United States Patent Application Publication US 2018/0305689 A1 - sequence listing, part 171

SEQ ID NO: 2534857 - RNA, 19 nt, Artificial Sequence
  Description of Artificial Sequence: Synthetic oligonucleotide
  Antisense strand to SEQ ID NO: 2534856
ugauucaugcagauucacu

SEQ ID NO: 2534858 - RNA, 19 nt, Artificial Sequence
  Description of Artificial Sequence: Synthetic oligonucleotide
  Sense strand starting at position 3142 of SEQ ID NO: 1888450
cguauuacuaggcaucaga

SEQ ID NO: 2534859 - RNA, 19 nt, Artificial Sequence
  Description of Artificial Sequence: Synthetic oligonucleotide
  Antisense strand to SEQ ID NO: 2534858
ucugaugccuaguaauacg

SEQ ID NO: 2534860 - RNA, 19 nt, Artificial Sequence
  Description of Artificial Sequence: Synthetic oligonucleotide
  Sense strand starting at position 3590 of SEQ ID NO: 1888450
aaaugaugucgcuaaccug

SEQ ID NO: 2534861 - RNA, 19 nt, Artificial Sequence
  Description of Artificial Sequence: Synthetic oligonucleotide
  Antisense strand to SEQ ID NO: 2534860
cagguuagcgacaucauuu

SEQ ID NO: 2534862 - RNA, 19 nt, Artificial Sequence
  Description of Artificial Sequence: Synthetic oligonucleotide
  Sense strand starting at position 1700 of SEQ ID NO: 1888450
guaaaugaguuucucacca

SEQ ID NO: 2534863 - RNA, 19 nt, Artificial Sequence
  Description of Artificial Sequence: Synthetic oligonucleotide
  Antisense strand to SEQ ID NO: 2534862
uggugagaaacucauuuac

SEQ ID NO: 2534864 - RNA, 19 nt, Artificial Sequence
  Description of Artificial Sequence: Synthetic oligonucleotide
  Sense strand starting at position 3756 of SEQ ID NO: 1888450
ucagaagcugcucauuauu

SEQ ID NO: 2534865 - RNA, 19 nt, Artificial Sequence
  Description of Artificial Sequence: Synthetic oligonucleotide
  Antisense strand to SEQ ID NO: 2534864
aauaaugagcagcuucuga

SEQ ID NO: 2534866 - RNA, 19 nt, Artificial Sequence
  Description of Artificial Sequence: Synthetic oligonucleotide
  Sense strand starting at position 3439 of SEQ ID NO: 1888450
gcuguuaugaccgaggauu

SEQ ID NO: 2534867 - RNA, 19 nt, Artificial Sequence
  Description of Artificial Sequence: Synthetic oligonucleotide
  Antisense strand to SEQ ID NO: 2534866
aauccucggucauaacagc

SEQ ID NO: 2534868 - RNA, 19 nt, Artificial Sequence
  Description of Artificial Sequence: Synthetic oligonucleotide
  Sense strand starting at position 2318 of SEQ ID NO: 1888450
cuaauuacagccgagucau

SEQ ID NO: 2534869 - RNA, 19 nt, Artificial Sequence
  Description of Artificial Sequence: Synthetic oligonucleotide
  Antisense strand to SEQ ID NO: 2534868
augacucggcuguaauuag

SEQ ID NO: 2534870 - RNA, 19 nt, Artificial Sequence
  Description of Artificial Sequence: Synthetic oligonucleotide
  Sense strand starting at position 3169 of SEQ ID NO: 1888450
guaagugaaucugcaugaa

SEQ ID NO: 2534871 - RNA, 19 nt, Artificial Sequence
  Description of Artificial Sequence: Synthetic oligonucleotide
  Antisense strand to SEQ ID NO: 2534870
uucaugcagauucacuuac

SEQ ID NO: 2534872 - RNA, 19 nt, Artificial Sequence
  Description of Artificial Sequence: Synthetic oligonucleotide
  Sense strand starting at position 1420 of SEQ ID NO: 1888450
gguuuaauguuguuaagaa

SEQ ID NO: 2534873 - RNA, 19 nt, Artificial Sequence
  Description of Artificial Sequence: Synthetic oligonucleotide
  Antisense strand to SEQ ID NO: 2534872
uucuuaacaacauuaaacc

SEQ ID NO: 2534874 - RNA, 19 nt, Artificial Sequence
  Description of Artificial Sequence: Synthetic oligonucleotide
  Sense strand starting at position 2217 of SEQ ID NO: 1888452
gccauaguucuagucgcaa

SEQ ID NO: 2534875 - RNA, 19 nt, Artificial Sequence
  Description of Artificial Sequence: Synthetic oligonucleotide
  Antisense strand to SEQ ID NO: 2534874
uugcgacuagaacuauggc

SEQ ID NO: 2534876 - RNA, 19 nt, Artificial Sequence
  Description of Artificial Sequence: Synthetic oligonucleotide
  Sense strand starting at position 327 of SEQ ID NO: 1888452
gagaaagagucuuuacuac

SEQ ID NO: 2534877 - RNA, 19 nt, Artificial Sequence
  Description of Artificial Sequence: Synthetic oligonucleotide
  Antisense strand to SEQ ID NO: 2534876
guaguaaagacucuuucuc

SEQ ID NO: 2534878 - RNA, 19 nt, Artificial Sequence
  Description of Artificial Sequence: Synthetic oligonucleotide
  Sense strand starting at position 167 of SEQ ID NO: 1888452
uugaacugccaucauuaga

SEQ ID NO: 2534879 - RNA, 19 nt, Artificial Sequence
  Description of Artificial Sequence: Synthetic oligonucleotide
  Antisense strand to SEQ ID NO: 2534878
ucuaaugauggcaguucaa

SEQ ID NO: 2534880 - RNA, 19 nt, Artificial Sequence
  Description of Artificial Sequence: Synthetic oligonucleotide
  Sense strand starting at position 3647 of SEQ ID NO: 1888452
ugauaaguuguacaaucau

SEQ ID NO: 2534881 - RNA, 19 nt, Artificial Sequence
  Description of Artificial Sequence: Synthetic oligonucleotide
  Antisense strand to SEQ ID NO: 2534880
augauuguacaacuuauca

SEQ ID NO: 2534882 - RNA, 19 nt, Artificial Sequence
  Description of Artificial Sequence: Synthetic oligonucleotide
  Sense strand starting at position 521 of SEQ ID NO: 1888452
ucuugagguccuuaauaua

SEQ ID NO: 2534883 - RNA, 19 nt, Artificial Sequence
  Description of Artificial Sequence: Synthetic oligonucleotide
  Antisense strand to SEQ ID NO: 2534882
uauauuaaggaccucaaga

SEQ ID NO: 2534884 - RNA, 19 nt, Artificial Sequence
  Description of Artificial Sequence: Synthetic oligonucleotide
  Sense strand starting at position 197 of SEQ ID NO: 1888452
uccuauuugcuaugaguca

SEQ ID NO: 2534885 - RNA, 19 nt, Artificial Sequence
  Description of Artificial Sequence: Synthetic oligonucleotide
  Antisense strand to SEQ ID NO: 2534884
ugacucauagcaaauagga

SEQ ID NO: 2534886 - RNA, 19 nt, Artificial Sequence
  Description of Artificial Sequence: Synthetic oligonucleotide
  Sense strand starting at position 1155 of SEQ ID NO: 1888452
aucuguuuagaaugaauga

SEQ ID NO: 2534887 - RNA, 19 nt, Artificial Sequence
  Description of Artificial Sequence: Synthetic oligonucleotide
  Antisense strand to SEQ ID NO: 2534886
ucauucauucuaaacagau

SEQ ID NO: 2534888 - RNA, 19 nt, Artificial Sequence
  Description of Artificial Sequence: Synthetic oligonucleotide
  Sense strand starting at position 1776 of SEQ ID NO: 1888452
aucuaauagggcugaaaug

SEQ ID NO: 2534889 - RNA, 19 nt, Artificial Sequence
  Description of Artificial Sequence: Synthetic oligonucleotide
  Antisense strand to SEQ ID NO: 2534888
cauuucagcccuauuagau

SEQ ID NO: 2534890 - RNA, 19 nt, Artificial Sequence
  Description of Artificial Sequence: Synthetic oligonucleotide
  Sense strand starting at position 40 of SEQ ID NO: 1888452
acaccuaguauugggagau

SEQ ID NO: 2534891 - RNA, 19 nt, Artificial Sequence
  Description of Artificial Sequence: Synthetic oligonucleotide
  Antisense strand to SEQ ID NO: 2534890
aucucccaauacuaggugu

SEQ ID NO: 2534892 - RNA, 19 nt, Artificial Sequence
  Description of Artificial Sequence: Synthetic oligonucleotide
  Sense strand starting at position 483 of SEQ ID NO: 1888452
cugagcauucuagaaaggu

SEQ ID NO: 2534893 - RNA, 19 nt, Artificial Sequence
  Description of Artificial Sequence: Synthetic oligonucleotide
  Antisense strand to SEQ ID NO: 2534892
accuuucuagaaugcucag

SEQ ID NO: 2534894 - RNA, 19 nt, Artificial Sequence
  Description of Artificial Sequence: Synthetic oligonucleotide
  Sense strand starting at position 628 of SEQ ID NO: 1888452
cugugucugaaagaugauc

SEQ ID NO: 2534895 - RNA, 19 nt, Artificial Sequence
  Description of Artificial Sequence: Synthetic oligonucleotide
  Antisense strand to SEQ ID NO: 2534894
gaucaucuuucagacacag

SEQ ID NO: 2534896 - RNA, 19 nt, Artificial Sequence
  Description of Artificial Sequence: Synthetic oligonucleotide
  Sense strand starting at position 650 of SEQ ID NO: 1888452
guaagauagccucacuaca

SEQ ID NO: 2534897 - RNA, 19 nt, Artificial Sequence
  Description of Artificial Sequence: Synthetic oligonucleotide
  Antisense strand to SEQ ID NO: 2534896
uguagugaggcuaucuuac

SEQ ID NO: 2534898 - RNA, 19 nt, Artificial Sequence
  Description of Artificial Sequence: Synthetic oligonucleotide
  Sense strand starting at position 633 of SEQ ID NO: 1888452
ucugaaagaugaucuaugu

SEQ ID NO: 2534899 - RNA, 19 nt, Artificial Sequence
  Description of Artificial Sequence: Synthetic oligonucleotide
  Antisense strand to SEQ ID NO: 2534898
acauagaucaucuuucaga

SEQ ID NO: 2534900 - RNA, 19 nt, Artificial Sequence
  Description of Artificial Sequence: Synthetic oligonucleotide
  Sense strand starting at position 3354 of SEQ ID NO: 1888452
cgauaauggcaugauuacu

SEQ ID NO: 2534901 - RNA, 19 nt, Artificial Sequence
  Description of Artificial Sequence: Synthetic oligonucleotide
  Antisense strand to SEQ ID NO: 2534900
aguaaucaugccauuaucg

SEQ ID NO: 2534902 - RNA, 19 nt, Artificial Sequence
  Description of Artificial Sequence: Synthetic oligonucleotide
  Sense strand starting at position 2488 of SEQ ID NO: 1888452
uuccaaguuguugagaauu

SEQ ID NO: 2534903 - RNA, 19 nt, Artificial Sequence
  Description of Artificial Sequence: Synthetic oligonucleotide
  Antisense strand to SEQ ID NO: 2534902
aauucucaacaacuuggaa

SEQ ID NO: 2534904 - RNA, 19 nt, Artificial Sequence
  Description of Artificial Sequence: Synthetic oligonucleotide
  Sense strand starting at position 2846 of SEQ ID NO: 1888452
cugaguucuaaggaugcau

SEQ ID NO: 2534905 - RNA, 19 nt, Artificial Sequence
  Description of Artificial Sequence: Synthetic oligonucleotide
  Antisense strand to SEQ ID NO: 2534904
augcauccuuagaacucag

SEQ ID NO: 2534906 - RNA, 19 nt, Artificial Sequence
  Description of Artificial Sequence: Synthetic oligonucleotide
  Sense strand starting at position 1814 of SEQ ID NO: 1888452
ggcccaaaucaaugaucca

SEQ ID NO: 2534907 - RNA, 19 nt, Artificial Sequence
  Description of Artificial Sequence: Synthetic oligonucleotide
  Antisense strand to SEQ ID NO: 2534906
uggaucauugauuugggcc

SEQ ID NO: 2534908 - RNA, 19 nt, Artificial Sequence
  Description of Artificial Sequence: Synthetic oligonucleotide
  Sense strand starting at position 1539 of SEQ ID NO: 1888452
agcuauuaacucuagcaga

SEQ ID NO: 2534909 - RNA, 19 nt, Artificial Sequence
  Description of Artificial Sequence: Synthetic oligonucleotide
  Antisense strand to SEQ ID NO: 2534908
ucugcuagaguuaauagcu

SEQ ID NO: 2534910 - RNA, 19 nt, Artificial Sequence
  Description of Artificial Sequence: Synthetic oligonucleotide
  Sense strand starting at position 3062 of SEQ ID NO: 1888452
gaggcaugaauguaguauu

SEQ ID NO: 2534911 - RNA, 19 nt, Artificial Sequence
  Description of Artificial Sequence: Synthetic oligonucleotide
  Antisense strand to SEQ ID NO: 2534910
aauacuacauucaugccuc

SEQ ID NO: 2534912 - RNA, 19 nt, Artificial Sequence
  Description of Artificial Sequence: Synthetic oligonucleotide
  Sense strand starting at position 2299 of SEQ ID NO: 1888452
auauaaauccaaugguagu

SEQ ID NO: 2534913 - RNA, 19 nt, Artificial Sequence
  Description of Artificial Sequence: Synthetic oligonucleotide
  Antisense strand to SEQ ID NO: 2534912
acuaccauuggauuuauau

SEQ ID NO: 2534914 - RNA, 19 nt, Artificial Sequence
  Description of Artificial Sequence: Synthetic oligonucleotide
  Sense strand starting at position 2461 of SEQ ID NO: 1888452
gaacuugaaugggugugau

SEQ ID NO: 2534915 - RNA, 19 nt, Artificial Sequence
  Description of Artificial Sequence: Synthetic oligonucleotide
  Antisense strand to SEQ ID NO: 2534914
aucacacccauucaaguuc

SEQ ID NO: 2534916 - RNA, 19 nt, Artificial Sequence
  Description of Artificial Sequence: Synthetic oligonucleotide
  Sense strand starting at position 722 of SEQ ID NO: 1888452
agucccauuugcuuuguaa

SEQ ID NO: 2534917 - RNA, 19 nt, Artificial Sequence
  Description of Artificial Sequence: Synthetic oligonucleotide
  Antisense strand to SEQ ID NO: 2534916
uuacaaagcaaaugggacu

SEQ ID NO: 2534918 - RNA, 19 nt, Artificial Sequence
  Description of Artificial Sequence: Synthetic oligonucleotide
  Sense strand starting at position 3734 of SEQ ID NO: 1888452
auacuaauugcuuagugau

SEQ ID NO: 2534919 - RNA, 19 nt, Artificial Sequence
  Description of Artificial Sequence: Synthetic oligonucleotide
  Antisense strand to SEQ ID NO: 2534918
aucacuaagcaauuaguau

SEQ ID NO: 2534920 - RNA, 19 nt, Artificial Sequence
  Description of Artificial Sequence: Synthetic oligonucleotide
  Sense strand starting at position 1049 of SEQ ID NO: 1888452
ugaauuaucuaaguguagg

SEQ ID NO: 2534921 - RNA, 19 nt, Artificial Sequence
  Description of Artificial Sequence: Synthetic oligonucleotide
  Antisense strand to SEQ ID NO: 2534920
ccuacacuuagauaauuca

SEQ ID NO: 2534922 - RNA, 19 nt, Artificial Sequence
  Description of Artificial Sequence: Synthetic oligonucleotide
  Sense strand starting at position 1530 of SEQ ID NO: 1888452
ugcuaugggagcuauuaac

SEQ ID NO: 2534923 - RNA, 19 nt, Artificial Sequence
  Description of Artificial Sequence: Synthetic oligonucleotide
  Antisense strand to SEQ ID NO: 2534922
guuaauagcucccauagca

SEQ ID NO: 2534924 - RNA, 19 nt, Artificial Sequence
  Description of Artificial Sequence: Synthetic oligonucleotide
  Sense strand starting at position 630 of SEQ ID NO: 1888452
gugucugaaagaugaucua

SEQ ID NO: 2534925 - RNA, 19 nt, Artificial Sequence
  Description of Artificial Sequence: Synthetic oligonucleotide
  Antisense strand to SEQ ID NO: 2534924
uagaucaucuuucagacac

SEQ ID NO: 2534926 - RNA, 19 nt, Artificial Sequence
  Description of Artificial Sequence: Synthetic oligonucleotide
  Sense strand starting at position 1910 of SEQ ID NO: 1888452
ucaagugugcuccaaggaa

SEQ ID NO: 2534927 - RNA, 19 nt, Artificial Sequence
  Description of Artificial Sequence: Synthetic oligonucleotide
  Antisense strand to SEQ ID NO: 2534926
uuccuuggagcacacuuga

SEQ ID NO: 2534928 - RNA, 19 nt, Artificial Sequence
  Description of Artificial Sequence: Synthetic oligonucleotide
  Sense strand starting at position 451 of SEQ ID NO: 1888452
gcaaguucuagguauuaag

SEQ ID NO: 2534929 - RNA, 19 nt, Artificial Sequence
  Description of Artificial Sequence: Synthetic oligonucleotide
  Antisense strand to SEQ ID NO: 2534928
cuuaauaccuagaacuugc

SEQ ID NO: 2534930 - RNA, 19 nt, Artificial Sequence
  Description of Artificial Sequence: Synthetic oligonucleotide
  Sense strand starting at position 1871 of SEQ ID NO: 1888452
gcucaaucagguuaaagug

SEQ ID NO: 2534931 - RNA, 19 nt, Artificial Sequence
  Description of Artificial Sequence: Synthetic oligonucleotide
  Antisense strand to SEQ ID NO: 2534930
cacuuuaaccugauugagc

SEQ ID NO: 2534932 - RNA, 19 nt, Artificial Sequence
  Description of Artificial Sequence: Synthetic oligonucleotide
  Sense strand starting at position 2079 of SEQ ID NO: 1888452
agggcuuggcaaggauaua

SEQ ID NO: 2534933 - RNA, 19 nt, Artificial Sequence
  Description of Artificial Sequence: Synthetic oligonucleotide
  Antisense strand to SEQ ID NO: 2534932
uauauccuugccaagcccu

SEQ ID NO: 2534934 - RNA, 19 nt, Artificial Sequence
  Description of Artificial Sequence: Synthetic oligonucleotide
  Sense strand starting at position 2464 of SEQ ID NO: 1888452
cuugaaugggugugauaua

SEQ ID NO: 2534935 - RNA, 19 nt, Artificial Sequence
  Description of Artificial Sequence: Synthetic oligonucleotide
  Antisense strand to SEQ ID NO: 2534934
uauaucacacccauucaag

SEQ ID NO: 2534936 - RNA, 19 nt, Artificial Sequence
  Description of Artificial Sequence: Synthetic oligonucleotide
  Sense strand starting at position 3797 of SEQ ID NO: 1888452
ucauguguucuacauaauu

SEQ ID NO: 2534937 - RNA, 19 nt, Artificial Sequence
  Description of Artificial Sequence: Synthetic oligonucleotide
  Antisense strand to SEQ ID NO: 2534936
aauuauguagaacacauga

SEQ ID NO: 2534938 - RNA, 19 nt, Artificial Sequence
  Description of Artificial Sequence: Synthetic oligonucleotide
  Sense strand starting at position 3353 of SEQ ID NO: 1888452
acgauaauggcaugauuac

SEQ ID NO: 2534939 - RNA, 19 nt, Artificial Sequence
  Description of Artificial Sequence: Synthetic oligonucleotide
  Antisense strand to SEQ ID NO: 2534938
guaaucaugccauuaucgu

SEQ ID NO: 2534940 - RNA, 19 nt, Artificial Sequence
  Description of Artificial Sequence: Synthetic oligonucleotide
  Sense strand starting at position 1054 of SEQ ID NO: 1888452
uaucuaaguguaggaucau

SEQ ID NO: 2534941 - RNA, 19 nt, Artificial Sequence
  Description of Artificial Sequence: Synthetic oligonucleotide
  Antisense strand to SEQ ID NO: 2534940
augauccuacacuuagaua

SEQ ID NO: 2534942 - RNA, 19 nt, Artificial Sequence
  Description of Artificial Sequence: Synthetic oligonucleotide
  Sense strand starting at position 623 of SEQ ID NO: 1888452
uaauccugugucugaaaga

SEQ ID NO: 2534943 - RNA, 19 nt, Artificial Sequence
  Description of Artificial Sequence: Synthetic oligonucleotide
  Antisense strand to SEQ ID NO: 2534942
ucuuucagacacaggauua

SEQ ID NO: 2534944 - RNA, 19 nt, Artificial Sequence
  Description of Artificial Sequence: Synthetic oligonucleotide
  Sense strand starting at position 191 of SEQ ID NO: 1888452
ugguguuccuauuugcuau

SEQ ID NO: 2534945 - RNA, 19 nt, Artificial Sequence
  Description of Artificial Sequence: Synthetic oligonucleotide
  Antisense strand to SEQ ID NO: 2534944
auagcaaauaggaacacca

SEQ ID NO: 2534946 - RNA, 19 nt, Artificial Sequence
  Description of Artificial Sequence: Synthetic oligonucleotide
  Sense strand starting at position 3653 of SEQ ID NO: 1888452
guuguacaaucauuaauca

SEQ ID NO: 2534947 - RNA, 19 nt, Artificial Sequence
  Description of Artificial Sequence: Synthetic oligonucleotide
  Antisense strand to SEQ ID NO: 2534946
ugauuaaugauuguacaac

SEQ ID NO: 2534948 - RNA, 19 nt, Artificial Sequence
  Description of Artificial Sequence: Synthetic oligonucleotide
  Sense strand starting at position 2848 of SEQ ID NO: 1888452
gaguucuaaggaugcauau

SEQ ID NO: 2534949 - RNA, 19 nt, Artificial Sequence
  Description of Artificial Sequence: Synthetic oligonucleotide
  Antisense strand to SEQ ID NO: 2534948
auaugcauccuuagaacuc

SEQ ID NO: 2534950 - RNA, 19 nt, Artificial Sequence
  Description of Artificial Sequence: Synthetic oligonucleotide
  Sense strand starting at position 1370 of SEQ ID NO: 1888452
gcucauuaugaguaaggca

SEQ ID NO: 2534951 - RNA, 19 nt, Artificial Sequence
  Description of Artificial Sequence: Synthetic oligonucleotide
  Antisense strand to SEQ ID NO: 2534950
ugccuuacucauaaugagc

SEQ ID NO: 2534952 - RNA, 19 nt, Artificial Sequence
  Description of Artificial Sequence: Synthetic oligonucleotide
  Sense strand starting at position 3310 of SEQ ID NO: 1888452
uuacaauauuuggaugagu

SEQ ID NO: 2534953 - RNA, 19 nt, Artificial Sequence
  Description of Artificial Sequence: Synthetic oligonucleotide
  Antisense strand to SEQ ID NO: 2534952
acucauccaaauauuguaa

SEQ ID NO: 2534954 - RNA, 19 nt, Artificial Sequence
  Description of Artificial Sequence: Synthetic oligonucleotide
  Sense strand starting at position 3297 of SEQ ID NO: 1888453
ggauuuaguguauguccau

SEQ ID NO: 2534955 - RNA, 19 nt, Artificial Sequence
  Description of Artificial Sequence: Synthetic oligonucleotide
  Antisense strand to SEQ ID NO: 2534954
auggacauacacuaaaucc

SEQ ID NO: 2534956 - RNA, 19 nt, Artificial Sequence
  Description of Artificial Sequence: Synthetic oligonucleotide
  Sense strand starting at position 3834 of SEQ ID NO: 1888453
guuauuggugaggaauacu

SEQ ID NO: 2534957 - RNA, 19 nt, Artificial Sequence
  Description of Artificial Sequence: Synthetic oligonucleotide
  Antisense strand to SEQ ID NO: 2534956
aguauuccucaccaauaac

SEQ ID NO: 2534958 - RNA, 19 nt, Artificial Sequence
  Description of Artificial Sequence: Synthetic oligonucleotide
  Sense strand starting at position 3227 of SEQ ID NO: 1888453
aaauaagauggauguucuu

SEQ ID NO: 2534959 - RNA, 19 nt, Artificial Sequence
  Description of Artificial Sequence: Synthetic oligonucleotide
  Antisense strand to SEQ ID NO: 2534958
aagaacauccaucuuauuu

SEQ ID NO: 2534960 - RNA, 19 nt, Artificial Sequence
  Description of Artificial Sequence: Synthetic oligonucleotide
  Sense strand starting at position 956 of SEQ ID NO: 1888453
uaauaagagcugggacauu

SEQ ID NO: 2534961 - RNA, 19 nt, Artificial Sequence
  Description of Artificial Sequence: Synthetic oligonucleotide
  Antisense strand to SEQ ID NO: 2534960
aaugucccagcucuuauua

SEQ ID NO: 2534962 - RNA, 19 nt, Artificial Sequence
  Description of Artificial Sequence: Synthetic oligonucleotide
  Sense strand starting at position 955 of SEQ ID NO: 1888453
uuaauaagagcugggacau

SEQ ID NO: 2534963 - RNA, 19 nt, Artificial Sequence
  Description of Artificial Sequence: Synthetic oligonucleotide
  Antisense strand to SEQ ID NO: 2534962
augucccagcucuuauuaa

SEQ ID NO: 2534964 - RNA, 19 nt, Artificial Sequence
  Description of Artificial Sequence: Synthetic oligonucleotide
  Sense strand starting at position 2654 of SEQ ID NO: 1888453
uuggaacaucuguaaguua

SEQ ID NO: 2534965 - RNA, 19 nt, Artificial Sequence
  Description of Artificial Sequence: Synthetic oligonucleotide
  Antisense strand to SEQ ID NO: 2534964
uaacuuacagauguuccaa

SEQ ID NO: 2534966 - RNA, 19 nt, Artificial Sequence
  Description of Artificial Sequence: Synthetic oligonucleotide
  Sense strand starting at position 3475 of SEQ ID NO: 1888453
uugauauaugguuagguua

SEQ ID NO: 2534967 - RNA, 19 nt, Artificial Sequence
  Description of Artificial Sequence: Synthetic oligonucleotide
  Antisense strand to SEQ ID NO: 2534966
uaaccuaaccauauaucaa

SEQ ID NO: 2534968 - RNA, 19 nt, Artificial Sequence
  Description of Artificial Sequence: Synthetic oligonucleotide
  Sense strand starting at position 2712 of SEQ ID NO: 1888453
ucugaaauuuguuucgcaa

SEQ ID NO: 2534969 - RNA, 19 nt, Artificial Sequence
  Description of Artificial Sequence: Synthetic oligonucleotide
  Antisense strand to SEQ ID NO: 2534968
uugcgaaacaaauuucaga

SEQ ID NO: 2534970 - RNA, 19 nt, Artificial Sequence
  Description of Artificial Sequence: Synthetic oligonucleotide
  Sense strand starting at position 1697 of SEQ ID NO: 1888453
gcguccuggcugucaauca

SEQ ID NO: 2534971 - RNA, 19 nt, Artificial Sequence
  Description of Artificial Sequence: Synthetic oligonucleotide
  Antisense strand to SEQ ID NO: 2534970
ugauugacagccaggacgc

SEQ ID NO: 2534972 - RNA, 19 nt, Artificial Sequence
  Description of Artificial Sequence: Synthetic oligonucleotide
  Sense strand starting at position 3377 of SEQ ID NO: 1888453
agcaacauacgguguauuu

SEQ ID NO: 2534973 - RNA, 19 nt, Artificial Sequence
  Description of Artificial Sequence: Synthetic oligonucleotide
  Antisense strand to SEQ ID NO: 2534972
aaauacaccguauguugcu

SEQ ID NO: 2534974 - RNA, 19 nt, Artificial Sequence
  Description of Artificial Sequence: Synthetic oligonucleotide
  Sense strand starting at position 2106 of SEQ ID NO: 1888453
uaaauuugucaguggcucu

SEQ ID NO: 2534975 - RNA, 19 nt, Artificial Sequence
  Description of Artificial Sequence: Synthetic oligonucleotide
  Antisense strand to SEQ ID NO: 2534974
agagccacugacaaauuua

SEQ ID NO: 2534976 - RNA, 19 nt, Artificial Sequence
  Description of Artificial Sequence: Synthetic oligonucleotide
  Sense strand starting at position 625 of SEQ ID NO: 1888453
ugacaagcuccagagguuu

SEQ ID NO: 2534977 - RNA, 19 nt, Artificial Sequence
  Description of Artificial Sequence: Synthetic oligonucleotide
  Antisense strand to SEQ ID NO: 2534976
aaaccucuggagcuuguca

SEQ ID NO: 2534978 - RNA, 19 nt, Artificial Sequence
  Description of Artificial Sequence: Synthetic oligonucleotide
  Sense strand starting at position 2128 of SEQ ID NO: 1888453
ugaaauugcuaaguagaca

SEQ ID NO: 2534979 - RNA, 19 nt, Artificial Sequence
  Description of Artificial Sequence: Synthetic oligonucleotide
  Antisense strand to SEQ ID NO: 2534978
ugucuacuuagcaauuuca

SEQ ID NO: 2534980 - RNA, 19 nt, Artificial Sequence
  Description of Artificial Sequence: Synthetic oligonucleotide
  Sense strand starting at position 2711 of SEQ ID NO: 1888453
uucugaaauuuguuucgca

SEQ ID NO: 2534981 - RNA, 19 nt, Artificial Sequence
  Description of Artificial Sequence: Synthetic oligonucleotide
  Antisense strand to SEQ ID NO: 2534980
ugcgaaacaaauuucagaa

SEQ ID NO: 2534982 - RNA, 19 nt, Artificial Sequence
  Description of Artificial Sequence: Synthetic oligonucleotide
  Sense strand starting at position 238 of SEQ ID NO: 1888453
aguaucugaucuuugaaug

SEQ ID NO: 2534983 - RNA, 19 nt, Artificial Sequence
  Description of Artificial Sequence: Synthetic oligonucleotide
  Antisense strand to SEQ ID NO: 2534982
cauucaaagaucagauacu

SEQ ID NO: 2534984 - RNA, 19 nt, Artificial Sequence
  Description of Artificial Sequence: Synthetic oligonucleotide
  Sense strand starting at position 904 of SEQ ID NO: 1888453
uguauauuccaguagaucc

SEQ ID NO: 2534985 - RNA, 19 nt, Artificial Sequence
  Description of Artificial Sequence: Synthetic oligonucleotide
  Antisense strand to SEQ ID NO: 2534984
ggaucuacuggaauauaca

SEQ ID NO: 2534986 - RNA, 19 nt, Artificial Sequence
  Description of Artificial Sequence: Synthetic oligonucleotide
  Sense strand starting at position 3980 of SEQ ID NO: 1888453
aggaauuucuuugacuaca

SEQ ID NO: 2534987 - RNA, 19 nt, Artificial Sequence
  Description of Artificial Sequence: Synthetic oligonucleotide
  Antisense strand to SEQ ID NO: 2534986
uguagucaaagaaauuccu

SEQ ID NO: 2534988 - RNA, 19 nt, Artificial Sequence
  Description of Artificial Sequence: Synthetic oligonucleotide
  Sense strand starting at position 2475 of SEQ ID NO: 1888453
gaugaugcgguuuaauaca

SEQ ID NO: 2534989 - RNA, 19 nt, Artificial Sequence
  Description of Artificial Sequence: Synthetic oligonucleotide
  Antisense strand to SEQ ID NO: 2534988
uguauuaaaccgcaucauc

SEQ ID NO: 2534990 - RNA, 19 nt, Artificial Sequence
  Description of Artificial Sequence: Synthetic oligonucleotide
  Sense strand starting at position 669 of SEQ ID NO: 1888453
ucugacaagucuuuauuag

SEQ ID NO: 2534991 - RNA, 19 nt, Artificial Sequence
  Description of Artificial Sequence: Synthetic oligonucleotide
  Antisense strand to SEQ ID NO: 2534990
cuaauaaagacuugucaga

SEQ ID NO: 2534992 - RNA, 19 nt, Artificial Sequence
  Description of Artificial Sequence: Synthetic oligonucleotide
  Sense strand starting at position 243 of SEQ ID NO: 1888453
cugaucuuugaauguuaac

SEQ ID NO: 2534993 - RNA, 19 nt, Artificial Sequence
  Description of Artificial Sequence: Synthetic oligonucleotide
  Antisense strand to SEQ ID NO: 2534992
guuaacauucaaagaucag

SEQ ID NO: 2534994 - RNA, 19 nt, Artificial Sequence
  Description of Artificial Sequence: Synthetic oligonucleotide
  Sense strand starting at position 830 of SEQ ID NO: 1888453
ugcaauuugugcuuguaaa

SEQ ID NO: 2534995 - RNA, 19 nt, Artificial Sequence
  Description of Artificial Sequence: Synthetic oligonucleotide
  Antisense strand to SEQ ID NO: 2534994
uuuacaagcacaaauugca

SEQ ID NO: 2534996 - RNA, 19 nt, Artificial Sequence
  Description of Artificial Sequence: Synthetic oligonucleotide
  Sense strand starting at position 690 of SEQ ID NO: 1888453
gguaguaaggucugagaau

SEQ ID NO: 2534997 - RNA, 19 nt, Artificial Sequence
  Description of Artificial Sequence: Synthetic oligonucleotide
  Antisense strand to SEQ ID NO: 2534996
auucucagaccuuacuacc

SEQ ID NO: 2534998 - RNA, 19 nt, Artificial Sequence
  Description of Artificial Sequence: Synthetic oligonucleotide
  Sense strand starting at position 208 of SEQ ID NO: 1888453
ucuggacagcuauaugcua

SEQ ID NO: 2534999 - RNA, 19 nt, Artificial Sequence
  Description of Artificial Sequence: Synthetic oligonucleotide
  Antisense strand to SEQ ID NO: 2534998
uagcauauagcuguccaga

SEQ ID NO: 2535000 - RNA, 19 nt, Artificial Sequence
  Description of Artificial Sequence: Synthetic oligonucleotide
  Sense strand starting at position 1420 of SEQ ID NO: 1888453
cuaugugcugaguaaauca

SEQ ID NO: 2535001 - RNA, 19 nt, Artificial Sequence
  Description of Artificial Sequence: Synthetic oligonucleotide
  Antisense strand to SEQ ID NO: 2535000
ugauuuacucagcacauag

SEQ ID NO: 2535002 - RNA, 19 nt, Artificial Sequence
  Description of Artificial Sequence: Synthetic oligonucleotide
  Sense strand starting at position 831 of SEQ ID NO: 1888453
gcaauuugugcuuguaaau

SEQ ID NO: 2535003 - RNA, 19 nt, Artificial Sequence
  Description of Artificial Sequence: Synthetic oligonucleotide
  Antisense strand to SEQ ID NO: 2535002
auuuacaagcacaaauugc

SEQ ID NO: 2535004 - RNA, 19 nt, Artificial Sequence
  Description of Artificial Sequence: Synthetic oligonucleotide
  Sense strand starting at position 2248 of SEQ ID NO: 1888453
gacuaaggugaauguucuu

SEQ ID NO: 2535005 - RNA, 19 nt, Artificial Sequence
  Description of Artificial Sequence: Synthetic oligonucleotide
  Antisense strand to SEQ ID NO: 2535004
aagaacauucaccuuaguc

SEQ ID NO: 2535006 - RNA, 19 nt, Artificial Sequence
  Description of Artificial Sequence: Synthetic oligonucleotide
  Sense strand starting at position 2634 of SEQ ID NO: 1888453
gugaauggaucuuugaugu

SEQ ID NO: 2535007 - RNA, 19 nt, Artificial Sequence
  Description of Artificial Sequence: Synthetic oligonucleotide
  Antisense strand to SEQ ID NO: 2535006
acaucaaagauccauucac

SEQ ID NO: 2535008 - RNA, 19 nt, Artificial Sequence
  Description of Artificial Sequence: Synthetic oligonucleotide
  Sense strand starting at position 2661 of SEQ ID NO: 1888453
aucuguaaguuauuagacu

SEQ ID NO: 2535009 - RNA, 19 nt, Artificial Sequence
  Description of Artificial Sequence: Synthetic oligonucleotide
  Antisense strand to SEQ ID NO: 2535008
agucuaauaacuuacagau

SEQ ID NO: 2535010 - RNA, 19 nt, Artificial Sequence
  Description of Artificial Sequence: Synthetic oligonucleotide
  Sense strand starting at position 2151 of SEQ ID NO: 1888453
uauaauccgugacuauuga

SEQ ID NO: 2535011 - RNA, 19 nt, Artificial Sequence
  Description of Artificial Sequence: Synthetic oligonucleotide
  Antisense strand to SEQ ID NO: 2535010
ucaauagucacggauuaua

SEQ ID NO: 2535012 - RNA, 19 nt, Artificial Sequence
  Description of Artificial Sequence: Synthetic oligonucleotide
  Sense strand starting at position 2117 of SEQ ID NO: 1888453
guggcucuccuugaaauug

SEQ ID NO: 2535013 - RNA, 19 nt, Artificial Sequence
  Description of Artificial Sequence: Synthetic oligonucleotide
  Antisense strand to SEQ ID NO: 2535012
caauuucaaggagagccac

SEQ ID NO: 2535014 - RNA, 19 nt, Artificial Sequence
  Description of Artificial Sequence: Synthetic oligonucleotide
  Sense strand starting at position 2370 of SEQ ID NO: 1888453
agcuuuacgcuauaaagau

SEQ ID NO: 2535015 - RNA, 19 nt, Artificial Sequence
  Description of Artificial Sequence: Synthetic oligonucleotide
  Antisense strand to SEQ ID NO: 2535014
aucuuuauagcguaaagcu

SEQ ID NO: 2535016 - RNA, 19 nt, Artificial Sequence
  Description of Artificial Sequence: Synthetic oligonucleotide
  Sense strand starting at position 3816 of SEQ ID NO: 1888453
ccagcugacuucucugaag

SEQ ID NO: 2535017 - RNA, 19 nt, Artificial Sequence
  Description of Artificial Sequence: Synthetic oligonucleotide
  Antisense strand to SEQ ID NO: 2535016
cuucagagaagucagcugg

SEQ ID NO: 2535018 - RNA, 19 nt, Artificial Sequence
  Description of Artificial Sequence: Synthetic oligonucleotide
  Sense strand starting at position 216 of SEQ ID NO: 1888453
gcuauaugcuaauugggaa

SEQ ID NO: 2535019 - RNA, 19 nt, Artificial Sequence
  Description of Artificial Sequence: Synthetic oligonucleotide
  Antisense strand to SEQ ID NO: 2535018
uucccaauuagcauauagc

SEQ ID NO: 2535020 - RNA, 19 nt, Artificial Sequence
  Description of Artificial Sequence: Synthetic oligonucleotide
  Sense strand starting at position 2653 of SEQ ID NO: 1888453
uuuggaacaucuguaaguu

SEQ ID NO: 2535021 - RNA, 19 nt, Artificial Sequence
  Description of Artificial Sequence: Synthetic oligonucleotide
  Antisense strand to SEQ ID NO: 2535020
aacuuacagauguuccaaa

SEQ ID NO: 2535022 - RNA, 19 nt, Artificial Sequence
  Description of Artificial Sequence: Synthetic oligonucleotide
  Sense strand starting at position 2556 of SEQ ID NO: 1888453
cguuaugugaguuaggaca

SEQ ID NO: 2535023 - RNA, 19 nt, Artificial Sequence
  Description of Artificial Sequence: Synthetic oligonucleotide
  Antisense strand to SEQ ID NO: 2535022
uguccuaacucacauaacg

SEQ ID NO: 2535024 - RNA, 19 nt, Artificial Sequence
  Description of Artificial Sequence: Synthetic oligonucleotide
  Sense strand starting at position 3233 of SEQ ID NO: 1888453
gauggauguucuuucucua

SEQ ID NO: 2535025 - RNA, 19 nt, Artificial Sequence
  Description of Artificial Sequence: Synthetic oligonucleotide
  Antisense strand to SEQ ID NO: 2535024
uagagaaagaacauccauc

SEQ ID NO: 2535026 - RNA, 19 nt, Artificial Sequence
  Description of Artificial Sequence: Synthetic oligonucleotide
  Sense strand starting at position 2483 of SEQ ID NO: 1888453
gguuuaauacacugcugaa

SEQ ID NO: 2535027 - RNA, 19 nt, Artificial Sequence
  Description of Artificial Sequence: Synthetic oligonucleotide
  Antisense strand to SEQ ID NO: 2535026
uucagcaguguauuaaacc

SEQ ID NO: 2535028 - RNA, 19 nt, Artificial Sequence
  Description of Artificial Sequence: Synthetic oligonucleotide
  Sense strand starting at position 2149 of SEQ ID NO: 1888453
uguauaauccgugacuauu

SEQ ID NO: 2535029 - RNA, 19 nt, Artificial Sequence
  Description of Artificial Sequence: Synthetic oligonucleotide
  Antisense strand to SEQ ID NO: 2535028
aauagucacggauuauaca

SEQ ID NO: 2535030 - RNA, 19 nt, Artificial Sequence
  Description of Artificial Sequence: Synthetic oligonucleotide
  Sense strand starting at position 3474 of SEQ ID NO: 1888453
uuugauauaugguuagguu

SEQ ID NO: 2535031 - RNA, 19 nt, Artificial Sequence
  Description of Artificial Sequence: Synthetic oligonucleotide
  Antisense strand to SEQ ID NO: 2535030
aaccuaaccauauaucaaa

SEQ ID NO: 2535032 - RNA, 19 nt, Artificial Sequence
  Description of Artificial Sequence: Synthetic oligonucleotide
  Sense strand starting at position 2564 of SEQ ID NO: 1888453
gaguuaggacacuguuucu

SEQ ID NO: 2535033 - RNA, 19 nt, Artificial Sequence
  Description of Artificial Sequence: Synthetic oligonucleotide
  Antisense strand to SEQ ID NO: 2535032
agaaacaguguccuaacuc

SEQ ID NO: 2535034 - RNA, 19 nt, Artificial Sequence
  Description of Artificial Sequence: Synthetic oligonucleotide
  Sense strand starting at position 3680 of SEQ ID NO: 1888454
uugaaauugcuagaucuca

SEQ ID NO: 2535035 - RNA, 19 nt, Artificial Sequence
  Description of Artificial Sequence: Synthetic oligonucleotide
  Antisense strand to SEQ ID NO: 2535034
ugagaucuagcaauuucaa

SEQ ID NO: 2535036 - RNA, 19 nt, Artificial Sequence
  Description of Artificial Sequence: Synthetic oligonucleotide
  Sense strand starting at position 3538 of SEQ ID NO: 1888454
cugcguagugauucauugu

SEQ ID NO: 2535037 - RNA, 19 nt, Artificial Sequence
  Description of Artificial Sequence: Synthetic oligonucleotide
  Antisense strand to SEQ ID NO: 2535036
acaaugaaucacuacgcag

SEQ ID NO: 2535038 - RNA, 19 nt, Artificial Sequence
  Description of Artificial Sequence: Synthetic oligonucleotide
  Sense strand starting at position 725 of SEQ ID NO: 1888454
auggaauuaacuggguuau

SEQ ID NO: 2535039 - RNA, 19 nt, Artificial Sequence
  Description of Artificial Sequence: Synthetic oligonucleotide
  Antisense strand to SEQ ID NO: 2535038
auaacccaguuaauuccau

SEQ ID NO: 2535040 - RNA, 19 nt, Artificial Sequence
  Description of Artificial Sequence: Synthetic oligonucleotide
  Sense strand starting at position 726 of SEQ ID NO: 1888454
uggaauuaacuggguuaug

SEQ ID NO: 2535041 - RNA, 19 nt, Artificial Sequence
  Description of Artificial Sequence: Synthetic oligonucleotide
  Antisense strand to SEQ ID NO: 2535040
cauaacccaguuaauucca

SEQ ID NO: 2535042 - RNA, 19 nt, Artificial Sequence
  Description of Artificial Sequence: Synthetic oligonucleotide
  Sense strand starting at position 2941 of SEQ ID NO: 1888454
gcaccugugcaugcgaauu

SEQ ID NO: 2535043 - RNA, 19 nt, Artificial Sequence
  Description of Artificial Sequence: Synthetic oligonucleotide
  Antisense strand to SEQ ID NO: 2535042
aauucgcaugcacaggugc

SEQ ID NO: 2535044 - RNA, 19 nt, Artificial Sequence
  Description of Artificial Sequence: Synthetic oligonucleotide
  Sense strand starting at position 455 of SEQ ID NO: 1888454
gucaauucugaguaacuac

SEQ ID NO: 2535045 - RNA, 19 nt, Artificial Sequence
  Description of Artificial Sequence: Synthetic oligonucleotide
  Antisense strand to SEQ ID NO: 2535044
guaguuacucagaauugac

SEQ ID NO: 2535046 - RNA, 19 nt, Artificial Sequence
  Description of Artificial Sequence: Synthetic oligonucleotide
  Sense strand starting at position 100 of SEQ ID NO: 1888454
aaaugaagucuguagcaac

SEQ ID NO: 2535047 - RNA, 19 nt, Artificial Sequence
  Description of Artificial Sequence: Synthetic oligonucleotide
  Antisense strand to SEQ ID NO: 2535046
guugcuacagacuucauuu

SEQ ID NO: 2535048 - RNA, 19 nt, Artificial Sequence
  Description of Artificial Sequence: Synthetic oligonucleotide
  Sense strand starting at position 1218 of SEQ ID NO: 1888454
cucugaaugccugaucuga

SEQ ID NO: 2535049 - RNA, 19 nt, Artificial Sequence
  Description of Artificial Sequence: Synthetic oligonucleotide
  Antisense strand to SEQ ID NO: 2535048
ucagaucaggcauucagag

SEQ ID NO: 2535050 - RNA, 19 nt, Artificial Sequence
  Description of Artificial Sequence: Synthetic oligonucleotide
  Sense strand starting at position 3070 of SEQ ID NO: 1888454
cucuaaagauguuccauga

SEQ ID NO: 2535051 - RNA, 19 nt, Artificial Sequence
  Description of Artificial Sequence: Synthetic oligonucleotide
  Antisense strand to SEQ ID NO: 2535050
ucauggaacaucuuuagag

SEQ ID NO: 2535052 - RNA, 19 nt, Artificial Sequence
  Description of Artificial Sequence: Synthetic oligonucleotide
  Sense strand starting at position 3653 of SEQ ID NO: 1888454
cuguuacaucuguaggaug

SEQ ID NO: 2535053 - RNA, 19 nt, Artificial Sequence
  Description of Artificial Sequence: Synthetic oligonucleotide
  Antisense strand to SEQ ID NO: 2535052
cauccuacagauguaacag

SEQ ID NO: 2535054 - RNA, 19 nt, Artificial Sequence
  Description of Artificial Sequence: Synthetic oligonucleotide
  Sense strand starting at position 3243 of SEQ ID NO: 1888454
gacuaaauuucgcucuugu

SEQ ID NO: 2535055 - RNA, 19 nt, Artificial Sequence
  Description of Artificial Sequence: Synthetic oligonucleotide
  Antisense strand to SEQ ID NO: 2535054
acaagagcgaaauuuaguc

SEQ ID NO: 2535056 - RNA, 19 nt, Artificial Sequence
  Description of Artificial Sequence: Synthetic oligonucleotide
  Sense strand starting at position 2473 of SEQ ID NO: 1888454
guuauucuugaguaauacu

SEQ ID NO: 2535057 - RNA, 19 nt, Artificial Sequence
  Description of Artificial Sequence: Synthetic oligonucleotide
  Antisense strand to SEQ ID NO: 2535056
aguauuacucaagaauaac

SEQ ID NO: 2535058 - RNA, 19 nt, Artificial Sequence
  Description of Artificial Sequence: Synthetic oligonucleotide
  Sense strand starting at position 2470 of SEQ ID NO: 1888454
cuaguuauucuugaguaau

SEQ ID NO: 2535059 - RNA, 19 nt, Artificial Sequence
  Description of Artificial Sequence: Synthetic oligonucleotide
  Antisense strand to SEQ ID NO: 2535058
auuacucaagaauaacuag

SEQ ID NO: 2535060 - RNA, 19 nt, Artificial Sequence
  Description of Artificial Sequence: Synthetic oligonucleotide
  Sense strand starting at position 3621 of SEQ ID NO: 1888454
uaaucagugcuguaaugaa

SEQ ID NO: 2535061 - RNA, 19 nt, Artificial Sequence
  Description of Artificial Sequence: Synthetic oligonucleotide
  Antisense strand to SEQ ID NO: 2535060
uucauuacagcacugauua

SEQ ID NO: 2535062 - RNA, 19 nt, Artificial Sequence
  Description of Artificial Sequence: Synthetic oligonucleotide
  Sense strand starting at position 3185 of SEQ ID NO: 1888454
ggcccauaucuguauauga

SEQ ID NO: 2535063 - RNA, 19 nt, Artificial Sequence
  Description of Artificial Sequence: Synthetic oligonucleotide
  Antisense strand to SEQ ID NO: 2535062
ucauauacagauaugggcc

SEQ ID NO: 2535064 - RNA, 19 nt, Artificial Sequence
  Description of Artificial Sequence: Synthetic oligonucleotide
  Sense strand starting at position 2185 of SEQ ID NO: 1888454
ggaguacuauuagcaugga

SEQ ID NO: 2535065 - RNA, 19 nt, Artificial Sequence
  Description of Artificial Sequence: Synthetic oligonucleotide
  Antisense strand to SEQ ID NO: 2535064
uccaugcuaauaguacucc

SEQ ID NO: 2535066 - RNA, 19 nt, Artificial Sequence
  Description of Artificial Sequence: Synthetic oligonucleotide
  Sense strand starting at position 3655 of SEQ ID NO: 1888454
guuacaucuguaggaugaa

SEQ ID NO: 2535067 - RNA, 19 nt, Artificial Sequence
  Description of Artificial Sequence: Synthetic oligonucleotide
  Antisense strand to SEQ ID NO: 2535066
uucauccuacagauguaac

SEQ ID NO: 2535068 - RNA, 19 nt, Artificial Sequence
  Description of Artificial Sequence: Synthetic oligonucleotide
  Sense strand starting at position 2984 of SEQ ID NO: 1888454
ggguauucgguagagugaa

SEQ ID NO: 2535069 - RNA, 19 nt, Artificial Sequence
  Description of Artificial Sequence: Synthetic oligonucleotide
  Antisense strand to SEQ ID NO: 2535068
uucacucuaccgaauaccc

SEQ ID NO: 2535070 - RNA, 19 nt, Artificial Sequence
  Description of Artificial Sequence: Synthetic oligonucleotide
  Sense strand starting at position 2982 of SEQ ID NO: 1888454
aaggguauucgguagagug

SEQ ID NO: 2535071 - RNA, 19 nt, Artificial Sequence
  Description of Artificial Sequence: Synthetic oligonucleotide
  Antisense strand to SEQ ID NO: 2535070
cacucuaccgaauacccuu

SEQ ID NO: 2535072 - RNA, 19 nt, Artificial Sequence
  Description of Artificial Sequence: Synthetic oligonucleotide
  Sense strand starting at position 3177 of SEQ ID NO: 1888454
uggagaucggcccauaucu

SEQ ID NO: 2535073 - RNA, 19 nt, Artificial Sequence
  Description of Artificial Sequence: Synthetic oligonucleotide
  Antisense strand to SEQ ID NO: 2535072
agauaugggccgaucucca

SEQ ID NO: 2535074 - RNA, 19 nt, Artificial Sequence
  Description of Artificial Sequence: Synthetic oligonucleotide
  Sense strand starting at position 3688 of SEQ ID NO: 1888454
gcuagaucucaauauaugc

SEQ ID NO: 2535075 - RNA, 19 nt, Artificial Sequence
  Description of Artificial Sequence: Synthetic oligonucleotide
  Antisense strand to SEQ ID NO: 2535074
gcauauauugagaucuagc

SEQ ID NO: 2535076 - RNA, 19 nt, Artificial Sequence
  Description of Artificial Sequence: Synthetic oligonucleotide
  Sense strand starting at position 3842 of SEQ ID NO: 1888454
guggaagaucccgagcacu

SEQ ID NO: 2535077 - RNA, 19 nt, Artificial Sequence
  Description of Artificial Sequence: Synthetic oligonucleotide
  Antisense strand to SEQ ID NO: 2535076
agugcucgggaucuuccac

SEQ ID NO: 2535078 - RNA, 19 nt, Artificial Sequence
  Description of Artificial Sequence: Synthetic oligonucleotide
  Sense strand starting at position 257 of SEQ ID NO: 1888454
ccuaaauuacugugaagua

SEQ ID NO: 2535079 - RNA, 19 nt, Artificial Sequence
  Description of Artificial Sequence: Synthetic oligonucleotide
  Antisense strand to SEQ ID NO: 2535078
uacuucacaguaauuuagg

SEQ ID NO: 2535080 - RNA, 19 nt, Artificial Sequence
  Description of Artificial Sequence: Synthetic oligonucleotide
  Sense strand starting at position 3544 of SEQ ID NO: 1888454
agugauucauuguugggau

SEQ ID NO: 2535081 - RNA, 19 nt, Artificial Sequence
  Description of Artificial Sequence: Synthetic oligonucleotide
  Antisense strand to SEQ ID NO: 2535080
aucccaacaaugaaucacu

SEQ ID NO: 2535082 - RNA, 19 nt, Artificial Sequence
  Description of Artificial Sequence: Synthetic oligonucleotide
  Sense strand starting at position 2472 of SEQ ID NO: 1888454
aguuauucuugaguaauac

SEQ ID NO: 2535083 - RNA, 19 nt, Artificial Sequence
  Description of Artificial Sequence: Synthetic oligonucleotide
  Antisense strand to SEQ ID NO: 2535082
guauuacucaagaauaacu

SEQ ID NO: 2535084 - RNA, 19 nt, Artificial Sequence
  Description of Artificial Sequence: Synthetic oligonucleotide
  Sense strand starting at position 454 of SEQ ID NO: 1888454
ugucaauucugaguaacua

SEQ ID NO: 2535085 - RNA, 19 nt, Artificial Sequence
  Description of Artificial Sequence: Synthetic oligonucleotide
  Antisense strand to SEQ ID NO: 2535084
uaguuacucagaauugaca

SEQ ID NO: 2535086 - RNA, 19 nt, Artificial Sequence
  Description of Artificial Sequence: Synthetic oligonucleotide
  Sense strand starting at position 3652 of SEQ ID NO: 1888454
acuguuacaucuguaggau

SEQ ID NO: 2535087 - RNA, 19 nt, Artificial Sequence
  Description of Artificial Sequence: Synthetic oligonucleotide
  Antisense strand to SEQ ID NO: 2535086
auccuacagauguaacagu

SEQ ID NO: 2535088 - RNA, 19 nt, Artificial Sequence
  Description of Artificial Sequence: Synthetic oligonucleotide
  Sense strand starting at position 2188 of SEQ ID NO: 1888454
guacuauuagcauggaacu

SEQ ID NO: 2535089 - RNA, 19 nt, Artificial Sequence
  Description of Artificial Sequence: Synthetic oligonucleotide
  Antisense strand to SEQ ID NO: 2535088
aguuccaugcuaauaguac

SEQ ID NO: 2535090 - RNA, 19 nt, Artificial Sequence
  Description of Artificial Sequence: Synthetic oligonucleotide
  Sense strand starting at position 1148 of SEQ ID NO: 1888454
ccaaguuggcccugaaaca

SEQ ID NO: 2535091 - RNA, 19 nt, Artificial Sequence
  Description of Artificial Sequence: Synthetic oligonucleotide
  Antisense strand to SEQ ID NO: 2535090
uguuucagggccaacuugg

SEQ ID NO: 2535092 - RNA, 19 nt, Artificial Sequence
  Description of Artificial Sequence: Synthetic oligonucleotide
  Sense strand starting at position 2502 of SEQ ID NO: 1888454
acagcuuuauagcuacaga

SEQ ID NO: 2535093 - RNA, 19 nt, Artificial Sequence
  Description of Artificial Sequence: Synthetic oligonucleotide
  Antisense strand to SEQ ID NO: 2535092
ucuguagcuauaaagcugu

SEQ ID NO: 2535094 - RNA, 19 nt, Artificial Sequence
  Description of Artificial Sequence: Synthetic oligonucleotide
  Sense strand starting at position 2228 of SEQ ID NO: 1888454
caaagaggaucauagagau

SEQ ID NO: 2535095 - RNA, 19 nt, Artificial Sequence
  Description of Artificial Sequence: Synthetic oligonucleotide
  Antisense strand to SEQ ID NO: 2535094
aucucuaugauccucuuug

SEQ ID NO: 2535096 - RNA, 19 nt, Artificial Sequence
  Description of Artificial Sequence: Synthetic oligonucleotide
  Sense strand starting at position 2177 of SEQ ID NO: 1888454
gucggaguggaguacuauu

SEQ ID NO: 2535097 - RNA, 19 nt, Artificial Sequence
  Description of Artificial Sequence: Synthetic oligonucleotide
  Antisense strand to SEQ ID NO: 2535096
aauaguacuccacuccgac

SEQ ID NO: 2535098 - RNA, 19 nt, Artificial Sequence
  Description of Artificial Sequence: Synthetic oligonucleotide
  Sense strand starting at position 3056 of SEQ ID NO: 1888454
aguuucuuaugauccucua

SEQ ID NO: 2535099 - RNA, 19 nt, Artificial Sequence
  Description of Artificial Sequence: Synthetic oligonucleotide
  Antisense strand to SEQ ID NO: 2535098
uagaggaucauaagaaacu

SEQ ID NO: 2535100 - RNA, 19 nt, Artificial Sequence
  Description of Artificial Sequence: Synthetic oligonucleotide
  Sense strand starting at position 2462 of SEQ ID NO: 1888454
gguaauuacuaguuauucu

SEQ ID NO: 2535101 - RNA, 19 nt, Artificial Sequence
  Description of Artificial Sequence: Synthetic oligonucleotide
  Antisense strand to SEQ ID NO: 2535100
agaauaacuaguaauuacc

SEQ ID NO: 2535102 - RNA, 19 nt, Artificial Sequence
  Description of Artificial Sequence: Synthetic oligonucleotide
  Sense strand starting at position 3050 of SEQ ID NO: 1888454
guuaacaguuucuuaugau

SEQ ID NO: 2535103 - RNA, 19 nt, Artificial Sequence
  Description of Artificial Sequence: Synthetic oligonucleotide
  Antisense strand to SEQ ID NO: 2535102
aucauaagaaacuguuaac

SEQ ID NO: 2535104 - RNA, 19 nt, Artificial Sequence
  Description of Artificial Sequence: Synthetic oligonucleotide
  Sense strand starting at position 3049 of SEQ ID NO: 1888454
uguuaacaguuucuuauga

SEQ ID NO: 2535105 - RNA, 19 nt, Artificial Sequence
  Description of Artificial Sequence: Synthetic oligonucleotide
  Antisense strand to SEQ ID NO: 2535104
ucauaagaaacuguuaaca

SEQ ID NO: 2535106 - RNA, 19 nt, Artificial Sequence
  Description of Artificial Sequence: Synthetic oligonucleotide
  Sense strand starting at position 1971 of SEQ ID NO: 1888454
cgcucucaauacuuggaga

SEQ ID NO: 2535107 - RNA, 19 nt, Artificial Sequence
  Description of Artificial Sequence: Synthetic oligonucleotide
  Antisense strand to SEQ ID NO: 2535106
ucuccaaguauugagagcg

SEQ ID NO: 2535108 - RNA, 19 nt, Artificial Sequence
  Description of Artificial Sequence: Synthetic oligonucleotide
  Sense strand starting at position 895 of SEQ ID NO: 1888454
cgaagaaggcuggguaucu

SEQ ID NO: 2535109 - RNA, 19 nt, Artificial Sequence
  Description of Artificial Sequence: Synthetic oligonucleotide
  Antisense strand to SEQ ID NO: 2535108
agauacccagccuucuucg

SEQ ID NO: 2535110 - RNA, 19 nt, Artificial Sequence
  Description of Artificial Sequence: Synthetic oligonucleotide
  Sense strand starting at position 2811 of SEQ ID NO: 1888454
uugugacaguucucagacu

SEQ ID NO: 2535111 - RNA, 19 nt, Artificial Sequence
  Description of Artificial Sequence: Synthetic oligonucleotide
  Antisense strand to SEQ ID NO: 2535110
agucugagaacugucacaa

SEQ ID NO: 2535112 - RNA, 19 nt, Artificial Sequence
  Description of Artificial Sequence: Synthetic oligonucleotide
  Sense strand starting at position 98 of SEQ ID NO: 1888454
uuaaaugaagucuguagca

SEQ ID NO: 2535113 - RNA, 19 nt, Artificial Sequence
  Description of Artificial Sequence: Synthetic oligonucleotide
  Antisense strand to SEQ ID NO: 2535112
ugcuacagacuucauuuaa

SEQ ID NO: 2535114 - RNA, 19 nt, Artificial Sequence
  Description of Artificial Sequence: Synthetic oligonucleotide
  Sense strand starting at position 2434 of SEQ ID NO: 1888455
guaucucuucuggcgcaua

SEQ ID NO: 2535115 - RNA, 19 nt, Artificial Sequence
  Description of Artificial Sequence: Synthetic oligonucleotide
  Antisense strand to SEQ ID NO: 2535114
uaugcgccagaagagauac

SEQ ID NO: 2535116 - RNA, 19 nt, Artificial Sequence
  Description of Artificial Sequence: Synthetic oligonucleotide
  Sense strand starting at position 3274 of SEQ ID NO: 1888455
agccucauaguggaaacua

SEQ ID NO: 2535117 - RNA, 19 nt, Artificial Sequence
  Description of Artificial Sequence: Synthetic oligonucleotide
  Antisense strand to SEQ ID NO: 2535116
uaguuuccacuaugaggcu

SEQ ID NO: 2535118 - RNA, 19 nt, Artificial Sequence
  Description of Artificial Sequence: Synthetic oligonucleotide
  Sense strand starting at position 3363 of SEQ ID NO: 1888455
ccaauuugucauggucucu

SEQ ID NO: 2535119 - RNA, 19 nt, Artificial Sequence
  Description of Artificial Sequence: Synthetic oligonucleotide
  Antisense strand to SEQ ID NO: 2535118
agagaccaugacaaauugg

SEQ ID NO: 2535120 - RNA, 19 nt, Artificial Sequence
  Description of Artificial Sequence: Synthetic oligonucleotide
  Sense strand starting at position 2799 of SEQ ID NO: 1888455
aaggaacugcuugaaguuu

SEQ ID NO: 2535121 - RNA, 19 nt, Artificial Sequence
  Description of Artificial Sequence: Synthetic oligonucleotide
  Antisense strand to SEQ ID NO: 2535120
aaacuucaagcaguuccuu

SEQ ID NO: 2535122 - RNA, 19 nt, Artificial Sequence
  Description of Artificial Sequence: Synthetic oligonucleotide
  Sense strand starting at position 3734 of SEQ ID NO: 1888455
guuggaguauuucuguuau

SEQ ID NO: 2535123 - RNA, 19 nt, Artificial Sequence
  Description of Artificial Sequence: Synthetic oligonucleotide
  Antisense strand to SEQ ID NO: 2535122
auaacagaaauacuccaac

SEQ ID NO: 2535124 - RNA, 19 nt, Artificial Sequence
  Description of Artificial Sequence: Synthetic oligonucleotide
  Sense strand starting at position 2070 of SEQ ID NO: 1888455
gcgcaaugcggaagagaug

SEQ ID NO: 2535125 - RNA, 19 nt, Artificial Sequence
  Description of Artificial Sequence: Synthetic oligonucleotide
  Antisense strand to SEQ ID NO: 2535124
caucucuuccgcauugcgc

SEQ ID NO: 2535126 - RNA, 19 nt, Artificial Sequence
  Description of Artificial Sequence: Synthetic oligonucleotide
  Sense strand starting at position 2577 of SEQ ID NO: 1888455
ccggguggccauucguauu

SEQ ID NO: 2535127 - RNA, 19 nt, Artificial Sequence
  Description of Artificial Sequence: Synthetic oligonucleotide
  Antisense strand to SEQ ID NO: 2535126
aauacgaauggccacccgg

SEQ ID NO: 2535128 - RNA, 19 nt, Artificial Sequence
  Description of Artificial Sequence: Synthetic oligonucleotide
  Sense strand starting at position 3458 of SEQ ID NO: 1888455
gcagauuaugcuuguauuu

SEQ ID NO: 2535129 - RNA, 19 nt, Artificial Sequence
  Description of Artificial Sequence: Synthetic oligonucleotide
  Antisense strand to SEQ ID NO: 2535128
aaauacaagcauaaucugc

SEQ ID NO: 2535130 - RNA, 19 nt, Artificial Sequence
  Description of Artificial Sequence: Synthetic oligonucleotide
  Sense strand starting at position 2798 of SEQ ID NO: 1888455
gaaggaacugcuugaaguu

SEQ ID NO: 2535131 - RNA, 19 nt, Artificial Sequence
  Description of Artificial Sequence: Synthetic oligonucleotide
  Antisense strand to SEQ ID NO: 2535130
aacuucaagcaguuccuuc

SEQ ID NO: 2535132 - RNA, 19 nt, Artificial Sequence
  Description of Artificial Sequence: Synthetic oligonucleotide
  Sense strand starting at position 3948 of SEQ ID NO: 1888455
gauacugggucuuucuuaa

SEQ ID NO: 2535133 - RNA, 19 nt, Artificial Sequence
  Description of Artificial Sequence: Synthetic oligonucleotide
  Antisense strand to SEQ ID NO: 2535132
uuaagaaagacccaguauc

SEQ ID NO: 2535134 - RNA, 19 nt, Artificial Sequence
  Description of Artificial Sequence: Synthetic oligonucleotide
  Sense strand starting at position 2936 of SEQ ID NO: 1888455
caaccagaccguugauuga

SEQ ID NO: 2535135 - RNA, 19 nt, Artificial Sequence
  Description of Artificial Sequence: Synthetic oligonucleotide
  Antisense strand to SEQ ID NO: 2535134
ucaaucaacggucugguug

SEQ ID NO: 2535136 - RNA, 19 nt, Artificial Sequence
  Description of Artificial Sequence: Synthetic oligonucleotide
  Sense strand starting at position 2950 of SEQ ID NO: 1888455
auugacuuacagugcuaaa

SEQ ID NO: 2535137 - RNA, 19 nt, Artificial Sequence
  Description of Artificial Sequence: Synthetic oligonucleotide
  Antisense strand to SEQ ID NO: 2535136
uuuagcacuguaagucaau

SEQ ID NO: 2535138 - RNA, 19 nt, Artificial Sequence
  Description of Artificial Sequence: Synthetic oligonucleotide
  Sense strand starting at position 3746 of SEQ ID NO: 1888455
cuguuauggccguuguguu

SEQ ID NO: 2535139 - RNA, 19 nt, Artificial Sequence
  Description of Artificial Sequence: Synthetic oligonucleotide
  Antisense strand to SEQ ID NO: 2535138
aacacaacggccauaacag

SEQ ID NO: 2535140 - RNA, 19 nt, Artificial Sequence
  Description of Artificial Sequence: Synthetic oligonucleotide
  Sense strand starting at position 2945 of SEQ ID NO: 1888455
cguugauugacuuacagug

SEQ ID NO: 2535141 - RNA, 19 nt, Artificial Sequence
  Description of Artificial Sequence: Synthetic oligonucleotide
  Antisense strand to SEQ ID NO: 2535140
cacuguaagucaaucaacg

SEQ ID NO: 2535142 - RNA, 19 nt, Artificial Sequence
  Description of Artificial Sequence: Synthetic oligonucleotide
  Sense strand starting at position 3723 of SEQ ID NO: 1888455
uauccaauauuguuggagu

SEQ ID NO: 2535143 - RNA, 19 nt, Artificial Sequence
  Description of Artificial Sequence: Synthetic oligonucleotide
  Antisense strand to SEQ ID NO: 2535142
acuccaacaauauuggaua

SEQ ID NO: 2535144 - RNA, 19 nt, Artificial Sequence
  Description of Artificial Sequence: Synthetic oligonucleotide
  Sense strand starting at position 2871 of SEQ ID NO: 1888455
aacagcuccggacgaaaua

SEQ ID NO: 2535145 - RNA, 19 nt, Artificial Sequence
  Description of Artificial Sequence: Synthetic oligonucleotide
  Antisense strand to SEQ ID NO: 2535144
uauuucguccggagcuguu

SEQ ID NO: 2535146 - RNA, 19 nt, Artificial Sequence
  Description of Artificial Sequence: Synthetic oligonucleotide
  Sense strand starting at position 3725 of SEQ ID NO: 1888455
uccaauauuguuggaguau

SEQ ID NO: 2535147 - RNA, 19 nt, Artificial Sequence
  Description of Artificial Sequence: Synthetic oligonucleotide
  Antisense strand to SEQ ID NO: 2535146
auacuccaacaauauugga

SEQ ID NO: 2535148 - RNA, 19 nt, Artificial Sequence
  Description of Artificial Sequence: Synthetic oligonucleotide
  Sense strand starting at position 3684 of SEQ ID NO: 1888455
acugguaggucaguuauag

SEQ ID NO: 2535149 - RNA, 19 nt, Artificial Sequence
  Description of Artificial Sequence: Synthetic oligonucleotide
  Antisense strand to SEQ ID NO: 2535148
cuauaacugaccuaccagu

SEQ ID NO: 2535150 - RNA, 19 nt, Artificial Sequence
  Description of Artificial Sequence: Synthetic oligonucleotide
  Sense strand starting at position 3663 of SEQ ID NO: 1888455
agugucuugcuugacauau

SEQ ID NO: 2535151 - RNA, 19 nt, Artificial Sequence
  Description of Artificial Sequence: Synthetic oligonucleotide
  Antisense strand to SEQ ID NO: 2535150
auaugucaagcaagacacu

SEQ ID NO: 2535152 - RNA, 19 nt, Artificial Sequence
  Description of Artificial Sequence: Synthetic oligonucleotide
  Sense strand starting at position 2976 of SEQ ID NO: 1888455
cuugccuugguaugagaau

SEQ ID NO: 2535153 - RNA, 19 nt, Artificial Sequence
  Description of Artificial Sequence: Synthetic oligonucleotide
  Antisense strand to SEQ ID NO: 2535152
auucucauaccaaggcaag

SEQ ID NO: 2535154 - RNA, 19 nt, Artificial Sequence
  Description of Artificial Sequence: Synthetic oligonucleotide
  Sense strand starting at position 3342 of SEQ ID NO: 1888455
cuguaagucaucuguuaga

SEQ ID NO: 2535155 - RNA, 19 nt, Artificial Sequence
  Description of Artificial Sequence: Synthetic oligonucleotide
  Antisense strand to SEQ ID NO: 2535154
ucuaacagaugacuuacag

SEQ ID NO: 2535156 - RNA, 19 nt, Artificial Sequence
  Description of Artificial Sequence: Synthetic oligonucleotide
  Sense strand starting at position 3696 of SEQ ID NO: 1888455
guuauaguaguagguauua

SEQ ID NO: 2535157 - RNA, 19 nt, Artificial Sequence
  Description of Artificial Sequence: Synthetic oligonucleotide
  Antisense strand to SEQ ID NO: 2535156
uaauaccuacuacuauaac

SEQ ID NO: 2535158 - RNA, 19 nt, Artificial Sequence
  Description of Artificial Sequence: Synthetic oligonucleotide
  Sense strand starting at position 3677 of SEQ ID NO: 1888455
cauauuuacugguagguca

SEQ ID NO: 2535159 - RNA, 19 nt, Artificial Sequence
  Description of Artificial Sequence: Synthetic oligonucleotide
  Antisense strand to SEQ ID NO: 2535158
ugaccuaccaguaaauaug

SEQ ID NO: 2535160 - RNA, 19 nt, Artificial Sequence
  Description of Artificial Sequence: Synthetic oligonucleotide
  Sense strand starting at position 2437 of SEQ ID NO: 1888455
ucucuucuggcgcauaaau

SEQ ID NO: 2535161 - RNA, 19 nt, Artificial Sequence
  Description of Artificial Sequence: Synthetic oligonucleotide
  Antisense strand to SEQ ID NO: 2535160
auuuaugcgccagaagaga

SEQ ID NO: 2535162 - RNA, 19 nt, Artificial Sequence
  Description of Artificial Sequence: Synthetic oligonucleotide
  Sense strand starting at position 3457 of SEQ ID NO: 1888455
agcagauuaugcuuguauu

SEQ ID NO: 2535163 - RNA, 19 nt, Artificial Sequence
  Description of Artificial Sequence: Synthetic oligonucleotide
  Antisense strand to SEQ ID NO: 2535162
aauacaagcauaaucugcu

SEQ ID NO: 2535164 - RNA, 19 nt, Artificial Sequence
  Description of Artificial Sequence: Synthetic oligonucleotide
  Sense strand starting at position 3340 of SEQ ID NO: 1888455
cucuguaagucaucuguua

SEQ ID NO: 2535165 - RNA, 19 nt, Artificial Sequence
  Description of Artificial Sequence: Synthetic oligonucleotide
  Antisense strand to SEQ ID NO: 2535164
uaacagaugacuuacagag

SEQ ID NO: 2535166 - RNA, 19 nt, Artificial Sequence
  Description of Artificial Sequence: Synthetic oligonucleotide
  Sense strand starting at position 3660 of SEQ ID NO: 1888455
uacagugucuugcuugaca

SEQ ID NO: 2535167 - RNA, 19 nt, Artificial Sequence
  Description of Artificial Sequence: Synthetic oligonucleotide
  Antisense strand to SEQ ID NO: 2535166
ugucaagcaagacacugua

SEQ ID NO: 2535168 - RNA, 19 nt, Artificial Sequence
  Description of Artificial Sequence: Synthetic oligonucleotide
  Sense strand starting at position 3662 of SEQ ID NO: 1888455
cagugucuugcuugacaua

SEQ ID NO: 2535169 - RNA, 19 nt, Artificial Sequence
  Description of Artificial Sequence: Synthetic oligonucleotide
  Antisense strand to SEQ ID NO: 2535168
uaugucaagcaagacacug

SEQ ID NO: 2535170 - RNA, 19 nt, Artificial Sequence
  Description of Artificial Sequence: Synthetic oligonucleotide
  Sense strand starting at position 3867 of SEQ ID NO: 1888455
ggacuauuguaccacaaga

SEQ ID NO: 2535171 - RNA, 19 nt, Artificial Sequence
  Description of Artificial Sequence: Synthetic oligonucleotide
  Antisense strand to SEQ ID NO: 2535170
ucuugugguacaauagucc

SEQ ID NO: 2535172 - RNA, 19 nt, Artificial Sequence
  Description of Artificial Sequence: Synthetic oligonucleotide
  Sense strand starting at position 2972 of SEQ ID NO: 1888455
uugucuugccuugguauga

SEQ ID NO: 2535173 - RNA, 19 nt, Artificial Sequence
  Description of Artificial Sequence: Synthetic oligonucleotide
  Antisense strand to SEQ ID NO: 2535172
ucauaccaaggcaagacaa

SEQ ID NO: 2535174 - RNA, 19 nt, Artificial Sequence
  Description of Artificial Sequence: Synthetic oligonucleotide
  Sense strand starting at position 3240 of SEQ ID NO: 1888455
ccggaucuaucacaaauug

SEQ ID NO: 2535175 - RNA, 19 nt, Artificial Sequence
  Description of Artificial Sequence: Synthetic oligonucleotide
  Antisense strand to SEQ ID NO: 2535174
caauuugugauagauccgg

SEQ ID NO: 2535176 - RNA, 19 nt, Artificial Sequence
  Description of Artificial Sequence: Synthetic oligonucleotide
  Sense strand starting at position 3333 of SEQ ID NO: 1888455
cgcugugcucuguaaguca

SEQ ID NO: 2535177 - RNA, 19 nt, Artificial Sequence
  Description of Artificial Sequence: Synthetic oligonucleotide
  Antisense strand to SEQ ID NO: 2535176
ugacuuacagagcacagcg

SEQ ID NO: 2535178 - RNA, 19 nt, Artificial Sequence
  Description of Artificial Sequence: Synthetic oligonucleotide
  Sense strand starting at position 3300 of SEQ ID NO: 1888455
ggaagaaugucucauguuc

SEQ ID NO: 2535179 - RNA, 19 nt, Artificial Sequence
  Description of Artificial Sequence: Synthetic oligonucleotide
  Antisense strand to SEQ ID NO: 2535178
gaacaugagacauucuucc

SEQ ID NO: 2535180 - RNA, 19 nt, Artificial Sequence
  Description of Artificial Sequence: Synthetic oligonucleotide
  Sense strand starting at position 3636 of SEQ ID NO: 1888455
uguaucauguaucacauaa

SEQ ID NO: 2535181 - RNA, 19 nt, Artificial Sequence
  Description of Artificial Sequence: Synthetic oligonucleotide
  Antisense strand to SEQ ID NO: 2535180
uuaugugauacaugauaca

SEQ ID NO: 2535182 - RNA, 19 nt, Artificial Sequence
  Description of Artificial Sequence: Synthetic oligonucleotide
  Sense strand starting at position 2580 of SEQ ID NO: 1888455
gguggccauucguauuuau

SEQ ID NO: 2535183 - RNA, 19 nt, Artificial Sequence
  Description of Artificial Sequence: Synthetic oligonucleotide
  Antisense strand to SEQ ID NO: 2535182
auaaauacgaauggccacc

SEQ ID NO: 2535184 - RNA, 19 nt, Artificial Sequence
  Description of Artificial Sequence: Synthetic oligonucleotide
  Sense strand starting at position 2699 of SEQ ID NO: 1888455
agccugucgcgugggauaa

SEQ ID NO: 2535185 - RNA, 19 nt, Artificial Sequence
  Description of Artificial Sequence: Synthetic oligonucleotide
  Antisense strand to SEQ ID NO: 2535184
uuaucccacgcgacaggcu

SEQ ID NO: 2535186 - RNA, 19 nt, Artificial Sequence
  Description of Artificial Sequence: Synthetic oligonucleotide
  Sense strand starting at position 2807 of SEQ ID NO: 1888455
gcuugaaguuuccaaauag

SEQ ID NO: 2535187 - RNA, 19 nt, Artificial Sequence
  Description of Artificial Sequence: Synthetic oligonucleotide
  Antisense strand to SEQ ID NO: 2535186
cuauuuggaaacuucaagc

SEQ ID NO: 2535188 - RNA, 19 nt, Artificial Sequence
  Description of Artificial Sequence: Synthetic oligonucleotide
  Sense strand starting at position 3701 of SEQ ID NO: 1888455
aguaguagguauuaucuaa

SEQ ID NO: 2535189 - RNA, 19 nt, Artificial Sequence
  Description of Artificial Sequence: Synthetic oligonucleotide
  Antisense strand to SEQ ID NO: 2535188
uuagauaauaccuacuacu

SEQ ID NO: 2535190 - RNA, 19 nt, Artificial Sequence
  Description of Artificial Sequence: Synthetic oligonucleotide
  Sense strand starting at position 2698 of SEQ ID NO: 1888455
gagccugucgcgugggaua

SEQ ID NO: 2535191 - RNA, 19 nt, Artificial Sequence
  Description of Artificial Sequence: Synthetic oligonucleotide
  Antisense strand to SEQ ID NO: 2535190
uaucccacgcgacaggcuc

SEQ ID NO: 2535192 - RNA, 19 nt, Artificial Sequence
  Description of Artificial Sequence: Synthetic oligonucleotide
  Sense strand starting at position 3726 of SEQ ID NO: 1888455
ccaauauuguuggaguauu

SEQ ID NO: 2535193 - RNA, 19 nt, Artificial Sequence
  Description of Artificial Sequence: Synthetic oligonucleotide
  Antisense strand to SEQ ID NO: 2535192
aauacuccaacaauauugg

SEQ ID NO: 2535194 - RNA, 19 nt, Artificial Sequence
  Description of Artificial Sequence: Synthetic oligonucleotide
  Sense strand starting at position 1370 of SEQ ID NO: 1888456
uuuagacaaucuguggaaa

SEQ ID NO: 2535195 - RNA, 19 nt, Artificial Sequence
  Description of Artificial Sequence: Synthetic oligonucleotide
  Antisense strand to SEQ ID NO: 2535194
uuuccacagauugucuaaa

SEQ ID NO: 2535196 - RNA, 19 nt, Artificial Sequence
  Description of Artificial Sequence: Synthetic oligonucleotide
  Sense strand starting at position 1260 of SEQ ID NO: 1888456
ucaggaaaguacuuacuga

SEQ ID NO: 2535197 - RNA, 19 nt, Artificial Sequence
  Description of Artificial Sequence: Synthetic oligonucleotide
  Antisense strand to SEQ ID NO: 2535196
ucaguaaguacuuuccuga

SEQ ID NO: 2535198 - RNA, 19 nt, Artificial Sequence
  Description of Artificial Sequence: Synthetic oligonucleotide
  Sense strand starting at position 2490 of SEQ ID NO: 1888456
gugugaguagucccuuugu

SEQ ID NO: 2535199 - RNA, 19 nt, Artificial Sequence
  Description of Artificial Sequence: Synthetic oligonucleotide
  Antisense strand to SEQ ID NO: 2535198
acaaagggacuacucacac

SEQ ID NO: 2535200 - RNA, 19 nt, Artificial Sequence
  Description of Artificial Sequence: Synthetic oligonucleotide
  Sense strand starting at position 3198 of SEQ ID NO: 1888456
ccgagacguaggugaauuu

SEQ ID NO: 2535201 - RNA, 19 nt, Artificial Sequence
  Description of Artificial Sequence: Synthetic oligonucleotide
  Antisense strand to SEQ ID NO: 2535200
aaauucaccuacgucucgg

SEQ ID NO: 2535202 - RNA, 19 nt, Artificial Sequence
  Description of Artificial Sequence: Synthetic oligonucleotide
  Sense strand starting at position 1252 of SEQ ID NO: 1888456
gccauccaucaggaaagua

SEQ ID NO: 2535203 - RNA, 19 nt, Artificial Sequence
  Description of Artificial Sequence: Synthetic oligonucleotide
  Antisense strand to SEQ ID NO: 2535202
uacuuuccugauggauggc

SEQ ID NO: 2535204 - RNA, 19 nt, Artificial Sequence
  Description of Artificial Sequence: Synthetic oligonucleotide
  Sense strand starting at position 3915 of SEQ ID NO: 1888456
uacuuugaucaaggugaau

SEQ ID NO: 2535205 - RNA, 19 nt, Artificial Sequence
  Description of Artificial Sequence: Synthetic oligonucleotide
  Antisense strand to SEQ ID NO: 2535204
auucaccuugaucaaagua

SEQ ID NO: 2535206 - RNA, 19 nt, Artificial Sequence
  Description of Artificial Sequence: Synthetic oligonucleotide
  Sense strand starting at position 1056 of SEQ ID NO: 1888456
gcgucuggugcuguauaaa

SEQ ID NO: 2535207 - RNA, 19 nt, Artificial Sequence
  Description of Artificial Sequence: Synthetic oligonucleotide
  Antisense strand to SEQ ID NO: 2535206
uuuauacagcaccagacgc

SEQ ID NO: 2535208 - RNA, 19 nt, Artificial Sequence
  Description of Artificial Sequence: Synthetic oligonucleotide
  Sense strand starting at position 111 of SEQ ID NO: 1888456
gaagucagccaguguauuu

SEQ ID NO: 2535209 - RNA, 19 nt, Artificial Sequence
  Description of Artificial Sequence: Synthetic oligonucleotide
  Antisense strand to SEQ ID NO: 2535208
aaauacacuggcugacuuc

SEQ ID NO: 2535210 - RNA, 19 nt, Artificial Sequence
  Description of Artificial Sequence: Synthetic oligonucleotide
  Sense strand starting at position 884 of SEQ ID NO: 1888456
gggaaaggccucuguagaa

SEQ ID NO: 2535211 - RNA, 19 nt, Artificial Sequence
  Description of Artificial Sequence: Synthetic oligonucleotide
  Antisense strand to SEQ ID NO: 2535210
uucuacagaggccuuuccc

SEQ ID NO: 2535212 - RNA, 19 nt, Artificial Sequence
  Description of Artificial Sequence: Synthetic oligonucleotide
  Sense strand starting at position 468 of SEQ ID NO: 1888456
uuaguuaggguucagaagu

SEQ ID NO: 2535213 - RNA, 19 nt, Artificial Sequence
  Description of Artificial Sequence: Synthetic oligonucleotide
  Antisense strand to SEQ ID NO: 2535212
acuucugaacccuaacuaa

SEQ ID NO: 2535214 - RNA, 19 nt, Artificial Sequence
  Description of Artificial Sequence: Synthetic oligonucleotide
  Sense strand starting at position 3874 of SEQ ID NO: 1888456
cugcguugagguuugugua

SEQ ID NO: 2535215 - RNA, 19 nt, Artificial Sequence
  Description of Artificial Sequence: Synthetic oligonucleotide
  Antisense strand to SEQ ID NO: 2535214
uacacaaaccucaacgcag

SEQ ID NO: 2535216 - RNA, 19 nt, Artificial Sequence
  Description of Artificial Sequence: Synthetic oligonucleotide
  Sense strand starting at position 897 of SEQ ID NO: 1888456
guagaaagccuugacuuuc

SEQ ID NO: 2535217 - RNA, 19 nt, Artificial Sequence
  Description of Artificial Sequence: Synthetic oligonucleotide
  Antisense strand to SEQ ID NO: 2535216
gaaagucaaggcuuucuac

SEQ ID NO: 2535218 - RNA, 19 nt, Artificial Sequence
  Description of Artificial Sequence: Synthetic oligonucleotide
  Sense strand starting at position 192 of SEQ ID NO: 1888456
acaggaugcucaucuuuaa

SEQ ID NO: 2535219 - RNA, 19 nt, Artificial Sequence
  Description of Artificial Sequence: Synthetic oligonucleotide
  Antisense strand to SEQ ID NO: 2535218
uuaaagaugagcauccugu

SEQ ID NO: 2535220 - RNA, 19 nt, Artificial Sequence
  Description of Artificial Sequence: Synthetic oligonucleotide
  Sense strand starting at position 346 of SEQ ID NO: 1888456
ggcuaaucuguggaggagu

SEQ ID NO: 2535221 - RNA, 19 nt, Artificial Sequence
  Description of Artificial Sequence: Synthetic oligonucleotide
  Antisense strand to SEQ ID NO: 2535220
acuccuccacagauuagcc

SEQ ID NO: 2535222 - RNA, 19 nt, Artificial Sequence
  Description of Artificial Sequence: Synthetic oligonucleotide
  Sense strand starting at position 3911 of SEQ ID NO: 1888456
uuuauacuuugaucaaggu

SEQ ID NO: 2535223 - RNA, 19 nt, Artificial Sequence
  Description of Artificial Sequence: Synthetic oligonucleotide
  Antisense strand to SEQ ID NO: 2535222
accuugaucaaaguauaaa

SEQ ID NO: 2535224 - RNA, 19 nt, Artificial Sequence
  Description of Artificial Sequence: Synthetic oligonucleotide
  Sense strand starting at position 16 of SEQ ID NO: 1888456
uuauuaagucccuaacugu

SEQ ID NO: 2535225 - RNA, 19 nt, Artificial Sequence
  Description of Artificial Sequence: Synthetic oligonucleotide
  Antisense strand to SEQ ID NO: 2535224
acaguuagggacuuaauaa

SEQ ID NO: 2535226 - RNA, 19 nt, Artificial Sequence
  Description of Artificial Sequence: Synthetic oligonucleotide
  Sense strand starting at position 344 of SEQ ID NO: 1888456
auggcuaaucuguggagga

SEQ ID NO: 2535227 - RNA, 19 nt, Artificial Sequence
  Description of Artificial Sequence: Synthetic oligonucleotide
  Antisense strand to SEQ ID NO: 2535226
uccuccacagauuagccau

SEQ ID NO: 2535228 - RNA, 19 nt, Artificial Sequence
  Description of Artificial Sequence: Synthetic oligonucleotide
  Sense strand starting at position 3507 of SEQ ID NO: 1888456
gcaagaaauuugcgauuua

SEQ ID NO: 2535229 - RNA, 19 nt, Artificial Sequence
  Description of Artificial Sequence: Synthetic oligonucleotide
  Antisense strand to SEQ ID NO: 2535228
uaaaucgcaaauuucuugc

SEQ ID NO: 2535230 - RNA, 19 nt, Artificial Sequence
  Description of Artificial Sequence: Synthetic oligonucleotide
  Sense strand starting at position 1059 of SEQ ID NO: 1888456
ucuggugcuguauaaauau

SEQ ID NO: 2535231 - RNA, 19 nt, Artificial Sequence
  Description of Artificial Sequence: Synthetic oligonucleotide
  Antisense strand to SEQ ID NO: 2535230
auauuuauacagcaccaga

SEQ ID NO: 2535232 - RNA, 19 nt, Artificial Sequence
  Description of Artificial Sequence: Synthetic oligonucleotide
  Sense strand starting at position 3482 of SEQ ID NO: 1888456
gacucuaguuaggacauuu

SEQ ID NO: 2535233 - RNA, 19 nt, Artificial Sequence
  Description of Artificial Sequence: Synthetic oligonucleotide
  Antisense strand to SEQ ID NO: 2535232
aaauguccuaacuagaguc

SEQ ID NO: 2535234 - RNA, 19 nt, Artificial Sequence
  Description of Artificial Sequence: Synthetic oligonucleotide
  Sense strand starting at position 3329 of SEQ ID NO: 1888456
uuaggcguucuugaugaua

SEQ ID NO: 2535235 - RNA, 19 nt, Artificial Sequence
  Description of Artificial Sequence: Synthetic oligonucleotide
  Antisense strand to SEQ ID NO: 2535234
uaucaucaagaacgccuaa

SEQ ID NO: 2535236 - RNA, 19 nt, Artificial Sequence
  Description of Artificial Sequence: Synthetic oligonucleotide
  Sense strand starting at position 3881 of SEQ ID NO: 1888456
gagguuuguguauaucuuu

SEQ ID NO: 2535237 - RNA, 19 nt, Artificial Sequence
  Description of Artificial Sequence: Synthetic oligonucleotide
  Antisense strand to SEQ ID NO: 2535236
aaagauauacacaaaccuc

SEQ ID NO: 2535238 - RNA, 19 nt, Artificial Sequence
  Description of Artificial Sequence: Synthetic oligonucleotide
  Sense strand starting at position 896 of SEQ ID NO: 1888456
uguagaaagccuugacuuu

SEQ ID NO: 2535239 - RNA, 19 nt, Artificial Sequence
  Description of Artificial Sequence: Synthetic oligonucleotide
  Antisense strand to SEQ ID NO: 2535238
aaagucaaggcuuucuaca

SEQ ID NO: 2535240 - RNA, 19 nt, Artificial Sequence
  Description of Artificial Sequence: Synthetic oligonucleotide
  Sense strand starting at position 1054 of SEQ ID NO: 1888456
ucgcgucuggugcuguaua

SEQ ID NO: 2535241 - RNA, 19 nt, Artificial Sequence
  Description of Artificial Sequence: Synthetic oligonucleotide
  Antisense strand to SEQ ID NO: 2535240
uauacagcaccagacgcga

SEQ ID NO: 2535242 - RNA, 19 nt, Artificial Sequence
  Description of Artificial Sequence: Synthetic oligonucleotide
  Sense strand starting at position 1734 of SEQ ID NO: 1888456
ugcccauucguggagacuu

SEQ ID NO: 2535243 - RNA, 19 nt, Artificial Sequence
  Description of Artificial Sequence: Synthetic oligonucleotide
  Antisense strand to SEQ ID NO: 2535242
aagucuccacgaaugggca

SEQ ID NO: 2535244 - RNA, 19 nt, Artificial Sequence
  Description of Artificial Sequence: Synthetic oligonucleotide
  Sense strand starting at position 447 of SEQ ID NO: 1888456
gauggugcaggcugauaua

SEQ ID NO: 2535245 - RNA, 19 nt, Artificial Sequence
  Description of Artificial Sequence: Synthetic oligonucleotide
  Antisense strand to SEQ ID NO: 2535244
uauaucagccugcaccauc

SEQ ID NO: 2535246 - RNA, 19 nt, Artificial Sequence
  Description of Artificial Sequence: Synthetic oligonucleotide
  Sense strand starting at position 108 of SEQ ID NO: 1888456
agugaagucagccagugua

SEQ ID NO: 2535247 - RNA, 19 nt, Artificial Sequence
  Description of Artificial Sequence: Synthetic oligonucleotide
  Antisense strand to SEQ ID NO: 2535246
uacacuggcugacuucacu

SEQ ID NO: 2535248 - RNA, 19 nt, Artificial Sequence
  Description of Artificial Sequence: Synthetic oligonucleotide
  Sense strand starting at position 3517 of SEQ ID NO: 1888456
ugcgauuuauccuaaggaa

SEQ ID NO: 2535249 - RNA, 19 nt, Artificial Sequence
  Description of Artificial Sequence: Synthetic oligonucleotide
  Antisense strand to SEQ ID NO: 2535248
uuccuuaggauaaaucgca

SEQ ID NO: 2535250 - RNA, 19 nt, Artificial Sequence
  Description of Artificial Sequence: Synthetic oligonucleotide
  Sense strand starting at position 633 of SEQ ID NO: 1888456
ugucuuagugagcaucagu

SEQ ID NO: 2535251 - RNA, 19 nt, Artificial Sequence
  Description of Artificial Sequence: Synthetic oligonucleotide
  Antisense strand to SEQ ID NO: 2535250
acugaugcucacuaagaca

SEQ ID NO: 2535252 - RNA, 19 nt, Artificial Sequence
  Description of Artificial Sequence: Synthetic oligonucleotide
  Sense strand starting at position 3334 of SEQ ID NO: 1888456
cguucuugaugauauuuaa

SEQ ID NO: 2535253 - RNA, 19 nt, Artificial Sequence
  Description of Artificial Sequence: Synthetic oligonucleotide
  Antisense strand to SEQ ID NO: 2535252
uuaaauaucaucaagaacg

SEQ ID NO: 2535254 - RNA, 19 nt, Artificial Sequence
  Description of Artificial Sequence: Synthetic oligonucleotide
  Sense strand starting at position 3890 of SEQ ID NO: 1888456
guauaucuuuacuuugcau

SEQ ID NO: 2535255 - RNA, 19 nt, Artificial Sequence
  Description of Artificial Sequence: Synthetic oligonucleotide
  Antisense strand to SEQ ID NO: 2535254
augcaaaguaaagauauac

SEQ ID NO: 2535256 - RNA, 19 nt, Artificial Sequence
  Description of Artificial Sequence: Synthetic oligonucleotide
  Sense strand starting at position 1210 of SEQ ID NO: 1888456
auguauucuucccuuguca

SEQ ID NO: 2535257 - RNA, 19 nt, Artificial Sequence
  Description of Artificial Sequence: Synthetic oligonucleotide
  Antisense strand to SEQ ID NO: 2535256
ugacaagggaagaauacau

SEQ ID NO: 2535258 - RNA, 19 nt, Artificial Sequence
  Description of Artificial Sequence: Synthetic oligonucleotide
  Sense strand starting at position 164 of SEQ ID NO: 1888456
uugcaaucuugagcaaguu

SEQ ID NO: 2535259 - RNA, 19 nt, Artificial Sequence
  Description of Artificial Sequence: Synthetic oligonucleotide
  Antisense strand to SEQ ID NO: 2535258
aacuugcucaagauugcaa

SEQ ID NO: 2535260 - RNA, 19 nt, Artificial Sequence
  Description of Artificial Sequence: Synthetic oligonucleotide
  Sense strand starting at position 2844 of SEQ ID NO: 1888456
aauucugucgaguggguau

SEQ ID NO: 2535261 - RNA, 19 nt, Artificial Sequence
  Description of Artificial Sequence: Synthetic oligonucleotide
  Antisense strand to SEQ ID NO: 2535260
auacccacucgacagaauu

SEQ ID NO: 2535262 - RNA, 19 nt, Artificial Sequence
  Description of Artificial Sequence: Synthetic oligonucleotide
  Sense strand starting at position 725 of SEQ ID NO: 1888456
acccgacuucucuggccua

SEQ ID NO: 2535263 - RNA, 19 nt, Artificial Sequence
  Description of Artificial Sequence: Synthetic oligonucleotide
  Antisense strand to SEQ ID NO: 2535262
uaggccagagaagucgggu

SEQ ID NO: 2535264 - RNA, 19 nt, Artificial Sequence
  Description of Artificial Sequence: Synthetic oligonucleotide
  Sense strand starting at position 3196 of SEQ ID NO: 1888456
agccgagacguaggugaau

SEQ ID NO: 2535265 - RNA, 19 nt, Artificial Sequence
  Description of Artificial Sequence: Synthetic oligonucleotide
  Antisense strand to SEQ ID NO: 2535264
auucaccuacgucucggcu

SEQ ID NO: 2535266 - RNA, 19 nt, Artificial Sequence
  Description of Artificial Sequence: Synthetic oligonucleotide
  Sense strand starting at position 628 of SEQ ID NO: 1888456
auuagugucuuagugagca

SEQ ID NO: 2535267 - RNA, 19 nt, Artificial Sequence
  Description of Artificial Sequence: Synthetic oligonucleotide
  Antisense strand to SEQ ID NO: 2535266
ugcucacuaagacacuaau

SEQ ID NO: 2535268 - RNA, 19 nt, Artificial Sequence
  Description of Artificial Sequence: Synthetic oligonucleotide
  Sense strand starting at position 1742 of SEQ ID NO: 1888456
cguggagacuucuauuucu

SEQ ID NO: 2535269 - RNA, 19 nt, Artificial Sequence
  Description of Artificial Sequence: Synthetic oligonucleotide
  Antisense strand to SEQ ID NO: 2535268
agaaauagaagucuccacg

SEQ ID NO: 2535270 - RNA, 19 nt, Artificial Sequence
  Description of Artificial Sequence: Synthetic oligonucleotide
  Sense strand starting at position 728 of SEQ ID NO: 1888456
cgacuucucuggccuacuu

SEQ ID NO: 2535271 - RNA, 19 nt, Artificial Sequence
  Description of Artificial Sequence: Synthetic oligonucleotide
  Antisense strand to SEQ ID NO: 2535270
aaguaggccagagaagucg

SEQ ID NO: 2535272 - RNA, 19 nt, Artificial Sequence
  Description of Artificial Sequence: Synthetic oligonucleotide
  Sense strand starting at position 3197 of SEQ ID NO: 1888456
gccgagacguaggugaauu

SEQ ID NO: 2535273 - RNA, 19 nt, Artificial Sequence
  Description of Artificial Sequence: Synthetic oligonucleotide
  Antisense strand to SEQ ID NO: 2535272
aauucaccuacgucucggc

SEQ ID NO: 2535274 - RNA, 19 nt, Artificial Sequence
  Description of Artificial Sequence: Synthetic oligonucleotide
  Sense strand starting at position 443 of SEQ ID NO: 1888457
auaagaagccauuacaugu

SEQ ID NO: 2535275 - RNA, 19 nt, Artificial Sequence
  Description of Artificial Sequence: Synthetic oligonucleotide
  Antisense strand to SEQ ID NO: 2535274
acauguaauggcuucuuau

SEQ ID NO: 2535276 - RNA, 19 nt, Artificial Sequence
  Description of Artificial Sequence: Synthetic oligonucleotide
  Sense strand starting at position 2768 of SEQ ID NO: 1888457
uucugcgaggcguuauuaa

SEQ ID NO: 2535277 - RNA, 19 nt, Artificial Sequence
  Description of Artificial Sequence: Synthetic oligonucleotide
  Antisense strand to SEQ ID NO: 2535276
uuaauaacgccucgcagaa

SEQ ID NO: 2535278 - RNA, 19 nt, Artificial Sequence
  Description of Artificial Sequence: Synthetic oligonucleotide
  Sense strand starting at position 3107 of SEQ ID NO: 1888457
ggugaauccuacuuagaga

SEQ ID NO: 2535279 - RNA, 19 nt, Artificial Sequence
  Description of Artificial Sequence: Synthetic oligonucleotide
  Antisense strand to SEQ ID NO: 2535278
ucucuaaguaggauucacc

SEQ ID NO: 2535280 - RNA, 19 nt, Artificial Sequence
  Description of Artificial Sequence: Synthetic oligonucleotide
  Sense strand starting at position 320 of SEQ ID NO: 1888457
aacuguuugguuuaaagac

SEQ ID NO: 2535281 - RNA, 19 nt, Artificial Sequence
  Description of Artificial Sequence: Synthetic oligonucleotide
  Antisense strand to SEQ ID NO: 2535280
gucuuuaaaccaaacaguu

SEQ ID NO: 2535282 - RNA, 19 nt, Artificial Sequence
  Description of Artificial Sequence: Synthetic oligonucleotide
  Sense strand starting at position 3299 of SEQ ID NO: 1888457
auuuauaucugccuauugu

SEQ ID NO: 2535283 - RNA, 19 nt, Artificial Sequence
  Description of Artificial Sequence: Synthetic oligonucleotide
  Antisense strand to SEQ ID NO: 2535282
acaauaggcagauauaaau

SEQ ID NO: 2535284 - RNA, 19 nt, Artificial Sequence
  Description of Artificial Sequence: Synthetic oligonucleotide
  Sense strand starting at position 3625 of SEQ ID NO: 1888457
gagugucuggguuaagaga

SEQ ID NO: 2535285 - RNA, 19 nt, Artificial Sequence
  Description of Artificial Sequence: Synthetic oligonucleotide
  Antisense strand to SEQ ID NO: 2535284
ucucuuaacccagacacuc

SEQ ID NO: 2535286 - RNA, 19 nt, Artificial Sequence
  Description of Artificial Sequence: Synthetic oligonucleotide
  Sense strand starting at position 11 of SEQ ID NO: 1888457
guugacgucauacagaaga

SEQ ID NO: 2535287 - RNA, 19 nt, Artificial Sequence
  Description of Artificial Sequence: Synthetic oligonucleotide
  Antisense strand to SEQ ID NO: 2535286
ucuucuguaugacgucaac

SEQ ID NO: 2535288 - RNA, 19 nt, Artificial Sequence
  Description of Artificial Sequence: Synthetic oligonucleotide
  Sense strand starting at position 3392 of SEQ ID NO: 1888457
ucaggacguccugagaacu

SEQ ID NO: 2535289 - RNA, 19 nt, Artificial Sequence
  Description of Artificial Sequence: Synthetic oligonucleotide
  Antisense strand to SEQ ID NO: 2535288
aguucucaggacguccuga

SEQ ID NO: 2535290 - RNA, 19 nt, Artificial Sequence
  Description of Artificial Sequence: Synthetic oligonucleotide
  Sense strand starting at position 3667 of SEQ ID NO: 1888457
uuauuauguggaugaaauc

SEQ ID NO: 2535291 - RNA, 19 nt, Artificial Sequence
  Description of Artificial Sequence: Synthetic oligonucleotide
  Antisense strand to SEQ ID NO: 2535290
gauuucauccacauaauaa

SEQ ID NO: 2535292 - RNA, 19 nt, Artificial Sequence
  Description of Artificial Sequence: Synthetic oligonucleotide
  Sense strand starting at position 3598 of SEQ ID NO: 1888457
aucugaaggcuuggaauca

SEQ ID NO: 2535293 - RNA, 19 nt, Artificial Sequence
  Description of Artificial Sequence: Synthetic oligonucleotide
  Antisense strand to SEQ ID NO: 2535292
ugauuccaagccuucagau

SEQ ID NO: 2535294 - RNA, 19 nt, Artificial Sequence
  Description of Artificial Sequence: Synthetic oligonucleotide
  Sense strand starting at position 2037 of SEQ ID NO: 1888457
cgugaaaugcguucccagu

SEQ ID NO: 2535295 - RNA, 19 nt, Artificial Sequence
  Description of Artificial Sequence: Synthetic oligonucleotide
  Antisense strand to SEQ ID NO: 2535294
acugggaacgcauuucacg

SEQ ID NO: 2535296 - RNA, 19 nt, Artificial Sequence
  Description of Artificial Sequence: Synthetic oligonucleotide
  Sense strand starting at position 3656 of SEQ ID NO: 1888457
gaccgagguccuuauuaug

SEQ ID NO: 2535297 - RNA, 19 nt, Artificial Sequence
  Description of Artificial Sequence: Synthetic oligonucleotide
  Antisense strand to SEQ ID NO: 2535296
cauaauaaggaccucgguc

SEQ ID NO: 2535298 - RNA, 19 nt, Artificial Sequence
  Description of Artificial Sequence: Synthetic oligonucleotide
  Sense strand starting at position 2967 of SEQ ID NO: 1888457
aacgguauaauuggacgaa

SEQ ID NO: 2535299 - RNA, 19 nt, Artificial Sequence
  Description of Artificial Sequence: Synthetic oligonucleotide
  Antisense strand to SEQ ID NO: 2535298
uucguccaauuauaccguu

SEQ ID NO: 2535300 - RNA, 19 nt, Artificial Sequence
  Description of Artificial Sequence: Synthetic oligonucleotide
  Sense strand starting at position 318 of SEQ ID NO: 1888457
caaacuguuugguuuaaag

SEQ ID NO: 2535301 - RNA, 19 nt, Artificial Sequence
  Description of Artificial Sequence: Synthetic oligonucleotide
  Antisense strand to SEQ ID NO: 2535300
cuuuaaaccaaacaguuug

SEQ ID NO: 2535302 - RNA, 19 nt, Artificial Sequence
  Description of Artificial Sequence: Synthetic oligonucleotide
  Sense strand starting at position 407 of SEQ ID NO: 1888457
agacguuaaagcuacaagu

SEQ ID NO: 2535303 - RNA, 19 nt, Artificial Sequence
  Description of Artificial Sequence: Synthetic oligonucleotide
  Antisense strand to SEQ ID NO: 2535302
acuuguagcuuuaacgucu

SEQ ID NO: 2535304 - RNA, 19 nt, Artificial Sequence
  Description of Artificial Sequence: Synthetic oligonucleotide
  Sense strand starting at position 317 of SEQ ID NO: 1888457
ucaaacuguuugguuuaaa

SEQ ID NO: 2535305 - RNA, 19 nt, Artificial Sequence
  Description of Artificial Sequence: Synthetic oligonucleotide
  Antisense strand to SEQ ID NO: 2535304
uuuaaaccaaacaguuuga

SEQ ID NO: 2535306 - RNA, 19 nt, Artificial Sequence
  Description of Artificial Sequence: Synthetic oligonucleotide
  Sense strand starting at position 1019 of SEQ ID NO: 1888457
cugagaauucacugcggag

SEQ ID NO: 2535307 - RNA, 19 nt, Artificial Sequence
  Description of Artificial Sequence: Synthetic oligonucleotide
  Antisense strand to SEQ ID NO: 2535306
cuccgcagugaauucucag

SEQ ID NO: 2535308 - RNA, 19 nt, Artificial Sequence
  Description of Artificial Sequence: Synthetic oligonucleotide
  Sense strand starting at position 409 of SEQ ID NO: 1888457
acguuaaagcuacaaguau

SEQ ID NO: 2535309 - RNA, 19 nt, Artificial Sequence
  Description of Artificial Sequence: Synthetic oligonucleotide
  Antisense strand to SEQ ID NO: 2535308
auacuuguagcuuuaacgu

SEQ ID NO: 2535310 - RNA, 19 nt, Artificial Sequence
  Description of Artificial Sequence: Synthetic oligonucleotide
  Sense strand starting at position 3574 of SEQ ID NO: 1888457
ggcaguugguugaaagaag

SEQ ID NO: 2535311 - RNA, 19 nt, Artificial Sequence
  Description of Artificial Sequence: Synthetic oligonucleotide
  Antisense strand to SEQ ID NO: 2535310
cuucuuucaaccaacugcc

SEQ ID NO: 2535312 - RNA, 19 nt, Artificial Sequence
  Description of Artificial Sequence: Synthetic oligonucleotide
  Sense strand starting at position 3035 of SEQ ID NO: 1888457
ucuguuaaauuugagauca

SEQ ID NO: 2535313 - RNA, 19 nt, Artificial Sequence
  Description of Artificial Sequence: Synthetic oligonucleotide
  Antisense strand to SEQ ID NO: 2535312
ugaucucaaauuuaacaga

SEQ ID NO: 2535314 - RNA, 19 nt, Artificial Sequence
  Description of Artificial Sequence: Synthetic oligonucleotide
  Sense strand starting at position 2538 of SEQ ID NO: 1888457
augagagccuggguuucua

SEQ ID NO: 2535315 - RNA, 19 nt, Artificial Sequence
  Description of Artificial Sequence: Synthetic oligonucleotide
  Antisense strand to SEQ ID NO: 2535314
uagaaacccaggcucucau

SEQ ID NO: 2535316 - RNA, 19 nt, Artificial Sequence
  Description of Artificial Sequence: Synthetic oligonucleotide
  Sense strand starting at position 3663 of SEQ ID NO: 1888457
guccuuauuauguggauga

SEQ ID NO: 2535317 - RNA, 19 nt, Artificial Sequence
  Description of Artificial Sequence: Synthetic oligonucleotide
  Antisense strand to SEQ ID NO: 2535316
ucauccacauaauaaggac

SEQ ID NO: 2535318 - RNA, 19 nt, Artificial Sequence
  Description of Artificial Sequence: Synthetic oligonucleotide
  Sense strand starting at position 59 of SEQ ID NO: 1888457
gucucaaaugcugagguuu

SEQ ID NO: 2535319 - RNA, 19 nt, Artificial Sequence
  Description of Artificial Sequence: Synthetic oligonucleotide
  Antisense strand to SEQ ID NO: 2535318
aaaccucagcauuugagac

SEQ ID NO: 2535320 - RNA, 19 nt, Artificial Sequence
  Description of Artificial Sequence: Synthetic oligonucleotide
  Sense strand starting at position 2979 of SEQ ID NO: 1888457
ggacgaauuucuugaagga

SEQ ID NO: 2535321 - RNA, 19 nt, Artificial Sequence
  Description of Artificial Sequence: Synthetic oligonucleotide
  Antisense strand to SEQ ID NO: 2535320
uccuucaagaaauucgucc

SEQ ID NO: 2535322 - RNA, 19 nt, Artificial Sequence
  Description of Artificial Sequence: Synthetic oligonucleotide
  Sense strand starting at position 522 of SEQ ID NO: 1888457
cugugaugauguucuuaau

SEQ ID NO: 2535323 - RNA, 19 nt, Artificial Sequence
  Description of Artificial Sequence: Synthetic oligonucleotide
  Antisense strand to SEQ ID NO: 2535322
auuaagaacaucaucacag

SEQ ID NO: 2535324 - RNA, 19 nt, Artificial Sequence
  Description of Artificial Sequence: Synthetic oligonucleotide
  Sense strand starting at position 401 of SEQ ID NO: 1888457
uauguuagacguuaaagcu

SEQ ID NO: 2535325 - RNA, 19 nt, Artificial Sequence
  Description of Artificial Sequence: Synthetic oligonucleotide
  Antisense strand to SEQ ID NO: 2535324
agcuuuaacgucuaacaua

SEQ ID NO: 2535326 - RNA, 19 nt, Artificial Sequence
  Description of Artificial Sequence: Synthetic oligonucleotide
  Sense strand starting at position 376 of SEQ ID NO: 1888457
gugcacuaugucuauugau

SEQ ID NO: 2535327 - RNA, 19 nt, Artificial Sequence
  Description of Artificial Sequence: Synthetic oligonucleotide
  Antisense strand to SEQ ID NO: 2535326
aucaauagacauagugcac

SEQ ID NO: 2535328 - RNA, 19 nt, Artificial Sequence
  Description of Artificial Sequence: Synthetic oligonucleotide
  Sense strand starting at position 1009 of SEQ ID NO: 1888457
cgucuuggcccugagaauu

SEQ ID NO: 2535329 - RNA, 19 nt, Artificial Sequence
  Description of Artificial Sequence: Synthetic oligonucleotide
  Antisense strand to SEQ ID NO: 2535328
aauucucagggccaagacg

SEQ ID NO: 2535330 - RNA, 19 nt, Artificial Sequence
  Description of Artificial Sequence: Synthetic oligonucleotide
  Sense strand starting at position 174 of SEQ ID NO: 1888457
guuucucuaugaccaguua

SEQ ID NO: 2535331 - RNA, 19 nt, Artificial Sequence
  Description of Artificial Sequence: Synthetic oligonucleotide
  Antisense strand to SEQ ID NO: 2535330
uaacuggucauagagaaac

SEQ ID NO: 2535332 - RNA, 19 nt, Artificial Sequence
  Description of Artificial Sequence: Synthetic oligonucleotide
  Sense strand starting at position 3300 of SEQ ID NO: 1888457
uuuauaucugccuauuguu

SEQ ID NO: 2535333 - RNA, 19 nt, Artificial Sequence
  Description of Artificial Sequence: Synthetic oligonucleotide
  Antisense strand to SEQ ID NO: 2535332
aacaauaggcagauauaaa

SEQ ID NO: 2535334 - RNA, 19 nt, Artificial Sequence
  Description of Artificial Sequence: Synthetic oligonucleotide
  Sense strand starting at position 3760 of SEQ ID NO: 1888457
cagccagucuccucaggau

SEQ ID NO: 2535335 - RNA, 19 nt, Artificial Sequence
  Description of Artificial Sequence: Synthetic oligonucleotide
  Antisense strand to SEQ ID NO: 2535334
auccugaggagacuggcug

SEQ ID NO: 2535336 - RNA, 19 nt, Artificial Sequence
  Description of Artificial Sequence: Synthetic oligonucleotide
  Sense strand starting at position 3195 of SEQ ID NO: 1888457
cagcauugccuugauagca

SEQ ID NO: 2535337 - RNA, 19 nt, Artificial Sequence
  Description of Artificial Sequence: Synthetic oligonucleotide
  Antisense strand to SEQ ID NO: 2535336
ugcuaucaaggcaaugcug

SEQ ID NO: 2535338 - RNA, 19 nt, Artificial Sequence
  Description of Artificial Sequence: Synthetic oligonucleotide
  Sense strand starting at position 315 of SEQ ID NO: 1888457
ucucaaacuguuugguuua

SEQ ID NO: 2535339 - RNA, 19 nt, Artificial Sequence
  Description of Artificial Sequence: Synthetic oligonucleotide
  Antisense strand to SEQ ID NO: 2535338
uaaaccaaacaguuugaga

SEQ ID NO: 2535340 - RNA, 19 nt, Artificial Sequence
  Description of Artificial Sequence: Synthetic oligonucleotide
  Sense strand starting at position 391 of SEQ ID NO: 1888457
ugauacguccuauguuaga

SEQ ID NO: 2535341 - RNA, 19 nt, Artificial Sequence
  Description of Artificial Sequence: Synthetic oligonucleotide
  Antisense strand to SEQ ID NO: 2535340
ucuaacauaggacguauca

SEQ ID NO: 2535342 - RNA, 19 nt, Artificial Sequence
  Description of Artificial Sequence: Synthetic oligonucleotide
  Sense strand starting at position 139 of SEQ ID NO: 1888457
aaugguuccuaguuuguga

SEQ ID NO: 2535343 - RNA, 19 nt, Artificial Sequence
  Description of Artificial Sequence: Synthetic oligonucleotide
  Antisense strand to SEQ ID NO: 2535342
ucacaaacuaggaaccauu

SEQ ID NO: 2535344 - RNA, 19 nt, Artificial Sequence
  Description of Artificial Sequence: Synthetic oligonucleotide
  Sense strand starting at position 571 of SEQ ID NO: 1888457
gcuggauucccauacccgu

SEQ ID NO: 2535345 - RNA, 19 nt, Artificial Sequence
  Description of Artificial Sequence: Synthetic oligonucleotide
  Antisense strand to SEQ ID NO: 2535344
acggguaugggaauccagc

SEQ ID NO: 2535346 - RNA, 19 nt, Artificial Sequence
  Description of Artificial Sequence: Synthetic oligonucleotide
  Sense strand starting at position 3183 of SEQ ID NO: 1888457
cgauguaugggccagcauu

SEQ ID NO: 2535347 - RNA, 19 nt, Artificial Sequence
  Description of Artificial Sequence: Synthetic oligonucleotide
  Antisense strand to SEQ ID NO: 2535346
aaugcuggcccauacaucg

SEQ ID NO: 2535348 - RNA, 19 nt, Artificial Sequence
  Description of Artificial Sequence: Synthetic oligonucleotide
  Sense strand starting at position 314 of SEQ ID NO: 1888457
uucucaaacuguuugguuu

SEQ ID NO: 2535349 - RNA, 19 nt, Artificial Sequence
  Description of Artificial Sequence: Synthetic oligonucleotide
  Antisense strand to SEQ ID NO: 2535348
aaaccaaacaguuugagaa

SEQ ID NO: 2535350 - RNA, 19 nt, Artificial Sequence
  Description of Artificial Sequence: Synthetic oligonucleotide
  Sense strand starting at position 673 of SEQ ID NO: 1888457
cguauaauacucugguacu

SEQ ID NO: 2535351 - RNA, 19 nt, Artificial Sequence
  Description of Artificial Sequence: Synthetic oligonucleotide
  Antisense strand to SEQ ID NO: 2535350
aguaccagaguauuauacg

SEQ ID NO: 2535352 - RNA, 19 nt, Artificial Sequence
  Description of Artificial Sequence: Synthetic oligonucleotide
  Sense strand starting at position 385 of SEQ ID NO: 1888457
gucuauugauacguccuau

SEQ ID NO: 2535353 - RNA, 19 nt, Artificial Sequence
  Description of Artificial Sequence: Synthetic oligonucleotide
  Antisense strand to SEQ ID NO: 2535352
auaggacguaucaauagac

SEQ ID NO: 2535354 - RNA, 19 nt, Artificial Sequence
  Description of Artificial Sequence: Synthetic oligonucleotide
  Sense strand starting at position 1832 of SEQ ID NO: 1888459
uugcgauccgcuccggaaa

SEQ ID NO: 2535355 - RNA, 19 nt, Artificial Sequence
  Description of Artificial Sequence: Synthetic oligonucleotide
  Antisense strand to SEQ ID NO: 2535354
uuuccggagcggaucgcaa

SEQ ID NO: 2535356 - RNA, 19 nt, Artificial Sequence
  Description of Artificial Sequence: Synthetic oligonucleotide
  Sense strand starting at position 946 of SEQ ID NO: 1888459
uguuuauuuccaugaguuu

SEQ ID NO: 2535357 - RNA, 19 nt, Artificial Sequence
  Description of Artificial Sequence: Synthetic oligonucleotide
  Antisense strand to SEQ ID NO: 2535356
aaacucauggaaauaaaca

SEQ ID NO: 2535358 - RNA, 19 nt, Artificial Sequence
  Description of Artificial Sequence: Synthetic oligonucleotide
  Sense strand starting at position 2653 of SEQ ID NO: 1888459
gguucuuaagcauaugaga

SEQ ID NO: 2535359 - RNA, 19 nt, Artificial Sequence
  Description of Artificial Sequence: Synthetic oligonucleotide
  Antisense strand to SEQ ID NO: 2535358
ucucauaugcuuaagaacc

SEQ ID NO: 2535360 - RNA, 19 nt, Artificial Sequence
  Description of Artificial Sequence: Synthetic oligonucleotide
  Sense strand starting at position 3010 of SEQ ID NO: 1888459
cuccuuuacggguaggaga

SEQ ID NO: 2535361 - RNA, 19 nt, Artificial Sequence
  Description of Artificial Sequence: Synthetic oligonucleotide
  Antisense strand to SEQ ID NO: 2535360
ucuccuacccguaaaggag

SEQ ID NO: 2535362 - RNA, 19 nt, Artificial Sequence
  Description of Artificial Sequence: Synthetic oligonucleotide
  Sense strand starting at position 3145 of SEQ ID NO: 1888459
ggcauaugugaucaucaca

SEQ ID NO: 2535363 - RNA, 19 nt, Artificial Sequence
  Description of Artificial Sequence: Synthetic oligonucleotide
  Antisense strand to SEQ ID NO: 2535362
ugugaugaucacauaugcc

SEQ ID NO: 2535364 - RNA, 19 nt, Artificial Sequence
  Description of Artificial Sequence: Synthetic oligonucleotide
  Sense strand starting at position 3137 of SEQ ID NO: 1888459
guaugaauggcauauguga

SEQ ID NO: 2535365 - RNA, 19 nt, Artificial Sequence
  Description of Artificial Sequence: Synthetic oligonucleotide
  Antisense strand to SEQ ID NO: 2535364
ucacauaugccauucauac

SEQ ID NO: 2535366 - RNA, 19 nt, Artificial Sequence
  Description of Artificial Sequence: Synthetic oligonucleotide
  Sense strand starting at position 603 of SEQ ID NO: 1888459
ugcauucuccaaggagaac

SEQ ID NO: 2535367 - RNA, 19 nt, Artificial Sequence
  Description of Artificial Sequence: Synthetic oligonucleotide
  Antisense strand to SEQ ID NO: 2535366
guucuccuuggagaaugca

SEQ ID NO: 2535368 - RNA, 19 nt, Artificial Sequence
  Description of Artificial Sequence: Synthetic oligonucleotide
  Sense strand starting at position 3828 of SEQ ID NO: 1888459
ucaagaggauugucaaugu

SEQ ID NO: 2535369 - RNA, 19 nt, Artificial Sequence
  Description of Artificial Sequence: Synthetic oligonucleotide
  Antisense strand to SEQ ID NO: 2535368
acauugacaauccucuuga

SEQ ID NO: 2535370 - RNA, 19 nt, Artificial Sequence
  Description of Artificial Sequence: Synthetic oligonucleotide
  Sense strand starting at position 138 of SEQ ID NO: 1888459
uggccuucuguacagauaa

SEQ ID NO: 2535371 - RNA, 19 nt, Artificial Sequence
  Description of Artificial Sequence: Synthetic oligonucleotide
  Antisense strand to SEQ ID NO: 2535370
uuaucuguacagaaggcca

SEQ ID NO: 2535372 - RNA, 19 nt, Artificial Sequence
  Description of Artificial Sequence: Synthetic oligonucleotide
  Sense strand starting at position 3713 of SEQ ID NO: 1888459
gugcgaauaacugaaagua

SEQ ID NO: 2535373 - RNA, 19 nt, Artificial Sequence
  Description of Artificial Sequence: Synthetic oligonucleotide
  Antisense strand to SEQ ID NO: 2535372
uacuuucaguuauucgcac

SEQ ID NO: 2535374 - RNA, 19 nt, Artificial Sequence
  Description of Artificial Sequence: Synthetic oligonucleotide
  Sense strand starting at position 934 of SEQ ID NO: 1888459
accagauaggaguguuuau

SEQ ID NO: 2535375 - RNA, 19 nt, Artificial Sequence
  Description of Artificial Sequence: Synthetic oligonucleotide
  Antisense strand to SEQ ID NO: 2535374
auaaacacuccuaucuggu

SEQ ID NO: 2535376 - RNA, 19 nt, Artificial Sequence
  Description of Artificial Sequence: Synthetic oligonucleotide
  Sense strand starting at position 464 of SEQ ID NO: 1888459
cagcgaugucaggaaaucu

SEQ ID NO: 2535377 - RNA, 19 nt, Artificial Sequence
  Description of Artificial Sequence: Synthetic oligonucleotide
  Antisense strand to SEQ ID NO: 2535376
agauuuccugacaucgcug

SEQ ID NO: 2535378 - RNA, 19 nt, Artificial Sequence
  Description of Artificial Sequence: Synthetic oligonucleotide
  Sense strand starting at position 2627 of SEQ ID NO: 1888459
gauggacaguucguaggaa

SEQ ID NO: 2535379 - RNA, 19 nt, Artificial Sequence
  Description of Artificial Sequence: Synthetic oligonucleotide
  Antisense strand to SEQ ID NO: 2535378
uuccuacgaacuguccauc

SEQ ID NO: 2535380 - RNA, 19 nt, Artificial Sequence
  Description of Artificial Sequence: Synthetic oligonucleotide
  Sense strand starting at position 3012 of SEQ ID NO: 1888459
ccuuuacggguaggagaau

SEQ ID NO: 2535381 - RNA, 19 nt, Artificial Sequence
  Description of Artificial Sequence: Synthetic oligonucleotide
  Antisense strand to SEQ ID NO: 2535380
auucuccuacccguaaagg

SEQ ID NO: 2535382 - RNA, 19 nt, Artificial Sequence
  Description of Artificial Sequence: Synthetic oligonucleotide
  Sense strand starting at position 78 of SEQ ID NO: 1888459
ggaagacacaguugccuua

SEQ ID NO: 2535383 - RNA, 19 nt, Artificial Sequence
  Description of Artificial Sequence: Synthetic oligonucleotide
  Antisense strand to SEQ ID NO: 2535382
uaaggcaacugugucuucc

SEQ ID NO: 2535384 - RNA, 19 nt, Artificial Sequence
  Description of Artificial Sequence: Synthetic oligonucleotide
  Sense strand starting at position 3139 of SEQ ID NO: 1888459
augaauggcauaugugauc

SEQ ID NO: 2535385 - RNA, 19 nt, Artificial Sequence
  Description of Artificial Sequence: Synthetic oligonucleotide
  Antisense strand to SEQ ID NO: 2535384
gaucacauaugccauucau

SEQ ID NO: 2535386 - RNA, 19 nt, Artificial Sequence
  Description of Artificial Sequence: Synthetic oligonucleotide
  Sense strand starting at position 81 of SEQ ID NO: 1888459
agacacaguugccuuaaau

SEQ ID NO: 2535387 - RNA, 19 nt, Artificial Sequence
  Description of Artificial Sequence: Synthetic oligonucleotide
  Antisense strand to SEQ ID NO: 2535386
auuuaaggcaacugugucu

SEQ ID NO: 2535388 - RNA, 19 nt, Artificial Sequence
  Description of Artificial Sequence: Synthetic oligonucleotide
  Sense strand starting at position 1215 of SEQ ID NO: 1888459
ggacucagcuucucuaaac

SEQ ID NO: 2535389 - RNA, 19 nt, Artificial Sequence
  Description of Artificial Sequence: Synthetic oligonucleotide
  Antisense strand to SEQ ID NO: 2535388
guuuagagaagcugagucc

SEQ ID NO: 2535390 - RNA, 19 nt, Artificial Sequence
  Description of Artificial Sequence: Synthetic oligonucleotide
  Sense strand starting at position 588 of SEQ ID NO: 1888459
gaguguugacaucauugca

SEQ ID NO: 2535391 - RNA, 19 nt, Artificial Sequence
  Description of Artificial Sequence: Synthetic oligonucleotide
  Antisense strand to SEQ ID NO: 2535390
ugcaaugaugucaacacuc

SEQ ID NO: 2535392 - RNA, 19 nt, Artificial Sequence
  Description of Artificial Sequence: Synthetic oligonucleotide
  Sense strand starting at position 615 of SEQ ID NO: 1888459
ggagaacugucacugcuac

SEQ ID NO: 2535393 - RNA, 19 nt, Artificial Sequence
  Description of Artificial Sequence: Synthetic oligonucleotide
  Antisense strand to SEQ ID NO: 2535392
guagcagugacaguucucc

SEQ ID NO: 2535394 - RNA, 19 nt, Artificial Sequence
  Description of Artificial Sequence: Synthetic oligonucleotide
  Sense strand starting at position 3838 of SEQ ID NO: 1888459
ugucaauguguccacuaua

SEQ ID NO: 2535395 - RNA, 19 nt, Artificial Sequence
  Description of Artificial Sequence: Synthetic oligonucleotide
  Antisense strand to SEQ ID NO: 2535394
uauaguggacacauugaca

SEQ ID NO: 2535396 - RNA, 19 nt, Artificial Sequence
  Description of Artificial Sequence: Synthetic oligonucleotide
  Sense strand starting at position 3190 of SEQ ID NO: 1888459
augggaaguguuggaugca

SEQ ID NO: 2535397 - RNA, 19 nt, Artificial Sequence
  Description of Artificial Sequence: Synthetic oligonucleotide
  Antisense strand to SEQ ID NO: 2535396
ugcauccaacacuucccau

SEQ ID NO: 2535398 - RNA, 19 nt, Artificial Sequence
  Description of Artificial Sequence: Synthetic oligonucleotide
  Sense strand starting at position 136 of SEQ ID NO: 1888459
ccuggccuucuguacagau

SEQ ID NO: 2535399 - RNA, 19 nt, Artificial Sequence
  Description of Artificial Sequence: Synthetic oligonucleotide
  Antisense strand to SEQ ID NO: 2535398
aucuguacagaaggccagg

SEQ ID NO: 2535400 - RNA, 19 nt, Artificial Sequence
  Description of Artificial Sequence: Synthetic oligonucleotide
  Sense strand starting at position 3251 of SEQ ID NO: 1888459
agauuaggcaaguguugau

SEQ ID NO: 2535401 - RNA, 19 nt, Artificial Sequence
  Description of Artificial Sequence: Synthetic oligonucleotide
  Antisense strand to SEQ ID NO: 2535400
aucaacacuugccuaaucu

SEQ ID NO: 2535402 - RNA, 19 nt, Artificial Sequence
  Description of Artificial Sequence: Synthetic oligonucleotide
  Sense strand starting at position 3144 of SEQ ID NO: 1888459
uggcauaugugaucaucac

SEQ ID NO: 2535403 - RNA, 19 nt, Artificial Sequence
  Description of Artificial Sequence: Synthetic oligonucleotide
  Antisense strand to SEQ ID NO: 2535402
gugaugaucacauaugcca

SEQ ID NO: 2535404 - RNA, 19 nt, Artificial Sequence
  Description of Artificial Sequence: Synthetic oligonucleotide
  Sense strand starting at position 3025 of SEQ ID NO: 1888459
gagaauaaauuagcguagu

SEQ ID NO: 2535405 - RNA, 19 nt, Artificial Sequence
  Description of Artificial Sequence: Synthetic oligonucleotide
  Antisense strand to SEQ ID NO: 2535404
acuacgcuaauuuauucuc

SEQ ID NO: 2535406 - RNA, 19 nt, Artificial Sequence
  Description of Artificial Sequence: Synthetic oligonucleotide
  Sense strand starting at position 3645 of SEQ ID NO: 1888459
augaaacaguccucggcau

SEQ ID NO: 2535407 - RNA, 19 nt, Artificial Sequence
  Description of Artificial Sequence: Synthetic oligonucleotide
  Antisense strand to SEQ ID NO: 2535406
augccgaggacuguuucau

SEQ ID NO: 2535408 - RNA, 19 nt, Artificial Sequence
  Description of Artificial Sequence: Synthetic oligonucleotide
  Sense strand starting at position 1556 of SEQ ID NO: 1888459
gggaaauccagccggguuu

SEQ ID NO: 2535409 - RNA, 19 nt, Artificial Sequence
  Description of Artificial Sequence: Synthetic oligonucleotide
  Antisense strand to SEQ ID NO: 2535408
aaacccggcuggauuuccc

SEQ ID NO: 2535410 - RNA, 19 nt, Artificial Sequence
  Description of Artificial Sequence: Synthetic oligonucleotide
  Sense strand starting at position 3646 of SEQ ID NO: 1888459
ugaaacaguccucggcaua

SEQ ID NO: 2535411 - RNA, 19 nt, Artificial Sequence
  Description of Artificial Sequence: Synthetic oligonucleotide
  Antisense strand to SEQ ID NO: 2535410
uaugccgaggacuguuuca

SEQ ID NO: 2535412 - RNA, 19 nt, Artificial Sequence
  Description of Artificial Sequence: Synthetic oligonucleotide
  Sense strand starting at position 3647 of SEQ ID NO: 1888459
gaaacaguccucggcauau

SEQ ID NO: 2535413 - RNA, 19 nt, Artificial Sequence
  Description of Artificial Sequence: Synthetic oligonucleotide
  Antisense strand to SEQ ID NO: 2535412
auaugccgaggacuguuuc

SEQ ID NO: 2535414 - RNA, 19 nt, Artificial Sequence
  Description of Artificial Sequence: Synthetic oligonucleotide
  Sense strand starting at position 3651 of SEQ ID NO: 1888459
caguccucggcauauguga

SEQ ID NO: 2535415 - RNA, 19 nt, Artificial Sequence
  Description of Artificial Sequence: Synthetic oligonucleotide
  Antisense strand to SEQ ID NO: 2535414
ucacauaugccgaggacug

SEQ ID NO: 2535416 - RNA, 19 nt, Artificial Sequence
  Description of Artificial Sequence: Synthetic oligonucleotide
  Sense strand starting at position 786 of SEQ ID NO: 1888459
acgugucucugaucacaca

SEQ ID NO: 2535417 - RNA, 19 nt, Artificial Sequence
  Description of Artificial Sequence: Synthetic oligonucleotide
  Antisense strand to SEQ ID NO: 2535416
ugugugaucagagacacgu

SEQ ID NO: 2535418 - RNA, 19 nt, Artificial Sequence
  Description of Artificial Sequence: Synthetic oligonucleotide
  Sense strand starting at position 3180 of SEQ ID NO: 1888459
gugccaucccaugggaagu

SEQ ID NO: 2535419 - RNA, 19 nt, Artificial Sequence
  Description of Artificial Sequence: Synthetic oligonucleotide
  Antisense strand to SEQ ID NO: 2535418
acuucccaugggauggcac

SEQ ID NO: 2535420 - RNA, 19 nt, Artificial Sequence
  Description of Artificial Sequence: Synthetic oligonucleotide
  Sense strand starting at position 2553 of SEQ ID NO: 1888459
uucccucauguacgugaaa

SEQ ID NO: 2535421 - RNA, 19 nt, Artificial Sequence
  Description of Artificial Sequence: Synthetic oligonucleotide
  Antisense strand to SEQ ID NO: 2535420
uuucacguacaugagggaa

SEQ ID NO: 2535422 - RNA, 19 nt, Artificial Sequence
  Description of Artificial Sequence: Synthetic oligonucleotide
  Sense strand starting at position 357 of SEQ ID NO: 1888459
aaguaugaaucacagauag

SEQ ID NO: 2535423 - RNA, 19 nt, Artificial Sequence
  Description of Artificial Sequence: Synthetic oligonucleotide
  Antisense strand to SEQ ID NO: 2535422
cuaucugugauucauacuu

SEQ ID NO: 2535424 - RNA, 19 nt, Artificial Sequence
  Description of Artificial Sequence: Synthetic oligonucleotide
  Sense strand starting at position 3133 of SEQ ID NO: 1888459
gcuuguaugaauggcauau

SEQ ID NO: 2535425 - RNA, 19 nt, Artificial Sequence
  Description of Artificial Sequence: Synthetic oligonucleotide
  Antisense strand to SEQ ID NO: 2535424
auaugccauucauacaagc

SEQ ID NO: 2535426 - RNA, 19 nt, Artificial Sequence
  Description of Artificial Sequence: Synthetic oligonucleotide
  Sense strand starting at position 579 of SEQ ID NO: 1888459
acccuuaucgaguguugac

SEQ ID NO: 2535427 - RNA, 19 nt, Artificial Sequence
  Description of Artificial Sequence: Synthetic oligonucleotide
  Antisense strand to SEQ ID NO: 2535426
gucaacacucgauaagggu

SEQ ID NO: 2535428 - RNA, 19 nt, Artificial Sequence
  Description of Artificial Sequence: Synthetic oligonucleotide
  Sense strand starting at position 3050 of SEQ ID NO: 1888459
ucagauauuuguggauauc

SEQ ID NO: 2535429 - RNA, 19 nt, Artificial Sequence
  Description of Artificial Sequence: Synthetic oligonucleotide
  Antisense strand to SEQ ID NO: 2535428
gauauccacaaauaucuga

SEQ ID NO: 2535430 - RNA, 19 nt, Artificial Sequence
  Description of Artificial Sequence: Synthetic oligonucleotide
  Sense strand starting at position 752 of SEQ ID NO: 1888459
gaguguugguagcuuuaaa

SEQ ID NO: 2535431 - RNA, 19 nt, Artificial Sequence
  Description of Artificial Sequence: Synthetic oligonucleotide
  Antisense strand to SEQ ID NO: 2535430
uuuaaagcuaccaacacuc

SEQ ID NO: 2535432 - RNA, 19 nt, Artificial Sequence
  Description of Artificial Sequence: Synthetic oligonucleotide
  Sense strand starting at position 3837 of SEQ ID NO: 1888459
uugucaauguguccacuau

SEQ ID NO: 2535433 - RNA, 19 nt, Artificial Sequence
  Description of Artificial Sequence: Synthetic oligonucleotide
  Antisense strand to SEQ ID NO: 2535432
auaguggacacauugacaa

SEQ ID NO: 2535434 - RNA, 19 nt, Artificial Sequence
  Description of Artificial Sequence: Synthetic oligonucleotide
  Sense strand starting at position 261 of SEQ ID NO: 1888458
cggcauguccuuccugcaa

SEQ ID NO: 2535435 - RNA, 19 nt, Artificial Sequence
  Description of Artificial Sequence: Synthetic oligonucleotide
  Antisense strand to SEQ ID NO: 2535434
uugcaggaaggacaugccg

SEQ ID NO: 2535436 - RNA, 19 nt, Artificial Sequence
  Description of Artificial Sequence: Synthetic oligonucleotide
  Sense strand starting at position 1417 of SEQ ID NO: 1888458
gucuuugcugucuuggcaa

SEQ ID NO: 2535437 - RNA, 19 nt, Artificial Sequence
  Description of Artificial Sequence: Synthetic oligonucleotide
  Antisense strand to SEQ ID NO: 2535436
uugccaagacagcaaagac

SEQ ID NO: 2535438 - RNA, 19 nt, Artificial Sequence
  Description of Artificial Sequence: Synthetic oligonucleotide
  Sense strand starting at position 489 of SEQ ID NO: 1888458
gugaguuagcuacaaggaa

SEQ ID NO: 2535439 - RNA, 19 nt, Artificial Sequence
  Description of Artificial Sequence: Synthetic oligonucleotide
  Antisense strand to SEQ ID NO: 2535438
uuccuuguagcuaacucac

SEQ ID NO: 2535440 - RNA, 19 nt, Artificial Sequence
  Description of Artificial Sequence: Synthetic oligonucleotide
  Sense strand starting at position 1928 of SEQ ID NO: 1888458
cuuaccuuacauuagugau

SEQ ID NO: 2535441 - RNA, 19 nt, Artificial Sequence
  Description of Artificial Sequence: Synthetic oligonucleotide
  Antisense strand to SEQ ID NO: 2535440
aucacuaauguaagguaag

SEQ ID NO: 2535442 - RNA, 19 nt, Artificial Sequence
  Description of Artificial Sequence: Synthetic oligonucleotide
  Sense strand starting at position 2247 of SEQ ID NO: 1888458
gucaauuaagcucagacca

SEQ ID NO: 2535443 - RNA, 19 nt, Artificial Sequence
  Description of Artificial Sequence: Synthetic oligonucleotide
  Antisense strand to SEQ ID NO: 2535442
uggucugagcuuaauugac

SEQ ID NO: 2535444 - RNA, 19 nt, Artificial Sequence
  Description of Artificial Sequence: Synthetic oligonucleotide
  Sense strand starting at position 90 of SEQ ID NO: 1888458
gguggaucuagacauuguu

SEQ ID NO: 2535445 - RNA, 19 nt, Artificial Sequence
  Description of Artificial Sequence: Synthetic oligonucleotide
  Antisense strand to SEQ ID NO: 2535444
aacaaugucuagauccacc

SEQ ID NO: 2535446 - RNA, 19 nt, Artificial Sequence
  Description of Artificial Sequence: Synthetic oligonucleotide
  Sense strand starting at position 1566 of SEQ ID NO: 1888458
gaacuagaaguucgagauc

SEQ ID NO: 2535447 - RNA, 19 nt, Artificial Sequence
  Description of Artificial Sequence: Synthetic oligonucleotide
  Antisense strand to SEQ ID NO: 2535446
gaucucgaacuucuaguuc

SEQ ID NO: 2535448 - RNA, 19 nt, Artificial Sequence
  Description of Artificial Sequence: Synthetic oligonucleotide
  Sense strand starting at position 519 of SEQ ID NO: 1888458
gaaagagaguuccaauuug

SEQ ID NO: 2535449 - RNA, 19 nt, Artificial Sequence
  Description of Artificial Sequence: Synthetic oligonucleotide
  Antisense strand to SEQ ID NO: 2535448
caaauuggaacucucuuuc

SEQ ID NO: 2535450 - RNA, 19 nt, Artificial Sequence
  Description of Artificial Sequence: Synthetic oligonucleotide
  Sense strand starting at position 3442 of SEQ ID NO: 1888458
gcaguucuucuagaacaua

SEQ ID NO: 2535451 - RNA, 19 nt, Artificial Sequence
  Description of Artificial Sequence: Synthetic oligonucleotide
  Antisense strand to SEQ ID NO: 2535450
uauguucuagaagaacugc

SEQ ID NO: 2535452 - RNA, 19 nt, Artificial Sequence
  Description of Artificial Sequence: Synthetic oligonucleotide
  Sense strand starting at position 478 of SEQ ID NO: 1888458
aaguuaggagagugaguua

SEQ ID NO: 2535453 - RNA, 19 nt, Artificial Sequence
  Description of Artificial Sequence: Synthetic oligonucleotide
  Antisense strand to SEQ ID NO: 2535452
uaacucacucuccuaacuu

SEQ ID NO: 2535454 - RNA, 19 nt, Artificial Sequence
  Description of Artificial Sequence: Synthetic oligonucleotide
  Sense strand starting at position 300 of SEQ ID NO: 1888458
ugcugagugguuuaggaaa

SEQ ID NO: 2535455 - RNA, 19 nt, Artificial Sequence
  Description of Artificial Sequence: Synthetic oligonucleotide
  Antisense strand to SEQ ID NO: 2535454
uuuccuaaaccacucagca

SEQ ID NO: 2535456 - RNA, 19 nt, Artificial Sequence
  Description of Artificial Sequence: Synthetic oligonucleotide
  Sense strand starting at position 34 of SEQ ID NO: 1888458
uugcauaguggguagauga

SEQ ID NO: 2535457 - RNA, 19 nt, Artificial Sequence
  Description of Artificial Sequence: Synthetic oligonucleotide
  Antisense strand to SEQ ID NO: 2535456
ucaucuacccacuaugcaa

SEQ ID NO: 2535458 - RNA, 19 nt, Artificial Sequence
  Description of Artificial Sequence: Synthetic oligonucleotide
  Sense strand starting at position 958 of SEQ ID NO: 1888458
gucagaucaccgcagaaca

SEQ ID NO: 2535459 - RNA, 19 nt, Artificial Sequence
  Description of Artificial Sequence: Synthetic oligonucleotide
  Antisense strand to SEQ ID NO: 2535458
uguucugcggugaucugac

SEQ ID NO: 2535460 - RNA, 19 nt, Artificial Sequence
  Description of Artificial Sequence: Synthetic oligonucleotide
  Sense strand starting at position 166 of SEQ ID NO: 1888458
gcaguuugggaggagcaua

SEQ ID NO: 2535461 - RNA, 19 nt, Artificial Sequence
  Description of Artificial Sequence: Synthetic oligonucleotide
  Antisense strand to SEQ ID NO: 2535460
uaugcuccucccaaacugc

SEQ ID NO: 2535462 - RNA, 19 nt, Artificial Sequence
  Description of Artificial Sequence: Synthetic oligonucleotide
  Sense strand starting at position 41 of SEQ ID NO: 1888458
guggguagaugagcauaaa

SEQ ID NO: 2535463 - RNA, 19 nt, Artificial Sequence
  Description of Artificial Sequence: Synthetic oligonucleotide
  Antisense strand to SEQ ID NO: 2535462
uuuaugcucaucuacccac

SEQ ID NO: 2535464 - RNA, 19 nt, Artificial Sequence
  Description of Artificial Sequence: Synthetic oligonucleotide
  Sense strand starting at position 2460 of SEQ ID NO: 1888458
cuuugauaccggugagaag

SEQ ID NO: 2535465 - RNA, 19 nt, Artificial Sequence
  Description of Artificial Sequence: Synthetic oligonucleotide
  Antisense strand to SEQ ID NO: 2535464
cuucucaccgguaucaaag

SEQ ID NO: 2535466 - RNA, 19 nt, Artificial Sequence
  Description of Artificial Sequence: Synthetic oligonucleotide
  Sense strand starting at position 3244 of SEQ ID NO: 1888458
gcaguugucagagagaccu

SEQ ID NO: 2535467 - RNA, 19 nt, Artificial Sequence
  Description of Artificial Sequence: Synthetic oligonucleotide
  Antisense strand to SEQ ID NO: 2535466
aggucucucugacaacugc

SEQ ID NO: 2535468 - RNA, 19 nt, Artificial Sequence
  Description of Artificial Sequence: Synthetic oligonucleotide
  Sense strand starting at position 3375 of SEQ ID NO: 1888458
ugcaaagggucuccagaua

SEQ ID NO: 2535469 - RNA, 19 nt, Artificial Sequence
  Description of Artificial Sequence: Synthetic oligonucleotide
  Antisense strand to SEQ ID NO: 2535468
uaucuggagacccuuugca

SEQ ID NO: 2535470 - RNA, 19 nt, Artificial Sequence
  Description of Artificial Sequence: Synthetic oligonucleotide
  Sense strand starting at position 1383 of SEQ ID NO: 1888458
gcagaucaggccugauaaa

SEQ ID NO: 2535471 - RNA, 19 nt, Artificial Sequence
  Description of Artificial Sequence: Synthetic oligonucleotide
  Antisense strand to SEQ ID NO: 2535470
uuuaucaggccugaucugc

SEQ ID NO: 2535472 - RNA, 19 nt, Artificial Sequence
  Description of Artificial Sequence: Synthetic oligonucleotide
  Sense strand starting at position 485 of SEQ ID NO: 1888458
gagagugaguuagcuacaa

SEQ ID NO: 2535473 - RNA, 19 nt, Artificial Sequence
  Description of Artificial Sequence: Synthetic oligonucleotide
  Antisense strand to SEQ ID NO: 2535472
uuguagcuaacucacucuc

SEQ ID NO: 2535474 - RNA, 19 nt, Artificial Sequence
  Description of Artificial Sequence: Synthetic oligonucleotide
  Sense strand starting at position 2042 of SEQ ID NO: 1888458
augaaucaggcuuggcaga

SEQ ID NO: 2535475 - RNA, 19 nt, Artificial Sequence
  Description of Artificial Sequence: Synthetic oligonucleotide
  Antisense strand to SEQ ID NO: 2535474
ucugccaagccugauucau

SEQ ID NO: 2535476 - RNA, 19 nt, Artificial Sequence
  Description of Artificial Sequence: Synthetic oligonucleotide
  Sense strand starting at position 337 of SEQ ID NO: 1888458
cuugaaugcugauuccaca

SEQ ID NO: 2535477 - RNA, 19 nt, Artificial Sequence
  Description of Artificial Sequence: Synthetic oligonucleotide
  Antisense strand to SEQ ID NO: 2535476
uguggaaucagcauucaag

SEQ ID NO: 2535478 - RNA, 19 nt, Artificial Sequence
  Description of Artificial Sequence: Synthetic oligonucleotide
  Sense strand starting at position 3438 of SEQ ID NO: 1888458
cagagcaguucuucuagaa

SEQ ID NO: 2535479 - RNA, 19 nt, Artificial Sequence
  Description of Artificial Sequence: Synthetic oligonucleotide
  Antisense strand to SEQ ID NO: 2535478
uucuagaagaacugcucug

SEQ ID NO: 2535480 - RNA, 19 nt, Artificial Sequence
  Description of Artificial Sequence: Synthetic oligonucleotide
  Sense strand starting at position 1639 of SEQ ID NO: 1888458
gggcgaucacuucagguca

SEQ ID NO: 2535481 - RNA, 19 nt, Artificial Sequence
  Description of Artificial Sequence: Synthetic oligonucleotide
  Antisense strand to SEQ ID NO: 2535480
ugaccugaagugaucgccc

SEQ ID NO: 2535482 - RNA, 19 nt, Artificial Sequence
  Description of Artificial Sequence: Synthetic oligonucleotide
  Sense strand starting at position 2359 of SEQ ID NO: 1888458
cgugaagacaccuguuaaa

SEQ ID NO: 2535483 - RNA, 19 nt, Artificial Sequence
  Description of Artificial Sequence: Synthetic oligonucleotide
  Antisense strand to SEQ ID NO: 2535482
uuuaacaggugucuucacg

SEQ ID NO: 2535484 - RNA, 19 nt, Artificial Sequence
  Description of Artificial Sequence: Synthetic oligonucleotide
  Sense strand starting at position 121 of SEQ ID NO: 1888458
ucacauuccugggcuguaa

SEQ ID NO: 2535485 - RNA, 19 nt, Artificial Sequence
  Description of Artificial Sequence: Synthetic oligonucleotide
  Antisense strand to SEQ ID NO: 2535484
uuacagcccaggaauguga

SEQ ID NO: 2535486 - RNA, 19 nt, Artificial Sequence
  Description of Artificial Sequence: Synthetic oligonucleotide
  Sense strand starting at position 2908 of SEQ ID NO: 1888458
gcaguuagugcaggaacaa

SEQ ID NO: 2535487 - RNA, 19 nt, Artificial Sequence
  Description of Artificial Sequence: Synthetic oligonucleotide
  Antisense strand to SEQ ID NO: 2535486
uuguuccugcacuaacugc

SEQ ID NO: 2535488 - RNA, 19 nt, Artificial Sequence
  Description of Artificial Sequence: Synthetic oligonucleotide
  Sense strand starting at position 655 of SEQ ID NO: 1888458
gcaagugugacucaguuuc

SEQ ID NO: 2535489 - RNA, 19 nt, Artificial Sequence
  Description of Artificial Sequence: Synthetic oligonucleotide
  Antisense strand to SEQ ID NO: 2535488
gaaacugagucacacuugc

SEQ ID NO: 2535490 - RNA, 19 nt, Artificial Sequence
  Description of Artificial Sequence: Synthetic oligonucleotide
  Sense strand starting at position 308 of SEQ ID NO: 1888458
gguuuaggaaagugugcau

SEQ ID NO: 2535491 - RNA, 19 nt, Artificial Sequence
  Description of Artificial Sequence: Synthetic oligonucleotide
  Antisense strand to SEQ ID NO: 2535490
augcacacuuuccuaaacc

SEQ ID NO: 2535492 - RNA, 19 nt, Artificial Sequence
  Description of Artificial Sequence: Synthetic oligonucleotide
  Sense strand starting at position 331 of SEQ ID NO: 1888458
gcacuucuugaaugcugau

SEQ ID NO: 2535493 - RNA, 19 nt, Artificial Sequence
  Description of Artificial Sequence: Synthetic oligonucleotide
  Antisense strand to SEQ ID NO: 2535492
aucagcauucaagaagugc

SEQ ID NO: 2535494 - RNA, 19 nt, Artificial Sequence
  Description of Artificial Sequence: Synthetic oligonucleotide
  Sense strand starting at position 120 of SEQ ID NO: 1888458
cucacauuccugggcugua

SEQ ID NO: 2535495 - RNA, 19 nt, Artificial Sequence
  Description of Artificial Sequence: Synthetic oligonucleotide
  Antisense strand to SEQ ID NO: 2535494
uacagcccaggaaugugag

SEQ ID NO: 2535496 - RNA, 19 nt, Artificial Sequence
  Description of Artificial Sequence: Synthetic oligonucleotide
  Sense strand starting at position 3237 of SEQ ID NO: 1888458
uuaggacgcaguugucaga

SEQ ID NO: 2535497 - RNA, 19 nt, Artificial Sequence
  Description of Artificial Sequence: Synthetic oligonucleotide
  Antisense strand to SEQ ID NO: 2535496
ucugacaacugcguccuaa

SEQ ID NO: 2535498 - RNA, 19 nt, Artificial Sequence
  Description of Artificial Sequence: Synthetic oligonucleotide
  Sense strand starting at position 298 of SEQ ID NO: 1888458
guugcugagugguuuagga

SEQ ID NO: 2535499 - RNA, 19 nt, Artificial Sequence
  Description of Artificial Sequence: Synthetic oligonucleotide
  Antisense strand to SEQ ID NO: 2535498
uccuaaaccacucagcaac

SEQ ID NO: 2535500 - RNA, 19 nt, Artificial Sequence
  Description of Artificial Sequence: Synthetic oligonucleotide
  Sense strand starting at position 653 of SEQ ID NO: 1888458
uagcaagugugacucaguu

SEQ ID NO: 2535501 - RNA, 19 nt, Artificial Sequence
  Description of Artificial Sequence: Synthetic oligonucleotide
  Antisense strand to SEQ ID NO: 2535500
aacugagucacacuugcua

SEQ ID NO: 2535502 - RNA, 19 nt, Artificial Sequence
  Description of Artificial Sequence: Synthetic oligonucleotide
  Sense strand starting at position 2348 of SEQ ID NO: 1888458
acggaacgcuccgugaaga

SEQ ID NO: 2535503 - RNA, 19 nt, Artificial Sequence
  Description of Artificial Sequence: Synthetic oligonucleotide
  Antisense strand to SEQ ID NO: 2535502
ucuucacggagcguuccgu

SEQ ID NO: 2535504 - RNA, 19 nt, Artificial Sequence
  Description of Artificial Sequence: Synthetic oligonucleotide
  Sense strand starting at position 1931 of SEQ ID NO: 1888458
accuuacauuagugauuuc

SEQ ID NO: 2535505 - RNA, 19 nt, Artificial Sequence
  Description of Artificial Sequence: Synthetic oligonucleotide
  Antisense strand to SEQ ID NO: 2535504
gaaaucacuaauguaaggu

SEQ ID NO: 2535506 - RNA, 19 nt, Artificial Sequence
  Description of Artificial Sequence: Synthetic oligonucleotide
  Sense strand starting at position 453 of SEQ ID NO: 1888458
agagcagugccggguugaa

SEQ ID NO: 2535507 - RNA, 19 nt, Artificial Sequence
  Description of Artificial Sequence: Synthetic oligonucleotide
  Antisense strand to SEQ ID NO: 2535506
uucaacccggcacugcucu

SEQ ID NO: 2535508 - RNA, 19 nt, Artificial Sequence
  Description of Artificial Sequence: Synthetic oligonucleotide
  Sense strand starting at position 2065 of SEQ ID NO: 1888458
ccugcacucuguuugcaaa

SEQ ID NO: 2535509 - RNA, 19 nt, Artificial Sequence
  Description of Artificial Sequence: Synthetic oligonucleotide
  Antisense strand to SEQ ID NO: 2535508
uuugcaaacagagugcagg

SEQ ID NO: 2535510 - RNA, 19 nt, Artificial Sequence
  Description of Artificial Sequence: Synthetic oligonucleotide
  Sense strand starting at position 648 of SEQ ID NO: 1888458
ggcucuagcaagugugacu

SEQ ID NO: 2535511 - RNA, 19 nt, Artificial Sequence
  Description of Artificial Sequence: Synthetic oligonucleotide
  Antisense strand to SEQ ID NO: 2535510
agucacacuugcuagagcc

SEQ ID NO: 2535512 - RNA, 19 nt, Artificial Sequence
  Description of Artificial Sequence: Synthetic oligonucleotide
  Sense strand starting at position 2213 of SEQ ID NO: 1888458
guaauaauaucaggaaacc

SEQ ID NO: 2535513 - RNA, 19 nt, Artificial Sequence
  Description of Artificial Sequence: Synthetic oligonucleotide
  Antisense strand to SEQ ID NO: 2535512
gguuuccugauauuauuac

SEQ ID NO: 2535514 - RNA, 19 nt, Artificial Sequence
  Description of Artificial Sequence: Synthetic oligonucleotide
  Sense strand starting at position 3251 of SEQ ID NO: 1888460
agcuuaggaaacuggauau

SEQ ID NO: 2535515 - RNA, 19 nt, Artificial Sequence
  Description of Artificial Sequence: Synthetic oligonucleotide
  Antisense strand to SEQ ID NO: 2535514
auauccaguuuccuaagcu

SEQ ID NO: 2535516 - RNA, 19 nt, Artificial Sequence
  Description of Artificial Sequence: Synthetic oligonucleotide
  Sense strand starting at position 754 of SEQ ID NO: 1888460
ugauacaaacguuaaguga

SEQ ID NO: 2535517 - RNA, 19 nt, Artificial Sequence
  Description of Artificial Sequence: Synthetic oligonucleotide
  Antisense strand to SEQ ID NO: 2535516
ucacuuaacguuuguauca

SEQ ID NO: 2535518 - RNA, 19 nt, Artificial Sequence
  Description of Artificial Sequence: Synthetic oligonucleotide
  Sense strand starting at position 1092 of SEQ ID NO: 1888460
aggccaugaugacuggaau

SEQ ID NO: 2535519 - RNA, 19 nt, Artificial Sequence
  Description of Artificial Sequence: Synthetic oligonucleotide
  Antisense strand to SEQ ID NO: 2535518
auuccagucaucauggccu

SEQ ID NO: 2535520 - RNA, 19 nt, Artificial Sequence
  Description of Artificial Sequence: Synthetic oligonucleotide
  Sense strand starting at position 1244 of SEQ ID NO: 1888460
cguguucaucggcuacuga

SEQ ID NO: 2535521 - RNA, 19 nt, Artificial Sequence
  Description of Artificial Sequence: Synthetic oligonucleotide
  Antisense strand to SEQ ID NO: 2535520
ucaguagccgaugaacacg

SEQ ID NO: 2535522 - RNA, 19 nt, Artificial Sequence
  Description of Artificial Sequence: Synthetic oligonucleotide
  Sense strand starting at position 499 of SEQ ID NO: 1888460
aaacgauggacucggacaa

SEQ ID NO: 2535523 - RNA, 19 nt, Artificial Sequence
  Description of Artificial Sequence: Synthetic oligonucleotide
  Antisense strand to SEQ ID NO: 2535522
uuguccgaguccaucguuu

SEQ ID NO: 2535524 - RNA, 19 nt, Artificial Sequence
  Description of Artificial Sequence: Synthetic oligonucleotide
  Sense strand starting at position 3490 of SEQ ID NO: 1888460
cuguaaauaggguaauagu

SEQ ID NO: 2535525 - RNA, 19 nt, Artificial Sequence
  Description of Artificial Sequence: Synthetic oligonucleotide
  Antisense strand to SEQ ID NO: 2535524
acuauuacccuauuuacag

SEQ ID NO: 2535526 - RNA, 19 nt, Artificial Sequence
  Description of Artificial Sequence: Synthetic oligonucleotide
  Sense strand starting at position 2655 of SEQ ID NO: 1888460
cgcuucguggugguauaaa

SEQ ID NO: 2535527 - RNA, 19 nt, Artificial Sequence
  Description of Artificial Sequence: Synthetic oligonucleotide
  Antisense strand to SEQ ID NO: 2535526
uuuauaccaccacgaagcg

SEQ ID NO: 2535528 - RNA, 19 nt, Artificial Sequence
  Description of Artificial Sequence: Synthetic oligonucleotide
  Sense strand starting at position 3852 of SEQ ID NO: 1888460
uaguuacuuguugaggaca

SEQ ID NO: 2535529 - RNA, 19 nt, Artificial Sequence
  Description of Artificial Sequence: Synthetic oligonucleotide
  Antisense strand to SEQ ID NO: 2535528
uguccucaacaaguaacua

SEQ ID NO: 2535530 - RNA, 19 nt, Artificial Sequence
  Description of Artificial Sequence: Synthetic oligonucleotide
  Sense strand starting at position 1326 of SEQ ID NO: 1888460
gugaacaauccacgacaaa

SEQ ID NO: 2535531 - RNA, 19 nt, Artificial Sequence
  Description of Artificial Sequence: Synthetic oligonucleotide
  Antisense strand to SEQ ID NO: 2535530
uuugucguggauuguucac

SEQ ID NO: 2535532 - RNA, 19 nt, Artificial Sequence
  Description of Artificial Sequence: Synthetic oligonucleotide
  Sense strand starting at position 1024 of SEQ ID NO: 1888460
gugauaauagcauauguaa

SEQ ID NO: 2535533 - RNA, 19 nt, Artificial Sequence
  Description of Artificial Sequence: Synthetic oligonucleotide
  Antisense strand to SEQ ID NO: 2535532
uuacauaugcuauuaucac

SEQ ID NO: 2535534 - RNA, 19 nt, Artificial Sequence
  Description of Artificial Sequence: Synthetic oligonucleotide
  Sense strand starting at position 542 of SEQ ID NO: 1888460
gcauacguguuuacggaga

SEQ ID NO: 2535535 - RNA, 19 nt, Artificial Sequence
  Description of Artificial Sequence: Synthetic oligonucleotide
  Antisense strand to SEQ ID NO: 2535534
ucuccguaaacacguaugc

SEQ ID NO: 2535536 - RNA, 19 nt, Artificial Sequence
  Description of Artificial Sequence: Synthetic oligonucleotide
  Sense strand starting at position 3263 of SEQ ID NO: 1888460
uggauauccuuagugagau

SEQ ID NO: 2535537 - RNA, 19 nt, Artificial Sequence
  Description of Artificial Sequence: Synthetic oligonucleotide
  Antisense strand to SEQ ID NO: 2535536
aucucacuaaggauaucca

SEQ ID NO: 2535538 - RNA, 19 nt, Artificial Sequence
  Description of Artificial Sequence: Synthetic oligonucleotide
  Sense strand starting at position 1185 of SEQ ID NO: 1888460
cagggcucacuugacuauu

SEQ ID NO: 2535539 - RNA, 19 nt, Artificial Sequence
  Description of Artificial Sequence: Synthetic oligonucleotide
  Antisense strand to SEQ ID NO: 2535538
aauagucaagugagcccug

SEQ ID NO: 2535540 - RNA, 19 nt, Artificial Sequence
  Description of Artificial Sequence: Synthetic oligonucleotide
  Sense strand starting at position 500 of SEQ ID NO: 1888460
aacgauggacucggacaau

SEQ ID NO: 2535541 - RNA, 19 nt, Artificial Sequence
  Description of Artificial Sequence: Synthetic oligonucleotide
  Antisense strand to SEQ ID NO: 2535540
auuguccgaguccaucguu

SEQ ID NO: 2535542 - RNA, 19 nt, Artificial Sequence
  Description of Artificial Sequence: Synthetic oligonucleotide
  Sense strand starting at position 425 of SEQ ID NO: 1888460
gggcacuauauguaugauu

SEQ ID NO: 2535543 - RNA, 19 nt, Artificial Sequence
  Description of Artificial Sequence: Synthetic oligonucleotide
  Antisense strand to SEQ ID NO: 2535542
aaucauacauauagugccc

SEQ ID NO: 2535544 - RNA, 19 nt, Artificial Sequence
  Description of Artificial Sequence: Synthetic oligonucleotide
  Sense strand starting at position 1093 of SEQ ID NO: 1888460
ggccaugaugacuggaauu

SEQ ID NO: 2535545 - RNA, 19 nt, Artificial Sequence
  Description of Artificial Sequence: Synthetic oligonucleotide
  Antisense strand to SEQ ID NO: 2535544
aauuccagucaucauggcc

SEQ ID NO: 2535546 - RNA, 19 nt, Artificial Sequence
  Description of Artificial Sequence: Synthetic oligonucleotide
  Sense strand starting at position 3975 of SEQ ID NO: 1888460
aauagcaguuuauuaggaa

SEQ ID NO: 2535547 - RNA, 19 nt, Artificial Sequence
  Description of Artificial Sequence: Synthetic oligonucleotide
  Antisense strand to SEQ ID NO: 2535546
uuccuaauaaacugcuauu

SEQ ID NO: 2535548 - RNA, 19 nt, Artificial Sequence
  Description of Artificial Sequence: Synthetic oligonucleotide
  Sense strand starting at position 3331 of SEQ ID NO: 1888460
gguuaacuggucuauuaug

SEQ ID NO: 2535549 - RNA, 19 nt, Artificial Sequence
  Description of Artificial Sequence: Synthetic oligonucleotide
  Antisense strand to SEQ ID NO: 2535548
cauaauagaccaguuaacc

SEQ ID NO: 2535550 - RNA, 19 nt, Artificial Sequence
  Description of Artificial Sequence: Synthetic oligonucleotide
  Sense strand starting at position 1324 of SEQ ID NO: 1888460
ccgugaacaauccacgaca

SEQ ID NO: 2535551 - RNA, 19 nt, Artificial Sequence
  Description of Artificial Sequence: Synthetic oligonucleotide
  Antisense strand to SEQ ID NO: 2535550
ugucguggauuguucacgg

SEQ ID NO: 2535552 - RNA, 19 nt, Artificial Sequence
  Description of Artificial Sequence: Synthetic oligonucleotide
  Sense strand starting at position 3320 of SEQ ID NO: 1888460
uaggacuccuggguuaacu

SEQ ID NO: 2535553 - RNA, 19 nt, Artificial Sequence
  Description of Artificial Sequence: Synthetic oligonucleotide
  Antisense strand to SEQ ID NO: 2535552
aguuaacccaggaguccua

SEQ ID NO: 2535554 - RNA, 19 nt, Artificial Sequence
  Description of Artificial Sequence: Synthetic oligonucleotide
  Sense strand starting at position 853 of SEQ ID NO: 1888460
agaggagguugcucuaaau

SEQ ID NO: 2535555 - RNA, 19 nt, Artificial Sequence
  Description of Artificial Sequence: Synthetic oligonucleotide
  Antisense strand to SEQ ID NO: 2535554
auuuagagcaaccuccucu

SEQ ID NO: 2535556 - RNA, 19 nt, Artificial Sequence
  Description of Artificial Sequence: Synthetic oligonucleotide
  Sense strand starting at position 751 of SEQ ID NO: 1888460
aggugauacaaacguuaag

SEQ ID NO: 2535557 - RNA, 19 nt, Artificial Sequence
  Description of Artificial Sequence: Synthetic oligonucleotide
  Antisense strand to SEQ ID NO: 2535556
cuuaacguuuguaucaccu

SEQ ID NO: 2535558 - RNA, 19 nt, Artificial Sequence
  Description of Artificial Sequence: Synthetic oligonucleotide
  Sense strand starting at position 3319 of SEQ ID NO: 1888460
uuaggacuccuggguuaac

SEQ ID NO: 2535559 - RNA, 19 nt, Artificial Sequence
  Description of Artificial Sequence: Synthetic oligonucleotide
  Antisense strand to SEQ ID NO: 2535558
guuaacccaggaguccuaa

SEQ ID NO: 2535560 - RNA, 19 nt, Artificial Sequence
  Description of Artificial Sequence: Synthetic oligonucleotide
  Sense strand starting at position 2837 of SEQ ID NO: 1888460
gugauuguucuuuaauugg

SEQ ID NO: 2535561 - RNA, 19 nt, Artificial Sequence
  Description of Artificial Sequence: Synthetic oligonucleotide
  Antisense strand to SEQ ID NO: 2535560
ccaauuaaagaacaaucac

SEQ ID NO: 2535562 - RNA, 19 nt, Artificial Sequence
  Description of Artificial Sequence: Synthetic oligonucleotide
  Sense strand starting at position 1158 of SEQ ID NO: 1888460
guugaauuuacccgguugu

SEQ ID NO: 2535563 - RNA, 19 nt, Artificial Sequence
  Description of Artificial Sequence: Synthetic oligonucleotide
  Antisense strand to SEQ ID NO: 2535562
acaaccggguaaauucaac

SEQ ID NO: 2535564 - RNA, 19 nt, Artificial Sequence
  Description of Artificial Sequence: Synthetic oligonucleotide
  Sense strand starting at position 2998 of SEQ ID NO: 1888460
caugacaucgccugcauuu

SEQ ID NO: 2535565 - RNA, 19 nt, Artificial Sequence
  Description of Artificial Sequence: Synthetic oligonucleotide
  Antisense strand to SEQ ID NO: 2535564
aaaugcaggcgaugucaug

SEQ ID NO: 2535566 - RNA, 19 nt, Artificial Sequence
  Description of Artificial Sequence: Synthetic oligonucleotide
  Sense strand starting at position 3646 of SEQ ID NO: 1888460
cgaauuaaauacuuagcca

SEQ ID NO: 2535567 - RNA, 19 nt, Artificial Sequence
  Description of Artificial Sequence: Synthetic oligonucleotide
  Antisense strand to SEQ ID NO: 2535566
uggcuaaguauuuaauucg

SEQ ID NO: 2535568 - RNA, 19 nt, Artificial Sequence
  Description of Artificial Sequence: Synthetic oligonucleotide
  Sense strand starting at position 2816 of SEQ ID NO: 1888460
agccuuuaauaagcagaau

SEQ ID NO: 2535569 - RNA, 19 nt, Artificial Sequence
  Description of Artificial Sequence: Synthetic oligonucleotide
  Antisense strand to SEQ ID NO: 2535568
auucugcuuauuaaaggcu

SEQ ID NO: 2535570 - RNA, 19 nt, Artificial Sequence
  Description of Artificial Sequence: Synthetic oligonucleotide
  Sense strand starting at position 3850 of SEQ ID NO: 1888460
uauaguuacuuguugagga

SEQ ID NO: 2535571 - RNA, 19 nt, Artificial Sequence
  Description of Artificial Sequence: Synthetic oligonucleotide
  Antisense strand to SEQ ID NO: 2535570
uccucaacaaguaacuaua

SEQ ID NO: 2535572 - RNA, 19 nt, Artificial Sequence
  Description of Artificial Sequence: Synthetic oligonucleotide
  Sense strand starting at position 873 of SEQ ID NO: 1888460
aagugacacgucuaaaugu

SEQ ID NO: 2535573 - RNA, 19 nt, Artificial Sequence
  Description of Artificial Sequence: Synthetic oligonucleotide
  Antisense strand to SEQ ID NO: 2535572
acauuuagacgugucacuu

SEQ ID NO: 2535574 - RNA, 19 nt, Artificial Sequence
  Description of Artificial Sequence: Synthetic oligonucleotide
  Sense strand starting at position 1264 of SEQ ID NO: 1888460
acaucaugcuaauugaagu

SEQ ID NO: 2535575 - RNA, 19 nt, Artificial Sequence
  Description of Artificial Sequence: Synthetic oligonucleotide
  Antisense strand to SEQ ID NO: 2535574
acuucaauuagcaugaugu

SEQ ID NO: 2535576 - RNA, 19 nt, Artificial Sequence
  Description of Artificial Sequence: Synthetic oligonucleotide
  Sense strand starting at position 1056 of SEQ ID NO: 1888460
acguuugagauguauucug

SEQ ID NO: 2535577 - RNA, 19 nt, Artificial Sequence
  Description of Artificial Sequence: Synthetic oligonucleotide
  Antisense strand to SEQ ID NO: 2535576
cagaauacaucucaaacgu

SEQ ID NO: 2535578 - RNA, 19 nt, Artificial Sequence
  Description of Artificial Sequence: Synthetic oligonucleotide
  Sense strand starting at position 2678 of SEQ ID NO: 1888460
agaccuuuacucuggcaau

SEQ ID NO: 2535579 - RNA, 19 nt, Artificial Sequence
  Description of Artificial Sequence: Synthetic oligonucleotide
  Antisense strand to SEQ ID NO: 2535578
auugccagaguaaaggucu

SEQ ID NO: 2535580 - RNA, 19 nt, Artificial Sequence
  Description of Artificial Sequence: Synthetic oligonucleotide
  Sense strand starting at position 1104 of SEQ ID NO: 1888460
cuggaauucgcuuaggagu

SEQ ID NO: 2535581 - RNA, 19 nt, Artificial Sequence
  Description of Artificial Sequence: Synthetic oligonucleotide
  Antisense strand to SEQ ID NO: 2535580
acuccuaagcgaauuccag

SEQ ID NO: 2535582 - RNA, 19 nt, Artificial Sequence
  Description of Artificial Sequence: Synthetic oligonucleotide
  Sense strand starting at position 3329 of SEQ ID NO: 1888460
uggguuaacuggucuauua

SEQ ID NO: 2535583 - RNA, 19 nt, Artificial Sequence
  Description of Artificial Sequence: Synthetic oligonucleotide
  Antisense strand to SEQ ID NO: 2535582
uaauagaccaguuaaccca

SEQ ID NO: 2535584 - RNA, 19 nt, Artificial Sequence
  Description of Artificial Sequence: Synthetic oligonucleotide
  Sense strand starting at position 2824 of SEQ ID NO: 1888460
auaagcagaaugugugauu

SEQ ID NO: 2535585 - RNA, 19 nt, Artificial Sequence
  Description of Artificial Sequence: Synthetic oligonucleotide
  Antisense strand to SEQ ID NO: 2535584
aaucacacauucugcuuau

SEQ ID NO: 2535586 - RNA, 19 nt, Artificial Sequence
  Description of Artificial Sequence: Synthetic oligonucleotide
  Sense strand starting at position 3499 of SEQ ID NO: 1888460
ggguaauaguaauacauuu

SEQ ID NO: 2535587 - RNA, 19 nt, Artificial Sequence
  Description of Artificial Sequence: Synthetic oligonucleotide
  Antisense strand to SEQ ID NO: 2535586
aaauguauuacuauuaccc

SEQ ID NO: 2535588 - RNA, 19 nt, Artificial Sequence
  Description of Artificial Sequence: Synthetic oligonucleotide
  Sense strand starting at position 3019 of SEQ ID NO: 1888460
ugacuuugucaguagucac

SEQ ID NO: 2535589 - RNA, 19 nt, Artificial Sequence
  Description of Artificial Sequence: Synthetic oligonucleotide
  Antisense strand to SEQ ID NO: 2535588
gugacuacugacaaaguca

SEQ ID NO: 2535590 - RNA, 19 nt, Artificial Sequence
  Description of Artificial Sequence: Synthetic oligonucleotide
  Sense strand starting at position 3633 of SEQ ID NO: 1888460
aggcaaauauguucgaauu

SEQ ID NO: 2535591 - RNA, 19 nt, Artificial Sequence
  Description of Artificial Sequence: Synthetic oligonucleotide
  Antisense strand to SEQ ID NO: 2535590
aauucgaacauauuugccu

SEQ ID NO: 2535592 - RNA, 19 nt, Artificial Sequence
  Description of Artificial Sequence: Synthetic oligonucleotide
  Sense strand starting at position 3026 of SEQ ID NO: 1888460
gucaguagucacgaaggua

SEQ ID NO: 2535593 - RNA, 19 nt, Artificial Sequence
  Description of Artificial Sequence: Synthetic oligonucleotide
  Antisense strand to SEQ ID NO: 2535592
uaccuucgugacuacugac

SEQ ID NO: 2535594 - RNA, 19 nt, Artificial Sequence
  Description of Artificial Sequence: Synthetic oligonucleotide
  Sense strand starting at position 331 of SEQ ID NO: 1888461
ggccuccuugacuaacaaa

SEQ ID NO: 2535595 - RNA, 19 nt, Artificial Sequence
  Description of Artificial Sequence: Synthetic oligonucleotide
  Antisense strand to SEQ ID NO: 2535594
uuuguuagucaaggaggcc

SEQ ID NO: 2535596 - RNA, 19 nt, Artificial Sequence
  Description of Artificial Sequence: Synthetic oligonucleotide
  Sense strand starting at position 2609 of SEQ ID NO: 1888461
aggugugaacccgaacaca

SEQ ID NO: 2535597 - RNA, 19 nt, Artificial Sequence
  Description of Artificial Sequence: Synthetic oligonucleotide
  Antisense strand to SEQ ID NO: 2535596
uguguucggguucacaccu

SEQ ID NO: 2535598 - RNA, 19 nt, Artificial Sequence
  Description of Artificial Sequence: Synthetic oligonucleotide
  Sense strand starting at position 425 of SEQ ID NO: 1888461
ccugcaucggaauaaacau

SEQ ID NO: 2535599 - RNA, 19 nt, Artificial Sequence
  Description of Artificial Sequence: Synthetic oligonucleotide
  Antisense strand to SEQ ID NO: 2535598
auguuuauuccgaugcagg

SEQ ID NO: 2535600 - RNA, 19 nt, Artificial Sequence
  Description of Artificial Sequence: Synthetic oligonucleotide
  Sense strand starting at position 3678 of SEQ ID NO: 1888461
gccaccucucguuauauuu

SEQ ID NO: 2535601 - RNA, 19 nt, Artificial Sequence
  Description of Artificial Sequence: Synthetic oligonucleotide
  Antisense strand to SEQ ID NO: 2535600
aaauauaacgagagguggc

SEQ ID NO: 2535602 - RNA, 19 nt, Artificial Sequence
  Description of Artificial Sequence: Synthetic oligonucleotide
  Sense strand starting at position 3449 of SEQ ID NO: 1888461
gcgaaucguggcuuaagca

SEQ ID NO: 2535603 - RNA, 19 nt, Artificial Sequence
  Description of Artificial Sequence: Synthetic oligonucleotide
  Antisense strand to SEQ ID NO: 2535602
ugcuuaagccacgauucgc

SEQ ID NO: 2535604 - RNA, 19 nt, Artificial Sequence
  Description of Artificial Sequence: Synthetic oligonucleotide
  Sense strand starting at position 3845 of SEQ ID NO: 1888461
gguaguuggaagcauccaa

SEQ ID NO: 2535605 - RNA, 19 nt, Artificial Sequence
  Description of Artificial Sequence: Synthetic oligonucleotide
  Antisense strand to SEQ ID NO: 2535604
uuggaugcuuccaacuacc

SEQ ID NO: 2535606 - RNA, 19 nt, Artificial Sequence
  Description of Artificial Sequence: Synthetic oligonucleotide
  Sense strand starting at position 2398 of SEQ ID NO: 1888461
guacguuaaccacacuaga

SEQ ID NO: 2535607 - RNA, 19 nt, Artificial Sequence
  Description of Artificial Sequence: Synthetic oligonucleotide
  Antisense strand to SEQ ID NO: 2535606
ucuagugugguuaacguac

SEQ ID NO: 2535608 - RNA, 19 nt, Artificial Sequence
  Description of Artificial Sequence: Synthetic oligonucleotide
  Sense strand starting at position 2553 of SEQ ID NO: 1888461
cuaaauagugacggacauu

SEQ ID NO: 2535609 - RNA, 19 nt, Artificial Sequence
  Description of Artificial Sequence: Synthetic oligonucleotide
  Antisense strand to SEQ ID NO: 2535608
aauguccgucacuauuuag

SEQ ID NO: 2535610 - RNA, 19 nt, Artificial Sequence
  Description of Artificial Sequence: Synthetic oligonucleotide
  Sense strand starting at position 3533 of SEQ ID NO: 1888461
cuucuugaguaaccagauu

SEQ ID NO: 2535611 - RNA, 19 nt, Artificial Sequence
  Description of Artificial Sequence: Synthetic oligonucleotide
  Antisense strand to SEQ ID NO: 2535610
aaucugguuacucaagaag

SEQ ID NO: 2535612 - RNA, 19 nt, Artificial Sequence
  Description of Artificial Sequence: Synthetic oligonucleotide
  Sense strand starting at position 551 of SEQ ID NO: 1888461
ggucaacccuaauuguaag

SEQ ID NO: 2535613 - RNA, 19 nt, Artificial Sequence
  Description of Artificial Sequence: Synthetic oligonucleotide
  Antisense strand to SEQ ID NO: 2535612
cuuacaauuaggguugacc

SEQ ID NO: 2535614 - RNA, 19 nt, Artificial Sequence
  Description of Artificial Sequence: Synthetic oligonucleotide
  Sense strand starting at position 643 of SEQ ID NO: 1888461
ccagcaugacauugugaaa

SEQ ID NO: 2535615 - RNA, 19 nt, Artificial Sequence
  Description of Artificial Sequence: Synthetic oligonucleotide
  Antisense strand to SEQ ID NO: 2535614
uuucacaaugucaugcugg

SEQ ID NO: 2535616 - RNA, 19 nt, Artificial Sequence
  Description of Artificial Sequence: Synthetic oligonucleotide
  Sense strand starting at position 3288 of SEQ ID NO: 1888461
agaguuucguuuguuauuu

SEQ ID NO: 2535617 - RNA, 19 nt, Artificial Sequence
  Description of Artificial Sequence: Synthetic oligonucleotide
  Antisense strand to SEQ ID NO: 2535616
aaauaacaaacgaaacucu

SEQ ID NO: 2535618 - RNA, 19 nt, Artificial Sequence
  Description of Artificial Sequence: Synthetic oligonucleotide
  Sense strand starting at position 3795 of SEQ ID NO: 1888461
aaacgcuggcucuaggaua

SEQ ID NO: 2535619 - RNA, 19 nt, Artificial Sequence
  Description of Artificial Sequence: Synthetic oligonucleotide
  Antisense strand to SEQ ID NO: 2535618
uauccuagagccagcguuu

SEQ ID NO: 2535620 - RNA, 19 nt, Artificial Sequence
  Description of Artificial Sequence: Synthetic oligonucleotide
  Sense strand starting at position 49 of SEQ ID NO: 1888461
ccggauuaauucccacacu

SEQ ID NO: 2535621 - RNA, 19 nt, Artificial Sequence
  Description of Artificial Sequence: Synthetic oligonucleotide
  Antisense strand to SEQ ID NO: 2535620
agugugggaauuaauccgg

SEQ ID NO: 2535622 - RNA, 19 nt, Artificial Sequence
  Description of Artificial Sequence: Synthetic oligonucleotide
  Sense strand starting at position 330 of SEQ ID NO: 1888461
uggccuccuugacuaacaa

SEQ ID NO: 2535623 - RNA, 19 nt, Artificial Sequence
  Description of Artificial Sequence: Synthetic oligonucleotide
  Antisense strand to SEQ ID NO: 2535622
uuguuagucaaggaggcca

SEQ ID NO: 2535624 - RNA, 19 nt, Artificial Sequence
  Description of Artificial Sequence: Synthetic oligonucleotide
  Sense strand starting at position 40 of SEQ ID NO: 1888461
auggcaguuccggauuaau

SEQ ID NO: 2535625 - RNA, 19 nt, Artificial Sequence
  Description of Artificial Sequence: Synthetic oligonucleotide
  Antisense strand to SEQ ID NO: 2535624
auuaauccggaacugccau

SEQ ID NO: 2535626 - RNA, 19 nt, Artificial Sequence
  Description of Artificial Sequence: Synthetic oligonucleotide
  Sense strand starting at position 420 of SEQ ID NO: 1888461
auaauccugcaucggaaua

SEQ ID NO: 2535627 - RNA, 19 nt, Artificial Sequence
  Description of Artificial Sequence: Synthetic oligonucleotide
  Antisense strand to SEQ ID NO: 2535626
uauuccgaugcaggauuau

SEQ ID NO: 2535628 - RNA, 19 nt, Artificial Sequence
  Description of Artificial Sequence: Synthetic oligonucleotide
  Sense strand starting at position 3587 of SEQ ID NO: 1888461
uaggcaaucguccauccaa

SEQ ID NO: 2535629 - RNA, 19 nt, Artificial Sequence
  Description of Artificial Sequence: Synthetic oligonucleotide
  Antisense strand to SEQ ID NO: 2535628
uuggauggacgauugccua

SEQ ID NO: 2535630 - RNA, 19 nt, Artificial Sequence
  Description of Artificial Sequence: Synthetic oligonucleotide
  Sense strand starting at position 3250 of SEQ ID NO: 1888461
accugauagggcuggaguu

SEQ ID NO: 2535631 - RNA, 19 nt, Artificial Sequence
  Description of Artificial Sequence: Synthetic oligonucleotide
  Antisense strand to SEQ ID NO: 2535630
aacuccagcccuaucaggu

SEQ ID NO: 2535632 - RNA, 19 nt, Artificial Sequence
  Description of Artificial Sequence: Synthetic oligonucleotide
  Sense strand starting at position 3289 of SEQ ID NO: 1888461
gaguuucguuuguuauuuc

SEQ ID NO: 2535633 - RNA, 19 nt, Artificial Sequence
  Description of Artificial Sequence: Synthetic oligonucleotide
  Antisense strand to SEQ ID NO: 2535632
gaaauaacaaacgaaacuc

SEQ ID NO: 2535634 - RNA, 19 nt, Artificial Sequence
  Description of Artificial Sequence: Synthetic oligonucleotide
  Sense strand starting at position 3341 of SEQ ID NO: 1888461
aacacuauccuucgagguu

SEQ ID NO: 2535635 - RNA, 19 nt, Artificial Sequence
  Description of Artificial Sequence: Synthetic oligonucleotide
  Antisense strand to SEQ ID NO: 2535634
aaccucgaaggauaguguu

SEQ ID NO: 2535636 - RNA, 19 nt, Artificial Sequence
  Description of Artificial Sequence: Synthetic oligonucleotide
  Sense strand starting at position 247 of SEQ ID NO: 1888461
cccauucuguuuguggaaa

SEQ ID NO: 2535637 - RNA, 19 nt, Artificial Sequence
  Description of Artificial Sequence: Synthetic oligonucleotide
  Antisense strand to SEQ ID NO: 2535636
uuuccacaaacagaauggg

SEQ ID NO: 2535638 - RNA, 19 nt, Artificial Sequence
  Description of Artificial Sequence: Synthetic oligonucleotide
  Sense strand starting at position 3705 of SEQ ID NO: 1888461
ggucucacguaacuugaga

SEQ ID NO: 2535639 - RNA, 19 nt, Artificial Sequence
  Description of Artificial Sequence: Synthetic oligonucleotide
  Antisense strand to SEQ ID NO: 2535638
ucucaaguuacgugagacc

SEQ ID NO: 2535640 - RNA, 19 nt, Artificial Sequence
  Description of Artificial Sequence: Synthetic oligonucleotide
  Sense strand starting at position 2267 of SEQ ID NO: 1888461
uuaagugagcccuggacga

SEQ ID NO: 2535641 - RNA, 19 nt, Artificial Sequence
  Description of Artificial Sequence: Synthetic oligonucleotide
  Antisense strand to SEQ ID NO: 2535640
ucguccagggcucacuuaa

SEQ ID NO: 2535642 - RNA, 19 nt, Artificial Sequence
  Description of Artificial Sequence: Synthetic oligonucleotide
  Sense strand starting at position 209 of SEQ ID NO: 1888461
uacaguugccagugaauca

SEQ ID NO: 2535643 - RNA, 19 nt, Artificial Sequence
  Description of Artificial Sequence: Synthetic oligonucleotide
  Antisense strand to SEQ ID NO: 2535642
ugauucacuggcaacugua

SEQ ID NO: 2535644 - RNA, 19 nt, Artificial Sequence
  Description of Artificial Sequence: Synthetic oligonucleotide
  Sense strand starting at position 1725 of SEQ ID NO: 1888461
cgcucuaucagucagugga

SEQ ID NO: 2535645 - RNA, 19 nt, Artificial Sequence
  Description of Artificial Sequence: Synthetic oligonucleotide
  Antisense strand to SEQ ID NO: 2535644
uccacugacugauagagcg

SEQ ID NO: 2535646 - RNA, 19 nt, Artificial Sequence
  Description of Artificial Sequence: Synthetic oligonucleotide
  Sense strand starting at position 3979 of SEQ ID NO: 1888461
auccuuuguugucugaauu

SEQ ID NO: 2535647 - RNA, 19 nt, Artificial Sequence
  Description of Artificial Sequence: Synthetic oligonucleotide
  Antisense strand to SEQ ID NO: 2535646
aauucagacaacaaaggau

SEQ ID NO: 2535648 - RNA, 19 nt, Artificial Sequence
  Description of Artificial Sequence: Synthetic oligonucleotide
  Sense strand starting at position 3308 of SEQ ID NO: 1888461
uccaaagagucagcuguuu

SEQ ID NO: 2535649 - RNA, 19 nt, Artificial Sequence
  Description of Artificial Sequence: Synthetic oligonucleotide
  Antisense strand to SEQ ID NO: 2535648
aaacagcugacucuuugga

SEQ ID NO: 2535650 - RNA, 19 nt, Artificial Sequence
  Description of Artificial Sequence: Synthetic oligonucleotide
  Sense strand starting at position 3980 of SEQ ID NO: 1888461
uccuuuguugucugaauua

SEQ ID NO: 2535651 - RNA, 19 nt, Artificial Sequence
  Description of Artificial Sequence: Synthetic oligonucleotide
  Antisense strand to SEQ ID NO: 2535650
uaauucagacaacaaagga

SEQ ID NO: 2535652 - RNA, 19 nt, Artificial Sequence
  Description of Artificial Sequence: Synthetic oligonucleotide
  Sense strand starting at position 3450 of SEQ ID NO: 1888461
cgaaucguggcuuaagcaa

SEQ ID NO: 2535653 - RNA, 19 nt, Artificial Sequence
  Description of Artificial Sequence: Synthetic oligonucleotide
  Antisense strand to SEQ ID NO: 2535652
uugcuuaagccacgauucg

SEQ ID NO: 2535654 - RNA, 19 nt, Artificial Sequence
  Description of Artificial Sequence: Synthetic oligonucleotide
  Sense strand starting at position 3774 of SEQ ID NO: 1888461
uuacuuguuugcucaauug

SEQ ID NO: 2535655 - RNA, 19 nt, Artificial Sequence
  Description of Artificial Sequence: Synthetic oligonucleotide
  Antisense strand to SEQ ID NO: 2535654
caauugagcaaacaaguaa

SEQ ID NO: 2535656 - RNA, 19 nt, Artificial Sequence
  Description of Artificial Sequence: Synthetic oligonucleotide
  Sense strand starting at position 467 of SEQ ID NO: 1888461
ggugcucuacuaugcuaaa

SEQ ID NO: 2535657 - RNA, 19 nt, Artificial Sequence
  Description of Artificial Sequence: Synthetic oligonucleotide
  Antisense strand to SEQ ID NO: 2535656
uuuagcauaguagagcacc

SEQ ID NO: 2535658 - RNA, 19 nt, Artificial Sequence
  Description of Artificial Sequence: Synthetic oligonucleotide
  Sense strand starting at position 246 of SEQ ID NO: 1888461
gcccauucuguuuguggaa

SEQ ID NO: 2535659 - RNA, 19 nt, Artificial Sequence
  Description of Artificial Sequence: Synthetic oligonucleotide
  Antisense strand to SEQ ID NO: 2535658
uuccacaaacagaaugggc

SEQ ID NO: 2535660 - RNA, 19 nt, Artificial Sequence
  Description of Artificial Sequence: Synthetic oligonucleotide
  Sense strand starting at position 687 of SEQ ID NO: 1888461
cuuagaaccugcuggauuu

SEQ ID NO: 2535661 - RNA, 19 nt, Artificial Sequence
  Description of Artificial Sequence: Synthetic oligonucleotide
  Antisense strand to SEQ ID NO: 2535660
aaauccagcagguucuaag

SEQ ID NO: 2535662 - RNA, 19 nt, Artificial Sequence
  Description of Artificial Sequence: Synthetic oligonucleotide
  Sense strand starting at position 3287 of SEQ ID NO: 1888461
aagaguuucguuuguuauu

SEQ ID NO: 2535663 - RNA, 19 nt, Artificial Sequence
  Description of Artificial Sequence: Synthetic oligonucleotide
  Antisense strand to SEQ ID NO: 2535662
aauaacaaacgaaacucuu

SEQ ID NO: 2535664 - RNA, 19 nt, Artificial Sequence
  Description of Artificial Sequence: Synthetic oligonucleotide
  Sense strand starting at position 3327 of SEQ ID NO: 1888461
gcaggugugugguuaacac

SEQ ID NO: 2535665 - RNA, 19 nt, Artificial Sequence
  Description of Artificial Sequence: Synthetic oligonucleotide
  Antisense strand to SEQ ID NO: 2535664
guguuaaccacacaccugc

SEQ ID NO: 2535666 - RNA, 19 nt, Artificial Sequence
  Description of Artificial Sequence: Synthetic oligonucleotide
  Sense strand starting at position 3677 of SEQ ID NO: 1888461
ugccaccucucguuauauu

SEQ ID NO: 2535667 - RNA, 19 nt, Artificial Sequence
  Description of Artificial Sequence: Synthetic oligonucleotide
  Antisense strand to SEQ ID NO: 2535666
aauauaacgagagguggca

SEQ ID NO: 2535668 - RNA, 19 nt, Artificial Sequence
  Description of Artificial Sequence: Synthetic oligonucleotide
  Sense strand starting at position 3815 of SEQ ID NO: 1888461
aacggaaucuuugggagag

SEQ ID NO: 2535669 - RNA, 19 nt, Artificial Sequence
  Description of Artificial Sequence: Synthetic oligonucleotide
  Antisense strand to SEQ ID NO: 2535668
cucucccaaagauuccguu

SEQ ID NO: 2535670 - RNA, 19 nt, Artificial Sequence
  Description of Artificial Sequence: Synthetic oligonucleotide
  Sense strand starting at position 3566 of SEQ ID NO: 1888461
uuugucacuuaagagaacu

SEQ ID NO: 2535671 - RNA, 19 nt, Artificial Sequence
  Description of Artificial Sequence: Synthetic oligonucleotide
  Antisense strand to SEQ ID NO: 2535670
aguucucuuaagugacaaa

SEQ ID NO: 2535672 - RNA, 19 nt, Artificial Sequence
  Description of Artificial Sequence: Synthetic oligonucleotide
  Sense strand starting at position 3324 of SEQ ID NO: 1888461
uuugcaggugugugguuaa

SEQ ID NO: 2535673 - RNA, 19 nt, Artificial Sequence
  Description of Artificial Sequence: Synthetic oligonucleotide
  Antisense strand to SEQ ID NO: 2535672
uuaaccacacaccugcaaa

SEQ ID NO: 2535674 - RNA, 19 nt, Artificial Sequence
  Description of Artificial Sequence: Synthetic oligonucleotide
  Sense strand starting at position 3218 of SEQ ID NO: 1888467
uggguaggcucuuccggaa

SEQ ID NO: 2535675 - RNA, 19 nt, Artificial Sequence
  Description of Artificial Sequence: Synthetic oligonucleotide
  Antisense strand to SEQ ID NO: 2535674
uuccggaagagccuaccca

SEQ ID NO: 2535676 - RNA, 19 nt, Artificial Sequence
  Description of Artificial Sequence: Synthetic oligonucleotide
  Sense strand starting at position 2368 of SEQ ID NO: 1888472
gugcuaauauuuguuuaag

SEQ ID NO: 2535677 - RNA, 19 nt, Artificial Sequence
  Description of Artificial Sequence: Synthetic oligonucleotide
  Antisense strand to SEQ ID NO: 2535676
cuuaaacaaauauuagcac

SEQ ID NO: 2535678 - RNA, 19 nt, Artificial Sequence
  Description of Artificial Sequence: Synthetic oligonucleotide
  Sense strand starting at position 1066 of SEQ ID NO: 1888472
agagaaagcuuccuugaau

SEQ ID NO: 2535679 - RNA, 19 nt, Artificial Sequence
  Description of Artificial Sequence: Synthetic oligonucleotide
  Antisense strand to SEQ ID NO: 2535678
auucaaggaagcuuucucu

SEQ ID NO: 2535680 - RNA, 19 nt, Artificial Sequence
  Description of Artificial Sequence: Synthetic oligonucleotide
  Sense strand starting at position 1690 of SEQ ID NO: 1888472
augaguucacaaggugaag

SEQ ID NO: 2535681 - RNA, 19 nt, Artificial Sequence
  Description of Artificial Sequence: Synthetic oligonucleotide
  Antisense strand to SEQ ID NO: 2535680
cuucaccuugugaacucau

SEQ ID NO: 2535682 - RNA, 19 nt, Artificial Sequence
  Description of Artificial Sequence: Synthetic oligonucleotide
  Sense strand starting at position 1274 of SEQ ID NO: 1888472
ugagcuuugaaucaggagu

SEQ ID NO: 2535683 - RNA, 19 nt, Artificial Sequence
  Description of Artificial Sequence: Synthetic oligonucleotide
  Antisense strand to SEQ ID NO: 2535682
acuccugauucaaagcuca

SEQ ID NO: 2535684 - RNA, 19 nt, Artificial Sequence
  Description of Artificial Sequence: Synthetic oligonucleotide
  Sense strand starting at position 3683 of SEQ ID NO: 1888472
uccauucgagacuagcaaa

SEQ ID NO: 2535685 - RNA, 19 nt, Artificial Sequence
  Description of Artificial Sequence: Synthetic oligonucleotide
  Antisense strand to SEQ ID NO: 2535684
uuugcuagucucgaaugga

SEQ ID NO: 2535686 - RNA, 19 nt, Artificial Sequence
  Description of Artificial Sequence: Synthetic oligonucleotide
  Sense strand starting at position 3908 of SEQ ID NO: 1888472
agcaucaguccugagauca

SEQ ID NO: 2535687 - RNA, 19 nt, Artificial Sequence
  Description of Artificial Sequence: Synthetic oligonucleotide
  Antisense strand to SEQ ID NO: 2535686
ugaucucaggacugaugcu

SEQ ID NO: 2535688 - RNA, 19 nt, Artificial Sequence
  Description of Artificial Sequence: Synthetic oligonucleotide
  Sense strand starting at position 3962 of SEQ ID NO: 1888472
gauuucuauuugugaugac

SEQ ID NO: 2535689 - RNA, 19 nt, Artificial Sequence
  Description of Artificial Sequence: Synthetic oligonucleotide
  Antisense strand to SEQ ID NO: 2535688
gucaucacaaauagaaauc

SEQ ID NO: 2535690 - RNA, 19 nt, Artificial Sequence
  Description of Artificial Sequence: Synthetic oligonucleotide
  Sense strand starting at position 1289 of SEQ ID NO: 1888472
gagugaugugagcauauau

SEQ ID NO: 2535691 - RNA, 19 nt, Artificial Sequence
  Description of Artificial Sequence: Synthetic oligonucleotide
  Antisense strand to SEQ ID NO: 2535690
auauaugcucacaucacuc

SEQ ID NO: 2535692 - RNA, 19 nt, Artificial Sequence
  Description of Artificial Sequence: Synthetic oligonucleotide
  Sense strand starting at position 3329 of SEQ ID NO: 1888472
gcuaguagacuccauccaa

SEQ ID NO: 2535693 - RNA, 19 nt, Artificial Sequence
  Description of Artificial Sequence: Synthetic oligonucleotide
  Antisense strand to SEQ ID NO: 2535692
uuggauggagucuacuagc

SEQ ID NO: 2535694 - RNA, 19 nt, Artificial Sequence
  Description of Artificial Sequence: Synthetic oligonucleotide
  Sense strand starting at position 1115 of SEQ ID NO: 1888472
auucccuaagcaugggaau

SEQ ID NO: 2535695 - RNA, 19 nt, Artificial Sequence
  Description of Artificial Sequence: Synthetic oligonucleotide
  Antisense strand to SEQ ID NO: 2535694
auucccaugcuuagggaau

SEQ ID NO: 2535696 - RNA, 19 nt, Artificial Sequence
  Description of Artificial Sequence: Synthetic oligonucleotide
  Sense strand starting at position 2890 of SEQ ID NO: 1888472
uguaucuuaguugaccuaa

SEQ ID NO: 2535697 - RNA, 19 nt, Artificial Sequence
  Description of Artificial Sequence: Synthetic oligonucleotide
  Antisense strand to SEQ ID NO: 2535696
uuaggucaacuaagauaca

SEQ ID NO: 2535698 - RNA, 19 nt, Artificial Sequence
  Description of Artificial Sequence: Synthetic oligonucleotide
  Sense strand starting at position 3853 of SEQ ID NO: 1888472
cguugaguauuugauuuag

SEQ ID NO: 2535699 - RNA, 19 nt, Artificial Sequence
  Description of Artificial Sequence: Synthetic oligonucleotide
  Antisense strand to SEQ ID NO: 2535698
cuaaaucaaauacucaacg

SEQ ID NO: 2535700 - RNA, 19 nt, Artificial Sequence
  Description of Artificial Sequence: Synthetic oligonucleotide
  Sense strand starting at position 2408 of SEQ ID NO: 1888472
ccucuagaacuuuggaagu

SEQ ID NO: 2535701 - RNA, 19 nt, Artificial Sequence
  Description of Artificial Sequence: Synthetic oligonucleotide
  Antisense strand to SEQ ID NO: 2535700
acuuccaaaguucuagagg

SEQ ID NO: 2535702 - RNA, 19 nt, Artificial Sequence
  Description of Artificial Sequence: Synthetic oligonucleotide
  Sense strand starting at position 3845 of SEQ ID NO: 1888472
acugaauacguugaguauu

SEQ ID NO: 2535703 - RNA, 19 nt, Artificial Sequence
  Description of Artificial Sequence: Synthetic oligonucleotide
  Antisense strand to SEQ ID NO: 2535702
aauacucaacguauucagu

SEQ ID NO: 2535704 - RNA, 19 nt, Artificial Sequence
  Description of Artificial Sequence: Synthetic oligonucleotide
  Sense strand starting at position 1854 of SEQ ID NO: 1888472
cugagaagaccugguuucu

SEQ ID NO: 2535705 - RNA, 19 nt, Artificial Sequence
  Description of Artificial Sequence: Synthetic oligonucleotide
  Antisense strand to SEQ ID NO: 2535704
agaaaccaggucuucucag

SEQ ID NO: 2535706 - RNA, 19 nt, Artificial Sequence
  Description of Artificial Sequence: Synthetic oligonucleotide
  Sense strand starting at position 3918 of SEQ ID NO: 1888472
cugagaucagcagagcgau

SEQ ID NO: 2535707 - RNA, 19 nt, Artificial Sequence
  Description of Artificial Sequence: Synthetic oligonucleotide
  Antisense strand to SEQ ID NO: 2535706
aucgcucugcugaucucag

SEQ ID NO: 2535708 - RNA, 19 nt, Artificial Sequence
  Description of Artificial Sequence: Synthetic oligonucleotide
  Sense strand starting at position 1316 of SEQ ID NO: 1888472
ugggaauuauaguuugggu

SEQ ID NO: 2535709 - RNA, 19 nt, Artificial Sequence
  Description of Artificial Sequence: Synthetic oligonucleotide
  Antisense strand to SEQ ID NO: 2535708
acccaaacuauaauuccca

SEQ ID NO: 2535710 - RNA, 19 nt, Artificial Sequence
  Description of Artificial Sequence: Synthetic oligonucleotide
  Sense strand starting at position 3738 of SEQ ID NO: 1888472
uucuaacgcccagaaguaa

SEQ ID NO: 2535711 - RNA, 19 nt, Artificial Sequence
  Description of Artificial Sequence: Synthetic oligonucleotide
  Antisense strand to SEQ ID NO: 2535710
uuacuucugggcguuagaa

SEQ ID NO: 2535712 - RNA, 19 nt, Artificial Sequence
  Description of Artificial Sequence: Synthetic oligonucleotide
  Sense strand starting at position 2480 of SEQ ID NO: 1888472
aaacuagaagccugaguuu

SEQ ID NO: 2535713 - RNA, 19 nt, Artificial Sequence
  Description of Artificial Sequence: Synthetic oligonucleotide
  Antisense strand to SEQ ID NO: 2535712
aaacucaggcuucuaguuu

SEQ ID NO: 2535714 - RNA, 19 nt, Artificial Sequence
  Description of Artificial Sequence: Synthetic oligonucleotide
  Sense strand starting at position 1116 of SEQ ID NO: 1888472
uucccuaagcaugggaauu

SEQ ID NO: 2535715 - RNA, 19 nt, Artificial Sequence
  Description of Artificial Sequence: Synthetic oligonucleotide
  Antisense strand to SEQ ID NO: 2535714
aauucccaugcuuagggaa

SEQ ID NO: 2535716 - RNA, 19 nt, Artificial Sequence
  Description of Artificial Sequence: Synthetic oligonucleotide
  Sense strand starting at position 3564 of SEQ ID NO: 1888472
gcacaugagagcugaucaa

SEQ ID NO: 2535717 - RNA, 19 nt, Artificial Sequence
  Description of Artificial Sequence: Synthetic oligonucleotide
  Antisense strand to SEQ ID NO: 2535716
uugaucagcucucaugugc

SEQ ID NO: 2535718 - RNA, 19 nt, Artificial Sequence
  Description of Artificial Sequence: Synthetic oligonucleotide
  Sense strand starting at position 750 of SEQ ID NO: 1888472
cgauaaauggcucaaguuc

SEQ ID NO: 2535719 - RNA, 19 nt, Artificial Sequence
  Description of Artificial Sequence: Synthetic oligonucleotide
  Antisense strand to SEQ ID NO: 2535718
gaacuugagccauuuaucg

SEQ ID NO: 2535720 - RNA, 19 nt, Artificial Sequence
  Description of Artificial Sequence: Synthetic oligonucleotide
  Sense strand starting at position 1500 of SEQ ID NO: 1888472
uuguaacauugccuaagga

SEQ ID NO: 2535721 - RNA, 19 nt, Artificial Sequence
  Description of Artificial Sequence: Synthetic oligonucleotide
  Antisense strand to SEQ ID NO: 2535720
uccuuaggcaauguuacaa

SEQ ID NO: 2535722 - RNA, 19 nt, Artificial Sequence
  Description of Artificial Sequence: Synthetic oligonucleotide
  Sense strand starting at position 1269 of SEQ ID NO: 1888472
acuucugagcuuugaauca

SEQ ID NO: 2535723 - RNA, 19 nt, Artificial Sequence
  Description of Artificial Sequence: Synthetic oligonucleotide
  Antisense strand to SEQ ID NO: 2535722
ugauucaaagcucagaagu

SEQ ID NO: 2535724 - RNA, 19 nt, Artificial Sequence
  Description of Artificial Sequence: Synthetic oligonucleotide
  Sense strand starting at position 1318 of SEQ ID NO: 1888472
ggaauuauaguuuggguuc

SEQ ID NO: 2535725 - RNA, 19 nt, Artificial Sequence
  Description of Artificial Sequence: Synthetic oligonucleotide
  Antisense strand to SEQ ID NO: 2535724
gaacccaaacuauaauucc

SEQ ID NO: 2535726 - RNA, 19 nt, Artificial Sequence
  Description of Artificial Sequence: Synthetic oligonucleotide
  Sense strand starting at position 3736 of SEQ ID NO: 1888472
uauucuaacgcccagaagu

SEQ ID NO: 2535727 - RNA, 19 nt, Artificial Sequence
  Description of Artificial Sequence: Synthetic oligonucleotide
  Antisense strand to SEQ ID NO: 2535726
acuucugggcguuagaaua

SEQ ID NO: 2535728 - RNA, 19 nt, Artificial Sequence
  Description of Artificial Sequence: Synthetic oligonucleotide
  Sense strand starting at position 1321 of SEQ ID NO: 1888472
auuauaguuuggguuccaa

SEQ ID NO: 2535729 - RNA, 19 nt, Artificial Sequence
  Description of Artificial Sequence: Synthetic oligonucleotide
  Antisense strand to SEQ ID NO: 2535728
uuggaacccaaacuauaau

SEQ ID NO: 2535730 - RNA, 19 nt, Artificial Sequence
  Description of Artificial Sequence: Synthetic oligonucleotide
  Sense strand starting at position 3497 of SEQ ID NO: 1888472
cugggucuuucuuuaggau

SEQ ID NO: 2535731 - RNA, 19 nt, Artificial Sequence
  Description of Artificial Sequence: Synthetic oligonucleotide
  Antisense strand to SEQ ID NO: 2535730
auccuaaagaaagacccag

SEQ ID NO: 2535732 - RNA, 19 nt, Artificial Sequence
  Description of Artificial Sequence: Synthetic oligonucleotide
  Sense strand starting at position 3844 of SEQ ID NO: 1888472
gacugaauacguugaguau

SEQ ID NO: 2535733 - RNA, 19 nt, Artificial Sequence
  Description of Artificial Sequence: Synthetic oligonucleotide
  Antisense strand to SEQ ID NO: 2535732
auacucaacguauucaguc

SEQ ID NO: 2535734 - RNA, 19 nt, Artificial Sequence
  Description of Artificial Sequence: Synthetic oligonucleotide
  Sense strand starting at position 2999 of SEQ ID NO: 1888472
cuucucucuugagcaauga

SEQ ID NO: 2535735 - RNA, 19 nt, Artificial Sequence
  Description of Artificial Sequence: Synthetic oligonucleotide
  Antisense strand to SEQ ID NO: 2535734
ucauugcucaagagagaag

SEQ ID NO: 2535736 - RNA, 19 nt, Artificial Sequence
  Description of Artificial Sequence: Synthetic oligonucleotide
  Sense strand starting at position 646 of SEQ ID NO: 1888472
uguccauugcuuuauacau

SEQ ID NO: 2535737 - RNA, 19 nt, Artificial Sequence
  Description of Artificial Sequence: Synthetic oligonucleotide
  Antisense strand to SEQ ID NO: 2535736
auguauaaagcaauggaca

SEQ ID NO: 2535738 - RNA, 19 nt, Artificial Sequence
  Description of Artificial Sequence: Synthetic oligonucleotide
  Sense strand starting at position 1285 of SEQ ID NO: 1888472
ucaggagugaugugagcau

SEQ ID NO: 2535739 - RNA, 19 nt, Artificial Sequence
  Description of Artificial Sequence: Synthetic oligonucleotide
  Antisense strand to SEQ ID NO: 2535738
augcucacaucacuccuga

SEQ ID NO: 2535740 - RNA, 19 nt, Artificial Sequence
  Description of Artificial Sequence: Synthetic oligonucleotide
  Sense strand starting at position 3950 of SEQ ID NO: 1888472
cuagcaaacugagauuucu

SEQ ID NO: 2535741 - RNA, 19 nt, Artificial Sequence
  Description of Artificial Sequence: Synthetic oligonucleotide
  Antisense strand to SEQ ID NO: 2535740
agaaaucucaguuugcuag

SEQ ID NO: 2535742 - RNA, 19 nt, Artificial Sequence
  Description of Artificial Sequence: Synthetic oligonucleotide
  Sense strand starting at position 1733 of SEQ ID NO: 1888472
guaucugagcaaugcaaag

SEQ ID NO: 2535743 - RNA, 19 nt, Artificial Sequence
  Description of Artificial Sequence: Synthetic oligonucleotide
  Antisense strand to SEQ ID NO: 2535742
cuuugcauugcucagauac

SEQ ID NO: 2535744 - RNA, 19 nt, Artificial Sequence
  Description of Artificial Sequence: Synthetic oligonucleotide
  Sense strand starting at position 3476 of SEQ ID NO: 1888472
agcugacugcugcaagauu

SEQ ID NO: 2535745 - RNA, 19 nt, Artificial Sequence
  Description of Artificial Sequence: Synthetic oligonucleotide
  Antisense strand to SEQ ID NO: 2535744
aaucuugcagcagucagcu

SEQ ID NO: 2535746 - RNA, 19 nt, Artificial Sequence
  Description of Artificial Sequence: Synthetic oligonucleotide
  Sense strand starting at position 2511 of SEQ ID NO: 1888472
gucagucaaugccuaaaua

SEQ ID NO: 2535747 - RNA, 19 nt, Artificial Sequence
  Description of Artificial Sequence: Synthetic oligonucleotide
  Antisense strand to SEQ ID NO: 2535746
uauuuaggcauugacugac

SEQ ID NO: 2535748 - RNA, 19 nt, Artificial Sequence
  Description of Artificial Sequence: Synthetic oligonucleotide
  Sense strand starting at position 1717 of SEQ ID NO: 1888472
ccugcaaaggauuguggua

SEQ ID NO: 2535749 - RNA, 19 nt, Artificial Sequence
  Description of Artificial Sequence: Synthetic oligonucleotide
  Antisense strand to SEQ ID NO: 2535748
uaccacaauccuuugcagg

SEQ ID NO: 2535750 - RNA, 19 nt, Artificial Sequence
  Description of Artificial Sequence: Synthetic oligonucleotide
  Sense strand starting at position 1726 of SEQ ID NO: 1888472
gauugugguaucugagcaa

SEQ ID NO: 2535751 - RNA, 19 nt, Artificial Sequence
  Description of Artificial Sequence: Synthetic oligonucleotide
  Antisense strand to SEQ ID NO: 2535750
uugcucagauaccacaauc

SEQ ID NO: 2535752 - RNA, 19 nt, Artificial Sequence
  Description of Artificial Sequence: Synthetic oligonucleotide
  Sense strand starting at position 1730 of SEQ ID NO: 1888472
gugguaucugagcaaugca

SEQ ID NO: 2535753 - RNA, 19 nt, Artificial Sequence
  Description of Artificial Sequence: Synthetic oligonucleotide
  Antisense strand to SEQ ID NO: 2535752
ugcauugcucagauaccac

SEQ ID NO: 2535754 - RNA, 19 nt, Artificial Sequence
  Description of Artificial Sequence: Synthetic oligonucleotide
  Sense strand starting at position 616 of SEQ ID NO: 1888472
guuaccuuguacuuauuga

SEQ ID NO: 2535755 - RNA, 19 nt, Artificial Sequence
  Description of Artificial Sequence: Synthetic oligonucleotide
  Antisense strand to SEQ ID NO: 2535754
ucaauaaguacaagguaac

SEQ ID NO: 2535756 - RNA, 19 nt, Artificial Sequence
  Description of Artificial Sequence: Synthetic oligonucleotide
  Sense strand starting at position 3494 of SEQ ID NO: 1888473
gucugcaaagacuagaauu

SEQ ID NO: 2535757 - RNA, 19 nt, Artificial Sequence
  Description of Artificial Sequence: Synthetic oligonucleotide
  Antisense strand to SEQ ID NO: 2535756
aauucuagucuuugcagac

SEQ ID NO: 2535758 - RNA, 19 nt, Artificial Sequence
  Description of Artificial Sequence: Synthetic oligonucleotide
  Sense strand starting at position 603 of SEQ ID NO: 1888473
ggaagcauacguuaaugaa

SEQ ID NO: 2535759 - RNA, 19 nt, Artificial Sequence
  Description of Artificial Sequence: Synthetic oligonucleotide
  Antisense strand to SEQ ID NO: 2535758
uucauuaacguaugcuucc

SEQ ID NO: 2535760 - RNA, 19 nt, Artificial Sequence
  Description of Artificial Sequence: Synthetic oligonucleotide
  Sense strand starting at position 1208 of SEQ ID NO: 1888473
caucucuugguagauugau

SEQ ID NO: 2535761 - RNA, 19 nt, Artificial Sequence
  Description of Artificial Sequence: Synthetic oligonucleotide
  Antisense strand to SEQ ID NO: 2535760
aucaaucuaccaagagaug

SEQ ID NO: 2535762 - RNA, 19 nt, Artificial Sequence
  Description of Artificial Sequence: Synthetic oligonucleotide
  Sense strand starting at position 481 of SEQ ID NO: 1888473
cagaaacugguuuggacua

SEQ ID NO: 2535763 - RNA, 19 nt, Artificial Sequence
  Description of Artificial Sequence: Synthetic oligonucleotide
  Antisense strand to SEQ ID NO: 2535762
uaguccaaaccaguuucug

SEQ ID NO: 2535764 - RNA, 19 nt, Artificial Sequence
  Description of Artificial Sequence: Synthetic oligonucleotide
  Sense strand starting at position 1264 of SEQ ID NO: 1888473
aguccaaaccacugagauu

SEQ ID NO: 2535765 - RNA, 19 nt, Artificial Sequence
  Description of Artificial Sequence: Synthetic oligonucleotide
  Antisense strand to SEQ ID NO: 2535764
aaucucagugguuuggacu

SEQ ID NO: 2535766 - RNA, 19 nt, Artificial Sequence
  Description of Artificial Sequence: Synthetic oligonucleotide
  Sense strand starting at position 826 of SEQ ID NO: 1888473
ccauuccuuggccauagaa

SEQ ID NO: 2535767 - RNA, 19 nt, Artificial Sequence
  Description of Artificial Sequence: Synthetic oligonucleotide
  Antisense strand to SEQ ID NO: 2535766
uucuauggccaaggaaugg

SEQ ID NO: 2535768 - RNA, 19 nt, Artificial Sequence
  Description of Artificial Sequence: Synthetic oligonucleotide
  Sense strand starting at position 2111 of SEQ ID NO: 1888473
uuguacugucgggaaagaa

SEQ ID NO: 2535769 - RNA, 19 nt, Artificial Sequence
  Description of Artificial Sequence: Synthetic oligonucleotide
  Antisense strand to SEQ ID NO: 2535768
uucuuucccgacaguacaa

SEQ ID NO: 2535770 - RNA, 19 nt, Artificial Sequence
  Description of Artificial Sequence: Synthetic oligonucleotide
  Sense strand starting at position 1009 of SEQ ID NO: 1888473
aauugacucugggugauau

SEQ ID NO: 2535771 - RNA, 19 nt, Artificial Sequence
  Description of Artificial Sequence: Synthetic oligonucleotide
  Antisense strand to SEQ ID NO: 2535770
auaucacccagagucaauu

SEQ ID NO: 2535772 - RNA, 19 nt, Artificial Sequence
  Description of Artificial Sequence: Synthetic oligonucleotide
  Sense strand starting at position 3336 of SEQ ID NO: 1888473
gacaauucuguguauccag

SEQ ID NO: 2535773 - RNA, 19 nt, Artificial Sequence
  Description of Artificial Sequence: Synthetic oligonucleotide
  Antisense strand to SEQ ID NO: 2535772
cuggauacacagaauuguc

SEQ ID NO: 2535774 - RNA, 19 nt, Artificial Sequence
  Description of Artificial Sequence: Synthetic oligonucleotide
  Sense strand starting at position 1010 of SEQ ID NO: 1888473
auugacucugggugauaua

SEQ ID NO: 2535775 - RNA, 19 nt, Artificial Sequence
  Description of Artificial Sequence: Synthetic oligonucleotide
  Antisense strand to SEQ ID NO: 2535774
uauaucacccagagucaau

SEQ ID NO: 2535776 - RNA, 19 nt, Artificial Sequence
  Description of Artificial Sequence: Synthetic oligonucleotide
  Sense strand starting at position 1124 of SEQ ID NO: 1888473
ugguauuacagauauggcu

SEQ ID NO: 2535777 - RNA, 19 nt, Artificial Sequence
  Description of Artificial Sequence: Synthetic oligonucleotide
  Antisense strand to SEQ ID NO: 2535776
agccauaucuguaauacca

SEQ ID NO: 2535778 - RNA, 19 nt, Artificial Sequence
  Description of Artificial Sequence: Synthetic oligonucleotide
  Sense strand starting at position 1877 of SEQ ID NO: 1888473
aagauaaauuagcuuggua

SEQ ID NO: 2535779 - RNA, 19 nt, Artificial Sequence
  Description of Artificial Sequence: Synthetic oligonucleotide
  Antisense strand to SEQ ID NO: 2535778
uaccaagcuaauuuaucuu

SEQ ID NO: 2535780 - RNA, 19 nt, Artificial Sequence
  Description of Artificial Sequence: Synthetic oligonucleotide
  Sense strand starting at position 1897 of SEQ ID NO: 1888473
gaaggugaagcuuacaugu

SEQ ID NO: 2535781 - RNA, 19 nt, Artificial Sequence
  Description of Artificial Sequence: Synthetic oligonucleotide
  Antisense strand to SEQ ID NO: 2535780
acauguaagcuucaccuuc

SEQ ID NO: 2535782 - RNA, 19 nt, Artificial Sequence
  Description of Artificial Sequence: Synthetic oligonucleotide
  Sense strand starting at position 17 of SEQ ID NO: 1888473
guagacuuuguauacuauc

SEQ ID NO: 2535783 - RNA, 19 nt, Artificial Sequence
  Description of Artificial Sequence: Synthetic oligonucleotide
  Antisense strand to SEQ ID NO: 2535782
gauaguauacaaagucuac

SEQ ID NO: 2535784 - RNA, 19 nt, Artificial Sequence
  Description of Artificial Sequence: Synthetic oligonucleotide
  Sense strand starting at position 2424 of SEQ ID NO: 1888473
uuuauuugggccugccauu

SEQ ID NO: 2535785 - RNA, 19 nt, Artificial Sequence
  Description of Artificial Sequence: Synthetic oligonucleotide
  Antisense strand to SEQ ID NO: 2535784
aauggcaggcccaaauaaa

SEQ ID NO: 2535786 - RNA, 19 nt, Artificial Sequence
  Description of Artificial Sequence: Synthetic oligonucleotide
  Sense strand starting at position 1205 of SEQ ID NO: 1888473
auacaucucuugguagauu

SEQ ID NO: 2535787 - RNA, 19 nt, Artificial Sequence
  Description of Artificial Sequence: Synthetic oligonucleotide
  Antisense strand to SEQ ID NO: 2535786
aaucuaccaagagauguau

SEQ ID NO: 2535788 - RNA, 19 nt, Artificial Sequence
  Description of Artificial Sequence: Synthetic oligonucleotide
  Sense strand starting at position 1881 of SEQ ID NO: 1888473
uaaauuagcuugguaugaa

SEQ ID NO: 2535789 - RNA, 19 nt, Artificial Sequence
  Description of Artificial Sequence: Synthetic oligonucleotide
  Antisense strand to SEQ ID NO: 2535788
uucauaccaagcuaauuua

SEQ ID NO: 2535790 - RNA, 19 nt, Artificial Sequence
  Description of Artificial Sequence: Synthetic oligonucleotide
  Sense strand starting at position 3721 of SEQ ID NO: 1888473
ucugaugacucccucugau

SEQ ID NO: 2535791 - RNA, 19 nt, Artificial Sequence
  Description of Artificial Sequence: Synthetic oligonucleotide
  Antisense strand to SEQ ID NO: 2535790
aucagagggagucaucaga

SEQ ID NO: 2535792 - RNA, 19 nt, Artificial Sequence
  Description of Artificial Sequence: Synthetic oligonucleotide
  Sense strand starting at position 2253 of SEQ ID NO: 1888473
uuccuuuguguacaaauua

SEQ ID NO: 2535793 - RNA, 19 nt, Artificial Sequence
  Description of Artificial Sequence: Synthetic oligonucleotide
  Antisense strand to SEQ ID NO: 2535792
uaauuuguacacaaaggaa

SEQ ID NO: 2535794 - RNA, 19 nt, Artificial Sequence
  Description of Artificial Sequence: Synthetic oligonucleotide
  Sense strand starting at position 1880 of SEQ ID NO: 1888473
auaaauuagcuugguauga

SEQ ID NO: 2535795 - RNA, 19 nt, Artificial Sequence
  Description of Artificial Sequence: Synthetic oligonucleotide
  Antisense strand to SEQ ID NO: 2535794
ucauaccaagcuaauuuau

SEQ ID NO: 2535796 - RNA, 19 nt, Artificial Sequence
  Description of Artificial Sequence: Synthetic oligonucleotide
  Sense strand starting at position 4 of SEQ ID NO: 1888473
cuaauauuagcagguagac

SEQ ID NO: 2535797 - RNA, 19 nt, Artificial Sequence
  Description of Artificial Sequence: Synthetic oligonucleotide
  Antisense strand to SEQ ID NO: 2535796
gucuaccugcuaauauuag

SEQ ID NO: 2535798 - RNA, 19 nt, Artificial Sequence
  Description of Artificial Sequence: Synthetic oligonucleotide
  Sense strand starting at position 3487 of SEQ ID NO: 1888473
gcauuaagucugcaaagac

SEQ ID NO: 2535799 - RNA, 19 nt, Artificial Sequence
  Description of Artificial Sequence: Synthetic oligonucleotide
  Antisense strand to SEQ ID NO: 2535798
gucuuugcagacuuaaugc

SEQ ID NO: 2535800 - RNA, 19 nt, Artificial Sequence
  Description of Artificial Sequence: Synthetic oligonucleotide
  Sense strand starting at position 286 of SEQ ID NO: 1888473
caaguuagugcuuaaauug

SEQ ID NO: 2535801 - RNA, 19 nt, Artificial Sequence
  Description of Artificial Sequence: Synthetic oligonucleotide
  Antisense strand to SEQ ID NO: 2535800
caauuuaagcacuaacuug

SEQ ID NO: 2535802 - RNA, 19 nt, Artificial Sequence
  Description of Artificial Sequence: Synthetic oligonucleotide
  Sense strand starting at position 1597 of SEQ ID NO: 1888473
gaaugacuucuugguuuau

SEQ ID NO: 2535803 - RNA, 19 nt, Artificial Sequence
  Description of Artificial Sequence: Synthetic oligonucleotide
  Antisense strand to SEQ ID NO: 2535802
auaaaccaagaagucauuc

SEQ ID NO: 2535804 - RNA, 19 nt, Artificial Sequence
  Description of Artificial Sequence: Synthetic oligonucleotide
  Sense strand starting at position 1879 of SEQ ID NO: 1888473
gauaaauuagcuugguaug

SEQ ID NO: 2535805 - RNA, 19 nt, Artificial Sequence
  Description of Artificial Sequence: Synthetic oligonucleotide
  Antisense strand to SEQ ID NO: 2535804
cauaccaagcuaauuuauc

SEQ ID NO: 2535806 - RNA, 19 nt, Artificial Sequence
  Description of Artificial Sequence: Synthetic oligonucleotide
  Sense strand starting at position 3386 of SEQ ID NO: 1888473
aucagucucuucuuagaca

SEQ ID NO: 2535807 - RNA, 19 nt, Artificial Sequence
  Description of Artificial Sequence: Synthetic oligonucleotide
  Antisense strand to SEQ ID NO: 2535806
ugucuaagaagagacugau

SEQ ID NO: 2535808 - RNA, 19 nt, Artificial Sequence
  Description of Artificial Sequence: Synthetic oligonucleotide
  Sense strand starting at position 1201 of SEQ ID NO: 1888473
auccauacaucucuuggua

SEQ ID NO: 2535809 - RNA, 19 nt, Artificial Sequence
  Description of Artificial Sequence: Synthetic oligonucleotide
  Antisense strand to SEQ ID NO: 2535808
uaccaagagauguauggau

SEQ ID NO: 2535810 - RNA, 19 nt, Artificial Sequence
  Description of Artificial Sequence: Synthetic oligonucleotide
  Sense strand starting at position 3050 of SEQ ID NO: 1888473
uuaugugauacgugagaaa

SEQ ID NO: 2535811 - RNA, 19 nt, Artificial Sequence
  Description of Artificial Sequence: Synthetic oligonucleotide
  Antisense strand to SEQ ID NO: 2535810
uuucucacguaucacauaa

SEQ ID NO: 2535812 - RNA, 19 nt, Artificial Sequence
  Description of Artificial Sequence: Synthetic oligonucleotide
  Sense strand starting at position 1006 of SEQ ID NO: 1888473
agcaauugacucuggguga

SEQ ID NO: 2535813 - RNA, 19 nt, Artificial Sequence
  Description of Artificial Sequence: Synthetic oligonucleotide
  Antisense strand to SEQ ID NO: 2535812
ucacccagagucaauugcu

SEQ ID NO: 2535814 - RNA, 19 nt, Artificial Sequence
  Description of Artificial Sequence: Synthetic oligonucleotide
  Sense strand starting at position 2141 of SEQ ID NO: 1888473
aagugcuaaucagugaaau

SEQ ID NO: 2535815 - RNA, 19 nt, Artificial Sequence
  Description of Artificial Sequence: Synthetic oligonucleotide
  Antisense strand to SEQ ID NO: 2535814
auuucacugauuagcacuu

SEQ ID NO: 2535816 - RNA, 19 nt, Artificial Sequence
  Description of Artificial Sequence: Synthetic oligonucleotide
  Sense strand starting at position 3687 of SEQ ID NO: 1888473
uggagaguagcugguaaua

SEQ ID NO: 2535817 - RNA, 19 nt, Artificial Sequence
  Description of Artificial Sequence: Synthetic oligonucleotide
  Antisense strand to SEQ ID NO: 2535816
uauuaccagcuacucucca

SEQ ID NO: 2535818 - RNA, 19 nt, Artificial Sequence
  Description of Artificial Sequence: Synthetic oligonucleotide
  Sense strand starting at position 1084 of SEQ ID NO: 1888473
ugccacauuguguaaauau

SEQ ID NO: 2535819 - RNA, 19 nt, Artificial Sequence
  Description of Artificial Sequence: Synthetic oligonucleotide
  Antisense strand to SEQ ID NO: 2535818
auauuuacacaauguggca

SEQ ID NO: 2535820 - RNA, 19 nt, Artificial Sequence
  Description of Artificial Sequence: Synthetic oligonucleotide
  Sense strand starting at position 3335 of SEQ ID NO: 1888473
ggacaauucuguguaucca

SEQ ID NO: 2535821 - RNA, 19 nt, Artificial Sequence
  Description of Artificial Sequence: Synthetic oligonucleotide
  Antisense strand to SEQ ID NO: 2535820
uggauacacagaauugucc

SEQ ID NO: 2535822 - RNA, 19 nt, Artificial Sequence
  Description of Artificial Sequence: Synthetic oligonucleotide
  Sense strand starting at position 14 of SEQ ID NO: 1888473
cagguagacuuuguauacu

SEQ ID NO: 2535823 - RNA, 19 nt, Artificial Sequence
  Description of Artificial Sequence: Synthetic oligonucleotide
  Antisense strand to SEQ ID NO: 2535822
aguauacaaagucuaccug

SEQ ID NO: 2535824 - RNA, 19 nt, Artificial Sequence
  Description of Artificial Sequence: Synthetic oligonucleotide
  Sense strand starting at position 2085 of SEQ ID NO: 1888473
ggaaaugugucaucuuauc

SEQ ID NO: 2535825 - RNA, 19 nt, Artificial Sequence
  Description of Artificial Sequence: Synthetic oligonucleotide
  Antisense strand to SEQ ID NO: 2535824
gauaagaugacacauuucc

SEQ ID NO: 2535826 - RNA, 19 nt, Artificial Sequence
  Description of Artificial Sequence: Synthetic oligonucleotide
  Sense strand starting at position 2030 of SEQ ID NO: 1888473
agucuuccugcucagauau

SEQ ID NO: 2535827 - RNA, 19 nt, Artificial Sequence
  Description of Artificial Sequence: Synthetic oligonucleotide
  Antisense strand to SEQ ID NO: 2535826
auaucugagcaggaagacu

SEQ ID NO: 2535828 - RNA, 19 nt, Artificial Sequence
  Description of Artificial Sequence: Synthetic oligonucleotide
  Sense strand starting at position 1595 of SEQ ID NO: 1888473
uugaaugacuucuugguuu

SEQ ID NO: 2535829 - RNA, 19 nt, Artificial Sequence
  Description of Artificial Sequence: Synthetic oligonucleotide
  Antisense strand to SEQ ID NO: 2535828
aaaccaagaagucauucaa

SEQ ID NO: 2535830 - RNA, 19 nt, Artificial Sequence
  Description of Artificial Sequence: Synthetic oligonucleotide
  Sense strand starting at position 3259 of SEQ ID NO: 1888473
uuguaaauugcucaaggca

SEQ ID NO: 2535831 - RNA, 19 nt, Artificial Sequence
  Description of Artificial Sequence: Synthetic oligonucleotide
  Antisense strand to SEQ ID NO: 2535830
ugccuugagcaauuuacaa

SEQ ID NO: 2535832 - RNA, 19 nt, Artificial Sequence
  Description of Artificial Sequence: Synthetic oligonucleotide
  Sense strand starting at position 2250 of SEQ ID NO: 1888473
auauuccuuuguguacaaa

SEQ ID NO: 2535833 - RNA, 19 nt, Artificial Sequence
  Description of Artificial Sequence: Synthetic oligonucleotide
  Antisense strand to SEQ ID NO: 2535832
uuuguacacaaaggaauau

SEQ ID NO: 2535834 - RNA, 19 nt, Artificial Sequence
  Description of Artificial Sequence: Synthetic oligonucleotide
  Sense strand starting at position 2348 of SEQ ID NO: 1888473
ugugaagugaacugucuaa

SEQ ID NO: 2535835 - RNA, 19 nt, Artificial Sequence
  Description of Artificial Sequence: Synthetic oligonucleotide
  Antisense strand to SEQ ID NO: 2535834
uuagacaguucacuucaca

SEQ ID NO: 2535836 - RNA, 19 nt, Artificial Sequence
  Description of Artificial Sequence: Synthetic oligonucleotide
  Sense strand starting at position 273 of SEQ ID NO: 1888474
acaugaaacguuuauacug

SEQ ID NO: 2535837 - RNA, 19 nt, Artificial Sequence
  Description of Artificial Sequence: Synthetic oligonucleotide
  Antisense strand to SEQ ID NO: 2535836
caguauaaacguuucaugu

SEQ ID NO: 2535838 - RNA, 19 nt, Artificial Sequence
  Description of Artificial Sequence: Synthetic oligonucleotide
  Sense strand starting at position 2436 of SEQ ID NO: 1888474
ccagaauuagaaugcucaa

SEQ ID NO: 2535839 - RNA, 19 nt, Artificial Sequence
  Description of Artificial Sequence: Synthetic oligonucleotide
  Antisense strand to SEQ ID NO: 2535838
uugagcauucuaauucugg

SEQ ID NO: 2535840 - RNA, 19 nt, Artificial Sequence
  Description of Artificial Sequence: Synthetic oligonucleotide
  Sense strand starting at position 140 of SEQ ID NO: 1888474
uguggaaaugcucaaucua

SEQ ID NO: 2535841 - RNA, 19 nt, Artificial Sequence
  Description of Artificial Sequence: Synthetic oligonucleotide
  Antisense strand to SEQ ID NO: 2535840
uagauugagcauuuccaca

SEQ ID NO: 2535842 - RNA, 19 nt, Artificial Sequence
  Description of Artificial Sequence: Synthetic oligonucleotide
  Sense strand starting at position 1432 of SEQ ID NO: 1888474
uacgcugaugaaugaaaga

SEQ ID NO: 2535843 - RNA, 19 nt, Artificial Sequence
  Description of Artificial Sequence: Synthetic oligonucleotide
  Antisense strand to SEQ ID NO: 2535842
ucuuucauucaucagcgua

SEQ ID NO: 2535844 - RNA, 19 nt, Artificial Sequence
  Description of Artificial Sequence: Synthetic oligonucleotide
  Sense strand starting at position 1904 of SEQ ID NO: 1888474
ggagucuuuccuuacgaag

SEQ ID NO: 2535845 - RNA, 19 nt, Artificial Sequence
  Description of Artificial Sequence: Synthetic oligonucleotide
  Antisense strand to SEQ ID NO: 2535844
cuucguaaggaaagacucc

SEQ ID NO: 2535846 - RNA, 19 nt, Artificial Sequence
  Description of Artificial Sequence: Synthetic oligonucleotide
  Sense strand starting at position 3635 of SEQ ID NO: 1888474
ccuguuccacaaugacaga

SEQ ID NO: 2535847 - RNA, 19 nt, Artificial Sequence
  Description of Artificial Sequence: Synthetic oligonucleotide
  Antisense strand to SEQ ID NO: 2535846
ucugucauuguggaacagg

SEQ ID NO: 2535848 - RNA, 19 nt, Artificial Sequence
  Description of Artificial Sequence: Synthetic oligonucleotide
  Sense strand starting at position 371 of SEQ ID NO: 1888474
gugacuacagcuuaaucua

SEQ ID NO: 2535849 - RNA, 19 nt, Artificial Sequence
  Description of Artificial Sequence: Synthetic oligonucleotide
  Antisense strand to SEQ ID NO: 2535848
uagauuaagcuguagucac

SEQ ID NO: 2535850 - RNA, 19 nt, Artificial Sequence
  Description of Artificial Sequence: Synthetic oligonucleotide
  Sense strand starting at position 2768 of SEQ ID NO: 1888474
ugacaauucuuguuaugag

SEQ ID NO: 2535851 - RNA, 19 nt, Artificial Sequence
  Description of Artificial Sequence: Synthetic oligonucleotide
  Antisense strand to SEQ ID NO: 2535850
cucauaacaagaauuguca

SEQ ID NO: 2535852 - RNA, 19 nt, Artificial Sequence
  Description of Artificial Sequence: Synthetic oligonucleotide
  Sense strand starting at position 2472 of SEQ ID NO: 1888474
guguaaaccuaaguaacaa

SEQ ID NO: 2535853 - RNA, 19 nt, Artificial Sequence
  Description of Artificial Sequence: Synthetic oligonucleotide
  Antisense strand to SEQ ID NO: 2535852
uuguuacuuagguuuacac

SEQ ID NO: 2535854 - RNA, 19 nt, Artificial Sequence
  Description of Artificial Sequence: Synthetic oligonucleotide
  Sense strand starting at position 2517 of SEQ ID NO: 1888474
uuuaucugggaguagcauu

SEQ ID NO: 2535855 - RNA, 19 nt, Artificial Sequence
  Description of Artificial Sequence: Synthetic oligonucleotide
  Antisense strand to SEQ ID NO: 2535854
aaugcuacucccagauaaa

SEQ ID NO: 2535856 - RNA, 19 nt, Artificial Sequence
  Description of Artificial Sequence: Synthetic oligonucleotide
  Sense strand starting at position 3520 of SEQ ID NO: 1888474
uguucuaaugguuacaagu

SEQ ID NO: 2535857 - RNA, 19 nt, Artificial Sequence
  Description of Artificial Sequence: Synthetic oligonucleotide
  Antisense strand to SEQ ID NO: 2535856
acuuguaaccauuagaaca

SEQ ID NO: 2535858 - RNA, 19 nt, Artificial Sequence
  Description of Artificial Sequence: Synthetic oligonucleotide
  Sense strand starting at position 191 of SEQ ID NO: 1888474
guuauaugauaaucacugu

SEQ ID NO: 2535859 - RNA, 19 nt, Artificial Sequence
  Description of Artificial Sequence: Synthetic oligonucleotide
  Antisense strand to SEQ ID NO: 2535858
acagugauuaucauauaac

SEQ ID NO: 2535860 - RNA, 19 nt, Artificial Sequence
  Description of Artificial Sequence: Synthetic oligonucleotide
  Sense strand starting at position 2673 of SEQ ID NO: 1888474
aagguagcaucaguccaaa

SEQ ID NO: 2535861 - RNA, 19 nt, Artificial Sequence
  Description of Artificial Sequence: Synthetic oligonucleotide
  Antisense strand to SEQ ID NO: 2535860
uuuggacugaugcuaccuu

SEQ ID NO: 2535862 - RNA, 19 nt, Artificial Sequence
  Description of Artificial Sequence: Synthetic oligonucleotide
  Sense strand starting at position 9 of SEQ ID NO: 1888474
ucagaacuuccgcagaguu

SEQ ID NO: 2535863 - RNA, 19 nt, Artificial Sequence
  Description of Artificial Sequence: Synthetic oligonucleotide
  Antisense strand to SEQ ID NO: 2535862
aacucugcggaaguucuga

SEQ ID NO: 2535864 - RNA, 19 nt, Artificial Sequence
  Description of Artificial Sequence: Synthetic oligonucleotide
  Sense strand starting at position 283 of SEQ ID NO: 1888474
uuuauacugugagcuaaau

SEQ ID NO: 2535865 - RNA, 19 nt, Artificial Sequence
  Description of Artificial Sequence: Synthetic oligonucleotide
  Antisense strand to SEQ ID NO: 2535864
auuuagcucacaguauaaa

SEQ ID NO: 2535866 - RNA, 19 nt, Artificial Sequence
  Description of Artificial Sequence: Synthetic oligonucleotide
  Sense strand starting at position 245 of SEQ ID NO: 1888474
guaaacuguuucucucaag

SEQ ID NO: 2535867 - RNA, 19 nt, Artificial Sequence
  Description of Artificial Sequence: Synthetic oligonucleotide
  Antisense strand to SEQ ID NO: 2535866
cuugagagaaacaguuuac

SEQ ID NO: 2535868 - RNA, 19 nt, Artificial Sequence
  Description of Artificial Sequence: Synthetic oligonucleotide
  Sense strand starting at position 244 of SEQ ID NO: 1888474
gguaaacuguuucucucaa

SEQ ID NO: 2535869 - RNA, 19 nt, Artificial Sequence
  Description of Artificial Sequence: Synthetic oligonucleotide
  Antisense strand to SEQ ID NO: 2535868
uugagagaaacaguuuacc

SEQ ID NO: 2535870 - RNA, 19 nt, Artificial Sequence
  Description of Artificial Sequence: Synthetic oligonucleotide
  Sense strand starting at position 2676 of SEQ ID NO: 1888474
guagcaucaguccaaaguu

SEQ ID NO: 2535871 - RNA, 19 nt, Artificial Sequence
  Description of Artificial Sequence: Synthetic oligonucleotide
  Antisense strand to SEQ ID NO: 2535870
aacuuuggacugaugcuac

SEQ ID NO: 2535872 - RNA, 19 nt, Artificial Sequence
  Description of Artificial Sequence: Synthetic oligonucleotide
  Sense strand starting at position 2765 of SEQ ID NO: 1888474
uugugacaauucuuguuau

SEQ ID NO: 2535873 - RNA, 19 nt, Artificial Sequence
  Description of Artificial Sequence: Synthetic oligonucleotide
  Antisense strand to SEQ ID NO: 2535872
auaacaagaauugucacaa

SEQ ID NO: 2535874 - RNA, 19 nt, Artificial Sequence
  Description of Artificial Sequence: Synthetic oligonucleotide
  Sense strand starting at position 2512 of SEQ ID NO: 1888474
ugagauuuaucugggagua

SEQ ID NO: 2535875 - RNA, 19 nt, Artificial Sequence
  Description of Artificial Sequence: Synthetic oligonucleotide
  Antisense strand to SEQ ID NO: 2535874
uacucccagauaaaucuca

SEQ ID NO: 2535876 - RNA, 19 nt, Artificial Sequence
  Description of Artificial Sequence: Synthetic oligonucleotide
  Sense strand starting at position 2514 of SEQ ID NO: 1888474
agauuuaucugggaguagc

SEQ ID NO: 2535877 - RNA, 19 nt, Artificial Sequence
  Description of Artificial Sequence: Synthetic oligonucleotide
  Antisense strand to SEQ ID NO: 2535876
gcuacucccagauaaaucu

SEQ ID NO: 2535878 - RNA, 19 nt, Artificial Sequence
  Description of Artificial Sequence: Synthetic oligonucleotide
  Sense strand starting at position 2250 of SEQ ID NO: 1888474
aggauaacaucaggaagaa

SEQ ID NO: 2535879 - RNA, 19 nt, Artificial Sequence
  Description of Artificial Sequence: Synthetic oligonucleotide
  Antisense strand to SEQ ID NO: 2535878
uucuuccugauguuauccu

SEQ ID NO: 2535880 - RNA, 19 nt, Artificial Sequence
  Description of Artificial Sequence: Synthetic oligonucleotide
  Sense strand starting at position 2458 of SEQ ID NO: 1888474
ccuuguauacaauggugua

SEQ ID NO: 2535881 - RNA, 19 nt, Artificial Sequence
  Description of Artificial Sequence: Synthetic oligonucleotide
  Antisense strand to SEQ ID NO: 2535880
uacaccauuguauacaagg

SEQ ID NO: 2535882 - RNA, 19 nt, Artificial Sequence
  Description of Artificial Sequence: Synthetic oligonucleotide
  Sense strand starting at position 2232 of SEQ ID NO: 1888474
uaccuuaccggguggucaa

SEQ ID NO: 2535883 - RNA, 19 nt, Artificial Sequence
  Description of Artificial Sequence: Synthetic oligonucleotide
  Antisense strand to SEQ ID NO: 2535882
uugaccacccgguaaggua

SEQ ID NO: 2535884 - RNA, 19 nt, Artificial Sequence
  Description of Artificial Sequence: Synthetic oligonucleotide
  Sense strand starting at position 177 of SEQ ID NO: 1888474
ugauuuacuuuccaguuau

SEQ ID NO: 2535885 - RNA, 19 nt, Artificial Sequence
  Description of Artificial Sequence: Synthetic oligonucleotide
  Antisense strand to SEQ ID NO: 2535884
auaacuggaaaguaaauca

SEQ ID NO: 2535886 - RNA, 19 nt, Artificial Sequence
  Description of Artificial Sequence: Synthetic oligonucleotide
  Sense strand starting at position 1903 of SEQ ID NO: 1888474
cggagucuuuccuuacgaa

SEQ ID NO: 2535887 - RNA, 19 nt, Artificial Sequence
  Description of Artificial Sequence: Synthetic oligonucleotide
  Antisense strand to SEQ ID NO: 2535886
uucguaaggaaagacuccg

SEQ ID NO: 2535888 - RNA, 19 nt, Artificial Sequence
  Description of Artificial Sequence: Synthetic oligonucleotide
  Sense strand starting at position 128 of SEQ ID NO: 1888474
aacuguaauuucuguggaa

SEQ ID NO: 2535889 - RNA, 19 nt, Artificial Sequence
  Description of Artificial Sequence: Synthetic oligonucleotide
  Antisense strand to SEQ ID NO: 2535888
uuccacagaaauuacaguu

SEQ ID NO: 2535890 - RNA, 19 nt, Artificial Sequence
  Description of Artificial Sequence: Synthetic oligonucleotide
  Sense strand starting at position 131 of SEQ ID NO: 1888474
uguaauuucuguggaaaug

SEQ ID NO: 2535891 - RNA, 19 nt, Artificial Sequence
  Description of Artificial Sequence: Synthetic oligonucleotide
  Antisense strand to SEQ ID NO: 2535890
cauuuccacagaaauuaca

SEQ ID NO: 2535892 - RNA, 19 nt, Artificial Sequence
  Description of Artificial Sequence: Synthetic oligonucleotide
  Sense strand starting at position 2785 of SEQ ID NO: 1888474
aggcguagugcaugagaac

SEQ ID NO: 2535893 - RNA, 19 nt, Artificial Sequence
  Description of Artificial Sequence: Synthetic oligonucleotide
  Antisense strand to SEQ ID NO: 2535892
guucucaugcacuacgccu

SEQ ID NO: 2535894 - RNA, 19 nt, Artificial Sequence
  Description of Artificial Sequence: Synthetic oligonucleotide
  Sense strand starting at position 280 of SEQ ID NO: 1888474
acguuuauacugugagcua

SEQ ID NO: 2535895 - RNA, 19 nt, Artificial Sequence
  Description of Artificial Sequence: Synthetic oligonucleotide
  Antisense strand to SEQ ID NO: 2535894
uagcucacaguauaaacgu

SEQ ID NO: 2535896 - RNA, 19 nt, Artificial Sequence
  Description of Artificial Sequence: Synthetic oligonucleotide
  Sense strand starting at position 3414 of SEQ ID NO: 1888474
ccaugagacugauggaaca

SEQ ID NO: 2535897 - RNA, 19 nt, Artificial Sequence
  Description of Artificial Sequence: Synthetic oligonucleotide
  Antisense strand to SEQ ID NO: 2535896
uguuccaucagucucaugg

SEQ ID NO: 2535898 - RNA, 19 nt, Artificial Sequence
  Description of Artificial Sequence: Synthetic oligonucleotide
  Sense strand starting at position 969 of SEQ ID NO: 1888474
accgcacuuccgcaguaua

SEQ ID NO: 2535899 - RNA, 19 nt, Artificial Sequence
  Description of Artificial Sequence: Synthetic oligonucleotide
  Antisense strand to SEQ ID NO: 2535898
uauacugcggaagugcggu

SEQ ID NO: 2535900 - RNA, 19 nt, Artificial Sequence
  Description of Artificial Sequence: Synthetic oligonucleotide
  Sense strand starting at position 2769 of SEQ ID NO: 1888474
gacaauucuuguuaugagg

SEQ ID NO: 2535901 - RNA, 19 nt, Artificial Sequence
  Description of Artificial Sequence: Synthetic oligonucleotide
  Antisense strand to SEQ ID NO: 2535900
ccucauaacaagaauuguc

SEQ ID NO: 2535902 - RNA, 19 nt, Artificial Sequence
  Description of Artificial Sequence: Synthetic oligonucleotide
  Sense strand starting at position 1996 of SEQ ID NO: 1888474
gagucacuuugcucgccaa

SEQ ID NO: 2535903 - RNA, 19 nt, Artificial Sequence
  Description of Artificial Sequence: Synthetic oligonucleotide
  Antisense strand to SEQ ID NO: 2535902
uuggcgagcaaagugacuc

SEQ ID NO: 2535904 - RNA, 19 nt, Artificial Sequence
  Description of Artificial Sequence: Synthetic oligonucleotide
  Sense strand starting at position 183 of SEQ ID NO: 1888474
acuuuccaguuauaugaua

SEQ ID NO: 2535905 - RNA, 19 nt, Artificial Sequence
  Description of Artificial Sequence: Synthetic oligonucleotide
  Antisense strand to SEQ ID NO: 2535904
uaucauauaacuggaaagu

SEQ ID NO: 2535906 - RNA, 19 nt, Artificial Sequence
  Description of Artificial Sequence: Synthetic oligonucleotide
  Sense strand starting at position 1997 of SEQ ID NO: 1888474
agucacuuugcucgccaau

SEQ ID NO: 2535907 - RNA, 19 nt, Artificial Sequence
  Description of Artificial Sequence: Synthetic oligonucleotide
  Antisense strand to SEQ ID NO: 2535906
auuggcgagcaaagugacu

SEQ ID NO: 2535908 - RNA, 19 nt, Artificial Sequence
  Description of Artificial Sequence: Synthetic oligonucleotide
  Sense strand starting at position 3325 of SEQ ID NO: 1888474
gauggaaugugaggucaga

SEQ ID NO: 2535909 - RNA, 19 nt, Artificial Sequence
  Description of Artificial Sequence: Synthetic oligonucleotide
  Antisense strand to SEQ ID NO: 2535908
ucugaccucacauuccauc

SEQ ID NO: 2535910 - RNA, 19 nt, Artificial Sequence
  Description of Artificial Sequence: Synthetic oligonucleotide
  Sense strand starting at position 2557 of SEQ ID NO: 1888474
uaguaaacugugugcguuu

SEQ ID NO: 2535911 - RNA, 19 nt, Artificial Sequence
  Description of Artificial Sequence: Synthetic oligonucleotide
  Antisense strand to SEQ ID NO: 2535910
aaacgcacacaguuuacua

SEQ ID NO: 2535912 - RNA, 19 nt, Artificial Sequence
  Description of Artificial Sequence: Synthetic oligonucleotide
  Sense strand starting at position 3522 of SEQ ID NO: 1888474
uucuaaugguuacaaguuu

SEQ ID NO: 2535913 - RNA, 19 nt, Artificial Sequence
  Description of Artificial Sequence: Synthetic oligonucleotide
  Antisense strand to SEQ ID NO: 2535912
aaacuuguaaccauuagaa

SEQ ID NO: 2535914 - RNA, 19 nt, Artificial Sequence
  Description of Artificial Sequence: Synthetic oligonucleotide
  Sense strand starting at position 2138 of SEQ ID NO: 1888474
ccacuuugauuaugggcua

SEQ ID NO: 2535915 - RNA, 19 nt, Artificial Sequence
  Description of Artificial Sequence: Synthetic oligonucleotide
  Antisense strand to SEQ ID NO: 2535914
uagcccauaaucaaagugg

SEQ ID NO: 2535916 - RNA, 19 nt, Artificial Sequence
  Description of Artificial Sequence: Synthetic oligonucleotide
  Sense strand starting at position 220 of SEQ ID NO: 1888475
gagagaauauuacuguuua

SEQ ID NO: 2535917 - RNA, 19 nt, Artificial Sequence
  Description of Artificial Sequence: Synthetic oligonucleotide
  Antisense strand to SEQ ID NO: 2535916
uaaacaguaauauucucuc

SEQ ID NO: 2535918 - RNA, 19 nt, Artificial Sequence
  Description of Artificial Sequence: Synthetic oligonucleotide
  Sense strand starting at position 1811 of SEQ ID NO: 1888475
cauggaauugcaggaucaa

SEQ ID NO: 2535919 - RNA, 19 nt, Artificial Sequence
  Description of Artificial Sequence: Synthetic oligonucleotide
  Antisense strand to SEQ ID NO: 2535918
uugauccugcaauuccaug

SEQ ID NO: 2535920 - RNA, 19 nt, Artificial Sequence
  Description of Artificial Sequence: Synthetic oligonucleotide
  Sense strand starting at position 295 of SEQ ID NO: 1888475
aaguuuccgguagaaauaa

SEQ ID NO: 2535921 - RNA, 19 nt, Artificial Sequence
  Description of Artificial Sequence: Synthetic oligonucleotide
  Antisense strand to SEQ ID NO: 2535920
uuauuucuaccggaaacuu

SEQ ID NO: 2535922 - RNA, 19 nt, Artificial Sequence
  Description of Artificial Sequence: Synthetic oligonucleotide
  Sense strand starting at position 2618 of SEQ ID NO: 1888475
ggcagauuaaaugaugcca

SEQ ID NO: 2535923 - RNA, 19 nt, Artificial Sequence
  Description of Artificial Sequence: Synthetic oligonucleotide
  Antisense strand to SEQ ID NO: 2535922
uggcaucauuuaaucugcc

SEQ ID NO: 2535924 - RNA, 19 nt, Artificial Sequence
  Description of Artificial Sequence: Synthetic oligonucleotide
  Sense strand starting at position 2529 of SEQ ID NO: 1888475
gggaaucuuaccgagcaac

SEQ ID NO: 2535925 - RNA, 19 nt, Artificial Sequence
  Description of Artificial Sequence: Synthetic oligonucleotide
  Antisense strand to SEQ ID NO: 2535924
guugcucgguaagauuccc

SEQ ID NO: 2535926 - RNA, 19 nt, Artificial Sequence
  Description of Artificial Sequence: Synthetic oligonucleotide
  Sense strand starting at position 2570 of SEQ ID NO: 1888475
ugccauuuaucaucuuagu

SEQ ID NO: 2535927 - RNA, 19 nt, Artificial Sequence
  Description of Artificial Sequence: Synthetic oligonucleotide
  Antisense strand to SEQ ID NO: 2535926
acuaagaugauaaauggca

SEQ ID NO: 2535928 - RNA, 19 nt, Artificial Sequence
  Description of Artificial Sequence: Synthetic oligonucleotide
  Sense strand starting at position 2860 of SEQ ID NO: 1888475
cugcauuuauccucuguga

SEQ ID NO: 2535929 - RNA, 19 nt, Artificial Sequence
  Description of Artificial Sequence: Synthetic oligonucleotide
  Antisense strand to SEQ ID NO: 2535928
ucacagaggauaaaugcag

SEQ ID NO: 2535930 - RNA, 19 nt, Artificial Sequence
  Description of Artificial Sequence: Synthetic oligonucleotide
  Sense strand starting at position 901 of SEQ ID NO: 1888475
ggugauuuaguuuguuuac

SEQ ID NO: 2535931 - RNA, 19 nt, Artificial Sequence
  Description of Artificial Sequence: Synthetic oligonucleotide
  Antisense strand to SEQ ID NO: 2535930
guaaacaaacuaaaucacc

SEQ ID NO: 2535932 - RNA, 19 nt, Artificial Sequence
  Description of Artificial Sequence: Synthetic oligonucleotide
  Sense strand starting at position 898 of SEQ ID NO: 1888475
uugggugauuuaguuuguu

SEQ ID NO: 2535933 - RNA, 19 nt, Artificial Sequence
  Description of Artificial Sequence: Synthetic oligonucleotide
  Antisense strand to SEQ ID NO: 2535932
aacaaacuaaaucacccaa

SEQ ID NO: 2535934 - RNA, 19 nt, Artificial Sequence
  Description of Artificial Sequence: Synthetic oligonucleotide
  Sense strand starting at position 3372 of SEQ ID NO: 1888475
augcucauucuccauggaa

SEQ ID NO: 2535935 - RNA, 19 nt, Artificial Sequence
  Description of Artificial Sequence: Synthetic oligonucleotide
  Antisense strand to SEQ ID NO: 2535934
uuccauggagaaugagcau

SEQ ID NO: 2535936 - RNA, 19 nt, Artificial Sequence
  Description of Artificial Sequence: Synthetic oligonucleotide
  Sense strand starting at position 902 of SEQ ID NO: 1888475
gugauuuaguuuguuuacu

SEQ ID NO: 2535937 - RNA, 19 nt, Artificial Sequence
  Description of Artificial Sequence: Synthetic oligonucleotide
  Antisense strand to SEQ ID NO: 2535936
aguaaacaaacuaaaucac

SEQ ID NO: 2535938 - RNA, 19 nt, Artificial Sequence
  Description of Artificial Sequence: Synthetic oligonucleotide
  Sense strand starting at position 293 of SEQ ID NO: 1888475
acaaguuuccgguagaaau

SEQ ID NO: 2535939 - RNA, 19 nt, Artificial Sequence
  Description of Artificial Sequence: Synthetic oligonucleotide
  Antisense strand to SEQ ID NO: 2535938
auuucuaccggaaacuugu

SEQ ID NO: 2535940 - RNA, 19 nt, Artificial Sequence
  Description of Artificial Sequence: Synthetic oligonucleotide
  Sense strand starting at position 11 of SEQ ID NO: 1888475
accggagaauaucuccauu

SEQ ID NO: 2535941 - RNA, 19 nt, Artificial Sequence
  Description of Artificial Sequence: Synthetic oligonucleotide
  Antisense strand to SEQ ID NO: 2535940
aauggagauauucuccggu

SEQ ID NO: 2535942 - RNA, 19 nt, Artificial Sequence
  Description of Artificial Sequence: Synthetic oligonucleotide
  Sense strand starting at position 855 of SEQ ID NO: 1888475
guuuaaagagauggucaug

SEQ ID NO: 2535943 - RNA, 19 nt, Artificial Sequence
  Description of Artificial Sequence: Synthetic oligonucleotide
  Antisense strand to SEQ ID NO: 2535942
caugaccaucucuuuaaac

SEQ ID NO: 2535944 - RNA, 19 nt, Artificial Sequence
  Description of Artificial Sequence: Synthetic oligonucleotide
  Sense strand starting at position 1163 of SEQ ID NO: 1888475
agaaguuaacacuguuaac

SEQ ID NO: 2535945 - RNA, 19 nt, Artificial Sequence
  Description of Artificial Sequence: Synthetic oligonucleotide
  Antisense strand to SEQ ID NO: 2535944
guuaacaguguuaacuucu

SEQ ID NO: 2535946 - RNA, 19 nt, Artificial Sequence
  Description of Artificial Sequence: Synthetic oligonucleotide
  Sense strand starting at position 2232 of SEQ ID NO: 1888475
cugcauuaugcagagacca

SEQ ID NO: 2535947 - RNA, 19 nt, Artificial Sequence
  Description of Artificial Sequence: Synthetic oligonucleotide
  Antisense strand to SEQ ID NO: 2535946
uggucucugcauaaugcag

SEQ ID NO: 2535948 - RNA, 19 nt, Artificial Sequence
  Description of Artificial Sequence: Synthetic oligonucleotide
  Sense strand starting at position 2862 of SEQ ID NO: 1888475
gcauuuauccucugugacg

SEQ ID NO: 2535949 - RNA, 19 nt, Artificial Sequence
  Description of Artificial Sequence: Synthetic oligonucleotide
  Antisense strand to SEQ ID NO: 2535948
cgucacagaggauaaaugc

SEQ ID NO: 2535950 - RNA, 19 nt, Artificial Sequence
  Description of Artificial Sequence: Synthetic oligonucleotide
  Sense strand starting at position 854 of SEQ ID NO: 1888475
uguuuaaagagauggucau

SEQ ID NO: 2535951 - RNA, 19 nt, Artificial Sequence
  Description of Artificial Sequence: Synthetic oligonucleotide
  Antisense strand to SEQ ID NO: 2535950
augaccaucucuuuaaaca

SEQ ID NO: 2535952 - RNA, 19 nt, Artificial Sequence
  Description of Artificial Sequence: Synthetic oligonucleotide
  Sense strand starting at position 879 of SEQ ID NO: 1888475
uuaaguuggcaguagaauu

SEQ ID NO: 2535953 - RNA, 19 nt, Artificial Sequence
  Description of Artificial Sequence: Synthetic oligonucleotide
  Antisense strand to SEQ ID NO: 2535952
aauucuacugccaacuuaa

SEQ ID NO: 2535954 - RNA, 19 nt, Artificial Sequence
  Description of Artificial Sequence: Synthetic oligonucleotide
  Sense strand starting at position 836 of SEQ ID NO: 1888475
cuuagacuugcugagaugu

SEQ ID NO: 2535955 - RNA, 19 nt, Artificial Sequence
  Description of Artificial Sequence: Synthetic oligonucleotide
  Antisense strand to SEQ ID NO: 2535954
acaucucagcaagucuaag

SEQ ID NO: 2535956 - RNA, 19 nt, Artificial Sequence
  Description of Artificial Sequence: Synthetic oligonucleotide
  Sense strand starting at position 2129 of SEQ ID NO: 1888475
ugaaauggcccacgggaau

SEQ ID NO: 2535957 - RNA, 19 nt, Artificial Sequence
  Description of Artificial Sequence: Synthetic oligonucleotide
  Antisense strand to SEQ ID NO: 2535956
auucccgugggccauuuca

SEQ ID NO: 2535958 - RNA, 19 nt, Artificial Sequence
  Description of Artificial Sequence: Synthetic oligonucleotide
  Sense strand starting at position 2583 of SEQ ID NO: 1888475
cuuagugaaucucuugaua

SEQ ID NO: 2535959 - RNA, 19 nt, Artificial Sequence
  Description of Artificial Sequence: Synthetic oligonucleotide
  Antisense strand to SEQ ID NO: 2535958
uaucaagagauucacuaag

SEQ ID NO: 2535960 - RNA, 19 nt, Artificial Sequence
  Description of Artificial Sequence: Synthetic oligonucleotide
  Sense strand starting at position 1702 of SEQ ID NO: 1888475
cccuuacugguggauaguu

SEQ ID NO: 2535961 - RNA, 19 nt, Artificial Sequence
  Description of Artificial Sequence: Synthetic oligonucleotide
  Antisense strand to SEQ ID NO: 2535960
aacuauccaccaguaaggg

SEQ ID NO: 2535962 - RNA, 19 nt, Artificial Sequence
  Description of Artificial Sequence: Synthetic oligonucleotide
  Sense strand starting at position 2472 of SEQ ID NO: 1888475
cagaguuccggccaggaca

SEQ ID NO: 2535963 - RNA, 19 nt, Artificial Sequence
  Description of Artificial Sequence: Synthetic oligonucleotide
  Antisense strand to SEQ ID NO: 2535962
uguccuggccggaacucug

SEQ ID NO: 2535964 - RNA, 19 nt, Artificial Sequence
  Description of Artificial Sequence: Synthetic oligonucleotide
  Sense strand starting at position 3493 of SEQ ID NO: 1888475
guucccuucccugacuaua

SEQ ID NO: 2535965 - RNA, 19 nt, Artificial Sequence
  Description of Artificial Sequence: Synthetic oligonucleotide
  Antisense strand to SEQ ID NO: 2535964
uauagucagggaagggaac

SEQ ID NO: 2535966 - RNA, 19 nt, Artificial Sequence
  Description of Artificial Sequence: Synthetic oligonucleotide
  Sense strand starting at position 3375 of SEQ ID NO: 1888475
cucauucuccauggaaagu

SEQ ID NO: 2535967 - RNA, 19 nt, Artificial Sequence
  Description of Artificial Sequence: Synthetic oligonucleotide
  Antisense strand to SEQ ID NO: 2535966
acuuuccauggagaaugag

SEQ ID NO: 2535968 - RNA, 19 nt, Artificial Sequence
  Description of Artificial Sequence: Synthetic oligonucleotide
  Sense strand starting at position 2926 of SEQ ID NO: 1888475
acucuugaccagugauauc

SEQ ID NO: 2535969 - RNA, 19 nt, Artificial Sequence
  Description of Artificial Sequence: Synthetic oligonucleotide
  Antisense strand to SEQ ID NO: 2535968
gauaucacuggucaagagu

SEQ ID NO: 2535970 - RNA, 19 nt, Artificial Sequence
  Description of Artificial Sequence: Synthetic oligonucleotide
  Sense strand starting at position 2527 of SEQ ID NO: 1888475
cagggaaucuuaccgagca

SEQ ID NO: 2535971 - RNA, 19 nt, Artificial Sequence
  Description of Artificial Sequence: Synthetic oligonucleotide
  Antisense strand to SEQ ID NO: 2535970
ugcucgguaagauucccug

SEQ ID NO: 2535972 - RNA, 19 nt, Artificial Sequence
  Description of Artificial Sequence: Synthetic oligonucleotide
  Sense strand starting at position 3374 of SEQ ID NO: 1888475
gcucauucuccauggaaag

SEQ ID NO: 2535973 - RNA, 19 nt, Artificial Sequence
  Description of Artificial Sequence: Synthetic oligonucleotide
  Antisense strand to SEQ ID NO: 2535972
cuuuccauggagaaugagc

SEQ ID NO: 2535974 - RNA, 19 nt, Artificial Sequence
  Description of Artificial Sequence: Synthetic oligonucleotide
  Sense strand starting at position 987 of SEQ ID NO: 1888475
uuauuaaugcaguagugac

SEQ ID NO: 2535975 - RNA, 19 nt, Artificial Sequence
  Description of Artificial Sequence: Synthetic oligonucleotide
  Antisense strand to SEQ ID NO: 2535974
gucacuacugcauuaauaa

SEQ ID NO: 2535976 - RNA, 19 nt, Artificial Sequence
  Description of Artificial Sequence: Synthetic oligonucleotide
  Sense strand starting at position 224 of SEQ ID NO: 1888475
gaauauuacuguuuaggug

SEQ ID NO: 2535977 - RNA, 19 nt, Artificial Sequence
  Description of Artificial Sequence: Synthetic oligonucleotide
  Antisense strand to SEQ ID NO: 2535976
caccuaaacaguaauauuc

SEQ ID NO: 2535978 - RNA, 19 nt, Artificial Sequence
  Description of Artificial Sequence: Synthetic oligonucleotide
  Sense strand starting at position 972 of SEQ ID NO: 1888475
uugacacuguuaucauuau

SEQ ID NO: 2535979 - RNA, 19 nt, Artificial Sequence
  Description of Artificial Sequence: Synthetic oligonucleotide
  Antisense strand to SEQ ID NO: 2535978
auaaugauaacagugucaa

SEQ ID NO: 2535980 - RNA, 19 nt, Artificial Sequence
  Description of Artificial Sequence: Synthetic oligonucleotide
  Sense strand starting at position 511 of SEQ ID NO: 1888475
uguagucuuagguaccuaa

SEQ ID NO: 2535981 - RNA, 19 nt, Artificial Sequence
  Description of Artificial Sequence: Synthetic oligonucleotide
  Antisense strand to SEQ ID NO: 2535980
uuagguaccuaagacuaca

SEQ ID NO: 2535982 - RNA, 19 nt, Artificial Sequence
  Description of Artificial Sequence: Synthetic oligonucleotide
  Sense strand starting at position 2172 of SEQ ID NO: 1888475
gcagcaagauauccugaac

SEQ ID NO: 2535983 - RNA, 19 nt, Artificial Sequence
  Description of Artificial Sequence: Synthetic oligonucleotide
  Antisense strand to SEQ ID NO: 2535982
guucaggauaucuugcugc

SEQ ID NO: 2535984 - RNA, 19 nt, Artificial Sequence
  Description of Artificial Sequence: Synthetic oligonucleotide
  Sense strand starting at position 3628 of SEQ ID NO: 1888475
ugaugaaauggcugguacu

SEQ ID NO: 2535985 - RNA, 19 nt, Artificial Sequence
  Description of Artificial Sequence: Synthetic oligonucleotide
  Antisense strand to SEQ ID NO: 2535984
aguaccagccauuucauca

SEQ ID NO: 2535986 - RNA, 19 nt, Artificial Sequence
  Description of Artificial Sequence: Synthetic oligonucleotide
  Sense strand starting at position 3908 of SEQ ID NO: 1888475
aagacaaagcugugucaca

SEQ ID NO: 2535987 - RNA, 19 nt, Artificial Sequence
  Description of Artificial Sequence: Synthetic oligonucleotide
  Antisense strand to SEQ ID NO: 2535986
ugugacacagcuuugucuu

SEQ ID NO: 2535988 - RNA, 19 nt, Artificial Sequence
  Description of Artificial Sequence: Synthetic oligonucleotide
  Sense strand starting at position 3153 of SEQ ID NO: 1888475
ugucaucacccgcaauuaa

SEQ ID NO: 2535989 - RNA, 19 nt, Artificial Sequence
  Description of Artificial Sequence: Synthetic oligonucleotide
  Antisense strand to SEQ ID NO: 2535988
uuaauugcgggugaugaca

SEQ ID NO: 2535990 - RNA, 19 nt, Artificial Sequence
  Description of Artificial Sequence: Synthetic oligonucleotide
  Sense strand starting at position 1174 of SEQ ID NO: 1888475
cuguuaacaucaucugagu

SEQ ID NO: 2535991 - RNA, 19 nt, Artificial Sequence
  Description of Artificial Sequence: Synthetic oligonucleotide
  Antisense strand to SEQ ID NO: 2535990
acucagaugauguuaacag

SEQ ID NO: 2535992 - RNA, 19 nt, Artificial Sequence
  Description of Artificial Sequence: Synthetic oligonucleotide
  Sense strand starting at position 3909 of SEQ ID NO: 1888475
agacaaagcugugucacau

SEQ ID NO: 2535993 - RNA, 19 nt, Artificial Sequence
  Description of Artificial Sequence: Synthetic oligonucleotide
  Antisense strand to SEQ ID NO: 2535992
augugacacagcuuugucu

SEQ ID NO: 2535994 - RNA, 19 nt, Artificial Sequence
  Description of Artificial Sequence: Synthetic oligonucleotide
  Sense strand starting at position 3361 of SEQ ID NO: 1888475
gucugaaaccaaugcucau

SEQ ID NO: 2535995 - RNA, 19 nt, Artificial Sequence
  Description of Artificial Sequence: Synthetic oligonucleotide
  Antisense strand to SEQ ID NO: 2535994
augagcauugguuucagac

SEQ ID NO: 2535996 - RNA, 19 nt, Artificial Sequence
  Description of Artificial Sequence: Synthetic oligonucleotide
  Sense strand starting at position 349 of SEQ ID NO: 1888476
auauuccuacaaugggauu

SEQ ID NO: 2535997 - RNA, 19 nt, Artificial Sequence
  Description of Artificial Sequence: Synthetic oligonucleotide
  Antisense strand to SEQ ID NO: 2535996
aaucccauuguaggaauau

SEQ ID NO: 2535998 - RNA, 19 nt, Artificial Sequence
  Description of Artificial Sequence: Synthetic oligonucleotide
  Sense strand starting at position 2659 of SEQ ID NO: 1888476
uaagaauggguuuagcauu

SEQ ID NO: 2535999 - RNA, 19 nt, Artificial Sequence
  Description of Artificial Sequence: Synthetic oligonucleotide
  Antisense strand to SEQ ID NO: 2535998
aaugcuaaacccauucuua

SEQ ID NO: 2536000 - RNA, 19 nt, Artificial Sequence
  Description of Artificial Sequence: Synthetic oligonucleotide
  Sense strand starting at position 2173 of SEQ ID NO: 1888476
cgacuauguccgccauguu

SEQ ID NO: 2536001 - RNA, 19 nt, Artificial Sequence
  Description of Artificial Sequence: Synthetic oligonucleotide
  Antisense strand to SEQ ID NO: 2536000
aacauggcggacauagucg

SEQ ID NO: 2536002 - RNA, 19 nt, Artificial Sequence
  Description of Artificial Sequence: Synthetic oligonucleotide
  Sense strand starting at position 246 of SEQ ID NO: 1888476
guuaaucuacaaggaagua

SEQ ID NO: 2536003 - RNA, 19 nt, Artificial Sequence
  Description of Artificial Sequence: Synthetic oligonucleotide
  Antisense strand to SEQ ID NO: 2536002
uacuuccuuguagauuaac

SEQ ID NO: 2536004 - RNA, 19 nt, Artificial Sequence
  Description of Artificial Sequence: Synthetic oligonucleotide
  Sense strand starting at position 3059 of SEQ ID NO: 1888476
gaaacugauuuguagaaau

SEQ ID NO: 2536005 - RNA, 19 nt, Artificial Sequence
  Description of Artificial Sequence: Synthetic oligonucleotide
  Antisense strand to SEQ ID NO: 2536004
auuucuacaaaucaguuuc

SEQ ID NO: 2536006 - RNA, 19 nt, Artificial Sequence
  Description of Artificial Sequence: Synthetic oligonucleotide
  Sense strand starting at position 1396 of SEQ ID NO: 1888476
ugaagcucgcaauaauaaa

SEQ ID NO: 2536007 - RNA, 19 nt, Artificial Sequence
  Description of Artificial Sequence: Synthetic oligonucleotide
  Antisense strand to SEQ ID NO: 2536006
uuuauuauugcgagcuuca

SEQ ID NO: 2536008 - RNA, 19 nt, Artificial Sequence
  Description of Artificial Sequence: Synthetic oligonucleotide
  Sense strand starting at position 80 of SEQ ID NO: 1888476
gcauuauguguugaagaga

SEQ ID NO: 2536009 - RNA, 19 nt, Artificial Sequence
  Description of Artificial Sequence: Synthetic oligonucleotide
  Antisense strand to SEQ ID NO: 2536008
ucucuucaacacauaaugc

SEQ ID NO: 2536010 - RNA, 19 nt, Artificial Sequence
  Description of Artificial Sequence: Synthetic oligonucleotide
  Sense strand starting at position 2404 of SEQ ID NO: 1888476
gggauaugcauccgggaga

SEQ ID NO: 2536011 - RNA, 19 nt, Artificial Sequence
  Description of Artificial Sequence: Synthetic oligonucleotide
  Antisense strand to SEQ ID NO: 2536010
ucucccggaugcauauccc

SEQ ID NO: 2536012 - RNA, 19 nt, Artificial Sequence
  Description of Artificial Sequence: Synthetic oligonucleotide
  Sense strand starting at position 2393 of SEQ ID NO: 1888476
caguuucgacagggauaug

SEQ ID NO: 2536013 - RNA, 19 nt, Artificial Sequence
  Description of Artificial Sequence: Synthetic oligonucleotide
  Antisense strand to SEQ ID NO: 2536012
cauaucccugucgaaacug

SEQ ID NO: 2536014 - RNA, 19 nt, Artificial Sequence
  Description of Artificial Sequence: Synthetic oligonucleotide
  Sense strand starting at position 2647 of SEQ ID NO: 1888476
cgcacaauuggcuaagaau

SEQ ID NO: 2536015 - RNA, 19 nt, Artificial Sequence
  Description of Artificial Sequence: Synthetic oligonucleotide
  Antisense strand to SEQ ID NO: 2536014
auucuuagccaauugugcg

SEQ ID NO: 2536016 - RNA, 19 nt, Artificial Sequence
  Description of Artificial Sequence: Synthetic oligonucleotide
  Sense strand starting at position 2392 of SEQ ID NO: 1888476
ucaguuucgacagggauau

SEQ ID NO: 2536017 - RNA, 19 nt, Artificial Sequence
  Description of Artificial Sequence: Synthetic oligonucleotide
  Antisense strand to SEQ ID NO: 2536016
auaucccugucgaaacuga

SEQ ID NO: 2536018 - RNA, 19 nt, Artificial Sequence
  Description of Artificial Sequence: Synthetic oligonucleotide
  Sense strand starting at position 3260 of SEQ ID NO: 1888476
uugucucuggcagauuacu

SEQ ID NO: 2536019 - RNA, 19 nt, Artificial Sequence
  Description of Artificial Sequence: Synthetic oligonucleotide
  Antisense strand to SEQ ID NO: 2536018
aguaaucugccagagacaa

SEQ ID NO: 2536020 - RNA, 19 nt, Artificial Sequence
  Description of Artificial Sequence: Synthetic oligonucleotide
  Sense strand starting at position 3268 of SEQ ID NO: 1888476
ggcagauuacuugguuaau

SEQ ID NO: 2536021 - RNA, 19 nt, Artificial Sequence
  Description of Artificial Sequence: Synthetic oligonucleotide
  Antisense strand to SEQ ID NO: 2536020
auuaaccaaguaaucugcc

SEQ ID NO: 2536022 - RNA, 19 nt, Artificial Sequence
  Description of Artificial Sequence: Synthetic oligonucleotide
  Sense strand starting at position 2293 of SEQ ID NO: 1888476
ugcuaagugccugagauua

SEQ ID NO: 2536023 - RNA, 19 nt, Artificial Sequence
  Description of Artificial Sequence: Synthetic oligonucleotide
  Antisense strand to SEQ ID NO: 2536022
uaaucucaggcacuuagca

SEQ ID NO: 2536024 - RNA, 19 nt, Artificial Sequence
  Description of Artificial Sequence: Synthetic oligonucleotide
  Sense strand starting at position 144 of SEQ ID NO: 1888476
uuuagauauuccuucugua

SEQ ID NO: 2536025 - RNA, 19 nt, Artificial Sequence
  Description of Artificial Sequence: Synthetic oligonucleotide
  Antisense strand to SEQ ID NO: 2536024
uacagaaggaauaucuaaa

SEQ ID NO: 2536026 - RNA, 19 nt, Artificial Sequence
  Description of Artificial Sequence: Synthetic oligonucleotide
  Sense strand starting at position 2041 of SEQ ID NO: 1888476
cuuccugauuggcuccaaa

SEQ ID NO: 2536027 - RNA, 19 nt, Artificial Sequence
  Description of Artificial Sequence: Synthetic oligonucleotide
  Antisense strand to SEQ ID NO: 2536026
uuuggagccaaucaggaag

SEQ ID NO: 2536028 - RNA, 19 nt, Artificial Sequence
  Description of Artificial Sequence: Synthetic oligonucleotide
  Sense strand starting at position 743 of SEQ ID NO: 1888476
agcaaugugaguggaucua

SEQ ID NO: 2536029 - RNA, 19 nt, Artificial Sequence
  Description of Artificial Sequence: Synthetic oligonucleotide
  Antisense strand to SEQ ID NO: 2536028
uagauccacucacauugcu

SEQ ID NO: 2536030 - RNA, 19 nt, Artificial Sequence
  Description of Artificial Sequence: Synthetic oligonucleotide
  Sense strand starting at position 742 of SEQ ID NO: 1888476
aagcaaugugaguggaucu

SEQ ID NO: 2536031 - RNA, 19 nt, Artificial Sequence
  Description of Artificial Sequence: Synthetic oligonucleotide
  Antisense strand to SEQ ID NO: 2536030
agauccacucacauugcuu

SEQ ID NO: 2536032 - RNA, 19 nt, Artificial Sequence
  Description of Artificial Sequence: Synthetic oligonucleotide
  Sense strand starting at position 1858 of SEQ ID NO: 1888476
ggaggcguuuaccuggaaa

SEQ ID NO: 2536033 - RNA, 19 nt, Artificial Sequence
  Description of Artificial Sequence: Synthetic oligonucleotide
  Antisense strand to SEQ ID NO: 2536032
uuuccagguaaacgccucc

SEQ ID NO: 2536034 - RNA, 19 nt, Artificial Sequence
  Description of Artificial Sequence: Synthetic oligonucleotide
  Sense strand starting at position 3269 of SEQ ID NO: 1888476
gcagauuacuugguuaauu

SEQ ID NO: 2536035 - RNA, 19 nt, Artificial Sequence
  Description of Artificial Sequence: Synthetic oligonucleotide
  Antisense strand to SEQ ID NO: 2536034
aauuaaccaaguaaucugc

SEQ ID NO: 2536036 - RNA, 19 nt, Artificial Sequence
  Description of Artificial Sequence: Synthetic oligonucleotide
  Sense strand starting at position 2965 of SEQ ID NO: 1888476
cccggugucggugcguaaa

SEQ ID NO: 2536037 - RNA, 19 nt, Artificial Sequence
  Description of Artificial Sequence: Synthetic oligonucleotide
  Antisense strand to SEQ ID NO: 2536036
uuuacgcaccgacaccggg

SEQ ID NO: 2536038 - RNA, 19 nt, Artificial Sequence
  Description of Artificial Sequence: Synthetic oligonucleotide
  Sense strand starting at position 3330 of SEQ ID NO: 1888476
gcuuuauuugccugucuua

SEQ ID NO: 2536039 - RNA, 19 nt, Artificial Sequence
  Description of Artificial Sequence: Synthetic oligonucleotide
  Antisense strand to SEQ ID NO: 2536038
uaagacaggcaaauaaagc

SEQ ID NO: 2536040 - RNA, 19 nt, Artificial Sequence
  Description of Artificial Sequence: Synthetic oligonucleotide
  Sense strand starting at position 3178 of SEQ ID NO: 1888476
cuaagaugucaaggccuuu

SEQ ID NO: 2536041 - RNA, 19 nt, Artificial Sequence
  Description of Artificial Sequence: Synthetic oligonucleotide
  Antisense strand to SEQ ID NO: 2536040
aaaggccuugacaucuuag

SEQ ID NO: 2536042 - RNA, 19 nt, Artificial Sequence
  Description of Artificial Sequence: Synthetic oligonucleotide
  Sense strand starting at position 61 of SEQ ID NO: 1888476
uuguuugcagacugauaac

SEQ ID NO: 2536043 - RNA, 19 nt, Artificial Sequence
  Description of Artificial Sequence: Synthetic oligonucleotide
  Antisense strand to SEQ ID NO: 2536042
guuaucagucugcaaacaa

SEQ ID NO: 2536044 - RNA, 19 nt, Artificial Sequence
  Description of Artificial Sequence: Synthetic oligonucleotide
  Sense strand starting at position 3329 of SEQ ID NO: 1888476
ggcuuuauuugccugucuu

SEQ ID NO: 2536045 - RNA, 19 nt, Artificial Sequence
  Description of Artificial Sequence: Synthetic oligonucleotide
  Antisense strand to SEQ ID NO: 2536044
aagacaggcaaauaaagcc

SEQ ID NO: 2536046 - RNA, 19 nt, Artificial Sequence
  Description of Artificial Sequence: Synthetic oligonucleotide
  Sense strand starting at position 3266 of SEQ ID NO: 1888476
cuggcagauuacuugguua

SEQ ID NO: 2536047 - RNA, 19 nt, Artificial Sequence
  Description of Artificial Sequence: Synthetic oligonucleotide
  Antisense strand to SEQ ID NO: 2536046
uaaccaaguaaucugccag

SEQ ID NO: 2536048 - RNA, 19 nt, Artificial Sequence
  Description of Artificial Sequence: Synthetic oligonucleotide
  Sense strand starting at position 3978 of SEQ ID NO: 1888476
acuguaauuuaacaggguu

SEQ ID NO: 2536049 - RNA, 19 nt, Artificial Sequence
  Description of Artificial Sequence: Synthetic oligonucleotide
  Antisense strand to SEQ ID NO: 2536048
aacccuguuaaauuacagu

SEQ ID NO: 2536050 - RNA, 19 nt, Artificial Sequence
  Description of Artificial Sequence: Synthetic oligonucleotide
  Sense strand starting at position 3965 of SEQ ID NO: 1888476
uguuccuuccgagacugua

SEQ ID NO: 2536051 - RNA, 19 nt, Artificial Sequence
  Description of Artificial Sequence: Synthetic oligonucleotide
  Antisense strand to SEQ ID NO: 2536050
uacagucucggaaggaaca

SEQ ID NO: 2536052 - RNA, 19 nt, Artificial Sequence
  Description of Artificial Sequence: Synthetic oligonucleotide
  Sense strand starting at position 1622 of SEQ ID NO: 1888476
caucuuaacucgguucuga

SEQ ID NO: 2536053 - RNA, 19 nt, Artificial Sequence
  Description of Artificial Sequence: Synthetic oligonucleotide
  Antisense strand to SEQ ID NO: 2536052
ucagaaccgaguuaagaug

SEQ ID NO: 2536054 - RNA, 19 nt, Artificial Sequence
  Description of Artificial Sequence: Synthetic oligonucleotide
  Sense strand starting at position 3344 of SEQ ID NO: 1888476
ucuuauucugcuuauguua

SEQ ID NO: 2536055 - RNA, 19 nt, Artificial Sequence
  Description of Artificial Sequence: Synthetic oligonucleotide
  Antisense strand to SEQ ID NO: 2536054
uaacauaagcagaauaaga

SEQ ID NO: 2536056 - RNA, 19 nt, Artificial Sequence
  Description of Artificial Sequence: Synthetic oligonucleotide
  Sense strand starting at position 836 of SEQ ID NO: 1888476
guauuacuuugggcacuua

SEQ ID NO: 2536057 - RNA, 19 nt, Artificial Sequence
  Description of Artificial Sequence: Synthetic oligonucleotide
  Antisense strand to SEQ ID NO: 2536056
uaagugcccaaaguaauac

SEQ ID NO: 2536058 - RNA, 19 nt, Artificial Sequence
  Description of Artificial Sequence: Synthetic oligonucleotide
  Sense strand starting at position 3968 of SEQ ID NO: 1888476
uccuuccgagacuguaauu

SEQ ID NO: 2536059 - RNA, 19 nt, Artificial Sequence
  Description of Artificial Sequence: Synthetic oligonucleotide
  Antisense strand to SEQ ID NO: 2536058
aauuacagucucggaagga

SEQ ID NO: 2536060 - RNA, 19 nt, Artificial Sequence
  Description of Artificial Sequence: Synthetic oligonucleotide
  Sense strand starting at position 72 of SEQ ID NO: 1888476
cugauaacgcauuaugugu

SEQ ID NO: 2536061 - RNA, 19 nt, Artificial Sequence
  Description of Artificial Sequence: Synthetic oligonucleotide
  Antisense strand to SEQ ID NO: 2536060
acacauaaugcguuaucag

SEQ ID NO: 2536062 - RNA, 19 nt, Artificial Sequence
  Description of Artificial Sequence: Synthetic oligonucleotide
  Sense strand starting at position 1861 of SEQ ID NO: 1888476
ggcguuuaccuggaaagcu

SEQ ID NO: 2536063 - RNA, 19 nt, Artificial Sequence
  Description of Artificial Sequence: Synthetic oligonucleotide
  Antisense strand to SEQ ID NO: 2536062
agcuuuccagguaaacgcc

SEQ ID NO: 2536064 - RNA, 19 nt, Artificial Sequence
  Description of Artificial Sequence: Synthetic oligonucleotide
  Sense strand starting at position 1105 of SEQ ID NO: 1888476
gcgcaaauuauguaaaguc

SEQ ID NO: 2536065 - RNA, 19 nt, Artificial Sequence
  Description of Artificial Sequence: Synthetic oligonucleotide
  Antisense strand to SEQ ID NO: 2536064
gacuuuacauaauuugcgc

SEQ ID NO: 2536066 - RNA, 19 nt, Artificial Sequence
  Description of Artificial Sequence: Synthetic oligonucleotide
  Sense strand starting at position 3235 of SEQ ID NO: 1888476
gguguacuuucucuuuaug

SEQ ID NO: 2536067 - RNA, 19 nt, Artificial Sequence
  Description of Artificial Sequence: Synthetic oligonucleotide
  Antisense strand to SEQ ID NO: 2536066
cauaaagagaaaguacacc

SEQ ID NO: 2536068 - RNA, 19 nt, Artificial Sequence
  Description of Artificial Sequence: Synthetic oligonucleotide
  Sense strand starting at position 119 of SEQ ID NO: 1888476
auaaacugcuucgucuaau

SEQ ID NO: 2536069 - RNA, 19 nt, Artificial Sequence
  Description of Artificial Sequence: Synthetic oligonucleotide
  Antisense strand to SEQ ID NO: 2536068
auuagacgaagcaguuuau

SEQ ID NO: 2536070 - RNA, 19 nt, Artificial Sequence
  Description of Artificial Sequence: Synthetic oligonucleotide
  Sense strand starting at position 1670 of SEQ ID NO: 1888476
ggcgaaguuccucgaggga

SEQ ID NO: 2536071 - RNA, 19 nt, Artificial Sequence
  Description of Artificial Sequence: Synthetic oligonucleotide
  Antisense strand to SEQ ID NO: 2536070
ucccucgaggaacuucgcc

SEQ ID NO: 2536072 - RNA, 19 nt, Artificial Sequence
  Description of Artificial Sequence: Synthetic oligonucleotide
  Sense strand starting at position 2174 of SEQ ID NO: 1888476
gacuauguccgccauguua

SEQ ID NO: 2536073 - RNA, 19 nt, Artificial Sequence
  Description of Artificial Sequence: Synthetic oligonucleotide
  Antisense strand to SEQ ID NO: 2536072
uaacauggcggacauaguc

SEQ ID NO: 2536074 - RNA, 19 nt, Artificial Sequence
  Description of Artificial Sequence: Synthetic oligonucleotide
  Sense strand starting at position 1795 of SEQ ID NO: 1888476
gaagaaaggugccaaagaa

SEQ ID NO: 2536075 - RNA, 19 nt, Artificial Sequence
  Description of Artificial Sequence: Synthetic oligonucleotide
  Antisense strand to SEQ ID NO: 2536074
uucuuuggcaccuuucuuc

SEQ ID NO: 2536076 - RNA, 19 nt, Artificial Sequence
  Description of Artificial Sequence: Synthetic oligonucleotide
  Sense strand starting at position 1528 of SEQ ID NO: 1888477
cagagucaugagcagugaa

SEQ ID NO: 2536077 - RNA, 19 nt, Artificial Sequence
  Description of Artificial Sequence: Synthetic oligonucleotide
  Antisense strand to SEQ ID NO: 2536076
uucacugcucaugacucug

SEQ ID NO: 2536078 - RNA, 19 nt, Artificial Sequence
  Description of Artificial Sequence: Synthetic oligonucleotide
  Sense strand starting at position 945 of SEQ ID NO: 1888477
cagggagagcgucacaaua

SEQ ID NO: 2536079 - RNA, 19 nt, Artificial Sequence
  Description of Artificial Sequence: Synthetic oligonucleotide
  Antisense strand to SEQ ID NO: 2536078
uauugugacgcucucccug

SEQ ID NO: 2536080 - RNA, 19 nt, Artificial Sequence
  Description of Artificial Sequence: Synthetic oligonucleotide
  Sense strand starting at position 1216 of SEQ ID NO: 1888477
ggaagacuucugcagugac

SEQ ID NO: 2536081 - RNA, 19 nt, Artificial Sequence
  Description of Artificial Sequence: Synthetic oligonucleotide
  Antisense strand to SEQ ID NO: 2536080
gucacugcagaagucuucc

SEQ ID NO: 2536082 - RNA, 19 nt, Artificial Sequence
  Description of Artificial Sequence: Synthetic oligonucleotide
  Sense strand starting at position 2444 of SEQ ID NO: 1888477
gguauaacuguggaacagu

SEQ ID NO: 2536083 - RNA, 19 nt, Artificial Sequence
  Description of Artificial Sequence: Synthetic oligonucleotide
  Antisense strand to SEQ ID NO: 2536082
acuguuccacaguuauacc

SEQ ID NO: 2536084 - RNA, 19 nt, Artificial Sequence
  Description of Artificial Sequence: Synthetic oligonucleotide
  Sense strand starting at position 502 of SEQ ID NO: 1888477
gcuggauuccuacacucaa

SEQ ID NO: 2536085 - RNA, 19 nt, Artificial Sequence
  Description of Artificial Sequence: Synthetic oligonucleotide
  Antisense strand to SEQ ID NO: 2536084
uugaguguaggaauccagc

SEQ ID NO: 2536086 - RNA, 19 nt, Artificial Sequence
  Description of Artificial Sequence: Synthetic oligonucleotide
  Sense strand starting at position 85 of SEQ ID NO: 1888477
guggcauuuacacggguaa

SEQ ID NO: 2536087 - RNA, 19 nt, Artificial Sequence
  Description of Artificial Sequence: Synthetic oligonucleotide
  Antisense strand to SEQ ID NO: 2536086
uuacccguguaaaugccac

SEQ ID NO: 2536088 - RNA, 19 nt, Artificial Sequence
  Description of Artificial Sequence: Synthetic oligonucleotide
  Sense strand starting at position 2420 of SEQ ID NO: 1888477
ucaucaucuguguaaacau

SEQ ID NO: 2536089 - RNA, 19 nt, Artificial Sequence
  Description of Artificial Sequence: Synthetic oligonucleotide
  Antisense strand to SEQ ID NO: 2536088
auguuuacacagaugauga

SEQ ID NO: 2536090 - RNA, 19 nt, Artificial Sequence
  Description of Artificial Sequence: Synthetic oligonucleotide
  Sense strand starting at position 253 of SEQ ID NO: 1888477
cugggucuauauccuaaga

SEQ ID NO: 2536091 - RNA, 19 nt, Artificial Sequence
  Description of Artificial Sequence: Synthetic oligonucleotide
  Antisense strand to SEQ ID NO: 2536090
ucuuaggauauagacccag

SEQ ID NO: 2536092 - RNA, 19 nt, Artificial Sequence
  Description of Artificial Sequence: Synthetic oligonucleotide
  Sense strand starting at position 2453 of SEQ ID NO: 1888477
guggaacagucaguaaaua

SEQ ID NO: 2536093 - RNA, 19 nt, Artificial Sequence
  Description of Artificial Sequence: Synthetic oligonucleotide
  Antisense strand to SEQ ID NO: 2536092
uauuuacugacuguuccac

SEQ ID NO: 2536094 - RNA, 19 nt, Artificial Sequence
  Description of Artificial Sequence: Synthetic oligonucleotide
  Sense strand starting at position 263 of SEQ ID NO: 1888477
auccuaagaccguggaaau

SEQ ID NO: 2536095 - RNA, 19 nt, Artificial Sequence
  Description of Artificial Sequence: Synthetic oligonucleotide
  Antisense strand to SEQ ID NO: 2536094
auuuccacggucuuaggau

SEQ ID NO: 2536096 - RNA, 19 nt, Artificial Sequence
  Description of Artificial Sequence: Synthetic oligonucleotide
  Sense strand starting at position 2442 of SEQ ID NO: 1888477
uugguauaacuguggaaca

SEQ ID NO: 2536097 - RNA, 19 nt, Artificial Sequence
  Description of Artificial Sequence: Synthetic oligonucleotide
  Antisense strand to SEQ ID NO: 2536096
uguuccacaguuauaccaa

SEQ ID NO: 2536098 - RNA, 19 nt, Artificial Sequence
  Description of Artificial Sequence: Synthetic oligonucleotide
  Sense strand starting at position 550 of SEQ ID NO: 1888477
acaccagagugauuguuua

SEQ ID NO: 2536099 - RNA, 19 nt, Artificial Sequence
  Description of Artificial Sequence: Synthetic oligonucleotide
  Antisense strand to SEQ ID NO: 2536098
uaaacaaucacucuggugu

SEQ ID NO: 2536100 - RNA, 19 nt, Artificial Sequence
  Description of Artificial Sequence: Synthetic oligonucleotide
  Sense strand starting at position 264 of SEQ ID NO: 1888477
uccuaagaccguggaaauc

SEQ ID NO: 2536101 - RNA, 19 nt, Artificial Sequence
  Description of Artificial Sequence: Synthetic oligonucleotide
  Antisense strand to SEQ ID NO: 2536100
gauuuccacggucuuagga

SEQ ID NO: 2536102 - RNA, 19 nt, Artificial Sequence
  Description of Artificial Sequence: Synthetic oligonucleotide
  Sense strand starting at position 2419 of SEQ ID NO: 1888477
aucaucaucuguguaaaca

SEQ ID NO: 2536103 - RNA, 19 nt, Artificial Sequence
  Description of Artificial Sequence: Synthetic oligonucleotide
  Antisense strand to SEQ ID NO: 2536102
uguuuacacagaugaugau

SEQ ID NO: 2536104 - RNA, 19 nt, Artificial Sequence
  Description of Artificial Sequence: Synthetic oligonucleotide
  Sense strand starting at position 2478 of SEQ ID NO: 1888477
aaucgaagaguaggucuau

SEQ ID NO: 2536105 - RNA, 19 nt, Artificial Sequence
  Description of Artificial Sequence: Synthetic oligonucleotide
  Antisense strand to SEQ ID NO: 2536104
auagaccuacucuucgauu

SEQ ID NO: 2536106 - RNA, 19 nt, Artificial Sequence
  Description of Artificial Sequence: Synthetic oligonucleotide
  Sense strand starting at position 1714 of SEQ ID NO: 1888477
gggugaagggcucacuugu

SEQ ID NO: 2536107 - RNA, 19 nt, Artificial Sequence
  Description of Artificial Sequence: Synthetic oligonucleotide
  Antisense strand to SEQ ID NO: 2536106
acaagugagcccuucaccc

SEQ ID NO: 2536108 - RNA, 19 nt, Artificial Sequence
  Description of Artificial Sequence: Synthetic oligonucleotide
  Sense strand starting at position 2682 of SEQ ID NO: 1888477
cggagucuacagugaggau

SEQ ID NO: 2536109 - RNA, 19 nt, Artificial Sequence
  Description of Artificial Sequence: Synthetic oligonucleotide
  Antisense strand to SEQ ID NO: 2536108
auccucacuguagacuccg

SEQ ID NO: 2536110 - RNA, 19 nt, Artificial Sequence
  Description of Artificial Sequence: Synthetic oligonucleotide
  Sense strand starting at position 2479 of SEQ ID NO: 1888477
aucgaagaguaggucuauu

SEQ ID NO: 2536111 - RNA, 19 nt, Artificial Sequence
  Description of Artificial Sequence: Synthetic oligonucleotide
  Antisense strand to SEQ ID NO: 2536110
aauagaccuacucuucgau

SEQ ID NO: 2536112 - RNA, 19 nt, Artificial Sequence
  Description of Artificial Sequence: Synthetic oligonucleotide
  Sense strand starting at position 1624 of SEQ ID NO: 1888477
uuaagaaugugucccgaga

SEQ ID NO: 2536113 - RNA, 19 nt, Artificial Sequence
  Description of Artificial Sequence: Synthetic oligonucleotide
  Antisense strand to SEQ ID NO: 2536112
ucucgggacacauucuuaa

SEQ ID NO: 2536114 - RNA, 19 nt, Artificial Sequence
  Description of Artificial Sequence: Synthetic oligonucleotide
  Sense strand starting at position 731 of SEQ ID NO: 1888477
cugagauguccucgaaauu

SEQ ID NO: 2536115 - RNA, 19 nt, Artificial Sequence
  Description of Artificial Sequence: Synthetic oligonucleotide
  Antisense strand to SEQ ID NO: 2536114
aauuucgaggacaucucag

SEQ ID NO: 2536116 - RNA, 19 nt, Artificial Sequence
  Description of Artificial Sequence: Synthetic oligonucleotide
  Sense strand starting at position 2344 of SEQ ID NO: 1888477
uaucuucgugcagagaacu

SEQ ID NO: 2536117 - RNA, 19 nt, Artificial Sequence
  Description of Artificial Sequence: Synthetic oligonucleotide
  Antisense strand to SEQ ID NO: 2536116
aguucucugcacgaagaua

SEQ ID NO: 2536118 - RNA, 19 nt, Artificial Sequence
  Description of Artificial Sequence: Synthetic oligonucleotide
  Sense strand starting at position 2342 of SEQ ID NO: 1888477
uuuaucuucgugcagagaa

SEQ ID NO: 2536119 - RNA, 19 nt, Artificial Sequence
  Description of Artificial Sequence: Synthetic oligonucleotide
  Antisense strand to SEQ ID NO: 2536118
uucucugcacgaagauaaa

SEQ ID NO: 2536120 - RNA, 19 nt, Artificial Sequence
  Description of Artificial Sequence: Synthetic oligonucleotide
  Sense strand starting at position 2417 of SEQ ID NO: 1888477
uuaucaucaucuguguaaa

SEQ ID NO: 2536121 - RNA, 19 nt, Artificial Sequence
  Description of Artificial Sequence: Synthetic oligonucleotide
  Antisense strand to SEQ ID NO: 2536120
uuuacacagaugaugauaa

SEQ ID NO: 2536122 - RNA, 19 nt, Artificial Sequence
  Description of Artificial Sequence: Synthetic oligonucleotide
  Sense strand starting at position 558 of SEQ ID NO: 1888477
gugauuguuuauuccauaa

SEQ ID NO: 2536123 - RNA, 19 nt, Artificial Sequence
  Description of Artificial Sequence: Synthetic oligonucleotide
  Antisense strand to SEQ ID NO: 2536122
uuauggaauaaacaaucac

SEQ ID NO: 2536124 - RNA, 19 nt, Artificial Sequence
  Description of Artificial Sequence: Synthetic oligonucleotide
  Sense strand starting at position 557 of SEQ ID NO: 1888477
agugauuguuuauuccaua

SEQ ID NO: 2536125 - RNA, 19 nt, Artificial Sequence
  Description of Artificial Sequence: Synthetic oligonucleotide
  Antisense strand to SEQ ID NO: 2536124
uauggaauaaacaaucacu

SEQ ID NO: 2536126 - RNA, 19 nt, Artificial Sequence
  Description of Artificial Sequence: Synthetic oligonucleotide
  Sense strand starting at position 2376 of SEQ ID NO: 1888477
gguuauuccggucagugaa

SEQ ID NO: 2536127 - RNA, 19 nt, Artificial Sequence
  Description of Artificial Sequence: Synthetic oligonucleotide
  Antisense strand to SEQ ID NO: 2536126
uucacugaccggaauaacc

SEQ ID NO: 2536128 - RNA, 19 nt, Artificial Sequence
  Description of Artificial Sequence: Synthetic oligonucleotide
  Sense strand starting at position 2489 of SEQ ID NO: 1888477
aggucuauugcauaugcua

SEQ ID NO: 2536129 - RNA, 19 nt, Artificial Sequence
  Description of Artificial Sequence: Synthetic oligonucleotide
  Antisense strand to SEQ ID NO: 2536128
uagcauaugcaauagaccu

SEQ ID NO: 2536130 - RNA, 19 nt, Artificial Sequence
  Description of Artificial Sequence: Synthetic oligonucleotide
  Sense strand starting at position 2607 of SEQ ID NO: 1888477
agugucagugcggacuaaa

SEQ ID NO: 2536131 - RNA, 19 nt, Artificial Sequence
  Description of Artificial Sequence: Synthetic oligonucleotide
  Antisense strand to SEQ ID NO: 2536130
uuuaguccgcacugacacu

SEQ ID NO: 2536132 - RNA, 19 nt, Artificial Sequence
  Description of Artificial Sequence: Synthetic oligonucleotide
  Sense strand starting at position 2672 of SEQ ID NO: 1888477
cugguucucccggagucua

SEQ ID NO: 2536133 - RNA, 19 nt, Artificial Sequence
  Description of Artificial Sequence: Synthetic oligonucleotide
  Antisense strand to SEQ ID NO: 2536132
uagacuccgggagaaccag

SEQ ID NO: 2536134 - RNA, 19 nt, Artificial Sequence
  Description of Artificial Sequence: Synthetic oligonucleotide
  Sense strand starting at position 2576 of SEQ ID NO: 1888477
caccuaaacguugguaacu

SEQ ID NO: 2536135 - RNA, 19 nt, Artificial Sequence
  Description of Artificial Sequence: Synthetic oligonucleotide
  Antisense strand to SEQ ID NO: 2536134
aguuaccaacguuuaggug

SEQ ID NO: 2536136 - RNA, 19 nt, Artificial Sequence
  Description of Artificial Sequence: Synthetic oligonucleotide
  Sense strand starting at position 230 of SEQ ID NO: 1888477
uccacuuaaucucucgagu

SEQ ID NO: 2536137 - RNA, 19 nt, Artificial Sequence
  Description of Artificial Sequence: Synthetic oligonucleotide
  Antisense strand to SEQ ID NO: 2536136
acucgagagauuaagugga

SEQ ID NO: 2536138 - RNA, 19 nt, Artificial Sequence
  Description of Artificial Sequence: Synthetic oligonucleotide
  Sense strand starting at position 1612 of SEQ ID NO: 1888477
gcacguaucucuuuaagaa

SEQ ID NO: 2536139 - RNA, 19 nt, Artificial Sequence
  Description of Artificial Sequence: Synthetic oligonucleotide
  Antisense strand to SEQ ID NO: 2536138
uucuuaaagagauacgugc

SEQ ID NO: 2536140 - RNA, 19 nt, Artificial Sequence
  Description of Artificial Sequence: Synthetic oligonucleotide
  Sense strand starting at position 334 of SEQ ID NO: 1888477
guucuucucgugggagaca

SEQ ID NO: 2536141 - RNA, 19 nt, Artificial Sequence
  Description of Artificial Sequence: Synthetic oligonucleotide
  Antisense strand to SEQ ID NO: 2536140
ugucucccacgagaagaac

SEQ ID NO: 2536142 - RNA, 19 nt, Artificial Sequence
  Description of Artificial Sequence: Synthetic oligonucleotide
  Sense strand starting at position 1858 of SEQ ID NO: 1888477
gagugcuuaccgcauacca

SEQ ID NO: 2536143 - RNA, 19 nt, Artificial Sequence
  Description of Artificial Sequence: Synthetic oligonucleotide
  Antisense strand to SEQ ID NO: 2536142
ugguaugcgguaagcacuc

SEQ ID NO: 2536144 - RNA, 19 nt, Artificial Sequence
  Description of Artificial Sequence: Synthetic oligonucleotide
  Sense strand starting at position 292 of SEQ ID NO: 1888477
caccguauccuguaggcau

SEQ ID NO: 2536145 - RNA, 19 nt, Artificial Sequence
  Description of Artificial Sequence: Synthetic oligonucleotide
  Antisense strand to SEQ ID NO: 2536144
augccuacaggauacggug

SEQ ID NO: 2536146 - RNA, 19 nt, Artificial Sequence
  Description of Artificial Sequence: Synthetic oligonucleotide
  Sense strand starting at position 2339 of SEQ ID NO: 1888477
aacuuuaucuucgugcaga

SEQ ID NO: 2536147 - RNA, 19 nt, Artificial Sequence
  Description of Artificial Sequence: Synthetic oligonucleotide
  Antisense strand to SEQ ID NO: 2536146
ucugcacgaagauaaaguu

SEQ ID NO: 2536148 - RNA, 19 nt, Artificial Sequence
  Description of Artificial Sequence: Synthetic oligonucleotide
  Sense strand starting at position 16 of SEQ ID NO: 1888477
cucugaucccaccguucua

SEQ ID NO: 2536149 - RNA, 19 nt, Artificial Sequence
  Description of Artificial Sequence: Synthetic oligonucleotide
  Antisense strand to SEQ ID NO: 2536148
uagaacggugggaucagag

SEQ ID NO: 2536150 - RNA, 19 nt, Artificial Sequence
  Description of Artificial Sequence: Synthetic oligonucleotide
  Sense strand starting at position 917 of SEQ ID NO: 1888477
gaauguucccagugccauu

SEQ ID NO: 2536151 - RNA, 19 nt, Artificial Sequence
  Description of Artificial Sequence: Synthetic oligonucleotide
  Antisense strand to SEQ ID NO: 2536150
aauggcacugggaacauuc

SEQ ID NO: 2536152 - RNA, 19 nt, Artificial Sequence
  Description of Artificial Sequence: Synthetic oligonucleotide
  Sense strand starting at position 775 of SEQ ID NO: 1888477
aggauuccuucucaaagag

SEQ ID NO: 2536153 - RNA, 19 nt, Artificial Sequence
  Description of Artificial Sequence: Synthetic oligonucleotide
  Antisense strand to SEQ ID NO: 2536152
cucuuugagaaggaauccu

SEQ ID NO: 2536154 - RNA, 19 nt, Artificial Sequence
  Description of Artificial Sequence: Synthetic oligonucleotide
  Sense strand starting at position 3941 of SEQ ID NO: 1888477
gacggugugcccuggagau

SEQ ID NO: 2536155 - RNA, 19 nt, Artificial Sequence
  Description of Artificial Sequence: Synthetic oligonucleotide
  Antisense strand to SEQ ID NO: 2536154
aucuccagggcacaccguc

SEQ ID NO: 2536156 - RNA, 19 nt, Artificial Sequence
  Description of Artificial Sequence: Synthetic oligonucleotide
  Sense strand starting at position 1310 of SEQ ID NO: 1888478
cacagugaagacugaagua

SEQ ID NO: 2536157 - RNA, 19 nt, Artificial Sequence
  Description of Artificial Sequence: Synthetic oligonucleotide
  Antisense strand to SEQ ID NO: 2536156
uacuucagucuucacugug

SEQ ID NO: 2536158 - RNA, 19 nt, Artificial Sequence
  Description of Artificial Sequence: Synthetic oligonucleotide
  Sense strand starting at position 3891 of SEQ ID NO: 1888478
ugccuuccaggauauggau

SEQ ID NO: 2536159 - RNA, 19 nt, Artificial Sequence
  Description of Artificial Sequence: Synthetic oligonucleotide
  Antisense strand to SEQ ID NO: 2536158
auccauauccuggaaggca

SEQ ID NO: 2536160 - RNA, 19 nt, Artificial Sequence
  Description of Artificial Sequence: Synthetic oligonucleotide
  Sense strand starting at position 3898 of SEQ ID NO: 1888478
caggauauggauugucauu

SEQ ID NO: 2536161 - RNA, 19 nt, Artificial Sequence
  Description of Artificial Sequence: Synthetic oligonucleotide
  Antisense strand to SEQ ID NO: 2536160
aaugacaauccauauccug

SEQ ID NO: 2536162 - RNA, 19 nt, Artificial Sequence
  Description of Artificial Sequence: Synthetic oligonucleotide
  Sense strand starting at position 2961 of SEQ ID NO: 1888478
ugcgaaauaccugaacuuu

SEQ ID NO: 2536163 - RNA, 19 nt, Artificial Sequence
  Description of Artificial Sequence: Synthetic oligonucleotide
  Antisense strand to SEQ ID NO: 2536162
aaaguucagguauuucgca

SEQ ID NO: 2536164 - RNA, 19 nt, Artificial Sequence
  Description of Artificial Sequence: Synthetic oligonucleotide
  Sense strand starting at position 2165 of SEQ ID NO: 1888478
cccggagacccggaguuaa

SEQ ID NO: 2536165 - RNA, 19 nt, Artificial Sequence
  Description of Artificial Sequence: Synthetic oligonucleotide
  Antisense strand to SEQ ID NO: 2536164
uuaacuccgggucuccggg

SEQ ID NO: 2536166 - RNA, 19 nt, Artificial Sequence
  Description of Artificial Sequence: Synthetic oligonucleotide
  Sense strand starting at position 730 of SEQ ID NO: 1888478
gcuaguaagguuuaauuag

SEQ ID NO: 2536167 - RNA, 19 nt, Artificial Sequence
  Description of Artificial Sequence: Synthetic oligonucleotide
  Antisense strand to SEQ ID NO: 2536166
cuaauuaaaccuuacuagc

SEQ ID NO: 2536168 - RNA, 19 nt, Artificial Sequence
  Description of Artificial Sequence: Synthetic oligonucleotide
  Sense strand starting at position 1552 of SEQ ID NO: 1888478
gcacuacuacucugggaau

SEQ ID NO: 2536169 - RNA, 19 nt, Artificial Sequence
  Description of Artificial Sequence: Synthetic oligonucleotide
  Antisense strand to SEQ ID NO: 2536168
auucccagaguaguagugc

SEQ ID NO: 2536170 - RNA, 19 nt, Artificial Sequence
  Description of Artificial Sequence: Synthetic oligonucleotide
  Sense strand starting at position 1116 of SEQ ID NO: 1888478
acuaucaccuagucuuuga

SEQ ID NO: 2536171 - RNA, 19 nt, Artificial Sequence
  Description of Artificial Sequence: Synthetic oligonucleotide
  Antisense strand to SEQ ID NO: 2536170
ucaaagacuaggugauagu

SEQ ID NO: 2536172 - RNA, 19 nt, Artificial Sequence
  Description of Artificial Sequence: Synthetic oligonucleotide
  Sense strand starting at position 2869 of SEQ ID NO: 1888478
acuuccagugucugaugaa

SEQ ID NO: 2536173 - RNA, 19 nt, Artificial Sequence
  Description of Artificial Sequence: Synthetic oligonucleotide
  Antisense strand to SEQ ID NO: 2536172
uucaucagacacuggaagu

SEQ ID NO: 2536174 - RNA, 19 nt, Artificial Sequence
  Description of Artificial Sequence: Synthetic oligonucleotide
  Sense strand starting at position 3734 of SEQ ID NO: 1888478
cccuguugucuccaauauu

SEQ ID NO: 2536175 - RNA, 19 nt, Artificial Sequence
  Description of Artificial Sequence: Synthetic oligonucleotide
  Antisense strand to SEQ ID NO: 2536174
aauauuggagacaacaggg

SEQ ID NO: 2536176 - RNA, 19 nt, Artificial Sequence
  Description of Artificial Sequence: Synthetic oligonucleotide
  Sense strand starting at position 3845 of SEQ ID NO: 1888478
cgaugauuggcaggguuua

SEQ ID NO: 2536177 - RNA, 19 nt, Artificial Sequence
  Description of Artificial Sequence: Synthetic oligonucleotide
  Antisense strand to SEQ ID NO: 2536176
uaaacccugccaaucaucg

SEQ ID NO: 2536178 - RNA, 19 nt, Artificial Sequence
  Description of Artificial Sequence: Synthetic oligonucleotide
  Sense strand starting at position 2960 of SEQ ID NO: 1888478
gugcgaaauaccugaacuu

SEQ ID NO: 2536179 - RNA, 19 nt, Artificial Sequence
  Description of Artificial Sequence: Synthetic oligonucleotide
  Antisense strand to SEQ ID NO: 2536178
aaguucagguauuucgcac

SEQ ID NO: 2536180 - RNA, 19 nt, Artificial Sequence
  Description of Artificial Sequence: Synthetic oligonucleotide
  Sense strand starting at position 3752 of SEQ ID NO: 1888478
uggaauaucuagccuugcu

SEQ ID NO: 2536181 - RNA, 19 nt, Artificial Sequence
  Description of Artificial Sequence: Synthetic oligonucleotide
  Antisense strand to SEQ ID NO: 2536180
agcaaggcuagauauucca

SEQ ID NO: 2536182 - RNA, 19 nt, Artificial Sequence
  Description of Artificial Sequence: Synthetic oligonucleotide
  Sense strand starting at position 2952 of SEQ ID NO: 1888478
uauuuauugugcgaaauac

SEQ ID NO: 2536183 - RNA, 19 nt, Artificial Sequence
  Description of Artificial Sequence: Synthetic oligonucleotide
  Antisense strand to SEQ ID NO: 2536182
guauuucgcacaauaaaua

SEQ ID NO: 2536184 - RNA, 19 nt, Artificial Sequence
  Description of Artificial Sequence: Synthetic oligonucleotide
  Sense strand starting at position 2750 of SEQ ID NO: 1888478
gaaacuaauuugugagcuu

SEQ ID NO: 2536185 - RNA, 19 nt, Artificial Sequence
  Description of Artificial Sequence: Synthetic oligonucleotide
  Antisense strand to SEQ ID NO: 2536184
aagcucacaaauuaguuuc

SEQ ID NO: 2536186 - RNA, 19 nt, Artificial Sequence
  Description of Artificial Sequence: Synthetic oligonucleotide
  Sense strand starting at position 172 of SEQ ID NO: 1888478
acauguggauuccacagau

SEQ ID NO: 2536187 - RNA, 19 nt, Artificial Sequence
  Description of Artificial Sequence: Synthetic oligonucleotide
  Antisense strand to SEQ ID NO: 2536186
aucuguggaauccacaugu

SEQ ID NO: 2536188 - RNA, 19 nt, Artificial Sequence
  Description of Artificial Sequence: Synthetic oligonucleotide
  Sense strand starting at position 930 of SEQ ID NO: 1888478
caagcuaaguuugaaggaa

SEQ ID NO: 2536189 - RNA, 19 nt, Artificial Sequence
  Description of Artificial Sequence: Synthetic oligonucleotide
  Antisense strand to SEQ ID NO: 2536188
uuccuucaaacuuagcuug

SEQ ID NO: 2536190 - RNA, 19 nt, Artificial Sequence
  Description of Artificial Sequence: Synthetic oligonucleotide
  Sense strand starting at position 3740 of SEQ ID NO: 1888478
ugucuccaauauuggaaua

SEQ ID NO: 2536191 - RNA, 19 nt, Artificial Sequence
  Description of Artificial Sequence: Synthetic oligonucleotide
  Antisense strand to SEQ ID NO: 2536190
uauuccaauauuggagaca

SEQ ID NO: 2536192 - RNA, 19 nt, Artificial Sequence
  Description of Artificial Sequence: Synthetic oligonucleotide
  Sense strand starting at position 2870 of SEQ ID NO: 1888478
cuuccagugucugaugaac

SEQ ID NO: 2536193 - RNA, 19 nt, Artificial Sequence
  Description of Artificial Sequence: Synthetic oligonucleotide
  Antisense strand to SEQ ID NO: 2536192
guucaucagacacuggaag

SEQ ID NO: 2536194 - RNA, 19 nt, Artificial Sequence
  Description of Artificial Sequence: Synthetic oligonucleotide
  Sense strand starting at position 723 of SEQ ID NO: 1888478
uuuauaagcuaguaagguu

SEQ ID NO: 2536195 - RNA, 19 nt, Artificial Sequence
  Description of Artificial Sequence: Synthetic oligonucleotide
  Antisense strand to SEQ ID NO: 2536194
aaccuuacuagcuuauaaa

SEQ ID NO: 2536196 - RNA, 19 nt, Artificial Sequence
  Description of Artificial Sequence: Synthetic oligonucleotide
  Sense strand starting at position 2872 of SEQ ID NO: 1888478
uccagugucugaugaacau

SEQ ID NO: 2536197 - RNA, 19 nt, Artificial Sequence
  Description of Artificial Sequence: Synthetic oligonucleotide
  Antisense strand to SEQ ID NO: 2536196
auguucaucagacacugga

SEQ ID NO: 2536198 - RNA, 19 nt, Artificial Sequence
  Description of Artificial Sequence: Synthetic oligonucleotide
  Sense strand starting at position 614 of SEQ ID NO: 1888479
gugucuccggaagaagaaa

SEQ ID NO: 2536199 - RNA, 19 nt, Artificial Sequence
  Description of Artificial Sequence: Synthetic oligonucleotide
  Antisense strand to SEQ ID NO: 2536198
uuucuucuuccggagacac

SEQ ID NO: 2536200 - RNA, 19 nt, Artificial Sequence
  Description of Artificial Sequence: Synthetic oligonucleotide
  Sense strand starting at position 2556 of SEQ ID NO: 1888479
cgaggugauccucacaaua

SEQ ID NO: 2536201 - RNA, 19 nt, Artificial Sequence
  Description of Artificial Sequence: Synthetic oligonucleotide
  Antisense strand to SEQ ID NO: 2536200
uauugugaggaucaccucg

SEQ ID NO: 2536202 - RNA, 19 nt, Artificial Sequence
  Description of Artificial Sequence: Synthetic oligonucleotide
  Sense strand starting at position 2449 of SEQ ID NO: 1888479
aacggagggucuuuagaga

SEQ ID NO: 2536203 - RNA, 19 nt, Artificial Sequence
  Description of Artificial Sequence: Synthetic oligonucleotide
  Antisense strand to SEQ ID NO: 2536202
ucucuaaagacccuccguu

SEQ ID NO: 2536204 - RNA, 19 nt, Artificial Sequence
  Description of Artificial Sequence: Synthetic oligonucleotide
  Sense strand starting at position 2546 of SEQ ID NO: 1888479
gcugguuacccgaggugau

SEQ ID NO: 2536205 - RNA, 19 nt, Artificial Sequence
  Description of Artificial Sequence: Synthetic oligonucleotide
  Antisense strand to SEQ ID NO: 2536204
aucaccucggguaaccagc

SEQ ID NO: 2536206 - RNA, 19 nt, Artificial Sequence
  Description of Artificial Sequence: Synthetic oligonucleotide
  Sense strand starting at position 492 of SEQ ID NO: 1888479
cgauaaauucuuuaccuug

SEQ ID NO: 2536207 - RNA, 19 nt, Artificial Sequence
  Description of Artificial Sequence: Synthetic oligonucleotide
  Antisense strand to SEQ ID NO: 2536206
caagguaaagaauuuaucg

SEQ ID NO: 2536208 - RNA, 19 nt, Artificial Sequence
  Description of Artificial Sequence: Synthetic oligonucleotide
  Sense strand starting at position 2436 of SEQ ID NO: 1888479
gaggguucucgggaacgga

SEQ ID NO: 2536209 - RNA, 19 nt, Artificial Sequence
  Description of Artificial Sequence: Synthetic oligonucleotide
  Antisense strand to SEQ ID NO: 2536208
uccguucccgagaacccuc

SEQ ID NO: 2536210 - RNA, 19 nt, Artificial Sequence
  Description of Artificial Sequence: Synthetic oligonucleotide
  Sense strand starting at position 3089 of SEQ ID NO: 1888479
gaguuauuaucaguggaaa

SEQ ID NO: 2536211 - RNA, 19 nt, Artificial Sequence
  Description of Artificial Sequence: Synthetic oligonucleotide
  Antisense strand to SEQ ID NO: 2536210
uuuccacugauaauaacuc

SEQ ID NO: 2536212 - RNA, 19 nt, Artificial Sequence
  Description of Artificial Sequence: Synthetic oligonucleotide
  Sense strand starting at position 371 of SEQ ID NO: 1888479
ucccuuuaacccuagaggu

SEQ ID NO: 2536213 - RNA, 19 nt, Artificial Sequence
  Description of Artificial Sequence: Synthetic oligonucleotide
  Antisense strand to SEQ ID NO: 2536212
accucuaggguuaaaggga

SEQ ID NO: 2536214 - RNA, 19 nt, Artificial Sequence
  Description of Artificial Sequence: Synthetic oligonucleotide
  Sense strand starting at position 1231 of SEQ ID NO: 1888479
gagcucaagguuuauaauu

SEQ ID NO: 2536215 - RNA, 19 nt, Artificial Sequence
  Description of Artificial Sequence: Synthetic oligonucleotide
  Antisense strand to SEQ ID NO: 2536214
aauuauaaaccuugagcuc

SEQ ID NO: 2536216 - RNA, 19 nt, Artificial Sequence
  Description of Artificial Sequence: Synthetic oligonucleotide
  Sense strand starting at position 2389 of SEQ ID NO: 1888479
cagucuugucugucugcga

SEQ ID NO: 2536217 - RNA, 19 nt, Artificial Sequence
  Description of Artificial Sequence: Synthetic oligonucleotide
  Antisense strand to SEQ ID NO: 2536216
ucgcagacagacaagacug

SEQ ID NO: 2536218 - RNA, 19 nt, Artificial Sequence
  Description of Artificial Sequence: Synthetic oligonucleotide
  Sense strand starting at position 3685 of SEQ ID NO: 1888479
cuugauguuccagaaggca

SEQ ID NO: 2536219 - RNA, 19 nt, Artificial Sequence
  Description of Artificial Sequence: Synthetic oligonucleotide
  Antisense strand to SEQ ID NO: 2536218
ugccuucuggaacaucaag

SEQ ID NO: 2536220 - RNA, 19 nt, Artificial Sequence
  Description of Artificial Sequence: Synthetic oligonucleotide
  Sense strand starting at position 850 of SEQ ID NO: 1888479
ugaagugucaagggaucca

SEQ ID NO: 2536221 - RNA, 19 nt, Artificial Sequence
  Description of Artificial Sequence: Synthetic oligonucleotide
  Antisense strand to SEQ ID NO: 2536220
uggaucccuugacacuuca

SEQ ID NO: 2536222 - RNA, 19 nt, Artificial Sequence
  Description of Artificial Sequence: Synthetic oligonucleotide
  Sense strand starting at position 3083 of SEQ ID NO: 1888479
caaguagaguuauuaucag

SEQ ID NO: 2536223 - RNA, 19 nt, Artificial Sequence
  Description of Artificial Sequence: Synthetic oligonucleotide
  Antisense strand to SEQ ID NO: 2536222
cugauaauaacucuacuug

SEQ ID NO: 2536224 - RNA, 19 nt, Artificial Sequence
  Description of Artificial Sequence: Synthetic oligonucleotide
  Sense strand starting at position 3185 of SEQ ID NO: 1888479
ggauaauguucuccuauag

SEQ ID NO: 2536225 - RNA, 19 nt, Artificial Sequence
  Description of Artificial Sequence: Synthetic oligonucleotide
  Antisense strand to SEQ ID NO: 2536224
cuauaggagaacauuaucc

SEQ ID NO: 2536226 - RNA, 19 nt, Artificial Sequence
  Description of Artificial Sequence: Synthetic oligonucleotide
  Sense strand starting at position 3090 of SEQ ID NO: 1888479
aguuauuaucaguggaaau

SEQ ID NO: 2536227 - RNA, 19 nt, Artificial Sequence
  Description of Artificial Sequence: Synthetic oligonucleotide
  Antisense strand to SEQ ID NO: 2536226
auuuccacugauaauaacu

SEQ ID NO: 2536228 - RNA, 19 nt, Artificial Sequence
  Description of Artificial Sequence: Synthetic oligonucleotide
  Sense strand starting at position 3184 of SEQ ID NO: 1888479
uggauaauguucuccuaua

SEQ ID NO: 2536229 - RNA, 19 nt, Artificial Sequence
  Description of Artificial Sequence: Synthetic oligonucleotide
  Antisense strand to SEQ ID NO: 2536228
uauaggagaacauuaucca

SEQ ID NO: 2536230 - RNA, 19 nt, Artificial Sequence
  Description of Artificial Sequence: Synthetic oligonucleotide
  Sense strand starting at position 405 of SEQ ID NO: 1888479
cagagaucgggccacugua

SEQ ID NO: 2536231 - RNA, 19 nt, Artificial Sequence
  Description of Artificial Sequence: Synthetic oligonucleotide
  Antisense strand to SEQ ID NO: 2536230
uacaguggcccgaucucug

SEQ ID NO: 2536232 - RNA, 19 nt, Artificial Sequence
  Description of Artificial Sequence: Synthetic oligonucleotide
  Sense strand starting at position 1239 of SEQ ID NO: 1888479
gguuuauaauucucgaaag

SEQ ID NO: 2536233 - RNA, 19 nt, Artificial Sequence
  Description of Artificial Sequence: Synthetic oligonucleotide
  Antisense strand to SEQ ID NO: 2536232
cuuucgagaauuauaaacc

SEQ ID NO: 2536234 - RNA, 19 nt, Artificial Sequence
  Description of Artificial Sequence: Synthetic oligonucleotide
  Sense strand starting at position 3176 of SEQ ID NO: 1888479
ugccauccuggauaauguu

SEQ ID NO: 2536235 - RNA, 19 nt, Artificial Sequence
  Description of Artificial Sequence: Synthetic oligonucleotide
  Antisense strand to SEQ ID NO: 2536234
aacauuauccaggauggca

SEQ ID NO: 2536236 - RNA, 19 nt, Artificial Sequence
  Description of Artificial Sequence: Synthetic oligonucleotide
  Sense strand starting at position 2649 of SEQ ID NO: 1888479
ucuuucuuauagucagaua

SEQ ID NO: 2536237 - RNA, 19 nt, Artificial Sequence
  Description of Artificial Sequence: Synthetic oligonucleotide
  Antisense strand to SEQ ID NO: 2536236
uaucugacuauaagaaaga

SEQ ID NO: 2536238 - RNA, 19 nt, Artificial Sequence
  Description of Artificial Sequence: Synthetic oligonucleotide
  Sense strand starting at position 3535 of SEQ ID NO: 1888479
agggcagacugguuuauua

SEQ ID NO: 2536239 - RNA, 19 nt, Artificial Sequence
  Description of Artificial Sequence: Synthetic oligonucleotide
  Antisense strand to SEQ ID NO: 2536238
uaauaaaccagucugcccu

SEQ ID NO: 2536240 - RNA, 19 nt, Artificial Sequence
  Description of Artificial Sequence: Synthetic oligonucleotide
  Sense strand starting at position 1236 of SEQ ID NO: 1888479
caagguuuauaauucucga

SEQ ID NO: 2536241 - RNA, 19 nt, Artificial Sequence
  Description of Artificial Sequence: Synthetic oligonucleotide
  Antisense strand to SEQ ID NO: 2536240
ucgagaauuauaaaccuug

SEQ ID NO: 2536242 - RNA, 19 nt, Artificial Sequence
  Description of Artificial Sequence: Synthetic oligonucleotide
  Sense strand starting at position 3182 of SEQ ID NO: 1888479
ccuggauaauguucuccua

SEQ ID NO: 2536243 - RNA, 19 nt, Artificial Sequence
  Description of Artificial Sequence: Synthetic oligonucleotide
  Antisense strand to SEQ ID NO: 2536242
uaggagaacauuauccagg

SEQ ID NO: 2536244 - RNA, 19 nt, Artificial Sequence
  Description of Artificial Sequence: Synthetic oligonucleotide
  Sense strand starting at position 3681 of SEQ ID NO: 1888479
uggucuugauguuccagaa

SEQ ID NO: 2536245 - RNA, 19 nt, Artificial Sequence
  Description of Artificial Sequence: Synthetic oligonucleotide
  Antisense strand to SEQ ID NO: 2536244
uucuggaacaucaagacca

SEQ ID NO: 2536246 - RNA, 19 nt, Artificial Sequence
  Description of Artificial Sequence: Synthetic oligonucleotide
  Sense strand starting at position 774 of SEQ ID NO: 1888479
uugaaaugcaugcagguuu

SEQ ID NO: 2536247 - RNA, 19 nt, Artificial Sequence
  Description of Artificial Sequence: Synthetic oligonucleotide
  Antisense strand to SEQ ID NO: 2536246
aaaccugcaugcauuucaa

SEQ ID NO: 2536248 - RNA, 19 nt, Artificial Sequence
  Description of Artificial Sequence: Synthetic oligonucleotide
  Sense strand starting at position 1227 of SEQ ID NO: 1888479
aacggagcucaagguuuau

SEQ ID NO: 2536249 - RNA, 19 nt, Artificial Sequence
  Description of Artificial Sequence: Synthetic oligonucleotide
  Antisense strand to SEQ ID NO: 2536248
auaaaccuugagcuccguu

SEQ ID NO: 2536250 - RNA, 19 nt, Artificial Sequence
  Description of Artificial Sequence: Synthetic oligonucleotide
  Sense strand starting at position 883 of SEQ ID NO: 1888479
ugaagagucugagaaggga

SEQ ID NO: 2536251 - RNA, 19 nt, Artificial Sequence
  Description of Artificial Sequence: Synthetic oligonucleotide
  Antisense strand to SEQ ID NO: 2536250
ucccuucucagacucuuca

SEQ ID NO: 2536252 - RNA, 19 nt, Artificial Sequence
  Description of Artificial Sequence: Synthetic oligonucleotide
  Sense strand starting at position 2456 of SEQ ID NO: 1888479
ggucuuuagagaugccuuu

SEQ ID NO: 2536253 - RNA, 19 nt, Artificial Sequence
  Description of Artificial Sequence: Synthetic oligonucleotide
  Antisense strand to SEQ ID NO: 2536252
aaaggcaucucuaaagacc

SEQ ID NO: 2536254 - RNA, 19 nt, Artificial Sequence
  Description of Artificial Sequence: Synthetic oligonucleotide
  Sense strand starting at position 667 of SEQ ID NO: 1888479
uuuccagcgcgauaaauau

SEQ ID NO: 2536255 - RNA, 19 nt, Artificial Sequence
  Description of Artificial Sequence: Synthetic oligonucleotide
  Antisense strand to SEQ ID NO: 2536254
auauuuaucgcgcuggaaa

SEQ ID NO: 2536256 - RNA, 19 nt, Artificial Sequence
  Description of Artificial Sequence: Synthetic oligonucleotide
  Sense strand starting at position 3599 of SEQ ID NO: 1888479
agcucauccuucuuguuga

SEQ ID NO: 2536257 - RNA, 19 nt, Artificial Sequence
  Description of Artificial Sequence: Synthetic oligonucleotide
  Antisense strand to SEQ ID NO: 2536256
ucaacaagaaggaugagcu

SEQ ID NO: 2536258 - RNA, 19 nt, Artificial Sequence
  Description of Artificial Sequence: Synthetic oligonucleotide
  Sense strand starting at position 763 of SEQ ID NO: 1888479
uugcucuacguuugaaaug

SEQ ID NO: 2536259 - RNA, 19 nt, Artificial Sequence
  Description of Artificial Sequence: Synthetic oligonucleotide
  Antisense strand to SEQ ID NO: 2536258
cauuucaaacguagagcaa

SEQ ID NO: 2536260 - RNA, 19 nt, Artificial Sequence
  Description of Artificial Sequence: Synthetic oligonucleotide
  Sense strand starting at position 772 of SEQ ID NO: 1888479
guuugaaaugcaugcaggu

SEQ ID NO: 2536261 - RNA, 19 nt, Artificial Sequence
  Description of Artificial Sequence: Synthetic oligonucleotide
  Antisense strand to SEQ ID NO: 2536260
accugcaugcauuucaaac

SEQ ID NO: 2536262 - RNA, 19 nt, Artificial Sequence
  Description of Artificial Sequence: Synthetic oligonucleotide
  Sense strand starting at position 757 of SEQ ID NO: 1888479
uaauguuugcucuacguuu

SEQ ID NO: 2536263 - RNA, 19 nt, Artificial Sequence
  Description of Artificial Sequence: Synthetic oligonucleotide
  Antisense strand to SEQ ID NO: 2536262
aaacguagagcaaacauua

SEQ ID NO: 2536264 - RNA, 19 nt, Artificial Sequence
  Description of Artificial Sequence: Synthetic oligonucleotide
  Sense strand starting at position 421 of SEQ ID NO: 1888479
guacuuguagccuggucaa

SEQ ID NO: 2536265 - RNA, 19 nt, Artificial Sequence
  Description of Artificial Sequence: Synthetic oligonucleotide
  Antisense strand to SEQ ID NO: 2536264
uugaccaggcuacaaguac

SEQ ID NO: 2536266 - RNA, 19 nt, Artificial Sequence
  Description of Artificial Sequence: Synthetic oligonucleotide
  Sense strand starting at position 1201 of SEQ ID NO: 1888479
ugacaaugcucugcugcua

SEQ ID NO: 2536267 - RNA, 19 nt, Artificial Sequence
  Description of Artificial Sequence: Synthetic oligonucleotide
  Antisense strand to SEQ ID NO: 2536266
uagcagcagagcauuguca

SEQ ID NO: 2536268 - RNA, 19 nt, Artificial Sequence
  Description of Artificial Sequence: Synthetic oligonucleotide
  Sense strand starting at position 2312 of SEQ ID NO: 1888479
agugcaguaccgugagauu

SEQ ID NO: 2536269 - RNA, 19 nt, Artificial Sequence
  Description of Artificial Sequence: Synthetic oligonucleotide
  Antisense strand to SEQ ID NO: 2536268
aaucucacgguacugcacu

SEQ ID NO: 2536270 - RNA, 19 nt, Artificial Sequence
  Description of Artificial Sequence: Synthetic oligonucleotide
  Sense strand starting at position 3261 of SEQ ID NO: 1888479
uuugaaauaugucacaaug

SEQ ID NO: 2536271 - RNA, 19 nt, Artificial Sequence
  Description of Artificial Sequence: Synthetic oligonucleotide
  Antisense strand to SEQ ID NO: 2536270
cauugugacauauuucaaa

SEQ ID NO: 2536272 - RNA, 19 nt, Artificial Sequence
  Description of Artificial Sequence: Synthetic oligonucleotide
  Sense strand starting at position 2558 of SEQ ID NO: 1888479
aggugauccucacaauaca

SEQ ID NO: 2536273 - RNA, 19 nt, Artificial Sequence
  Description of Artificial Sequence: Synthetic oligonucleotide
  Antisense strand to SEQ ID NO: 2536272
uguauugugaggaucaccu

SEQ ID NO: 2536274 - RNA, 19 nt, Artificial Sequence
  Description of Artificial Sequence: Synthetic oligonucleotide
  Sense strand starting at position 3215 of SEQ ID NO: 1888479
gggcuaggaucuagguguu

SEQ ID NO: 2536275 - RNA, 19 nt, Artificial Sequence
  Description of Artificial Sequence: Synthetic oligonucleotide
  Antisense strand to SEQ ID NO: 2536274
aacaccuagauccuagccc

SEQ ID NO: 2536276 - RNA, 19 nt, Artificial Sequence
  Description of Artificial Sequence: Synthetic oligonucleotide
  Sense strand starting at position 933 of SEQ ID NO: 1888479
cuuacagcgcgauguaaga

SEQ ID NO: 2536277 - RNA, 19 nt, Artificial Sequence
  Description of Artificial Sequence: Synthetic oligonucleotide
  Antisense strand to SEQ ID NO: 2536276
ucuuacaucgcgcuguaag

SEQ ID NO: 2536278 - RNA, 19 nt, Artificial Sequence
  Description of Artificial Sequence: Synthetic oligonucleotide
  Sense strand starting at position 729 of SEQ ID NO: 1888480
gcgcauucaguaucgauua

SEQ ID NO: 2536279 - RNA, 19 nt, Artificial Sequence
  Description of Artificial Sequence: Synthetic oligonucleotide
  Antisense strand to SEQ ID NO: 2536278
uaaucgauacugaaugcgc

SEQ ID NO: 2536280 - RNA, 19 nt, Artificial Sequence
  Description of Artificial Sequence: Synthetic oligonucleotide
  Sense strand starting at position 2453 of SEQ ID NO: 1888480
ccugaagaugcucaucaca

SEQ ID NO: 2536281 - RNA, 19 nt, Artificial Sequence
  Description of Artificial Sequence: Synthetic oligonucleotide
  Antisense strand to SEQ ID NO: 2536280
ugugaugagcaucuucagg

SEQ ID NO: 2536282 - RNA, 19 nt, Artificial Sequence
  Description of Artificial Sequence: Synthetic oligonucleotide
  Sense strand starting at position 756 of SEQ ID NO: 1888480
cagucaucuggugagaaug

SEQ ID NO: 2536283 - RNA, 19 nt, Artificial Sequence
  Description of Artificial Sequence: Synthetic oligonucleotide
  Antisense strand to SEQ ID NO: 2536282
cauucucaccagaugacug

SEQ ID NO: 2536284 - RNA, 19 nt, Artificial Sequence
  Description of Artificial Sequence: Synthetic oligonucleotide
  Sense strand starting at position 2867 of SEQ ID NO: 1888480
gaccuuggugaccagugaa

SEQ ID NO: 2536285 - RNA, 19 nt, Artificial Sequence
  Description of Artificial Sequence: Synthetic oligonucleotide
  Antisense strand to SEQ ID NO: 2536284
uucacuggucaccaagguc

SEQ ID NO: 2536286 - RNA, 19 nt, Artificial Sequence
  Description of Artificial Sequence: Synthetic oligonucleotide
  Sense strand starting at position 50 of SEQ ID NO: 1888480
cgucaucugcugcuggauu

SEQ ID NO: 2536287 - RNA, 19 nt, Artificial Sequence
  Description of Artificial Sequence: Synthetic oligonucleotide
  Antisense strand to SEQ ID NO: 2536286
aauccagcagcagaugacg

SEQ ID NO: 2536288 - RNA, 19 nt, Artificial Sequence
  Description of Artificial Sequence: Synthetic oligonucleotide
  Sense strand starting at position 49 of SEQ ID NO: 1888480
ccgucaucugcugcuggau

SEQ ID NO: 2536289 - RNA, 19 nt, Artificial Sequence
  Description of Artificial Sequence: Synthetic oligonucleotide
  Antisense strand to SEQ ID NO: 2536288
auccagcagcagaugacgg

SEQ ID NO: 2536290 - RNA, 19 nt, Artificial Sequence
  Description of Artificial Sequence: Synthetic oligonucleotide
  Sense strand starting at position 1418 of SEQ ID NO: 1888480
agcagaagauucccaauua

SEQ ID NO: 2536291 - RNA, 19 nt, Artificial Sequence
  Description of Artificial Sequence: Synthetic oligonucleotide
  Antisense strand to SEQ ID NO: 2536290
uaauugggaaucuucugcu

SEQ ID NO: 2536292 - RNA, 19 nt, Artificial Sequence
  Description of Artificial Sequence: Synthetic oligonucleotide
  Sense strand starting at position 276 of SEQ ID NO: 1888480
gagcaaagggcuuaacgaa

SEQ ID NO: 2536293 - RNA, 19 nt, Artificial Sequence
  Description of Artificial Sequence: Synthetic oligonucleotide
  Antisense strand to SEQ ID NO: 2536292
uucguuaagcccuuugcuc

SEQ ID NO: 2536294 - RNA, 19 nt, Artificial Sequence
  Description of Artificial Sequence: Synthetic oligonucleotide
  Sense strand starting at position 1204 of SEQ ID NO: 1888480
ccuaauuaagaacgaaagu

SEQ ID NO: 2536295 - RNA, 19 nt, Artificial Sequence
  Description of Artificial Sequence: Synthetic oligonucleotide
  Antisense strand to SEQ ID NO: 2536294
acuuucguucuuaauuagg

SEQ ID NO: 2536296 - RNA, 19 nt, Artificial Sequence
  Description of Artificial Sequence: Synthetic oligonucleotide
  Sense strand starting at position 704 of SEQ ID NO: 1888480
uuugaaauucgacagucca

SEQ ID NO: 2536297 - RNA, 19 nt, Artificial Sequence
  Description of Artificial Sequence: Synthetic oligonucleotide
  Antisense strand to SEQ ID NO: 2536296
uggacugucgaauuucaaa

SEQ ID NO: 2536298 - RNA, 19 nt, Artificial Sequence
  Description of Artificial Sequence: Synthetic oligonucleotide
  Sense strand starting at position 3306 of SEQ ID NO: 1888480
gcaguccuugauuaagaca

SEQ ID NO: 2536299 - RNA, 19 nt, Artificial Sequence
  Description of Artificial Sequence: Synthetic oligonucleotide
  Antisense strand to SEQ ID NO: 2536298
ugucuuaaucaaggacugc

SEQ ID NO: 2536300 - RNA, 19 nt, Artificial Sequence
  Description of Artificial Sequence: Synthetic oligonucleotide
  Sense strand starting at position 3831 of SEQ ID NO: 1888480
ucagaaaguuuaccgacaa

SEQ ID NO: 2536301 - RNA, 19 nt, Artificial Sequence
  Description of Artificial Sequence: Synthetic oligonucleotide
  Antisense strand to SEQ ID NO: 2536300
uugucgguaaacuuucuga

SEQ ID NO: 2536302 - RNA, 19 nt, Artificial Sequence
  Description of Artificial Sequence: Synthetic oligonucleotide
  Sense strand starting at position 3303 of SEQ ID NO: 1888480
caggcaguccuugauuaag

SEQ ID NO: 2536303 - RNA, 19 nt, Artificial Sequence
  Description of Artificial Sequence: Synthetic oligonucleotide
  Antisense strand to SEQ ID NO: 2536302
cuuaaucaaggacugccug

SEQ ID NO: 2536304 - RNA, 19 nt, Artificial Sequence
  Description of Artificial Sequence: Synthetic oligonucleotide
  Sense strand starting at position 2227 of SEQ ID NO: 1888480
uuaauuagucaguaaggug

SEQ ID NO: 2536305 - RNA, 19 nt, Artificial Sequence
  Description of Artificial Sequence: Synthetic oligonucleotide
  Antisense strand to SEQ ID NO: 2536304
caccuuacugacuaauuaa

SEQ ID NO: 2536306 - RNA, 19 nt, Artificial Sequence
  Description of Artificial Sequence: Synthetic oligonucleotide
  Sense strand starting at position 518 of SEQ ID NO: 1888480
aagcgaucggaaugagaag

SEQ ID NO: 2536307 - RNA, 19 nt, Artificial Sequence
  Description of Artificial Sequence: Synthetic oligonucleotide
  Antisense strand to SEQ ID NO: 2536306
cuucucauuccgaucgcuu

SEQ ID NO: 2536308 - RNA, 19 nt, Artificial Sequence
  Description of Artificial Sequence: Synthetic oligonucleotide
  Sense strand starting at position 2264 of SEQ ID NO: 1888480
cuuugcaucagggagugau

SEQ ID NO: 2536309 - RNA, 19 nt, Artificial Sequence
  Description of Artificial Sequence: Synthetic oligonucleotide
  Antisense strand to SEQ ID NO: 2536308
aucacucccugaugcaaag

SEQ ID NO: 2536310 - RNA, 19 nt, Artificial Sequence
  Description of Artificial Sequence: Synthetic oligonucleotide
  Sense strand starting at position 2893 of SEQ ID NO: 1888480
uugugaaauuccuccaagg

SEQ ID NO: 2536311 - RNA, 19 nt, Artificial Sequence
  Description of Artificial Sequence: Synthetic oligonucleotide
  Antisense strand to SEQ ID NO: 2536310
ccuuggaggaauuucacaa

SEQ ID NO: 2536312 - RNA, 19 nt, Artificial Sequence
  Description of Artificial Sequence: Synthetic oligonucleotide
  Sense strand starting at position 1975 of SEQ ID NO: 1888480
uggagcugccaucauuaaa

SEQ ID NO: 2536313 - RNA, 19 nt, Artificial Sequence
  Description of Artificial Sequence: Synthetic oligonucleotide
  Antisense strand to SEQ ID NO: 2536312
uuuaaugauggcagcucca

SEQ ID NO: 2536314 - RNA, 19 nt, Artificial Sequence
  Description of Artificial Sequence: Synthetic oligonucleotide
  Sense strand starting at position 1454 of SEQ ID NO: 1888480
ccagauaucaggcauggcu

SEQ ID NO: 2536315 - RNA, 19 nt, Artificial Sequence
  Description of Artificial Sequence: Synthetic oligonucleotide
  Antisense strand to SEQ ID NO: 2536314
agccaugccugauaucugg

SEQ ID NO: 2536316 - RNA, 19 nt, Artificial Sequence
  Description of Artificial Sequence: Synthetic oligonucleotide
  Sense strand starting at position 693 of SEQ ID NO: 1888480
uacgguaaaucuuugaaau

SEQ ID NO: 2536317 - RNA, 19 nt, Artificial Sequence
  Description of Artificial Sequence: Synthetic oligonucleotide
  Antisense strand to SEQ ID NO: 2536316
auuucaaagauuuaccgua

SEQ ID NO: 2536318 - RNA, 19 nt, Artificial Sequence
  Description of Artificial Sequence: Synthetic oligonucleotide
  Sense strand starting at position 2633 of SEQ ID NO: 1888480
cucgcaaauccaugcauuu

SEQ ID NO: 2536319 - RNA, 19 nt, Artificial Sequence
  Description of Artificial Sequence: Synthetic oligonucleotide
  Antisense strand to SEQ ID NO: 2536318
aaaugcauggauuugcgag

SEQ ID NO: 2536320 - RNA, 19 nt, Artificial Sequence
  Description of Artificial Sequence: Synthetic oligonucleotide
  Sense strand starting at position 859 of SEQ ID NO: 1888480
cugcuaagacaaugacuuu

SEQ ID NO: 2536321 - RNA, 19 nt, Artificial Sequence
  Description of Artificial Sequence: Synthetic oligonucleotide
  Antisense strand to SEQ ID NO: 2536320
aaagucauugucuuagcag

SEQ ID NO: 2536322 - RNA, 19 nt, Artificial Sequence
  Description of Artificial Sequence: Synthetic oligonucleotide
  Sense strand starting at position 694 of SEQ ID NO: 1888480
acgguaaaucuuugaaauu

SEQ ID NO: 2536323 - RNA, 19 nt, Artificial Sequence
  Description of Artificial Sequence: Synthetic oligonucleotide
  Antisense strand to SEQ ID NO: 2536322
aauuucaaagauuuaccgu

SEQ ID NO: 2536324 - RNA, 19 nt, Artificial Sequence
  Description of Artificial Sequence: Synthetic oligonucleotide
  Sense strand starting at position 620 of SEQ ID NO: 1888480
cuccuuagccgaggaagaa

SEQ ID NO: 2536325 - RNA, 19 nt, Artificial Sequence
  Description of Artificial Sequence: Synthetic oligonucleotide
  Antisense strand to SEQ ID NO: 2536324
uucuuccucggcuaaggag

SEQ ID NO: 2536326 - RNA, 19 nt, Artificial Sequence
  Description of Artificial Sequence: Synthetic oligonucleotide
  Sense strand starting at position 413 of SEQ ID NO: 1888480
ucacauuggucaccuacau

SEQ ID NO: 2536327 - RNA, 19 nt, Artificial Sequence
  Description of Artificial Sequence: Synthetic oligonucleotide
  Antisense strand to SEQ ID NO: 2536326
auguaggugaccaauguga

SEQ ID NO: 2536328 - RNA, 19 nt, Artificial Sequence
  Description of Artificial Sequence: Synthetic oligonucleotide
  Sense strand starting at position 686 of SEQ ID NO: 1888480
uuggucauacgguaaaucu

SEQ ID NO: 2536329 - RNA, 19 nt, Artificial Sequence
  Description of Artificial Sequence: Synthetic oligonucleotide
  Antisense strand to SEQ ID NO: 2536328
agauuuaccguaugaccaa

SEQ ID NO: 2536330 - RNA, 19 nt, Artificial Sequence
  Description of Artificial Sequence: Synthetic oligonucleotide
  Sense strand starting at position 1374 of SEQ ID NO: 1888480
agucauucccuguaacucu

SEQ ID NO: 2536331 - RNA, 19 nt, Artificial Sequence
  Description of Artificial Sequence: Synthetic oligonucleotide
  Antisense strand to SEQ ID NO: 2536330
agaguuacagggaaugacu

SEQ ID NO: 2536332 - RNA, 19 nt, Artificial Sequence
  Description of Artificial Sequence: Synthetic oligonucleotide
  Sense strand starting at position 2744 of SEQ ID NO: 1888480
gauguuaagcgcuaggaag

SEQ ID NO: 2536333 - RNA, 19 nt, Artificial Sequence
  Description of Artificial Sequence: Synthetic oligonucleotide
  Antisense strand to SEQ ID NO: 2536332
cuuccuagcgcuuaacauc

SEQ ID NO: 2536334 - RNA, 19 nt, Artificial Sequence
  Description of Artificial Sequence: Synthetic oligonucleotide
  Sense strand starting at position 3006 of SEQ ID NO: 1888480
gggaauagccgauggcaga

SEQ ID NO: 2536335 - RNA, 19 nt, Artificial Sequence
  Description of Artificial Sequence: Synthetic oligonucleotide
  Antisense strand to SEQ ID NO: 2536334
ucugccaucggcuauuccc

SEQ ID NO: 2536336 - RNA, 19 nt, Artificial Sequence
  Description of Artificial Sequence: Synthetic oligonucleotide
  Sense strand starting at position 3305 of SEQ ID NO: 1888480
ggcaguccuugauuaagac

SEQ ID NO: 2536337 - RNA, 19 nt, Artificial Sequence
  Description of Artificial Sequence: Synthetic oligonucleotide
  Antisense strand to SEQ ID NO: 2536336
gucuuaaucaaggacugcc

SEQ ID NO: 2536338 - RNA, 19 nt, Artificial Sequence
  Description of Artificial Sequence: Synthetic oligonucleotide
  Sense strand starting at position 1630 of SEQ ID NO: 1888480
cguguuucccaagaucaua

SEQ ID NO: 2536339 - RNA, 19 nt, Artificial Sequence
  Description of Artificial Sequence: Synthetic oligonucleotide
  Antisense strand to SEQ ID NO: 2536338
uaugaucuugggaaacacg

SEQ ID NO: 2536340 - RNA, 19 nt, Artificial Sequence
  Description of Artificial Sequence: Synthetic oligonucleotide
  Sense strand starting at position 1785 of SEQ ID NO: 1888480
guuuauuaucagcauguag

SEQ ID NO: 2536341 - RNA, 19 nt, Artificial Sequence
  Description of Artificial Sequence: Synthetic oligonucleotide
  Antisense strand to SEQ ID NO: 2536340
cuacaugcugauaauaaac

SEQ ID NO: 2536342 - RNA, 19 nt, Artificial Sequence
  Description of Artificial Sequence: Synthetic oligonucleotide
  Sense strand starting at position 2223 of SEQ ID NO: 1888480
cccuuuaauuagucaguaa

SEQ ID NO: 2536343 - RNA, 19 nt, Artificial Sequence
  Description of Artificial Sequence: Synthetic oligonucleotide
  Antisense strand to SEQ ID NO: 2536342
uuacugacuaauuaaaggg

SEQ ID NO: 2536344 - RNA, 19 nt, Artificial Sequence
  Description of Artificial Sequence: Synthetic oligonucleotide
  Sense strand starting at position 2216 of SEQ ID NO: 1888480
guggcuucccuuuaauuag

SEQ ID NO: 2536345 - RNA, 19 nt, Artificial Sequence
  Description of Artificial Sequence: Synthetic oligonucleotide
  Antisense strand to SEQ ID NO: 2536344
cuaauuaaagggaagccac

SEQ ID NO: 2536346 - RNA, 19 nt, Artificial Sequence
  Description of Artificial Sequence: Synthetic oligonucleotide
  Sense strand starting at position 1775 of SEQ ID NO: 1888480
ugauaccucuguuuauuau

SEQ ID NO: 2536347 - RNA, 19 nt, Artificial Sequence
  Description of Artificial Sequence: Synthetic oligonucleotide
  Antisense strand to SEQ ID NO: 2536346
auaauaaacagagguauca

SEQ ID NO: 2536348 - RNA, 19 nt, Artificial Sequence
  Description of Artificial Sequence: Synthetic oligonucleotide
  Sense strand starting at position 901 of SEQ ID NO: 1888480
ucaaaucgauugcuuuaga

SEQ ID NO: 2536349 - RNA, 19 nt, Artificial Sequence
  Description of Artificial Sequence: Synthetic oligonucleotide
  Antisense strand to SEQ ID NO: 2536348
ucuaaagcaaucgauuuga

SEQ ID NO: 2536350 - RNA, 19 nt, Artificial Sequence
  Description of Artificial Sequence: Synthetic oligonucleotide
  Sense strand starting at position 2594 of SEQ ID NO: 1888480
gcaucuuugaagggcugaa

SEQ ID NO: 2536351 - RNA, 19 nt, Artificial Sequence
  Description of Artificial Sequence: Synthetic oligonucleotide
  Antisense strand to SEQ ID NO: 2536350
uucagcccuucaaagaugc

SEQ ID NO: 2536352 - RNA, 19 nt, Artificial Sequence
  Description of Artificial Sequence: Synthetic oligonucleotide
  Sense strand starting at position 3279 of SEQ ID NO: 1888480
cggcaaacgccugagagau

SEQ ID NO: 2536353 - RNA, 19 nt, Artificial Sequence
  Description of Artificial Sequence: Synthetic oligonucleotide
  Antisense strand to SEQ ID NO: 2536352
aucucucaggcguuugccg

SEQ ID NO: 2536354 - RNA, 19 nt, Artificial Sequence
  Description of Artificial Sequence: Synthetic oligonucleotide
  Sense strand starting at position 3636 of SEQ ID NO: 1888480
gggcucugucugcauagaa

SEQ ID NO: 2536355 - RNA, 19 nt, Artificial Sequence
  Description of Artificial Sequence: Synthetic oligonucleotide
  Antisense strand to SEQ ID NO: 2536354
uucuaugcagacagagccc

SEQ ID NO: 2536356 - RNA, 19 nt, Artificial Sequence
  Description of Artificial Sequence: Synthetic oligonucleotide
  Sense strand starting at position 1138 of SEQ ID NO: 1888480
gauaguaggccacaguguu

SEQ ID NO: 2536357 - RNA, 19 nt, Artificial Sequence
  Description of Artificial Sequence: Synthetic oligonucleotide
  Antisense strand to SEQ ID NO: 2536356
aacacuguggccuacuauc

SEQ ID NO: 2536358 - RNA, 19 nt, Artificial Sequence
  Description of Artificial Sequence: Synthetic oligonucleotide
  Sense strand starting at position 1438 of SEQ ID NO: 1888481
aucauuaugcaacaaggua

SEQ ID NO: 2536359 - RNA, 19 nt, Artificial Sequence
  Description of Artificial Sequence: Synthetic oligonucleotide
  Antisense strand to SEQ ID NO: 2536358
uaccuuguugcauaaugau

SEQ ID NO: 2536360 - RNA, 19 nt, Artificial Sequence
  Description of Artificial Sequence: Synthetic oligonucleotide
  Sense strand starting at position 1431 of SEQ ID NO: 1888481
augugaaaucauuaugcaa

SEQ ID NO: 2536361 - RNA, 19 nt, Artificial Sequence
  Description of Artificial Sequence: Synthetic oligonucleotide
  Antisense strand to SEQ ID NO: 2536360
uugcauaaugauuucacau

SEQ ID NO: 2536362 - RNA, 19 nt, Artificial Sequence
  Description of Artificial Sequence: Synthetic oligonucleotide
  Sense strand starting at position 1499 of SEQ ID NO: 1888481
gaguuaacccggugauuuc

SEQ ID NO: 2536363 - RNA, 19 nt, Artificial Sequence
  Description of Artificial Sequence: Synthetic oligonucleotide
  Antisense strand to SEQ ID NO: 2536362
gaaaucaccggguuaacuc

SEQ ID NO: 2536364 - RNA, 19 nt, Artificial Sequence
  Description of Artificial Sequence: Synthetic oligonucleotide
  Sense strand starting at position 3744 of SEQ ID NO: 1888481
ccucuaaucccagaggcaa

SEQ ID NO: 2536365 - RNA, 19 nt, Artificial Sequence
  Description of Artificial Sequence: Synthetic oligonucleotide
  Antisense strand to SEQ ID NO: 2536364
uugccucugggauuagagg

SEQ ID NO: 2536366 - RNA, 19 nt, Artificial Sequence
  Description of Artificial Sequence: Synthetic oligonucleotide
  Sense strand starting at position 124 of SEQ ID NO: 1888481
uaggccuugagggauaagu

SEQ ID NO: 2536367 - RNA, 19 nt, Artificial Sequence
  Description of Artificial Sequence: Synthetic oligonucleotide
  Antisense strand to SEQ ID NO: 2536366
acuuaucccucaaggccua

SEQ ID NO: 2536368 - RNA, 19 nt, Artificial Sequence
  Description of Artificial Sequence: Synthetic oligonucleotide
  Sense strand starting at position 120 of SEQ ID NO: 1888481
gcaauaggccuugagggau

SEQ ID NO: 2536369 - RNA, 19 nt, Artificial Sequence
  Description of Artificial Sequence: Synthetic oligonucleotide
  Antisense strand to SEQ ID NO: 2536368
aucccucaaggccuauugc

SEQ ID NO: 2536370 - RNA, 19 nt, Artificial Sequence
  Description of Artificial Sequence: Synthetic oligonucleotide
  Sense strand starting at position 2021 of SEQ ID NO: 1888481
ggaagaugaggcugauguu

SEQ ID NO: 2536371 - RNA, 19 nt, Artificial Sequence
  Description of Artificial Sequence: Synthetic oligonucleotide
  Antisense strand to SEQ ID NO: 2536370
aacaucagccucaucuucc

SEQ ID NO: 2536372 - RNA, 19 nt, Artificial Sequence
  Description of Artificial Sequence: Synthetic oligonucleotide
  Sense strand starting at position 1024 of SEQ ID NO: 1888481
aucugagcuccuugaggag

SEQ ID NO: 2536373 - RNA, 19 nt, Artificial Sequence
  Description of Artificial Sequence: Synthetic oligonucleotide
  Antisense strand to SEQ ID NO: 2536372
cuccucaaggagcucagau

SEQ ID NO: 2536374 - RNA, 19 nt, Artificial Sequence
  Description of Artificial Sequence: Synthetic oligonucleotide
  Sense strand starting at position 3648 of SEQ ID NO: 1888481
gggacucucugccuuaaga

SEQ ID NO: 2536375 - RNA, 19 nt, Artificial Sequence
  Description of Artificial Sequence: Synthetic oligonucleotide
  Antisense strand to SEQ ID NO: 2536374
ucuuaaggcagagaguccc

SEQ ID NO: 2536376 - RNA, 19 nt, Artificial Sequence
  Description of Artificial Sequence: Synthetic oligonucleotide
  Sense strand starting at position 1464 of SEQ ID NO: 1888481
guaacagauuuccaggacu

SEQ ID NO: 2536377 - RNA, 19 nt, Artificial Sequence
  Description of Artificial Sequence: Synthetic oligonucleotide
  Antisense strand to SEQ ID NO: 2536376
aguccuggaaaucuguuac

SEQ ID NO: 2536378 - RNA, 19 nt, Artificial Sequence
  Description of Artificial Sequence: Synthetic oligonucleotide
  Sense strand starting at position 2027 of SEQ ID NO: 1888481
ugaggcugauguucugaga

SEQ ID NO: 2536379 - RNA, 19 nt, Artificial Sequence
  Description of Artificial Sequence: Synthetic oligonucleotide
  Antisense strand to SEQ ID NO: 2536378
ucucagaacaucagccuca

SEQ ID NO: 2536380 - RNA, 19 nt, Artificial Sequence
  Description of Artificial Sequence: Synthetic oligonucleotide
  Sense strand starting at position 2946 of SEQ ID NO: 1888481
caguguucucaugagguca

SEQ ID NO: 2536381 - RNA, 19 nt, Artificial Sequence
  Description of Artificial Sequence: Synthetic oligonucleotide
  Antisense strand to SEQ ID NO: 2536380
ugaccucaugagaacacug

SEQ ID NO: 2536382 - RNA, 19 nt, Artificial Sequence
  Description of Artificial Sequence: Synthetic oligonucleotide
  Sense strand starting at position 119 of SEQ ID NO: 1888481
ugcaauaggccuugaggga

SEQ ID NO: 2536383 - RNA, 19 nt, Artificial Sequence
  Description of Artificial Sequence: Synthetic oligonucleotide
  Antisense strand to SEQ ID NO: 2536382
ucccucaaggccuauugca

SEQ ID NO: 2536384 - RNA, 19 nt, Artificial Sequence
  Description of Artificial Sequence: Synthetic oligonucleotide
  Sense strand starting at position 1477 of SEQ ID NO: 1888481
aggacucuagcgcaacauu

SEQ ID NO: 2536385 - RNA, 19 nt, Artificial Sequence
  Description of Artificial Sequence: Synthetic oligonucleotide
  Antisense strand to SEQ ID NO: 2536384
aauguugcgcuagaguccu

SEQ ID NO: 2536386 - RNA, 19 nt, Artificial Sequence
  Description of Artificial Sequence: Synthetic oligonucleotide
  Sense strand starting at position 3298 of SEQ ID NO: 1888481
uuccgagacccguaaacuu

SEQ ID NO: 2536387 - RNA, 19 nt, Artificial Sequence
  Description of Artificial Sequence: Synthetic oligonucleotide
  Antisense strand to SEQ ID NO: 2536386
aaguuuacgggucucggaa

SEQ ID NO: 2536388 - RNA, 19 nt, Artificial Sequence
  Description of Artificial Sequence: Synthetic oligonucleotide
  Sense strand starting at position 711 of SEQ ID NO: 1888481
uggaaaugcucuguggacu

SEQ ID NO: 2536389 - RNA, 19 nt, Artificial Sequence
  Description of Artificial Sequence: Synthetic oligonucleotide
  Antisense strand to SEQ ID NO: 2536388
aguccacagagcauuucca

SEQ ID NO: 2536390 - RNA, 19 nt, Artificial Sequence
  Description of Artificial Sequence: Synthetic oligonucleotide
  Sense strand starting at position 2957 of SEQ ID NO: 1888481
ugaggucauccauggucau

SEQ ID NO: 2536391 - RNA, 19 nt, Artificial Sequence
  Description of Artificial Sequence: Synthetic oligonucleotide
  Antisense strand to SEQ ID NO: 2536390
augaccauggaugaccuca

SEQ ID NO: 2536392 - RNA, 19 nt, Artificial Sequence
  Description of Artificial Sequence: Synthetic oligonucleotide
  Sense strand starting at position 712 of SEQ ID NO: 1888481
ggaaaugcucuguggacuc

SEQ ID NO: 2536393 - RNA, 19 nt, Artificial Sequence
  Description of Artificial Sequence: Synthetic oligonucleotide
  Antisense strand to SEQ ID NO: 2536392
gaguccacagagcauuucc

SEQ ID NO: 2536394 - RNA, 19 nt, Artificial Sequence
  Description of Artificial Sequence: Synthetic oligonucleotide
  Sense strand starting at position 81 of SEQ ID NO: 1888481
uguauagucacggaaggcu

SEQ ID NO: 2536395 - RNA, 19 nt, Artificial Sequence
  Description of Artificial Sequence: Synthetic oligonucleotide
  Antisense strand to SEQ ID NO: 2536394
agccuuccgugacuauaca

SEQ ID NO: 2536396 - RNA, 19 nt, Artificial Sequence
  Description of Artificial Sequence: Synthetic oligonucleotide
  Sense strand starting at position 945 of SEQ ID NO: 1888481
ggcuuucuugcugaaggua

SEQ ID NO: 2536397 - RNA, 19 nt, Artificial Sequence
  Description of Artificial Sequence: Synthetic oligonucleotide
  Antisense strand to SEQ ID NO: 2536396
uaccuucagcaagaaagcc

SEQ ID NO: 2536398 - RNA, 19 nt, Artificial Sequence
  Description of Artificial Sequence: Synthetic oligonucleotide
  Sense strand starting at position 76 of SEQ ID NO: 1888481
gagguuguauagucacgga

SEQ ID NO: 2536399 - RNA, 19 nt, Artificial Sequence
  Description of Artificial Sequence: Synthetic oligonucleotide
  Antisense strand to SEQ ID NO: 2536398
uccgugacuauacaaccuc

SEQ ID NO: 2536400 - RNA, 19 nt, Artificial Sequence
  Description of Artificial Sequence: Synthetic oligonucleotide
  Sense strand starting at position 710 of SEQ ID NO: 1888481
guggaaaugcucuguggac

SEQ ID NO: 2536401 - RNA, 19 nt, Artificial Sequence
  Description of Artificial Sequence: Synthetic oligonucleotide
  Antisense strand to SEQ ID NO: 2536400
guccacagagcauuuccac

SEQ ID NO: 2536402 - RNA, 19 nt, Artificial Sequence
  Description of Artificial Sequence: Synthetic oligonucleotide
  Sense strand starting at position 3646 of SEQ ID NO: 1888481
gugggacucucugccuuaa

SEQ ID NO: 2536403 - RNA, 19 nt, Artificial Sequence
  Description of Artificial Sequence: Synthetic oligonucleotide
  Antisense strand to SEQ ID NO: 2536402
uuaaggcagagagucccac

SEQ ID NO: 2536404 - RNA, 19 nt, Artificial Sequence
  Description of Artificial Sequence: Synthetic oligonucleotide
  Sense strand starting at position 1423 of SEQ ID NO: 1888481
gauaaaggaugugaaauca

SEQ ID NO: 2536405 - RNA, 19 nt, Artificial Sequence
  Description of Artificial Sequence: Synthetic oligonucleotide
  Antisense strand to SEQ ID NO: 2536404
ugauuucacauccuuuauc

SEQ ID NO: 2536406 - RNA, 19 nt, Artificial Sequence
  Description of Artificial Sequence: Synthetic oligonucleotide
  Sense strand starting at position 1583 of SEQ ID NO: 1888481
ccaguucuguucucccaaa

SEQ ID NO: 2536407 - RNA, 19 nt, Artificial Sequence
  Description of Artificial Sequence: Synthetic oligonucleotide
  Antisense strand to SEQ ID NO: 2536406
uuugggagaacagaacugg

SEQ ID NO: 2536408 - RNA, 19 nt, Artificial Sequence
  Description of Artificial Sequence: Synthetic oligonucleotide
  Sense strand starting at position 1497 of SEQ ID NO: 1888481
uugaguuaacccggugauu

SEQ ID NO: 2536409 - RNA, 19 nt, Artificial Sequence
  Description of Artificial Sequence: Synthetic oligonucleotide
  Antisense strand to SEQ ID NO: 2536408
aaucaccggguuaacucaa

SEQ ID NO: 2536410 - RNA, 19 nt, Artificial Sequence
  Description of Artificial Sequence: Synthetic oligonucleotide
  Sense strand starting at position 557 of SEQ ID NO: 1888481
agaggaugcaucuguguuc

SEQ ID NO: 2536411 - RNA, 19 nt, Artificial Sequence
  Description of Artificial Sequence: Synthetic oligonucleotide
  Antisense strand to SEQ ID NO: 2536410
gaacacagaugcauccucu

SEQ ID NO: 2536412 - RNA, 19 nt, Artificial Sequence
  Description of Artificial Sequence: Synthetic oligonucleotide
  Sense strand starting at position 2561 of SEQ ID NO: 1888481
ugggauuaugggcgccaau

SEQ ID NO: 2536413 - RNA, 19 nt, Artificial Sequence
  Description of Artificial Sequence: Synthetic oligonucleotide
  Antisense strand to SEQ ID NO: 2536412
auuggcgcccauaauccca

SEQ ID NO: 2536414 - RNA, 19 nt, Artificial Sequence
  Description of Artificial Sequence: Synthetic oligonucleotide
  Sense strand starting at position 1357 of SEQ ID NO: 1888481
acauacuugugucuuugua

SEQ ID NO: 2536415 - RNA, 19 nt, Artificial Sequence
  Description of Artificial Sequence: Synthetic oligonucleotide
  Antisense strand to SEQ ID NO: 2536414
uacaaagacacaaguaugu

SEQ ID NO: 2536416 - RNA, 19 nt, Artificial Sequence
  Description of Artificial Sequence: Synthetic oligonucleotide
  Sense strand starting at position 458 of SEQ ID NO: 1888481
gcagucuucuggccaugga

SEQ ID NO: 2536417 - RNA, 19 nt, Artificial Sequence
  Description of Artificial Sequence: Synthetic oligonucleotide
  Antisense strand to SEQ ID NO: 2536416
uccauggccagaagacugc

SEQ ID NO: 2536418 - RNA, 19 nt, Artificial Sequence
  Description of Artificial Sequence: Synthetic oligonucleotide
  Sense strand starting at position 1359 of SEQ ID NO: 1888481
auacuugugucuuuguauc

SEQ ID NO: 2536419 - RNA, 19 nt, Artificial Sequence
  Description of Artificial Sequence: Synthetic oligonucleotide
  Antisense strand to SEQ ID NO: 2536418
gauacaaagacacaaguau

SEQ ID NO: 2536420 - RNA, 19 nt, Artificial Sequence
  Description of Artificial Sequence: Synthetic oligonucleotide
  Sense strand starting at position 200 of SEQ ID NO: 1888481
gcaugaaauggguguugcu

SEQ ID NO: 2536421 - RNA, 19 nt, Artificial Sequence
  Description of Artificial Sequence: Synthetic oligonucleotide
  Antisense strand to SEQ ID NO: 2536420
agcaacacccauuucaugc

SEQ ID NO: 2536422 - RNA, 19 nt, Artificial Sequence
  Description of Artificial Sequence: Synthetic oligonucleotide
  Sense strand starting at position 3734 of SEQ ID NO: 1888481
ugugcagguuccucuaauc

SEQ ID NO: 2536423 - RNA, 19 nt, Artificial Sequence
  Description of Artificial Sequence: Synthetic oligonucleotide
  Antisense strand to SEQ ID NO: 2536422
gauuagaggaaccugcaca

SEQ ID NO: 2536424 - RNA, 19 nt, Artificial Sequence
  Description of Artificial Sequence: Synthetic oligonucleotide
  Sense strand starting at position 2319 of SEQ ID NO: 1888481
ugguuucgcaacuguacaa

SEQ ID NO: 2536425 - RNA, 19 nt, Artificial Sequence
  Description of Artificial Sequence: Synthetic oligonucleotide
  Antisense strand to SEQ ID NO: 2536424
uuguacaguugcgaaacca

SEQ ID NO: 2536426 - RNA, 19 nt, Artificial Sequence
  Description of Artificial Sequence: Synthetic oligonucleotide
  Sense strand starting at position 2030 of SEQ ID NO: 1888481
ggcugauguucugagagga

SEQ ID NO: 2536427 - RNA, 19 nt, Artificial Sequence
  Description of Artificial Sequence: Synthetic oligonucleotide
  Antisense strand to SEQ ID NO: 2536426
uccucucagaacaucagcc

SEQ ID NO: 2536428 - RNA, 19 nt, Artificial Sequence
  Description of Artificial Sequence: Synthetic oligonucleotide
  Sense strand starting at position 1216 of SEQ ID NO: 1888481
ccaccuuccuugggaacaa

SEQ ID NO: 2536429 - RNA, 19 nt, Artificial Sequence
  Description of Artificial Sequence: Synthetic oligonucleotide
  Antisense strand to SEQ ID NO: 2536428
uuguucccaaggaaggugg

SEQ ID NO: 2536430 - RNA, 19 nt, Artificial Sequence
  Description of Artificial Sequence: Synthetic oligonucleotide
  Sense strand starting at position 3098 of SEQ ID NO: 1888481
gacggucacugucagacaa

SEQ ID NO: 2536431 - RNA, 19 nt, Artificial Sequence
  Description of Artificial Sequence: Synthetic oligonucleotide
  Antisense strand to SEQ ID NO: 2536430
uugucugacagugaccguc

SEQ ID NO: 2536432 - RNA, 19 nt, Artificial Sequence
  Description of Artificial Sequence: Synthetic oligonucleotide
  Sense strand starting at position 3006 of SEQ ID NO: 1888481
gaggguugcugggaugcaa

SEQ ID NO: 2536433 - RNA, 19 nt, Artificial Sequence
  Description of Artificial Sequence: Synthetic oligonucleotide
  Antisense strand to SEQ ID NO: 2536432
uugcaucccagcaacccuc

SEQ ID NO: 2536434 - RNA, 19 nt, Artificial Sequence
  Description of Artificial Sequence: Synthetic oligonucleotide
  Sense strand starting at position 1535 of SEQ ID NO: 1888481
gggaaauggucaugcaacc

SEQ ID NO: 2536435 - RNA, 19 nt, Artificial Sequence
  Description of Artificial Sequence: Synthetic oligonucleotide
  Antisense strand to SEQ ID NO: 2536434
gguugcaugaccauuuccc

SEQ ID NO: 2536436 - RNA, 19 nt, Artificial Sequence
  Description of Artificial Sequence: Synthetic oligonucleotide
  Sense strand starting at position 1433 of SEQ ID NO: 1888481
gugaaaucauuaugcaaca

SEQ ID NO: 2536437 - RNA, 19 nt, Artificial Sequence
  Description of Artificial Sequence: Synthetic oligonucleotide
  Antisense strand to SEQ ID NO: 2536436
uguugcauaaugauuucac

SEQ ID NO: 2536438 - RNA, 19 nt, Artificial Sequence
  Description of Artificial Sequence: Synthetic oligonucleotide
  Sense strand starting at position 2381 of SEQ ID NO: 1888482
gggaucugugcgucuggca

SEQ ID NO: 2536439 - RNA, 19 nt, Artificial Sequence
  Description of Artificial Sequence: Synthetic oligonucleotide
  Antisense strand to SEQ ID NO: 2536438
ugccagacgcacagauccc

SEQ ID NO: 2536440 - RNA, 19 nt, Artificial Sequence
  Description of Artificial Sequence: Synthetic oligonucleotide
  Sense strand starting at position 1755 of SEQ ID NO: 1888482
cuaugaaaugcacaucagu

SEQ ID NO: 2536441 - RNA, 19 nt, Artificial Sequence
  Description of Artificial Sequence: Synthetic oligonucleotide
  Antisense strand to SEQ ID NO: 2536440
acugaugugcauuucauag

SEQ ID NO: 2536442 - RNA, 19 nt, Artificial Sequence
  Description of Artificial Sequence: Synthetic oligonucleotide
  Sense strand starting at position 2724 of SEQ ID NO: 1888482
cuggccuauccagaacauu

SEQ ID NO: 2536443 - RNA, 19 nt, Artificial Sequence
  Description of Artificial Sequence: Synthetic oligonucleotide
  Antisense strand to SEQ ID NO: 2536442
aauguucuggauaggccag

SEQ ID NO: 2536444 - RNA, 19 nt, Artificial Sequence
  Description of Artificial Sequence: Synthetic oligonucleotide
  Sense strand starting at position 1956 of SEQ ID NO: 1888482
gcugguguucgaccugcau

SEQ ID NO: 2536445 - RNA, 19 nt, Artificial Sequence
  Description of Artificial Sequence: Synthetic oligonucleotide
  Antisense strand to SEQ ID NO: 2536444
augcaggucgaacaccagc

SEQ ID NO: 2536446 - RNA, 19 nt, Artificial Sequence
  Description of Artificial Sequence: Synthetic oligonucleotide
  Sense strand starting at position 2080 of SEQ ID NO: 1888482
gcgucacgucuuccugacu

SEQ ID NO: 2536447 - RNA, 19 nt, Artificial Sequence
  Description of Artificial Sequence: Synthetic oligonucleotide
  Antisense strand to SEQ ID NO: 2536446
agucaggaagacgugacgc

SEQ ID NO: 2536448 - RNA, 19 nt, Artificial Sequence
  Description of Artificial Sequence: Synthetic oligonucleotide
  Sense strand starting at position 1812 of SEQ ID NO: 1888482
gagcauauuugcccucgua

SEQ ID NO: 2536449 - RNA, 19 nt, Artificial Sequence
  Description of Artificial Sequence: Synthetic oligonucleotide
  Antisense strand to SEQ ID NO: 2536448
uacgagggcaaauaugcuc

SEQ ID NO: 2536450 - RNA, 19 nt, Artificial Sequence
  Description of Artificial Sequence: Synthetic oligonucleotide
  Sense strand starting at position 3800 of SEQ ID NO: 1888482
ggauuugucuguguacgug

SEQ ID NO: 2536451 - RNA, 19 nt, Artificial Sequence
  Description of Artificial Sequence: Synthetic oligonucleotide
  Antisense strand to SEQ ID NO: 2536450
cacguacacagacaaaucc

SEQ ID NO: 2536452 - RNA, 19 nt, Artificial Sequence
  Description of Artificial Sequence: Synthetic oligonucleotide
  Sense strand starting at position 835 of SEQ ID NO: 1888482
acgagugagacauguccca

SEQ ID NO: 2536453 - RNA, 19 nt, Artificial Sequence
  Description of Artificial Sequence: Synthetic oligonucleotide
  Antisense strand to SEQ ID NO: 2536452
ugggacaugucucacucgu

SEQ ID NO: 2536454 - RNA, 19 nt, Artificial Sequence
  Description of Artificial Sequence: Synthetic oligonucleotide
  Sense strand starting at position 959 of SEQ ID NO: 1888482
gcagaauugccugacugug

SEQ ID NO: 2536455 - RNA, 19 nt, Artificial Sequence
  Description of Artificial Sequence: Synthetic oligonucleotide
  Antisense strand to SEQ ID NO: 2536454
cacagucaggcaauucugc

SEQ ID NO: 2536456 - RNA, 19 nt, Artificial Sequence
  Description of Artificial Sequence: Synthetic oligonucleotide
  Sense strand starting at position 301 of SEQ ID NO: 1888482
gccauucccagcuggaaga

SEQ ID NO: 2536457 - RNA, 19 nt, Artificial Sequence
  Description of Artificial Sequence: Synthetic oligonucleotide
  Antisense strand to SEQ ID NO: 2536456
ucuuccagcugggaauggc

SEQ ID NO: 2536458 - RNA, 19 nt, Artificial Sequence
  Description of Artificial Sequence: Synthetic oligonucleotide
  Sense strand starting at position 3797 of SEQ ID NO: 1888482
cguggauuugucuguguac

SEQ ID NO: 2536459 - RNA, 19 nt, Artificial Sequence
  Description of Artificial Sequence: Synthetic oligonucleotide
  Antisense strand to SEQ ID NO: 2536458
guacacagacaaauccacg

SEQ ID NO: 2536460 - RNA, 19 nt, Artificial Sequence
  Description of Artificial Sequence: Synthetic oligonucleotide
  Sense strand starting at position 3799 of SEQ ID NO: 1888482
uggauuugucuguguacgu

SEQ ID NO: 2536461 - RNA, 19 nt, Artificial Sequence
  Description of Artificial Sequence: Synthetic oligonucleotide
  Antisense strand to SEQ ID NO: 2536460
acguacacagacaaaucca

SEQ ID NO: 2536462 - RNA, 19 nt, Artificial Sequence
  Description of Artificial Sequence: Synthetic oligonucleotide
  Sense strand starting at position 948 of SEQ ID NO: 1888482
cucccuguggugcagaauu

SEQ ID NO: 2536463 - RNA, 19 nt, Artificial Sequence
  Description of Artificial Sequence: Synthetic oligonucleotide
  Antisense strand to SEQ ID NO: 2536462
aauucugcaccacagggag

SEQ ID NO: 2536464 - RNA, 19 nt, Artificial Sequence
  Description of Artificial Sequence: Synthetic oligonucleotide
  Sense strand starting at position 1050 of SEQ ID NO: 1888482
ugcaccaucagauguguga

SEQ ID NO: 2536465 - RNA, 19 nt, Artificial Sequence
  Description of Artificial Sequence: Synthetic oligonucleotide
  Antisense strand to SEQ ID NO: 2536464
ucacacaucugauggugca

SEQ ID NO: 2536466 - RNA, 19 nt, Artificial Sequence
  Description of Artificial Sequence: Synthetic oligonucleotide
  Sense strand starting at position 3606 of SEQ ID NO: 1888482
agguuuccucucugggcaa

SEQ ID NO: 2536467 - RNA, 19 nt, Artificial Sequence
  Description of Artificial Sequence: Synthetic oligonucleotide
  Antisense strand to SEQ ID NO: 2536466
uugcccagagaggaaaccu

SEQ ID NO: 2536468 - RNA, 19 nt, Artificial Sequence
  Description of Artificial Sequence: Synthetic oligonucleotide
  Sense strand starting at position 355 of SEQ ID NO: 1888482
ggguuucugugacugaguu

SEQ ID NO: 2536469 - RNA, 19 nt, Artificial Sequence
  Description of Artificial Sequence: Synthetic oligonucleotide
  Antisense strand to SEQ ID NO: 2536468
aacucagucacagaaaccc

SEQ ID NO: 2536470 - RNA, 19 nt, Artificial Sequence
  Description of Artificial Sequence: Synthetic oligonucleotide
  Sense strand starting at position 324 of SEQ ID NO: 1888482
cccuguguguccuccagaa

SEQ ID NO: 2536471 - RNA, 19 nt, Artificial Sequence
  Description of Artificial Sequence: Synthetic oligonucleotide
  Antisense strand to SEQ ID NO: 2536470
uucuggaggacacacaggg

SEQ ID NO: 2536472 - RNA, 19 nt, Artificial Sequence
  Description of Artificial Sequence: Synthetic oligonucleotide
  Sense strand starting at position 958 of SEQ ID NO: 1888482
ugcagaauugccugacugu

SEQ ID NO: 2536473 - RNA, 19 nt, Artificial Sequence
  Description of Artificial Sequence: Synthetic oligonucleotide
  Antisense strand to SEQ ID NO: 2536472
acagucaggcaauucugca

SEQ ID NO: 2536474 - RNA, 19 nt, Artificial Sequence
  Description of Artificial Sequence: Synthetic oligonucleotide
  Sense strand starting at position 1689 of SEQ ID NO: 1888482
gucugaaccuggucacgua

SEQ ID NO: 2536475 - RNA, 19 nt, Artificial Sequence
  Description of Artificial Sequence: Synthetic oligonucleotide
  Antisense strand to SEQ ID NO: 2536474
uacgugaccagguucagac

SEQ ID NO: 2536476 - RNA, 19 nt, Artificial Sequence
  Description of Artificial Sequence: Synthetic oligonucleotide
  Sense strand starting at position 3371 of SEQ ID NO: 1888482
gggugaucccucugccugu

SEQ ID NO: 2536477 - RNA, 19 nt, Artificial Sequence
  Description of Artificial Sequence: Synthetic oligonucleotide
  Antisense strand to SEQ ID NO: 2536476
acaggcagagggaucaccc

SEQ ID NO: 2536478 - RNA, 19 nt, Artificial Sequence
  Description of Artificial Sequence: Synthetic oligonucleotide
  Sense strand starting at position 633 of SEQ ID NO: 1888482
agugcugagcccuguggau

SEQ ID NO: 2536479 - RNA, 19 nt, Artificial Sequence
  Description of Artificial Sequence: Synthetic oligonucleotide
  Antisense strand to SEQ ID NO: 2536478
auccacagggcucagcacu

SEQ ID NO: 2536480 - RNA, 19 nt, Artificial Sequence
  Description of Artificial Sequence: Synthetic oligonucleotide
  Sense strand starting at position 414 of SEQ ID NO: 1888482
ccucgcugcucccaggaaa

SEQ ID NO: 2536481 - RNA, 19 nt, Artificial Sequence
  Description of Artificial Sequence: Synthetic oligonucleotide
  Antisense strand to SEQ ID NO: 2536480
uuuccugggagcagcgagg

SEQ ID NO: 2536482 - RNA, 19 nt, Artificial Sequence
  Description of Artificial Sequence: Synthetic oligonucleotide
  Sense strand starting at position 3607 of SEQ ID NO: 1888482
gguuuccucucugggcaaa

SEQ ID NO: 2536483 - RNA, 19 nt, Artificial Sequence
  Description of Artificial Sequence: Synthetic oligonucleotide
  Antisense strand to SEQ ID NO: 2536482
uuugcccagagaggaaacc

SEQ ID NO: 2536484 - RNA, 19 nt, Artificial Sequence
  Description of Artificial Sequence: Synthetic oligonucleotide
  Sense strand starting at position 2275 of SEQ ID NO: 1888483
agcguuacucggccuuaga

SEQ ID NO: 2536485 - RNA, 19 nt, Artificial Sequence
  Description of Artificial Sequence: Synthetic oligonucleotide
  Antisense strand to SEQ ID NO: 2536484
ucuaaggccgaguaacgcu

SEQ ID NO: 2536486 - RNA, 19 nt, Artificial Sequence
  Description of Artificial Sequence: Synthetic oligonucleotide
  Sense strand starting at position 2276 of SEQ ID NO: 1888483
gcguuacucggccuuagaa

SEQ ID NO: 2536487 - RNA, 19 nt, Artificial Sequence
  Description of Artificial Sequence: Synthetic oligonucleotide
  Antisense strand to SEQ ID NO: 2536486
uucuaaggccgaguaacgc

SEQ ID NO: 2536488 - RNA, 19 nt, Artificial Sequence
  Description of Artificial Sequence: Synthetic oligonucleotide
  Sense strand starting at position 710 of SEQ ID NO: 1888483
ucaaauggucgcuuguguu

SEQ ID NO: 2536489 - RNA, 19 nt, Artificial Sequence
  Description of Artificial Sequence: Synthetic oligonucleotide
  Antisense strand to SEQ ID NO: 2536488
aacacaagcgaccauuuga

SEQ ID NO: 2536490 - RNA, 19 nt, Artificial Sequence
  Description of Artificial Sequence: Synthetic oligonucleotide
  Sense strand starting at position 2610 of SEQ ID NO: 1888483
gaugguugaggugggaaau

SEQ ID NO: 2536491 - RNA, 19 nt, Artificial Sequence
  Description of Artificial Sequence: Synthetic oligonucleotide
  Antisense strand to SEQ ID NO: 2536490
auuucccaccucaaccauc

SEQ ID NO: 2536492 - RNA, 19 nt, Artificial Sequence
  Description of Artificial Sequence: Synthetic oligonucleotide
  Sense strand starting at position 912 of SEQ ID NO: 1888483
cagaaauggacucguagag

SEQ ID NO: 2536493 - RNA, 19 nt, Artificial Sequence
  Description of Artificial Sequence: Synthetic oligonucleotide
  Antisense strand to SEQ ID NO: 2536492
cucuacgaguccauuucug

SEQ ID NO: 2536494 - RNA, 19 nt, Artificial Sequence
  Description of Artificial Sequence: Synthetic oligonucleotide
  Sense strand starting at position 3659 of SEQ ID NO: 1888483
agcuuccuccaagagacuu

SEQ ID NO: 2536495 - RNA, 19 nt, Artificial Sequence
  Description of Artificial Sequence: Synthetic oligonucleotide
  Antisense strand to SEQ ID NO: 2536494
aagucucuuggaggaagcu

SEQ ID NO: 2536496 - RNA, 19 nt, Artificial Sequence
  Description of Artificial Sequence: Synthetic oligonucleotide
  Sense strand starting at position 782 of SEQ ID NO: 1888483
ugcagacaacucuggaaca

SEQ ID NO: 2536497 - RNA, 19 nt, Artificial Sequence
  Description of Artificial Sequence: Synthetic oligonucleotide
  Antisense strand to SEQ ID NO: 2536496
uguuccagaguugucugca

SEQ ID NO: 2536498 - RNA, 19 nt, Artificial Sequence
  Description of Artificial Sequence: Synthetic oligonucleotide
  Sense strand starting at position 350 of SEQ ID NO: 1888483
ggacaugaugcccagucua

SEQ ID NO: 2536499 - RNA, 19 nt, Artificial Sequence
  Description of Artificial Sequence: Synthetic oligonucleotide
  Antisense strand to SEQ ID NO: 2536498
uagacugggcaucaugucc

SEQ ID NO: 2536500 - RNA, 19 nt, Artificial Sequence
  Description of Artificial Sequence: Synthetic oligonucleotide
  Sense strand starting at position 2622 of SEQ ID NO: 1888483
gggaaauguuauguuauau

SEQ ID NO: 2536501 - RNA, 19 nt, Artificial Sequence
  Description of Artificial Sequence: Synthetic oligonucleotide
  Antisense strand to SEQ ID NO: 2536500
auauaacauaacauuuccc

SEQ ID NO: 2536502 - RNA, 19 nt, Artificial Sequence
  Description of Artificial Sequence: Synthetic oligonucleotide
  Sense strand starting at position 3023 of SEQ ID NO: 1888483
cacauaugugacugugaga

SEQ ID NO: 2536503 - RNA, 19 nt, Artificial Sequence
  Description of Artificial Sequence: Synthetic oligonucleotide
  Antisense strand to SEQ ID NO: 2536502
ucucacagucacauaugug

SEQ ID NO: 2536504 - RNA, 19 nt, Artificial Sequence
  Description of Artificial Sequence: Synthetic oligonucleotide
  Sense strand starting at position 2324 of SEQ ID NO: 1888483
acggaugaaccuugaguca

SEQ ID NO: 2536505 - RNA, 19 nt, Artificial Sequence
  Description of Artificial Sequence: Synthetic oligonucleotide
  Antisense strand to SEQ ID NO: 2536504
ugacucaagguucauccgu

SEQ ID NO: 2536506 - RNA, 19 nt, Artificial Sequence
  Description of Artificial Sequence: Synthetic oligonucleotide
  Sense strand starting at position 380 of SEQ ID NO: 1888483
ggcagacgccucgggauuu

SEQ ID NO: 2536507 - RNA, 19 nt, Artificial Sequence
  Description of Artificial Sequence: Synthetic oligonucleotide
  Antisense strand to SEQ ID NO: 2536506
aaaucccgaggcgucugcc

SEQ ID NO: 2536508 - RNA, 19 nt, Artificial Sequence
  Description of Artificial Sequence: Synthetic oligonucleotide
  Sense strand starting at position 1515 of SEQ ID NO: 1888483
acuggacaccucugugauc

SEQ ID NO: 2536509 - RNA, 19 nt, Artificial Sequence
  Description of Artificial Sequence: Synthetic oligonucleotide
  Antisense strand to SEQ ID NO: 2536508
gaucacagagguguccagu

SEQ ID NO: 2536510 - RNA, 19 nt, Artificial Sequence
  Description of Artificial Sequence: Synthetic oligonucleotide
  Sense strand starting at position 3242 of SEQ ID NO: 1888483
cucggugaacaguauuauu

SEQ ID NO: 2536511 - RNA, 19 nt, Artificial Sequence
  Description of Artificial Sequence: Synthetic oligonucleotide
  Antisense strand to SEQ ID NO: 2536510
aauaauacuguucaccgag

SEQ ID NO: 2536512 - RNA, 19 nt, Artificial Sequence
  Description of Artificial Sequence: Synthetic oligonucleotide
  Sense strand starting at position 2278 of SEQ ID NO: 1888483
guuacucggccuuagaaag

SEQ ID NO: 2536513 - RNA, 19 nt, Artificial Sequence
  Description of Artificial Sequence: Synthetic oligonucleotide
  Antisense strand to SEQ ID NO: 2536512
cuuucuaaggccgaguaac

SEQ ID NO: 2536514 - RNA, 19 nt, Artificial Sequence
  Description of Artificial Sequence: Synthetic oligonucleotide
  Sense strand starting at position 2590 of SEQ ID NO: 1888483
cccugaucugugcaccuaa

SEQ ID NO: 2536515 - RNA, 19 nt, Artificial Sequence
  Description of Artificial Sequence: Synthetic oligonucleotide
  Antisense strand to SEQ ID NO: 2536514
uuaggugcacagaucaggg

SEQ ID NO: 2536516 - RNA, 19 nt, Artificial Sequence
  Description of Artificial Sequence: Synthetic oligonucleotide
  Sense strand starting at position 760 of SEQ ID NO: 1888483
cacagauaugugcagccau

SEQ ID NO: 2536517 - RNA, 19 nt, Artificial Sequence
  Description of Artificial Sequence: Synthetic oligonucleotide
  Antisense strand to SEQ ID NO: 2536516
auggcugcacauaucugug

SEQ ID NO: 2536518 - RNA, 19 nt, Artificial Sequence
  Description of Artificial Sequence: Synthetic oligonucleotide
  Sense strand starting at position 3236 of SEQ ID NO: 1888483
uaccuucucggugaacagu

SEQ ID NO: 2536519 - RNA, 19 nt, Artificial Sequence
  Description of Artificial Sequence: Synthetic oligonucleotide
  Antisense strand to SEQ ID NO: 2536518
acuguucaccgagaaggua

SEQ ID NO: 2536520 - RNA, 19 nt, Artificial Sequence
  Description of Artificial Sequence: Synthetic oligonucleotide
  Sense strand starting at position 3064 of SEQ ID NO: 1888483
cggcuccuccucuauaaau

SEQ ID NO: 2536521 - RNA, 19 nt, Artificial Sequence
  Description of Artificial Sequence: Synthetic oligonucleotide
  Antisense strand to SEQ ID NO: 2536520
auuuauagaggaggagccg

SEQ ID NO: 2536522 - RNA, 19 nt, Artificial Sequence
  Description of Artificial Sequence: Synthetic oligonucleotide
  Sense strand starting at position 3245 of SEQ ID NO: 1888483
ggugaacaguauuauuuac

SEQ ID NO: 2536523 - RNA, 19 nt, Artificial Sequence
  Description of Artificial Sequence: Synthetic oligonucleotide
  Antisense strand to SEQ ID NO: 2536522
guaaauaauacuguucacc

SEQ ID NO: 2536524 - RNA, 19 nt, Artificial Sequence
  Description of Artificial Sequence: Synthetic oligonucleotide
  Sense strand starting at position 2492 of SEQ ID NO: 1888483
gauguuuacugggugcaga

SEQ ID NO: 2536525 - RNA, 19 nt, Artificial Sequence
  Description of Artificial Sequence: Synthetic oligonucleotide
  Antisense strand to SEQ ID NO: 2536524
ucugcacccaguaaacauc

SEQ ID NO: 2536526 - RNA, 19 nt, Artificial Sequence
  Description of Artificial Sequence: Synthetic oligonucleotide
  Sense strand starting at position 3235 of SEQ ID NO: 1888483
guaccuucucggugaacag

SEQ ID NO: 2536527 - RNA, 19 nt, Artificial Sequence
  Description of Artificial Sequence: Synthetic oligonucleotide
  Antisense strand to SEQ ID NO: 2536526
cuguucaccgagaagguac

SEQ ID NO: 2536528 - RNA, 19 nt, Artificial Sequence
  Description of Artificial Sequence: Synthetic oligonucleotide
  Sense strand starting at position 2010 of SEQ ID NO: 1888483
acacaaugcugagagaaga

SEQ ID NO: 2536529 - RNA, 19 nt, Artificial Sequence
  Description of Artificial Sequence: Synthetic oligonucleotide
  Antisense strand to SEQ ID NO: 2536528
ucuucucucagcauugugu

SEQ ID NO: 2536530 - RNA, 19 nt, Artificial Sequence
  Description of Artificial Sequence: Synthetic oligonucleotide
  Sense strand starting at position 685 of SEQ ID NO: 1888483
uguguaaccuuggcucuga

SEQ ID NO: 2536531 - RNA, 19 nt, Artificial Sequence
  Description of Artificial Sequence: Synthetic oligonucleotide
  Antisense strand to SEQ ID NO: 2536530
ucagagccaagguuacaca

SEQ ID NO: 2536532 - RNA, 19 nt, Artificial Sequence
  Description of Artificial Sequence: Synthetic oligonucleotide
  Sense strand starting at position 2568 of SEQ ID NO: 1888483
gcaguaugaaugugcuuaa

SEQ ID NO: 2536533 - RNA, 19 nt, Artificial Sequence
  Description of Artificial Sequence: Synthetic oligonucleotide
  Antisense strand to SEQ ID NO: 2536532
uuaagcacauucauacugc

SEQ ID NO: 2536534 - RNA, 19 nt, Artificial Sequence
  Description of Artificial Sequence: Synthetic oligonucleotide
  Sense strand starting at position 3062 of SEQ ID NO: 1888483
cccggcuccuccucuauaa

SEQ ID NO: 2536535 - RNA, 19 nt, Artificial Sequence
  Description of Artificial Sequence: Synthetic oligonucleotide
  Antisense strand to SEQ ID NO: 2536534
uuauagaggaggagccggg

SEQ ID NO: 2536536 - RNA, 19 nt, Artificial Sequence
  Description of Artificial Sequence: Synthetic oligonucleotide
  Sense strand starting at position 677 of SEQ ID NO: 1888483
ggcuucuguguguaaccuu

SEQ ID NO: 2536537 - RNA, 19 nt, Artificial Sequence
  Description of Artificial Sequence: Synthetic oligonucleotide
  Antisense strand to SEQ ID NO: 2536536
aagguuacacacagaagcc

SEQ ID NO: 2536538 - RNA, 19 nt, Artificial Sequence
  Description of Artificial Sequence: Synthetic oligonucleotide
  Sense strand starting at position 3234 of SEQ ID NO: 1888483
cguaccuucucggugaaca

SEQ ID NO: 2536539 - RNA, 19 nt, Artificial Sequence
  Description of Artificial Sequence: Synthetic oligonucleotide
  Antisense strand to SEQ ID NO: 2536538
uguucaccgagaagguacg

SEQ ID NO: 2536540 - RNA, 19 nt, Artificial Sequence
  Description of Artificial Sequence: Synthetic oligonucleotide
  Sense strand starting at position 472 of SEQ ID NO: 1888483
uggacaguuuaugaacuaa

SEQ ID NO: 2536541 - RNA, 19 nt, Artificial Sequence
  Description of Artificial Sequence: Synthetic oligonucleotide
  Antisense strand to SEQ ID NO: 2536540
uuaguucauaaacugucca

SEQ ID NO: 2536542 - RNA, 19 nt, Artificial Sequence
  Description of Artificial Sequence: Synthetic oligonucleotide
  Sense strand starting at position 18 of SEQ ID NO: 1888483
ggaugacaauguuaacuua

SEQ ID NO: 2536543 - RNA, 19 nt, Artificial Sequence
  Description of Artificial Sequence: Synthetic oligonucleotide
  Antisense strand to SEQ ID NO: 2536542
uaaguuaacauugucaucc

SEQ ID NO: 2536544 - RNA, 19 nt, Artificial Sequence
  Description of Artificial Sequence: Synthetic oligonucleotide
  Sense strand starting at position 3122 of SEQ ID NO: 1888483
gaugucuguuguguccuaa

SEQ ID NO: 2536545 - RNA, 19 nt, Artificial Sequence
  Description of Artificial Sequence: Synthetic oligonucleotide
  Antisense strand to SEQ ID NO: 2536544
uuaggacacaacagacauc

SEQ ID NO: 2536546 - RNA, 19 nt, Artificial Sequence
  Description of Artificial Sequence: Synthetic oligonucleotide
  Sense strand starting at position 3196 of SEQ ID NO: 1888483
aagauuauuuccugguggu

SEQ ID NO: 2536547 - RNA, 19 nt, Artificial Sequence
  Description of Artificial Sequence: Synthetic oligonucleotide
  Antisense strand to SEQ ID NO: 2536546
accaccaggaaauaaucuu

SEQ ID NO: 2536548 - RNA, 19 nt, Artificial Sequence
  Description of Artificial Sequence: Synthetic oligonucleotide
  Sense strand starting at position 320 of SEQ ID NO: 1888483
gagaaugaauugugauuaa

SEQ ID NO: 2536549 - RNA, 19 nt, Artificial Sequence
  Description of Artificial Sequence: Synthetic oligonucleotide
  Antisense strand to SEQ ID NO: 2536548
uuaaucacaauucauucuc

SEQ ID NO: 2536550 - RNA, 19 nt, Artificial Sequence
  Description of Artificial Sequence: Synthetic oligonucleotide
  Sense strand starting at position 3231 of SEQ ID NO: 1888483
gggcguaccuucucgguga

SEQ ID NO: 2536551 - RNA, 19 nt, Artificial Sequence
  Description of Artificial Sequence: Synthetic oligonucleotide
  Antisense strand to SEQ ID NO: 2536550
ucaccgagaagguacgccc

SEQ ID NO: 2536552 - RNA, 19 nt, Artificial Sequence
  Description of Artificial Sequence: Synthetic oligonucleotide
  Sense strand starting at position 471 of SEQ ID NO: 1888483
auggacaguuuaugaacua

SEQ ID NO: 2536553 - RNA, 19 nt, Artificial Sequence
  Description of Artificial Sequence: Synthetic oligonucleotide
  Antisense strand to SEQ ID NO: 2536552
uaguucauaaacuguccau

SEQ ID NO: 2536554 - RNA, 19 nt, Artificial Sequence
  Description of Artificial Sequence: Synthetic oligonucleotide
  Sense strand starting at position 783 of SEQ ID NO: 1888483
gcagacaacucuggaacau

SEQ ID NO: 2536555 - RNA, 19 nt, Artificial Sequence
  Description of Artificial Sequence: Synthetic oligonucleotide
  Antisense strand to SEQ ID NO: 2536554
auguuccagaguugucugc

SEQ ID NO: 2536556 - RNA, 19 nt, Artificial Sequence
  Description of Artificial Sequence: Synthetic oligonucleotide
  Sense strand starting at position 2621 of SEQ ID NO: 1888483
ugggaaauguuauguuaua

SEQ ID NO: 2536557 - RNA, 19 nt, Artificial Sequence
  Description of Artificial Sequence: Synthetic oligonucleotide
  Antisense strand to SEQ ID NO: 2536556
uauaacauaacauuuccca

SEQ ID NO: 2536558 - RNA, 19 nt, Artificial Sequence
  Description of Artificial Sequence: Synthetic oligonucleotide
  Sense strand starting at position 3126 of SEQ ID NO: 1888483
ucuguuguguccuaauauc

SEQ ID NO: 2536559 - RNA, 19 nt, Artificial Sequence
  Description of Artificial Sequence: Synthetic oligonucleotide
  Antisense strand to SEQ ID NO: 2536558
gauauuaggacacaacaga

SEQ ID NO: 2536560 - RNA, 19 nt, Artificial Sequence
  Description of Artificial Sequence: Synthetic oligonucleotide
  Sense strand starting at position 3086 of SEQ ID NO: 1888483
ggagguagcuucuggccaa

SEQ ID NO: 2536561 - RNA, 19 nt, Artificial Sequence
  Description of Artificial Sequence: Synthetic oligonucleotide
  Antisense strand to SEQ ID NO: 2536560
uuggccagaagcuaccucc

SEQ ID NO: 2536562 - RNA, 19 nt, Artificial Sequence
  Description of Artificial Sequence: Synthetic oligonucleotide
  Sense strand starting at position 3087 of SEQ ID NO: 1888483
gagguagcuucuggccaau

SEQ ID NO: 2536563 - RNA, 19 nt, Artificial Sequence
  Description of Artificial Sequence: Synthetic oligonucleotide
  Antisense strand to SEQ ID NO: 2536562
auuggccagaagcuaccuc

SEQ ID NO: 2536564 - RNA, 19 nt, Artificial Sequence
  Description of Artificial Sequence: Synthetic oligonucleotide
  Sense strand starting at position 3710 of SEQ ID NO: 1888484
ugacauccgccugaaagaa

SEQ ID NO: 2536565 - RNA, 19 nt, Artificial Sequence
  Description of Artificial Sequence: Synthetic oligonucleotide
  Antisense strand to SEQ ID NO: 2536564
uucuuucaggcggauguca

SEQ ID NO: 2536566 - RNA, 19 nt, Artificial Sequence
  Description of Artificial Sequence: Synthetic oligonucleotide
  Sense strand starting at position 997 of SEQ ID NO: 1888484
gagcuagcucuagaaacag

SEQ ID NO: 2536567 - RNA, 19 nt, Artificial Sequence
  Description of Artificial Sequence: Synthetic oligonucleotide
  Antisense strand to SEQ ID NO: 2536566
cuguuucuagagcuagcuc

SEQ ID NO: 2536568 - RNA, 19 nt, Artificial Sequence
  Description of Artificial Sequence: Synthetic oligonucleotide
  Sense strand starting at position 1180 of SEQ ID NO: 1888484
gaguaucuucuagaaugua

SEQ ID NO: 2536569 - RNA, 19 nt, Artificial Sequence
  Description of Artificial Sequence: Synthetic oligonucleotide
  Antisense strand to SEQ ID NO: 2536568
uacauucuagaagauacuc

SEQ ID NO: 2536570 - RNA, 19 nt, Artificial Sequence
  Description of Artificial Sequence: Synthetic oligonucleotide
  Sense strand starting at position 2507 of SEQ ID NO: 1888484
uggucaucccgacauagaa

SEQ ID NO: 2536571 - RNA, 19 nt, Artificial Sequence
  Description of Artificial Sequence: Synthetic oligonucleotide
  Antisense strand to SEQ ID NO: 2536570
uucuaugucgggaugacca

SEQ ID NO: 2536572 - RNA, 19 nt, Artificial Sequence
  Description of Artificial Sequence: Synthetic oligonucleotide
  Sense strand starting at position 1176 of SEQ ID NO: 1888484
uuaagaguaucuucuagaa

SEQ ID NO: 2536573 - RNA, 19 nt, Artificial Sequence
  Description of Artificial Sequence: Synthetic oligonucleotide
  Antisense strand to SEQ ID NO: 2536572
uucuagaagauacucuuaa

SEQ ID NO: 2536574 - RNA, 19 nt, Artificial Sequence
  Description of Artificial Sequence: Synthetic oligonucleotide
  Sense strand starting at position 1099 of SEQ ID NO: 1888484
gacagagagcuuggacauu

SEQ ID NO: 2536575 - RNA, 19 nt, Artificial Sequence
  Description of Artificial Sequence: Synthetic oligonucleotide
  Antisense strand to SEQ ID NO: 2536574
aauguccaagcucucuguc

SEQ ID NO: 2536576 - RNA, 19 nt, Artificial Sequence
  Description of Artificial Sequence: Synthetic oligonucleotide
  Sense strand starting at position 2016 of SEQ ID NO: 1888484
guauguguccuagagagaa

SEQ ID NO: 2536577 - RNA, 19 nt, Artificial Sequence
  Description of Artificial Sequence: Synthetic oligonucleotide
  Antisense strand to SEQ ID NO: 2536576
uucucucuaggacacauac

SEQ ID NO: 2536578 - RNA, 19 nt, Artificial Sequence
  Description of Artificial Sequence: Synthetic oligonucleotide
  Sense strand starting at position 2323 of SEQ ID NO: 1888484
uuucuuccucugggaagga

SEQ ID NO: 2536579 - RNA, 19 nt, Artificial Sequence
  Description of Artificial Sequence: Synthetic oligonucleotide
  Antisense strand to SEQ ID NO: 2536578
uccuucccagaggaagaaa

SEQ ID NO: 2536580 - RNA, 19 nt, Artificial Sequence
  Description of Artificial Sequence: Synthetic oligonucleotide
  Sense strand starting at position 1280 of SEQ ID NO: 1888484
cagugauggaauugucaga

SEQ ID NO: 2536581 - RNA, 19 nt, Artificial Sequence
  Description of Artificial Sequence: Synthetic oligonucleotide
  Antisense strand to SEQ ID NO: 2536580
ucugacaauuccaucacug

SEQ ID NO: 2536582 - RNA, 19 nt, Artificial Sequence
  Description of Artificial Sequence: Synthetic oligonucleotide
  Sense strand starting at position 995 of SEQ ID NO: 1888484
cugagcuagcucuagaaac

SEQ ID NO: 2536583 - RNA, 19 nt, Artificial Sequence
  Description of Artificial Sequence: Synthetic oligonucleotide
  Antisense strand to SEQ ID NO: 2536582
guuucuagagcuagcucag

SEQ ID NO: 2536584 - RNA, 19 nt, Artificial Sequence
  Description of Artificial Sequence: Synthetic oligonucleotide
  Sense strand starting at position 714 of SEQ ID NO: 1888484
gagaaaggaucccugcagu

SEQ ID NO: 2536585 - RNA, 19 nt, Artificial Sequence
  Description of Artificial Sequence: Synthetic oligonucleotide
  Antisense strand to SEQ ID NO: 2536584
acugcagggauccuuucuc

SEQ ID NO: 2536586 - RNA, 19 nt, Artificial Sequence
  Description of Artificial Sequence: Synthetic oligonucleotide
  Sense strand starting at position 1231 of SEQ ID NO: 1888484
ucuguaucuggcuaaccaa

SEQ ID NO: 2536587 - RNA, 19 nt, Artificial Sequence
  Description of Artificial Sequence: Synthetic oligonucleotide
  Antisense strand to SEQ ID NO: 2536586
uugguuagccagauacaga

SEQ ID NO: 2536588 - RNA, 19 nt, Artificial Sequence
  Description of Artificial Sequence: Synthetic oligonucleotide
  Sense strand starting at position 611 of SEQ ID NO: 1888484
ugacuuucucgucaacuag

SEQ ID NO: 2536589 - RNA, 19 nt, Artificial Sequence
  Description of Artificial Sequence: Synthetic oligonucleotide
  Antisense strand to SEQ ID NO: 2536588
cuaguugacgagaaaguca

SEQ ID NO: 2536590 - RNA, 19 nt, Artificial Sequence
  Description of Artificial Sequence: Synthetic oligonucleotide
  Sense strand starting at position 774 of SEQ ID NO: 1888484
ccaacaccgugauccuaaa

SEQ ID NO: 2536591 - RNA, 19 nt, Artificial Sequence
  Description of Artificial Sequence: Synthetic oligonucleotide
  Antisense strand to SEQ ID NO: 2536590
uuuaggaucacgguguugg

SEQ ID NO: 2536592 - RNA, 19 nt, Artificial Sequence
  Description of Artificial Sequence: Synthetic oligonucleotide
  Sense strand starting at position 2572 of SEQ ID NO: 1888484
cugacauuaccguaagguc

SEQ ID NO: 2536593 - RNA, 19 nt, Artificial Sequence
  Description of Artificial Sequence: Synthetic oligonucleotide
  Antisense strand to SEQ ID NO: 2536592
gaccuuacgguaaugucag

SEQ ID NO: 2536594 - RNA, 19 nt, Artificial Sequence
  Description of Artificial Sequence: Synthetic oligonucleotide
  Sense strand starting at position 627 of SEQ ID NO: 1888484
uaggcaaggucuccuaaca

SEQ ID NO: 2536595 - RNA, 19 nt, Artificial Sequence
  Description of Artificial Sequence: Synthetic oligonucleotide
  Antisense strand to SEQ ID NO: 2536594
uguuaggagaccuugccua

SEQ ID NO: 2536596 - RNA, 19 nt, Artificial Sequence
  Description of Artificial Sequence: Synthetic oligonucleotide
  Sense strand starting at position 2505 of SEQ ID NO: 1888484
guuggucaucccgacauag

SEQ ID NO: 2536597 - RNA, 19 nt, Artificial Sequence
  Description of Artificial Sequence: Synthetic oligonucleotide
  Antisense strand to SEQ ID NO: 2536596
cuaugucgggaugaccaac

SEQ ID NO: 2536598 - RNA, 19 nt, Artificial Sequence
  Description of Artificial Sequence: Synthetic oligonucleotide
  Sense strand starting at position 2610 of SEQ ID NO: 1888484
ccugaugugucacucagag

SEQ ID NO: 2536599 - RNA, 19 nt, Artificial Sequence
  Description of Artificial Sequence: Synthetic oligonucleotide
  Antisense strand to SEQ ID NO: 2536598
cucugagugacacaucagg

SEQ ID NO: 2536600 - RNA, 19 nt, Artificial Sequence
  Description of Artificial Sequence: Synthetic oligonucleotide
  Sense strand starting at position 3709 of SEQ ID NO: 1888484
gugacauccgccugaaaga

SEQ ID NO: 2536601 - RNA, 19 nt, Artificial Sequence
  Description of Artificial Sequence: Synthetic oligonucleotide
  Antisense strand to SEQ ID NO: 2536600
ucuuucaggcggaugucac

SEQ ID NO: 2536602 - RNA, 19 nt, Artificial Sequence
  Description of Artificial Sequence: Synthetic oligonucleotide
  Sense strand starting at position 2009 of SEQ ID NO: 1888484
agaacugguauguguccua

SEQ ID NO: 2536603 - RNA, 19 nt, Artificial Sequence
  Description of Artificial Sequence: Synthetic oligonucleotide
  Antisense strand to SEQ ID NO: 2536602
uaggacacauaccaguucu

SEQ ID NO: 2536604 - RNA, 19 nt, Artificial Sequence
  Description of Artificial Sequence: Synthetic oligonucleotide
  Sense strand starting at position 2012 of SEQ ID NO: 1888484
acugguauguguccuagag

SEQ ID NO: 2536605 - RNA, 19 nt, Artificial Sequence
  Description of Artificial Sequence: Synthetic oligonucleotide
  Antisense strand to SEQ ID NO: 2536604
cucuaggacacauaccagu

SEQ ID NO: 2536606 - RNA, 19 nt, Artificial Sequence
  Description of Artificial Sequence: Synthetic oligonucleotide
  Sense strand starting at position 843 of SEQ ID NO: 1888484
gcaccaaggugcucaagau

SEQ ID NO: 2536607 - RNA, 19 nt, Artificial Sequence
  Description of Artificial Sequence: Synthetic oligonucleotide
  Antisense strand to SEQ ID NO: 2536606
aucuugagcaccuuggugc

SEQ ID NO: 2536608 - RNA, 19 nt, Artificial Sequence
  Description of Artificial Sequence: Synthetic oligonucleotide
  Sense strand starting at position 1227 of SEQ ID NO: 1888484
agagucuguaucuggcuaa

SEQ ID NO: 2536609 - RNA, 19 nt, Artificial Sequence
  Description of Artificial Sequence: Synthetic oligonucleotide
  Antisense strand to SEQ ID NO: 2536608
uuagccagauacagacucu

SEQ ID NO: 2536610 - RNA, 19 nt, Artificial Sequence
  Description of Artificial Sequence: Synthetic oligonucleotide
  Sense strand starting at position 1226 of SEQ ID NO: 1888484
gagagucuguaucuggcua

SEQ ID NO: 2536611 - RNA, 19 nt, Artificial Sequence
  Description of Artificial Sequence: Synthetic oligonucleotide
  Antisense strand to SEQ ID NO: 2536610
uagccagauacagacucuc

SEQ ID NO: 2536612 - RNA, 19 nt, Artificial Sequence
  Description of Artificial Sequence: Synthetic oligonucleotide
  Sense strand starting at position 2460 of SEQ ID NO: 1888484
ggagaauguuugccuggca

SEQ ID NO: 2536613 - RNA, 19 nt, Artificial Sequence
  Description of Artificial Sequence: Synthetic oligonucleotide
  Antisense strand to SEQ ID NO: 2536612
ugccaggcaaacauucucc

SEQ ID NO: 2536614 - RNA, 19 nt, Artificial Sequence
  Description of Artificial Sequence: Synthetic oligonucleotide
  Sense strand starting at position 606 of SEQ ID NO: 1888484
acaagugacuuucucguca

SEQ ID NO: 2536615 - RNA, 19 nt, Artificial Sequence
  Description of Artificial Sequence: Synthetic oligonucleotide
  Antisense strand to SEQ ID NO: 2536614
ugacgagaaagucacuugu

SEQ ID NO: 2536616 - RNA, 19 nt, Artificial Sequence
  Description of Artificial Sequence: Synthetic oligonucleotide
  Sense strand starting at position 1285 of SEQ ID NO: 1888484
auggaauugucagagaagg

SEQ ID NO: 2536617 - RNA, 19 nt, Artificial Sequence
  Description of Artificial Sequence: Synthetic oligonucleotide
  Antisense strand to SEQ ID NO: 2536616
ccuucucugacaauuccau

SEQ ID NO: 2536618 - RNA, 19 nt, Artificial Sequence
  Description of Artificial Sequence: Synthetic oligonucleotide
  Sense strand starting at position 2461 of SEQ ID NO: 1888484
gagaauguuugccuggcau

SEQ ID NO: 2536619 - RNA, 19 nt, Artificial Sequence
  Description of Artificial Sequence: Synthetic oligonucleotide
  Antisense strand to SEQ ID NO: 2536618
augccaggcaaacauucuc

SEQ ID NO: 2536620 - RNA, 19 nt, Artificial Sequence
  Description of Artificial Sequence: Synthetic oligonucleotide
  Sense strand starting at position 610 of SEQ ID NO: 1888484
gugacuuucucgucaacua

SEQ ID NO: 2536621 - RNA, 19 nt, Artificial Sequence
  Description of Artificial Sequence: Synthetic oligonucleotide
  Antisense strand to SEQ ID NO: 2536620
uaguugacgagaaagucac

SEQ ID NO: 2536622 - RNA, 19 nt, Artificial Sequence
  Description of Artificial Sequence: Synthetic oligonucleotide
  Sense strand starting at position 1230 of SEQ ID NO: 1888484
gucuguaucuggcuaacca

SEQ ID NO: 2536623 - RNA, 19 nt, Artificial Sequence
  Description of Artificial Sequence: Synthetic oligonucleotide
  Antisense strand to SEQ ID NO: 2536622
ugguuagccagauacagac

SEQ ID NO: 2536624 - RNA, 19 nt, Artificial Sequence
  Description of Artificial Sequence: Synthetic oligonucleotide
  Sense strand starting at position 1178 of SEQ ID NO: 1888484
aagaguaucuucuagaaug

SEQ ID NO: 2536625 - RNA, 19 nt, Artificial Sequence
  Description of Artificial Sequence: Synthetic oligonucleotide
  Antisense strand to SEQ ID NO: 2536624
cauucuagaagauacucuu

SEQ ID NO: 2536626 - RNA, 19 nt, Artificial Sequence
  Description of Artificial Sequence: Synthetic oligonucleotide
  Sense strand starting at position 1991 of SEQ ID NO: 1888484
aaggaaaguucuggaauga

SEQ ID NO: 2536627 - RNA, 19 nt, Artificial Sequence
  Description of Artificial Sequence: Synthetic oligonucleotide
  Antisense strand to SEQ ID NO: 2536626
ucauuccagaacuuuccuu

SEQ ID NO: 2536628 - RNA, 19 nt, Artificial Sequence
  Description of Artificial Sequence: Synthetic oligonucleotide
  Sense strand starting at position 2324 of SEQ ID NO: 1888484
uucuuccucugggaaggaa

SEQ ID NO: 2536629 - RNA, 19 nt, Artificial Sequence
  Description of Artificial Sequence: Synthetic oligonucleotide
  Antisense strand to SEQ ID NO: 2536628
uuccuucccagaggaagaa

SEQ ID NO: 2536630 - RNA, 19 nt, Artificial Sequence
  Description of Artificial Sequence: Synthetic oligonucleotide
  Sense strand starting at position 749 of SEQ ID NO: 1888484
uuuggagauuaucauccua

SEQ ID NO: 2536631 - RNA, 19 nt, Artificial Sequence
  Description of Artificial Sequence: Synthetic oligonucleotide
  Antisense strand to SEQ ID NO: 2536630
uaggaugauaaucuccaaa

SEQ ID NO: 2536632 - RNA, 19 nt, Artificial Sequence
  Description of Artificial Sequence: Synthetic oligonucleotide
  Sense strand starting at position 1990 of SEQ ID NO: 1888484
uaaggaaaguucuggaaug

SEQ ID NO: 2536633 - RNA, 19 nt, Artificial Sequence
  Description of Artificial Sequence: Synthetic oligonucleotide
  Antisense strand to SEQ ID NO: 2536632
cauuccagaacuuuccuua

SEQ ID NO: 2536634 - RNA, 19 nt, Artificial Sequence
  Description of Artificial Sequence: Synthetic oligonucleotide
  Sense strand starting at position 1274 of SEQ ID NO: 1888484
ugaggacagugauggaauu

SEQ ID NO: 2536635 - RNA, 19 nt, Artificial Sequence
  Description of Artificial Sequence: Synthetic oligonucleotide
  Antisense strand to SEQ ID NO: 2536634
aauuccaucacuguccuca

SEQ ID NO: 2536636 - RNA, 19 nt, Artificial Sequence
  Description of Artificial Sequence: Synthetic oligonucleotide
  Sense strand starting at position 2614 of SEQ ID NO: 1888484
augugucacucagagaauc

SEQ ID NO: 2536637 - RNA, 19 nt, Artificial Sequence
  Description of Artificial Sequence: Synthetic oligonucleotide
  Antisense strand to SEQ ID NO: 2536636
gauucucugagugacacau

SEQ ID NO: 2536638 - RNA, 19 nt, Artificial Sequence
  Description of Artificial Sequence: Synthetic oligonucleotide
  Sense strand starting at position 2014 of SEQ ID NO: 1888484
ugguauguguccuagagag

SEQ ID NO: 2536639 - RNA, 19 nt, Artificial Sequence
  Description of Artificial Sequence: Synthetic oligonucleotide
  Antisense strand to SEQ ID NO: 2536638
cucucuaggacacauacca

SEQ ID NO: 2536640 - RNA, 19 nt, Artificial Sequence
  Description of Artificial Sequence: Synthetic oligonucleotide
  Sense strand starting at position 679 of SEQ ID NO: 1888484
gguccugcauucuaaauca

SEQ ID NO: 2536641 - RNA, 19 nt, Artificial Sequence
  Description of Artificial Sequence: Synthetic oligonucleotide
  Antisense strand to SEQ ID NO: 2536640
ugauuuagaaugcaggacc

SEQ ID NO: 2536642 - RNA, 19 nt, Artificial Sequence
  Description of Artificial Sequence: Synthetic oligonucleotide
  Sense strand starting at position 608 of SEQ ID NO: 1888484
aagugacuuucucgucaac

SEQ ID NO: 2536643 - RNA, 19 nt, Artificial Sequence
  Description of Artificial Sequence: Synthetic oligonucleotide
  Antisense strand to SEQ ID NO: 2536642
guugacgagaaagucacuu

SEQ ID NO: 2536644 - RNA, 19 nt, Artificial Sequence
  Description of Artificial Sequence: Synthetic oligonucleotide
  Sense strand starting at position 3614 of SEQ ID NO: 1888485
agcucuaguccugcuguau

SEQ ID NO: 2536645 - RNA, 19 nt, Artificial Sequence
  Description of Artificial Sequence: Synthetic oligonucleotide
  Antisense strand to SEQ ID NO: 2536644
auacagcaggacuagagcu

SEQ ID NO: 2536646 - RNA, 19 nt, Artificial Sequence
  Description of Artificial Sequence: Synthetic oligonucleotide
  Sense strand starting at position 1530 of SEQ ID NO: 1888485
ggcuuaaugcaagacuaaa

SEQ ID NO: 2536647 - RNA, 19 nt, Artificial Sequence
  Description of Artificial Sequence: Synthetic oligonucleotide
  Antisense strand to SEQ ID NO: 2536646
uuuagucuugcauuaagcc

SEQ ID NO: 2536648 - RNA, 19 nt, Artificial Sequence
  Description of Artificial Sequence: Synthetic oligonucleotide
  Sense strand starting at position 2262 of SEQ ID NO: 1888485
gggacauaccuguggagac

SEQ ID NO: 2536649 - RNA, 19 nt, Artificial Sequence
  Description of Artificial Sequence: Synthetic oligonucleotide
  Antisense strand to SEQ ID NO: 2536648
gucuccacagguauguccc

SEQ ID NO: 2536650 - RNA, 19 nt, Artificial Sequence
  Description of Artificial Sequence: Synthetic oligonucleotide
  Sense strand starting at position 2389 of SEQ ID NO: 1888485
acgagagaaguccauguua

SEQ ID NO: 2536651 - RNA, 19 nt, Artificial Sequence
  Description of Artificial Sequence: Synthetic oligonucleotide
  Antisense strand to SEQ ID NO: 2536650
uaacauggacuucucucgu

SEQ ID NO: 2536652 - RNA, 19 nt, Artificial Sequence
  Description of Artificial Sequence: Synthetic oligonucleotide
  Sense strand starting at position 262 of SEQ ID NO: 1888485
ugggaugcugcacaaauga

SEQ ID NO: 2536653 - RNA, 19 nt, Artificial Sequence
  Description of Artificial Sequence: Synthetic oligonucleotide
  Antisense strand to SEQ ID NO: 2536652
ucauuugugcagcauccca

SEQ ID NO: 2536654 - RNA, 19 nt, Artificial Sequence
  Description of Artificial Sequence: Synthetic oligonucleotide
  Sense strand starting at position 3615 of SEQ ID NO: 1888485
gcucuaguccugcuguauc

SEQ ID NO: 2536655 - RNA, 19 nt, Artificial Sequence
  Description of Artificial Sequence: Synthetic oligonucleotide
  Antisense strand to SEQ ID NO: 2536654
gauacagcaggacuagagc

SEQ ID NO: 2536656 - RNA, 19 nt, Artificial Sequence
  Description of Artificial Sequence: Synthetic oligonucleotide
  Sense strand starting at position 2867 of SEQ ID NO: 1888485
uaagguugucaugagagug

SEQ ID NO: 2536657 - RNA, 19 nt, Artificial Sequence
  Description of Artificial Sequence: Synthetic oligonucleotide
  Antisense strand to SEQ ID NO: 2536656
cacucucaugacaaccuua

SEQ ID NO: 2536658 - RNA, 19 nt, Artificial Sequence
  Description of Artificial Sequence: Synthetic oligonucleotide
  Sense strand starting at position 2391 of SEQ ID NO: 1888485
gagagaaguccauguuaua

SEQ ID NO: 2536659 - RNA, 19 nt, Artificial Sequence
  Description of Artificial Sequence: Synthetic oligonucleotide
  Antisense strand to SEQ ID NO: 2536658
uauaacauggacuucucuc

SEQ ID NO: 2536660 - RNA, 19 nt, Artificial Sequence
  Description of Artificial Sequence: Synthetic oligonucleotide
  Sense strand starting at position 307 of SEQ ID NO: 1888485
ucaucuguggaaugagauu

SEQ ID NO: 2536661 - RNA, 19 nt, Artificial Sequence
  Description of Artificial Sequence: Synthetic oligonucleotide
  Antisense strand to SEQ ID NO: 2536660
aaucucauuccacagauga

SEQ ID NO: 2536662 - RNA, 19 nt, Artificial Sequence
  Description of Artificial Sequence: Synthetic oligonucleotide
  Sense strand starting at position 36 of SEQ ID NO: 1888485
ggguuuccugcgccaguca

SEQ ID NO: 2536663 - RNA, 19 nt, Artificial Sequence
  Description of Artificial Sequence: Synthetic oligonucleotide
  Antisense strand to SEQ ID NO: 2536662
ugacuggcgcaggaaaccc

SEQ ID NO: 2536664 - RNA, 19 nt, Artificial Sequence
  Description of Artificial Sequence: Synthetic oligonucleotide
  Sense strand starting at position 1984 of SEQ ID NO: 1888485
uuucuuugcccagaacuga

SEQ ID NO: 2536665 - RNA, 19 nt, Artificial Sequence
  Description of Artificial Sequence: Synthetic oligonucleotide
  Antisense strand to SEQ ID NO: 2536664
ucaguucugggcaaagaaa

SEQ ID NO: 2536666 - RNA, 19 nt, Artificial Sequence
  Description of Artificial Sequence: Synthetic oligonucleotide
  Sense strand starting at position 442 of SEQ ID NO: 1888485
agggcuaacucuuccagga

SEQ ID NO: 2536667 - RNA, 19 nt, Artificial Sequence
  Description of Artificial Sequence: Synthetic oligonucleotide
  Antisense strand to SEQ ID NO: 2536666
uccuggaagaguuagcccu

SEQ ID NO: 2536668 - RNA, 19 nt, Artificial Sequence
  Description of Artificial Sequence: Synthetic oligonucleotide
  Sense strand starting at position 302 of SEQ ID NO: 1888485
uauacucaucuguggaaug

SEQ ID NO: 2536669 - RNA, 19 nt, Artificial Sequence
  Description of Artificial Sequence: Synthetic oligonucleotide
  Antisense strand to SEQ ID NO: 2536668
cauuccacagaugaguaua

SEQ ID NO: 2536670 - RNA, 19 nt, Artificial Sequence
  Description of Artificial Sequence: Synthetic oligonucleotide
  Sense strand starting at position 656 of SEQ ID NO: 1888485
gugugcauuuguucuagag

SEQ ID NO: 2536671 - RNA, 19 nt, Artificial Sequence
  Description of Artificial Sequence: Synthetic oligonucleotide
  Antisense strand to SEQ ID NO: 2536670
cucuagaacaaaugcacac

SEQ ID NO: 2536672 - RNA, 19 nt, Artificial Sequence
  Description of Artificial Sequence: Synthetic oligonucleotide
  Sense strand starting at position 1753 of SEQ ID NO: 1888485
gagaguuaccuguaggcug

SEQ ID NO: 2536673 - RNA, 19 nt, Artificial Sequence
  Description of Artificial Sequence: Synthetic oligonucleotide
  Antisense strand to SEQ ID NO: 2536672
cagccuacagguaacucuc

SEQ ID NO: 2536674 - RNA, 19 nt, Artificial Sequence
  Description of Artificial Sequence: Synthetic oligonucleotide
  Sense strand starting at position 2687 of SEQ ID NO: 1888485
uggagaauguuggcacauc

SEQ ID NO: 2536675 - RNA, 19 nt, Artificial Sequence
  Description of Artificial Sequence: Synthetic oligonucleotide
  Antisense strand to SEQ ID NO: 2536674
gaugugccaacauucucca

SEQ ID NO: 2536676 - RNA, 19 nt, Artificial Sequence
  Description of Artificial Sequence: Synthetic oligonucleotide
  Sense strand starting at position 2283 of SEQ ID NO: 1888485
ccgggugcucuagaauaug

SEQ ID NO: 2536677 - RNA, 19 nt, Artificial Sequence
  Description of Artificial Sequence: Synthetic oligonucleotide
  Antisense strand to SEQ ID NO: 2536676
cauauucuagagcacccgg

SEQ ID NO: 2536678 - RNA, 19 nt, Artificial Sequence
  Description of Artificial Sequence: Synthetic oligonucleotide
  Sense strand starting at position 301 of SEQ ID NO: 1888485
guauacucaucuguggaau

SEQ ID NO: 2536679 - RNA, 19 nt, Artificial Sequence
  Description of Artificial Sequence: Synthetic oligonucleotide
  Antisense strand to SEQ ID NO: 2536678
auuccacagaugaguauac

SEQ ID NO: 2536680 - RNA, 19 nt, Artificial Sequence
  Description of Artificial Sequence: Synthetic oligonucleotide
  Sense strand starting at position 3814 of SEQ ID NO: 1888485
ggcuuucuagcuggaagga

SEQ ID NO: 2536681 - RNA, 19 nt, Artificial Sequence
  Description of Artificial Sequence: Synthetic oligonucleotide
  Antisense strand to SEQ ID NO: 2536680
uccuuccagcuagaaagcc

SEQ ID NO: 2536682 - RNA, 19 nt, Artificial Sequence
  Description of Artificial Sequence: Synthetic oligonucleotide
  Sense strand starting at position 2786 of SEQ ID NO: 1888485
gcuaauauuuaaggaauga

SEQ ID NO: 2536683 - RNA, 19 nt, Artificial Sequence
  Description of Artificial Sequence: Synthetic oligonucleotide
  Antisense strand to SEQ ID NO: 2536682
ucauuccuuaaauauuagc

SEQ ID NO: 2536684 - RNA, 19 nt, Artificial Sequence
  Description of Artificial Sequence: Synthetic oligonucleotide
  Sense strand starting at position 2872 of SEQ ID NO: 1888485
uugucaugagaguguugga

SEQ ID NO: 2536685 - RNA, 19 nt, Artificial Sequence
  Description of Artificial Sequence: Synthetic oligonucleotide
  Antisense strand to SEQ ID NO: 2536684
uccaacacucucaugacaa

SEQ ID NO: 2536686 - RNA, 19 nt, Artificial Sequence
  Description of Artificial Sequence: Synthetic oligonucleotide
  Sense strand starting at position 1037 of SEQ ID NO: 1888485
cuauuuguccagcguccau

SEQ ID NO: 2536687 - RNA, 19 nt, Artificial Sequence
  Description of Artificial Sequence: Synthetic oligonucleotide
  Antisense strand to SEQ ID NO: 2536686
auggacgcuggacaaauag

SEQ ID NO: 2536688 - RNA, 19 nt, Artificial Sequence
  Description of Artificial Sequence: Synthetic oligonucleotide
  Sense strand starting at position 3733 of SEQ ID NO: 1888485
ugcagugacugauuagcaa

SEQ ID NO: 2536689 - RNA, 19 nt, Artificial Sequence
  Description of Artificial Sequence: Synthetic oligonucleotide
  Antisense strand to SEQ ID NO: 2536688
uugcuaaucagucacugca

SEQ ID NO: 2536690 - RNA, 19 nt, Artificial Sequence
  Description of Artificial Sequence: Synthetic oligonucleotide
  Sense strand starting at position 679 of SEQ ID NO: 1888485
ggucaucacugggcuucua

SEQ ID NO: 2536691 - RNA, 19 nt, Artificial Sequence
  Description of Artificial Sequence: Synthetic oligonucleotide
  Antisense strand to SEQ ID NO: 2536690
uagaagcccagugaugacc

SEQ ID NO: 2536692 - RNA, 19 nt, Artificial Sequence
  Description of Artificial Sequence: Synthetic oligonucleotide
  Sense strand starting at position 638 of SEQ ID NO: 1888485
aggagagauucucauacag

SEQ ID NO: 2536693 - RNA, 19 nt, Artificial Sequence
  Description of Artificial Sequence: Synthetic oligonucleotide
  Antisense strand to SEQ ID NO: 2536692
cuguaugagaaucucuccu

SEQ ID NO: 2536694 - RNA, 19 nt, Artificial Sequence
  Description of Artificial Sequence: Synthetic oligonucleotide
  Sense strand starting at position 1903 of SEQ ID NO: 1888485
gaagcugcuucuguggaga

SEQ ID NO: 2536695 - RNA, 19 nt, Artificial Sequence
  Description of Artificial Sequence: Synthetic oligonucleotide
  Antisense strand to SEQ ID NO: 2536694
ucuccacagaagcagcuuc

SEQ ID NO: 2536696 - RNA, 19 nt, Artificial Sequence
  Description of Artificial Sequence: Synthetic oligonucleotide
  Sense strand starting at position 341 of SEQ ID NO: 1888485
cuccuauggcgauggagua

SEQ ID NO: 2536697 - RNA, 19 nt, Artificial Sequence
  Description of Artificial Sequence: Synthetic oligonucleotide
  Antisense strand to SEQ ID NO: 2536696
uacuccaucgccauaggag

SEQ ID NO: 2536698 - RNA, 19 nt, Artificial Sequence
  Description of Artificial Sequence: Synthetic oligonucleotide
  Sense strand starting at position 1050 of SEQ ID NO: 1888485
guccauuugcgguggcauu

SEQ ID NO: 2536699 - RNA, 19 nt, Artificial Sequence
  Description of Artificial Sequence: Synthetic oligonucleotide
  Antisense strand to SEQ ID NO: 2536698
aaugccaccgcaaauggac

SEQ ID NO: 2536700 - RNA, 19 nt, Artificial Sequence
  Description of Artificial Sequence: Synthetic oligonucleotide
  Sense strand starting at position 1090 of SEQ ID NO: 1888485
ucuuucucccagugugaau

SEQ ID NO: 2536701 - RNA, 19 nt, Artificial Sequence
  Description of Artificial Sequence: Synthetic oligonucleotide
  Antisense strand to SEQ ID NO: 2536700
auucacacugggagaaaga

SEQ ID NO: 2536702 - RNA, 19 nt, Artificial Sequence
  Description of Artificial Sequence: Synthetic oligonucleotide
  Sense strand starting at position 3923 of SEQ ID NO: 1888485
uucucauucgccuaauguc

SEQ ID NO: 2536703 - RNA, 19 nt, Artificial Sequence
  Description of Artificial Sequence: Synthetic oligonucleotide
  Antisense strand to SEQ ID NO: 2536702
gacauuaggcgaaugagaa

SEQ ID NO: 2536704 - RNA, 19 nt, Artificial Sequence
  Description of Artificial Sequence: Synthetic oligonucleotide
  Sense strand starting at position 2294 of SEQ ID NO: 1888485
agaauauggcgcgggaagu

SEQ ID NO: 2536705 - RNA, 19 nt, Artificial Sequence
  Description of Artificial Sequence: Synthetic oligonucleotide
  Antisense strand to SEQ ID NO: 2536704
acuucccgcgccauauucu

SEQ ID NO: 2536706 - RNA, 19 nt, Artificial Sequence
  Description of Artificial Sequence: Synthetic oligonucleotide
  Sense strand starting at position 2677 of SEQ ID NO: 1888485
cacuaaguauuggagaaug

SEQ ID NO: 2536707 - RNA, 19 nt, Artificial Sequence
  Description of Artificial Sequence: Synthetic oligonucleotide
  Antisense strand to SEQ ID NO: 2536706
cauucuccaauacuuagug

SEQ ID NO: 2536708 - RNA, 19 nt, Artificial Sequence
  Description of Artificial Sequence: Synthetic oligonucleotide
  Sense strand starting at position 1890 of SEQ ID NO: 1888485
gcuguucuccagggaagcu

SEQ ID NO: 2536709 - RNA, 19 nt, Artificial Sequence
  Description of Artificial Sequence: Synthetic oligonucleotide
  Antisense strand to SEQ ID NO: 2536708
agcuucccuggagaacagc

SEQ ID NO: 2536710 - RNA, 19 nt, Artificial Sequence
  Description of Artificial Sequence: Synthetic oligonucleotide
  Sense strand starting at position 2295 of SEQ ID NO: 1888485
gaauauggcgcgggaaguu

SEQ ID NO: 2536711 - RNA, 19 nt, Artificial Sequence
  Description of Artificial Sequence: Synthetic oligonucleotide
  Antisense strand to SEQ ID NO: 2536710
aacuucccgcgccauauuc

SEQ ID NO: 2536712 - RNA, 19 nt, Artificial Sequence
  Description of Artificial Sequence: Synthetic oligonucleotide
  Sense strand starting at position 640 of SEQ ID NO: 1888485
gagagauucucauacagug

SEQ ID NO: 2536713 - RNA, 19 nt, Artificial Sequence
  Description of Artificial Sequence: Synthetic oligonucleotide
  Antisense strand to SEQ ID NO: 2536712
cacuguaugagaaucucuc

SEQ ID NO: 2536714 - RNA, 19 nt, Artificial Sequence
  Description of Artificial Sequence: Synthetic oligonucleotide
  Sense strand starting at position 2863 of SEQ ID NO: 1888485
gccguaagguugucaugag

SEQ ID NO: 2536715 - RNA, 19 nt, Artificial Sequence
  Description of Artificial Sequence: Synthetic oligonucleotide
  Antisense strand to SEQ ID NO: 2536714
cucaugacaaccuuacggc

SEQ ID NO: 2536716 - RNA, 19 nt, Artificial Sequence
  Description of Artificial Sequence: Synthetic oligonucleotide
  Sense strand starting at position 2529 of SEQ ID NO: 1888485
gguguuauacuccgcugga

SEQ ID NO: 2536717 - RNA, 19 nt, Artificial Sequence
  Description of Artificial Sequence: Synthetic oligonucleotide
  Antisense strand to SEQ ID NO: 2536716
uccagcggaguauaacacc

SEQ ID NO: 2536718 - RNA, 19 nt, Artificial Sequence
  Description of Artificial Sequence: Synthetic oligonucleotide
  Sense strand starting at position 757 of SEQ ID NO: 1888485
gcauccuucugcguaagag

SEQ ID NO: 2536719 - RNA, 19 nt, Artificial Sequence
  Description of Artificial Sequence: Synthetic oligonucleotide
  Antisense strand to SEQ ID NO: 2536718
cucuuacgcagaaggaugc

SEQ ID NO: 2536720 - RNA, 19 nt, Artificial Sequence
  Description of Artificial Sequence: Synthetic oligonucleotide
  Sense strand starting at position 2530 of SEQ ID NO: 1888485
guguuauacuccgcuggac

SEQ ID NO: 2536721 - RNA, 19 nt, Artificial Sequence
  Description of Artificial Sequence: Synthetic oligonucleotide
  Antisense strand to SEQ ID NO: 2536720
guccagcggaguauaacac

SEQ ID NO: 2536722 - RNA, 19 nt, Artificial Sequence
  Description of Artificial Sequence: Synthetic oligonucleotide
  Sense strand starting at position 2675 of SEQ ID NO: 1888485
gacacuaaguauuggagaa

SEQ ID NO: 2536723 - RNA, 19 nt, Artificial Sequence
  Description of Artificial Sequence: Synthetic oligonucleotide
  Antisense strand to SEQ ID NO: 2536722
uucuccaauacuuaguguc

SEQ ID NO: 2536724 - RNA, 19 nt, Artificial Sequence
  Description of Artificial Sequence: Synthetic oligonucleotide
  Sense strand starting at position 3688 of SEQ ID NO: 1888486
uuaacagaccuuggaucua

SEQ ID NO: 2536725 - RNA, 19 nt, Artificial Sequence
  Description of Artificial Sequence: Synthetic oligonucleotide
  Antisense strand to SEQ ID NO: 2536724
uagauccaaggucuguuaa

SEQ ID NO: 2536726 - RNA, 19 nt, Artificial Sequence
  Description of Artificial Sequence: Synthetic oligonucleotide
  Sense strand starting at position 3503 of SEQ ID NO: 1888486
auuacuagaggcuauuauu

SEQ ID NO: 2536727 - RNA, 19 nt, Artificial Sequence
  Description of Artificial Sequence: Synthetic oligonucleotide
  Antisense strand to SEQ ID NO: 2536726
aauaauagccucuaguaau

SEQ ID NO: 2536728 - RNA, 19 nt, Artificial Sequence
  Description of Artificial Sequence: Synthetic oligonucleotide
  Sense strand starting at position 3498 of SEQ ID NO: 1888486
uaaguauuacuagaggcua

SEQ ID NO: 2536729 - RNA, 19 nt, Artificial Sequence
  Description of Artificial Sequence: Synthetic oligonucleotide
  Antisense strand to SEQ ID NO: 2536728
uagccucuaguaauacuua

SEQ ID NO: 2536730 - RNA, 19 nt, Artificial Sequence
  Description of Artificial Sequence: Synthetic oligonucleotide
  Sense strand starting at position 3515 of SEQ ID NO: 1888486
uauuauuugcuacgguaga

SEQ ID NO: 2536731 - RNA, 19 nt, Artificial Sequence
  Description of Artificial Sequence: Synthetic oligonucleotide
  Antisense strand to SEQ ID NO: 2536730
ucuaccguagcaaauaaua

SEQ ID NO: 2536732 - RNA, 19 nt, Artificial Sequence
  Description of Artificial Sequence: Synthetic oligonucleotide
  Sense strand starting at position 2949 of SEQ ID NO: 1888486
aaaguaacaugguuuggga

SEQ ID NO: 2536733 - RNA, 19 nt, Artificial Sequence
  Description of Artificial Sequence: Synthetic oligonucleotide
  Antisense strand to SEQ ID NO: 2536732
ucccaaaccauguuacuuu

SEQ ID NO: 2536734 - RNA, 19 nt, Artificial Sequence
  Description of Artificial Sequence: Synthetic oligonucleotide
  Sense strand starting at position 2839 of SEQ ID NO: 1888486
uugucaguugaccaggaau

SEQ ID NO: 2536735 - RNA, 19 nt, Artificial Sequence
  Description of Artificial Sequence: Synthetic oligonucleotide
  Antisense strand to SEQ ID NO: 2536734
auuccuggucaacugacaa

SEQ ID NO: 2536736 - RNA, 19 nt, Artificial Sequence
  Description of Artificial Sequence: Synthetic oligonucleotide
  Sense strand starting at position 526 of SEQ ID NO: 1888486
uggauaauccugggaaguu

SEQ ID NO: 2536737 - RNA, 19 nt, Artificial Sequence
  Description of Artificial Sequence: Synthetic oligonucleotide
  Antisense strand to SEQ ID NO: 2536736
aacuucccaggauuaucca

SEQ ID NO: 2536738 - RNA, 19 nt, Artificial Sequence
  Description of Artificial Sequence: Synthetic oligonucleotide
  Sense strand starting at position 525 of SEQ ID NO: 1888486
cuggauaauccugggaagu

SEQ ID NO: 2536739 - RNA, 19 nt, Artificial Sequence
  Description of Artificial Sequence: Synthetic oligonucleotide
  Antisense strand to SEQ ID NO: 2536738
acuucccaggauuauccag

SEQ ID NO: 2536740 - RNA, 19 nt, Artificial Sequence
  Description of Artificial Sequence: Synthetic oligonucleotide
  Sense strand starting at position 578 of SEQ ID NO: 1888486
agcacagagggaugguaau

SEQ ID NO: 2536741 - RNA, 19 nt, Artificial Sequence
  Description of Artificial Sequence: Synthetic oligonucleotide
  Antisense strand to SEQ ID NO: 2536740
auuaccaucccucugugcu

SEQ ID NO: 2536742 - RNA, 19 nt, Artificial Sequence
  Description of Artificial Sequence: Synthetic oligonucleotide
  Sense strand starting at position 735 of SEQ ID NO: 1888486
uguggauaaucagucagaa

SEQ ID NO: 2536743 - RNA, 19 nt, Artificial Sequence
  Description of Artificial Sequence: Synthetic oligonucleotide
  Antisense strand to SEQ ID NO: 2536742
uucugacugauuauccaca

SEQ ID NO: 2536744 - RNA, 19 nt, Artificial Sequence
  Description of Artificial Sequence: Synthetic oligonucleotide
  Sense strand starting at position 337 of SEQ ID NO: 1888486
ggguuaacccagcaucaau

SEQ ID NO: 2536745 - RNA, 19 nt, Artificial Sequence
  Description of Artificial Sequence: Synthetic oligonucleotide
  Antisense strand to SEQ ID NO: 2536744
auugaugcuggguuaaccc

SEQ ID NO: 2536746 - RNA, 19 nt, Artificial Sequence
  Description of Artificial Sequence: Synthetic oligonucleotide
  Sense strand starting at position 3605 of SEQ ID NO: 1888486
gcagauauuggucaguaaa

SEQ ID NO: 2536747 - RNA, 19 nt, Artificial Sequence
  Description of Artificial Sequence: Synthetic oligonucleotide
  Antisense strand to SEQ ID NO: 2536746
uuuacugaccaauaucugc

SEQ ID NO: 2536748 - RNA, 19 nt, Artificial Sequence
  Description of Artificial Sequence: Synthetic oligonucleotide
  Sense strand starting at position 3414 of SEQ ID NO: 1888486
cuuugauaccuauaccugu

SEQ ID NO: 2536749 - RNA, 19 nt, Artificial Sequence
  Description of Artificial Sequence: Synthetic oligonucleotide
  Antisense strand to SEQ ID NO: 2536748
acagguauagguaucaaag

SEQ ID NO: 2536750 - RNA, 19 nt, Artificial Sequence
  Description of Artificial Sequence: Synthetic oligonucleotide
  Sense strand starting at position 2793 of SEQ ID NO: 1888486
cugacuugaugacuuguaa

SEQ ID NO: 2536751 - RNA, 19 nt, Artificial Sequence
  Description of Artificial Sequence: Synthetic oligonucleotide
  Antisense strand to SEQ ID NO: 2536750
uuacaagucaucaagucag

SEQ ID NO: 2536752 - RNA, 19 nt, Artificial Sequence
  Description of Artificial Sequence: Synthetic oligonucleotide
  Sense strand starting at position 3520 of SEQ ID NO: 1888486
uuugcuacgguagagauaa

SEQ ID NO: 2536753 - RNA, 19 nt, Artificial Sequence
  Description of Artificial Sequence: Synthetic oligonucleotide
  Antisense strand to SEQ ID NO: 2536752
uuaucucuaccguagcaaa

SEQ ID NO: 2536754 - RNA, 19 nt, Artificial Sequence
  Description of Artificial Sequence: Synthetic oligonucleotide
  Sense strand starting at position 3458 of SEQ ID NO: 1888486
gauacuuaguuagcauaga

SEQ ID NO: 2536755 - RNA, 19 nt, Artificial Sequence
  Description of Artificial Sequence: Synthetic oligonucleotide
  Antisense strand to SEQ ID NO: 2536754
ucuaugcuaacuaaguauc

SEQ ID NO: 2536756 - RNA, 19 nt, Artificial Sequence
  Description of Artificial Sequence: Synthetic oligonucleotide
  Sense strand starting at position 3454 of SEQ ID NO: 1888486
agaugauacuuaguuagca

SEQ ID NO: 2536757 - RNA, 19 nt, Artificial Sequence
  Description of Artificial Sequence: Synthetic oligonucleotide
  Antisense strand to SEQ ID NO: 2536756
ugcuaacuaaguaucaucu

SEQ ID NO: 2536758 - RNA, 19 nt, Artificial Sequence
  Description of Artificial Sequence: Synthetic oligonucleotide
  Sense strand starting at position 2654 of SEQ ID NO: 1888486
gcaguugucagggaaguaa

SEQ ID NO: 2536759 - RNA, 19 nt, Artificial Sequence
  Description of Artificial Sequence: Synthetic oligonucleotide
  Antisense strand to SEQ ID NO: 2536758
uuacuucccugacaacugc

SEQ ID NO: 2536760 - RNA, 19 nt, Artificial Sequence
  Description of Artificial Sequence: Synthetic oligonucleotide
  Sense strand starting at position 363 of SEQ ID NO: 1888486
ggcauuaacuuagucuaaa

SEQ ID NO: 2536761 - RNA, 19 nt, Artificial Sequence
  Description of Artificial Sequence: Synthetic oligonucleotide
  Antisense strand to SEQ ID NO: 2536760
uuuagacuaaguuaaugcc

SEQ ID NO: 2536762 - RNA, 19 nt, Artificial Sequence
  Description of Artificial Sequence: Synthetic oligonucleotide
  Sense strand starting at position 2869 of SEQ ID NO: 1888486
ugagauguagccgacucua

SEQ ID NO: 2536763 - RNA, 19 nt, Artificial Sequence
  Description of Artificial Sequence: Synthetic oligonucleotide
  Antisense strand to SEQ ID NO: 2536762
uagagucggcuacaucuca

SEQ ID NO: 2536764 - RNA, 19 nt, Artificial Sequence
  Description of Artificial Sequence: Synthetic oligonucleotide
  Sense strand starting at position 706 of SEQ ID NO: 1888486
guuagcgauuaaccaaaga

SEQ ID NO: 2536765 - RNA, 19 nt, Artificial Sequence
  Description of Artificial Sequence: Synthetic oligonucleotide
  Antisense strand to SEQ ID NO: 2536764
ucuuugguuaaucgcuaac

SEQ ID NO: 2536766 - RNA, 19 nt, Artificial Sequence
  Description of Artificial Sequence: Synthetic oligonucleotide
  Sense strand starting at position 2687 of SEQ ID NO: 1888486
ucuauugaguccuuacuga

SEQ ID NO: 2536767 - RNA, 19 nt, Artificial Sequence
  Description of Artificial Sequence: Synthetic oligonucleotide
  Antisense strand to SEQ ID NO: 2536766
ucaguaaggacucaauaga

SEQ ID NO: 2536768 - RNA, 19 nt, Artificial Sequence
  Description of Artificial Sequence: Synthetic oligonucleotide
  Sense strand starting at position 3455 of SEQ ID NO: 1888486
gaugauacuuaguuagcau

SEQ ID NO: 2536769 - RNA, 19 nt, Artificial Sequence
  Description of Artificial Sequence: Synthetic oligonucleotide
  Antisense strand to SEQ ID NO: 2536768
augcuaacuaaguaucauc

SEQ ID NO: 2536770 - RNA, 19 nt, Artificial Sequence
  Description of Artificial Sequence: Synthetic oligonucleotide
  Sense strand starting at position 513 of SEQ ID NO: 1888486
accaguuacuagcuggaua

SEQ ID NO: 2536771 - RNA, 19 nt, Artificial Sequence
  Description of Artificial Sequence: Synthetic oligonucleotide
  Antisense strand to SEQ ID NO: 2536770
uauccagcuaguaacuggu

SEQ ID NO: 2536772 - RNA, 19 nt, Artificial Sequence
  Description of Artificial Sequence: Synthetic oligonucleotide
  Sense strand starting at position 515 of SEQ ID NO: 1888486
caguuacuagcuggauaau

SEQ ID NO: 2536773 - RNA, 19 nt, Artificial Sequence
  Description of Artificial Sequence: Synthetic oligonucleotide
  Antisense strand to SEQ ID NO: 2536772
auuauccagcuaguaacug

SEQ ID NO: 2536774 - RNA, 19 nt, Artificial Sequence
  Description of Artificial Sequence: Synthetic oligonucleotide
  Sense strand starting at position 3604 of SEQ ID NO: 1888486
ggcagauauuggucaguaa

SEQ ID NO: 2536775 - RNA, 19 nt, Artificial Sequence
  Description of Artificial Sequence: Synthetic oligonucleotide
  Antisense strand to SEQ ID NO: 2536774
uuacugaccaauaucugcc

SEQ ID NO: 2536776 - RNA, 19 nt, Artificial Sequence
  Description of Artificial Sequence: Synthetic oligonucleotide
  Sense strand starting at position 28 of SEQ ID NO: 1888486
ggagcccucagauguaauu

SEQ ID NO: 2536777 - RNA, 19 nt, Artificial Sequence
  Description of Artificial Sequence: Synthetic oligonucleotide
  Antisense strand to SEQ ID NO: 2536776
aauuacaucugagggcucc

SEQ ID NO: 2536778 - RNA, 19 nt, Artificial Sequence
  Description of Artificial Sequence: Synthetic oligonucleotide
  Sense strand starting at position 703 of SEQ ID NO: 1888486
gugguuagcgauuaaccaa

SEQ ID NO: 2536779 - RNA, 19 nt, Artificial Sequence
  Description of Artificial Sequence: Synthetic oligonucleotide
  Antisense strand to SEQ ID NO: 2536778
uugguuaaucgcuaaccac

SEQ ID NO: 2536780 - RNA, 19 nt, Artificial Sequence
  Description of Artificial Sequence: Synthetic oligonucleotide
  Sense strand starting at position 46 of SEQ ID NO: 1888486
uagugagugucuuuauaaa

SEQ ID NO: 2536781 - RNA, 19 nt, Artificial Sequence
  Description of Artificial Sequence: Synthetic oligonucleotide
  Antisense strand to SEQ ID NO: 2536780
uuuauaaagacacucacua

SEQ ID NO: 2536782 - RNA, 19 nt, Artificial Sequence
  Description of Artificial Sequence: Synthetic oligonucleotide
  Sense strand starting at position 2874 of SEQ ID NO: 1888486
uguagccgacucuauaauu

SEQ ID NO: 2536783 - RNA, 19 nt, Artificial Sequence
  Description of Artificial Sequence: Synthetic oligonucleotide
  Antisense strand to SEQ ID NO: 2536782
aauuauagagucggcuaca

SEQ ID NO: 2536784 - RNA, 19 nt, Artificial Sequence
  Description of Artificial Sequence: Synthetic oligonucleotide
  Sense strand starting at position 3477 of SEQ ID NO: 1888486
guuauuuauuuccgaauuc

SEQ ID NO: 2536785 - RNA, 19 nt, Artificial Sequence
  Description of Artificial Sequence: Synthetic oligonucleotide
  Antisense strand to SEQ ID NO: 2536784
gaauucggaaauaaauaac

SEQ ID NO: 2536786 - RNA, 19 nt, Artificial Sequence
  Description of Artificial Sequence: Synthetic oligonucleotide
  Sense strand starting at position 3224 of SEQ ID NO: 1888486
cugagauuguaggugcaca

SEQ ID NO: 2536787 - RNA, 19 nt, Artificial Sequence
  Description of Artificial Sequence: Synthetic oligonucleotide
  Antisense strand to SEQ ID NO: 2536786
ugugcaccuacaaucucag

SEQ ID NO: 2536788 - RNA, 19 nt, Artificial Sequence
  Description of Artificial Sequence: Synthetic oligonucleotide
  Sense strand starting at position 2683 of SEQ ID NO: 1888486
cuucucuauugaguccuua

SEQ ID NO: 2536789 - RNA, 19 nt, Artificial Sequence
  Description of Artificial Sequence: Synthetic oligonucleotide
  Antisense strand to SEQ ID NO: 2536788
uaaggacucaauagagaag

SEQ ID NO: 2536790 - RNA, 19 nt, Artificial Sequence
  Description of Artificial Sequence: Synthetic oligonucleotide
  Sense strand starting at position 2934 of SEQ ID NO: 1888486
cuuguaaucguuuggaaag

SEQ ID NO: 2536791 - RNA, 19 nt, Artificial Sequence
  Description of Artificial Sequence: Synthetic oligonucleotide
  Antisense strand to SEQ ID NO: 2536790
cuuuccaaacgauuacaag

SEQ ID NO: 2536792 - RNA, 19 nt, Artificial Sequence
  Description of Artificial Sequence: Synthetic oligonucleotide
  Sense strand starting at position 311 of SEQ ID NO: 1888486
guuggugagccucauaucu

SEQ ID NO: 2536793 - RNA, 19 nt, Artificial Sequence
  Description of Artificial Sequence: Synthetic oligonucleotide
  Antisense strand to SEQ ID NO: 2536792
agauaugaggcucaccaac

SEQ ID NO: 2536794 - RNA, 19 nt, Artificial Sequence
  Description of Artificial Sequence: Synthetic oligonucleotide
  Sense strand starting at position 2993 of SEQ ID NO: 1888486
guggaagcauugcucuaaa

SEQ ID NO: 2536795 - RNA, 19 nt, Artificial Sequence
  Description of Artificial Sequence: Synthetic oligonucleotide
  Antisense strand to SEQ ID NO: 2536794
uuuagagcaaugcuuccac

SEQ ID NO: 2536796 - RNA, 19 nt, Artificial Sequence
  Description of Artificial Sequence: Synthetic oligonucleotide
  Sense strand starting at position 44 of SEQ ID NO: 1888486
auuagugagugucuuuaua

SEQ ID NO: 2536797 - RNA, 19 nt, Artificial Sequence
  Description of Artificial Sequence: Synthetic oligonucleotide
  Antisense strand to SEQ ID NO: 2536796
uauaaagacacucacuaau

SEQ ID NO: 2536798 - RNA, 19 nt, Artificial Sequence
  Description of Artificial Sequence: Synthetic oligonucleotide
  Sense strand starting at position 535 of SEQ ID NO: 1888486
cugggaaguuccucaugcu

SEQ ID NO: 2536799 - RNA, 19 nt, Artificial Sequence
  Description of Artificial Sequence: Synthetic oligonucleotide
  Antisense strand to SEQ ID NO: 2536798
agcaugaggaacuucccag

SEQ ID NO: 2536800 - RNA, 19 nt, Artificial Sequence
  Description of Artificial Sequence: Synthetic oligonucleotide
  Sense strand starting at position 132 of SEQ ID NO: 1888486
ccacuugagcucugggcaa

SEQ ID NO: 2536801 - RNA, 19 nt, Artificial Sequence
  Description of Artificial Sequence: Synthetic oligonucleotide
  Antisense strand to SEQ ID NO: 2536800
uugcccagagcucaagugg

SEQ ID NO: 2536802 - RNA, 19 nt, Artificial Sequence
  Description of Artificial Sequence: Synthetic oligonucleotide
  Sense strand starting at position 2480 of SEQ ID NO: 1888486
agccucugguuugcagaaa

SEQ ID NO: 2536803 - RNA, 19 nt, Artificial Sequence
  Description of Artificial Sequence: Synthetic oligonucleotide
  Antisense strand to SEQ ID NO: 2536802
uuucugcaaaccagaggcu

SEQ ID NO: 2536804 - RNA, 19 nt, Artificial Sequence
  Description of Artificial Sequence: Synthetic oligonucleotide
  Sense strand starting at position 1274 of SEQ ID NO: 1888487
agcccuaaggagcaauuaa

SEQ ID NO: 2536805 - RNA, 19 nt, Artificial Sequence
  Description of Artificial Sequence: Synthetic oligonucleotide
  Antisense strand to SEQ ID NO: 2536804
uuaauugcuccuuagggcu

SEQ ID NO: 2536806 - RNA, 19 nt, Artificial Sequence
  Description of Artificial Sequence: Synthetic oligonucleotide
  Sense strand starting at position 983 of SEQ ID NO: 1888487
acacgucguccguuucaaa

SEQ ID NO: 2536807 - RNA, 19 nt, Artificial Sequence
  Description of Artificial Sequence: Synthetic oligonucleotide
  Antisense strand to SEQ ID NO: 2536806
uuugaaacggacgacgugu

SEQ ID NO: 2536808 - RNA, 19 nt, Artificial Sequence
  Description of Artificial Sequence: Synthetic oligonucleotide
  Sense strand starting at position 830 of SEQ ID NO: 1888487
cucacucuggcagauauua

SEQ ID NO: 2536809 - RNA, 19 nt, Artificial Sequence
  Description of Artificial Sequence: Synthetic oligonucleotide
  Antisense strand to SEQ ID NO: 2536808
uaauaucugccagagugag

SEQ ID NO: 2536810 - RNA, 19 nt, Artificial Sequence
  Description of Artificial Sequence: Synthetic oligonucleotide
  Sense strand starting at position 148 of SEQ ID NO: 1888487
augcgacaugguuauaaga

SEQ ID NO: 2536811 - RNA, 19 nt, Artificial Sequence
  Description of Artificial Sequence: Synthetic oligonucleotide
  Antisense strand to SEQ ID NO: 2536810
ucuuauaaccaugucgcau

SEQ ID NO: 2536812 - RNA, 19 nt, Artificial Sequence
  Description of Artificial Sequence: Synthetic oligonucleotide
  Sense strand starting at position 3124 of SEQ ID NO: 1888487
cuuggccauguugaagaau

SEQ ID NO: 2536813 - RNA, 19 nt, Artificial Sequence
  Description of Artificial Sequence: Synthetic oligonucleotide
  Antisense strand to SEQ ID NO: 2536812
auucuucaacauggccaag

SEQ ID NO: 2536814 - RNA, 19 nt, Artificial Sequence
  Description of Artificial Sequence: Synthetic oligonucleotide
  Sense strand starting at position 3741 of SEQ ID NO: 1888487
accaacuauugggucuaau

SEQ ID NO: 2536815 - RNA, 19 nt, Artificial Sequence
  Description of Artificial Sequence: Synthetic oligonucleotide
  Antisense strand to SEQ ID NO: 2536814
auuagacccaauaguuggu

SEQ ID NO: 2536816 - RNA, 19 nt, Artificial Sequence
  Description of Artificial Sequence: Synthetic oligonucleotide
  Sense strand starting at position 2242 of SEQ ID NO: 1888487
agacguaggaccugaugau

SEQ ID NO: 2536817 - RNA, 19 nt, Artificial Sequence
  Description of Artificial Sequence: Synthetic oligonucleotide
  Antisense strand to SEQ ID NO: 2536816
aucaucagguccuacgucu

SEQ ID NO: 2536818 - RNA, 19 nt, Artificial Sequence
  Description of Artificial Sequence: Synthetic oligonucleotide
  Sense strand starting at position 2947 of SEQ ID NO: 1888487
aguaaucacugguccaaag

SEQ ID NO: 2536819 - RNA, 19 nt, Artificial Sequence
  Description of Artificial Sequence: Synthetic oligonucleotide
  Antisense strand to SEQ ID NO: 2536818
cuuuggaccagugauuacu

SEQ ID NO: 2536820 - RNA, 19 nt, Artificial Sequence
  Description of Artificial Sequence: Synthetic oligonucleotide
  Sense strand starting at position 3637 of SEQ ID NO: 1888487
uugagaucaccuugacuuc

SEQ ID NO: 2536821 - RNA, 19 nt, Artificial Sequence
  Description of Artificial Sequence: Synthetic oligonucleotide
  Antisense strand to SEQ ID NO: 2536820
gaagucaaggugaucucaa

SEQ ID NO: 2536822 - RNA, 19 nt, Artificial Sequence
  Description of Artificial Sequence: Synthetic oligonucleotide
  Sense strand starting at position 2559 of SEQ ID NO: 1888487
ccaagauguggucaugggu

SEQ ID NO: 2536823 - RNA, 19 nt, Artificial Sequence
  Description of Artificial Sequence: Synthetic oligonucleotide
  Antisense strand to SEQ ID NO: 2536822
acccaugaccacaucuugg

SEQ ID NO: 2536824 - RNA, 19 nt, Artificial Sequence
  Description of Artificial Sequence: Synthetic oligonucleotide
  Sense strand starting at position 2100 of SEQ ID NO: 1888487
cgguguuucggguuuggca

SEQ ID NO: 2536825 - RNA, 19 nt, Artificial Sequence
  Description of Artificial Sequence: Synthetic oligonucleotide
  Antisense strand to SEQ ID NO: 2536824
ugccaaacccgaaacaccg

SEQ ID NO: 2536826 - RNA, 19 nt, Artificial Sequence
  Description of Artificial Sequence: Synthetic oligonucleotide
  Sense strand starting at position 142 of SEQ ID NO: 1888487
aaaucuaugcgacaugguu

SEQ ID NO: 2536827 - RNA, 19 nt, Artificial Sequence
  Description of Artificial Sequence: Synthetic oligonucleotide
  Antisense strand to SEQ ID NO: 2536826
aaccaugucgcauagauuu

SEQ ID NO: 2536828 - RNA, 19 nt, Artificial Sequence
  Description of Artificial Sequence: Synthetic oligonucleotide
  Sense strand starting at position 1252 of SEQ ID NO: 1888487
guaagugucggagaugacu

SEQ ID NO: 2536829 - RNA, 19 nt, Artificial Sequence
  Description of Artificial Sequence: Synthetic oligonucleotide
  Antisense strand to SEQ ID NO: 2536828
agucaucuccgacacuuac

SEQ ID NO: 2536830 - RNA, 19 nt, Artificial Sequence
  Description of Artificial Sequence: Synthetic oligonucleotide
  Sense strand starting at position 3139 of SEQ ID NO: 1888487
gaaugugcccuuugagaaa

SEQ ID NO: 2536831 - RNA, 19 nt, Artificial Sequence
  Description of Artificial Sequence: Synthetic oligonucleotide
  Antisense strand to SEQ ID NO: 2536830
uuucucaaagggcacauuc

SEQ ID NO: 2536832 - RNA, 19 nt, Artificial Sequence
  Description of Artificial Sequence: Synthetic oligonucleotide
  Sense strand starting at position 3700 of SEQ ID NO: 1888487
ugaucuuuggcccagguua

SEQ ID NO: 2536833 - RNA, 19 nt, Artificial Sequence
  Description of Artificial Sequence: Synthetic oligonucleotide
  Antisense strand to SEQ ID NO: 2536832
uaaccugggccaaagauca

SEQ ID NO: 2536834 - RNA, 19 nt, Artificial Sequence
  Description of Artificial Sequence: Synthetic oligonucleotide
  Sense strand starting at position 23 of SEQ ID NO: 1888487
cuuaaucucuuauuggagu

SEQ ID NO: 2536835 - RNA, 19 nt, Artificial Sequence
  Description of Artificial Sequence: Synthetic oligonucleotide
  Antisense strand to SEQ ID NO: 2536834
acuccaauaagagauuaag

SEQ ID NO: 2536836 - RNA, 19 nt, Artificial Sequence
  Description of Artificial Sequence: Synthetic oligonucleotide
  Sense strand starting at position 889 of SEQ ID NO: 1888487
cggguuucugaguacaauu

SEQ ID NO: 2536837 - RNA, 19 nt, Artificial Sequence
  Description of Artificial Sequence: Synthetic oligonucleotide
  Antisense strand to SEQ ID NO: 2536836
aauuguacucagaaacccg

SEQ ID NO: 2536838 - RNA, 19 nt, Artificial Sequence
  Description of Artificial Sequence: Synthetic oligonucleotide
  Sense strand starting at position 629 of SEQ ID NO: 1888487
gaaccuaaacuucgguuua

SEQ ID NO: 2536839 - RNA, 19 nt, Artificial Sequence
  Description of Artificial Sequence: Synthetic oligonucleotide
  Antisense strand to SEQ ID NO: 2536838
uaaaccgaaguuuagguuc

SEQ ID NO: 2536840 - RNA, 19 nt, Artificial Sequence
  Description of Artificial Sequence: Synthetic oligonucleotide
  Sense strand starting at position 566 of SEQ ID NO: 1888487
accugaaaguguucccaug

SEQ ID NO: 2536841 - RNA, 19 nt, Artificial Sequence
  Description of Artificial Sequence: Synthetic oligonucleotide
  Antisense strand to SEQ ID NO: 2536840
caugggaacacuuucaggu

SEQ ID NO: 2536842 - RNA, 19 nt, Artificial Sequence
  Description of Artificial Sequence: Synthetic oligonucleotide
  Sense strand starting at position 568 of SEQ ID NO: 1888487
cugaaaguguucccaugac

SEQ ID NO: 2536843 - RNA, 19 nt, Artificial Sequence
  Description of Artificial Sequence: Synthetic oligonucleotide
  Antisense strand to SEQ ID NO: 2536842
gucaugggaacacuuucag

SEQ ID NO: 2536844 - RNA, 19 nt, Artificial Sequence
  Description of Artificial Sequence: Synthetic oligonucleotide
  Sense strand starting at position 2263 of SEQ ID NO: 1888487
cuacuagaugccugguaaa

SEQ ID NO: 2536845 - RNA, 19 nt, Artificial Sequence
  Description of Artificial Sequence: Synthetic oligonucleotide
  Antisense strand to SEQ ID NO: 2536844
uuuaccaggcaucuaguag

SEQ ID NO: 2536846 - RNA, 19 nt, Artificial Sequence
  Description of Artificial Sequence: Synthetic oligonucleotide
  Sense strand starting at position 3135 of SEQ ID NO: 1888487
ugaagaaugugcccuuuga

SEQ ID NO: 2536847 - RNA, 19 nt, Artificial Sequence
  Description of Artificial Sequence: Synthetic oligonucleotide
  Antisense strand to SEQ ID NO: 2536846
ucaaagggcacauucuuca

SEQ ID NO: 2536848 - RNA, 19 nt, Artificial Sequence
  Description of Artificial Sequence: Synthetic oligonucleotide
  Sense strand starting at position 3844 of SEQ ID NO: 1888487
uucuauaagugucucaaca

SEQ ID NO: 2536849 - RNA, 19 nt, Artificial Sequence
  Description of Artificial Sequence: Synthetic oligonucleotide
  Antisense strand to SEQ ID NO: 2536848
uguugagacacuuauagaa

SEQ ID NO: 2536850 - RNA, 19 nt, Artificial Sequence
  Description of Artificial Sequence: Synthetic oligonucleotide
  Sense strand starting at position 1012 of SEQ ID NO: 1888487
caaauaaccugggaaagga

SEQ ID NO: 2536851 - RNA, 19 nt, Artificial Sequence
  Description of Artificial Sequence: Synthetic oligonucleotide
  Antisense strand to SEQ ID NO: 2536850
uccuuucccagguuauuug

SEQ ID NO: 2536852 - RNA, 19 nt, Artificial Sequence
  Description of Artificial Sequence: Synthetic oligonucleotide
  Sense strand starting at position 1054 of SEQ ID NO: 1888487
acuacuaauugcuccgaga

SEQ ID NO: 2536853 - RNA, 19 nt, Artificial Sequence
  Description of Artificial Sequence: Synthetic oligonucleotide
  Antisense strand to SEQ ID NO: 2536852
ucucggagcaauuaguagu

SEQ ID NO: 2536854 - RNA, 19 nt, Artificial Sequence
  Description of Artificial Sequence: Synthetic oligonucleotide
  Sense strand starting at position 29 of SEQ ID NO: 1888487
cucuuauuggaguacguca

SEQ ID NO: 2536855 - RNA, 19 nt, Artificial Sequence
  Description of Artificial Sequence: Synthetic oligonucleotide
  Antisense strand to SEQ ID NO: 2536854
ugacguacuccaauaagag

SEQ ID NO: 2536856 - RNA, 19 nt, Artificial Sequence
  Description of Artificial Sequence: Synthetic oligonucleotide
  Sense strand starting at position 840 of SEQ ID NO: 1888487
cagauauuagaccgugagu

SEQ ID NO: 2536857 - RNA, 19 nt, Artificial Sequence
  Description of Artificial Sequence: Synthetic oligonucleotide
  Antisense strand to SEQ ID NO: 2536856
acucacggucuaauaucug

SEQ ID NO: 2536858 - RNA, 19 nt, Artificial Sequence
  Description of Artificial Sequence: Synthetic oligonucleotide
  Sense strand starting at position 1076 of SEQ ID NO: 1888487
cugaguuaggacuguucca

SEQ ID NO: 2536859 - RNA, 19 nt, Artificial Sequence
  Description of Artificial Sequence: Synthetic oligonucleotide
  Antisense strand to SEQ ID NO: 2536858
uggaacaguccuaacucag

SEQ ID NO: 2536860 - RNA, 19 nt, Artificial Sequence
  Description of Artificial Sequence: Synthetic oligonucleotide
  Sense strand starting at position 1286 of SEQ ID NO: 1888487
caauuaaggccaggugagu

SEQ ID NO: 2536861 - RNA, 19 nt, Artificial Sequence
  Description of Artificial Sequence: Synthetic oligonucleotide
  Antisense strand to SEQ ID NO: 2536860
acucaccuggccuuaauug

SEQ ID NO: 2536862 - RNA, 19 nt, Artificial Sequence
  Description of Artificial Sequence: Synthetic oligonucleotide
  Sense strand starting at position 2693 of SEQ ID NO: 1888487
cccaaacuaugguuaguuu

SEQ ID NO: 2536863 - RNA, 19 nt, Artificial Sequence
  Description of Artificial Sequence: Synthetic oligonucleotide
  Antisense strand to SEQ ID NO: 2536862
aaacuaaccauaguuuggg

SEQ ID NO: 2536864 - RNA, 19 nt, Artificial Sequence
  Description of Artificial Sequence: Synthetic oligonucleotide
  Sense strand starting at position 888 of SEQ ID NO: 1888487
acggguuucugaguacaau

SEQ ID NO: 2536865 - RNA, 19 nt, Artificial Sequence
  Description of Artificial Sequence: Synthetic oligonucleotide
  Antisense strand to SEQ ID NO: 2536864
auuguacucagaaacccgu

SEQ ID NO: 2536866 - RNA, 19 nt, Artificial Sequence
  Description of Artificial Sequence: Synthetic oligonucleotide
  Sense strand starting at position 3216 of SEQ ID NO: 1888487
cuaaacuguucuguccaca

SEQ ID NO: 2536867 - RNA, 19 nt, Artificial Sequence
  Description of Artificial Sequence: Synthetic oligonucleotide
  Antisense strand to SEQ ID NO: 2536866
uguggacagaacaguuuag

SEQ ID NO: 2536868 - RNA, 19 nt, Artificial Sequence
  Description of Artificial Sequence: Synthetic oligonucleotide
  Sense strand starting at position 631 of SEQ ID NO: 1888487
accuaaacuucgguuuauc

SEQ ID NO: 2536869 - RNA, 19 nt, Artificial Sequence
  Description of Artificial Sequence: Synthetic oligonucleotide
  Antisense strand to SEQ ID NO: 2536868
gauaaaccgaaguuuaggu

SEQ ID NO: 2536870 - RNA, 19 nt, Artificial Sequence
  Description of Artificial Sequence: Synthetic oligonucleotide
  Sense strand starting at position 842 of SEQ ID NO: 1888487
gauauuagaccgugagucu

SEQ ID NO: 2536871 - RNA, 19 nt, Artificial Sequence
  Description of Artificial Sequence: Synthetic oligonucleotide
  Antisense strand to SEQ ID NO: 2536870
agacucacggucuaauauc

SEQ ID NO: 2536872 - RNA, 19 nt, Artificial Sequence
  Description of Artificial Sequence: Synthetic oligonucleotide
  Sense strand starting at position 1249 of SEQ ID NO: 1888487
uggguaagugucggagaug

SEQ ID NO: 2536873 - RNA, 19 nt, Artificial Sequence
  Description of Artificial Sequence: Synthetic oligonucleotide
  Antisense strand to SEQ ID NO: 2536872
caucuccgacacuuaccca

SEQ ID NO: 2536874 - RNA, 19 nt, Artificial Sequence
  Description of Artificial Sequence: Synthetic oligonucleotide
  Sense strand starting at position 1784 of SEQ ID NO: 1888487
uggucucccuguuccaaga

SEQ ID NO: 2536875 - RNA, 19 nt, Artificial Sequence
  Description of Artificial Sequence: Synthetic oligonucleotide
  Antisense strand to SEQ ID NO: 2536874
ucuuggaacagggagacca

SEQ ID NO: 2536876 - RNA, 19 nt, Artificial Sequence
  Description of Artificial Sequence: Synthetic oligonucleotide
  Sense strand starting at position 879 of SEQ ID NO: 1888487
ggauaugugacggguuucu

SEQ ID NO: 2536877 - RNA, 19 nt, Artificial Sequence
  Description of Artificial Sequence: Synthetic oligonucleotide
  Antisense strand to SEQ ID NO: 2536876
agaaacccgucacauaucc

SEQ ID NO: 2536878 - RNA, 19 nt, Artificial Sequence
  Description of Artificial Sequence: Synthetic oligonucleotide
  Sense strand starting at position 31 of SEQ ID NO: 1888487
cuuauuggaguacgucaua

SEQ ID NO: 2536879 - RNA, 19 nt, Artificial Sequence
  Description of Artificial Sequence: Synthetic oligonucleotide
  Antisense strand to SEQ ID NO: 2536878
uaugacguacuccaauaag

SEQ ID NO: 2536880 - RNA, 19 nt, Artificial Sequence
  Description of Artificial Sequence: Synthetic oligonucleotide
  Sense strand starting at position 50 of SEQ ID NO: 1888487
cugcauaguucugugggaa

SEQ ID NO: 2536881 - RNA, 19 nt, Artificial Sequence
  Description of Artificial Sequence: Synthetic oligonucleotide
  Antisense strand to SEQ ID NO: 2536880
uucccacagaacuaugcag

SEQ ID NO: 2536882 - RNA, 19 nt, Artificial Sequence
  Description of Artificial Sequence: Synthetic oligonucleotide
  Sense strand starting at position 3780 of SEQ ID NO: 1888487
cccaaagugugcucuaaau

SEQ ID NO: 2536883 - RNA, 19 nt, Artificial Sequence
  Description of Artificial Sequence: Synthetic oligonucleotide
  Antisense strand to SEQ ID NO: 2536882
auuuagagcacacuuuggg

SEQ ID NO: 2536884 - RNA, 19 nt, Artificial Sequence
  Description of Artificial Sequence: Synthetic oligonucleotide
  Sense strand starting at position 1507 of SEQ ID NO: 1888490
caaaguuccggagaguaga

SEQ ID NO: 2536885 - RNA, 19 nt, Artificial Sequence
  Description of Artificial Sequence: Synthetic oligonucleotide
  Antisense strand to SEQ ID NO: 2536884
ucuacucuccggaacuuug

SEQ ID NO: 2536886 - RNA, 19 nt, Artificial Sequence
  Description of Artificial Sequence: Synthetic oligonucleotide
  Sense strand starting at position 2695 of SEQ ID NO: 1888490
acacuugugacuucgcgua

SEQ ID NO: 2536887 - RNA, 19 nt, Artificial Sequence
  Description of Artificial Sequence: Synthetic oligonucleotide
  Antisense strand to SEQ ID NO: 2536886
uacgcgaagucacaagugu

SEQ ID NO: 2536888 - RNA, 19 nt, Artificial Sequence
  Description of Artificial Sequence: Synthetic oligonucleotide
  Sense strand starting at position 362 of SEQ ID NO: 1888490
agauguaauuaagugauga

SEQ ID NO: 2536889 - RNA, 19 nt, Artificial Sequence
  Description of Artificial Sequence: Synthetic oligonucleotide
  Antisense strand to SEQ ID NO: 2536888
ucaucacuuaauuacaucu

SEQ ID NO: 2536890 - RNA, 19 nt, Artificial Sequence
  Description of Artificial Sequence: Synthetic oligonucleotide
  Sense strand starting at position 3236 of SEQ ID NO: 1888490
ugcggaauugucuucguua

SEQ ID NO: 2536891 - RNA, 19 nt, Artificial Sequence
  Description of Artificial Sequence: Synthetic oligonucleotide
  Antisense strand to SEQ ID NO: 2536890
uaacgaagacaauuccgca

SEQ ID NO: 2536892 - RNA, 19 nt, Artificial Sequence
  Description of Artificial Sequence: Synthetic oligonucleotide
  Sense strand starting at position 382 of SEQ ID NO: 1888490
gaagucaugcuggaguaag

SEQ ID NO: 2536893 - RNA, 19 nt, Artificial Sequence
  Description of Artificial Sequence: Synthetic oligonucleotide
  Antisense strand to SEQ ID NO: 2536892
cuuacuccagcaugacuuc

SEQ ID NO: 2536894 - RNA, 19 nt, Artificial Sequence
  Description of Artificial Sequence: Synthetic oligonucleotide
  Sense strand starting at position 2699 of SEQ ID NO: 1888490
uugugacuucgcguauuca

SEQ ID NO: 2536895 - RNA, 19 nt, Artificial Sequence
  Description of Artificial Sequence: Synthetic oligonucleotide
  Antisense strand to SEQ ID NO: 2536894
ugaauacgcgaagucacaa

SEQ ID NO: 2536896 - RNA, 19 nt, Artificial Sequence
  Description of Artificial Sequence: Synthetic oligonucleotide
  Sense strand starting at position 1505 of SEQ ID NO: 1888490
uucaaaguuccggagagua

SEQ ID NO: 2536897 - RNA, 19 nt, Artificial Sequence
  Description of Artificial Sequence: Synthetic oligonucleotide
  Antisense strand to SEQ ID NO: 2536896
uacucuccggaacuuugaa

SEQ ID NO: 2536898 - RNA, 19 nt, Artificial Sequence
  Description of Artificial Sequence: Synthetic oligonucleotide
  Sense strand starting at position 1406 of SEQ ID NO: 1888490
uuucuuaagcacuaaguga

SEQ ID NO: 2536899 - RNA, 19 nt, Artificial Sequence
  Description of Artificial Sequence: Synthetic oligonucleotide
  Antisense strand to SEQ ID NO: 2536898
ucacuuagugcuuaagaaa

SEQ ID NO: 2536900 - RNA, 19 nt, Artificial Sequence
  Description of Artificial Sequence: Synthetic oligonucleotide
  Sense strand starting at position 842 of SEQ ID NO: 1888490
aagucugugcccuaaagaa

SEQ ID NO: 2536901 - RNA, 19 nt, Artificial Sequence
  Description of Artificial Sequence: Synthetic oligonucleotide
  Antisense strand to SEQ ID NO: 2536900
uucuuuagggcacagacuu

SEQ ID NO: 2536902 - RNA, 19 nt, Artificial Sequence
  Description of Artificial Sequence: Synthetic oligonucleotide
  Sense strand starting at position 929 of SEQ ID NO: 1888490
gcucuugcgguguuuacau

SEQ ID NO: 2536903 - RNA, 19 nt, Artificial Sequence
  Description of Artificial Sequence: Synthetic oligonucleotide
  Antisense strand to SEQ ID NO: 2536902
auguaaacaccgcaagagc

SEQ ID NO: 2536904 - RNA, 19 nt, Artificial Sequence
  Description of Artificial Sequence: Synthetic oligonucleotide
  Sense strand starting at position 928 of SEQ ID NO: 1888490
ugcucuugcgguguuuaca

SEQ ID NO: 2536905 - RNA, 19 nt, Artificial Sequence
  Description of Artificial Sequence: Synthetic oligonucleotide
  Antisense strand to SEQ ID NO: 2536904
uguaaacaccgcaagagca

SEQ ID NO: 2536906 - RNA, 19 nt, Artificial Sequence
  Description of Artificial Sequence: Synthetic oligonucleotide
  Sense strand starting at position 346 of SEQ ID NO: 1888490
gaaacaggguucuugcaga

SEQ ID NO: 2536907 - RNA, 19 nt, Artificial Sequence
  Description of Artificial Sequence: Synthetic oligonucleotide
  Antisense strand to SEQ ID NO: 2536906
ucugcaagaacccuguuuc

SEQ ID NO: 2536908 - RNA, 19 nt, Artificial Sequence
  Description of Artificial Sequence: Synthetic oligonucleotide
  Sense strand starting at position 871 of SEQ ID NO: 1888490
uacugaacccguugggaaa

SEQ ID NO: 2536909 - RNA, 19 nt, Artificial Sequence
  Description of Artificial Sequence: Synthetic oligonucleotide
  Antisense strand to SEQ ID NO: 2536908
uuucccaacggguucagua

SEQ ID NO: 2536910 - RNA, 19 nt, Artificial Sequence
  Description of Artificial Sequence: Synthetic oligonucleotide
  Sense strand starting at position 3218 of SEQ ID NO: 1888490
caucguguuguuguguauu

SEQ ID NO: 2536911 - RNA, 19 nt, Artificial Sequence
  Description of Artificial Sequence: Synthetic oligonucleotide
  Antisense strand to SEQ ID NO: 2536910
aauacacaacaacacgaug

SEQ ID NO: 2536912 - RNA, 19 nt, Artificial Sequence
  Description of Artificial Sequence: Synthetic oligonucleotide
  Sense strand starting at position 2653 of SEQ ID NO: 1888490
aguagugacaugugaacag

SEQ ID NO: 2536913 - RNA, 19 nt, Artificial Sequence
  Description of Artificial Sequence: Synthetic oligonucleotide
  Antisense strand to SEQ ID NO: 2536912
cuguucacaugucacuacu

SEQ ID NO: 2536914 - RNA, 19 nt, Artificial Sequence
  Description of Artificial Sequence: Synthetic oligonucleotide
  Sense strand starting at position 95 of SEQ ID NO: 1888490
aaggaaacgucacccagua

SEQ ID NO: 2536915 - RNA, 19 nt, Artificial Sequence
  Description of Artificial Sequence: Synthetic oligonucleotide
  Antisense strand to SEQ ID NO: 2536914
uacugggugacguuuccuu

SEQ ID NO: 2536916 - RNA, 19 nt, Artificial Sequence
  Description of Artificial Sequence: Synthetic oligonucleotide
  Sense strand starting at position 161 of SEQ ID NO: 1888490
caaggcuuacagugaaauc

SEQ ID NO: 2536917 - RNA, 19 nt, Artificial Sequence
  Description of Artificial Sequence: Synthetic oligonucleotide
  Antisense strand to SEQ ID NO: 2536916
gauuucacuguaagccuug

SEQ ID NO: 2536918 - RNA, 19 nt, Artificial Sequence
  Description of Artificial Sequence: Synthetic oligonucleotide
  Sense strand starting at position 624 of SEQ ID NO: 1888490
uggucuccagauugugaaa

SEQ ID NO: 2536919 - RNA, 19 nt, Artificial Sequence
  Description of Artificial Sequence: Synthetic oligonucleotide
  Antisense strand to SEQ ID NO: 2536918
uuucacaaucuggagacca

SEQ ID NO: 2536920 - RNA, 19 nt, Artificial Sequence
  Description of Artificial Sequence: Synthetic oligonucleotide
  Sense strand starting at position 926 of SEQ ID NO: 1888490
agugcucuugcgguguuua

SEQ ID NO: 2536921 - RNA, 19 nt, Artificial Sequence
  Description of Artificial Sequence: Synthetic oligonucleotide
  Antisense strand to SEQ ID NO: 2536920
uaaacaccgcaagagcacu

SEQ ID NO: 2536922 - RNA, 19 nt, Artificial Sequence
  Description of Artificial Sequence: Synthetic oligonucleotide
  Sense strand starting at position 97 of SEQ ID NO: 1888490
ggaaacgucacccaguagu

SEQ ID NO: 2536923 - RNA, 19 nt, Artificial Sequence
  Description of Artificial Sequence: Synthetic oligonucleotide
  Antisense strand to SEQ ID NO: 2536922
acuacugggugacguuucc

SEQ ID NO: 2536924 - RNA, 19 nt, Artificial Sequence
  Description of Artificial Sequence: Synthetic oligonucleotide
  Sense strand starting at position 1219 of SEQ ID NO: 1888490
ucucauguagcuggaaaca

SEQ ID NO: 2536925 - RNA, 19 nt, Artificial Sequence
  Description of Artificial Sequence: Synthetic oligonucleotide
  Antisense strand to SEQ ID NO: 2536924
uguuuccagcuacaugaga

SEQ ID NO: 2536926 - RNA, 19 nt, Artificial Sequence
  Description of Artificial Sequence: Synthetic oligonucleotide
  Sense strand starting at position 798 of SEQ ID NO: 1888490
auguaagucugguugaaau

SEQ ID NO: 2536927 - RNA, 19 nt, Artificial Sequence
  Description of Artificial Sequence: Synthetic oligonucleotide
  Antisense strand to SEQ ID NO: 2536926
auuucaaccagacuuacau

SEQ ID NO: 2536928 - RNA, 19 nt, Artificial Sequence
  Description of Artificial Sequence: Synthetic oligonucleotide
  Sense strand starting at position 3378 of SEQ ID NO: 1888490
uggagagccugauugcaau

SEQ ID NO: 2536929 - RNA, 19 nt, Artificial Sequence
  Description of Artificial Sequence: Synthetic oligonucleotide
  Antisense strand to SEQ ID NO: 2536928
auugcaaucaggcucucca

SEQ ID NO: 2536930 - RNA, 19 nt, Artificial Sequence
  Description of Artificial Sequence: Synthetic oligonucleotide
  Sense strand starting at position 3303 of SEQ ID NO: 1888490
ucacaugucgauggacauu

SEQ ID NO: 2536931 - RNA, 19 nt, Artificial Sequence
  Description of Artificial Sequence: Synthetic oligonucleotide
  Antisense strand to SEQ ID NO: 2536930
aauguccaucgacauguga

SEQ ID NO: 2536932 - RNA, 19 nt, Artificial Sequence
  Description of Artificial Sequence: Synthetic oligonucleotide
  Sense strand starting at position 2651 of SEQ ID NO: 1888490
ccaguagugacaugugaac

SEQ ID NO: 2536933 - RNA, 19 nt, Artificial Sequence
  Description of Artificial Sequence: Synthetic oligonucleotide
  Antisense strand to SEQ ID NO: 2536932
guucacaugucacuacugg

SEQ ID NO: 2536934 - RNA, 19 nt, Artificial Sequence
  Description of Artificial Sequence: Synthetic oligonucleotide
  Sense strand starting at position 381 of SEQ ID NO: 1888490
ugaagucaugcuggaguaa

SEQ ID NO: 2536935 - RNA, 19 nt, Artificial Sequence
  Description of Artificial Sequence: Synthetic oligonucleotide
  Antisense strand to SEQ ID NO: 2536934
uuacuccagcaugacuuca

SEQ ID NO: 2536936 - RNA, 19 nt, Artificial Sequence
  Description of Artificial Sequence: Synthetic oligonucleotide
  Sense strand starting at position 3347 of SEQ ID NO: 1888490
ugugaaugaacgugggagu

SEQ ID NO: 2536937 - RNA, 19 nt, Artificial Sequence
  Description of Artificial Sequence: Synthetic oligonucleotide
  Antisense strand to SEQ ID NO: 2536936
acucccacguucauucaca

SEQ ID NO: 2536938 - RNA, 19 nt, Artificial Sequence
  Description of Artificial Sequence: Synthetic oligonucleotide
  Sense strand starting at position 2274 of SEQ ID NO: 1888490
uagagagguugccuggcaa

SEQ ID NO: 2536939 - RNA, 19 nt, Artificial Sequence
  Description of Artificial Sequence: Synthetic oligonucleotide
  Antisense strand to SEQ ID NO: 2536938
uugccaggcaaccucucua

SEQ ID NO: 2536940 - RNA, 19 nt, Artificial Sequence
  Description of Artificial Sequence: Synthetic oligonucleotide
  Sense strand starting at position 3248 of SEQ ID NO: 1888490
uucguuaaggcugaauagu

SEQ ID NO: 2536941 - RNA, 19 nt, Artificial Sequence
  Description of Artificial Sequence: Synthetic oligonucleotide
  Antisense strand to SEQ ID NO: 2536940
acuauucagccuuaacgaa

SEQ ID NO: 2536942 - RNA, 19 nt, Artificial Sequence
  Description of Artificial Sequence: Synthetic oligonucleotide
  Sense strand starting at position 3239 of SEQ ID NO: 1888490
ggaauugucuucguuaagg

SEQ ID NO: 2536943 - RNA, 19 nt, Artificial Sequence
  Description of Artificial Sequence: Synthetic oligonucleotide
  Antisense strand to SEQ ID NO: 2536942
ccuuaacgaagacaauucc

SEQ ID NO: 2536944 - RNA, 19 nt, Artificial Sequence
  Description of Artificial Sequence: Synthetic oligonucleotide
  Sense strand starting at position 2744 of SEQ ID NO: 1888490
ccaugaagugcuggguaca

SEQ ID NO: 2536945 - RNA, 19 nt, Artificial Sequence
  Description of Artificial Sequence: Synthetic oligonucleotide
  Antisense strand to SEQ ID NO: 2536944
uguacccagcacuucaugg

SEQ ID NO: 2536946 - RNA, 19 nt, Artificial Sequence
  Description of Artificial Sequence: Synthetic oligonucleotide
  Sense strand starting at position 838 of SEQ ID NO: 1888490
gaacaagucugugcccuaa

SEQ ID NO: 2536947 - RNA, 19 nt, Artificial Sequence
  Description of Artificial Sequence: Synthetic oligonucleotide
  Antisense strand to SEQ ID NO: 2536946
uuagggcacagacuuguuc

SEQ ID NO: 2536948 - RNA, 19 nt, Artificial Sequence
  Description of Artificial Sequence: Synthetic oligonucleotide
  Sense strand starting at position 837 of SEQ ID NO: 1888490
agaacaagucugugcccua

SEQ ID NO: 2536949 - RNA, 19 nt, Artificial Sequence
  Description of Artificial Sequence: Synthetic oligonucleotide
  Antisense strand to SEQ ID NO: 2536948
uagggcacagacuuguucu

SEQ ID NO: 2536950 - RNA, 19 nt, Artificial Sequence
  Description of Artificial Sequence: Synthetic oligonucleotide
  Sense strand starting at position 3550 of SEQ ID NO: 1888490
aggguagggcucugguuau

SEQ ID NO: 2536951 - RNA, 19 nt, Artificial Sequence
  Description of Artificial Sequence: Synthetic oligonucleotide
  Antisense strand to SEQ ID NO: 2536950
auaaccagagcccuacccu

SEQ ID NO: 2536952 - RNA, 19 nt, Artificial Sequence
  Description of Artificial Sequence: Synthetic oligonucleotide
  Sense strand starting at position 3247 of SEQ ID NO: 1888490
cuucguuaaggcugaauag

SEQ ID NO: 2536953 - RNA, 19 nt, Artificial Sequence
  Description of Artificial Sequence: Synthetic oligonucleotide
  Antisense strand to SEQ ID NO: 2536952
cuauucagccuuaacgaag

SEQ ID NO: 2536954 - RNA, 19 nt, Artificial Sequence
  Description of Artificial Sequence: Synthetic oligonucleotide
  Sense strand starting at position 1395 of SEQ ID NO: 1888490
ggcacaggcucuuucuuaa

SEQ ID NO: 2536955 - RNA, 19 nt, Artificial Sequence
  Description of Artificial Sequence: Synthetic oligonucleotide
  Antisense strand to SEQ ID NO: 2536954
uuaagaaagagccugugcc

SEQ ID NO: 2536956 - RNA, 19 nt, Artificial Sequence
  Description of Artificial Sequence: Synthetic oligonucleotide
  Sense strand starting at position 3241 of SEQ ID NO: 1888490
aauugucuucguuaaggcu

SEQ ID NO: 2536957 - RNA, 19 nt, Artificial Sequence
  Description of Artificial Sequence: Synthetic oligonucleotide
  Antisense strand to SEQ ID NO: 2536956
agccuuaacgaagacaauu

SEQ ID NO: 2536958 - RNA, 19 nt, Artificial Sequence
  Description of Artificial Sequence: Synthetic oligonucleotide
  Sense strand starting at position 251 of SEQ ID NO: 1888490
ggugguguucuggguugaa

SEQ ID NO: 2536959 - RNA, 19 nt, Artificial Sequence
  Description of Artificial Sequence: Synthetic oligonucleotide
  Antisense strand to SEQ ID NO: 2536958
uucaacccagaacaccacc

SEQ ID NO: 2536960 - RNA, 19 nt, Artificial Sequence
  Description of Artificial Sequence: Synthetic oligonucleotide
  Sense strand starting at position 3002 of SEQ ID NO: 1888490
cgacuaugggugugauguc

SEQ ID NO: 2536961 - RNA, 19 nt, Artificial Sequence
  Description of Artificial Sequence: Synthetic oligonucleotide
  Antisense strand to SEQ ID NO: 2536960
gacaucacacccauagucg

SEQ ID NO: 2536962 - RNA, 19 nt, Artificial Sequence
  Description of Artificial Sequence: Synthetic oligonucleotide
  Sense strand starting at position 3238 of SEQ ID NO: 1888490
cggaauugucuucguuaag

SEQ ID NO: 2536963 - RNA, 19 nt, Artificial Sequence
  Description of Artificial Sequence: Synthetic oligonucleotide
  Antisense strand to SEQ ID NO: 2536962
cuuaacgaagacaauuccg

SEQ ID NO: 2536964 - RNA, 19 nt, Artificial Sequence
  Description of Artificial Sequence: Synthetic oligonucleotide
  Sense strand starting at position 3115 of SEQ ID NO: 1888488
guaaaucgggaauauguga

SEQ ID NO: 2536965 - RNA, 19 nt, Artificial Sequence
  Description of Artificial Sequence: Synthetic oligonucleotide
  Antisense strand to SEQ ID NO: 2536964
ucacauauucccgauuuac

SEQ ID NO: 2536966 - RNA, 19 nt, Artificial Sequence
  Description of Artificial Sequence: Synthetic oligonucleotide
  Sense strand starting at position 2572 of SEQ ID NO: 1888488
ggucucucgauggaaauga

SEQ ID NO: 2536967 - RNA, 19 nt, Artificial Sequence
  Description of Artificial Sequence: Synthetic oligonucleotide
  Antisense strand to SEQ ID NO: 2536966
ucauuuccaucgagagacc

SEQ ID NO: 2536968 - RNA, 19 nt, Artificial Sequence
  Description of Artificial Sequence: Synthetic oligonucleotide
  Sense strand starting at position 3109 of SEQ ID NO: 1888488
accaaaguaaaucgggaau

SEQ ID NO: 2536969 - RNA, 19 nt, Artificial Sequence
  Description of Artificial Sequence: Synthetic oligonucleotide
  Antisense strand to SEQ ID NO: 2536968
auucccgauuuacuuuggu

SEQ ID NO: 2536970 - RNA, 19 nt, Artificial Sequence
  Description of Artificial Sequence: Synthetic oligonucleotide
  Sense strand starting at position 2204 of SEQ ID NO: 1888488
acaagaaaguggguuaauc

SEQ ID NO: 2536971 - RNA, 19 nt, Artificial Sequence
  Description of Artificial Sequence: Synthetic oligonucleotide
  Antisense strand to SEQ ID NO: 2536970
gauuaacccacuuucuugu

SEQ ID NO: 2536972 - RNA, 19 nt, Artificial Sequence
  Description of Artificial Sequence: Synthetic oligonucleotide
  Sense strand starting at position 2491 of SEQ ID NO: 1888488
aggaacuuacacuguugaa

SEQ ID NO: 2536973 - RNA, 19 nt, Artificial Sequence
  Description of Artificial Sequence: Synthetic oligonucleotide
  Antisense strand to SEQ ID NO: 2536972
uucaacaguguaaguuccu

SEQ ID NO: 2536974 - RNA, 19 nt, Artificial Sequence
  Description of Artificial Sequence: Synthetic oligonucleotide
  Sense strand starting at position 3979 of SEQ ID NO: 1888488
agauaacauguugagcauu

SEQ ID NO: 2536975 - RNA, 19 nt, Artificial Sequence
  Description of Artificial Sequence: Synthetic oligonucleotide
  Antisense strand to SEQ ID NO: 2536974
aaugcucaacauguuaucu

SEQ ID NO: 2536976 - RNA, 19 nt, Artificial Sequence
  Description of Artificial Sequence: Synthetic oligonucleotide
  Sense strand starting at position 3965 of SEQ ID NO: 1888488
uuuauuguuguggaagaua

SEQ ID NO: 2536977 - RNA, 19 nt, Artificial Sequence
  Description of Artificial Sequence: Synthetic oligonucleotide
  Antisense strand to SEQ ID NO: 2536976
uaucuuccacaacaauaaa

SEQ ID NO: 2536978 - RNA, 19 nt, Artificial Sequence
  Description of Artificial Sequence: Synthetic oligonucleotide
  Sense strand starting at position 2298 of SEQ ID NO: 1888488
aaggacuaguagucauuaa

SEQ ID NO: 2536979 - RNA, 19 nt, Artificial Sequence
  Description of Artificial Sequence: Synthetic oligonucleotide
  Antisense strand to SEQ ID NO: 2536978
uuaaugacuacuaguccuu

SEQ ID NO: 2536980 - RNA, 19 nt, Artificial Sequence
  Description of Artificial Sequence: Synthetic oligonucleotide
  Sense strand starting at position 2271 of SEQ ID NO: 1888488
guguacuuggaguaaauga

SEQ ID NO: 2536981 - RNA, 19 nt, Artificial Sequence
  Description of Artificial Sequence: Synthetic oligonucleotide
  Antisense strand to SEQ ID NO: 2536980
ucauuuacuccaaguacac

SEQ ID NO: 2536982 - RNA, 19 nt, Artificial Sequence
  Description of Artificial Sequence: Synthetic oligonucleotide
  Sense strand starting at position 3771 of SEQ ID NO: 1888488
gaugaauuguaaccagagu

SEQ ID NO: 2536983 - RNA, 19 nt, Artificial Sequence
  Description of Artificial Sequence: Synthetic oligonucleotide
  Antisense strand to SEQ ID NO: 2536982
acucugguuacaauucauc

SEQ ID NO: 2536984 - RNA, 19 nt, Artificial Sequence
  Description of Artificial Sequence: Synthetic oligonucleotide
  Sense strand starting at position 3982 of SEQ ID NO: 1888488
uaacauguugagcauugau

SEQ ID NO: 2536985 - RNA, 19 nt, Artificial Sequence
  Description of Artificial Sequence: Synthetic oligonucleotide
  Antisense strand to SEQ ID NO: 2536984
aucaaugcucaacauguua

SEQ ID NO: 2536986 - RNA, 19 nt, Artificial Sequence
  Description of Artificial Sequence: Synthetic oligonucleotide
  Sense strand starting at position 3646 of SEQ ID NO: 1888488
ucaacuggaucuuucgaaa

SEQ ID NO: 2536987 - RNA, 19 nt, Artificial Sequence
  Description of Artificial Sequence: Synthetic oligonucleotide
  Antisense strand to SEQ ID NO: 2536986
uuucgaaagauccaguuga

SEQ ID NO: 2536988 - RNA, 19 nt, Artificial Sequence
  Description of Artificial Sequence: Synthetic oligonucleotide
  Sense strand starting at position 3022 of SEQ ID NO: 1888488
auuauaagcuauguaagag

SEQ ID NO: 2536989 - RNA, 19 nt, Artificial Sequence
  Description of Artificial Sequence: Synthetic oligonucleotide
  Antisense strand to SEQ ID NO: 2536988
cucuuacauagcuuauaau

SEQ ID NO: 2536990 - RNA, 19 nt, Artificial Sequence
  Description of Artificial Sequence: Synthetic oligonucleotide
  Sense strand starting at position 3661 of SEQ ID NO: 1888488
gaaagaaguuagccaagua

SEQ ID NO: 2536991 - RNA, 19 nt, Artificial Sequence
  Description of Artificial Sequence: Synthetic oligonucleotide
  Antisense strand to SEQ ID NO: 2536990
uacuuggcuaacuucuuuc

SEQ ID NO: 2536992 - RNA, 19 nt, Artificial Sequence
  Description of Artificial Sequence: Synthetic oligonucleotide
  Sense strand starting at position 3021 of SEQ ID NO: 1888488
gauuauaagcuauguaaga

SEQ ID NO: 2536993 - RNA, 19 nt, Artificial Sequence
  Description of Artificial Sequence: Synthetic oligonucleotide
  Antisense strand to SEQ ID NO: 2536992
ucuuacauagcuuauaauc

SEQ ID NO: 2536994 - RNA, 19 nt, Artificial Sequence
  Description of Artificial Sequence: Synthetic oligonucleotide
  Sense strand starting at position 828 of SEQ ID NO: 1888488
gugggaugacgucaaauuc

SEQ ID NO: 2536995 - RNA, 19 nt, Artificial Sequence
  Description of Artificial Sequence: Synthetic oligonucleotide
  Antisense strand to SEQ ID NO: 2536994
gaauuugacgucaucccac

SEQ ID NO: 2536996 - RNA, 19 nt, Artificial Sequence
  Description of Artificial Sequence: Synthetic oligonucleotide
  Sense strand starting at position 3284 of SEQ ID NO: 1888488
uccaguagugauuaaaguc

SEQ ID NO: 2536997 - RNA, 19 nt, Artificial Sequence
  Description of Artificial Sequence: Synthetic oligonucleotide
  Antisense strand to SEQ ID NO: 2536996
gacuuuaaucacuacugga

SEQ ID NO: 2536998 - RNA, 19 nt, Artificial Sequence
  Description of Artificial Sequence: Synthetic oligonucleotide
  Sense strand starting at position 2516 of SEQ ID NO: 1888488
auguguacacucugaagga

SEQ ID NO: 2536999 - RNA, 19 nt, Artificial Sequence
  Description of Artificial Sequence: Synthetic oligonucleotide
  Antisense strand to SEQ ID NO: 2536998
uccuucagaguguacacau

SEQ ID NO: 2537000 - RNA, 19 nt, Artificial Sequence
  Description of Artificial Sequence: Synthetic oligonucleotide
  Sense strand starting at position 2570 of SEQ ID NO: 1888488
aaggucucucgauggaaau

SEQ ID NO: 2537001 - RNA, 19 nt, Artificial Sequence
  Description of Artificial Sequence: Synthetic oligonucleotide
  Antisense strand to SEQ ID NO: 2537000
auuuccaucgagagaccuu

SEQ ID NO: 2537002 - RNA, 19 nt, Artificial Sequence
  Description of Artificial Sequence: Synthetic oligonucleotide
  Sense strand starting at position 3744 of SEQ ID NO: 1888488
guaaguaguguccaauaag

SEQ ID NO: 2537003 - RNA, 19 nt, Artificial Sequence
  Description of Artificial Sequence: Synthetic oligonucleotide
  Antisense strand to SEQ ID NO: 2537002
cuuauuggacacuacuuac

SEQ ID NO: 2537004 - RNA, 19 nt, Artificial Sequence
  Description of Artificial Sequence: Synthetic oligonucleotide
  Sense strand starting at position 3981 of SEQ ID NO: 1888488
auaacauguugagcauuga

SEQ ID NO: 2537005 - RNA, 19 nt, Artificial Sequence
  Description of Artificial Sequence: Synthetic oligonucleotide
  Antisense strand to SEQ ID NO: 2537004
ucaaugcucaacauguuau

SEQ ID NO: 2537006 - RNA, 19 nt, Artificial Sequence
  Description of Artificial Sequence: Synthetic oligonucleotide
  Sense strand starting at position 933 of SEQ ID NO: 1888488
acugaagaccggugaguaa

SEQ ID NO: 2537007 - RNA, 19 nt, Artificial Sequence
  Description of Artificial Sequence: Synthetic oligonucleotide
  Antisense strand to SEQ ID NO: 2537006
uuacucaccggucuucagu

SEQ ID NO: 2537008 - RNA, 19 nt, Artificial Sequence
  Description of Artificial Sequence: Synthetic oligonucleotide
  Sense strand starting at position 2571 of SEQ ID NO: 1888488
aggucucucgauggaaaug

SEQ ID NO: 2537009 - RNA, 19 nt, Artificial Sequence
  Description of Artificial Sequence: Synthetic oligonucleotide
  Antisense strand to SEQ ID NO: 2537008
cauuuccaucgagagaccu

SEQ ID NO: 2537010 - RNA, 19 nt, Artificial Sequence
  Description of Artificial Sequence: Synthetic oligonucleotide
  Sense strand starting at position 3747 of SEQ ID NO: 1888488
aguaguguccaauaagggu

SEQ ID NO: 2537011 - RNA, 19 nt, Artificial Sequence
  Description of Artificial Sequence: Synthetic oligonucleotide
  Antisense strand to SEQ ID NO: 2537010
acccuuauuggacacuacu

SEQ ID NO: 2537012 - RNA, 19 nt, Artificial Sequence
  Description of Artificial Sequence: Synthetic oligonucleotide
  Sense strand starting at position 2565 of SEQ ID NO: 1888488
uuaagaaggucucucgaug

SEQ ID NO: 2537013 - RNA, 19 nt, Artificial Sequence
  Description of Artificial Sequence: Synthetic oligonucleotide
  Antisense strand to SEQ ID NO: 2537012
caucgagagaccuucuuaa

SEQ ID NO: 2537014 - RNA, 19 nt, Artificial Sequence
  Description of Artificial Sequence: Synthetic oligonucleotide
  Sense strand starting at position 3728 of SEQ ID NO: 1888488
guuuguagaguagauggua

SEQ ID NO: 2537015 - RNA, 19 nt, Artificial Sequence
  Description of Artificial Sequence: Synthetic oligonucleotide
  Antisense strand to SEQ ID NO: 2537014
uaccaucuacucuacaaac

SEQ ID NO: 2537016 - RNA, 19 nt, Artificial Sequence
  Description of Artificial Sequence: Synthetic oligonucleotide
  Sense strand starting at position 3158 of SEQ ID NO: 1888488
acgagaguuguggaguuua

SEQ ID NO: 2537017 - RNA, 19 nt, Artificial Sequence
  Description of Artificial Sequence: Synthetic oligonucleotide
  Antisense strand to SEQ ID NO: 2537016
uaaacuccacaacucucgu

SEQ ID NO: 2537018 - RNA, 19 nt, Artificial Sequence
  Description of Artificial Sequence: Synthetic oligonucleotide
  Sense strand starting at position 3042 of SEQ ID NO: 1888488
uagguuugaccaggucaca

SEQ ID NO: 2537019 - RNA, 19 nt, Artificial Sequence
  Description of Artificial Sequence: Synthetic oligonucleotide
  Antisense strand to SEQ ID NO: 2537018
ugugaccuggucaaaccua

SEQ ID NO: 2537020 - RNA, 19 nt, Artificial Sequence
  Description of Artificial Sequence: Synthetic oligonucleotide
  Sense strand starting at position 3030 of SEQ ID NO: 1888488
cuauguaagagcuagguuu

SEQ ID NO: 2537021 - RNA, 19 nt, Artificial Sequence
  Description of Artificial Sequence: Synthetic oligonucleotide
  Antisense strand to SEQ ID NO: 2537020
aaaccuagcucuuacauag

SEQ ID NO: 2537022 - RNA, 19 nt, Artificial Sequence
  Description of Artificial Sequence: Synthetic oligonucleotide
  Sense strand starting at position 3395 of SEQ ID NO: 1888488
gagccucaaguuugaugau

SEQ ID NO: 2537023 - RNA, 19 nt, Artificial Sequence
  Description of Artificial Sequence: Synthetic oligonucleotide
  Antisense strand to SEQ ID NO: 2537022
aucaucaaacuugaggcuc

SEQ ID NO: 2537024 - RNA, 19 nt, Artificial Sequence
  Description of Artificial Sequence: Synthetic oligonucleotide
  Sense strand starting at position 3281 of SEQ ID NO: 1888488
ucguccaguagugauuaaa

SEQ ID NO: 2537025 - RNA, 19 nt, Artificial Sequence
  Description of Artificial Sequence: Synthetic oligonucleotide
  Antisense strand to SEQ ID NO: 2537024
uuuaaucacuacuggacga

SEQ ID NO: 2537026 - RNA, 19 nt, Artificial Sequence
  Description of Artificial Sequence: Synthetic oligonucleotide
  Sense strand starting at position 3032 of SEQ ID NO: 1888488
auguaagagcuagguuuga

SEQ ID NO: 2537027 - RNA, 19 nt, Artificial Sequence
  Description of Artificial Sequence: Synthetic oligonucleotide
  Antisense strand to SEQ ID NO: 2537026
ucaaaccuagcucuuacau

SEQ ID NO: 2537028 - RNA, 19 nt, Artificial Sequence
  Description of Artificial Sequence: Synthetic oligonucleotide
  Sense strand starting at position 3461 of SEQ ID NO: 1888488
cagggauacgugcaugcaa

SEQ ID NO: 2537029 - RNA, 19 nt, Artificial Sequence
  Description of Artificial Sequence: Synthetic oligonucleotide
  Antisense strand to SEQ ID NO: 2537028
uugcaugcacguaucccug

SEQ ID NO: 2537030 - RNA, 19 nt, Artificial Sequence
  Description of Artificial Sequence: Synthetic oligonucleotide
  Sense strand starting at position 3274 of SEQ ID NO: 1888488
ggaaucaucguccaguagu

SEQ ID NO: 2537031 - RNA, 19 nt, Artificial Sequence
  Description of Artificial Sequence: Synthetic oligonucleotide
  Antisense strand to SEQ ID NO: 2537030
acuacuggacgaugauucc

SEQ ID NO: 2537032 - RNA, 19 nt, Artificial Sequence
  Description of Artificial Sequence: Synthetic oligonucleotide
  Sense strand starting at position 3272 of SEQ ID NO: 1888488
ugggaaucaucguccagua

SEQ ID NO: 2537033 - RNA, 19 nt, Artificial Sequence
  Description of Artificial Sequence: Synthetic oligonucleotide
  Antisense strand to SEQ ID NO: 2537032
uacuggacgaugauuccca

SEQ ID NO: 2537034 - RNA, 19 nt, Artificial Sequence
  Description of Artificial Sequence: Synthetic oligonucleotide
  Sense strand starting at position 3055 of SEQ ID NO: 1888488
gucacagugauaggcuaua

SEQ ID NO: 2537035 - RNA, 19 nt, Artificial Sequence
  Description of Artificial Sequence: Synthetic oligonucleotide
  Antisense strand to SEQ ID NO: 2537034
uauagccuaucacugugac

SEQ ID NO: 2537036 - RNA, 19 nt, Artificial Sequence
  Description of Artificial Sequence: Synthetic oligonucleotide
  Sense strand starting at position 3277 of SEQ ID NO: 1888488
aucaucguccaguagugau

SEQ ID NO: 2537037 - RNA, 19 nt, Artificial Sequence
  Description of Artificial Sequence: Synthetic oligonucleotide
  Antisense strand to SEQ ID NO: 2537036
aucacuacuggacgaugau

SEQ ID NO: 2537038 - RNA, 19 nt, Artificial Sequence
  Description of Artificial Sequence: Synthetic oligonucleotide
  Sense strand starting at position 3017 of SEQ ID NO: 1888488
agcagauuauaagcuaugu

SEQ ID NO: 2537039 - RNA, 19 nt, Artificial Sequence
  Description of Artificial Sequence: Synthetic oligonucleotide
  Antisense strand to SEQ ID NO: 2537038
acauagcuuauaaucugcu

SEQ ID NO: 2537040 - RNA, 19 nt, Artificial Sequence
  Description of Artificial Sequence: Synthetic oligonucleotide
  Sense strand starting at position 3926 of SEQ ID NO: 1888488
ugcauuuaauuggagugaa

SEQ ID NO: 2537041 - RNA, 19 nt, Artificial Sequence
  Description of Artificial Sequence: Synthetic oligonucleotide
  Antisense strand to SEQ ID NO: 2537040
uucacuccaauuaaaugca

SEQ ID NO: 2537042 - RNA, 19 nt, Artificial Sequence
  Description of Artificial Sequence: Synthetic oligonucleotide
  Sense strand starting at position 3389 of SEQ ID NO: 1888488
ggucuugagccucaaguuu

SEQ ID NO: 2537043 - RNA, 19 nt, Artificial Sequence
  Description of Artificial Sequence: Synthetic oligonucleotide
  Antisense strand to SEQ ID NO: 2537042
aaacuugaggcucaagacc

SEQ ID NO: 2537044 - RNA, 19 nt, Artificial Sequence
  Description of Artificial Sequence: Synthetic oligonucleotide
  Sense strand starting at position 1242 of SEQ ID NO: 1888489
caaaguuccggagaguaga

SEQ ID NO: 2537045 - RNA, 19 nt, Artificial Sequence
  Description of Artificial Sequence: Synthetic oligonucleotide
  Antisense strand to SEQ ID NO: 2537044
ucuacucuccggaacuuug

SEQ ID NO: 2537046 - RNA, 19 nt, Artificial Sequence
  Description of Artificial Sequence: Synthetic oligonucleotide
  Sense strand starting at position 2430 of SEQ ID NO: 1888489
acacuugugacuucgcgua

SEQ ID NO: 2537047 - RNA, 19 nt, Artificial Sequence
  Description of Artificial Sequence: Synthetic oligonucleotide
  Antisense strand to SEQ ID NO: 2537046
uacgcgaagucacaagugu

SEQ ID NO: 2537048 - RNA, 19 nt, Artificial Sequence
  Description of Artificial Sequence: Synthetic oligonucleotide
  Sense strand starting at position 97 of SEQ ID NO: 1888489
agauguaauuaagugauga

SEQ ID NO: 2537049 - RNA, 19 nt, Artificial Sequence
  Description of Artificial Sequence: Synthetic oligonucleotide
  Antisense strand to SEQ ID NO: 2537048
ucaucacuuaauuacaucu

SEQ ID NO: 2537050 - RNA, 19 nt, Artificial Sequence
  Description of Artificial Sequence: Synthetic oligonucleotide
  Sense strand starting at position 2971 of SEQ ID NO: 1888489
ugcggaauugucuucguua

SEQ ID NO: 2537051 - RNA, 19 nt, Artificial Sequence
  Description of Artificial Sequence: Synthetic oligonucleotide
  Antisense strand to SEQ ID NO: 2537050
uaacgaagacaauuccgca

SEQ ID NO: 2537052 - RNA, 19 nt, Artificial Sequence
  Description of Artificial Sequence: Synthetic oligonucleotide
  Sense strand starting at position 117 of SEQ ID NO: 1888489
gaagucaugcuggaguaag

SEQ ID NO: 2537053 - RNA, 19 nt, Artificial Sequence
  Description of Artificial Sequence: Synthetic oligonucleotide
  Antisense strand to SEQ ID NO: 2537052
cuuacuccagcaugacuuc

SEQ ID NO: 2537054 - RNA, 19 nt, Artificial Sequence
  Description of Artificial Sequence: Synthetic oligonucleotide
  Sense strand starting at position 2434 of SEQ ID NO: 1888489
uugugacuucgcguauuca

SEQ ID NO: 2537055 - RNA, 19 nt, Artificial Sequence
  Description of Artificial Sequence: Synthetic oligonucleotide
  Antisense strand to SEQ ID NO: 2537054
ugaauacgcgaagucacaa

SEQ ID NO: 2537056 - RNA, 19 nt, Artificial Sequence
  Description of Artificial Sequence: Synthetic oligonucleotide
  Sense strand starting at position 3857 of SEQ ID NO: 1888489
acagcagauauugguaaga

SEQ ID NO: 2537057 - RNA, 19 nt, Artificial Sequence
  Description of Artificial Sequence: Synthetic oligonucleotide
  Antisense strand to SEQ ID NO: 2537056
ucuuaccaauaucugcugu

SEQ ID NO: 2537058 - RNA, 19 nt, Artificial Sequence
  Description of Artificial Sequence: Synthetic oligonucleotide
  Sense strand starting at position 3794 of SEQ ID NO: 1888489
aggaauacaccguggaacu

SEQ ID NO: 2537059 - RNA, 19 nt, Artificial Sequence
  Description of Artificial Sequence: Synthetic oligonucleotide
  Antisense strand to SEQ ID NO: 2537058
aguuccacgguguauuccu

SEQ ID NO: 2537060 - RNA, 19 nt, Artificial Sequence
  Description of Artificial Sequence: Synthetic oligonucleotide
  Sense strand starting at position 3792 of SEQ ID NO: 1888489
ccaggaauacaccguggaa

SEQ ID NO: 2537061 - RNA, 19 nt, Artificial Sequence
  Description of Artificial Sequence: Synthetic oligonucleotide
  Antisense strand to SEQ ID NO: 2537060
uuccacgguguauuccugg

SEQ ID NO: 2537062 - RNA, 19 nt, Artificial Sequence
  Description of Artificial Sequence: Synthetic oligonucleotide
  Sense strand starting at position 3874 of SEQ ID NO: 1888489
gagcuacaaugagucaaau

SEQ ID NO: 2537063 - RNA, 19 nt, Artificial Sequence
  Description of Artificial Sequence: Synthetic oligonucleotide
  Antisense strand to SEQ ID NO: 2537062
auuugacucauuguagcuc

SEQ ID NO: 2537064 - RNA, 19 nt, Artificial Sequence
  Description of Artificial Sequence: Synthetic oligonucleotide
  Sense strand starting at position 1240 of SEQ ID NO: 1888489
uucaaaguuccggagagua

SEQ ID NO: 2537065 - RNA, 19 nt, Artificial Sequence
  Description of Artificial Sequence: Synthetic oligonucleotide
  Antisense strand to SEQ ID NO: 2537064
uacucuccggaacuuugaa

SEQ ID NO: 2537066 - RNA, 19 nt, Artificial Sequence
  Description of Artificial Sequence: Synthetic oligonucleotide
  Sense strand starting at position 1141 of SEQ ID NO: 1888489
uuucuuaagcacuaaguga

SEQ ID NO: 2537067 - RNA, 19 nt, Artificial Sequence
  Description of Artificial Sequence: Synthetic oligonucleotide
  Antisense strand to SEQ ID NO: 2537066
ucacuuagugcuuaagaaa

SEQ ID NO: 2537068 - RNA, 19 nt, Artificial Sequence
  Description of Artificial Sequence: Synthetic oligonucleotide
  Sense strand starting at position 577 of SEQ ID NO: 1888489
aagucugugcccuaaagaa

SEQ ID NO: 2537069 - RNA, 19 nt, Artificial Sequence
  Description of Artificial Sequence: Synthetic oligonucleotide
  Antisense strand to SEQ ID NO: 2537068
uucuuuagggcacagacuu

SEQ ID NO: 2537070 - RNA, 19 nt, Artificial Sequence
  Description of Artificial Sequence: Synthetic oligonucleotide
  Sense strand starting at position 664 of SEQ ID NO: 1888489
gcucuugcgguguuuacau

SEQ ID NO: 2537071 - RNA, 19 nt, Artificial Sequence
  Description of Artificial Sequence: Synthetic oligonucleotide
  Antisense strand to SEQ ID NO: 2537070
auguaaacaccgcaagagc

SEQ ID NO: 2537072 - RNA, 19 nt, Artificial Sequence
  Description of Artificial Sequence: Synthetic oligonucleotide
  Sense strand starting at position 663 of SEQ ID NO: 1888489
ugcucuugcgguguuuaca

SEQ ID NO: 2537073 - RNA, 19 nt, Artificial Sequence
  Description of Artificial Sequence: Synthetic oligonucleotide
  Antisense strand to SEQ ID NO: 2537072
uguaaacaccgcaagagca

SEQ ID NO: 2537074 - RNA, 19 nt, Artificial Sequence
  Description of Artificial Sequence: Synthetic oligonucleotide
  Sense strand starting at position 81 of SEQ ID NO: 1888489
gaaacaggguucuugcaga

SEQ ID NO: 2537075 - RNA, 19 nt, Artificial Sequence
  Description of Artificial Sequence: Synthetic oligonucleotide
  Antisense strand to SEQ ID NO: 2537074
ucugcaagaacccuguuuc

SEQ ID NO: 2537076 - RNA, 19 nt, Artificial Sequence
  Description of Artificial Sequence: Synthetic oligonucleotide
  Sense strand starting at position 606 of SEQ ID NO: 1888489
uacugaacccguugggaaa

SEQ ID NO: 2537077 - RNA, 19 nt, Artificial Sequence
  Description of Artificial Sequence: Synthetic oligonucleotide
  Antisense strand to SEQ ID NO: 2537076
uuucccaacggguucagua

SEQ ID NO: 2537078 - RNA, 19 nt, Artificial Sequence
  Description of Artificial Sequence: Synthetic oligonucleotide
  Sense strand starting at position 2953 of SEQ ID NO: 1888489
caucguguuguuguguauu

SEQ ID NO: 2537079 - RNA, 19 nt, Artificial Sequence
  Description of Artificial Sequence: Synthetic oligonucleotide
  Antisense strand to SEQ ID NO: 2537078
aauacacaacaacacgaug

SEQ ID NO: 2537080 - RNA, 19 nt, Artificial Sequence
  Description of Artificial Sequence: Synthetic oligonucleotide
  Sense strand starting at position 2388 of SEQ ID NO: 1888489
aguagugacaugugaacag

SEQ ID NO: 2537081 - RNA, 19 nt, Artificial Sequence
  Description of Artificial Sequence: Synthetic oligonucleotide
  Antisense strand to SEQ ID NO: 2537080
cuguucacaugucacuacu

SEQ ID NO: 2537082 - RNA, 19 nt, Artificial Sequence
  Description of Artificial Sequence: Synthetic oligonucleotide
  Sense strand starting at position 359 of SEQ ID NO: 1888489
uggucuccagauugugaaa

SEQ ID NO: 2537083 - RNA, 19 nt, Artificial Sequence
  Description of Artificial Sequence: Synthetic oligonucleotide
  Antisense strand to SEQ ID NO: 2537082
uuucacaaucuggagacca

SEQ ID NO: 2537084 - RNA, 19 nt, Artificial Sequence
  Description of Artificial Sequence: Synthetic oligonucleotide
  Sense strand starting at position 661 of SEQ ID NO: 1888489
agugcucuugcgguguuua

SEQ ID NO: 2537085 - RNA, 19 nt, Artificial Sequence
  Description of Artificial Sequence: Synthetic oligonucleotide
  Antisense strand to SEQ ID NO: 2537084
uaaacaccgcaagagcacu

SEQ ID NO: 2537086 - RNA, 19 nt, Artificial Sequence
  Description of Artificial Sequence: Synthetic oligonucleotide
  Sense strand starting at position 954 of SEQ ID NO: 1888489
ucucauguagcuggaaaca

SEQ ID NO: 2537087 - RNA, 19 nt, Artificial Sequence
  Description of Artificial Sequence: Synthetic oligonucleotide
  Antisense strand to SEQ ID NO: 2537086
uguuuccagcuacaugaga

SEQ ID NO: 2537088 - RNA, 19 nt, Artificial Sequence
  Description of Artificial Sequence: Synthetic oligonucleotide
  Sense strand starting at position 533 of SEQ ID NO: 1888489
auguaagucugguugaaau

SEQ ID NO: 2537089 - RNA, 19 nt, Artificial Sequence
  Description of Artificial Sequence: Synthetic oligonucleotide
  Antisense strand to SEQ ID NO: 2537088
auuucaaccagacuuacau

SEQ ID NO: 2537090 - RNA, 19 nt, Artificial Sequence
  Description of Artificial Sequence: Synthetic oligonucleotide
  Sense strand starting at position 3113 of SEQ ID NO: 1888489
uggagagccugauugcaau

SEQ ID NO: 2537091 - RNA, 19 nt, Artificial Sequence
  Description of Artificial Sequence: Synthetic oligonucleotide
  Antisense strand to SEQ ID NO: 2537090
auugcaaucaggcucucca

SEQ ID NO: 2537092 - RNA, 19 nt, Artificial Sequence
  Description of Artificial Sequence: Synthetic oligonucleotide
  Sense strand starting at position 3038 of SEQ ID NO: 1888489
ucacaugucgauggacauu

SEQ ID NO: 2537093 - RNA, 19 nt, Artificial Sequence
  Description of Artificial Sequence: Synthetic oligonucleotide
  Antisense strand to SEQ ID NO: 2537092
aauguccaucgacauguga

SEQ ID NO: 2537094 - RNA, 19 nt, Artificial Sequence
  Description of Artificial Sequence: Synthetic oligonucleotide
  Sense strand starting at position 2386 of SEQ ID NO: 1888489
ccaguagugacaugugaac

SEQ ID NO: 2537095 - RNA, 19 nt, Artificial Sequence
  Description of Artificial Sequence: Synthetic oligonucleotide
  Antisense strand to SEQ ID NO: 2537094
guucacaugucacuacugg

SEQ ID NO: 2537096 - RNA, 19 nt, Artificial Sequence
  Description of Artificial Sequence: Synthetic oligonucleotide
  Sense strand starting at position 116 of SEQ ID NO: 1888489
ugaagucaugcuggaguaa

SEQ ID NO: 2537097 - RNA, 19 nt, Artificial Sequence
  Description of Artificial Sequence: Synthetic oligonucleotide
  Antisense strand to SEQ ID NO: 2537096
uuacuccagcaugacuuca

SEQ ID NO: 2537098 - RNA, 19 nt, Artificial Sequence
  Description of Artificial Sequence: Synthetic oligonucleotide
  Sense strand starting at position 3082 of SEQ ID NO: 1888489
ugugaaugaacgugggagu

SEQ ID NO: 2537099 - RNA, 19 nt, Artificial Sequence
  Description of Artificial Sequence: Synthetic oligonucleotide
  Antisense strand to SEQ ID NO: 2537098
acucccacguucauucaca

SEQ ID NO: 2537100 - RNA, 19 nt, Artificial Sequence
  Description of Artificial Sequence: Synthetic oligonucleotide
  Sense strand starting at position 2009 of SEQ ID NO: 1888489
uagagagguugccuggcaa

SEQ ID NO: 2537101 - RNA, 19 nt, Artificial Sequence
  Description of Artificial Sequence: Synthetic oligonucleotide
  Antisense strand to SEQ ID NO: 2537100
uugccaggcaaccucucua

SEQ ID NO: 2537102 - RNA, 19 nt, Artificial Sequence
  Description of Artificial Sequence: Synthetic oligonucleotide
  Sense strand starting at position 2983 of SEQ ID NO: 1888489
uucguuaaggcugaauagu

SEQ ID NO: 2537103 - RNA, 19 nt, Artificial Sequence
  Description of Artificial Sequence: Synthetic oligonucleotide
  Antisense strand to SEQ ID NO: 2537102
acuauucagccuuaacgaa

SEQ ID NO: 2537104 - RNA, 19 nt, Artificial Sequence
  Description of Artificial Sequence: Synthetic oligonucleotide
  Sense strand starting at position 2974 of SEQ ID NO: 1888489
ggaauugucuucguuaagg

SEQ ID NO: 2537105 - RNA, 19 nt, Artificial Sequence
  Description of Artificial Sequence: Synthetic oligonucleotide
  Antisense strand to SEQ ID NO: 2537104
ccuuaacgaagacaauucc

SEQ ID NO: 2537106 - RNA, 19 nt, Artificial Sequence
  Description of Artificial Sequence: Synthetic oligonucleotide
  Sense strand starting at position 2479 of SEQ ID NO: 1888489
ccaugaagugcuggguaca

SEQ ID NO: 2537107 - RNA, 19 nt, Artificial Sequence
  Description of Artificial Sequence: Synthetic oligonucleotide
  Antisense strand to SEQ ID NO: 2537106
uguacccagcacuucaugg

SEQ ID NO: 2537108 - RNA, 19 nt, Artificial Sequence
  Description of Artificial Sequence: Synthetic oligonucleotide
  Sense strand starting at position 573 of SEQ ID NO: 1888489
gaacaagucugugcccuaa

SEQ ID NO: 2537109 - RNA, 19 nt, Artificial Sequence
  Description of Artificial Sequence: Synthetic oligonucleotide
  Antisense strand to SEQ ID NO: 2537108
uuagggcacagacuuguuc

SEQ ID NO: 2537110 - RNA, 19 nt, Artificial Sequence
  Description of Artificial Sequence: Synthetic oligonucleotide
  Sense strand starting at position 572 of SEQ ID NO: 1888489
agaacaagucugugcccua

SEQ ID NO: 2537111 - RNA, 19 nt, Artificial Sequence
  Description of Artificial Sequence: Synthetic oligonucleotide
  Antisense strand to SEQ ID NO: 2537110
uagggcacagacuuguucu

SEQ ID NO: 2537112 - RNA, 19 nt, Artificial Sequence
  Description of Artificial Sequence: Synthetic oligonucleotide
  Sense strand starting at position 3285 of SEQ ID NO: 1888489
aggguagggcucugguuau

SEQ ID NO: 2537113 - RNA, 19 nt, Artificial Sequence
  Description of Artificial Sequence: Synthetic oligonucleotide
  Antisense strand to SEQ ID NO: 2537112
auaaccagagcccuacccu

SEQ ID NO: 2537114 - RNA, 19 nt, Artificial Sequence
  Description of Artificial Sequence: Synthetic oligonucleotide
  Sense strand starting at position 2982 of SEQ ID NO: 1888489
cuucguuaaggcugaauag

SEQ ID NO: 2537115 - RNA, 19 nt, Artificial Sequence
  Description of Artificial Sequence: Synthetic oligonucleotide
  Antisense strand to SEQ ID NO: 2537114
cuauucagccuuaacgaag

SEQ ID NO: 2537116 - RNA, 19 nt, Artificial Sequence
  Description of Artificial Sequence: Synthetic oligonucleotide
  Sense strand starting at position 1130 of SEQ ID NO: 1888489
ggcacaggcucuuucuuaa

SEQ ID NO: 2537117 - RNA, 19 nt, Artificial Sequence
  Description of Artificial Sequence: Synthetic oligonucleotide
  Antisense strand to SEQ ID NO: 2537116
uuaagaaagagccugugcc

SEQ ID NO: 2537118 - RNA, 19 nt, Artificial Sequence
  Description of Artificial Sequence: Synthetic oligonucleotide
  Sense strand starting at position 2976 of SEQ ID NO: 1888489
aauugucuucguuaaggcu

SEQ ID NO: 2537119 - RNA, 19 nt, Artificial Sequence
  Description of Artificial Sequence: Synthetic oligonucleotide
  Antisense strand to SEQ ID NO: 2537118
agccuuaacgaagacaauu

SEQ ID NO: 2537120 - RNA, 19 nt, Artificial Sequence
  Description of Artificial Sequence: Synthetic oligonucleotide
  Sense strand starting at position 2737 of SEQ ID NO: 1888489
cgacuaugggugugauguc

SEQ ID NO: 2537121 - RNA, 19 nt, Artificial Sequence
  Description of Artificial Sequence: Synthetic oligonucleotide
  Antisense strand to SEQ ID NO: 2537120
gacaucacacccauagucg

SEQ ID NO: 2537122 - RNA, 19 nt, Artificial Sequence
  Description of Artificial Sequence: Synthetic oligonucleotide
  Sense strand starting at position 2973 of SEQ ID NO: 1888489
cggaauugucuucguuaag

SEQ ID NO: 2537123 - RNA, 19 nt, Artificial Sequence
  Description of Artificial Sequence: Synthetic oligonucleotide
  Antisense strand to SEQ ID NO: 2537122
cuuaacgaagacaauuccg

SEQ ID NO: 2537124 - RNA, 19 nt, Artificial Sequence
  Description of Artificial Sequence: Synthetic oligonucleotide
  Sense strand starting at position 865 of SEQ ID NO: 1888491
gagguauaugaaggcuaag

SEQ ID NO: 2537125 - RNA, 19 nt, Artificial Sequence
  Description of Artificial Sequence: Synthetic oligonucleotide
  Antisense strand to SEQ ID NO: 2537124
cuuagccuucauauaccuc

SEQ ID NO: 2537126 - RNA, 19 nt, Artificial Sequence
  Description of Artificial Sequence: Synthetic oligonucleotide
  Sense strand starting at position 1195 of SEQ ID NO: 1888491
ggaauucucccagaaacgc

SEQ ID NO: 2537127 - RNA, 19 nt, Artificial Sequence
  Description of Artificial Sequence: Synthetic oligonucleotide
  Antisense strand to SEQ ID NO: 2537126
gcguuucugggagaauucc

SEQ ID NO: 2537128 - RNA, 19 nt, Artificial Sequence
  Description of Artificial Sequence: Synthetic oligonucleotide
  Sense strand starting at position 3776 of SEQ ID NO: 1888491
agacgagagcacugaaauc

SEQ ID NO: 2537129 - RNA, 19 nt, Artificial Sequence
  Description of Artificial Sequence: Synthetic oligonucleotide
  Antisense strand to SEQ ID NO: 2537128
gauuucagugcucucgucu

SEQ ID NO: 2537130 - RNA, 19 nt, Artificial Sequence
  Description of Artificial Sequence: Synthetic oligonucleotide
  Sense strand starting at position 1007 of SEQ ID NO: 1888491
ggcauccguagacaagaau

SEQ ID NO: 2537131 - RNA, 19 nt, Artificial Sequence
  Description of Artificial Sequence: Synthetic oligonucleotide
  Antisense strand to SEQ ID NO: 2537130
auucuugucuacggaugcc

SEQ ID NO: 2537132 - RNA, 19 nt, Artificial Sequence
  Description of Artificial Sequence: Synthetic oligonucleotide
  Sense strand starting at position 1005 of SEQ ID NO: 1888491
auggcauccguagacaaga

SEQ ID NO: 2537133 - RNA, 19 nt, Artificial Sequence
  Description of Artificial Sequence: Synthetic oligonucleotide
  Antisense strand to SEQ ID NO: 2537132
ucuugucuacggaugccau

SEQ ID NO: 2537134 - RNA, 19 nt, Artificial Sequence
  Description of Artificial Sequence: Synthetic oligonucleotide
  Sense strand starting at position 2680 of SEQ ID NO: 1888491
acaucaucugggugagacu

SEQ ID NO: 2537135 - RNA, 19 nt, Artificial Sequence
  Description of Artificial Sequence: Synthetic oligonucleotide
  Antisense strand to SEQ ID NO: 2537134
agucucacccagaugaugu

SEQ ID NO: 2537136 - RNA, 19 nt, Artificial Sequence
  Description of Artificial Sequence: Synthetic oligonucleotide
  Sense strand starting at position 1184 of SEQ ID NO: 1888491
gcuaguacugaggaauucu

SEQ ID NO: 2537137 - RNA, 19 nt, Artificial Sequence
  Description of Artificial Sequence: Synthetic oligonucleotide
  Antisense strand to SEQ ID NO: 2537136
agaauuccucaguacuagc

SEQ ID NO: 2537138 - RNA, 19 nt, Artificial Sequence
  Description of Artificial Sequence: Synthetic oligonucleotide
  Sense strand starting at position 816 of SEQ ID NO: 1888491
acaacauuggcucagcuaa

SEQ ID NO: 2537139 - RNA, 19 nt, Artificial Sequence
  Description of Artificial Sequence: Synthetic oligonucleotide
  Antisense strand to SEQ ID NO: 2537138
uuagcugagccaauguugu

SEQ ID NO: 2537140 - RNA, 19 nt, Artificial Sequence
  Description of Artificial Sequence: Synthetic oligonucleotide
  Sense strand starting at position 2090 of SEQ ID NO: 1888491
aagggaguguuucuagaug

SEQ ID NO: 2537141 - RNA, 19 nt, Artificial Sequence
  Description of Artificial Sequence: Synthetic oligonucleotide
  Antisense strand to SEQ ID NO: 2537140
caucuagaaacacucccuu

SEQ ID NO: 2537142 - RNA, 19 nt, Artificial Sequence
  Description of Artificial Sequence: Synthetic oligonucleotide
  Sense strand starting at position 859 of SEQ ID NO: 1888491
gcgcaagagguauaugaag

SEQ ID NO: 2537143 - RNA, 19 nt, Artificial Sequence
  Description of Artificial Sequence: Synthetic oligonucleotide
  Antisense strand to SEQ ID NO: 2537142
cuucauauaccucuugcgc

SEQ ID NO: 2537144 - RNA, 19 nt, Artificial Sequence
  Description of Artificial Sequence: Synthetic oligonucleotide
  Sense strand starting at position 3366 of SEQ ID NO: 1888491
cuaagaccuucuuuggagu

SEQ ID NO: 2537145 - RNA, 19 nt, Artificial Sequence
  Description of Artificial Sequence: Synthetic oligonucleotide
  Antisense strand to SEQ ID NO: 2537144
acuccaaagaaggucuuag

SEQ ID NO: 2537146 - RNA, 19 nt, Artificial Sequence
  Description of Artificial Sequence: Synthetic oligonucleotide
  Sense strand starting at position 3343 of SEQ ID NO: 1888491
gguauuaggucugugagag

SEQ ID NO: 2537147 - RNA, 19 nt, Artificial Sequence
  Description of Artificial Sequence: Synthetic oligonucleotide
  Antisense strand to SEQ ID NO: 2537146
cucucacagaccuaauacc

SEQ ID NO: 2537148 - RNA, 19 nt, Artificial Sequence
  Description of Artificial Sequence: Synthetic oligonucleotide
  Sense strand starting at position 3342 of SEQ ID NO: 1888491
ggguauuaggucugugaga

SEQ ID NO: 2537149 - RNA, 19 nt, Artificial Sequence
  Description of Artificial Sequence: Synthetic oligonucleotide
  Antisense strand to SEQ ID NO: 2537148
ucucacagaccuaauaccc

SEQ ID NO: 2537150 - RNA, 19 nt, Artificial Sequence
  Description of Artificial Sequence: Synthetic oligonucleotide
  Sense strand starting at position 3344 of SEQ ID NO: 1888491
guauuaggucugugagagg

SEQ ID NO: 2537151 - RNA, 19 nt, Artificial Sequence
  Description of Artificial Sequence: Synthetic oligonucleotide
  Antisense strand to SEQ ID NO: 2537150
ccucucacagaccuaauac

SEQ ID NO: 2537152 - RNA, 19 nt, Artificial Sequence
  Description of Artificial Sequence: Synthetic oligonucleotide
  Sense strand starting at position 136 of SEQ ID NO: 1888491
auguaauacuucucuguga

SEQ ID NO: 2537153 - RNA, 19 nt, Artificial Sequence
  Description of Artificial Sequence: Synthetic oligonucleotide
  Antisense strand to SEQ ID NO: 2537152
ucacagagaaguauuacau

SEQ ID NO: 2537154 - RNA, 19 nt, Artificial Sequence
  Description of Artificial Sequence: Synthetic oligonucleotide
  Sense strand starting at position 137 of SEQ ID NO: 1888491
uguaauacuucucugugau

SEQ ID NO: 2537155 - RNA, 19 nt, Artificial Sequence
  Description of Artificial Sequence: Synthetic oligonucleotide
  Antisense strand to SEQ ID NO: 2537154
aucacagagaaguauuaca

SEQ ID NO: 2537156 - RNA, 19 nt, Artificial Sequence
  Description of Artificial Sequence: Synthetic oligonucleotide
  Sense strand starting at position 138 of SEQ ID NO: 1888491
guaauacuucucugugauu

SEQ ID NO: 2537157 - RNA, 19 nt, Artificial Sequence
  Description of Artificial Sequence: Synthetic oligonucleotide
  Antisense strand to SEQ ID NO: 2537156
aaucacagagaaguauuac

SEQ ID NO: 2537158 - RNA, 19 nt, Artificial Sequence
  Description of Artificial Sequence: Synthetic oligonucleotide
  Sense strand starting at position 2893 of SEQ ID NO: 1888491
ggccuccuccgccaugaaa

SEQ ID NO: 2537159 - RNA, 19 nt, Artificial Sequence
  Description of Artificial Sequence: Synthetic oligonucleotide
  Antisense strand to SEQ ID NO: 2537158
uuucauggcggaggaggcc

SEQ ID NO: 2537160 - RNA, 19 nt, Artificial Sequence
  Description of Artificial Sequence: Synthetic oligonucleotide
  Sense strand starting at position 2689 of SEQ ID NO: 1888491
gggugagacuuggaggaga

SEQ ID NO: 2537161 - RNA, 19 nt, Artificial Sequence
  Description of Artificial Sequence: Synthetic oligonucleotide
  Antisense strand to SEQ ID NO: 2537160
ucuccuccaagucucaccc

SEQ ID NO: 2537162 - RNA, 19 nt, Artificial Sequence
  Description of Artificial Sequence: Synthetic oligonucleotide
  Sense strand starting at position 94 of SEQ ID NO: 1888491
agucaucuguugcuaacca

SEQ ID NO: 2537163 - RNA, 19 nt, Artificial Sequence
  Description of Artificial Sequence: Synthetic oligonucleotide
  Antisense strand to SEQ ID NO: 2537162
ugguuagcaacagaugacu

SEQ ID NO: 2537164 - RNA, 19 nt, Artificial Sequence
  Description of Artificial Sequence: Synthetic oligonucleotide
  Sense strand starting at position 2729 of SEQ ID NO: 1888491
gagagauucuagcagagaa

SEQ ID NO: 2537165 - RNA, 19 nt, Artificial Sequence
  Description of Artificial Sequence: Synthetic oligonucleotide
  Antisense strand to SEQ ID NO: 2537164
uucucugcuagaaucucuc

SEQ ID NO: 2537166 - RNA, 19 nt, Artificial Sequence
  Description of Artificial Sequence: Synthetic oligonucleotide
  Sense strand starting at position 258 of SEQ ID NO: 1888491
aggauuccacgcggucaga

SEQ ID NO: 2537167 - RNA, 19 nt, Artificial Sequence
  Description of Artificial Sequence: Synthetic oligonucleotide
  Antisense strand to SEQ ID NO: 2537166
ucugaccgcguggaauccu

SEQ ID NO: 2537168 - RNA, 19 nt, Artificial Sequence
  Description of Artificial Sequence: Synthetic oligonucleotide
  Sense strand starting at position 1222 of SEQ ID NO: 1888491
gaccuagucuaggaggaaa

SEQ ID NO: 2537169 - RNA, 19 nt, Artificial Sequence
  Description of Artificial Sequence: Synthetic oligonucleotide
  Antisense strand to SEQ ID NO: 2537168
uuuccuccuagacuagguc

SEQ ID NO: 2537170 - RNA, 19 nt, Artificial Sequence
  Description of Artificial Sequence: Synthetic oligonucleotide
  Sense strand starting at position 3816 of SEQ ID NO: 1888491
ugaggcagucauugccauu

SEQ ID NO: 2537171 - RNA, 19 nt, Artificial Sequence
  Description of Artificial Sequence: Synthetic oligonucleotide
  Antisense strand to SEQ ID NO: 2537170
aauggcaaugacugccuca

SEQ ID NO: 2537172 - RNA, 19 nt, Artificial Sequence
  Description of Artificial Sequence: Synthetic oligonucleotide
  Sense strand starting at position 1024 of SEQ ID NO: 1888491
augagaacuucugaaccga

SEQ ID NO: 2537173 - RNA, 19 nt, Artificial Sequence
  Description of Artificial Sequence: Synthetic oligonucleotide
  Antisense strand to SEQ ID NO: 2537172
ucgguucagaaguucucau

SEQ ID NO: 2537174 - RNA, 19 nt, Artificial Sequence
  Description of Artificial Sequence: Synthetic oligonucleotide
  Sense strand starting at position 3260 of SEQ ID NO: 1888491
cuguuugcgcugcaauaga

SEQ ID NO: 2537175 - RNA, 19 nt, Artificial Sequence
  Description of Artificial Sequence: Synthetic oligonucleotide
  Antisense strand to SEQ ID NO: 2537174
ucuauugcagcgcaaacag

SEQ ID NO: 2537176 - RNA, 19 nt, Artificial Sequence
  Description of Artificial Sequence: Synthetic oligonucleotide
  Sense strand starting at position 2716 of SEQ ID NO: 1888491
ggagagagguaucgagaga

SEQ ID NO: 2537177 - RNA, 19 nt, Artificial Sequence
  Description of Artificial Sequence: Synthetic oligonucleotide
  Antisense strand to SEQ ID NO: 2537176
ucucucgauaccucucucc

SEQ ID NO: 2537178 - RNA, 19 nt, Artificial Sequence
  Description of Artificial Sequence: Synthetic oligonucleotide
  Sense strand starting at position 3330 of SEQ ID NO: 1888491
guuagguggcucggguauu

SEQ ID NO: 2537179 - RNA, 19 nt, Artificial Sequence
  Description of Artificial Sequence: Synthetic oligonucleotide
  Antisense strand to SEQ ID NO: 2537178
aauacccgagccaccuaac

SEQ ID NO: 2537180 - RNA, 19 nt, Artificial Sequence
  Description of Artificial Sequence: Synthetic oligonucleotide
  Sense strand starting at position 1180 of SEQ ID NO: 1888491
ugaagcuaguacugaggaa

SEQ ID NO: 2537181 - RNA, 19 nt, Artificial Sequence
  Description of Artificial Sequence: Synthetic oligonucleotide
  Antisense strand to SEQ ID NO: 2537180
uuccucaguacuagcuuca

SEQ ID NO: 2537182 - RNA, 19 nt, Artificial Sequence
  Description of Artificial Sequence: Synthetic oligonucleotide
  Sense strand starting at position 3347 of SEQ ID NO: 1888491
uuaggucugugagagggua

SEQ ID NO: 2537183 - RNA, 19 nt, Artificial Sequence
  Description of Artificial Sequence: Synthetic oligonucleotide
  Antisense strand to SEQ ID NO: 2537182
uacccucucacagaccuaa

SEQ ID NO: 2537184 - RNA, 19 nt, Artificial Sequence
  Description of Artificial Sequence: Synthetic oligonucleotide
  Sense strand starting at position 3690 of SEQ ID NO: 1888491
ucauccuuguucuacagau

SEQ ID NO: 2537185 - RNA, 19 nt, Artificial Sequence
  Description of Artificial Sequence: Synthetic oligonucleotide
  Antisense strand to SEQ ID NO: 2537184
aucuguagaacaaggauga

SEQ ID NO: 2537186 - RNA, 19 nt, Artificial Sequence
  Description of Artificial Sequence: Synthetic oligonucleotide
  Sense strand starting at position 3673 of SEQ ID NO: 1888491
aggcauugcuaagaucauc

SEQ ID NO: 2537187 - RNA, 19 nt, Artificial Sequence
  Description of Artificial Sequence: Synthetic oligonucleotide
  Antisense strand to SEQ ID NO: 2537186
gaugaucuuagcaaugccu

SEQ ID NO: 2537188 - RNA, 19 nt, Artificial Sequence
  Description of Artificial Sequence: Synthetic oligonucleotide
  Sense strand starting at position 2600 of SEQ ID NO: 1888491
cccagugacuccuggaaca

SEQ ID NO: 2537189 - RNA, 19 nt, Artificial Sequence
  Description of Artificial Sequence: Synthetic oligonucleotide
  Antisense strand to SEQ ID NO: 2537188
uguuccaggagucacuggg

SEQ ID NO: 2537190 - RNA, 19 nt, Artificial Sequence
  Description of Artificial Sequence: Synthetic oligonucleotide
  Sense strand starting at position 3258 of SEQ ID NO: 1888491
cucuguuugcgcugcaaua

SEQ ID NO: 2537191 - RNA, 19 nt, Artificial Sequence
  Description of Artificial Sequence: Synthetic oligonucleotide
  Antisense strand to SEQ ID NO: 2537190
uauugcagcgcaaacagag

SEQ ID NO: 2537192 - RNA, 19 nt, Artificial Sequence
  Description of Artificial Sequence: Synthetic oligonucleotide
  Sense strand starting at position 2432 of SEQ ID NO: 1888491
ggagaagucuccugcccag

SEQ ID NO: 2537193 - RNA, 19 nt, Artificial Sequence
  Description of Artificial Sequence: Synthetic oligonucleotide
  Antisense strand to SEQ ID NO: 2537192
cugggcaggagacuucucc

SEQ ID NO: 2537194 - RNA, 19 nt, Artificial Sequence
  Description of Artificial Sequence: Synthetic oligonucleotide
  Sense strand starting at position 3256 of SEQ ID NO: 1888491
ggcucuguuugcgcugcaa

SEQ ID NO: 2537195 - RNA, 19 nt, Artificial Sequence
  Description of Artificial Sequence: Synthetic oligonucleotide
  Antisense strand to SEQ ID NO: 2537194
uugcagcgcaaacagagcc

SEQ ID NO: 2537196 - RNA, 19 nt, Artificial Sequence
  Description of Artificial Sequence: Synthetic oligonucleotide
  Sense strand starting at position 3819 of SEQ ID NO: 1888491
ggcagucauugccauugau

SEQ ID NO: 2537197 - RNA, 19 nt, Artificial Sequence
  Description of Artificial Sequence: Synthetic oligonucleotide
  Antisense strand to SEQ ID NO: 2537196
aucaauggcaaugacugcc

SEQ ID NO: 2537198 - RNA, 19 nt, Artificial Sequence
  Description of Artificial Sequence: Synthetic oligonucleotide
  Sense strand starting at position 3465 of SEQ ID NO: 1888491
acgugaugcucucaaguca

SEQ ID NO: 2537199 - RNA, 19 nt, Artificial Sequence
  Description of Artificial Sequence: Synthetic oligonucleotide
  Antisense strand to SEQ ID NO: 2537198
ugacuugagagcaucacgu

SEQ ID NO: 2537200 - RNA, 19 nt, Artificial Sequence
  Description of Artificial Sequence: Synthetic oligonucleotide
  Sense strand starting at position 92 of SEQ ID NO: 1888491
ugagucaucuguugcuaac

SEQ ID NO: 2537201 - RNA, 19 nt, Artificial Sequence
  Description of Artificial Sequence: Synthetic oligonucleotide
  Antisense strand to SEQ ID NO: 2537200
guuagcaacagaugacuca

SEQ ID NO: 2537202 - RNA, 19 nt, Artificial Sequence
  Description of Artificial Sequence: Synthetic oligonucleotide
  Sense strand starting at position 3331 of SEQ ID NO: 1888491
uuagguggcucggguauua

SEQ ID NO: 2537203 - RNA, 19 nt, Artificial Sequence
  Description of Artificial Sequence: Synthetic oligonucleotide
  Antisense strand to SEQ ID NO: 2537202
uaauacccgagccaccuaa

SEQ ID NO: 2537204 - RNA, 19 nt, Artificial Sequence
  Description of Artificial Sequence: Synthetic oligonucleotide
  Sense strand starting at position 1007 of SEQ ID NO: 1888492
uuaagaucauagcuaggga

SEQ ID NO: 2537205 - RNA, 19 nt, Artificial Sequence
  Description of Artificial Sequence: Synthetic oligonucleotide
  Antisense strand to SEQ ID NO: 2537204
ucccuagcuaugaucuuaa

SEQ ID NO: 2537206 - RNA, 19 nt, Artificial Sequence
  Description of Artificial Sequence: Synthetic oligonucleotide
  Sense strand starting at position 3950 of SEQ ID NO: 1888492
agagacuuugugggagauu

SEQ ID NO: 2537207 - RNA, 19 nt, Artificial Sequence
  Description of Artificial Sequence: Synthetic oligonucleotide
  Antisense strand to SEQ ID NO: 2537206
aaucucccacaaagucucu

SEQ ID NO: 2537208 - RNA, 19 nt, Artificial Sequence
  Description of Artificial Sequence: Synthetic oligonucleotide
  Sense strand starting at position 3658 of SEQ ID NO: 1888492
uugagauccugaccuuaau

SEQ ID NO: 2537209 - RNA, 19 nt, Artificial Sequence
  Description of Artificial Sequence: Synthetic oligonucleotide
  Antisense strand to SEQ ID NO: 2537208
auuaaggucaggaucucaa

SEQ ID NO: 2537210 - RNA, 19 nt, Artificial Sequence
  Description of Artificial Sequence: Synthetic oligonucleotide
  Sense strand starting at position 3797 of SEQ ID NO: 1888492
ggcuauuugcuauguggag

SEQ ID NO: 2537211 - RNA, 19 nt, Artificial Sequence
  Description of Artificial Sequence: Synthetic oligonucleotide
  Antisense strand to SEQ ID NO: 2537210
cuccacauagcaaauagcc

SEQ ID NO: 2537212 - RNA, 19 nt, Artificial Sequence
  Description of Artificial Sequence: Synthetic oligonucleotide
  Sense strand starting at position 3633 of SEQ ID NO: 1888492
uuggauaaucccggaugau

SEQ ID NO: 2537213 - RNA, 19 nt, Artificial Sequence
  Description of Artificial Sequence: Synthetic oligonucleotide
  Antisense strand to SEQ ID NO: 2537212
aucauccgggauuauccaa

SEQ ID NO: 2537214 - RNA, 19 nt, Artificial Sequence
  Description of Artificial Sequence: Synthetic oligonucleotide
  Sense strand starting at position 1458 of SEQ ID NO: 1888492
uucuuugcuccugaaggga

SEQ ID NO: 2537215 - RNA, 19 nt, Artificial Sequence
  Description of Artificial Sequence: Synthetic oligonucleotide
  Antisense strand to SEQ ID NO: 2537214
ucccuucaggagcaaagaa

SEQ ID NO: 2537216 - RNA, 19 nt, Artificial Sequence
  Description of Artificial Sequence: Synthetic oligonucleotide
  Sense strand starting at position 800 of SEQ ID NO: 1888492
acuagaaaccgucagcuaa

SEQ ID NO: 2537217 - RNA, 19 nt, Artificial Sequence
  Description of Artificial Sequence: Synthetic oligonucleotide
  Antisense strand to SEQ ID NO: 2537216
uuagcugacgguuucuagu

SEQ ID NO: 2537218 - RNA, 19 nt, Artificial Sequence
  Description of Artificial Sequence: Synthetic oligonucleotide
  Sense strand starting at position 750 of SEQ ID NO: 1888492
cauagaaaguccucagagu

SEQ ID NO: 2537219 - RNA, 19 nt, Artificial Sequence
  Description of Artificial Sequence: Synthetic oligonucleotide
  Antisense strand to SEQ ID NO: 2537218
acucugaggacuuucuaug

SEQ ID NO: 2537220 - RNA, 19 nt, Artificial Sequence
  Description of Artificial Sequence: Synthetic oligonucleotide
  Sense strand starting at position 3864 of SEQ ID NO: 1888492
ggucauuccaggugaagga

SEQ ID NO: 2537221 - RNA, 19 nt, Artificial Sequence
  Description of Artificial Sequence: Synthetic oligonucleotide
  Antisense strand to SEQ ID NO: 2537220
uccuucaccuggaaugacc

SEQ ID NO: 2537222 - RNA, 19 nt, Artificial Sequence
  Description of Artificial Sequence: Synthetic oligonucleotide
  Sense strand starting at position 3636 of SEQ ID NO: 1888492
gauaaucccggaugaucuu

SEQ ID NO: 2537223 - RNA, 19 nt, Artificial Sequence
  Description of Artificial Sequence: Synthetic oligonucleotide
  Antisense strand to SEQ ID NO: 2537222
aagaucauccgggauuauc

SEQ ID NO: 2537224 - RNA, 19 nt, Artificial Sequence
  Description of Artificial Sequence: Synthetic oligonucleotide
  Sense strand starting at position 3623 of SEQ ID NO: 1888492
uggagcuuacuuggauaau

SEQ ID NO: 2537225 - RNA, 19 nt, Artificial Sequence
  Description of Artificial Sequence: Synthetic oligonucleotide
  Antisense strand to SEQ ID NO: 2537224
auuauccaaguaagcucca

SEQ ID NO: 2537226 - RNA, 19 nt, Artificial Sequence
  Description of Artificial Sequence: Synthetic oligonucleotide
  Sense strand starting at position 3961 of SEQ ID NO: 1888492
gggagauucuggaggugag

SEQ ID NO: 2537227 - RNA, 19 nt, Artificial Sequence
  Description of Artificial Sequence: Synthetic oligonucleotide
  Antisense strand to SEQ ID NO: 2537226
cucaccuccagaaucuccc

SEQ ID NO: 2537228 - RNA, 19 nt, Artificial Sequence
  Description of Artificial Sequence: Synthetic oligonucleotide
  Sense strand starting at position 2228 of SEQ ID NO: 1888492
gugccucaucgcuugcuaa

SEQ ID NO: 2537229 - RNA, 19 nt, Artificial Sequence
  Description of Artificial Sequence: Synthetic oligonucleotide
  Antisense strand to SEQ ID NO: 2537228
uuagcaagcgaugaggcac

SEQ ID NO: 2537230 - RNA, 19 nt, Artificial Sequence
  Description of Artificial Sequence: Synthetic oligonucleotide
  Sense strand starting at position 176 of SEQ ID NO: 1888492
auaagagccugcuugagaa

SEQ ID NO: 2537231 - RNA, 19 nt, Artificial Sequence
  Description of Artificial Sequence: Synthetic oligonucleotide
  Antisense strand to SEQ ID NO: 2537230
uucucaagcaggcucuuau

SEQ ID NO: 2537232 - RNA, 19 nt, Artificial Sequence
  Description of Artificial Sequence: Synthetic oligonucleotide
  Sense strand starting at position 3242 of SEQ ID NO: 1888492
uggacacuguguccacaaa

SEQ ID NO: 2537233 - RNA, 19 nt, Artificial Sequence
  Description of Artificial Sequence: Synthetic oligonucleotide
  Antisense strand to SEQ ID NO: 2537232
uuuguggacacagugucca

SEQ ID NO: 2537234 - RNA, 19 nt, Artificial Sequence
  Description of Artificial Sequence: Synthetic oligonucleotide
  Sense strand starting at position 3621 of SEQ ID NO: 1888492
uuuggagcuuacuuggaua

SEQ ID NO: 2537235 - RNA, 19 nt, Artificial Sequence
  Description of Artificial Sequence: Synthetic oligonucleotide
  Antisense strand to SEQ ID NO: 2537234
uauccaaguaagcuccaaa

SEQ ID NO: 2537236 - RNA, 19 nt, Artificial Sequence
  Description of Artificial Sequence: Synthetic oligonucleotide
  Sense strand starting at position 173 of SEQ ID NO: 1888492
aagauaagagccugcuuga

SEQ ID NO: 2537237 - RNA, 19 nt, Artificial Sequence
  Description of Artificial Sequence: Synthetic oligonucleotide
  Antisense strand to SEQ ID NO: 2537236
ucaagcaggcucuuaucuu

SEQ ID NO: 2537238 - RNA, 19 nt, Artificial Sequence
  Description of Artificial Sequence: Synthetic oligonucleotide
  Sense strand starting at position 1002 of SEQ ID NO: 1888492
caguguuaagaucauagcu

SEQ ID NO: 2537239 - RNA, 19 nt, Artificial Sequence
  Description of Artificial Sequence: Synthetic oligonucleotide
  Antisense strand to SEQ ID NO: 2537238
agcuaugaucuuaacacug

SEQ ID NO: 2537240 - RNA, 19 nt, Artificial Sequence
  Description of Artificial Sequence: Synthetic oligonucleotide
  Sense strand starting at position 3104 of SEQ ID NO: 1888492
cuggcugacccuuggaaau

SEQ ID NO: 2537241 - RNA, 19 nt, Artificial Sequence
  Description of Artificial Sequence: Synthetic oligonucleotide
  Antisense strand to SEQ ID NO: 2537240
auuuccaagggucagccag

SEQ ID NO: 2537242 - RNA, 19 nt, Artificial Sequence
  Description of Artificial Sequence: Synthetic oligonucleotide
  Sense strand starting at position 1262 of SEQ ID NO: 1888492
cgcagcguaaucuuugcau

SEQ ID NO: 2537243 - RNA, 19 nt, Artificial Sequence
  Description of Artificial Sequence: Synthetic oligonucleotide
  Antisense strand to SEQ ID NO: 2537242
augcaaagauuacgcugcg

SEQ ID NO: 2537244 - RNA, 19 nt, Artificial Sequence
  Description of Artificial Sequence: Synthetic oligonucleotide
  Sense strand starting at position 3771 of SEQ ID NO: 1888492
gggucugcagguggaaaua

SEQ ID NO: 2537245 - RNA, 19 nt, Artificial Sequence
  Description of Artificial Sequence: Synthetic oligonucleotide
  Antisense strand to SEQ ID NO: 2537244
uauuuccaccugcagaccc

SEQ ID NO: 2537246 - RNA, 19 nt, Artificial Sequence
  Description of Artificial Sequence: Synthetic oligonucleotide
  Sense strand starting at position 3770 of SEQ ID NO: 1888492
agggucugcagguggaaau

SEQ ID NO: 2537247 - RNA, 19 nt, Artificial Sequence
  Description of Artificial Sequence: Synthetic oligonucleotide
  Antisense strand to SEQ ID NO: 2537246
auuuccaccugcagacccu

SEQ ID NO: 2537248 - RNA, 19 nt, Artificial Sequence
  Description of Artificial Sequence: Synthetic oligonucleotide
  Sense strand starting at position 891 of SEQ ID NO: 1888492
auguuaguagcugauucua

SEQ ID NO: 2537249 - RNA, 19 nt, Artificial Sequence
  Description of Artificial Sequence: Synthetic oligonucleotide
  Antisense strand to SEQ ID NO: 2537248
uagaaucagcuacuaacau

SEQ ID NO: 2537250 - RNA, 19 nt, Artificial Sequence
  Description of Artificial Sequence: Synthetic oligonucleotide
  Sense strand starting at position 2880 of SEQ ID NO: 1888492
uggcgugaccuuuacaaau

SEQ ID NO: 2537251 - RNA, 19 nt, Artificial Sequence
  Description of Artificial Sequence: Synthetic oligonucleotide
  Antisense strand to SEQ ID NO: 2537250
auuuguaaaggucacgcca

SEQ ID NO: 2537252 - RNA, 19 nt, Artificial Sequence
  Description of Artificial Sequence: Synthetic oligonucleotide
  Sense strand starting at position 237 of SEQ ID NO: 1888492
uuugaagccucuuccauga

SEQ ID NO: 2537253 - RNA, 19 nt, Artificial Sequence
  Description of Artificial Sequence: Synthetic oligonucleotide
  Antisense strand to SEQ ID NO: 2537252
ucauggaagaggcuucaaa

SEQ ID NO: 2537254 - RNA, 19 nt, Artificial Sequence
  Description of Artificial Sequence: Synthetic oligonucleotide
  Sense strand starting at position 289 of SEQ ID NO: 1888492
cucuuugcacuccauagua

SEQ ID NO: 2537255 - RNA, 19 nt, Artificial Sequence
  Description of Artificial Sequence: Synthetic oligonucleotide
  Antisense strand to SEQ ID NO: 2537254
uacuauggagugcaaagag

SEQ ID NO: 2537256 - RNA, 19 nt, Artificial Sequence
  Description of Artificial Sequence: Synthetic oligonucleotide
  Sense strand starting at position 3672 of SEQ ID NO: 1888492
uuaauuacgucugugaaga

SEQ ID NO: 2537257 - RNA, 19 nt, Artificial Sequence
  Description of Artificial Sequence: Synthetic oligonucleotide
  Antisense strand to SEQ ID NO: 2537256
ucuucacagacguaauuaa

SEQ ID NO: 2537258 - RNA, 19 nt, Artificial Sequence
  Description of Artificial Sequence: Synthetic oligonucleotide
  Sense strand starting at position 1522 of SEQ ID NO: 1888492
cuaccaucucagugacagu

SEQ ID NO: 2537259 - RNA, 19 nt, Artificial Sequence
  Description of Artificial Sequence: Synthetic oligonucleotide
  Antisense strand to SEQ ID NO: 2537258
acugucacugagaugguag

SEQ ID NO: 2537260 - RNA, 19 nt, Artificial Sequence
  Description of Artificial Sequence: Synthetic oligonucleotide
  Sense strand starting at position 3217 of SEQ ID NO: 1888492
ggacuuucugagggcugua

SEQ ID NO: 2537261 - RNA, 19 nt, Artificial Sequence
  Description of Artificial Sequence: Synthetic oligonucleotide
  Antisense strand to SEQ ID NO: 2537260
uacagcccucagaaagucc

SEQ ID NO: 2537262 - RNA, 19 nt, Artificial Sequence
  Description of Artificial Sequence: Synthetic oligonucleotide
  Sense strand starting at position 1347 of SEQ ID NO: 1888492
guuuacaaguggcugaaua

SEQ ID NO: 2537263 - RNA, 19 nt, Artificial Sequence
  Description of Artificial Sequence: Synthetic oligonucleotide
  Antisense strand to SEQ ID NO: 2537262
uauucagccacuuguaaac

SEQ ID NO: 2537264 - RNA, 19 nt, Artificial Sequence
  Description of Artificial Sequence: Synthetic oligonucleotide
  Sense strand starting at position 3673 of SEQ ID NO: 1888492
uaauuacgucugugaagac

SEQ ID NO: 2537265 - RNA, 19 nt, Artificial Sequence
  Description of Artificial Sequence: Synthetic oligonucleotide
  Antisense strand to SEQ ID NO: 2537264
gucuucacagacguaauua

SEQ ID NO: 2537266 - RNA, 19 nt, Artificial Sequence
  Description of Artificial Sequence: Synthetic oligonucleotide
  Sense strand starting at position 709 of SEQ ID NO: 1888492
ucuuaucugucuuuauaug

SEQ ID NO: 2537267 - RNA, 19 nt, Artificial Sequence
  Description of Artificial Sequence: Synthetic oligonucleotide
  Antisense strand to SEQ ID NO: 2537266
cauauaaagacagauaaga

SEQ ID NO: 2537268 - RNA, 19 nt, Artificial Sequence
  Description of Artificial Sequence: Synthetic oligonucleotide
  Sense strand starting at position 734 of SEQ ID NO: 1888492
uuagcagugccuuacacau

SEQ ID NO: 2537269 - RNA, 19 nt, Artificial Sequence
  Description of Artificial Sequence: Synthetic oligonucleotide
  Antisense strand to SEQ ID NO: 2537268
auguguaaggcacugcuaa

SEQ ID NO: 2537270 - RNA, 19 nt, Artificial Sequence
  Description of Artificial Sequence: Synthetic oligonucleotide
  Sense strand starting at position 1558 of SEQ ID NO: 1888492
gcaggaaagugcccauauu

SEQ ID NO: 2537271 - RNA, 19 nt, Artificial Sequence
  Description of Artificial Sequence: Synthetic oligonucleotide
  Antisense strand to SEQ ID NO: 2537270
aauaugggcacuuuccugc

SEQ ID NO: 2537272 - RNA, 19 nt, Artificial Sequence
  Description of Artificial Sequence: Synthetic oligonucleotide
  Sense strand starting at position 893 of SEQ ID NO: 1888492
guuaguagcugauucuaga

SEQ ID NO: 2537273 - RNA, 19 nt, Artificial Sequence
  Description of Artificial Sequence: Synthetic oligonucleotide
  Antisense strand to SEQ ID NO: 2537272
ucuagaaucagcuacuaac

SEQ ID NO: 2537274 - RNA, 19 nt, Artificial Sequence
  Description of Artificial Sequence: Synthetic oligonucleotide
  Sense strand starting at position 3671 of SEQ ID NO: 1888492
cuuaauuacgucugugaag

SEQ ID NO: 2537275 - RNA, 19 nt, Artificial Sequence
  Description of Artificial Sequence: Synthetic oligonucleotide
  Antisense strand to SEQ ID NO: 2537274
cuucacagacguaauuaag

SEQ ID NO: 2537276 - RNA, 19 nt, Artificial Sequence
  Description of Artificial Sequence: Synthetic oligonucleotide
  Sense strand starting at position 707 of SEQ ID NO: 1888492
ggucuuaucugucuuuaua

SEQ ID NO: 2537277 - RNA, 19 nt, Artificial Sequence
  Description of Artificial Sequence: Synthetic oligonucleotide
  Antisense strand to SEQ ID NO: 2537276
uauaaagacagauaagacc

SEQ ID NO: 2537278 - RNA, 19 nt, Artificial Sequence
  Description of Artificial Sequence: Synthetic oligonucleotide
  Sense strand starting at position 3120 of SEQ ID NO: 1888492
aauagaggcugucugcauu

SEQ ID NO: 2537279 - RNA, 19 nt, Artificial Sequence
  Description of Artificial Sequence: Synthetic oligonucleotide
  Antisense strand to SEQ ID NO: 2537278
aaugcagacagccucuauu

SEQ ID NO: 2537280 - RNA, 19 nt, Artificial Sequence
  Description of Artificial Sequence: Synthetic oligonucleotide
  Sense strand starting at position 1308 of SEQ ID NO: 1888492
gccuccagcgacuaaguua

SEQ ID NO: 2537281 - RNA, 19 nt, Artificial Sequence
  Description of Artificial Sequence: Synthetic oligonucleotide
  Antisense strand to SEQ ID NO: 2537280
uaacuuagucgcuggaggc

SEQ ID NO: 2537282 - RNA, 19 nt, Artificial Sequence
  Description of Artificial Sequence: Synthetic oligonucleotide
  Sense strand starting at position 721 of SEQ ID NO: 1888492
uuauauggcucucuuagca

SEQ ID NO: 2537283 - RNA, 19 nt, Artificial Sequence
  Description of Artificial Sequence: Synthetic oligonucleotide
  Antisense strand to SEQ ID NO: 2537282
ugcuaagagagccauauaa

SEQ ID NO: 2537284 - RNA, 19 nt, Artificial Sequence
  Description of Artificial Sequence: Synthetic oligonucleotide
  Sense strand starting at position 2615 of SEQ ID NO: 1888493
uggucugguccagauacca

SEQ ID NO: 2537285 - RNA, 19 nt, Artificial Sequence
  Description of Artificial Sequence: Synthetic oligonucleotide
  Antisense strand to SEQ ID NO: 2537284
ugguaucuggaccagacca

SEQ ID NO: 2537286 - RNA, 19 nt, Artificial Sequence
  Description of Artificial Sequence: Synthetic oligonucleotide
  Sense strand starting at position 525 of SEQ ID NO: 1888493
ugagucuuuaguggagaaa

SEQ ID NO: 2537287 - RNA, 19 nt, Artificial Sequence
  Description of Artificial Sequence: Synthetic oligonucleotide
  Antisense strand to SEQ ID NO: 2537286
uuucuccacuaaagacuca

SEQ ID NO: 2537288 - RNA, 19 nt, Artificial Sequence
  Description of Artificial Sequence: Synthetic oligonucleotide
  Sense strand starting at position 1441 of SEQ ID NO: 1888493
gaaagagucuuacauuuga

SEQ ID NO: 2537289 - RNA, 19 nt, Artificial Sequence
  Description of Artificial Sequence: Synthetic oligonucleotide
  Antisense strand to SEQ ID NO: 2537288
ucaaauguaagacucuuuc

SEQ ID NO: 2537290 - RNA, 19 nt, Artificial Sequence
  Description of Artificial Sequence: Synthetic oligonucleotide
  Sense strand starting at position 509 of SEQ ID NO: 1888493
gagagcuccgcagacauga

SEQ ID NO: 2537291 - RNA, 19 nt, Artificial Sequence
  Description of Artificial Sequence: Synthetic oligonucleotide
  Antisense strand to SEQ ID NO: 2537290
ucaugucugcggagcucuc

SEQ ID NO: 2537292 - RNA, 19 nt, Artificial Sequence
  Description of Artificial Sequence: Synthetic oligonucleotide
  Sense strand starting at position 507 of SEQ ID NO: 1888493
gggagagcuccgcagacau

SEQ ID NO: 2537293 - RNA, 19 nt, Artificial Sequence
  Description of Artificial Sequence: Synthetic oligonucleotide
  Antisense strand to SEQ ID NO: 2537292
augucugcggagcucuccc

SEQ ID NO: 2537294 - RNA, 19 nt, Artificial Sequence
  Description of Artificial Sequence: Synthetic oligonucleotide
  Sense strand starting at position 2581 of SEQ ID NO: 1888493
ugaagucucacuugaggug

SEQ ID NO: 2537295 - RNA, 19 nt, Artificial Sequence
  Description of Artificial Sequence: Synthetic oligonucleotide
  Antisense strand to SEQ ID NO: 2537294
caccucaagugagacuuca

SEQ ID NO: 2537296 - RNA, 19 nt, Artificial Sequence
  Description of Artificial Sequence: Synthetic oligonucleotide
  Sense strand starting at position 2054 of SEQ ID NO: 1888493
cugcucuguggugaacaga

SEQ ID NO: 2537297 - RNA, 19 nt, Artificial Sequence
  Description of Artificial Sequence: Synthetic oligonucleotide
  Antisense strand to SEQ ID NO: 2537296
ucuguucaccacagagcag

SEQ ID NO: 2537298 - RNA, 19 nt, Artificial Sequence
  Description of Artificial Sequence: Synthetic oligonucleotide
  Sense strand starting at position 1439 of SEQ ID NO: 1888493
cggaaagagucuuacauuu

SEQ ID NO: 2537299 - RNA, 19 nt, Artificial Sequence
  Description of Artificial Sequence: Synthetic oligonucleotide
  Antisense strand to SEQ ID NO: 2537298
aaauguaagacucuuuccg

SEQ ID NO: 2537300 - RNA, 19 nt, Artificial Sequence
  Description of Artificial Sequence: Synthetic oligonucleotide
  Sense strand starting at position 2556 of SEQ ID NO: 1888493
uccaguuuccucuggaagu

SEQ ID NO: 2537301 - RNA, 19 nt, Artificial Sequence
  Description of Artificial Sequence: Synthetic oligonucleotide
  Antisense strand to SEQ ID NO: 2537300
acuuccagaggaaacugga

SEQ ID NO: 2537302 - RNA, 19 nt, Artificial Sequence
  Description of Artificial Sequence: Synthetic oligonucleotide
  Sense strand starting at position 577 of SEQ ID NO: 1888493
cccacuucuggcuggagua

SEQ ID NO: 2537303 - RNA, 19 nt, Artificial Sequence
  Description of Artificial Sequence: Synthetic oligonucleotide
  Antisense strand to SEQ ID NO: 2537302
uacuccagccagaaguggg

SEQ ID NO: 2537304 - RNA, 19 nt, Artificial Sequence
  Description of Artificial Sequence: Synthetic oligonucleotide
  Sense strand starting at position 1605 of SEQ ID NO: 1888493
cugccuugcccaggaaauc

SEQ ID NO: 2537305 - RNA, 19 nt, Artificial Sequence
  Description of Artificial Sequence: Synthetic oligonucleotide
  Antisense strand to SEQ ID NO: 2537304
gauuuccugggcaaggcag

SEQ ID NO: 2537306 - RNA, 19 nt, Artificial Sequence
  Description of Artificial Sequence: Synthetic oligonucleotide
  Sense strand starting at position 2050 of SEQ ID NO: 1888493
aacccugcucuguggugaa

SEQ ID NO: 2537307 - RNA, 19 nt, Artificial Sequence
  Description of Artificial Sequence: Synthetic oligonucleotide
  Antisense strand to SEQ ID NO: 2537306
uucaccacagagcaggguu

SEQ ID NO: 2537308 - RNA, 19 nt, Artificial Sequence
  Description of Artificial Sequence: Synthetic oligonucleotide
  Sense strand starting at position 1557 of SEQ ID NO: 1888493
uggaguuccucugcccgaa

SEQ ID NO: 2537309 - RNA, 19 nt, Artificial Sequence
  Description of Artificial Sequence: Synthetic oligonucleotide
  Antisense strand to SEQ ID NO: 2537308
uucgggcagaggaacucca

SEQ ID NO: 2537310 - RNA, 19 nt, Artificial Sequence
  Description of Artificial Sequence: Synthetic oligonucleotide
  Sense strand starting at position 796 of SEQ ID NO: 1888493
ggguaacuugcaugcccua

SEQ ID NO: 2537311 - RNA, 19 nt, Artificial Sequence
  Description of Artificial Sequence: Synthetic oligonucleotide
  Antisense strand to SEQ ID NO: 2537310
uagggcaugcaaguuaccc

SEQ ID NO: 2537312 - RNA, 19 nt, Artificial Sequence
  Description of Artificial Sequence: Synthetic oligonucleotide
  Sense strand starting at position 3206 of SEQ ID NO: 1888493
ugcuauuccuugcccauga

SEQ ID NO: 2537313 - RNA, 19 nt, Artificial Sequence
  Description of Artificial Sequence: Synthetic oligonucleotide
  Antisense strand to SEQ ID NO: 2537312
ucaugggcaaggaauagca

SEQ ID NO: 2537314 - RNA, 19 nt, Artificial Sequence
  Description of Artificial Sequence: Synthetic oligonucleotide
  Sense strand starting at position 1056 of SEQ ID NO: 1888493
ccgagcggguucuuggaua

SEQ ID NO: 2537315 - RNA, 19 nt, Artificial Sequence
  Description of Artificial Sequence: Synthetic oligonucleotide
  Antisense strand to SEQ ID NO: 2537314
uauccaagaacccgcucgg

SEQ ID NO: 2537316 - RNA, 19 nt, Artificial Sequence
  Description of Artificial Sequence: Synthetic oligonucleotide
  Sense strand starting at position 1473 of SEQ ID NO: 1888493
gcgugagccugaucccaga

SEQ ID NO: 2537317 - RNA, 19 nt, Artificial Sequence
  Description of Artificial Sequence: Synthetic oligonucleotide
  Antisense strand to SEQ ID NO: 2537316
ucugggaucaggcucacgc

SEQ ID NO: 2537318 - RNA, 19 nt, Artificial Sequence
  Description of Artificial Sequence: Synthetic oligonucleotide
  Sense strand starting at position 3203 of SEQ ID NO: 1888493
gagugcuauuccuugccca

SEQ ID NO: 2537319 - RNA, 19 nt, Artificial Sequence
  Description of Artificial Sequence: Synthetic oligonucleotide
  Antisense strand to SEQ ID NO: 2537318
ugggcaaggaauagcacuc

SEQ ID NO: 2537320 - RNA, 19 nt, Artificial Sequence
  Description of Artificial Sequence: Synthetic oligonucleotide
  Sense strand starting at position 3204 of SEQ ID NO: 1888493
agugcuauuccuugcccau

SEQ ID NO: 2537321 - RNA, 19 nt, Artificial Sequence
  Description of Artificial Sequence: Synthetic oligonucleotide
  Antisense strand to SEQ ID NO: 2537320
augggcaaggaauagcacu

SEQ ID NO: 2537322 - RNA, 19 nt, Artificial Sequence
  Description of Artificial Sequence: Synthetic oligonucleotide
  Sense strand starting at position 2506 of SEQ ID NO: 1888493
agcugccuuguuugcaaau

SEQ ID NO: 2537323 - RNA, 19 nt, Artificial Sequence
  Description of Artificial Sequence: Synthetic oligonucleotide
  Antisense strand to SEQ ID NO: 2537322
auuugcaaacaaggcagcu

SEQ ID NO: 2537324 - RNA, 19 nt, Artificial Sequence
  Description of Artificial Sequence: Synthetic oligonucleotide
  Sense strand starting at position 2500 of SEQ ID NO: 1888493
ggcauaagcugccuuguuu

SEQ ID NO: 2537325 - RNA, 19 nt, Artificial Sequence
  Description of Artificial Sequence: Synthetic oligonucleotide
  Antisense strand to SEQ ID NO: 2537324
aaacaaggcagcuuaugcc

SEQ ID NO: 2537326 - RNA, 19 nt, Artificial Sequence
  Description of Artificial Sequence: Synthetic oligonucleotide
  Sense strand starting at position 3098 of SEQ ID NO: 1888493
cggccuacugugugcuaga

SEQ ID NO: 2537327 - RNA, 19 nt, Artificial Sequence
  Description of Artificial Sequence: Synthetic oligonucleotide
  Antisense strand to SEQ ID NO: 2537326
ucuagcacacaguaggccg

SEQ ID NO: 2537328 - RNA, 19 nt, Artificial Sequence
  Description of Artificial Sequence: Synthetic oligonucleotide
  Sense strand starting at position 524 of SEQ ID NO: 1888493
augagucuuuaguggagaa

SEQ ID NO: 2537329 - RNA, 19 nt, Artificial Sequence
  Description of Artificial Sequence: Synthetic oligonucleotide
  Antisense strand to SEQ ID NO: 2537328
uucuccacuaaagacucau

SEQ ID NO: 2537330 - RNA, 19 nt, Artificial Sequence
  Description of Artificial Sequence: Synthetic oligonucleotide
  Sense strand starting at position 291 of SEQ ID NO: 1888493
gcugauggguaucagguaa

SEQ ID NO: 2537331 - RNA, 19 nt, Artificial Sequence
  Description of Artificial Sequence: Synthetic oligonucleotide
  Antisense strand to SEQ ID NO: 2537330
uuaccugauacccaucagc

SEQ ID NO: 2537332 - RNA, 19 nt, Artificial Sequence
  Description of Artificial Sequence: Synthetic oligonucleotide
  Sense strand starting at position 1696 of SEQ ID NO: 1888493
ccuccauucucccgggaga

SEQ ID NO: 2537333 - RNA, 19 nt, Artificial Sequence
  Description of Artificial Sequence: Synthetic oligonucleotide
  Antisense strand to SEQ ID NO: 2537332
ucucccgggagaauggagg

SEQ ID NO: 2537334 - RNA, 19 nt, Artificial Sequence
  Description of Artificial Sequence: Synthetic oligonucleotide
  Sense strand starting at position 2508 of SEQ ID NO: 1888493
cugccuuguuugcaaauga

SEQ ID NO: 2537335 - RNA, 19 nt, Artificial Sequence
  Description of Artificial Sequence: Synthetic oligonucleotide
  Antisense strand to SEQ ID NO: 2537334
ucauuugcaaacaaggcag

SEQ ID NO: 2537336 - RNA, 19 nt, Artificial Sequence
  Description of Artificial Sequence: Synthetic oligonucleotide
  Sense strand starting at position 2557 of SEQ ID NO: 1888493
ccaguuuccucuggaaguu

SEQ ID NO: 2537337 - RNA, 19 nt, Artificial Sequence
  Description of Artificial Sequence: Synthetic oligonucleotide
  Antisense strand to SEQ ID NO: 2537336
aacuuccagaggaaacugg

SEQ ID NO: 2537338 - RNA, 19 nt, Artificial Sequence
  Description of Artificial Sequence: Synthetic oligonucleotide
  Sense strand starting at position 920 of SEQ ID NO: 1888493
caagaaggguccugcuguu

SEQ ID NO: 2537339 - RNA, 19 nt, Artificial Sequence
  Description of Artificial Sequence: Synthetic oligonucleotide
  Antisense strand to SEQ ID NO: 2537338
aacagcaggacccuucuug

SEQ ID NO: 2537340 - RNA, 19 nt, Artificial Sequence
  Description of Artificial Sequence: Synthetic oligonucleotide
  Sense strand starting at position 1037 of SEQ ID NO: 1888493
gcggcagcguauuaacauu

SEQ ID NO: 2537341 - RNA, 19 nt, Artificial Sequence
  Description of Artificial Sequence: Synthetic oligonucleotide
  Antisense strand to SEQ ID NO: 2537340
aauguuaauacgcugccgc

SEQ ID NO: 2537342 - RNA, 19 nt, Artificial Sequence
  Description of Artificial Sequence: Synthetic oligonucleotide
  Sense strand starting at position 1142 of SEQ ID NO: 1888494
ggucuaucauuugcccuaa

SEQ ID NO: 2537343 - RNA, 19 nt, Artificial Sequence
  Description of Artificial Sequence: Synthetic oligonucleotide
  Antisense strand to SEQ ID NO: 2537342
uuagggcaaaugauagacc

SEQ ID NO: 2537344 - RNA, 19 nt, Artificial Sequence
  Description of Artificial Sequence: Synthetic oligonucleotide
  Sense strand starting at position 2868 of SEQ ID NO: 1888494
auuacauuagagcaauagu

SEQ ID NO: 2537345 - RNA, 19 nt, Artificial Sequence
  Description of Artificial Sequence: Synthetic oligonucleotide
  Antisense strand to SEQ ID NO: 2537344
acuauugcucuaauguaau

SEQ ID NO: 2537346 - RNA, 19 nt, Artificial Sequence
  Description of Artificial Sequence: Synthetic oligonucleotide
  Sense strand starting at position 2871 of SEQ ID NO: 1888494
acauuagagcaauaguuua

SEQ ID NO: 2537347 - RNA, 19 nt, Artificial Sequence
  Description of Artificial Sequence: Synthetic oligonucleotide
  Antisense strand to SEQ ID NO: 2537346
uaaacuauugcucuaaugu

SEQ ID NO: 2537348 - RNA, 19 nt, Artificial Sequence
  Description of Artificial Sequence: Synthetic oligonucleotide
  Sense strand starting at position 2830 of SEQ ID NO: 1888494
guagaugacugaucuacaa

SEQ ID NO: 2537349 - RNA, 19 nt, Artificial Sequence
  Description of Artificial Sequence: Synthetic oligonucleotide
  Antisense strand to SEQ ID NO: 2537348
uuguagaucagucaucuac

SEQ ID NO: 2537350 - RNA, 19 nt, Artificial Sequence
  Description of Artificial Sequence: Synthetic oligonucleotide
  Sense strand starting at position 670 of SEQ ID NO: 1888494
aguucuugugaggacagau

SEQ ID NO: 2537351 - RNA, 19 nt, Artificial Sequence
  Description of Artificial Sequence: Synthetic oligonucleotide
  Antisense strand to SEQ ID NO: 2537350
aucuguccucacaagaacu

SEQ ID NO: 2537352 - RNA, 19 nt, Artificial Sequence
  Description of Artificial Sequence: Synthetic oligonucleotide
  Sense strand starting at position 2760 of SEQ ID NO: 1888494
acaaacugugaguaauagu

SEQ ID NO: 2537353 - RNA, 19 nt, Artificial Sequence
  Description of Artificial Sequence: Synthetic oligonucleotide
  Antisense strand to SEQ ID NO: 2537352
acuauuacucacaguuugu

SEQ ID NO: 2537354 - RNA, 19 nt, Artificial Sequence
  Description of Artificial Sequence: Synthetic oligonucleotide
  Sense strand starting at position 209 of SEQ ID NO: 1888494
gucguucccaaaugauuug

SEQ ID NO: 2537355 - RNA, 19 nt, Artificial Sequence
  Description of Artificial Sequence: Synthetic oligonucleotide
  Antisense strand to SEQ ID NO: 2537354
caaaucauuugggaacgac

SEQ ID NO: 2537356 - RNA, 19 nt, Artificial Sequence
  Description of Artificial Sequence: Synthetic oligonucleotide
  Sense strand starting at position 1134 of SEQ ID NO: 1888494
guugaaagggucuaucauu

SEQ ID NO: 2537357 - RNA, 19 nt, Artificial Sequence
  Description of Artificial Sequence: Synthetic oligonucleotide
  Antisense strand to SEQ ID NO: 2537356
aaugauagacccuuucaac

SEQ ID NO: 2537358 - RNA, 19 nt, Artificial Sequence
  Description of Artificial Sequence: Synthetic oligonucleotide
  Sense strand starting at position 2954 of SEQ ID NO: 1888494
cccugagaugcucacaauc

SEQ ID NO: 2537359 - RNA, 19 nt, Artificial Sequence
  Description of Artificial Sequence: Synthetic oligonucleotide
  Antisense strand to SEQ ID NO: 2537358
gauugugagcaucucaggg

SEQ ID NO: 2537360 - RNA, 19 nt, Artificial Sequence
  Description of Artificial Sequence: Synthetic oligonucleotide
  Sense strand starting at position 139 of SEQ ID NO: 1888494
gcaaaugauuuacacagaa

SEQ ID NO: 2537361 - RNA, 19 nt, Artificial Sequence
  Description of Artificial Sequence: Synthetic oligonucleotide
  Antisense strand to SEQ ID NO: 2537360
uucuguguaaaucauuugc

SEQ ID NO: 2537362 - RNA, 19 nt, Artificial Sequence
  Description of Artificial Sequence: Synthetic oligonucleotide
  Sense strand starting at position 354 of SEQ ID NO: 1888494
gcacuuuauggucaauaca

SEQ ID NO: 2537363 - RNA, 19 nt, Artificial Sequence
  Description of Artificial Sequence: Synthetic oligonucleotide
  Antisense strand to SEQ ID NO: 2537362
uguauugaccauaaagugc

SEQ ID NO: 2537364 - RNA, 19 nt, Artificial Sequence
  Description of Artificial Sequence: Synthetic oligonucleotide
  Sense strand starting at position 428 of SEQ ID NO: 1888494
auagccaguccuggaagaa

SEQ ID NO: 2537365 - RNA, 19 nt, Artificial Sequence
  Description of Artificial Sequence: Synthetic oligonucleotide
  Antisense strand to SEQ ID NO: 2537364
uucuuccaggacuggcuau

SEQ ID NO: 2537366 - RNA, 19 nt, Artificial Sequence
  Description of Artificial Sequence: Synthetic oligonucleotide
  Sense strand starting at position 2827 of SEQ ID NO: 1888494
gacguagaugacugaucua

SEQ ID NO: 2537367 - RNA, 19 nt, Artificial Sequence
  Description of Artificial Sequence: Synthetic oligonucleotide
  Antisense strand to SEQ ID NO: 2537366
uagaucagucaucuacguc

SEQ ID NO: 2537368 - RNA, 19 nt, Artificial Sequence
  Description of Artificial Sequence: Synthetic oligonucleotide
  Sense strand starting at position 2804 of SEQ ID NO: 1888494
gucagaguucucuagguaa

SEQ ID NO: 2537369 - RNA, 19 nt, Artificial Sequence
  Description of Artificial Sequence: Synthetic oligonucleotide
  Antisense strand to SEQ ID NO: 2537368
uuaccuagagaacucugac

SEQ ID NO: 2537370 - RNA, 19 nt, Artificial Sequence
  Description of Artificial Sequence: Synthetic oligonucleotide
  Sense strand starting at position 2737 of SEQ ID NO: 1888494
uguugaaauuuggagauac

SEQ ID NO: 2537371 - RNA, 19 nt, Artificial Sequence
  Description of Artificial Sequence: Synthetic oligonucleotide
  Antisense strand to SEQ ID NO: 2537370
guaucuccaaauuucaaca

SEQ ID NO: 2537372 - RNA, 19 nt, Artificial Sequence
  Description of Artificial Sequence: Synthetic oligonucleotide
  Sense strand starting at position 2997 of SEQ ID NO: 1888494
auaaguguuccucaagcaa

SEQ ID NO: 2537373 - RNA, 19 nt, Artificial Sequence
  Description of Artificial Sequence: Synthetic oligonucleotide
  Antisense strand to SEQ ID NO: 2537372
uugcuugaggaacacuuau

SEQ ID NO: 2537374 - RNA, 19 nt, Artificial Sequence
  Description of Artificial Sequence: Synthetic oligonucleotide
  Sense strand starting at position 2769 of SEQ ID NO: 1888494
gaguaauagugucuaaaug

SEQ ID NO: 2537375 - RNA, 19 nt, Artificial Sequence
  Description of Artificial Sequence: Synthetic oligonucleotide
  Antisense strand to SEQ ID NO: 2537374
cauuuagacacuauuacuc

SEQ ID NO: 2537376 - RNA, 19 nt, Artificial Sequence
  Description of Artificial Sequence: Synthetic oligonucleotide
  Sense strand starting at position 3887 of SEQ ID NO: 1888494
caguguuugcagucgccau

SEQ ID NO: 2537377 - RNA, 19 nt, Artificial Sequence
  Description of Artificial Sequence: Synthetic oligonucleotide
  Antisense strand to SEQ ID NO: 2537376
auggcgacugcaaacacug

SEQ ID NO: 2537378 - RNA, 19 nt, Artificial Sequence
  Description of Artificial Sequence: Synthetic oligonucleotide
  Sense strand starting at position 1159 of SEQ ID NO: 1888494
aaggucuaacugugguaaa

SEQ ID NO: 2537379 - RNA, 19 nt, Artificial Sequence
  Description of Artificial Sequence: Synthetic oligonucleotide
  Antisense strand to SEQ ID NO: 2537378
uuuaccacaguuagaccuu

SEQ ID NO: 2537380 - RNA, 19 nt, Artificial Sequence
  Description of Artificial Sequence: Synthetic oligonucleotide
  Sense strand starting at position 2446 of SEQ ID NO: 1888494
ucucuugaucucgagaugu

SEQ ID NO: 2537381 - RNA, 19 nt, Artificial Sequence
  Description of Artificial Sequence: Synthetic oligonucleotide
  Antisense strand to SEQ ID NO: 2537380
acaucucgagaucaagaga

SEQ ID NO: 2537382 - RNA, 19 nt, Artificial Sequence
  Description of Artificial Sequence: Synthetic oligonucleotide
  Sense strand starting at position 653 of SEQ ID NO: 1888494
auuucuaugucucaaagag

SEQ ID NO: 2537383 - RNA, 19 nt, Artificial Sequence
  Description of Artificial Sequence: Synthetic oligonucleotide
  Antisense strand to SEQ ID NO: 2537382
cucuuugagacauagaaau

SEQ ID NO: 2537384 - RNA, 19 nt, Artificial Sequence
  Description of Artificial Sequence: Synthetic oligonucleotide
  Sense strand starting at position 3909 of SEQ ID NO: 1888494
gagguuuaucauuguacua

SEQ ID NO: 2537385 - RNA, 19 nt, Artificial Sequence
  Description of Artificial Sequence: Synthetic oligonucleotide
  Antisense strand to SEQ ID NO: 2537384
uaguacaaugauaaaccuc

SEQ ID NO: 2537386 - RNA, 19 nt, Artificial Sequence
  Description of Artificial Sequence: Synthetic oligonucleotide
  Sense strand starting at position 2806 of SEQ ID NO: 1888494
cagaguucucuagguaacc

SEQ ID NO: 2537387 - RNA, 19 nt, Artificial Sequence
  Description of Artificial Sequence: Synthetic oligonucleotide
  Antisense strand to SEQ ID NO: 2537386
gguuaccuagagaacucug

SEQ ID NO: 2537388 - RNA, 19 nt, Artificial Sequence
  Description of Artificial Sequence: Synthetic oligonucleotide
  Sense strand starting at position 2569 of SEQ ID NO: 1888494
gcagauaccuuagcaaauc

SEQ ID NO: 2537389 - RNA, 19 nt, Artificial Sequence
  Description of Artificial Sequence: Synthetic oligonucleotide
  Antisense strand to SEQ ID NO: 2537388
gauuugcuaagguaucugc

SEQ ID NO: 2537390 - RNA, 19 nt, Artificial Sequence
  Description of Artificial Sequence: Synthetic oligonucleotide
  Sense strand starting at position 587 of SEQ ID NO: 1888494
ugcuaugugaccuggaaua

SEQ ID NO: 2537391 - RNA, 19 nt, Artificial Sequence
  Description of Artificial Sequence: Synthetic oligonucleotide
  Antisense strand to SEQ ID NO: 2537390
uauuccaggucacauagca

SEQ ID NO: 2537392 - RNA, 19 nt, Artificial Sequence
  Description of Artificial Sequence: Synthetic oligonucleotide
  Sense strand starting at position 353 of SEQ ID NO: 1888494
agcacuuuauggucaauac

SEQ ID NO: 2537393 - RNA, 19 nt, Artificial Sequence
  Description of Artificial Sequence: Synthetic oligonucleotide
  Antisense strand to SEQ ID NO: 2537392
guauugaccauaaagugcu

SEQ ID NO: 2537394 - RNA, 19 nt, Artificial Sequence
  Description of Artificial Sequence: Synthetic oligonucleotide
  Sense strand starting at position 2644 of SEQ ID NO: 1888494
uguagauauagauguugua

SEQ ID NO: 2537395 - RNA, 19 nt, Artificial Sequence
  Description of Artificial Sequence: Synthetic oligonucleotide
  Antisense strand to SEQ ID NO: 2537394
uacaacaucuauaucuaca

SEQ ID NO: 2537396 - RNA, 19 nt, Artificial Sequence
  Description of Artificial Sequence: Synthetic oligonucleotide
  Sense strand starting at position 646 of SEQ ID NO: 1888494
gggaacaauuucuaugucu

SEQ ID NO: 2537397 - RNA, 19 nt, Artificial Sequence
  Description of Artificial Sequence: Synthetic oligonucleotide
  Antisense strand to SEQ ID NO: 2537396
agacauagaaauuguuccc

SEQ ID NO: 2537398 - RNA, 19 nt, Artificial Sequence
  Description of Artificial Sequence: Synthetic oligonucleotide
  Sense strand starting at position 494 of SEQ ID NO: 1888494
ucacccaugcauuguagaa

SEQ ID NO: 2537399 - RNA, 19 nt, Artificial Sequence
  Description of Artificial Sequence: Synthetic oligonucleotide
  Antisense strand to SEQ ID NO: 2537398
uucuacaaugcauggguga

SEQ ID NO: 2537400 - RNA, 19 nt, Artificial Sequence
  Description of Artificial Sequence: Synthetic oligonucleotide
  Sense strand starting at position 550 of SEQ ID NO: 1888494
cgggcugacccggauucua

SEQ ID NO: 2537401 - RNA, 19 nt, Artificial Sequence
  Description of Artificial Sequence: Synthetic oligonucleotide
  Antisense strand to SEQ ID NO: 2537400
uagaauccgggucagcccg

SEQ ID NO: 2537402 - RNA, 19 nt, Artificial Sequence
  Description of Artificial Sequence: Synthetic oligonucleotide
  Sense strand starting at position 3908 of SEQ ID NO: 1888494
ugagguuuaucauuguacu

SEQ ID NO: 2537403 - RNA, 19 nt, Artificial Sequence
  Description of Artificial Sequence: Synthetic oligonucleotide
  Antisense strand to SEQ ID NO: 2537402
aguacaaugauaaaccuca

SEQ ID NO: 2537404 - RNA, 19 nt, Artificial Sequence
  Description of Artificial Sequence: Synthetic oligonucleotide
  Sense strand starting at position 585 of SEQ ID NO: 1888494
cuugcuaugugaccuggaa

SEQ ID NO: 2537405 - RNA, 19 nt, Artificial Sequence
  Description of Artificial Sequence: Synthetic oligonucleotide
  Antisense strand to SEQ ID NO: 2537404
uuccaggucacauagcaag

SEQ ID NO: 2537406 - RNA, 19 nt, Artificial Sequence
  Description of Artificial Sequence: Synthetic oligonucleotide
  Sense strand starting at position 1180 of SEQ ID NO: 1888494
aguccaaguccgugcauuu

SEQ ID NO: 2537407 - RNA, 19 nt, Artificial Sequence
  Description of Artificial Sequence: Synthetic oligonucleotide
  Antisense strand to SEQ ID NO: 2537406
aaaugcacggacuuggacu

SEQ ID NO: 2537408 - RNA, 19 nt, Artificial Sequence
  Description of Artificial Sequence: Synthetic oligonucleotide
  Sense strand starting at position 84 of SEQ ID NO: 1888494
ucaggucuaucaucugcaa

SEQ ID NO: 2537409 - RNA, 19 nt, Artificial Sequence
  Description of Artificial Sequence: Synthetic oligonucleotide
  Antisense strand to SEQ ID NO: 2537408
uugcagaugauagaccuga

SEQ ID NO: 2537410 - RNA, 19 nt, Artificial Sequence
  Description of Artificial Sequence: Synthetic oligonucleotide
  Sense strand starting at position 2709 of SEQ ID NO: 1888494
gcauaauguacgugggaaa

SEQ ID NO: 2537411 - RNA, 19 nt, Artificial Sequence
  Description of Artificial Sequence: Synthetic oligonucleotide
  Antisense strand to SEQ ID NO: 2537410
uuucccacguacauuaugc

SEQ ID NO: 2537412 - RNA, 19 nt, Artificial Sequence
  Description of Artificial Sequence: Synthetic oligonucleotide
  Sense strand starting at position 1297 of SEQ ID NO: 1888494
uuccgagucaugggaaguu

SEQ ID NO: 2537413 - RNA, 19 nt, Artificial Sequence
  Description of Artificial Sequence: Synthetic oligonucleotide
  Antisense strand to SEQ ID NO: 2537412
aacuucccaugacucggaa

SEQ ID NO: 2537414 - RNA, 19 nt, Artificial Sequence
  Description of Artificial Sequence: Synthetic oligonucleotide
  Sense strand starting at position 2802 of SEQ ID NO: 1888494
uagucagaguucucuaggu

SEQ ID NO: 2537415 - RNA, 19 nt, Artificial Sequence
  Description of Artificial Sequence: Synthetic oligonucleotide
  Antisense strand to SEQ ID NO: 2537414
accuagagaacucugacua

SEQ ID NO: 2537416 - RNA, 19 nt, Artificial Sequence
  Description of Artificial Sequence: Synthetic oligonucleotide
  Sense strand starting at position 284 of SEQ ID NO: 1888494
augucuuugucaucggaga

SEQ ID NO: 2537417 - RNA, 19 nt, Artificial Sequence
  Description of Artificial Sequence: Synthetic oligonucleotide
  Antisense strand to SEQ ID NO: 2537416
ucuccgaugacaaagacau

SEQ ID NO: 2537418 - RNA, 19 nt, Artificial Sequence
  Description of Artificial Sequence: Synthetic oligonucleotide
  Sense strand starting at position 2708 of SEQ ID NO: 1888494
ugcauaauguacgugggaa

SEQ ID NO: 2537419 - RNA, 19 nt, Artificial Sequence
  Description of Artificial Sequence: Synthetic oligonucleotide
  Antisense strand to SEQ ID NO: 2537418
uucccacguacauuaugca

SEQ ID NO: 2537420 - RNA, 19 nt, Artificial Sequence
  Description of Artificial Sequence: Synthetic oligonucleotide
  Sense strand starting at position 817 of SEQ ID NO: 1888494
cuguuaugccaguacuuug

SEQ ID NO: 2537421 - RNA, 19 nt, Artificial Sequence
  Description of Artificial Sequence: Synthetic oligonucleotide
  Antisense strand to SEQ ID NO: 2537420
caaaguacuggcauaacag

SEQ ID NO: 2537422 - RNA, 19 nt, Artificial Sequence
  Description of Artificial Sequence: Synthetic oligonucleotide
  Sense strand starting at position 3586 of SEQ ID NO: 1888495
gggauauucuaaguaauau

SEQ ID NO: 2537423 - RNA, 19 nt, Artificial Sequence
  Description of Artificial Sequence: Synthetic oligonucleotide
  Antisense strand to SEQ ID NO: 2537422
auauuacuuagaauauccc

SEQ ID NO: 2537424 - RNA, 19 nt, Artificial Sequence
  Description of Artificial Sequence: Synthetic oligonucleotide
  Sense strand starting at position 129 of SEQ ID NO: 1888495
ugaugaaaucucuagccua

SEQ ID NO: 2537425 - RNA, 19 nt, Artificial Sequence
  Description of Artificial Sequence: Synthetic oligonucleotide
  Antisense strand to SEQ ID NO: 2537424
uaggcuagagauuucauca

SEQ ID NO: 2537426 - RNA, 19 nt, Artificial Sequence
  Description of Artificial Sequence: Synthetic oligonucleotide
  Sense strand starting at position 3105 of SEQ ID NO: 1888495
cacaauucugcagggaaag

SEQ ID NO: 2537427 - RNA, 19 nt, Artificial Sequence
  Description of Artificial Sequence: Synthetic oligonucleotide
  Antisense strand to SEQ ID NO: 2537426
cuuucccugcagaauugug

SEQ ID NO: 2537428 - RNA, 19 nt, Artificial Sequence
  Description of Artificial Sequence: Synthetic oligonucleotide
  Sense strand starting at position 3462 of SEQ ID NO: 1888495
ggucuuugagcugaaauaa

SEQ ID NO: 2537429 - RNA, 19 nt, Artificial Sequence
  Description of Artificial Sequence: Synthetic oligonucleotide
  Antisense strand to SEQ ID NO: 2537428
uuauuucagcucaaagacc

SEQ ID NO: 2537430 - RNA, 19 nt, Artificial Sequence
  Description of Artificial Sequence: Synthetic oligonucleotide
  Sense strand starting at position 576 of SEQ ID NO: 1888495
cucagaguuccucacauau

SEQ ID NO: 2537431 - RNA, 19 nt, Artificial Sequence
  Description of Artificial Sequence: Synthetic oligonucleotide
  Antisense strand to SEQ ID NO: 2537430
auaugugaggaacucugag

SEQ ID NO: 2537432 - RNA, 19 nt, Artificial Sequence
  Description of Artificial Sequence: Synthetic oligonucleotide
  Sense strand starting at position 1218 of SEQ ID NO: 1888495
acacuuuagguaugaauau

SEQ ID NO: 2537433 - RNA, 19 nt, Artificial Sequence
  Description of Artificial Sequence: Synthetic oligonucleotide
  Antisense strand to SEQ ID NO: 2537432
auauucauaccuaaagugu

SEQ ID NO: 2537434 - RNA, 19 nt, Artificial Sequence
  Description of Artificial Sequence: Synthetic oligonucleotide
  Sense strand starting at position 2614 of SEQ ID NO: 1888495
uugcuaucuggauauccaa

SEQ ID NO: 2537435 - RNA, 19 nt, Artificial Sequence
  Description of Artificial Sequence: Synthetic oligonucleotide
  Antisense strand to SEQ ID NO: 2537434
uuggauauccagauagcaa

SEQ ID NO: 2537436 - RNA, 19 nt, Artificial Sequence
  Description of Artificial Sequence: Synthetic oligonucleotide
  Sense strand starting at position 2849 of SEQ ID NO: 1888495
uuuagaaacugggcuuaca

SEQ ID NO: 2537437 - RNA, 19 nt, Artificial Sequence
  Description of Artificial Sequence: Synthetic oligonucleotide
  Antisense strand to SEQ ID NO: 2537436
uguaagcccaguuucuaaa

SEQ ID NO: 2537438 - RNA, 19 nt, Artificial Sequence
  Description of Artificial Sequence: Synthetic oligonucleotide
  Sense strand starting at position 767 of SEQ ID NO: 1888495
gaggauccgaugugaaacu

SEQ ID NO: 2537439 - RNA, 19 nt, Artificial Sequence
  Description of Artificial Sequence: Synthetic oligonucleotide
  Antisense strand to SEQ ID NO: 2537438
aguuucacaucggauccuc

SEQ ID NO: 2537440 - RNA, 19 nt, Artificial Sequence
  Description of Artificial Sequence: Synthetic oligonucleotide
  Sense strand starting at position 2183 of SEQ ID NO: 1888495
uuccauuucuguuuccagu

SEQ ID NO: 2537441 - RNA, 19 nt, Artificial Sequence
  Description of Artificial Sequence: Synthetic oligonucleotide
  Antisense strand to SEQ ID NO: 2537440
acuggaaacagaaauggaa

SEQ ID NO: 2537442 - RNA, 19 nt, Artificial Sequence
  Description of Artificial Sequence: Synthetic oligonucleotide
  Sense strand starting at position 3459 of SEQ ID NO: 1888495
aaaggucuuugagcugaaa

SEQ ID NO: 2537443 - RNA, 19 nt, Artificial Sequence
  Description of Artificial Sequence: Synthetic oligonucleotide
  Antisense strand to SEQ ID NO: 2537442
uuucagcucaaagaccuuu

SEQ ID NO: 2537444 - RNA, 19 nt, Artificial Sequence
  Description of Artificial Sequence: Synthetic oligonucleotide
  Sense strand starting at position 1712 of SEQ ID NO: 1888495
acauuugacuuggauauua

SEQ ID NO: 2537445 - RNA, 19 nt, Artificial Sequence
  Description of Artificial Sequence: Synthetic oligonucleotide
  Antisense strand to SEQ ID NO: 2537444
uaauauccaagucaaaugu

SEQ ID NO: 2537446 - RNA, 19 nt, Artificial Sequence
  Description of Artificial Sequence: Synthetic oligonucleotide
  Sense strand starting at position 3292 of SEQ ID NO: 1888495
uccugagauuauguacuau

SEQ ID NO: 2537447 - RNA, 19 nt, Artificial Sequence
  Description of Artificial Sequence: Synthetic oligonucleotide
  Antisense strand to SEQ ID NO: 2537446
auaguacauaaucucagga

SEQ ID NO: 2537448 - RNA, 19 nt, Artificial Sequence
  Description of Artificial Sequence: Synthetic oligonucleotide
  Sense strand starting at position 1801 of SEQ ID NO: 1888495
ggcuuuguaguugaaauag

SEQ ID NO: 2537449 - RNA, 19 nt, Artificial Sequence
  Description of Artificial Sequence: Synthetic oligonucleotide
  Antisense strand to SEQ ID NO: 2537448
cuauuucaacuacaaagcc

SEQ ID NO: 2537450 - RNA, 19 nt, Artificial Sequence
  Description of Artificial Sequence: Synthetic oligonucleotide
  Sense strand starting at position 1505 of SEQ ID NO: 1888495
aguguuuagccauaaccaa

SEQ ID NO: 2537451 - RNA, 19 nt, Artificial Sequence
  Description of Artificial Sequence: Synthetic oligonucleotide
  Antisense strand to SEQ ID NO: 2537450
uugguuauggcuaaacacu

SEQ ID NO: 2537452 - RNA, 19 nt, Artificial Sequence
  Description of Artificial Sequence: Synthetic oligonucleotide
  Sense strand starting at position 2609 of SEQ ID NO: 1888495
aagaguugcuaucuggaua

SEQ ID NO: 2537453 - RNA, 19 nt, Artificial Sequence
  Description of Artificial Sequence: Synthetic oligonucleotide
  Antisense strand to SEQ ID NO: 2537452
uauccagauagcaacucuu

SEQ ID NO: 2537454 - RNA, 19 nt, Artificial Sequence
  Description of Artificial Sequence: Synthetic oligonucleotide
  Sense strand starting at position 203 of SEQ ID NO: 1888495
ucacgacuaccugguaaga

SEQ ID NO: 2537455 - RNA, 19 nt, Artificial Sequence
  Description of Artificial Sequence: Synthetic oligonucleotide
  Antisense strand to SEQ ID NO: 2537454
ucuuaccagguagucguga

SEQ ID NO: 2537456 - RNA, 19 nt, Artificial Sequence
  Description of Artificial Sequence: Synthetic oligonucleotide
  Sense strand starting at position 382 of SEQ ID NO: 1888495
uaaagaaggcguuaucuuu

SEQ ID NO: 2537457 - RNA, 19 nt, Artificial Sequence
  Description of Artificial Sequence: Synthetic oligonucleotide
  Antisense strand to SEQ ID NO: 2537456
aaagauaacgccuucuuua

SEQ ID NO: 2537458 - RNA, 19 nt, Artificial Sequence
  Description of Artificial Sequence: Synthetic oligonucleotide
  Sense strand starting at position 1459 of SEQ ID NO: 1888495
agcagaaccguuuaucaug

SEQ ID NO: 2537459 - RNA, 19 nt, Artificial Sequence
  Description of Artificial Sequence: Synthetic oligonucleotide
  Antisense strand to SEQ ID NO: 2537458
caugauaaacgguucugcu

SEQ ID NO: 2537460 - RNA, 19 nt, Artificial Sequence
  Description of Artificial Sequence: Synthetic oligonucleotide
  Sense strand starting at position 3461 of SEQ ID NO: 1888495
aggucuuugagcugaaaua

SEQ ID NO: 2537461 - RNA, 19 nt, Artificial Sequence
  Description of Artificial Sequence: Synthetic oligonucleotide
  Antisense strand to SEQ ID NO: 2537460
uauuucagcucaaagaccu

SEQ ID NO: 2537462 - RNA, 19 nt, Artificial Sequence
  Description of Artificial Sequence: Synthetic oligonucleotide
  Sense strand starting at position 379 of SEQ ID NO: 1888495
ggauaaagaaggcguuauc

SEQ ID NO: 2537463 - RNA, 19 nt, Artificial Sequence
  Description of Artificial Sequence: Synthetic oligonucleotide
  Antisense strand to SEQ ID NO: 2537462
gauaacgccuucuuuaucc

SEQ ID NO: 2537464 - RNA, 19 nt, Artificial Sequence
  Description of Artificial Sequence: Synthetic oligonucleotide
  Sense strand starting at position 2276 of SEQ ID NO: 1888495
uuuacuauaccagguuauu

SEQ ID NO: 2537465 - RNA, 19 nt, Artificial Sequence
  Description of Artificial Sequence: Synthetic oligonucleotide
  Antisense strand to SEQ ID NO: 2537464
aauaaccugguauaguaaa

SEQ ID NO: 2537466 - RNA, 19 nt, Artificial Sequence
  Description of Artificial Sequence: Synthetic oligonucleotide
  Sense strand starting at position 3913 of SEQ ID NO: 1888495
gcccauguucuugaauauu

SEQ ID NO: 2537467 - RNA, 19 nt, Artificial Sequence
  Description of Artificial Sequence: Synthetic oligonucleotide
  Antisense strand to SEQ ID NO: 2537466
aauauucaagaacaugggc

SEQ ID NO: 2537468 - RNA, 19 nt, Artificial Sequence
  Description of Artificial Sequence: Synthetic oligonucleotide
  Sense strand starting at position 3045 of SEQ ID NO: 1888495
agaucuaggcauuguacua

SEQ ID NO: 2537469 - RNA, 19 nt, Artificial Sequence
  Description of Artificial Sequence: Synthetic oligonucleotide
  Antisense strand to SEQ ID NO: 2537468
uaguacaaugccuagaucu

SEQ ID NO: 2537470 - RNA, 19 nt, Artificial Sequence
  Description of Artificial Sequence: Synthetic oligonucleotide
  Sense strand starting at position 839 of SEQ ID NO: 1888495
augagucauugagccuuga

SEQ ID NO: 2537471 - RNA, 19 nt, Artificial Sequence
  Description of Artificial Sequence: Synthetic oligonucleotide
  Antisense strand to SEQ ID NO: 2537470
ucaaggcucaaugacucau

SEQ ID NO: 2537472 - RNA, 19 nt, Artificial Sequence
  Description of Artificial Sequence: Synthetic oligonucleotide
  Sense strand starting at position 2610 of SEQ ID NO: 1888495
agaguugcuaucuggauau

SEQ ID NO: 2537473 - RNA, 19 nt, Artificial Sequence
  Description of Artificial Sequence: Synthetic oligonucleotide
  Antisense strand to SEQ ID NO: 2537472
auauccagauagcaacucu

SEQ ID NO: 2537474 - RNA, 19 nt, Artificial Sequence
  Description of Artificial Sequence: Synthetic oligonucleotide
  Sense strand starting at position 2090 of SEQ ID NO: 1888495
cacugugcucuggaaagca

SEQ ID NO: 2537475 - RNA, 19 nt, Artificial Sequence
  Description of Artificial Sequence: Synthetic oligonucleotide
  Antisense strand to SEQ ID NO: 2537474
ugcuuuccagagcacagug

SEQ ID NO: 2537476 - RNA, 19 nt, Artificial Sequence
  Description of Artificial Sequence: Synthetic oligonucleotide
  Sense strand starting at position 121 of SEQ ID NO: 1888495
cgacguugugaugaaaucu

SEQ ID NO: 2537477 - RNA, 19 nt, Artificial Sequence
  Description of Artificial Sequence: Synthetic oligonucleotide
  Antisense strand to SEQ ID NO: 2537476
agauuucaucacaacgucg

SEQ ID NO: 2537478 - RNA, 19 nt, Artificial Sequence
  Description of Artificial Sequence: Synthetic oligonucleotide
  Sense strand starting at position 2906 of SEQ ID NO: 1888495
cuuagcucugcagauaucu

SEQ ID NO: 2537479 - RNA, 19 nt, Artificial Sequence
  Description of Artificial Sequence: Synthetic oligonucleotide
  Antisense strand to SEQ ID NO: 2537478
agauaucugcagagcuaag

SEQ ID NO: 2537480 - RNA, 19 nt, Artificial Sequence
  Description of Artificial Sequence: Synthetic oligonucleotide
  Sense strand starting at position 1933 of SEQ ID NO: 1888495
gcauguguucuauacccaa

SEQ ID NO: 2537481 - RNA, 19 nt, Artificial Sequence
  Description of Artificial Sequence: Synthetic oligonucleotide
  Antisense strand to SEQ ID NO: 2537480
uuggguauagaacacaugc

SEQ ID NO: 2537482 - RNA, 19 nt, Artificial Sequence
  Description of Artificial Sequence: Synthetic oligonucleotide
  Sense strand starting at position 1756 of SEQ ID NO: 1888495
cuuucuugugagcaucauu

SEQ ID NO: 2537483 - RNA, 19 nt, Artificial Sequence
  Description of Artificial Sequence: Synthetic oligonucleotide
  Antisense strand to SEQ ID NO: 2537482
aaugaugcucacaagaaag

SEQ ID NO: 2537484 - RNA, 19 nt, Artificial Sequence
  Description of Artificial Sequence: Synthetic oligonucleotide
  Sense strand starting at position 2896 of SEQ ID NO: 1888495
uaguaagagccuuagcucu

SEQ ID NO: 2537485 - RNA, 19 nt, Artificial Sequence
  Description of Artificial Sequence: Synthetic oligonucleotide
  Antisense strand to SEQ ID NO: 2537484
agagcuaaggcucuuacua

SEQ ID NO: 2537486 - RNA, 19 nt, Artificial Sequence
  Description of Artificial Sequence: Synthetic oligonucleotide
  Sense strand starting at position 1761 of SEQ ID NO: 1888495
uugugagcaucauuacauu

SEQ ID NO: 2537487 - RNA, 19 nt, Artificial Sequence
  Description of Artificial Sequence: Synthetic oligonucleotide
  Antisense strand to SEQ ID NO: 2537486
aauguaaugaugcucacaa

SEQ ID NO: 2537488 - RNA, 19 nt, Artificial Sequence
  Description of Artificial Sequence: Synthetic oligonucleotide
  Sense strand starting at position 1461 of SEQ ID NO: 1888495
cagaaccguuuaucaugua

SEQ ID NO: 2537489 - RNA, 19 nt, Artificial Sequence
  Description of Artificial Sequence: Synthetic oligonucleotide
  Antisense strand to SEQ ID NO: 2537488
uacaugauaaacgguucug

SEQ ID NO: 2537490 - RNA, 19 nt, Artificial Sequence
  Description of Artificial Sequence: Synthetic oligonucleotide
  Sense strand starting at position 3658 of SEQ ID NO: 1888495
uugaguuacuucuuacagu

SEQ ID NO: 2537491 - RNA, 19 nt, Artificial Sequence
  Description of Artificial Sequence: Synthetic oligonucleotide
  Antisense strand to SEQ ID NO: 2537490
acuguaagaaguaacucaa

SEQ ID NO: 2537492 - RNA, 19 nt, Artificial Sequence
  Description of Artificial Sequence: Synthetic oligonucleotide
  Sense strand starting at position 1879 of SEQ ID NO: 1888495
gguacauguguucaauguc

SEQ ID NO: 2537493 - RNA, 19 nt, Artificial Sequence
  Description of Artificial Sequence: Synthetic oligonucleotide
  Antisense strand to SEQ ID NO: 2537492
gacauugaacacauguacc

SEQ ID NO: 2537494 - RNA, 19 nt, Artificial Sequence
  Description of Artificial Sequence: Synthetic oligonucleotide
  Sense strand starting at position 1677 of SEQ ID NO: 1888495
cuacacucagcuugaaguu

SEQ ID NO: 2537495 - RNA, 19 nt, Artificial Sequence
  Description of Artificial Sequence: Synthetic oligonucleotide
  Antisense strand to SEQ ID NO: 2537494
aacuucaagcugaguguag

SEQ ID NO: 2537496 - RNA, 19 nt, Artificial Sequence
  Description of Artificial Sequence: Synthetic oligonucleotide
  Sense strand starting at position 2007 of SEQ ID NO: 1888495
gauguacucucagcuuuag

SEQ ID NO: 2537497 - RNA, 19 nt, Artificial Sequence
  Description of Artificial Sequence: Synthetic oligonucleotide
  Antisense strand to SEQ ID NO: 2537496
cuaaagcugagaguacauc

SEQ ID NO: 2537498 - RNA, 19 nt, Artificial Sequence
  Description of Artificial Sequence: Synthetic oligonucleotide
  Sense strand starting at position 3455 of SEQ ID NO: 1888495
uuccaaaggucuuugagcu

SEQ ID NO: 2537499 - RNA, 19 nt, Artificial Sequence
  Description of Artificial Sequence: Synthetic oligonucleotide
  Antisense strand to SEQ ID NO: 2537498
agcucaaagaccuuuggaa

SEQ ID NO: 2537500 - RNA, 19 nt, Artificial Sequence
  Description of Artificial Sequence: Synthetic oligonucleotide
  Sense strand starting at position 448 of SEQ ID NO: 1888495
augaaugugcaaugcuuaa

SEQ ID NO: 2537501 - RNA, 19 nt, Artificial Sequence
  Description of Artificial Sequence: Synthetic oligonucleotide
  Antisense strand to SEQ ID NO: 2537500
uuaagcauugcacauucau

SEQ ID NO: 2537502 - RNA, 19 nt, Artificial Sequence
  Description of Artificial Sequence: Synthetic oligonucleotide
  Sense strand starting at position 2798 of SEQ ID NO: 1888496
gugugauaucugagguguc

SEQ ID NO: 2537503 - RNA, 19 nt, Artificial Sequence
  Description of Artificial Sequence: Synthetic oligonucleotide
  Antisense strand to SEQ ID NO: 2537502
gacaccucagauaucacac

SEQ ID NO: 2537504 - RNA, 19 nt, Artificial Sequence
  Description of Artificial Sequence: Synthetic oligonucleotide
  Sense strand starting at position 2247 of SEQ ID NO: 1888496
cauguaguccaggaaccua

SEQ ID NO: 2537505 - RNA, 19 nt, Artificial Sequence
  Description of Artificial Sequence: Synthetic oligonucleotide
  Antisense strand to SEQ ID NO: 2537504
uagguuccuggacuacaug

SEQ ID NO: 2537506 - RNA, 19 nt, Artificial Sequence
  Description of Artificial Sequence: Synthetic oligonucleotide
  Sense strand starting at position 1266 of SEQ ID NO: 1888496
gcuacuucugccucagugu

SEQ ID NO: 2537507 - RNA, 19 nt, Artificial Sequence
  Description of Artificial Sequence: Synthetic oligonucleotide
  Antisense strand to SEQ ID NO: 2537506
acacugaggcagaaguagc

SEQ ID NO: 2537508 - RNA, 19 nt, Artificial Sequence
  Description of Artificial Sequence: Synthetic oligonucleotide
  Sense strand starting at position 2086 of SEQ ID NO: 1888496
acauguucugauuggacaa

SEQ ID NO: 2537509 - RNA, 19 nt, Artificial Sequence
  Description of Artificial Sequence: Synthetic oligonucleotide
  Antisense strand to SEQ ID NO: 2537508
uuguccaaucagaacaugu

SEQ ID NO: 2537510 - RNA, 19 nt, Artificial Sequence
  Description of Artificial Sequence: Synthetic oligonucleotide
  Sense strand starting at position 1637 of SEQ ID NO: 1888496
agcaguacagauugggaua

SEQ ID NO: 2537511 - RNA, 19 nt, Artificial Sequence
  Description of Artificial Sequence: Synthetic oligonucleotide
  Antisense strand to SEQ ID NO: 2537510
uaucccaaucuguacugcu

SEQ ID NO: 2537512 - RNA, 19 nt, Artificial Sequence
  Description of Artificial Sequence: Synthetic oligonucleotide
  Sense strand starting at position 2046 of SEQ ID NO: 1888496
ccuuuauauguggaguuga

SEQ ID NO: 2537513 - RNA, 19 nt, Artificial Sequence
  Description of Artificial Sequence: Synthetic oligonucleotide
  Antisense strand to SEQ ID NO: 2537512
ucaacuccacauauaaagg

SEQ ID NO: 2537514 - RNA, 19 nt, Artificial Sequence
  Description of Artificial Sequence: Synthetic oligonucleotide
  Sense strand starting at position 2889 of SEQ ID NO: 1888496
gggcauuaucgggagugga

SEQ ID NO: 2537515 - RNA, 19 nt, Artificial Sequence
  Description of Artificial Sequence: Synthetic oligonucleotide
  Antisense strand to SEQ ID NO: 2537514
uccacucccgauaaugccc

SEQ ID NO: 2537516 - RNA, 19 nt, Artificial Sequence
  Description of Artificial Sequence: Synthetic oligonucleotide
  Sense strand starting at position 3613 of SEQ ID NO: 1888496
cucuguuuagcagagacca

SEQ ID NO: 2537517 - RNA, 19 nt, Artificial Sequence
  Description of Artificial Sequence: Synthetic oligonucleotide
  Antisense strand to SEQ ID NO: 2537516
uggucucugcuaaacagag

SEQ ID NO: 2537518 - RNA, 19 nt, Artificial Sequence
  Description of Artificial Sequence: Synthetic oligonucleotide
  Sense strand starting at position 2787 of SEQ ID NO: 1888496
gaacuccuugggugugaua

SEQ ID NO: 2537519 - RNA, 19 nt, Artificial Sequence
  Description of Artificial Sequence: Synthetic oligonucleotide
  Antisense strand to SEQ ID NO: 2537518
uaucacacccaaggaguuc

SEQ ID NO: 2537520 - RNA, 19 nt, Artificial Sequence
  Description of Artificial Sequence: Synthetic oligonucleotide
  Sense strand starting at position 2786 of SEQ ID NO: 1888496
ggaacuccuugggugugau

SEQ ID NO: 2537521 - RNA, 19 nt, Artificial Sequence
  Description of Artificial Sequence: Synthetic oligonucleotide
  Antisense strand to SEQ ID NO: 2537520
aucacacccaaggaguucc

SEQ ID NO: 2537522 - RNA, 19 nt, Artificial Sequence
  Description of Artificial Sequence: Synthetic oligonucleotide
  Sense strand starting at position 3608 of SEQ ID NO: 1888496
ucuuacucuguuuagcaga

SEQ ID NO: 2537523 - RNA, 19 nt, Artificial Sequence
  Description of Artificial Sequence: Synthetic oligonucleotide
  Antisense strand to SEQ ID NO: 2537522
ucugcuaaacagaguaaga

SEQ ID NO: 2537524 - RNA, 19 nt, Artificial Sequence
  Description of Artificial Sequence: Synthetic oligonucleotide
  Sense strand starting at position 3442 of SEQ ID NO: 1888496
agcgguggucuccaagaga

SEQ ID NO: 2537525 - RNA, 19 nt, Artificial Sequence
  Description of Artificial Sequence: Synthetic oligonucleotide
  Antisense strand to SEQ ID NO: 2537524
ucucuuggagaccaccgcu

SEQ ID NO: 2537526 - RNA, 19 nt, Artificial Sequence
  Description of Artificial Sequence: Synthetic oligonucleotide
  Sense strand starting at position 2466 of SEQ ID NO: 1888496
ggcagaguaggugagcuau

SEQ ID NO: 2537527 - RNA, 19 nt, Artificial Sequence
  Description of Artificial Sequence: Synthetic oligonucleotide
  Antisense strand to SEQ ID NO: 2537526
auagcucaccuacucugcc

SEQ ID NO: 2537528 - RNA, 19 nt, Artificial Sequence
  Description of Artificial Sequence: Synthetic oligonucleotide
  Sense strand starting at position 2059 of SEQ ID NO: 1888496
aguugaugcaaaugaaguu

SEQ ID NO: 2537529 - RNA, 19 nt, Artificial Sequence
  Description of Artificial Sequence: Synthetic oligonucleotide
  Antisense strand to SEQ ID NO: 2537528
aacuucauuugcaucaacu

SEQ ID NO: 2537530 - RNA, 19 nt, Artificial Sequence
  Description of Artificial Sequence: Synthetic oligonucleotide
  Sense strand starting at position 2646 of SEQ ID NO: 1888496
gggaaugguuggguguuau

SEQ ID NO: 2537531 - RNA, 19 nt, Artificial Sequence
  Description of Artificial Sequence: Synthetic oligonucleotide
  Antisense strand to SEQ ID NO: 2537530
auaacacccaaccauuccc

SEQ ID NO: 2537532 - RNA, 19 nt, Artificial Sequence
  Description of Artificial Sequence: Synthetic oligonucleotide
  Sense strand starting at position 2801 of SEQ ID NO: 1888496
ugauaucugaggugucacu

SEQ ID NO: 2537533 - RNA, 19 nt, Artificial Sequence
  Description of Artificial Sequence: Synthetic oligonucleotide
  Antisense strand to SEQ ID NO: 2537532
agugacaccucagauauca

SEQ ID NO: 2537534 - RNA, 19 nt, Artificial Sequence
  Description of Artificial Sequence: Synthetic oligonucleotide
  Sense strand starting at position 2476 of SEQ ID NO: 1888496
gugagcuauccagggacuu

SEQ ID NO: 2537535 - RNA, 19 nt, Artificial Sequence
  Description of Artificial Sequence: Synthetic oligonucleotide
  Antisense strand to SEQ ID NO: 2537534
aagucccuggauagcucac

SEQ ID NO: 2537536 - RNA, 19 nt, Artificial Sequence
  Description of Artificial Sequence: Synthetic oligonucleotide
  Sense strand starting at position 2796 of SEQ ID NO: 1888496
gggugugauaucugaggug

SEQ ID NO: 2537537 - RNA, 19 nt, Artificial Sequence
  Description of Artificial Sequence: Synthetic oligonucleotide
  Antisense strand to SEQ ID NO: 2537536
caccucagauaucacaccc

SEQ ID NO: 2537538 - RNA, 19 nt, Artificial Sequence
  Description of Artificial Sequence: Synthetic oligonucleotide
  Sense strand starting at position 3610 of SEQ ID NO: 1888496
uuacucuguuuagcagaga

SEQ ID NO: 2537539 - RNA, 19 nt, Artificial Sequence
  Description of Artificial Sequence: Synthetic oligonucleotide
  Antisense strand to SEQ ID NO: 2537538
ucucugcuaaacagaguaa

SEQ ID NO: 2537540 - RNA, 19 nt, Artificial Sequence
  Description of Artificial Sequence: Synthetic oligonucleotide
  Sense strand starting at position 2038 of SEQ ID NO: 1888496
cuuggcauccuuuauaugu

SEQ ID NO: 2537541 - RNA, 19 nt, Artificial Sequence
  Description of Artificial Sequence: Synthetic oligonucleotide
  Antisense strand to SEQ ID NO: 2537540
acauauaaaggaugccaag

SEQ ID NO: 2537542 - RNA, 19 nt, Artificial Sequence
  Description of Artificial Sequence: Synthetic oligonucleotide
  Sense strand starting at position 2845 of SEQ ID NO: 1888496
gcgcuaucuauggacuaca

SEQ ID NO: 2537543 - RNA, 19 nt, Artificial Sequence
  Description of Artificial Sequence: Synthetic oligonucleotide
  Antisense strand to SEQ ID NO: 2537542
uguaguccauagauagcgc

SEQ ID NO: 2537544 - RNA, 19 nt, Artificial Sequence
  Description of Artificial Sequence: Synthetic oligonucleotide
  Sense strand starting at position 1555 of SEQ ID NO: 1888496
acccgauaguucucccaac

SEQ ID NO: 2537545 - RNA, 19 nt, Artificial Sequence
  Description of Artificial Sequence: Synthetic oligonucleotide
  Antisense strand to SEQ ID NO: 2537544
guugggagaacuaucgggu

SEQ ID NO: 2537546 - RNA, 19 nt, Artificial Sequence
  Description of Artificial Sequence: Synthetic oligonucleotide
  Sense strand starting at position 2117 of SEQ ID NO: 1888496
ggccuagucugauuggacu

SEQ ID NO: 2537547 - RNA, 19 nt, Artificial Sequence
  Description of Artificial Sequence: Synthetic oligonucleotide
  Antisense strand to SEQ ID NO: 2537546
aguccaaucagacuaggcc

SEQ ID NO: 2537548 - RNA, 19 nt, Artificial Sequence
  Description of Artificial Sequence: Synthetic oligonucleotide
  Sense strand starting at position 2789 of SEQ ID NO: 1888496
acuccuugggugugauauc

SEQ ID NO: 2537549 - RNA, 19 nt, Artificial Sequence
  Description of Artificial Sequence: Synthetic oligonucleotide
  Antisense strand to SEQ ID NO: 2537548
gauaucacacccaaggagu

SEQ ID NO: 2537550 - RNA, 19 nt, Artificial Sequence
  Description of Artificial Sequence: Synthetic oligonucleotide
  Sense strand starting at position 2142 of SEQ ID NO: 1888496
ucauguucugauugguuau

SEQ ID NO: 2537551 - RNA, 19 nt, Artificial Sequence
  Description of Artificial Sequence: Synthetic oligonucleotide
  Antisense strand to SEQ ID NO: 2537550
auaaccaaucagaacauga

SEQ ID NO: 2537552 - RNA, 19 nt, Artificial Sequence
  Description of Artificial Sequence: Synthetic oligonucleotide
  Sense strand starting at position 1556 of SEQ ID NO: 1888496
cccgauaguucucccaacu

SEQ ID NO: 2537553 - RNA, 19 nt, Artificial Sequence
  Description of Artificial Sequence: Synthetic oligonucleotide
  Antisense strand to SEQ ID NO: 2537552
aguugggagaacuaucggg

SEQ ID NO: 2537554 - RNA, 19 nt, Artificial Sequence
  Description of Artificial Sequence: Synthetic oligonucleotide
  Sense strand starting at position 152 of SEQ ID NO: 1888496
gugucaguuucagugaaga

SEQ ID NO: 2537555 - RNA, 19 nt, Artificial Sequence
  Description of Artificial Sequence: Synthetic oligonucleotide
  Antisense strand to SEQ ID NO: 2537554
ucuucacugaaacugacac

SEQ ID NO: 2537556 - RNA, 19 nt, Artificial Sequence
  Description of Artificial Sequence: Synthetic oligonucleotide
  Sense strand starting at position 2277 of SEQ ID NO: 1888496
cuuuguaagcgagagucuu

SEQ ID NO: 2537557 - RNA, 19 nt, Artificial Sequence
  Description of Artificial Sequence: Synthetic oligonucleotide
  Antisense strand to SEQ ID NO: 2537556
aagacucucgcuuacaaag

SEQ ID NO: 2537558 - RNA, 19 nt, Artificial Sequence
  Description of Artificial Sequence: Synthetic oligonucleotide
  Sense strand starting at position 1267 of SEQ ID NO: 1888496
cuacuucugccucagugua

SEQ ID NO: 2537559 - RNA, 19 nt, Artificial Sequence
  Description of Artificial Sequence: Synthetic oligonucleotide
  Antisense strand to SEQ ID NO: 2537558
uacacugaggcagaaguag

SEQ ID NO: 2537560 - RNA, 19 nt, Artificial Sequence
  Description of Artificial Sequence: Synthetic oligonucleotide
  Sense strand starting at position 2657 of SEQ ID NO: 1888496
gguguuaucccaggcauca

SEQ ID NO: 2537561 - RNA, 19 nt, Artificial Sequence
  Description of Artificial Sequence: Synthetic oligonucleotide
  Antisense strand to SEQ ID NO: 2537560
ugaugccugggauaacacc

SEQ ID NO: 2537562 - RNA, 19 nt, Artificial Sequence
  Description of Artificial Sequence: Synthetic oligonucleotide
  Sense strand starting at position 2843 of SEQ ID NO: 1888496
gggcgcuaucuauggacua

SEQ ID NO: 2537563 - RNA, 19 nt, Artificial Sequence
  Description of Artificial Sequence: Synthetic oligonucleotide
  Antisense strand to SEQ ID NO: 2537562
uaguccauagauagcgccc

SEQ ID NO: 2537564 - RNA, 19 nt, Artificial Sequence
  Description of Artificial Sequence: Synthetic oligonucleotide
  Sense strand starting at position 1177 of SEQ ID NO: 1888496
ggcaguguauccucaguag

SEQ ID NO: 2537565 - RNA, 19 nt, Artificial Sequence
  Description of Artificial Sequence: Synthetic oligonucleotide
  Antisense strand to SEQ ID NO: 2537564
cuacugaggauacacugcc

SEQ ID NO: 2537566 - RNA, 19 nt, Artificial Sequence
  Description of Artificial Sequence: Synthetic oligonucleotide
  Sense strand starting at position 3541 of SEQ ID NO: 1888496
guguuuccgcgggaauacu

SEQ ID NO: 2537567 - RNA, 19 nt, Artificial Sequence
  Description of Artificial Sequence: Synthetic oligonucleotide
  Antisense strand to SEQ ID NO: 2537566
aguauucccgcggaaacac

SEQ ID NO: 2537568 - RNA, 19 nt, Artificial Sequence
  Description of Artificial Sequence: Synthetic oligonucleotide
  Sense strand starting at position 2088 of SEQ ID NO: 1888496
auguucugauuggacaaga

SEQ ID NO: 2537569 - RNA, 19 nt, Artificial Sequence
  Description of Artificial Sequence: Synthetic oligonucleotide
  Antisense strand to SEQ ID NO: 2537568
ucuuguccaaucagaacau

SEQ ID NO: 2537570 - RNA, 19 nt, Artificial Sequence
  Description of Artificial Sequence: Synthetic oligonucleotide
  Sense strand starting at position 3510 of SEQ ID NO: 1888496
ccuguuugugcugaagugu

SEQ ID NO: 2537571 - RNA, 19 nt, Artificial Sequence
  Description of Artificial Sequence: Synthetic oligonucleotide
  Antisense strand to SEQ ID NO: 2537570
acacuucagcacaaacagg

SEQ ID NO: 2537572 - RNA, 19 nt, Artificial Sequence
  Description of Artificial Sequence: Synthetic oligonucleotide
  Sense strand starting at position 2354 of SEQ ID NO: 1888496
ggaguugucaccgguggca

SEQ ID NO: 2537573 - RNA, 19 nt, Artificial Sequence
  Description of Artificial Sequence: Synthetic oligonucleotide
  Antisense strand to SEQ ID NO: 2537572
ugccaccggugacaacucc

SEQ ID NO: 2537574 - RNA, 19 nt, Artificial Sequence
  Description of Artificial Sequence: Synthetic oligonucleotide
  Sense strand starting at position 415 of SEQ ID NO: 1888496
cgugguauccgcuacucua

SEQ ID NO: 2537575 - RNA, 19 nt, Artificial Sequence
  Description of Artificial Sequence: Synthetic oligonucleotide
  Antisense strand to SEQ ID NO: 2537574
uagaguagcggauaccacg

SEQ ID NO: 2537576 - RNA, 19 nt, Artificial Sequence
  Description of Artificial Sequence: Synthetic oligonucleotide
  Sense strand starting at position 3537 of SEQ ID NO: 1888496
cacaguguuuccgcgggaa

SEQ ID NO: 2537577 - RNA, 19 nt, Artificial Sequence
  Description of Artificial Sequence: Synthetic oligonucleotide
  Antisense strand to SEQ ID NO: 2537576
uucccgcggaaacacugug

SEQ ID NO: 2537578 - RNA, 19 nt, Artificial Sequence
  Description of Artificial Sequence: Synthetic oligonucleotide
  Sense strand starting at position 1381 of SEQ ID NO: 1888496
cccagauugugcgcucaac

SEQ ID NO: 2537579 - RNA, 19 nt, Artificial Sequence
  Description of Artificial Sequence: Synthetic oligonucleotide
  Antisense strand to SEQ ID NO: 2537578
guugagcgcacaaucuggg

SEQ ID NO: 2537580 - RNA, 19 nt, Artificial Sequence
  Description of Artificial Sequence: Synthetic oligonucleotide
  Sense strand starting at position 3539 of SEQ ID NO: 1888496
caguguuuccgcgggaaua

SEQ ID NO: 2537581 - RNA, 19 nt, Artificial Sequence
  Description of Artificial Sequence: Synthetic oligonucleotide
  Antisense strand to SEQ ID NO: 2537580
uauucccgcggaaacacug

SEQ ID NO: 2537582 - RNA, 19 nt, Artificial Sequence
  Description of Artificial Sequence: Synthetic oligonucleotide
  Sense strand starting at position 3156 of SEQ ID NO: 1888498
gaaucugacugucuggaaa

SEQ ID NO: 2537583 - RNA, 19 nt, Artificial Sequence
  Description of Artificial Sequence: Synthetic oligonucleotide
  Antisense strand to SEQ ID NO: 2537582
uuuccagacagucagauuc

SEQ ID NO: 2537584 - RNA, 19 nt, Artificial Sequence
  Description of Artificial Sequence: Synthetic oligonucleotide
  Sense strand starting at position 3159 of SEQ ID NO: 1888498
ucugacugucuggaaacuu

SEQ ID NO: 2537585 - RNA, 19 nt, Artificial Sequence
  Description of Artificial Sequence: Synthetic oligonucleotide
  Antisense strand to SEQ ID NO: 2537584
aaguuuccagacagucaga

SEQ ID NO: 2537586 - RNA, 19 nt, Artificial Sequence
  Description of Artificial Sequence: Synthetic oligonucleotide
  Sense strand starting at position 456 of SEQ ID NO: 1888498
gccagaugucuccaaagga

SEQ ID NO: 2537587 - RNA, 19 nt, Artificial Sequence
  Description of Artificial Sequence: Synthetic oligonucleotide
  Antisense strand to SEQ ID NO: 2537586
uccuuuggagacaucuggc

SEQ ID NO: 2537588 - RNA, 19 nt, Artificial Sequence
  Description of Artificial Sequence: Synthetic oligonucleotide
  Sense strand starting at position 836 of SEQ ID NO: 1888498
gggagacuugccuauccua

SEQ ID NO: 2537589 - RNA, 19 nt, Artificial Sequence
  Description of Artificial Sequence: Synthetic oligonucleotide
  Antisense strand to SEQ ID NO: 2537588
uaggauaggcaagucuccc

SEQ ID NO: 2537590 - RNA, 19 nt, Artificial Sequence
  Description of Artificial Sequence: Synthetic oligonucleotide
  Sense strand starting at position 1406 of SEQ ID NO: 1888498
ccucguugauuucccuaca

SEQ ID NO: 2537591 - RNA, 19 nt, Artificial Sequence
  Description of Artificial Sequence: Synthetic oligonucleotide
  Antisense strand to SEQ ID NO: 2537590
uguagggaaaucaacgagg

SEQ ID NO: 2537592 - RNA, 19 nt, Artificial Sequence
  Description of Artificial Sequence: Synthetic oligonucleotide
  Sense strand starting at position 862 of SEQ ID NO: 1888498
gagugaucagauggugaca

SEQ ID NO: 2537593 - RNA, 19 nt, Artificial Sequence
  Description of Artificial Sequence: Synthetic oligonucleotide
  Antisense strand to SEQ ID NO: 2537592
ugucaccaucugaucacuc

SEQ ID NO: 2537594 - RNA, 19 nt, Artificial Sequence
  Description of Artificial Sequence: Synthetic oligonucleotide
  Sense strand starting at position 856 of SEQ ID NO: 1888498
cauguagagugaucagaug

SEQ ID NO: 2537595 - RNA, 19 nt, Artificial Sequence
  Description of Artificial Sequence: Synthetic oligonucleotide
  Antisense strand to SEQ ID NO: 2537594
caucugaucacucuacaug

SEQ ID NO: 2537596 - RNA, 19 nt, Artificial Sequence
  Description of Artificial Sequence: Synthetic oligonucleotide
  Sense strand starting at position 3152 of SEQ ID NO: 1888498
ugaggaaucugacugucug

SEQ ID NO: 2537597 - RNA, 19 nt, Artificial Sequence
  Description of Artificial Sequence: Synthetic oligonucleotide
  Antisense strand to SEQ ID NO: 2537596
cagacagucagauuccuca

SEQ ID NO: 2537598 - RNA, 19 nt, Artificial Sequence
  Description of Artificial Sequence: Synthetic oligonucleotide
  Sense strand starting at position 2426 of SEQ ID NO: 1888497
ucagaagccgcauauaaga

SEQ ID NO: 2537599 - RNA, 19 nt, Artificial Sequence
  Description of Artificial Sequence: Synthetic oligonucleotide
  Antisense strand to SEQ ID NO: 2537598
ucuuauaugcggcuucuga

SEQ ID NO: 2537600 - RNA, 19 nt, Artificial Sequence
  Description of Artificial Sequence: Synthetic oligonucleotide
  Sense strand starting at position 1425 of SEQ ID NO: 1888498
cugugaucuccuggaggga

SEQ ID NO: 2537601 - RNA, 19 nt, Artificial Sequence
  Description of Artificial Sequence: Synthetic oligonucleotide
  Antisense strand to SEQ ID NO: 2537600
ucccuccaggagaucacag

SEQ ID NO: 2537602 - RNA, 19 nt, Artificial Sequence
  Description of Artificial Sequence: Synthetic oligonucleotide
  Sense strand starting at position 3141 of SEQ ID NO: 1888498
cucuucugccuugaggaau

SEQ ID NO: 2537603 - RNA, 19 nt, Artificial Sequence
  Description of Artificial Sequence: Synthetic oligonucleotide
  Antisense strand to SEQ ID NO: 2537602
auuccucaaggcagaagag

SEQ ID NO: 2537604 - RNA, 19 nt, Artificial Sequence
  Description of Artificial Sequence: Synthetic oligonucleotide
  Sense strand starting at position 2891 of SEQ ID NO: 1888497
accagaguuagucauguca

SEQ ID NO: 2537605 - RNA, 19 nt, Artificial Sequence
  Description of Artificial Sequence: Synthetic oligonucleotide
  Antisense strand to SEQ ID NO: 2537604
ugacaugacuaacucuggu

SEQ ID NO: 2537606 - RNA, 19 nt, Artificial Sequence
  Description of Artificial Sequence: Synthetic oligonucleotide
  Sense strand starting at position 3149 of SEQ ID NO: 1888498
ccuugaggaaucugacugu

SEQ ID NO: 2537607 - RNA, 19 nt, Artificial Sequence
  Description of Artificial Sequence: Synthetic oligonucleotide
  Antisense strand to SEQ ID NO: 2537606
acagucagauuccucaagg

SEQ ID NO: 2537608 - RNA, 19 nt, Artificial Sequence
  Description of Artificial Sequence: Synthetic oligonucleotide
  Sense strand starting at position 2868 of SEQ ID NO: 1888497
agaggcucaccuggugaaa

SEQ ID NO: 2537609 - RNA, 19 nt, Artificial Sequence
  Description of Artificial Sequence: Synthetic oligonucleotide
  Antisense strand to SEQ ID NO: 2537608
uuucaccaggugagccucu

SEQ ID NO: 2537610 - RNA, 19 nt, Artificial Sequence
  Description of Artificial Sequence: Synthetic oligonucleotide
  Sense strand starting at position 2802 of SEQ ID NO: 1888497
guuggaagcaagugaugaa

SEQ ID NO: 2537611 - RNA, 19 nt, Artificial Sequence
  Description of Artificial Sequence: Synthetic oligonucleotide
  Antisense strand to SEQ ID NO: 2537610
uucaucacuugcuuccaac

SEQ ID NO: 2537612 - RNA, 19 nt, Artificial Sequence
  Description of Artificial Sequence: Synthetic oligonucleotide
  Sense strand starting at position 3821 of SEQ ID NO: 1888497
gguuguggcacuuauggaa

SEQ ID NO: 2537613 - RNA, 19 nt, Artificial Sequence
  Description of Artificial Sequence: Synthetic oligonucleotide
  Antisense strand to SEQ ID NO: 2537612
uuccauaagugccacaacc

SEQ ID NO: 2537614 - RNA, 19 nt, Artificial Sequence
  Description of Artificial Sequence: Synthetic oligonucleotide
  Sense strand starting at position 1292 of SEQ ID NO: 1888498
ugcagaucucaggguaaca

SEQ ID NO: 2537615 - RNA, 19 nt, Artificial Sequence
  Description of Artificial Sequence: Synthetic oligonucleotide
  Antisense strand to SEQ ID NO: 2537614
uguuacccugagaucugca

SEQ ID NO: 2537616 - RNA, 19 nt, Artificial Sequence
  Description of Artificial Sequence: Synthetic oligonucleotide
  Sense strand starting at position 2370 of SEQ ID NO: 1888497
ugacuuauaugccugauua

SEQ ID NO: 2537617 - RNA, 19 nt, Artificial Sequence
  Description of Artificial Sequence: Synthetic oligonucleotide
  Antisense strand to SEQ ID NO: 2537616
uaaucaggcauauaaguca

SEQ ID NO: 2537618 - RNA, 19 nt, Artificial Sequence
  Description of Artificial Sequence: Synthetic oligonucleotide
  Sense strand starting at position 2361 of SEQ ID NO: 1888497
ugggaugugugacuuauau

SEQ ID NO: 2537619 - RNA, 19 nt, Artificial Sequence
  Description of Artificial Sequence: Synthetic oligonucleotide
  Antisense strand to SEQ ID NO: 2537618
auauaagucacacauccca

SEQ ID NO: 2537620 - RNA, 19 nt, Artificial Sequence
  Description of Artificial Sequence: Synthetic oligonucleotide
  Sense strand starting at position 453 of SEQ ID NO: 1888498
gaugccagaugucuccaaa

SEQ ID NO: 2537621 - RNA, 19 nt, Artificial Sequence
  Description of Artificial Sequence: Synthetic oligonucleotide
  Antisense strand to SEQ ID NO: 2537620
uuuggagacaucuggcauc

SEQ ID NO: 2537622 - RNA, 19 nt, Artificial Sequence
  Description of Artificial Sequence: Synthetic oligonucleotide
  Sense strand starting at position 3918 of SEQ ID NO: 1888498
gucacucaacccuauguuu

SEQ ID NO: 2537623 - RNA, 19 nt, Artificial Sequence
  Description of Artificial Sequence: Synthetic oligonucleotide
  Antisense strand to SEQ ID NO: 2537622
aaacauaggguugagugac

SEQ ID NO: 2537624 - RNA, 19 nt, Artificial Sequence
  Description of Artificial Sequence: Synthetic oligonucleotide
  Sense strand starting at position 2363 of SEQ ID NO: 1888497
ggaugugugacuuauaugc

SEQ ID NO: 2537625 - RNA, 19 nt, Artificial Sequence
  Description of Artificial Sequence: Synthetic oligonucleotide
  Antisense strand to SEQ ID NO: 2537624
gcauauaagucacacaucc

SEQ ID NO: 2537626 - RNA, 19 nt, Artificial Sequence
  Description of Artificial Sequence: Synthetic oligonucleotide
  Sense strand starting at position 3832 of SEQ ID NO: 1888498
uuucuaaugcaauacguua

SEQ ID NO: 2537627 - RNA, 19 nt, Artificial Sequence
  Description of Artificial Sequence: Synthetic oligonucleotide
  Antisense strand to SEQ ID NO: 2537626
uaacguauugcauuagaaa

SEQ ID NO: 2537628 - RNA, 19 nt, Artificial Sequence
  Description of Artificial Sequence: Synthetic oligonucleotide
  Sense strand starting at position 613 of SEQ ID NO: 1888497
cugagagucaugggcccua

SEQ ID NO: 2537629 - RNA, 19 nt, Artificial Sequence
  Description of Artificial Sequence: Synthetic oligonucleotide
  Antisense strand to SEQ ID NO: 2537628
uagggcccaugacucucag

SEQ ID NO: 2537630 - RNA, 19 nt, Artificial Sequence
  Description of Artificial Sequence: Synthetic oligonucleotide
  Sense strand starting at position 3837 of SEQ ID NO: 1888498
aaugcaauacguuaguuua

SEQ ID NO: 2537631 - RNA, 19 nt, Artificial Sequence
  Description of Artificial Sequence: Synthetic oligonucleotide
  Antisense strand to SEQ ID NO: 2537630
uaaacuaacguauugcauu

SEQ ID NO: 2537632 - RNA, 19 nt, Artificial Sequence
  Description of Artificial Sequence: Synthetic oligonucleotide
  Sense strand starting at position 101 of SEQ ID NO: 1888498
caaagaggugccuguggau

SEQ ID NO: 2537633 - RNA, 19 nt, Artificial Sequence
  Description of Artificial Sequence: Synthetic oligonucleotide
  Antisense strand to SEQ ID NO: 2537632
auccacaggcaccucuuug

SEQ ID NO: 2537634 - RNA, 19 nt, Artificial Sequence
  Description of Artificial Sequence: Synthetic oligonucleotide
  Sense strand starting at position 2733 of SEQ ID NO: 1888497
gagggaccggcuugucaaa

SEQ ID NO: 2537635 - RNA, 19 nt, Artificial Sequence
  Description of Artificial Sequence: Synthetic oligonucleotide
  Antisense strand to SEQ ID NO: 2537634
uuugacaagccggucccuc

SEQ ID NO: 2537636 - RNA, 19 nt, Artificial Sequence
  Description of Artificial Sequence: Synthetic oligonucleotide
  Sense strand starting at position 3140 of SEQ ID NO: 1888498
ccucuucugccuugaggaa

SEQ ID NO: 2537637 - RNA, 19 nt, Artificial Sequence
  Description of Artificial Sequence: Synthetic oligonucleotide
  Antisense strand to SEQ ID NO: 2537636
uuccucaaggcagaagagg

SEQ ID NO: 2537638 - RNA, 19 nt, Artificial Sequence
  Description of Artificial Sequence: Synthetic oligonucleotide
  Sense strand starting at position 3263 of SEQ ID NO: 1888498
uccuuaaugugcccagaca

SEQ ID NO: 2537639 - RNA, 19 nt, Artificial Sequence
  Description of Artificial Sequence: Synthetic oligonucleotide
  Antisense strand to SEQ ID NO: 2537638
ugucugggcacauuaagga

SEQ ID NO: 2537640 - RNA, 19 nt, Artificial Sequence
  Description of Artificial Sequence: Synthetic oligonucleotide
  Sense strand starting at position 2767 of SEQ ID NO: 1888497
ugucucuggguuugauaac

SEQ ID NO: 2537641 - RNA, 19 nt, Artificial Sequence
  Description of Artificial Sequence: Synthetic oligonucleotide
  Antisense strand to SEQ ID NO: 2537640
guuaucaaacccagagaca

SEQ ID NO: 2537642 - RNA, 19 nt, Artificial Sequence
  Description of Artificial Sequence: Synthetic oligonucleotide
  Sense strand starting at position 2368 of SEQ ID NO: 1888497
ugugacuuauaugccugau

SEQ ID NO: 2537643 - RNA, 19 nt, Artificial Sequence
  Description of Artificial Sequence: Synthetic oligonucleotide
  Antisense strand to SEQ ID NO: 2537642
aucaggcauauaagucaca

SEQ ID NO: 2537644 - RNA, 19 nt, Artificial Sequence
  Description of Artificial Sequence: Synthetic oligonucleotide
  Sense strand starting at position 2827 of SEQ ID NO: 1888497
gcagucauucugggcaaag

SEQ ID NO: 2537645 - RNA, 19 nt, Artificial Sequence
  Description of Artificial Sequence: Synthetic oligonucleotide
  Antisense strand to SEQ ID NO: 2537644
cuuugcccagaaugacugc

SEQ ID NO: 2537646 - RNA, 19 nt, Artificial Sequence
  Description of Artificial Sequence: Synthetic oligonucleotide
  Sense strand starting at position 3255 of SEQ ID NO: 1888497
ugcucugucccucaauagu

SEQ ID NO: 2537647 - RNA, 19 nt, Artificial Sequence
  Description of Artificial Sequence: Synthetic oligonucleotide
  Antisense strand to SEQ ID NO: 2537646
acuauugagggacagagca

SEQ ID NO: 2537648 - RNA, 19 nt, Artificial Sequence
  Description of Artificial Sequence: Synthetic oligonucleotide
  Sense strand starting at position 2367 of SEQ ID NO: 1888497
gugugacuuauaugccuga

SEQ ID NO: 2537649 - RNA, 19 nt, Artificial Sequence
  Description of Artificial Sequence: Synthetic oligonucleotide
  Antisense strand to SEQ ID NO: 2537648
ucaggcauauaagucacac

SEQ ID NO: 2537650 - RNA, 19 nt, Artificial Sequence
  Description of Artificial Sequence: Synthetic oligonucleotide
  Sense strand starting at position 3978 of SEQ ID NO: 1888498
uccuauugcuguccacuau

SEQ ID NO: 2537651 - RNA, 19 nt, Artificial Sequence
  Description of Artificial Sequence: Synthetic oligonucleotide
  Antisense strand to SEQ ID NO: 2537650
auaguggacagcaauagga

SEQ ID NO: 2537652 - RNA, 19 nt, Artificial Sequence
  Description of Artificial Sequence: Synthetic oligonucleotide
  Sense strand starting at position 2764 of SEQ ID NO: 1888497
uugugucucuggguuugau

SEQ ID NO: 2537653 - RNA, 19 nt, Artificial Sequence
  Description of Artificial Sequence: Synthetic oligonucleotide
  Antisense strand to SEQ ID NO: 2537652
aucaaacccagagacacaa

SEQ ID NO: 2537654 - RNA, 19 nt, Artificial Sequence
  Description of Artificial Sequence: Synthetic oligonucleotide
  Sense strand starting at position 3254 of SEQ ID NO: 1888498
gagcccuuguccuuaaugu

SEQ ID NO: 2537655 - RNA, 19 nt, Artificial Sequence
  Description of Artificial Sequence: Synthetic oligonucleotide
  Antisense strand to SEQ ID NO: 2537654
acauuaaggacaagggcuc

SEQ ID NO: 2537656 - RNA, 19 nt, Artificial Sequence
  Description of Artificial Sequence: Synthetic oligonucleotide
  Sense strand starting at position 3952 of SEQ ID NO: 1888498
ucuguuuaucacgguugca

SEQ ID NO: 2537657 - RNA, 19 nt, Artificial Sequence
  Description of Artificial Sequence: Synthetic oligonucleotide
  Antisense strand to SEQ ID NO: 2537656
ugcaaccgugauaaacaga

SEQ ID NO: 2537658 - RNA, 19 nt, Artificial Sequence
  Description of Artificial Sequence: Synthetic oligonucleotide
  Sense strand starting at position 3840 of SEQ ID NO: 1888498
gcaauacguuaguuuagcu

SEQ ID NO: 2537659 - RNA, 19 nt, Artificial Sequence
  Description of Artificial Sequence: Synthetic oligonucleotide
  Antisense strand to SEQ ID NO: 2537658
agcuaaacuaacguauugc

SEQ ID NO: 2537660 - RNA, 19 nt, Artificial Sequence
  Description of Artificial Sequence: Synthetic oligonucleotide
  Sense strand starting at position 531 of SEQ ID NO: 1888497
ggaacugccugaugaagga

SEQ ID NO: 2537661 - RNA, 19 nt, Artificial Sequence
  Description of Artificial Sequence: Synthetic oligonucleotide
  Antisense strand to SEQ ID NO: 2537660
uccuucaucaggcaguucc

SEQ ID NO: 2537662 - RNA, 19 nt, Artificial Sequence
  Description of Artificial Sequence: Synthetic oligonucleotide
  Sense strand starting at position 3797 of SEQ ID NO: 1888499
ugagauuacugguccagaa

SEQ ID NO: 2537663 - RNA, 19 nt, Artificial Sequence
  Description of Artificial Sequence: Synthetic oligonucleotide
  Antisense strand to SEQ ID NO: 2537662
uucuggaccaguaaucuca

SEQ ID NO: 2537664 - RNA, 19 nt, Artificial Sequence
  Description of Artificial Sequence: Synthetic oligonucleotide
  Sense strand starting at position 3208 of SEQ ID NO: 1888499
ggcaguuaaguagacauua

SEQ ID NO: 2537665 - RNA, 19 nt, Artificial Sequence
  Description of Artificial Sequence: Synthetic oligonucleotide
  Antisense strand to SEQ ID NO: 2537664
uaaugucuacuuaacugcc

SEQ ID NO: 2537666 - RNA, 19 nt, Artificial Sequence
  Description of Artificial Sequence: Synthetic oligonucleotide
  Sense strand starting at position 1756 of SEQ ID NO: 1888499
gaaagagugugagcaagau

SEQ ID NO: 2537667 - RNA, 19 nt, Artificial Sequence
  Description of Artificial Sequence: Synthetic oligonucleotide
  Antisense strand to SEQ ID NO: 2537666
aucuugcucacacucuuuc

SEQ ID NO: 2537668 - RNA, 19 nt, Artificial Sequence
  Description of Artificial Sequence: Synthetic oligonucleotide
  Sense strand starting at position 1820 of SEQ ID NO: 1888499
gcauaauaaccagacacgu

SEQ ID NO: 2537669 - RNA, 19 nt, Artificial Sequence
  Description of Artificial Sequence: Synthetic oligonucleotide
  Antisense strand to SEQ ID NO: 2537668
acgugucugguuauuaugc

SEQ ID NO: 2537670 - RNA, 19 nt, Artificial Sequence
  Description of Artificial Sequence: Synthetic oligonucleotide
  Sense strand starting at position 3144 of SEQ ID NO: 1888499
ucauauagccuccagugaa

SEQ ID NO: 2537671 - RNA, 19 nt, Artificial Sequence
  Description of Artificial Sequence: Synthetic oligonucleotide
  Antisense strand to SEQ ID NO: 2537670
uucacuggaggcuauauga

SEQ ID NO: 2537672 - RNA, 19 nt, Artificial Sequence
  Description of Artificial Sequence: Synthetic oligonucleotide
  Sense strand starting at position 486 of SEQ ID NO: 1888499
ugacucugacauugaagca

SEQ ID NO: 2537673 - RNA, 19 nt, Artificial Sequence
  Description of Artificial Sequence: Synthetic oligonucleotide
  Antisense strand to SEQ ID NO: 2537672
ugcuucaaugucagaguca

SEQ ID NO: 2537674 - RNA, 19 nt, Artificial Sequence
  Description of Artificial Sequence: Synthetic oligonucleotide
  Sense strand starting at position 2953 of SEQ ID NO: 1888499
gucagucagccguuugguu

SEQ ID NO: 2537675 - RNA, 19 nt, Artificial Sequence
  Description of Artificial Sequence: Synthetic oligonucleotide
  Antisense strand to SEQ ID NO: 2537674
aaccaaacggcugacugac

SEQ ID NO: 2537676 - RNA, 19 nt, Artificial Sequence
  Description of Artificial Sequence: Synthetic oligonucleotide
  Sense strand starting at position 1900 of SEQ ID NO: 1888499
gcagcuccugaucaaacau

SEQ ID NO: 2537677 - RNA, 19 nt, Artificial Sequence
  Description of Artificial Sequence: Synthetic oligonucleotide
  Antisense strand to SEQ ID NO: 2537676
auguuugaucaggagcugc

SEQ ID NO: 2537678 - RNA, 19 nt, Artificial Sequence
  Description of Artificial Sequence: Synthetic oligonucleotide
  Sense strand starting at position 3825 of SEQ ID NO: 1888499
uguuaaucuccucaguuaa

SEQ ID NO: 2537679 - RNA, 19 nt, Artificial Sequence
  Description of Artificial Sequence: Synthetic oligonucleotide
  Antisense strand to SEQ ID NO: 2537678
uuaacugaggagauuaaca

SEQ ID NO: 2537680 - RNA, 19 nt, Artificial Sequence
  Description of Artificial Sequence: Synthetic oligonucleotide
  Sense strand starting at position 3883 of SEQ ID NO: 1888499
ugcugugaccuggaugauu

SEQ ID NO: 2537681 - RNA, 19 nt, Artificial Sequence
  Description of Artificial Sequence: Synthetic oligonucleotide
  Antisense strand to SEQ ID NO: 2537680
aaucauccaggucacagca

SEQ ID NO: 2537682 - RNA, 19 nt, Artificial Sequence
  Description of Artificial Sequence: Synthetic oligonucleotide
  Sense strand starting at position 1753 of SEQ ID NO: 1888499
cuugaaagagugugagcaa

SEQ ID NO: 2537683 - RNA, 19 nt, Artificial Sequence
  Description of Artificial Sequence: Synthetic oligonucleotide
  Antisense strand to SEQ ID NO: 2537682
uugcucacacucuuucaag

SEQ ID NO: 2537684 - RNA, 19 nt, Artificial Sequence
  Description of Artificial Sequence: Synthetic oligonucleotide
  Sense strand starting at position 3009 of SEQ ID NO: 1888499
ggugcuagauaucccaaca

SEQ ID NO: 2537685 - RNA, 19 nt, Artificial Sequence
  Description of Artificial Sequence: Synthetic oligonucleotide
  Antisense strand to SEQ ID NO: 2537684
uguugggauaucuagcacc

SEQ ID NO: 2537686 - RNA, 19 nt, Artificial Sequence
  Description of Artificial Sequence: Synthetic oligonucleotide
  Sense strand starting at position 3147 of SEQ ID NO: 1888499
uauagccuccagugaaaug

SEQ ID NO: 2537687 - RNA, 19 nt, Artificial Sequence
  Description of Artificial Sequence: Synthetic oligonucleotide
  Antisense strand to SEQ ID NO: 2537686
cauuucacuggaggcuaua

SEQ ID NO: 2537688 - RNA, 19 nt, Artificial Sequence
  Description of Artificial Sequence: Synthetic oligonucleotide
  Sense strand starting at position 1838 of SEQ ID NO: 1888499
uucuccaggcucugagaua

SEQ ID NO: 2537689 - RNA, 19 nt, Artificial Sequence
  Description of Artificial Sequence: Synthetic oligonucleotide
  Antisense strand to SEQ ID NO: 2537688
uaucucagagccuggagaa

SEQ ID NO: 2537690 - RNA, 19 nt, Artificial Sequence
  Description of Artificial Sequence: Synthetic oligonucleotide
  Sense strand starting at position 1899 of SEQ ID NO: 1888499
agcagcuccugaucaaaca

SEQ ID NO: 2537691 - RNA, 19 nt, Artificial Sequence
  Description of Artificial Sequence: Synthetic oligonucleotide
  Antisense strand to SEQ ID NO: 2537690
uguuugaucaggagcugcu

SEQ ID NO: 2537692 - RNA, 19 nt, Artificial Sequence
  Description of Artificial Sequence: Synthetic oligonucleotide
  Sense strand starting at position 128 of SEQ ID NO: 1888499
guaauugcaccugaguuua

SEQ ID NO: 2537693 - RNA, 19 nt, Artificial Sequence
  Description of Artificial Sequence: Synthetic oligonucleotide
  Antisense strand to SEQ ID NO: 2537692
uaaacucaggugcaauuac

SEQ ID NO: 2537694 - RNA, 19 nt, Artificial Sequence
  Description of Artificial Sequence: Synthetic oligonucleotide
  Sense strand starting at position 2863 of SEQ ID NO: 1888499
gaacaagggcucugagcuu

SEQ ID NO: 2537695 - RNA, 19 nt, Artificial Sequence
  Description of Artificial Sequence: Synthetic oligonucleotide
  Antisense strand to SEQ ID NO: 2537694
aagcucagagcccuuguuc

SEQ ID NO: 2537696 - RNA, 19 nt, Artificial Sequence
  Description of Artificial Sequence: Synthetic oligonucleotide
  Sense strand starting at position 781 of SEQ ID NO: 1888499
cauggaguccugugaucua

SEQ ID NO: 2537697 - RNA, 19 nt, Artificial Sequence
  Description of Artificial Sequence: Synthetic oligonucleotide
  Antisense strand to SEQ ID NO: 2537696
uagaucacaggacuccaug

SEQ ID NO: 2537698 - RNA, 19 nt, Artificial Sequence
  Description of Artificial Sequence: Synthetic oligonucleotide
  Sense strand starting at position 1897 of SEQ ID NO: 1888499
gcagcagcuccugaucaaa

SEQ ID NO: 2537699 - RNA, 19 nt, Artificial Sequence
  Description of Artificial Sequence: Synthetic oligonucleotide
  Antisense strand to SEQ ID NO: 2537698
uuugaucaggagcugcugc

SEQ ID NO: 2537700 - RNA, 19 nt, Artificial Sequence
  Description of Artificial Sequence: Synthetic oligonucleotide
  Sense strand starting at position 843 of SEQ ID NO: 1888499
cucccauggccucaguuua

SEQ ID NO: 2537701 - RNA, 19 nt, Artificial Sequence
  Description of Artificial Sequence: Synthetic oligonucleotide
  Antisense strand to SEQ ID NO: 2537700
uaaacugaggccaugggag

SEQ ID NO: 2537702 - RNA, 19 nt, Artificial Sequence
  Description of Artificial Sequence: Synthetic oligonucleotide
  Sense strand starting at position 621 of SEQ ID NO: 1888499
aucucaugauugucaagcu

SEQ ID NO: 2537703 - RNA, 19 nt, Artificial Sequence
  Description of Artificial Sequence: Synthetic oligonucleotide
  Antisense strand to SEQ ID NO: 2537702
agcuugacaaucaugagau

SEQ ID NO: 2537704 - RNA, 19 nt, Artificial Sequence
  Description of Artificial Sequence: Synthetic oligonucleotide
  Sense strand starting at position 2818 of SEQ ID NO: 1888499
agaguauauuaggaagaag

SEQ ID NO: 2537705 - RNA, 19 nt, Artificial Sequence
  Description of Artificial Sequence: Synthetic oligonucleotide
  Antisense strand to SEQ ID NO: 2537704
cuucuuccuaauauacucu

SEQ ID NO: 2537706 - RNA, 19 nt, Artificial Sequence
  Description of Artificial Sequence: Synthetic oligonucleotide
  Sense strand starting at position 2222 of SEQ ID NO: 1888499
acgcuuauugcauauugau

SEQ ID NO: 2537707 - RNA, 19 nt, Artificial Sequence
  Description of Artificial Sequence: Synthetic oligonucleotide
  Antisense strand to SEQ ID NO: 2537706
aucaauaugcaauaagcgu

SEQ ID NO: 2537708 - RNA, 19 nt, Artificial Sequence
  Description of Artificial Sequence: Synthetic oligonucleotide
  Sense strand starting at position 3881 of SEQ ID NO: 1888499
agugcugugaccuggauga

SEQ ID NO: 2537709 - RNA, 19 nt, Artificial Sequence
  Description of Artificial Sequence: Synthetic oligonucleotide
  Antisense strand to SEQ ID NO: 2537708
ucauccaggucacagcacu

SEQ ID NO: 2537710 - RNA, 19 nt, Artificial Sequence
  Description of Artificial Sequence: Synthetic oligonucleotide
  Sense strand starting at position 3858 of SEQ ID NO: 1888499
cgcagaauuccugguaaua

SEQ ID NO: 2537711 - RNA, 19 nt, Artificial Sequence
  Description of Artificial Sequence: Synthetic oligonucleotide
  Antisense strand to SEQ ID NO: 2537710
uauuaccaggaauucugcg

SEQ ID NO: 2537712 - RNA, 19 nt, Artificial Sequence
  Description of Artificial Sequence: Synthetic oligonucleotide
  Sense strand starting at position 3340 of SEQ ID NO: 1888499
auaguuuguggccagcaca

SEQ ID NO: 2537713 - RNA, 19 nt, Artificial Sequence
  Description of Artificial Sequence: Synthetic oligonucleotide
  Antisense strand to SEQ ID NO: 2537712
ugugcuggccacaaacuau

SEQ ID NO: 2537714 - RNA, 19 nt, Artificial Sequence
  Description of Artificial Sequence: Synthetic oligonucleotide
  Sense strand starting at position 3824 of SEQ ID NO: 1888499
cuguuaaucuccucaguua

SEQ ID NO: 2537715 - RNA, 19 nt, Artificial Sequence
  Description of Artificial Sequence: Synthetic oligonucleotide
  Antisense strand to SEQ ID NO: 2537714
uaacugaggagauuaacag

SEQ ID NO: 2537716 - RNA, 19 nt, Artificial Sequence
  Description of Artificial Sequence: Synthetic oligonucleotide
  Sense strand starting at position 3758 of SEQ ID NO: 1888499
ggaguuagccugcaauugu

SEQ ID NO: 2537717 - RNA, 19 nt, Artificial Sequence
  Description of Artificial Sequence: Synthetic oligonucleotide
  Antisense strand to SEQ ID NO: 2537716
acaauugcaggcuaacucc

SEQ ID NO: 2537718 - RNA, 19 nt, Artificial Sequence
  Description of Artificial Sequence: Synthetic oligonucleotide
  Sense strand starting at position 1811 of SEQ ID NO: 1888499
cgugcaucugcauaauaac

SEQ ID NO: 2537719 - RNA, 19 nt, Artificial Sequence
  Description of Artificial Sequence: Synthetic oligonucleotide
  Antisense strand to SEQ ID NO: 2537718
guuauuaugcagaugcacg

SEQ ID NO: 2537720 - RNA, 19 nt, Artificial Sequence
  Description of Artificial Sequence: Synthetic oligonucleotide
  Sense strand starting at position 3846 of SEQ ID NO: 1888499
gauccaucccagcgcagaa

SEQ ID NO: 2537721 - RNA, 19 nt, Artificial Sequence
  Description of Artificial Sequence: Synthetic oligonucleotide
  Antisense strand to SEQ ID NO: 2537720
uucugcgcugggauggauc

SEQ ID NO: 2537722 - RNA, 19 nt, Artificial Sequence
  Description of Artificial Sequence: Synthetic oligonucleotide
  Sense strand starting at position 15 of SEQ ID NO: 1888499
cugaauagcaggugugagu

SEQ ID NO: 2537723 - RNA, 19 nt, Artificial Sequence
  Description of Artificial Sequence: Synthetic oligonucleotide
  Antisense strand to SEQ ID NO: 2537722
acucacaccugcuauucag

SEQ ID NO: 2537724 - RNA, 19 nt, Artificial Sequence
  Description of Artificial Sequence: Synthetic oligonucleotide
  Sense strand starting at position 877 of SEQ ID NO: 1888499
ucaaguaggugcucagagu

SEQ ID NO: 2537725 - RNA, 19 nt, Artificial Sequence
  Description of Artificial Sequence: Synthetic oligonucleotide
  Antisense strand to SEQ ID NO: 2537724
acucugagcaccuacuuga

SEQ ID NO: 2537726 - RNA, 19 nt, Artificial Sequence
  Description of Artificial Sequence: Synthetic oligonucleotide
  Sense strand starting at position 3822 of SEQ ID NO: 1888499
cucuguuaaucuccucagu

SEQ ID NO: 2537727 - RNA, 19 nt, Artificial Sequence
  Description of Artificial Sequence: Synthetic oligonucleotide
  Antisense strand to SEQ ID NO: 2537726
acugaggagauuaacagag

SEQ ID NO: 2537728 - RNA, 19 nt, Artificial Sequence
  Description of Artificial Sequence: Synthetic oligonucleotide
  Sense strand starting at position 2582 of SEQ ID NO: 1888499
guggguucuucugccagga

SEQ ID NO: 2537729 - RNA, 19 nt, Artificial Sequence
  Description of Artificial Sequence: Synthetic oligonucleotide
  Antisense strand to SEQ ID NO: 2537728
uccuggcagaagaacccac

SEQ ID NO: 2537730 - RNA, 19 nt, Artificial Sequence
  Description of Artificial Sequence: Synthetic oligonucleotide
  Sense strand starting at position 3856 of SEQ ID NO: 1888499
agcgcagaauuccugguaa

SEQ ID NO: 2537731 - RNA, 19 nt, Artificial Sequence
  Description of Artificial Sequence: Synthetic oligonucleotide
  Antisense strand to SEQ ID NO: 2537730
uuaccaggaauucugcgcu

SEQ ID NO: 2537732 - RNA, 19 nt, Artificial Sequence
  Description of Artificial Sequence: Synthetic oligonucleotide
  Sense strand starting at position 2817 of SEQ ID NO: 1888499
aagaguauauuaggaagaa

SEQ ID NO: 2537733 - RNA, 19 nt, Artificial Sequence
  Description of Artificial Sequence: Synthetic oligonucleotide
  Antisense strand to SEQ ID NO: 2537732
uucuuccuaauauacucuu

SEQ ID NO: 2537734 - RNA, 19 nt, Artificial Sequence
  Description of Artificial Sequence: Synthetic oligonucleotide
  Sense strand starting at position 830 of SEQ ID NO: 1888499
gcgagucacucaucuccca

SEQ ID NO: 2537735 - RNA, 19 nt, Artificial Sequence
  Description of Artificial Sequence: Synthetic oligonucleotide
  Antisense strand to SEQ ID NO: 2537734
ugggagaugagugacucgc

SEQ ID NO: 2537736 - RNA, 19 nt, Artificial Sequence
  Description of Artificial Sequence: Synthetic oligonucleotide
  Sense strand starting at position 585 of SEQ ID NO: 1888499
cacaguuaugcucacgcuu

SEQ ID NO: 2537737 - RNA, 19 nt, Artificial Sequence
  Description of Artificial Sequence: Synthetic oligonucleotide
  Antisense strand to SEQ ID NO: 2537736
aagcgugagcauaacugug

SEQ ID NO: 2537738 - RNA, 19 nt, Artificial Sequence
  Description of Artificial Sequence: Synthetic oligonucleotide
  Sense strand starting at position 3870 of SEQ ID NO: 1888499
gguaauaucuuagugcugu

SEQ ID NO: 2537739 - RNA, 19 nt, Artificial Sequence
  Description of Artificial Sequence: Synthetic oligonucleotide
  Antisense strand to SEQ ID NO: 2537738
acagcacuaagauauuacc

SEQ ID NO: 2537740 - RNA, 19 nt, Artificial Sequence
  Description of Artificial Sequence: Synthetic oligonucleotide
  Sense strand starting at position 2743 of SEQ ID NO: 1888499
uguuguaauuggccacagu

SEQ ID NO: 2537741 - RNA, 19 nt, Artificial Sequence
  Description of Artificial Sequence: Synthetic oligonucleotide
  Antisense strand to SEQ ID NO: 2537740
acuguggccaauuacaaca

SEQ ID NO: 2537742 - RNA, 19 nt, Artificial Sequence
  Description of Artificial Sequence: Synthetic oligonucleotide
  Sense strand starting at position 3628 of SEQ ID NO: 1888500
cucuauaggcauuagacau

SEQ ID NO: 2537743 - RNA, 19 nt, Artificial Sequence
  Description of Artificial Sequence: Synthetic oligonucleotide
  Antisense strand to SEQ ID NO: 2537742
augucuaaugccuauagag

SEQ ID NO: 2537744 - RNA, 19 nt, Artificial Sequence
  Description of Artificial Sequence: Synthetic oligonucleotide
  Sense strand starting at position 2330 of SEQ ID NO: 1888500
guauacuccugcuuauuua

SEQ ID NO: 2537745 - RNA, 19 nt, Artificial Sequence
  Description of Artificial Sequence: Synthetic oligonucleotide
  Antisense strand to SEQ ID NO: 2537744
uaaauaagcaggaguauac

SEQ ID NO: 2537746 - RNA, 19 nt, Artificial Sequence
  Description of Artificial Sequence: Synthetic oligonucleotide
  Sense strand starting at position 3621 of SEQ ID NO: 1888500
caagguacucuauaggcau

SEQ ID NO: 2537747 - RNA, 19 nt, Artificial Sequence
  Description of Artificial Sequence: Synthetic oligonucleotide
  Antisense strand to SEQ ID NO: 2537746
augccuauagaguaccuug

SEQ ID NO: 2537748 - RNA, 19 nt, Artificial Sequence
  Description of Artificial Sequence: Synthetic oligonucleotide
  Sense strand starting at position 2459 of SEQ ID NO: 1888500
aagacuguccagugggaca

SEQ ID NO: 2537749 - RNA, 19 nt, Artificial Sequence
  Description of Artificial Sequence: Synthetic oligonucleotide
  Antisense strand to SEQ ID NO: 2537748
ugucccacuggacagucuu

SEQ ID NO: 2537750 - RNA, 19 nt, Artificial Sequence
  Description of Artificial Sequence: Synthetic oligonucleotide
  Sense strand starting at position 2411 of SEQ ID NO: 1888500
aaggcauuguuacuggaaa

SEQ ID NO: 2537751 - RNA, 19 nt, Artificial Sequence
  Description of Artificial Sequence: Synthetic oligonucleotide
  Antisense strand to SEQ ID NO: 2537750
uuuccaguaacaaugccuu

SEQ ID NO: 2537752 - RNA, 19 nt, Artificial Sequence
  Description of Artificial Sequence: Synthetic oligonucleotide
  Sense strand starting at position 267 of SEQ ID NO: 1888500
uugauuguagcacaaagua

SEQ ID NO: 2537753 - RNA, 19 nt, Artificial Sequence
  Description of Artificial Sequence: Synthetic oligonucleotide
  Antisense strand to SEQ ID NO: 2537752
uacuuugugcuacaaucaa

SEQ ID NO: 2537754 - RNA, 19 nt, Artificial Sequence
  Description of Artificial Sequence: Synthetic oligonucleotide
  Sense strand starting at position 485 of SEQ ID NO: 1888500
ucacuaagauguguuuaag

SEQ ID NO: 2537755 - RNA, 19 nt, Artificial Sequence
  Description of Artificial Sequence: Synthetic oligonucleotide
  Antisense strand to SEQ ID NO: 2537754
cuuaaacacaucuuaguga

SEQ ID NO: 2537756 - RNA, 19 nt, Artificial Sequence
  Description of Artificial Sequence: Synthetic oligonucleotide
  Sense strand starting at position 2282 of SEQ ID NO: 1888500
cuagaugacuuacugguuu

SEQ ID NO: 2537757 - RNA, 19 nt, Artificial Sequence
  Description of Artificial Sequence: Synthetic oligonucleotide
  Antisense strand to SEQ ID NO: 2537756
aaaccaguaagucaucuag

SEQ ID NO: 2537758 - RNA, 19 nt, Artificial Sequence
  Description of Artificial Sequence: Synthetic oligonucleotide
  Sense strand starting at position 252 of SEQ ID NO: 1888500
cagcauaaugugcaauuga

SEQ ID NO: 2537759 - RNA, 19 nt, Artificial Sequence
  Description of Artificial Sequence: Synthetic oligonucleotide
  Antisense strand to SEQ ID NO: 2537758
ucaauugcacauuaugcug

SEQ ID NO: 2537760 - RNA, 19 nt, Artificial Sequence
  Description of Artificial Sequence: Synthetic oligonucleotide
  Sense strand starting at position 236 of SEQ ID NO: 1888500
guacgucuucuauaaacag

SEQ ID NO: 2537761 - RNA, 19 nt, Artificial Sequence
  Description of Artificial Sequence: Synthetic oligonucleotide
  Antisense strand to SEQ ID NO: 2537760
cuguuuauagaagacguac

SEQ ID NO: 2537762 - RNA, 19 nt, Artificial Sequence
  Description of Artificial Sequence: Synthetic oligonucleotide
  Sense strand starting at position 488 of SEQ ID NO: 1888500
cuaagauguguuuaaguuu

SEQ ID NO: 2537763 - RNA, 19 nt, Artificial Sequence
  Description of Artificial Sequence: Synthetic oligonucleotide
  Antisense strand to SEQ ID NO: 2537762
aaacuuaaacacaucuuag

SEQ ID NO: 2537764 - RNA, 19 nt, Artificial Sequence
  Description of Artificial Sequence: Synthetic oligonucleotide
  Sense strand starting at position 2413 of SEQ ID NO: 1888500
ggcauuguuacuggaaaug

SEQ ID NO: 2537765 - RNA, 19 nt, Artificial Sequence
  Description of Artificial Sequence: Synthetic oligonucleotide
  Antisense strand to SEQ ID NO: 2537764
cauuuccaguaacaaugcc

SEQ ID NO: 2537766 - RNA, 19 nt, Artificial Sequence
  Description of Artificial Sequence: Synthetic oligonucleotide
  Sense strand starting at position 1700 of SEQ ID NO: 1888500
gcccuaacagguuauucuu

SEQ ID NO: 2537767 - RNA, 19 nt, Artificial Sequence
  Description of Artificial Sequence: Synthetic oligonucleotide
  Antisense strand to SEQ ID NO: 2537766
aagaauaaccuguuagggc

SEQ ID NO: 2537768 - RNA, 19 nt, Artificial Sequence
  Description of Artificial Sequence: Synthetic oligonucleotide
  Sense strand starting at position 1714 of SEQ ID NO: 1888500
uucuuacaggcuuauuagu

SEQ ID NO: 2537769 - RNA, 19 nt, Artificial Sequence
  Description of Artificial Sequence: Synthetic oligonucleotide
  Antisense strand to SEQ ID NO: 2537768
acuaauaagccuguaagaa

SEQ ID NO: 2537770 - RNA, 19 nt, Artificial Sequence
  Description of Artificial Sequence: Synthetic oligonucleotide
  Sense strand starting at position 3609 of SEQ ID NO: 1888500
uuuauuaagcugcaaggua

SEQ ID NO: 2537771 - RNA, 19 nt, Artificial Sequence
  Description of Artificial Sequence: Synthetic oligonucleotide
  Antisense strand to SEQ ID NO: 2537770
uaccuugcagcuuaauaaa

SEQ ID NO: 2537772 - RNA, 19 nt, Artificial Sequence
  Description of Artificial Sequence: Synthetic oligonucleotide
  Sense strand starting at position 3319 of SEQ ID NO: 1888500
cagguugauugcuugaaac

SEQ ID NO: 2537773 - RNA, 19 nt, Artificial Sequence
  Description of Artificial Sequence: Synthetic oligonucleotide
  Antisense strand to SEQ ID NO: 2537772
guuucaagcaaucaaccug

SEQ ID NO: 2537774 - RNA, 19 nt, Artificial Sequence
  Description of Artificial Sequence: Synthetic oligonucleotide
  Sense strand starting at position 491 of SEQ ID NO: 1888500
agauguguuuaaguuugaa

SEQ ID NO: 2537775 - RNA, 19 nt, Artificial Sequence
  Description of Artificial Sequence: Synthetic oligonucleotide
  Antisense strand to SEQ ID NO: 2537774
uucaaacuuaaacacaucu

SEQ ID NO: 2537776 - RNA, 19 nt, Artificial Sequence
  Description of Artificial Sequence: Synthetic oligonucleotide
  Sense strand starting at position 1381 of SEQ ID NO: 1888500
ggcauaacggguuauucuu

SEQ ID NO: 2537777 - RNA, 19 nt, Artificial Sequence
  Description of Artificial Sequence: Synthetic oligonucleotide
  Antisense strand to SEQ ID NO: 2537776
aagaauaacccguuaugcc

SEQ ID NO: 2537778 - RNA, 19 nt, Artificial Sequence
  Description of Artificial Sequence: Synthetic oligonucleotide
  Sense strand starting at position 3852 of SEQ ID NO: 1888500
gauauaagugguuggcaca

SEQ ID NO: 2537779 - RNA, 19 nt, Artificial Sequence
  Description of Artificial Sequence: Synthetic oligonucleotide
  Antisense strand to SEQ ID NO: 2537778
ugugccaaccacuuauauc

SEQ ID NO: 2537780 - RNA, 19 nt, Artificial Sequence
  Description of Artificial Sequence: Synthetic oligonucleotide
  Sense strand starting at position 2406 of SEQ ID NO: 1888500
uccagaaggcauuguuacu

SEQ ID NO: 2537781 - RNA, 19 nt, Artificial Sequence
  Description of Artificial Sequence: Synthetic oligonucleotide
  Antisense strand to SEQ ID NO: 2537780
aguaacaaugccuucugga

SEQ ID NO: 2537782 - RNA, 19 nt, Artificial Sequence
  Description of Artificial Sequence: Synthetic oligonucleotide
  Sense strand starting at position 494 of SEQ ID NO: 1888500
uguguuuaaguuugaaaca

SEQ ID NO: 2537783 - RNA, 19 nt, Artificial Sequence
  Description of Artificial Sequence: Synthetic oligonucleotide
  Antisense strand to SEQ ID NO: 2537782
uguuucaaacuuaaacaca

SEQ ID NO: 2537784 - RNA, 19 nt, Artificial Sequence
  Description of Artificial Sequence: Synthetic oligonucleotide
  Sense strand starting at position 3775 of SEQ ID NO: 1888500
agauaaauauccuagaaug

SEQ ID NO: 2537785 - RNA, 19 nt, Artificial Sequence
  Description of Artificial Sequence: Synthetic oligonucleotide
  Antisense strand to SEQ ID NO: 2537784
cauucuaggauauuuaucu

SEQ ID NO: 2537786 - RNA, 19 nt, Artificial Sequence
  Description of Artificial Sequence: Synthetic oligonucleotide
  Sense strand starting at position 1637 of SEQ ID NO: 1888500
ucgugaucugcucacauca

SEQ ID NO: 2537787 - RNA, 19 nt, Artificial Sequence
  Description of Artificial Sequence: Synthetic oligonucleotide
  Antisense strand to SEQ ID NO: 2537786
ugaugugagcagaucacga

SEQ ID NO: 2537788 - RNA, 19 nt, Artificial Sequence
  Description of Artificial Sequence: Synthetic oligonucleotide
  Sense strand starting at position 3318 of SEQ ID NO: 1888500
gcagguugauugcuugaaa

SEQ ID NO: 2537789 - RNA, 19 nt, Artificial Sequence
  Description of Artificial Sequence: Synthetic oligonucleotide
  Antisense strand to SEQ ID NO: 2537788
uuucaagcaaucaaccugc

SEQ ID NO: 2537790 - RNA, 19 nt, Artificial Sequence
  Description of Artificial Sequence: Synthetic oligonucleotide
  Sense strand starting at position 2431 of SEQ ID NO: 1888500
gucaacuccauggguguua

SEQ ID NO: 2537791 - RNA, 19 nt, Artificial Sequence
  Description of Artificial Sequence: Synthetic oligonucleotide
  Antisense strand to SEQ ID NO: 2537790
uaacacccauggaguugac

SEQ ID NO: 2537792 - RNA, 19 nt, Artificial Sequence
  Description of Artificial Sequence: Synthetic oligonucleotide
  Sense strand starting at position 2271 of SEQ ID NO: 1888500
acuugauaauacuagauga

SEQ ID NO: 2537793 - RNA, 19 nt, Artificial Sequence
  Description of Artificial Sequence: Synthetic oligonucleotide
  Antisense strand to SEQ ID NO: 2537792
ucaucuaguauuaucaagu

SEQ ID NO: 2537794 - RNA, 19 nt, Artificial Sequence
  Description of Artificial Sequence: Synthetic oligonucleotide
  Sense strand starting at position 929 of SEQ ID NO: 1888500
gacuaauauuugugaagua

SEQ ID NO: 2537795 - RNA, 19 nt, Artificial Sequence
  Description of Artificial Sequence: Synthetic oligonucleotide
  Antisense strand to SEQ ID NO: 2537794
uacuucacaaauauuaguc

SEQ ID NO: 2537796 - RNA, 19 nt, Artificial Sequence
  Description of Artificial Sequence: Synthetic oligonucleotide
  Sense strand starting at position 232 of SEQ ID NO: 1888500
ucauguacgucuucuauaa

SEQ ID NO: 2537797 - RNA, 19 nt, Artificial Sequence
  Description of Artificial Sequence: Synthetic oligonucleotide
  Antisense strand to SEQ ID NO: 2537796
uuauagaagacguacauga

SEQ ID NO: 2537798 - RNA, 19 nt, Artificial Sequence
  Description of Artificial Sequence: Synthetic oligonucleotide
  Sense strand starting at position 2442 of SEQ ID NO: 1888500
ggguguuacugccucugaa

SEQ ID NO: 2537799 - RNA, 19 nt, Artificial Sequence
  Description of Artificial Sequence: Synthetic oligonucleotide
  Antisense strand to SEQ ID NO: 2537798
uucagaggcaguaacaccc

SEQ ID NO: 2537800 - RNA, 19 nt, Artificial Sequence
  Description of Artificial Sequence: Synthetic oligonucleotide
  Sense strand starting at position 1723 of SEQ ID NO: 1888500
gcuuauuaguacuauuuga

SEQ ID NO: 2537801 - RNA, 19 nt, Artificial Sequence
  Description of Artificial Sequence: Synthetic oligonucleotide
  Antisense strand to SEQ ID NO: 2537800
ucaaauaguacuaauaagc

SEQ ID NO: 2537802 - RNA, 19 nt, Artificial Sequence
  Description of Artificial Sequence: Synthetic oligonucleotide
  Sense strand starting at position 910 of SEQ ID NO: 1888500
gugaaaguauaacacaaua

SEQ ID NO: 2537803 - RNA, 19 nt, Artificial Sequence
  Description of Artificial Sequence: Synthetic oligonucleotide
  Antisense strand to SEQ ID NO: 2537802
uauuguguuauacuuucac

SEQ ID NO: 2537804 - RNA, 19 nt, Artificial Sequence
  Description of Artificial Sequence: Synthetic oligonucleotide
  Sense strand starting at position 260 of SEQ ID NO: 1888500
ugugcaauugauuguagca

SEQ ID NO: 2537805 - RNA, 19 nt, Artificial Sequence
  Description of Artificial Sequence: Synthetic oligonucleotide
  Antisense strand to SEQ ID NO: 2537804
ugcuacaaucaauugcaca

SEQ ID NO: 2537806 - RNA, 19 nt, Artificial Sequence
  Description of Artificial Sequence: Synthetic oligonucleotide
  Sense strand starting at position 2535 of SEQ ID NO: 1888500
uaaugagucuguuuguguc

SEQ ID NO: 2537807 - RNA, 19 nt, Artificial Sequence
  Description of Artificial Sequence: Synthetic oligonucleotide
  Antisense strand to SEQ ID NO: 2537806
gacacaaacagacucauua

SEQ ID NO: 2537808 - RNA, 19 nt, Artificial Sequence
  Description of Artificial Sequence: Synthetic oligonucleotide
  Sense strand starting at position 2533 of SEQ ID NO: 1888500
gcuaaugagucuguuugug

SEQ ID NO: 2537809 - RNA, 19 nt, Artificial Sequence
  Description of Artificial Sequence: Synthetic oligonucleotide
  Antisense strand to SEQ ID NO: 2537808
cacaaacagacucauuagc

SEQ ID NO: 2537810 - RNA, 19 nt, Artificial Sequence
  Description of Artificial Sequence: Synthetic oligonucleotide
  Sense strand starting at position 2532 of SEQ ID NO: 1888500
ggcuaaugagucuguuugu

SEQ ID NO: 2537811 - RNA, 19 nt, Artificial Sequence
  Description of Artificial Sequence: Synthetic oligonucleotide
  Antisense strand to SEQ ID NO: 2537810
acaaacagacucauuagcc

SEQ ID NO: 2537812 - RNA, 19 nt, Artificial Sequence
  Description of Artificial Sequence: Synthetic oligonucleotide
  Sense strand starting at position 852 of SEQ ID NO: 1888500
cuguaucauuaugauggaa

SEQ ID NO: 2537813 - RNA, 19 nt, Artificial Sequence
  Description of Artificial Sequence: Synthetic oligonucleotide
  Antisense strand to SEQ ID NO: 2537812
uuccaucauaaugauacag

SEQ ID NO: 2537814 - RNA, 19 nt, Artificial Sequence
  Description of Artificial Sequence: Synthetic oligonucleotide
  Sense strand starting at position 2096 of SEQ ID NO: 1888500
gguagagucuugcucuugu

SEQ ID NO: 2537815 - RNA, 19 nt, Artificial Sequence
  Description of Artificial Sequence: Synthetic oligonucleotide
  Antisense strand to SEQ ID NO: 2537814
acaagagcaagacucuacc

SEQ ID NO: 2537816 - RNA, 19 nt, Artificial Sequence
  Description of Artificial Sequence: Synthetic oligonucleotide
  Sense strand starting at position 265 of SEQ ID NO: 1888500
aauugauuguagcacaaag

SEQ ID NO: 2537817 - RNA, 19 nt, Artificial Sequence
  Description of Artificial Sequence: Synthetic oligonucleotide
  Antisense strand to SEQ ID NO: 2537816
cuuugugcuacaaucaauu

SEQ ID NO: 2537818 - RNA, 19 nt, Artificial Sequence
  Description of Artificial Sequence: Synthetic oligonucleotide
  Sense strand starting at position 854 of SEQ ID NO: 1888500
guaucauuaugauggaaca

SEQ ID NO: 2537819 - RNA, 19 nt, Artificial Sequence
  Description of Artificial Sequence: Synthetic oligonucleotide
  Antisense strand to SEQ ID NO: 2537818
uguuccaucauaaugauac

SEQ ID NO: 2537820 - RNA, 19 nt, Artificial Sequence
  Description of Artificial Sequence: Synthetic oligonucleotide
  Sense strand starting at position 851 of SEQ ID NO: 1888500
acuguaucauuaugaugga

SEQ ID NO: 2537821 - RNA, 19 nt, Artificial Sequence
  Description of Artificial Sequence: Synthetic oligonucleotide
  Antisense strand to SEQ ID NO: 2537820
uccaucauaaugauacagu

SEQ ID NO: 2537822 - RNA, 19 nt, Artificial Sequence
  Description of Artificial Sequence: Synthetic oligonucleotide
  Sense strand starting at position 419 of SEQ ID NO: 1888501
augcaaauacuguaagauc

SEQ ID NO: 2537823 - RNA, 19 nt, Artificial Sequence
  Description of Artificial Sequence: Synthetic oligonucleotide
  Antisense strand to SEQ ID NO: 2537822
gaucuuacaguauuugcau

SEQ ID NO: 2537824 - RNA, 19 nt, Artificial Sequence
  Description of Artificial Sequence: Synthetic oligonucleotide
  Sense strand starting at position 2066 of SEQ ID NO: 1888501
agugaagaaugaucucauc

SEQ ID NO: 2537825 - RNA, 19 nt, Artificial Sequence
  Description of Artificial Sequence: Synthetic oligonucleotide
  Antisense strand to SEQ ID NO: 2537824
gaugagaucauucuucacu

SEQ ID NO: 2537826 - RNA, 19 nt, Artificial Sequence
  Description of Artificial Sequence: Synthetic oligonucleotide
  Sense strand starting at position 2498 of SEQ ID NO: 1888501
ccucuuaaggacugaacau

SEQ ID NO: 2537827 - RNA, 19 nt, Artificial Sequence
  Description of Artificial Sequence: Synthetic oligonucleotide
  Antisense strand to SEQ ID NO: 2537826
auguucaguccuuaagagg

SEQ ID NO: 2537828 - RNA, 19 nt, Artificial Sequence
  Description of Artificial Sequence: Synthetic oligonucleotide
  Sense strand starting at position 2477 of SEQ ID NO: 1888501
agugauguccacuaauaau

SEQ ID NO: 2537829 - RNA, 19 nt, Artificial Sequence
  Description of Artificial Sequence: Synthetic oligonucleotide
  Antisense strand to SEQ ID NO: 2537828
auuauuaguggacaucacu

SEQ ID NO: 2537830 - RNA, 19 nt, Artificial Sequence
  Description of Artificial Sequence: Synthetic oligonucleotide
  Sense strand starting at position 445 of SEQ ID NO: 1888501
cccacuacuggguauaacu

SEQ ID NO: 2537831 - RNA, 19 nt, Artificial Sequence
  Description of Artificial Sequence: Synthetic oligonucleotide
  Antisense strand to SEQ ID NO: 2537830
aguuauacccaguaguggg

SEQ ID NO: 2537832 - RNA, 19 nt, Artificial Sequence
  Description of Artificial Sequence: Synthetic oligonucleotide
  Sense strand starting at position 941 of SEQ ID NO: 1888501
ggaaucauauaacugcuaa

SEQ ID NO: 2537833 - RNA, 19 nt, Artificial Sequence
  Description of Artificial Sequence: Synthetic oligonucleotide
  Antisense strand to SEQ ID NO: 2537832
uuagcaguuauaugauucc

SEQ ID NO: 2537834 - RNA, 19 nt, Artificial Sequence
  Description of Artificial Sequence: Synthetic oligonucleotide
  Sense strand starting at position 453 of SEQ ID NO: 1888501
uggguauaacuccagagca

SEQ ID NO: 2537835 - RNA, 19 nt, Artificial Sequence
  Description of Artificial Sequence: Synthetic oligonucleotide
  Antisense strand to SEQ ID NO: 2537834
ugcucuggaguuauaccca

SEQ ID NO: 2537836 - RNA, 19 nt, Artificial Sequence
  Description of Artificial Sequence: Synthetic oligonucleotide
  Sense strand starting at position 2606 of SEQ ID NO: 1888501
ucacucuuccagggacaca

SEQ ID NO: 2537837 - RNA, 19 nt, Artificial Sequence
  Description of Artificial Sequence: Synthetic oligonucleotide
  Antisense strand to SEQ ID NO: 2537836
ugugucccuggaagaguga

SEQ ID NO: 2537838 - RNA, 19 nt, Artificial Sequence
  Description of Artificial Sequence: Synthetic oligonucleotide
  Sense strand starting at position 2750 of SEQ ID NO: 1888501
uuaaauuaacccugggagu

SEQ ID NO: 2537839 - RNA, 19 nt, Artificial Sequence
  Description of Artificial Sequence: Synthetic oligonucleotide
  Antisense strand to SEQ ID NO: 2537838
acucccaggguuaauuuaa

SEQ ID NO: 2537840 - RNA, 19 nt, Artificial Sequence
  Description of Artificial Sequence: Synthetic oligonucleotide
  Sense strand starting at position 2926 of SEQ ID NO: 1888501
gagucaugcccacagacau

SEQ ID NO: 2537841 - RNA, 19 nt, Artificial Sequence
  Description of Artificial Sequence: Synthetic oligonucleotide
  Antisense strand to SEQ ID NO: 2537840
augucugugggcaugacuc

SEQ ID NO: 2537842 - RNA, 19 nt, Artificial Sequence
  Description of Artificial Sequence: Synthetic oligonucleotide
  Sense strand starting at position 788 of SEQ ID NO: 1888501
ggagaauggaaugguuugu

SEQ ID NO: 2537843 - RNA, 19 nt, Artificial Sequence
  Description of Artificial Sequence: Synthetic oligonucleotide
  Antisense strand to SEQ ID NO: 2537842
acaaaccauuccauucucc

SEQ ID NO: 2537844 - RNA, 19 nt, Artificial Sequence
  Description of Artificial Sequence: Synthetic oligonucleotide
  Sense strand starting at position 792 of SEQ ID NO: 1888501
aauggaaugguuugugaau

SEQ ID NO: 2537845 - RNA, 19 nt, Artificial Sequence
  Description of Artificial Sequence: Synthetic oligonucleotide
  Antisense strand to SEQ ID NO: 2537844
auucacaaaccauuccauu

SEQ ID NO: 2537846 - RNA, 19 nt, Artificial Sequence
  Description of Artificial Sequence: Synthetic oligonucleotide
  Sense strand starting at position 793 of SEQ ID NO: 1888501
auggaaugguuugugaaug

SEQ ID NO: 2537847 - RNA, 19 nt, Artificial Sequence
  Description of Artificial Sequence: Synthetic oligonucleotide
  Antisense strand to SEQ ID NO: 2537846
cauucacaaaccauuccau

SEQ ID NO: 2537848 - RNA, 19 nt, Artificial Sequence
  Description of Artificial Sequence: Synthetic oligonucleotide
  Sense strand starting at position 3468 of SEQ ID NO: 1888501
caagauacccgauguaaau

SEQ ID NO: 2537849 - RNA, 19 nt, Artificial Sequence
  Description of Artificial Sequence: Synthetic oligonucleotide
  Antisense strand to SEQ ID NO: 2537848
auuuacaucggguaucuug

SEQ ID NO: 2537850 - RNA, 19 nt, Artificial Sequence
  Description of Artificial Sequence: Synthetic oligonucleotide
  Sense strand starting at position 3083 of SEQ ID NO: 1888501
gauaaucuuugaguaguaa

SEQ ID NO: 2537851 - RNA, 19 nt, Artificial Sequence
  Description of Artificial Sequence: Synthetic oligonucleotide
  Antisense strand to SEQ ID NO: 2537850
uuacuacucaaagauuauc

SEQ ID NO: 2537852 - RNA, 19 nt, Artificial Sequence
  Description of Artificial Sequence: Synthetic oligonucleotide
  Sense strand starting at position 2937 of SEQ ID NO: 1888501
acagacauccugcauugua

SEQ ID NO: 2537853 - RNA, 19 nt, Artificial Sequence
  Description of Artificial Sequence: Synthetic oligonucleotide
  Antisense strand to SEQ ID NO: 2537852
uacaaugcaggaugucugu

SEQ ID NO: 2537854 - RNA, 19 nt, Artificial Sequence
  Description of Artificial Sequence: Synthetic oligonucleotide
  Sense strand starting at position 166 of SEQ ID NO: 1888501
ggucaaugugggcagauua

SEQ ID NO: 2537855 - RNA, 19 nt, Artificial Sequence
  Description of Artificial Sequence: Synthetic oligonucleotide
  Antisense strand to SEQ ID NO: 2537854
uaaucugcccacauugacc

SEQ ID NO: 2537856 - RNA, 19 nt, Artificial Sequence
  Description of Artificial Sequence: Synthetic oligonucleotide
  Sense strand starting at position 2752 of SEQ ID NO: 1888501
aaauuaacccugggagugu

SEQ ID NO: 2537857 - RNA, 19 nt, Artificial Sequence
  Description of Artificial Sequence: Synthetic oligonucleotide
  Antisense strand to SEQ ID NO: 2537856
acacucccaggguuaauuu

SEQ ID NO: 2537858 - RNA, 19 nt, Artificial Sequence
  Description of Artificial Sequence: Synthetic oligonucleotide
  Sense strand starting at position 99 of SEQ ID NO: 1888501
guacauauucuaugguaaa

SEQ ID NO: 2537859 - RNA, 19 nt, Artificial Sequence
  Description of Artificial Sequence: Synthetic oligonucleotide
  Antisense strand to SEQ ID NO: 2537858
uuuaccauagaauauguac

SEQ ID NO: 2537860 - RNA, 19 nt, Artificial Sequence
  Description of Artificial Sequence: Synthetic oligonucleotide
  Sense strand starting at position 918 of SEQ ID NO: 1888501
cgaaguuuggacgaaaguu

SEQ ID NO: 2537861 - RNA, 19 nt, Artificial Sequence
  Description of Artificial Sequence: Synthetic oligonucleotide
  Antisense strand to SEQ ID NO: 2537860
aacuuucguccaaacuucg

SEQ ID NO: 2537862 - RNA, 19 nt, Artificial Sequence
  Description of Artificial Sequence: Synthetic oligonucleotide
  Sense strand starting at position 2524 of SEQ ID NO: 1888501
caaauagcugaaugugauc

SEQ ID NO: 2537863 - RNA, 19 nt, Artificial Sequence
  Description of Artificial Sequence: Synthetic oligonucleotide
  Antisense strand to SEQ ID NO: 2537862
gaucacauucagcuauuug

SEQ ID NO: 2537864 - RNA, 19 nt, Artificial Sequence
  Description of Artificial Sequence: Synthetic oligonucleotide
  Sense strand starting at position 724 of SEQ ID NO: 1888501
ugcucaucaguuggaaaga

SEQ ID NO: 2537865 - RNA, 19 nt, Artificial Sequence
  Description of Artificial Sequence: Synthetic oligonucleotide
  Antisense strand to SEQ ID NO: 2537864
ucuuuccaacugaugagca

SEQ ID NO: 2537866 - RNA, 19 nt, Artificial Sequence
  Description of Artificial Sequence: Synthetic oligonucleotide
  Sense strand starting at position 723 of SEQ ID NO: 1888501
augcucaucaguuggaaag

SEQ ID NO: 2537867 - RNA, 19 nt, Artificial Sequence
  Description of Artificial Sequence: Synthetic oligonucleotide
  Antisense strand to SEQ ID NO: 2537866
cuuuccaacugaugagcau

SEQ ID NO: 2537868 - RNA, 19 nt, Artificial Sequence
  Description of Artificial Sequence: Synthetic oligonucleotide
  Sense strand starting at position 2767 of SEQ ID NO: 1888501
gugugaugaaaccagcagu

SEQ ID NO: 2537869 - RNA, 19 nt, Artificial Sequence
  Description of Artificial Sequence: Synthetic oligonucleotide
  Antisense strand to SEQ ID NO: 2537868
acugcugguuucaucacac

SEQ ID NO: 2537870 - RNA, 19 nt, Artificial Sequence
  Description of Artificial Sequence: Synthetic oligonucleotide
  Sense strand starting at position 3546 of SEQ ID NO: 1888501
ggaacucucuucuagauuu

SEQ ID NO: 2537871 - RNA, 19 nt, Artificial Sequence
  Description of Artificial Sequence: Synthetic oligonucleotide
  Antisense strand to SEQ ID NO: 2537870
aaaucuagaagagaguucc

SEQ ID NO: 2537872 - RNA, 19 nt, Artificial Sequence
  Description of Artificial Sequence: Synthetic oligonucleotide
  Sense strand starting at position 3789 of SEQ ID NO: 1888501
ucuugaacaucugcaaagu

SEQ ID NO: 2537873 - RNA, 19 nt, Artificial Sequence
  Description of Artificial Sequence: Synthetic oligonucleotide
  Antisense strand to SEQ ID NO: 2537872
acuuugcagauguucaaga

SEQ ID NO: 2537874 - RNA, 19 nt, Artificial Sequence
  Description of Artificial Sequence: Synthetic oligonucleotide
  Sense strand starting at position 165 of SEQ ID NO: 1888501
aggucaaugugggcagauu

SEQ ID NO: 2537875 - RNA, 19 nt, Artificial Sequence
  Description of Artificial Sequence: Synthetic oligonucleotide
  Antisense strand to SEQ ID NO: 2537874
aaucugcccacauugaccu

SEQ ID NO: 2537876 - RNA, 19 nt, Artificial Sequence
  Description of Artificial Sequence: Synthetic oligonucleotide
  Sense strand starting at position 721 of SEQ ID NO: 1888501
ccaugcucaucaguuggaa

SEQ ID NO: 2537877 - RNA, 19 nt, Artificial Sequence
  Description of Artificial Sequence: Synthetic oligonucleotide
  Antisense strand to SEQ ID NO: 2537876
uuccaacugaugagcaugg

SEQ ID NO: 2537878 - RNA, 19 nt, Artificial Sequence
  Description of Artificial Sequence: Synthetic oligonucleotide
  Sense strand starting at position 3465 of SEQ ID NO: 1888501
agccaagauacccgaugua

SEQ ID NO: 2537879 - RNA, 19 nt, Artificial Sequence
  Description of Artificial Sequence: Synthetic oligonucleotide
  Antisense strand to SEQ ID NO: 2537878
uacaucggguaucuuggcu

SEQ ID NO: 2537880 - RNA, 19 nt, Artificial Sequence
  Description of Artificial Sequence: Synthetic oligonucleotide
  Sense strand starting at position 3023 of SEQ ID NO: 1888501
aacuuaaggcuuugauguu

SEQ ID NO: 2537881 - RNA, 19 nt, Artificial Sequence
  Description of Artificial Sequence: Synthetic oligonucleotide
  Antisense strand to SEQ ID NO: 2537880
aacaucaaagccuuaaguu

SEQ ID NO: 2537882 - RNA, 19 nt, Artificial Sequence
  Description of Artificial Sequence: Synthetic oligonucleotide
  Sense strand starting at position 2738 of SEQ ID NO: 1888501
gaggcugguucuuuaaauu

SEQ ID NO: 2537883 - RNA, 19 nt, Artificial Sequence
  Description of Artificial Sequence: Synthetic oligonucleotide
  Antisense strand to SEQ ID NO: 2537882
aauuuaaagaaccagccuc

SEQ ID NO: 2537884 - RNA, 19 nt, Artificial Sequence
  Description of Artificial Sequence: Synthetic oligonucleotide
  Sense strand starting at position 3565 of SEQ ID NO: 1888501
ccugauucugguugcugaa

SEQ ID NO: 2537885 - RNA, 19 nt, Artificial Sequence
  Description of Artificial Sequence: Synthetic oligonucleotide
  Antisense strand to SEQ ID NO: 2537884
uucagcaaccagaaucagg

SEQ ID NO: 2537886 - RNA, 19 nt, Artificial Sequence
  Description of Artificial Sequence: Synthetic oligonucleotide
  Sense strand starting at position 2623 of SEQ ID NO: 1888501
caguuagcacggugaugaa

SEQ ID NO: 2537887 - RNA, 19 nt, Artificial Sequence
  Description of Artificial Sequence: Synthetic oligonucleotide
  Antisense strand to SEQ ID NO: 2537886
uucaucaccgugcuaacug

SEQ ID NO: 2537888 - RNA, 19 nt, Artificial Sequence
  Description of Artificial Sequence: Synthetic oligonucleotide
  Sense strand starting at position 3657 of SEQ ID NO: 1888501
gggagcuaggucugcauau

SEQ ID NO: 2537889 - RNA, 19 nt, Artificial Sequence
  Description of Artificial Sequence: Synthetic oligonucleotide
  Antisense strand to SEQ ID NO: 2537888
auaugcagaccuagcuccc

SEQ ID NO: 2537890 - RNA, 19 nt, Artificial Sequence
  Description of Artificial Sequence: Synthetic oligonucleotide
  Sense strand starting at position 3032 of SEQ ID NO: 1888501
cuuugauguuuggugguga

SEQ ID NO: 2537891 - RNA, 19 nt, Artificial Sequence
  Description of Artificial Sequence: Synthetic oligonucleotide
  Antisense strand to SEQ ID NO: 2537890
ucaccaccaaacaucaaag

SEQ ID NO: 2537892 - RNA, 19 nt, Artificial Sequence
  Description of Artificial Sequence: Synthetic oligonucleotide
  Sense strand starting at position 539 of SEQ ID NO: 1888501
ugaggaaacugauauccau

SEQ ID NO: 2537893 - RNA, 19 nt, Artificial Sequence
  Description of Artificial Sequence: Synthetic oligonucleotide
  Antisense strand to SEQ ID NO: 2537892
auggauaucaguuuccuca

SEQ ID NO: 2537894 - RNA, 19 nt, Artificial Sequence
  Description of Artificial Sequence: Synthetic oligonucleotide
  Sense strand starting at position 2737 of SEQ ID NO: 1888501
cgaggcugguucuuuaaau

SEQ ID NO: 2537895 - RNA, 19 nt, Artificial Sequence
  Description of Artificial Sequence: Synthetic oligonucleotide
  Antisense strand to SEQ ID NO: 2537894
auuuaaagaaccagccucg

SEQ ID NO: 2537896 - RNA, 19 nt, Artificial Sequence
  Description of Artificial Sequence: Synthetic oligonucleotide
  Sense strand starting at position 3564 of SEQ ID NO: 1888501
uccugauucugguugcuga

SEQ ID NO: 2537897 - RNA, 19 nt, Artificial Sequence
  Description of Artificial Sequence: Synthetic oligonucleotide
  Antisense strand to SEQ ID NO: 2537896
ucagcaaccagaaucagga

SEQ ID NO: 2537898 - RNA, 19 nt, Artificial Sequence
  Description of Artificial Sequence: Synthetic oligonucleotide
  Sense strand starting at position 2531 of SEQ ID NO: 1888501
cugaaugugaucggcagua

SEQ ID NO: 2537899 - RNA, 19 nt, Artificial Sequence
  Description of Artificial Sequence: Synthetic oligonucleotide
  Antisense strand to SEQ ID NO: 2537898
uacugccgaucacauucag

SEQ ID NO: 2537900 - RNA, 19 nt, Artificial Sequence
  Description of Artificial Sequence: Synthetic oligonucleotide
  Sense strand starting at position 3229 of SEQ ID NO: 1888501
gcaugaucucagcaccgca

SEQ ID NO: 2537901 - RNA, 19 nt, Artificial Sequence
  Description of Artificial Sequence: Synthetic oligonucleotide
  Antisense strand to SEQ ID NO: 2537900
ugcggugcugagaucaugc

SEQ ID NO: 2537902 - RNA, 19 nt, Artificial Sequence
  Description of Artificial Sequence: Synthetic oligonucleotide
  Sense strand starting at position 3158 of SEQ ID NO: 1888502
gcugcagcgauuguuuaga

SEQ ID NO: 2537903 - RNA, 19 nt, Artificial Sequence
  Description of Artificial Sequence: Synthetic oligonucleotide
  Antisense strand to SEQ ID NO: 2537902
ucuaaacaaucgcugcagc

SEQ ID NO: 2537904 - RNA, 19 nt, Artificial Sequence
  Description of Artificial Sequence: Synthetic oligonucleotide
  Sense strand starting at position 2086 of SEQ ID NO: 1888502
uuuccuugccuagaggagu

SEQ ID NO: 2537905 - RNA, 19 nt, Artificial Sequence
  Description of Artificial Sequence: Synthetic oligonucleotide
  Antisense strand to SEQ ID NO: 2537904
acuccucuaggcaaggaaa

SEQ ID NO: 2537906 - RNA, 19 nt, Artificial Sequence
  Description of Artificial Sequence: Synthetic oligonucleotide
  Sense strand starting at position 3660 of SEQ ID NO: 1888502
aaguacugugucgacucaa

SEQ ID NO: 2537907 - RNA, 19 nt, Artificial Sequence
  Description of Artificial Sequence: Synthetic oligonucleotide
  Antisense strand to SEQ ID NO: 2537906
uugagucgacacaguacuu

SEQ ID NO: 2537908 - RNA, 19 nt, Artificial Sequence
  Description of Artificial Sequence: Synthetic oligonucleotide
  Sense strand starting at position 613 of SEQ ID NO: 1888502
cagcauuguguguaaccca

SEQ ID NO: 2537909 - RNA, 19 nt, Artificial Sequence
  Description of Artificial Sequence: Synthetic oligonucleotide
  Antisense strand to SEQ ID NO: 2537908
uggguuacacacaaugcug

SEQ ID NO: 2537910 - RNA, 19 nt, Artificial Sequence
  Description of Artificial Sequence: Synthetic oligonucleotide
  Sense strand starting at position 3462 of SEQ ID NO: 1888502
gugucauucugguccugau

SEQ ID NO: 2537911 - RNA, 19 nt, Artificial Sequence
  Description of Artificial Sequence: Synthetic oligonucleotide
  Antisense strand to SEQ ID NO: 2537910
aucaggaccagaaugacac

SEQ ID NO: 2537912 - RNA, 19 nt, Artificial Sequence
  Description of Artificial Sequence: Synthetic oligonucleotide
  Sense strand starting at position 609 of SEQ ID NO: 1888502
auggcagcauuguguguaa

SEQ ID NO: 2537913 - RNA, 19 nt, Artificial Sequence
  Description of Artificial Sequence: Synthetic oligonucleotide
  Antisense strand to SEQ ID NO: 2537912
uuacacacaaugcugccau

SEQ ID NO: 2537914 - RNA, 19 nt, Artificial Sequence
  Description of Artificial Sequence: Synthetic oligonucleotide
  Sense strand starting at position 2100 of SEQ ID NO: 1888502
ggagucagcugcuguguua

SEQ ID NO: 2537915 - RNA, 19 nt, Artificial Sequence
  Description of Artificial Sequence: Synthetic oligonucleotide
  Antisense strand to SEQ ID NO: 2537914
uaacacagcagcugacucc

SEQ ID NO: 2537916 - RNA, 19 nt, Artificial Sequence
  Description of Artificial Sequence: Synthetic oligonucleotide
  Sense strand starting at position 866 of SEQ ID NO: 1888503
gagcuuauacaggagcaua

SEQ ID NO: 2537917 - RNA, 19 nt, Artificial Sequence
  Description of Artificial Sequence: Synthetic oligonucleotide
  Antisense strand to SEQ ID NO: 2537916
uaugcuccuguauaagcuc

SEQ ID NO: 2537918 - RNA, 19 nt, Artificial Sequence
  Description of Artificial Sequence: Synthetic oligonucleotide
  Sense strand starting at position 503 of SEQ ID NO: 1888503
uuuacauagguuugauaug

SEQ ID NO: 2537919 - RNA, 19 nt, Artificial Sequence
  Description of Artificial Sequence: Synthetic oligonucleotide
  Antisense strand to SEQ ID NO: 2537918
cauaucaaaccuauguaaa

SEQ ID NO: 2537920 - RNA, 19 nt, Artificial Sequence
  Description of Artificial Sequence: Synthetic oligonucleotide
  Sense strand starting at position 509 of SEQ ID NO: 1888503
uagguuugauaugcaacaa

SEQ ID NO: 2537921 - RNA, 19 nt, Artificial Sequence
  Description of Artificial Sequence: Synthetic oligonucleotide
  Antisense strand to SEQ ID NO: 2537920
uuguugcauaucaaaccua

SEQ ID NO: 2537922 - RNA, 19 nt, Artificial Sequence
  Description of Artificial Sequence: Synthetic oligonucleotide
  Sense strand starting at position 3544 of SEQ ID NO: 1888503
aggcauuaccucuguaagg

SEQ ID NO: 2537923 - RNA, 19 nt, Artificial Sequence
  Description of Artificial Sequence: Synthetic oligonucleotide
  Antisense strand to SEQ ID NO: 2537922
ccuuacagagguaaugccu

SEQ ID NO: 2537924 - RNA, 19 nt, Artificial Sequence
  Description of Artificial Sequence: Synthetic oligonucleotide
  Sense strand starting at position 290 of SEQ ID NO: 1888503
agugcuuuacuguauuaug

SEQ ID NO: 2537925 - RNA, 19 nt, Artificial Sequence
  Description of Artificial Sequence: Synthetic oligonucleotide
  Antisense strand to SEQ ID NO: 2537924
cauaauacaguaaagcacu

SEQ ID NO: 2537926 - RNA, 19 nt, Artificial Sequence
  Description of Artificial Sequence: Synthetic oligonucleotide
  Sense strand starting at position 3546 of SEQ ID NO: 1888503
gcauuaccucuguaaggcu

SEQ ID NO: 2537927 - RNA, 19 nt, Artificial Sequence
  Description of Artificial Sequence: Synthetic oligonucleotide
  Antisense strand to SEQ ID NO: 2537926
agccuuacagagguaaugc

SEQ ID NO: 2537928 - RNA, 19 nt, Artificial Sequence
  Description of Artificial Sequence: Synthetic oligonucleotide
  Sense strand starting at position 2327 of SEQ ID NO: 1888503
gaacuugguuuagugcuau

SEQ ID NO: 2537929 - RNA, 19 nt, Artificial Sequence
  Description of Artificial Sequence: Synthetic oligonucleotide
  Antisense strand to SEQ ID NO: 2537928
auagcacuaaaccaaguuc

SEQ ID NO: 2537930 - RNA, 19 nt, Artificial Sequence
  Description of Artificial Sequence: Synthetic oligonucleotide
  Sense strand starting at position 2333 of SEQ ID NO: 1888503
gguuuagugcuauguuguc

SEQ ID NO: 2537931 - RNA, 19 nt, Artificial Sequence
  Description of Artificial Sequence: Synthetic oligonucleotide
  Antisense strand to SEQ ID NO: 2537930
gacaacauagcacuaaacc

SEQ ID NO: 2537932 - RNA, 19 nt, Artificial Sequence
  Description of Artificial Sequence: Synthetic oligonucleotide
  Sense strand starting at position 293 of SEQ ID NO: 1888503
gcuuuacuguauuauggaa

SEQ ID NO: 2537933 - RNA, 19 nt, Artificial Sequence
  Description of Artificial Sequence: Synthetic oligonucleotide
  Antisense strand to SEQ ID NO: 2537932
uuccauaauacaguaaagc

SEQ ID NO: 2537934 - RNA, 19 nt, Artificial Sequence
  Description of Artificial Sequence: Synthetic oligonucleotide
  Sense strand starting at position 866 of SEQ ID NO: 1888504
gagcuuauacaggagcaua

SEQ ID NO: 2537935 - RNA, 19 nt, Artificial Sequence
  Description of Artificial Sequence: Synthetic oligonucleotide
  Antisense strand to SEQ ID NO: 2537934
uaugcuccuguauaagcuc

SEQ ID NO: 2537936 - RNA, 19 nt, Artificial Sequence
  Description of Artificial Sequence: Synthetic oligonucleotide
  Sense strand starting at position 503 of SEQ ID NO: 1888504
uuuacauagguuugauaug

SEQ ID NO: 2537937 - RNA, 19 nt, Artificial Sequence
  Description of Artificial Sequence: Synthetic oligonucleotide
  Antisense strand to SEQ ID NO: 2537936
cauaucaaaccuauguaaa

SEQ ID NO: 2537938 - RNA, 19 nt, Artificial Sequence
  Description of Artificial Sequence: Synthetic oligonucleotide
  Sense strand starting at position 509 of SEQ ID NO: 1888504
uagguuugauaugcaacaa

SEQ ID NO: 2537939 - RNA, 19 nt, Artificial Sequence
  Description of Artificial Sequence: Synthetic oligonucleotide
  Antisense strand to SEQ ID NO: 2537938
uuguugcauaucaaaccua

SEQ ID NO: 2537940 - RNA, 19 nt, Artificial Sequence
  Description of Artificial Sequence: Synthetic oligonucleotide
  Sense strand starting at position 3544 of SEQ ID NO: 1888504
aggcauuaccucuguaagg

SEQ ID NO: 2537941 - RNA, 19 nt, Artificial Sequence
  Description of Artificial Sequence: Synthetic oligonucleotide
  Antisense strand to SEQ ID NO: 2537940
ccuuacagagguaaugccu

SEQ ID NO: 2537942 - RNA, 19 nt, Artificial Sequence
  Description of Artificial Sequence: Synthetic oligonucleotide
  Sense strand starting at position 290 of SEQ ID NO: 1888504
agugcuuuacuguauuaug

SEQ ID NO: 2537943 - RNA, 19 nt, Artificial Sequence
  Description of Artificial Sequence: Synthetic oligonucleotide
  Antisense strand to SEQ ID NO: 2537942
cauaauacaguaaagcacu

SEQ ID NO: 2537944 - RNA, 19 nt, Artificial Sequence
  Description of Artificial Sequence: Synthetic oligonucleotide
  Sense strand starting at position 3546 of SEQ ID NO: 1888504
gcauuaccucuguaaggcu

SEQ ID NO: 2537945 - RNA, 19 nt, Artificial Sequence
  Description of Artificial Sequence: Synthetic oligonucleotide
  Antisense strand to SEQ ID NO: 2537944
agccuuacagagguaaugc

SEQ ID NO: 2537946 - RNA, 19 nt, Artificial Sequence
  Description of Artificial Sequence: Synthetic oligonucleotide
  Sense strand starting at position 2327 of SEQ ID NO: 1888504
gaacuugguuuagugcuau

SEQ ID NO: 2537947 - RNA, 19 nt, Artificial Sequence
  Description of Artificial Sequence: Synthetic oligonucleotide
  Antisense strand to SEQ ID NO: 2537946
auagcacuaaaccaaguuc

SEQ ID NO: 2537948 - RNA, 19 nt, Artificial Sequence
  Description of Artificial Sequence: Synthetic oligonucleotide
  Sense strand starting at position 2333 of SEQ ID NO: 1888504
gguuuagugcuauguuguc

SEQ ID NO: 2537949 - RNA, 19 nt, Artificial Sequence
  Description of Artificial Sequence: Synthetic oligonucleotide
  Antisense strand to SEQ ID NO: 2537948
gacaacauagcacuaaacc

SEQ ID NO: 2537950 - RNA, 19 nt, Artificial Sequence
  Description of Artificial Sequence: Synthetic oligonucleotide
  Sense strand starting at position 293 of SEQ ID NO: 1888504
gcuuuacuguauuauggaa

SEQ ID NO: 2537951 - RNA, 19 nt, Artificial Sequence
  Description of Artificial Sequence: Synthetic oligonucleotide
  Antisense strand to SEQ ID NO: 2537950
uuccauaauacaguaaagc

SEQ ID NO: 2537952 - RNA, 19 nt, Artificial Sequence
  Description of Artificial Sequence: Synthetic oligonucleotide
  Sense strand starting at position 8 of SEQ ID NO: 1888505
aguagacuacuguauuaca

SEQ ID NO: 2537953 - RNA, 19 nt, Artificial Sequence
  Description of Artificial Sequence: Synthetic oligonucleotide
  Antisense strand to SEQ ID NO: 2537952
uguaauacaguagucuacu

SEQ ID NO: 2537954 - RNA, 19 nt, Artificial Sequence
  Description of Artificial Sequence: Synthetic oligonucleotide
  Sense strand starting at position 167 of SEQ ID NO: 1888505
gcaauuauguaacuauaag

SEQ ID NO: 2537955 - RNA, 19 nt, Artificial Sequence
  Description of Artificial Sequence: Synthetic oligonucleotide
  Antisense strand to SEQ ID NO: 2537954
cuuauaguuacauaauugc

SEQ ID NO: 2537956 - RNA, 19 nt, Artificial Sequence
  Description of Artificial Sequence: Synthetic oligonucleotide
  Sense strand starting at position 2848 of SEQ ID NO: 1888505
uacugauugcuuuagcuag

SEQ ID NO: 2537957 - RNA, 19 nt, Artificial Sequence
  Description of Artificial Sequence: Synthetic oligonucleotide
  Antisense strand to SEQ ID NO: 2537956
cuagcuaaagcaaucagua

SEQ ID NO: 2537958 - RNA, 19 nt, Artificial Sequence
  Description of Artificial Sequence: Synthetic oligonucleotide
  Sense strand starting at position 2156 of SEQ ID NO: 1888505
ugaguucuccuuugcacag

SEQ ID NO: 2537959 - RNA, 19 nt, Artificial Sequence
  Description of Artificial Sequence: Synthetic oligonucleotide
  Antisense strand to SEQ ID NO: 2537958
cugugcaaaggagaacuca

SEQ ID NO: 2537960 - RNA, 19 nt, Artificial Sequence
  Description of Artificial Sequence: Synthetic oligonucleotide
  Sense strand starting at position 3940 of SEQ ID NO: 1888505
uggcuuucugcguaacaag

SEQ ID NO: 2537961 - RNA, 19 nt, Artificial Sequence
  Description of Artificial Sequence: Synthetic oligonucleotide
  Antisense strand to SEQ ID NO: 2537960
cuuguuacgcagaaagcca

SEQ ID NO: 2537962 - RNA, 19 nt, Artificial Sequence
  Description of Artificial Sequence: Synthetic oligonucleotide
  Sense strand starting at position 3907 of SEQ ID NO: 1888505
aggcacuuguagcuguaaa

SEQ ID NO: 2537963 - RNA, 19 nt, Artificial Sequence
  Description of Artificial Sequence: Synthetic oligonucleotide
  Antisense strand to SEQ ID NO: 2537962
uuuacagcuacaagugccu

SEQ ID NO: 2537964 - RNA, 19 nt, Artificial Sequence
  Description of Artificial Sequence: Synthetic oligonucleotide
  Sense strand starting at position 3908 of SEQ ID NO: 1888505
ggcacuuguagcuguaaau

SEQ ID NO: 2537965 - RNA, 19 nt, Artificial Sequence
  Description of Artificial Sequence: Synthetic oligonucleotide
  Antisense strand to SEQ ID NO: 2537964
auuuacagcuacaagugcc

SEQ ID NO: 2537966 - RNA, 19 nt, Artificial Sequence
  Description of Artificial Sequence: Synthetic oligonucleotide
  Sense strand starting at position 2843 of SEQ ID NO: 1888505
ggcuguacugauugcuuua

SEQ ID NO: 2537967 - RNA, 19 nt, Artificial Sequence
  Description of Artificial Sequence: Synthetic oligonucleotide
  Antisense strand to SEQ ID NO: 2537966
uaaagcaaucaguacagcc

SEQ ID NO: 2537968 - RNA, 19 nt, Artificial Sequence
  Description of Artificial Sequence: Synthetic oligonucleotide
  Sense strand starting at position 3939 of SEQ ID NO: 1888505
auggcuuucugcguaacaa

SEQ ID NO: 2537969 - RNA, 19 nt, Artificial Sequence
  Description of Artificial Sequence: Synthetic oligonucleotide
  Antisense strand to SEQ ID NO: 2537968
uuguuacgcagaaagccau

SEQ ID NO: 2537970 - RNA, 19 nt, Artificial Sequence
  Description of Artificial Sequence: Synthetic oligonucleotide
  Sense strand starting at position 3938 of SEQ ID NO: 1888505
uauggcuuucugcguaaca

SEQ ID NO: 2537971 - RNA, 19 nt, Artificial Sequence
  Description of Artificial Sequence: Synthetic oligonucleotide
  Antisense strand to SEQ ID NO: 2537970
uguuacgcagaaagccaua

SEQ ID NO: 2537972 - RNA, 19 nt, Artificial Sequence
  Description of Artificial Sequence: Synthetic oligonucleotide
  Sense strand starting at position 1721 of SEQ ID NO: 1888505
cgcaaagugcucugguuac

SEQ ID NO: 2537973 - RNA, 19 nt, Artificial Sequence
  Description of Artificial Sequence: Synthetic oligonucleotide
  Antisense strand to SEQ ID NO: 2537972
guaaccagagcacuuugcg

SEQ ID NO: 2537974 - RNA, 19 nt, Artificial Sequence
  Description of Artificial Sequence: Synthetic oligonucleotide
  Sense strand starting at position 6 of SEQ ID NO: 1888505
ccaguagacuacuguauua

SEQ ID NO: 2537975 - RNA, 19 nt, Artificial Sequence
  Description of Artificial Sequence: Synthetic oligonucleotide
  Antisense strand to SEQ ID NO: 2537974
uaauacaguagucuacugg

SEQ ID NO: 2537976 - RNA, 19 nt, Artificial Sequence
  Description of Artificial Sequence: Synthetic oligonucleotide
  Sense strand starting at position 1272 of SEQ ID NO: 1888505
accgcacucuaauguaagu

SEQ ID NO: 2537977 - RNA, 19 nt, Artificial Sequence
  Description of Artificial Sequence: Synthetic oligonucleotide
  Antisense strand to SEQ ID NO: 2537976
acuuacauuagagugcggu

SEQ ID NO: 2537978 - RNA, 19 nt, Artificial Sequence
  Description of Artificial Sequence: Synthetic oligonucleotide
  Sense strand starting at position 2805 of SEQ ID NO: 1888506
uauguugauuuguugguga

SEQ ID NO: 2537979 - RNA, 19 nt, Artificial Sequence
  Description of Artificial Sequence: Synthetic oligonucleotide
  Antisense strand to SEQ ID NO: 2537978
ucaccaacaaaucaacaua

SEQ ID NO: 2537980 - RNA, 19 nt, Artificial Sequence
  Description of Artificial Sequence: Synthetic oligonucleotide
  Sense strand starting at position 2529 of SEQ ID NO: 1888506
agaauuacugcccaugauu

SEQ ID NO: 2537981 - RNA, 19 nt, Artificial Sequence
  Description of Artificial Sequence: Synthetic oligonucleotide
  Antisense strand to SEQ ID NO: 2537980
aaucaugggcaguaauucu

SEQ ID NO: 2537982 - RNA, 19 nt, Artificial Sequence
  Description of Artificial Sequence: Synthetic oligonucleotide
  Sense strand starting at position 3435 of SEQ ID NO: 1888506
agaucuucucuggaggguu

SEQ ID NO: 2537983 - RNA, 19 nt, Artificial Sequence
  Description of Artificial Sequence: Synthetic oligonucleotide
  Antisense strand to SEQ ID NO: 2537982
aacccuccagagaagaucu

SEQ ID NO: 2537984 - RNA, 19 nt, Artificial Sequence
  Description of Artificial Sequence: Synthetic oligonucleotide
  Sense strand starting at position 2714 of SEQ ID NO: 1888506
uaagaaaggugcuugaaga

SEQ ID NO: 2537985 - RNA, 19 nt, Artificial Sequence
  Description of Artificial Sequence: Synthetic oligonucleotide
  Antisense strand to SEQ ID NO: 2537984
ucuucaagcaccuuucuua

SEQ ID NO: 2537986 - RNA, 19 nt, Artificial Sequence
  Description of Artificial Sequence: Synthetic oligonucleotide
  Sense strand starting at position 3886 of SEQ ID NO: 1888506
auguguuaaggauauauuc

SEQ ID NO: 2537987 - RNA, 19 nt, Artificial Sequence
  Description of Artificial Sequence: Synthetic oligonucleotide
  Antisense strand to SEQ ID NO: 2537986
gaauauauccuuaacacau

SEQ ID NO: 2537988 - RNA, 19 nt, Artificial Sequence
  Description of Artificial Sequence: Synthetic oligonucleotide
  Sense strand starting at position 1004 of SEQ ID NO: 1888506
ugacgucaccuugaaauag

SEQ ID NO: 2537989 - RNA, 19 nt, Artificial Sequence
  Description of Artificial Sequence: Synthetic oligonucleotide
  Antisense strand to SEQ ID NO: 2537988
cuauuucaaggugacguca

SEQ ID NO: 2537990 - RNA, 19 nt, Artificial Sequence
  Description of Artificial Sequence: Synthetic oligonucleotide
  Sense strand starting at position 2900 of SEQ ID NO: 1888506
gaggcugaacuuuauguaa

SEQ ID NO: 2537991 - RNA, 19 nt, Artificial Sequence
  Description of Artificial Sequence: Synthetic oligonucleotide
  Antisense strand to SEQ ID NO: 2537990
uuacauaaaguucagccuc

SEQ ID NO: 2537992 - RNA, 19 nt, Artificial Sequence
  Description of Artificial Sequence: Synthetic oligonucleotide
  Sense strand starting at position 97 of SEQ ID NO: 1888506
ugcccuuggcguguugaaa

SEQ ID NO: 2537993 - RNA, 19 nt, Artificial Sequence
  Description of Artificial Sequence: Synthetic oligonucleotide
  Antisense strand to SEQ ID NO: 2537992
uuucaacacgccaagggca

SEQ ID NO: 2537994 - RNA, 19 nt, Artificial Sequence
  Description of Artificial Sequence: Synthetic oligonucleotide
  Sense strand starting at position 98 of SEQ ID NO: 1888506
gcccuuggcguguugaaau

SEQ ID NO: 2537995 - RNA, 19 nt, Artificial Sequence
  Description of Artificial Sequence: Synthetic oligonucleotide
  Antisense strand to SEQ ID NO: 2537994
auuucaacacgccaagggc

SEQ ID NO: 2537996 - RNA, 19 nt, Artificial Sequence
  Description of Artificial Sequence: Synthetic oligonucleotide
  Sense strand starting at position 2808 of SEQ ID NO: 1888506
guugauuuguuggugaucu

SEQ ID NO: 2537997 - RNA, 19 nt, Artificial Sequence
  Description of Artificial Sequence: Synthetic oligonucleotide
  Antisense strand to SEQ ID NO: 2537996
agaucaccaacaaaucaac

SEQ ID NO: 2537998 - RNA, 19 nt, Artificial Sequence
  Description of Artificial Sequence: Synthetic oligonucleotide
  Sense strand starting at position 2807 of SEQ ID NO: 1888506
uguugauuuguuggugauc

SEQ ID NO: 2537999 - RNA, 19 nt, Artificial Sequence
  Description of Artificial Sequence: Synthetic oligonucleotide
  Antisense strand to SEQ ID NO: 2537998
gaucaccaacaaaucaaca

SEQ ID NO: 2538000 - RNA, 19 nt, Artificial Sequence
  Description of Artificial Sequence: Synthetic oligonucleotide
  Sense strand starting at position 3779 of SEQ ID NO: 1888506
uuggaaaggguguaaguuu

SEQ ID NO: 2538001 - RNA, 19 nt, Artificial Sequence
  Description of Artificial Sequence: Synthetic oligonucleotide
  Antisense strand to SEQ ID NO: 2538000
aaacuuacacccuuuccaa

SEQ ID NO: 2538002 - RNA, 19 nt, Artificial Sequence
  Description of Artificial Sequence: Synthetic oligonucleotide
  Sense strand starting at position 3716 of SEQ ID NO: 1888506
cuuaauguuacugggauga

SEQ ID NO: 2538003 - RNA, 19 nt, Artificial Sequence
  Description of Artificial Sequence: Synthetic oligonucleotide
  Antisense strand to SEQ ID NO: 2538002
ucaucccaguaacauuaag

SEQ ID NO: 2538004 - RNA, 19 nt, Artificial Sequence
  Description of Artificial Sequence: Synthetic oligonucleotide
  Sense strand starting at position 3720 of SEQ ID NO: 1888506
auguuacugggaugacuca

SEQ ID NO: 2538005 - RNA, 19 nt, Artificial Sequence
  Description of Artificial Sequence: Synthetic oligonucleotide
  Antisense strand to SEQ ID NO: 2538004
ugagucaucccaguaacau

SEQ ID NO: 2538006 - RNA, 19 nt, Artificial Sequence
  Description of Artificial Sequence: Synthetic oligonucleotide
  Sense strand starting at position 3354 of SEQ ID NO: 1888506
aaucuaguuugagcagaga

SEQ ID NO: 2538007 - RNA, 19 nt, Artificial Sequence
  Description of Artificial Sequence: Synthetic oligonucleotide
  Antisense strand to SEQ ID NO: 2538006
ucucugcucaaacuagauu

SEQ ID NO: 2538008 - RNA, 19 nt, Artificial Sequence
  Description of Artificial Sequence: Synthetic oligonucleotide
  Sense strand starting at position 3271 of SEQ ID NO: 1888506
agguguguucuggaacaau

SEQ ID NO: 2538009 - RNA, 19 nt, Artificial Sequence
  Description of Artificial Sequence: Synthetic oligonucleotide
  Antisense strand to SEQ ID NO: 2538008
auuguuccagaacacaccu

SEQ ID NO: 2538010 - RNA, 19 nt, Artificial Sequence
  Description of Artificial Sequence: Synthetic oligonucleotide
  Sense strand starting at position 2824 of SEQ ID NO: 1888506
ucuugacuugagcacuauu

SEQ ID NO: 2538011 - RNA, 19 nt, Artificial Sequence
  Description of Artificial Sequence: Synthetic oligonucleotide
  Antisense strand to SEQ ID NO: 2538010
aauagugcucaagucaaga

SEQ ID NO: 2538012 - RNA, 19 nt, Artificial Sequence
  Description of Artificial Sequence: Synthetic oligonucleotide
  Sense strand starting at position 2816 of SEQ ID NO: 1888506
guuggugaucuugacuuga

SEQ ID NO: 2538013 - RNA, 19 nt, Artificial Sequence
  Description of Artificial Sequence: Synthetic oligonucleotide
  Antisense strand to SEQ ID NO: 2538012
ucaagucaagaucaccaac

SEQ ID NO: 2538014 - RNA, 19 nt, Artificial Sequence
  Description of Artificial Sequence: Synthetic oligonucleotide
  Sense strand starting at position 470 of SEQ ID NO: 1888506
auguguccugaauauuacu

SEQ ID NO: 2538015 - RNA, 19 nt, Artificial Sequence
  Description of Artificial Sequence: Synthetic oligonucleotide
  Antisense strand to SEQ ID NO: 2538014
aguaauauucaggacacau

SEQ ID NO: 2538016 - RNA, 19 nt, Artificial Sequence
  Description of Artificial Sequence: Synthetic oligonucleotide
  Sense strand starting at position 1788 of SEQ ID NO: 1888506
gcauuucuccuagagcguu

SEQ ID NO: 2538017 - RNA, 19 nt, Artificial Sequence
  Description of Artificial Sequence: Synthetic oligonucleotide
  Antisense strand to SEQ ID NO: 2538016
aacgcucuaggagaaaugc

SEQ ID NO: 2538018 - RNA, 19 nt, Artificial Sequence
  Description of Artificial Sequence: Synthetic oligonucleotide
  Sense strand starting at position 3437 of SEQ ID NO: 1888506
aucuucucuggaggguuaa

SEQ ID NO: 2538019 - RNA, 19 nt, Artificial Sequence
  Description of Artificial Sequence: Synthetic oligonucleotide
  Antisense strand to SEQ ID NO: 2538018
uuaacccuccagagaagau

SEQ ID NO: 2538020 - RNA, 19 nt, Artificial Sequence
  Description of Artificial Sequence: Synthetic oligonucleotide
  Sense strand starting at position 2471 of SEQ ID NO: 1888506
cucagacaucugcauugua

SEQ ID NO: 2538021 - RNA, 19 nt, Artificial Sequence
  Description of Artificial Sequence: Synthetic oligonucleotide
  Antisense strand to SEQ ID NO: 2538020
uacaaugcagaugucugag

SEQ ID NO: 2538022 - RNA, 19 nt, Artificial Sequence
  Description of Artificial Sequence: Synthetic oligonucleotide
  Sense strand starting at position 1941 of SEQ ID NO: 1888506
ugcucugcucguucgaauu

SEQ ID NO: 2538023 - RNA, 19 nt, Artificial Sequence
  Description of Artificial Sequence: Synthetic oligonucleotide
  Antisense strand to SEQ ID NO: 2538022
aauucgaacgagcagagca

SEQ ID NO: 2538024 - RNA, 19 nt, Artificial Sequence
  Description of Artificial Sequence: Synthetic oligonucleotide
  Sense strand starting at position 732 of SEQ ID NO: 1888506
ccggcuucuccgccaguau

SEQ ID NO: 2538025 - RNA, 19 nt, Artificial Sequence
  Description of Artificial Sequence: Synthetic oligonucleotide
  Antisense strand to SEQ ID NO: 2538024
auacuggcggagaagccgg

SEQ ID NO: 2538026 - RNA, 19 nt, Artificial Sequence
  Description of Artificial Sequence: Synthetic oligonucleotide
  Sense strand starting at position 3714 of SEQ ID NO: 1888506
uucuuaauguuacugggau

SEQ ID NO: 2538027 - RNA, 19 nt, Artificial Sequence
  Description of Artificial Sequence: Synthetic oligonucleotide
  Antisense strand to SEQ ID NO: 2538026
aucccaguaacauuaagaa

SEQ ID NO: 2538028 - RNA, 19 nt, Artificial Sequence
  Description of Artificial Sequence: Synthetic oligonucleotide
  Sense strand starting at position 3732 of SEQ ID NO: 1888506
ugacucagucucuauguua

SEQ ID NO: 2538029 - RNA, 19 nt, Artificial Sequence
  Description of Artificial Sequence: Synthetic oligonucleotide
  Antisense strand to SEQ ID NO: 2538028
uaacauagagacugaguca

SEQ ID NO: 2538030 - RNA, 19 nt, Artificial Sequence
  Description of Artificial Sequence: Synthetic oligonucleotide
  Sense strand starting at position 3151 of SEQ ID NO: 1888506
cucuaagugagacguaaag

SEQ ID NO: 2538031 - RNA, 19 nt, Artificial Sequence
  Description of Artificial Sequence: Synthetic oligonucleotide
  Antisense strand to SEQ ID NO: 2538030
cuuuacgucucacuuagag

SEQ ID NO: 2538032 - RNA, 19 nt, Artificial Sequence
  Description of Artificial Sequence: Synthetic oligonucleotide
  Sense strand starting at position 3912 of SEQ ID NO: 1888506
accagucuguaaccuugaa

SEQ ID NO: 2538033 - RNA, 19 nt, Artificial Sequence
  Description of Artificial Sequence: Synthetic oligonucleotide
  Antisense strand to SEQ ID NO: 2538032
uucaagguuacagacuggu

SEQ ID NO: 2538034 - RNA, 19 nt, Artificial Sequence
  Description of Artificial Sequence: Synthetic oligonucleotide
  Sense strand starting at position 3607 of SEQ ID NO: 1888506
ggaauauauugugcuuaua

SEQ ID NO: 2538035 - RNA, 19 nt, Artificial Sequence
  Description of Artificial Sequence: Synthetic oligonucleotide
  Antisense strand to SEQ ID NO: 2538034
uauaagcacaauauauucc

SEQ ID NO: 2538036 - RNA, 19 nt, Artificial Sequence
  Description of Artificial Sequence: Synthetic oligonucleotide
  Sense strand starting at position 3610 of SEQ ID NO: 1888506
auauauugugcuuauaggu

SEQ ID NO: 2538037 - RNA, 19 nt, Artificial Sequence
  Description of Artificial Sequence: Synthetic oligonucleotide
  Antisense strand to SEQ ID NO: 2538036
accuauaagcacaauauau

SEQ ID NO: 2538038 - RNA, 19 nt, Artificial Sequence
  Description of Artificial Sequence: Synthetic oligonucleotide
  Sense strand starting at position 3561 of SEQ ID NO: 1888506
gccaucucagaauggugau

SEQ ID NO: 2538039 - RNA, 19 nt, Artificial Sequence
  Description of Artificial Sequence: Synthetic oligonucleotide
  Antisense strand to SEQ ID NO: 2538038
aucaccauucugagauggc

SEQ ID NO: 2538040 - RNA, 19 nt, Artificial Sequence
  Description of Artificial Sequence: Synthetic oligonucleotide
  Sense strand starting at position 3877 of SEQ ID NO: 1888506
gcaggacacauguguuaag

SEQ ID NO: 2538041 - RNA, 19 nt, Artificial Sequence
  Description of Artificial Sequence: Synthetic oligonucleotide
  Antisense strand to SEQ ID NO: 2538040
cuuaacacauguguccugc

SEQ ID NO: 2538042 - RNA, 19 nt, Artificial Sequence
  Description of Artificial Sequence: Synthetic oligonucleotide
  Sense strand starting at position 3179 of SEQ ID NO: 1888506
uucggagcccuuugggaaa

SEQ ID NO: 2538043 - RNA, 19 nt, Artificial Sequence
  Description of Artificial Sequence: Synthetic oligonucleotide
  Antisense strand to SEQ ID NO: 2538042
uuucccaaagggcuccgaa

SEQ ID NO: 2538044 - RNA, 19 nt, Artificial Sequence
  Description of Artificial Sequence: Synthetic oligonucleotide
  Sense strand starting at position 3349 of SEQ ID NO: 1888506
aacgaaaucuaguuugagc

SEQ ID NO: 2538045 - RNA, 19 nt, Artificial Sequence
  Description of Artificial Sequence: Synthetic oligonucleotide
  Antisense strand to SEQ ID NO: 2538044
gcucaaacuagauuucguu

SEQ ID NO: 2538046 - RNA, 19 nt, Artificial Sequence
  Description of Artificial Sequence: Synthetic oligonucleotide
  Sense strand starting at position 2125 of SEQ ID NO: 1888506
acgugacuucuaggugaga

SEQ ID NO: 2538047 - RNA, 19 nt, Artificial Sequence
  Description of Artificial Sequence: Synthetic oligonucleotide
  Antisense strand to SEQ ID NO: 2538046
ucucaccuagaagucacgu

SEQ ID NO: 2538048 - RNA, 19 nt, Artificial Sequence
  Description of Artificial Sequence: Synthetic oligonucleotide
  Sense strand starting at position 982 of SEQ ID NO: 1888506
ggcgguggcuauuuauagu

SEQ ID NO: 2538049 - RNA, 19 nt, Artificial Sequence
  Description of Artificial Sequence: Synthetic oligonucleotide
  Antisense strand to SEQ ID NO: 2538048
acuauaaauagccaccgcc

SEQ ID NO: 2538050 - RNA, 19 nt, Artificial Sequence
  Description of Artificial Sequence: Synthetic oligonucleotide
  Sense strand starting at position 2988 of SEQ ID NO: 1888506
ugcauuuccuuggaaggga

SEQ ID NO: 2538051 - RNA, 19 nt, Artificial Sequence
  Description of Artificial Sequence: Synthetic oligonucleotide
  Antisense strand to SEQ ID NO: 2538050
ucccuuccaaggaaaugca

SEQ ID NO: 2538052 - RNA, 19 nt, Artificial Sequence
  Description of Artificial Sequence: Synthetic oligonucleotide
  Sense strand starting at position 2771 of SEQ ID NO: 1888506
ggguguguuuggaaaccag

SEQ ID NO: 2538053 - RNA, 19 nt, Artificial Sequence
  Description of Artificial Sequence: Synthetic oligonucleotide
  Antisense strand to SEQ ID NO: 2538052
cugguuuccaaacacaccc

SEQ ID NO: 2538054 - RNA, 19 nt, Artificial Sequence
  Description of Artificial Sequence: Synthetic oligonucleotide
  Sense strand starting at position 2452 of SEQ ID NO: 1888506
agaaauucgggcggugaga

SEQ ID NO: 2538055 - RNA, 19 nt, Artificial Sequence
  Description of Artificial Sequence: Synthetic oligonucleotide
  Antisense strand to SEQ ID NO: 2538054
ucucaccgcccgaauuucu

SEQ ID NO: 2538056 - RNA, 19 nt, Artificial Sequence
  Description of Artificial Sequence: Synthetic oligonucleotide
  Sense strand starting at position 3420 of SEQ ID NO: 1888506
gcuacuuguguccauagau

SEQ ID NO: 2538057 - RNA, 19 nt, Artificial Sequence
  Description of Artificial Sequence: Synthetic oligonucleotide
  Antisense strand to SEQ ID NO: 2538056
aucuauggacacaaguagc

SEQ ID NO: 2538058 - RNA, 19 nt, Artificial Sequence
  Description of Artificial Sequence: Synthetic oligonucleotide
  Sense strand starting at position 3824 of SEQ ID NO: 1888507
gcagaaggucuucagggau

SEQ ID NO: 2538059 - RNA, 19 nt, Artificial Sequence
  Description of Artificial Sequence: Synthetic oligonucleotide
  Antisense strand to SEQ ID NO: 2538058
aucccugaagaccuucugc

SEQ ID NO: 2538060 - RNA, 19 nt, Artificial Sequence
  Description of Artificial Sequence: Synthetic oligonucleotide
  Sense strand starting at position 1500 of SEQ ID NO: 1888507
cgagcuguucugcccgaaa

SEQ ID NO: 2538061 - RNA, 19 nt, Artificial Sequence
  Description of Artificial Sequence: Synthetic oligonucleotide
  Antisense strand to SEQ ID NO: 2538060
uuucgggcagaacagcucg

SEQ ID NO: 2538062 - RNA, 19 nt, Artificial Sequence
  Description of Artificial Sequence: Synthetic oligonucleotide
  Sense strand starting at position 3522 of SEQ ID NO: 1888507
gcccgagggagaugaauaa

SEQ ID NO: 2538063 - RNA, 19 nt, Artificial Sequence
  Description of Artificial Sequence: Synthetic oligonucleotide
  Antisense strand to SEQ ID NO: 2538062
uuauucaucucccucgggc

SEQ ID NO: 2538064 - RNA, 19 nt, Artificial Sequence
  Description of Artificial Sequence: Synthetic oligonucleotide
  Sense strand starting at position 1782 of SEQ ID NO: 1888507
cuacguguccguucucaca

SEQ ID NO: 2538065 - RNA, 19 nt, Artificial Sequence
  Description of Artificial Sequence: Synthetic oligonucleotide
  Antisense strand to SEQ ID NO: 2538064
ugugagaacggacacguag

SEQ ID NO: 2538066 - RNA, 19 nt, Artificial Sequence
  Description of Artificial Sequence: Synthetic oligonucleotide
  Sense strand starting at position 3409 of SEQ ID NO: 1888507
gcgcuuaucaaggaagaaa

SEQ ID NO: 2538067 - RNA, 19 nt, Artificial Sequence
  Description of Artificial Sequence: Synthetic oligonucleotide
  Antisense strand to SEQ ID NO: 2538066
uuucuuccuugauaagcgc

SEQ ID NO: 2538068 - RNA, 19 nt, Artificial Sequence
  Description of Artificial Sequence: Synthetic oligonucleotide
  Sense strand starting at position 1841 of SEQ ID NO: 1888507
aaaggaaguuugguugacu

SEQ ID NO: 2538069 - RNA, 19 nt, Artificial Sequence
  Description of Artificial Sequence: Synthetic oligonucleotide
  Antisense strand to SEQ ID NO: 2538068
agucaaccaaacuuccuuu

SEQ ID NO: 2538070 - RNA, 19 nt, Artificial Sequence
  Description of Artificial Sequence: Synthetic oligonucleotide
  Sense strand starting at position 3836 of SEQ ID NO: 1888507
cagggaucucagcacaugu

SEQ ID NO: 2538071 - RNA, 19 nt, Artificial Sequence
  Description of Artificial Sequence: Synthetic oligonucleotide
  Antisense strand to SEQ ID NO: 2538070
acaugugcugagaucccug

SEQ ID NO: 2538072 - RNA, 19 nt, Artificial Sequence
  Description of Artificial Sequence: Synthetic oligonucleotide
  Sense strand starting at position 3823 of SEQ ID NO: 1888507
agcagaaggucuucaggga

SEQ ID NO: 2538073 - RNA, 19 nt, Artificial Sequence
  Description of Artificial Sequence: Synthetic oligonucleotide
  Antisense strand to SEQ ID NO: 2538072
ucccugaagaccuucugcu

SEQ ID NO: 2538074 - RNA, 19 nt, Artificial Sequence
  Description of Artificial Sequence: Synthetic oligonucleotide
  Sense strand starting at position 2424 of SEQ ID NO: 1888507
cagugugagccugagaaac

SEQ ID NO: 2538075 - RNA, 19 nt, Artificial Sequence
  Description of Artificial Sequence: Synthetic oligonucleotide
  Antisense strand to SEQ ID NO: 2538074
guuucucaggcucacacug

SEQ ID NO: 2538076 - RNA, 19 nt, Artificial Sequence
  Description of Artificial Sequence: Synthetic oligonucleotide
  Sense strand starting at position 1308 of SEQ ID NO: 1888507
aagauaaaccgccauugua

SEQ ID NO: 2538077 - RNA, 19 nt, Artificial Sequence
  Description of Artificial Sequence: Synthetic oligonucleotide
  Antisense strand to SEQ ID NO: 2538076
uacaauggcgguuuaucuu

SEQ ID NO: 2538078 - RNA, 19 nt, Artificial Sequence
  Description of Artificial Sequence: Synthetic oligonucleotide
  Sense strand starting at position 318 of SEQ ID NO: 1888507
ugcggugcuccuuucuuua

SEQ ID NO: 2538079 - RNA, 19 nt, Artificial Sequence
  Description of Artificial Sequence: Synthetic oligonucleotide
  Antisense strand to SEQ ID NO: 2538078
uaaagaaaggagcaccgca

SEQ ID NO: 2538080 - RNA, 19 nt, Artificial Sequence
  Description of Artificial Sequence: Synthetic oligonucleotide
  Sense strand starting at position 448 of SEQ ID NO: 1888507
gggauucccuaggauuuga

SEQ ID NO: 2538081 - RNA, 19 nt, Artificial Sequence
  Description of Artificial Sequence: Synthetic oligonucleotide
  Antisense strand to SEQ ID NO: 2538080
ucaaauccuagggaauccc

SEQ ID NO: 2538082 - RNA, 19 nt, Artificial Sequence
  Description of Artificial Sequence: Synthetic oligonucleotide
  Sense strand starting at position 94 of SEQ ID NO: 1888507
ugcgguuaaccugaaugaa

SEQ ID NO: 2538083 - RNA, 19 nt, Artificial Sequence
  Description of Artificial Sequence: Synthetic oligonucleotide
  Antisense strand to SEQ ID NO: 2538082
uucauucagguuaaccgca

SEQ ID NO: 2538084 - RNA, 19 nt, Artificial Sequence
  Description of Artificial Sequence: Synthetic oligonucleotide
  Sense strand starting at position 3625 of SEQ ID NO: 1888507
gcuggaguugaauaucucu

SEQ ID NO: 2538085 - RNA, 19 nt, Artificial Sequence
  Description of Artificial Sequence: Synthetic oligonucleotide
  Antisense strand to SEQ ID NO: 2538084
agagauauucaacuccagc

SEQ ID NO: 2538086 - RNA, 19 nt, Artificial Sequence
  Description of Artificial Sequence: Synthetic oligonucleotide
  Sense strand starting at position 1342 of SEQ ID NO: 1888507
ucagaaucgucccuaagga

SEQ ID NO: 2538087 - RNA, 19 nt, Artificial Sequence
  Description of Artificial Sequence: Synthetic oligonucleotide
  Antisense strand to SEQ ID NO: 2538086
uccuuagggacgauucuga

SEQ ID NO: 2538088 - RNA, 19 nt, Artificial Sequence
  Description of Artificial Sequence: Synthetic oligonucleotide
  Sense strand starting at position 391 of SEQ ID NO: 1888507
uuuauacuccucugggauu

SEQ ID NO: 2538089 - RNA, 19 nt, Artificial Sequence
  Description of Artificial Sequence: Synthetic oligonucleotide
  Antisense strand to SEQ ID NO: 2538088
aaucccagaggaguauaaa

SEQ ID NO: 2538090 - RNA, 19 nt, Artificial Sequence
  Description of Artificial Sequence: Synthetic oligonucleotide
  Sense strand starting at position 394 of SEQ ID NO: 1888507
auacuccucugggauuuaa

SEQ ID NO: 2538091 - RNA, 19 nt, Artificial Sequence
  Description of Artificial Sequence: Synthetic oligonucleotide
  Antisense strand to SEQ ID NO: 2538090
uuaaaucccagaggaguau

SEQ ID NO: 2538092 - RNA, 19 nt, Artificial Sequence
  Description of Artificial Sequence: Synthetic oligonucleotide
  Sense strand starting at position 3656 of SEQ ID NO: 1888507
gggcuuuaccuaggaguaa

SEQ ID NO: 2538093 - RNA, 19 nt, Artificial Sequence
  Description of Artificial Sequence: Synthetic oligonucleotide
  Antisense strand to SEQ ID NO: 2538092
uuacuccuagguaaagccc

SEQ ID NO: 2538094 - RNA, 19 nt, Artificial Sequence
  Description of Artificial Sequence: Synthetic oligonucleotide
  Sense strand starting at position 3673 of SEQ ID NO: 1888507
aagaaagccuguguaauua

SEQ ID NO: 2538095 - RNA, 19 nt, Artificial Sequence
  Description of Artificial Sequence: Synthetic oligonucleotide
  Antisense strand to SEQ ID NO: 2538094
uaauuacacaggcuuucuu

SEQ ID NO: 2538096 - RNA, 19 nt, Artificial Sequence
  Description of Artificial Sequence: Synthetic oligonucleotide
  Sense strand starting at position 634 of SEQ ID NO: 1888507
gugcaaagauguuuauaag

SEQ ID NO: 2538097 - RNA, 19 nt, Artificial Sequence
  Description of Artificial Sequence: Synthetic oligonucleotide
  Antisense strand to SEQ ID NO: 2538096
cuuauaaacaucuuugcac

SEQ ID NO: 2538098 - RNA, 19 nt, Artificial Sequence
  Description of Artificial Sequence: Synthetic oligonucleotide
  Sense strand starting at position 3628 of SEQ ID NO: 1888507
ggaguugaauaucucugca

SEQ ID NO: 2538099 - RNA, 19 nt, Artificial Sequence
  Description of Artificial Sequence: Synthetic oligonucleotide
  Antisense strand to SEQ ID NO: 2538098
ugcagagauauucaacucc

SEQ ID NO: 2538100 - RNA, 19 nt, Artificial Sequence
  Description of Artificial Sequence: Synthetic oligonucleotide
  Sense strand starting at position 3408 of SEQ ID NO: 1888507
ggcgcuuaucaaggaagaa

SEQ ID NO: 2538101 - RNA, 19 nt, Artificial Sequence
  Description of Artificial Sequence: Synthetic oligonucleotide
  Antisense strand to SEQ ID NO: 2538100
uucuuccuugauaagcgcc

SEQ ID NO: 2538102 - RNA, 19 nt, Artificial Sequence
  Description of Artificial Sequence: Synthetic oligonucleotide
  Sense strand starting at position 3672 of SEQ ID NO: 1888507
uaagaaagccuguguaauu

SEQ ID NO: 2538103 - RNA, 19 nt, Artificial Sequence
  Description of Artificial Sequence: Synthetic oligonucleotide
  Antisense strand to SEQ ID NO: 2538102
aauuacacaggcuuucuua

SEQ ID NO: 2538104 - RNA, 19 nt, Artificial Sequence
  Description of Artificial Sequence: Synthetic oligonucleotide
  Sense strand starting at position 373 of SEQ ID NO: 1888507
cggguuucccuccacucau

SEQ ID NO: 2538105 - RNA, 19 nt, Artificial Sequence
  Description of Artificial Sequence: Synthetic oligonucleotide
  Antisense strand to SEQ ID NO: 2538104
augaguggagggaaacccg

SEQ ID NO: 2538106 - RNA, 19 nt, Artificial Sequence
  Description of Artificial Sequence: Synthetic oligonucleotide
  Sense strand starting at position 3630 of SEQ ID NO: 1888507
aguugaauaucucugcauu

SEQ ID NO: 2538107 - RNA, 19 nt, Artificial Sequence
  Description of Artificial Sequence: Synthetic oligonucleotide
  Antisense strand to SEQ ID NO: 2538106
aaugcagagauauucaacu

SEQ ID NO: 2538108 - RNA, 19 nt, Artificial Sequence
  Description of Artificial Sequence: Synthetic oligonucleotide
  Sense strand starting at position 489 of SEQ ID NO: 1888507
gucagaagcuccguagaga

SEQ ID NO: 2538109 - RNA, 19 nt, Artificial Sequence
  Description of Artificial Sequence: Synthetic oligonucleotide
  Antisense strand to SEQ ID NO: 2538108
ucucuacggagcuucugac

SEQ ID NO: 2538110 - RNA, 19 nt, Artificial Sequence
  Description of Artificial Sequence: Synthetic oligonucleotide
  Sense strand starting at position 361 of SEQ ID NO: 1888507
caaauauggcaucggguuu

SEQ ID NO: 2538111 - RNA, 19 nt, Artificial Sequence
  Description of Artificial Sequence: Synthetic oligonucleotide
  Antisense strand to SEQ ID NO: 2538110
aaacccgaugccauauuug

SEQ ID NO: 2538112 - RNA, 19 nt, Artificial Sequence
  Description of Artificial Sequence: Synthetic oligonucleotide
  Sense strand starting at position 625 of SEQ ID NO: 1888507
ccgccugaugugcaaagau

SEQ ID NO: 2538113 - RNA, 19 nt, Artificial Sequence
  Description of Artificial Sequence: Synthetic oligonucleotide
  Antisense strand to SEQ ID NO: 2538112
aucuuugcacaucaggcgg

SEQ ID NO: 2538114 - RNA, 19 nt, Artificial Sequence
  Description of Artificial Sequence: Synthetic oligonucleotide
  Sense strand starting at position 1457 of SEQ ID NO: 1888507
cgagcuguucugcaagaug

SEQ ID NO: 2538115 - RNA, 19 nt, Artificial Sequence
  Description of Artificial Sequence: Synthetic oligonucleotide
  Antisense strand to SEQ ID NO: 2538114
caucuugcagaacagcucg

SEQ ID NO: 2538116 - RNA, 19 nt, Artificial Sequence
  Description of Artificial Sequence: Synthetic oligonucleotide
  Sense strand starting at position 3631 of SEQ ID NO: 1888507
guugaauaucucugcauuc

SEQ ID NO: 2538117 - RNA, 19 nt, Artificial Sequence
  Description of Artificial Sequence: Synthetic oligonucleotide
  Antisense strand to SEQ ID NO: 2538116
gaaugcagagauauucaac

SEQ ID NO: 2538118 - RNA, 19 nt, Artificial Sequence
  Description of Artificial Sequence: Synthetic oligonucleotide
  Sense strand starting at position 3548 of SEQ ID NO: 1888507
cugcgauuccaucaagcuu

SEQ ID NO: 2538119 - RNA, 19 nt, Artificial Sequence
  Description of Artificial Sequence: Synthetic oligonucleotide
  Antisense strand to SEQ ID NO: 2538118
aagcuugauggaaucgcag

SEQ ID NO: 2538120 - RNA, 19 nt, Artificial Sequence
  Description of Artificial Sequence: Synthetic oligonucleotide
  Sense strand starting at position 3654 of SEQ ID NO: 1888507
gcgggcuuuaccuaggagu

SEQ ID NO: 2538121 - RNA, 19 nt, Artificial Sequence
  Description of Artificial Sequence: Synthetic oligonucleotide
  Antisense strand to SEQ ID NO: 2538120
acuccuagguaaagcccgc

SEQ ID NO: 2538122 - RNA, 19 nt, Artificial Sequence
  Description of Artificial Sequence: Synthetic oligonucleotide
  Sense strand starting at position 392 of SEQ ID NO: 1888507
uuauacuccucugggauuu

SEQ ID NO: 2538123 - RNA, 19 nt, Artificial Sequence
  Description of Artificial Sequence: Synthetic oligonucleotide
  Antisense strand to SEQ ID NO: 2538122
aaaucccagaggaguauaa

SEQ ID NO: 2538124 - RNA, 19 nt, Artificial Sequence
  Description of Artificial Sequence: Synthetic oligonucleotide
  Sense strand starting at position 2834 of SEQ ID NO: 1888507
cuguguucccgccacagau

SEQ ID NO: 2538125 - RNA, 19 nt, Artificial Sequence
  Description of Artificial Sequence: Synthetic oligonucleotide
  Antisense strand to SEQ ID NO: 2538124
aucuguggcgggaacacag

SEQ ID NO: 2538126 - RNA, 19 nt, Artificial Sequence
  Description of Artificial Sequence: Synthetic oligonucleotide
  Sense strand starting at position 1456 of SEQ ID NO: 1888507
acgagcuguucugcaagau

SEQ ID NO: 2538127 - RNA, 19 nt, Artificial Sequence
  Description of Artificial Sequence: Synthetic oligonucleotide
  Antisense strand to SEQ ID NO: 2538126
aucuugcagaacagcucgu

SEQ ID NO: 2538128 - RNA, 19 nt, Artificial Sequence
  Description of Artificial Sequence: Synthetic oligonucleotide
  Sense strand starting at position 1127 of SEQ ID NO: 1888507
cgcccaugucaggguucaa

SEQ ID NO: 2538129 - RNA, 19 nt, Artificial Sequence
  Description of Artificial Sequence: Synthetic oligonucleotide
  Antisense strand to SEQ ID NO: 2538128
uugaacccugacaugggcg

SEQ ID NO: 2538130 - RNA, 19 nt, Artificial Sequence
  Description of Artificial Sequence: Synthetic oligonucleotide
  Sense strand starting at position 320 of SEQ ID NO: 1888507
cggugcuccuuucuuuaaa

SEQ ID NO: 2538131 - RNA, 19 nt, Artificial Sequence
  Description of Artificial Sequence: Synthetic oligonucleotide
  Antisense strand to SEQ ID NO: 2538130
uuuaaagaaaggagcaccg

SEQ ID NO: 2538132 - RNA, 19 nt, Artificial Sequence
  Description of Artificial Sequence: Synthetic oligonucleotide
  Sense strand starting at position 1742 of SEQ ID NO: 1888507
gcucgucccucuccuuaaa

SEQ ID NO: 2538133 - RNA, 19 nt, Artificial Sequence
  Description of Artificial Sequence: Synthetic oligonucleotide
  Antisense strand to SEQ ID NO: 2538132
uuuaaggagagggacgagc

SEQ ID NO: 2538134 - RNA, 19 nt, Artificial Sequence
  Description of Artificial Sequence: Synthetic oligonucleotide
  Sense strand starting at position 3182 of SEQ ID NO: 1888507
accgguuaauuacaggauu

SEQ ID NO: 2538135 - RNA, 19 nt, Artificial Sequence
  Description of Artificial Sequence: Synthetic oligonucleotide
  Antisense strand to SEQ ID NO: 2538134
aauccuguaauuaaccggu

SEQ ID NO: 2538136 - RNA, 19 nt, Artificial Sequence
  Description of Artificial Sequence: Synthetic oligonucleotide
  Sense strand starting at position 3657 of SEQ ID NO: 1888507
ggcuuuaccuaggaguaag

SEQ ID NO: 2538137 - RNA, 19 nt, Artificial Sequence
  Description of Artificial Sequence: Synthetic oligonucleotide
  Antisense strand to SEQ ID NO: 2538136
cuuacuccuagguaaagcc

SEQ ID NO: 2538138 - RNA, 19 nt, Artificial Sequence
  Description of Artificial Sequence: Synthetic oligonucleotide
  Sense strand starting at position 500 of SEQ ID NO: 1888508
uauugauuacaagagugca

SEQ ID NO: 2538139 - RNA, 19 nt, Artificial Sequence
  Description of Artificial Sequence: Synthetic oligonucleotide
  Antisense strand to SEQ ID NO: 2538138
ugcacucuuguaaucaaua

SEQ ID NO: 2538140 - RNA, 19 nt, Artificial Sequence
  Description of Artificial Sequence: Synthetic oligonucleotide
  Sense strand starting at position 1955 of SEQ ID NO: 1888508
gcuuaauuaggccaggaaa

SEQ ID NO: 2538141 - RNA, 19 nt, Artificial Sequence
  Description of Artificial Sequence: Synthetic oligonucleotide
  Antisense strand to SEQ ID NO: 2538140
uuuccuggccuaauuaagc

SEQ ID NO: 2538142 - RNA, 19 nt, Artificial Sequence
  Description of Artificial Sequence: Synthetic oligonucleotide
  Sense strand starting at position 3424 of SEQ ID NO: 1888508
cgaguaggaugacuagaau

SEQ ID NO: 2538143 - RNA, 19 nt, Artificial Sequence
  Description of Artificial Sequence: Synthetic oligonucleotide
  Antisense strand to SEQ ID NO: 2538142
auucuagucauccuacucg

SEQ ID NO: 2538144 - RNA, 19 nt, Artificial Sequence
  Description of Artificial Sequence: Synthetic oligonucleotide
  Sense strand starting at position 2630 of SEQ ID NO: 1888508
uucugugaccuugaauaug

SEQ ID NO: 2538145 - RNA, 19 nt, Artificial Sequence
  Description of Artificial Sequence: Synthetic oligonucleotide
  Antisense strand to SEQ ID NO: 2538144
cauauucaaggucacagaa

SEQ ID NO: 2538146 - RNA, 19 nt, Artificial Sequence
  Description of Artificial Sequence: Synthetic oligonucleotide
  Sense strand starting at position 876 of SEQ ID NO: 1888508
ucugcuuuacaggauaauu

SEQ ID NO: 2538147 - RNA, 19 nt, Artificial Sequence
  Description of Artificial Sequence: Synthetic oligonucleotide
  Antisense strand to SEQ ID NO: 2538146
aauuauccuguaaagcaga

SEQ ID NO: 2538148 - RNA, 19 nt, Artificial Sequence
  Description of Artificial Sequence: Synthetic oligonucleotide
  Sense strand starting at position 526 of SEQ ID NO: 1888508
gggcccuuccaucaucaaa

SEQ ID NO: 2538149 - RNA, 19 nt, Artificial Sequence
  Description of Artificial Sequence: Synthetic oligonucleotide
  Antisense strand to SEQ ID NO: 2538148
uuugaugauggaagggccc

SEQ ID NO: 2538150 - RNA, 19 nt, Artificial Sequence
  Description of Artificial Sequence: Synthetic oligonucleotide
  Sense strand starting at position 944 of SEQ ID NO: 1888508
ugggaaacauggcccaauu

SEQ ID NO: 2538151 - RNA, 19 nt, Artificial Sequence
  Description of Artificial Sequence: Synthetic oligonucleotide
  Antisense strand to SEQ ID NO: 2538150
aauugggccauguuuccca

SEQ ID NO: 2538152 - RNA, 19 nt, Artificial Sequence
  Description of Artificial Sequence: Synthetic oligonucleotide
  Sense strand starting at position 3668 of SEQ ID NO: 1888508
ugcaaacuucuugagaagu

SEQ ID NO: 2538153 - RNA, 19 nt, Artificial Sequence
  Description of Artificial Sequence: Synthetic oligonucleotide
  Antisense strand to SEQ ID NO: 2538152
acuucucaagaaguuugca

SEQ ID NO: 2538154 - RNA, 19 nt, Artificial Sequence
  Description of Artificial Sequence: Synthetic oligonucleotide
  Sense strand starting at position 269 of SEQ ID NO: 1888508
gguuauuugugaucugcau

SEQ ID NO: 2538155 - RNA, 19 nt, Artificial Sequence
  Description of Artificial Sequence: Synthetic oligonucleotide
  Antisense strand to SEQ ID NO: 2538154
augcagaucacaaauaacc

SEQ ID NO: 2538156 - RNA, 19 nt, Artificial Sequence
  Description of Artificial Sequence: Synthetic oligonucleotide
  Sense strand starting at position 3362 of SEQ ID NO: 1888508
ggcgucagagcgagacuua

SEQ ID NO: 2538157 - RNA, 19 nt, Artificial Sequence
  Description of Artificial Sequence: Synthetic oligonucleotide
  Antisense strand to SEQ ID NO: 2538156
uaagucucgcucugacgcc

SEQ ID NO: 2538158 - RNA, 19 nt, Artificial Sequence
  Description of Artificial Sequence: Synthetic oligonucleotide
  Sense strand starting at position 372 of SEQ ID NO: 1888508
cggcgaucagaaggaaaga

SEQ ID NO: 2538159 - RNA, 19 nt, Artificial Sequence
  Description of Artificial Sequence: Synthetic oligonucleotide
  Antisense strand to SEQ ID NO: 2538158
ucuuuccuucugaucgccg

SEQ ID NO: 2538160 - RNA, 19 nt, Artificial Sequence
  Description of Artificial Sequence: Synthetic oligonucleotide
  Sense strand starting at position 3486 of SEQ ID NO: 1888508
gaauaugagggcugaguca

SEQ ID NO: 2538161 - RNA, 19 nt, Artificial Sequence
  Description of Artificial Sequence: Synthetic oligonucleotide
  Antisense strand to SEQ ID NO: 2538160
ugacucagcccucauauuc

SEQ ID NO: 2538162 - RNA, 19 nt, Artificial Sequence
  Description of Artificial Sequence: Synthetic oligonucleotide
  Sense strand starting at position 257 of SEQ ID NO: 1888508
acggaaacaccagguuauu

SEQ ID NO: 2538163 - RNA, 19 nt, Artificial Sequence
  Description of Artificial Sequence: Synthetic oligonucleotide
  Antisense strand to SEQ ID NO: 2538162
aauaaccugguguuuccgu

SEQ ID NO: 2538164 - RNA, 19 nt, Artificial Sequence
  Description of Artificial Sequence: Synthetic oligonucleotide
  Sense strand starting at position 902 of SEQ ID NO: 1888508
aaauguucuugggugaaac

SEQ ID NO: 2538165 - RNA, 19 nt, Artificial Sequence
  Description of Artificial Sequence: Synthetic oligonucleotide
  Antisense strand to SEQ ID NO: 2538164
guuucacccaagaacauuu

SEQ ID NO: 2538166 - RNA, 19 nt, Artificial Sequence
  Description of Artificial Sequence: Synthetic oligonucleotide
  Sense strand starting at position 2926 of SEQ ID NO: 1888508
caauuaucuguggaggcuu

SEQ ID NO: 2538167 - RNA, 19 nt, Artificial Sequence
  Description of Artificial Sequence: Synthetic oligonucleotide
  Antisense strand to SEQ ID NO: 2538166
aagccuccacagauaauug

SEQ ID NO: 2538168 - RNA, 19 nt, Artificial Sequence
  Description of Artificial Sequence: Synthetic oligonucleotide
  Sense strand starting at position 1190 of SEQ ID NO: 1888508
gugcaaggugacugaagaa

SEQ ID NO: 2538169 - RNA, 19 nt, Artificial Sequence
  Description of Artificial Sequence: Synthetic oligonucleotide
  Antisense strand to SEQ ID NO: 2538168
uucuucagucaccuugcac

SEQ ID NO: 2538170 - RNA, 19 nt, Artificial Sequence
  Description of Artificial Sequence: Synthetic oligonucleotide
  Sense strand starting at position 903 of SEQ ID NO: 1888508
aauguucuugggugaaacu

SEQ ID NO: 2538171 - RNA, 19 nt, Artificial Sequence
  Description of Artificial Sequence: Synthetic oligonucleotide
  Antisense strand to SEQ ID NO: 2538170
aguuucacccaagaacauu

SEQ ID NO: 2538172 - RNA, 19 nt, Artificial Sequence
  Description of Artificial Sequence: Synthetic oligonucleotide
  Sense strand starting at position 3578 of SEQ ID NO: 1888508
cuguaaguccuggagcaau

SEQ ID NO: 2538173 - RNA, 19 nt, Artificial Sequence
  Description of Artificial Sequence: Synthetic oligonucleotide
  Antisense strand to SEQ ID NO: 2538172
auugcuccaggacuuacag

SEQ ID NO: 2538174 - RNA, 19 nt, Artificial Sequence
  Description of Artificial Sequence: Synthetic oligonucleotide
  Sense strand starting at position 2308 of SEQ ID NO: 1888508
guugaaaccucaguuacca

SEQ ID NO: 2538175 - RNA, 19 nt, Artificial Sequence
  Description of Artificial Sequence: Synthetic oligonucleotide
  Antisense strand to SEQ ID NO: 2538174
ugguaacugagguuucaac

SEQ ID NO: 2538176 - RNA, 19 nt, Artificial Sequence
  Description of Artificial Sequence: Synthetic oligonucleotide
  Sense strand starting at position 2449 of SEQ ID NO: 1888508
gguucuucacuagguggaa

SEQ ID NO: 2538177 - RNA, 19 nt, Artificial Sequence
  Description of Artificial Sequence: Synthetic oligonucleotide
  Antisense strand to SEQ ID NO: 2538176
uuccaccuagugaagaacc

SEQ ID NO: 2538178 - RNA, 19 nt, Artificial Sequence
  Description of Artificial Sequence: Synthetic oligonucleotide
  Sense strand starting at position 3465 of SEQ ID NO: 1888508
ggaucaucgcccuggagag

SEQ ID NO: 2538179 - RNA, 19 nt, Artificial Sequence
  Description of Artificial Sequence: Synthetic oligonucleotide
  Antisense strand to SEQ ID NO: 2538178
cucuccagggcgaugaucc

SEQ ID NO: 2538180 - RNA, 19 nt, Artificial Sequence
  Description of Artificial Sequence: Synthetic oligonucleotide
  Sense strand starting at position 275 of SEQ ID NO: 1888508
uugugaucugcauacucac

SEQ ID NO: 2538181 - RNA, 19 nt, Artificial Sequence
  Description of Artificial Sequence: Synthetic oligonucleotide
  Antisense strand to SEQ ID NO: 2538180
gugaguaugcagaucacaa

SEQ ID NO: 2538182 - RNA, 19 nt, Artificial Sequence
  Description of Artificial Sequence: Synthetic oligonucleotide
  Sense strand starting at position 869 of SEQ ID NO: 1888508
cuaugacucugcuuuacag

SEQ ID NO: 2538183 - RNA, 19 nt, Artificial Sequence
  Description of Artificial Sequence: Synthetic oligonucleotide
  Antisense strand to SEQ ID NO: 2538182
cuguaaagcagagucauag

SEQ ID NO: 2538184 - RNA, 19 nt, Artificial Sequence
  Description of Artificial Sequence: Synthetic oligonucleotide
  Sense strand starting at position 2989 of SEQ ID NO: 1888508
ugagucaugccucaugagu

SEQ ID NO: 2538185 - RNA, 19 nt, Artificial Sequence
  Description of Artificial Sequence: Synthetic oligonucleotide
  Antisense strand to SEQ ID NO: 2538184
acucaugaggcaugacuca

SEQ ID NO: 2538186 - RNA, 19 nt, Artificial Sequence
  Description of Artificial Sequence: Synthetic oligonucleotide
  Sense strand starting at position 1328 of SEQ ID NO: 1888508
uccugagugucucuggaag

SEQ ID NO: 2538187 - RNA, 19 nt, Artificial Sequence
  Description of Artificial Sequence: Synthetic oligonucleotide
  Antisense strand to SEQ ID NO: 2538186
cuuccagagacacucagga

SEQ ID NO: 2538188 - RNA, 19 nt, Artificial Sequence
  Description of Artificial Sequence: Synthetic oligonucleotide
  Sense strand starting at position 1163 of SEQ ID NO: 1888508
gaaguucccuggccaacua

SEQ ID NO: 2538189 - RNA, 19 nt, Artificial Sequence
  Description of Artificial Sequence: Synthetic oligonucleotide
  Antisense strand to SEQ ID NO: 2538188
uaguuggccagggaacuuc

SEQ ID NO: 2538190 - RNA, 19 nt, Artificial Sequence
  Description of Artificial Sequence: Synthetic oligonucleotide
  Sense strand starting at position 3073 of SEQ ID NO: 1888508
guggccuggaaaugucaga

SEQ ID NO: 2538191 - RNA, 19 nt, Artificial Sequence
  Description of Artificial Sequence: Synthetic oligonucleotide
  Antisense strand to SEQ ID NO: 2538190
ucugacauuuccaggccac

SEQ ID NO: 2538192 - RNA, 19 nt, Artificial Sequence
  Description of Artificial Sequence: Synthetic oligonucleotide
  Sense strand starting at position 2626 of SEQ ID NO: 1888508
gucauucugugaccuugaa

SEQ ID NO: 2538193 - RNA, 19 nt, Artificial Sequence
  Description of Artificial Sequence: Synthetic oligonucleotide
  Antisense strand to SEQ ID NO: 2538192
uucaaggucacagaaugac

SEQ ID NO: 2538194 - RNA, 19 nt, Artificial Sequence
  Description of Artificial Sequence: Synthetic oligonucleotide
  Sense strand starting at position 2868 of SEQ ID NO: 1888508
augagaucccgcuaucugu

SEQ ID NO: 2538195 - RNA, 19 nt, Artificial Sequence
  Description of Artificial Sequence: Synthetic oligonucleotide
  Antisense strand to SEQ ID NO: 2538194
acagauagcgggaucucau

SEQ ID NO: 2538196 - RNA, 19 nt, Artificial Sequence
  Description of Artificial Sequence: Synthetic oligonucleotide
  Sense strand starting at position 1825 of SEQ ID NO: 1888508
gcaacuucccaggguuaug

SEQ ID NO: 2538197 - RNA, 19 nt, Artificial Sequence
  Description of Artificial Sequence: Synthetic oligonucleotide
  Antisense strand to SEQ ID NO: 2538196
cauaacccugggaaguugc

SEQ ID NO: 2538198 - RNA, 19 nt, Artificial Sequence
  Description of Artificial Sequence: Synthetic oligonucleotide
  Sense strand starting at position 2554 of SEQ ID NO: 1888508
agcaauguugaggguucau

SEQ ID NO: 2538199 - RNA, 19 nt, Artificial Sequence
  Description of Artificial Sequence: Synthetic oligonucleotide
  Antisense strand to SEQ ID NO: 2538198
augaacccucaacauugcu

SEQ ID NO: 2538200 - RNA, 19 nt, Artificial Sequence
  Description of Artificial Sequence: Synthetic oligonucleotide
  Sense strand starting at position 2876 of SEQ ID NO: 1888508
ccgcuaucuguggaaggua

SEQ ID NO: 2538201 - RNA, 19 nt, Artificial Sequence
  Description of Artificial Sequence: Synthetic oligonucleotide
  Antisense strand to SEQ ID NO: 2538200
uaccuuccacagauagcgg

SEQ ID NO: 2538202 - RNA, 19 nt, Artificial Sequence
  Description of Artificial Sequence: Synthetic oligonucleotide
  Sense strand starting at position 1824 of SEQ ID NO: 1888508
ugcaacuucccaggguuau

SEQ ID NO: 2538203 - RNA, 19 nt, Artificial Sequence
  Description of Artificial Sequence: Synthetic oligonucleotide
  Antisense strand to SEQ ID NO: 2538202
auaacccugggaaguugca

SEQ ID NO: 2538204 - RNA, 19 nt, Artificial Sequence
  Description of Artificial Sequence: Synthetic oligonucleotide
  Sense strand starting at position 2623 of SEQ ID NO: 1888508
caggucauucugugaccuu

SEQ ID NO: 2538205 - RNA, 19 nt, Artificial Sequence
  Description of Artificial Sequence: Synthetic oligonucleotide
  Antisense strand to SEQ ID NO: 2538204
aaggucacagaaugaccug

SEQ ID NO: 2538206 - RNA, 19 nt, Artificial Sequence
  Description of Artificial Sequence: Synthetic oligonucleotide
  Sense strand starting at position 3069 of SEQ ID NO: 1888508
cuucguggccuggaaaugu

SEQ ID NO: 2538207 - RNA, 19 nt, Artificial Sequence
  Description of Artificial Sequence: Synthetic oligonucleotide
  Antisense strand to SEQ ID NO: 2538206
acauuuccaggccacgaag

SEQ ID NO: 2538208 - RNA, 19 nt, Artificial Sequence
  Description of Artificial Sequence: Synthetic oligonucleotide
  Sense strand starting at position 2934 of SEQ ID NO: 1888508
uguggaggcuuugagauuu

SEQ ID NO: 2538209 - RNA, 19 nt, Artificial Sequence
  Description of Artificial Sequence: Synthetic oligonucleotide
  Antisense strand to SEQ ID NO: 2538208
aaaucucaaagccuccaca

SEQ ID NO: 2538210 - RNA, 19 nt, Artificial Sequence
  Description of Artificial Sequence: Synthetic oligonucleotide
  Sense strand starting at position 3638 of SEQ ID NO: 1888508
uuuccauuguguccacauu

SEQ ID NO: 2538211 - RNA, 19 nt, Artificial Sequence
  Description of Artificial Sequence: Synthetic oligonucleotide
  Antisense strand to SEQ ID NO: 2538210
aauguggacacaauggaaa

SEQ ID NO: 2538212 - RNA, 19 nt, Artificial Sequence
  Description of Artificial Sequence: Synthetic oligonucleotide
  Sense strand starting at position 3718 of SEQ ID NO: 1888508
acguaauucuuggcacuca

SEQ ID NO: 2538213 - RNA, 19 nt, Artificial Sequence
  Description of Artificial Sequence: Synthetic oligonucleotide
  Antisense strand to SEQ ID NO: 2538212
ugagugccaagaauuacgu

SEQ ID NO: 2538214 - RNA, 19 nt, Artificial Sequence
  Description of Artificial Sequence: Synthetic oligonucleotide
  Sense strand starting at position 3363 of SEQ ID NO: 1888508
gcgucagagcgagacuuau

SEQ ID NO: 2538215 - RNA, 19 nt, Artificial Sequence
  Description of Artificial Sequence: Synthetic oligonucleotide
  Antisense strand to SEQ ID NO: 2538214
auaagucucgcucugacgc

SEQ ID NO: 2538216 - RNA, 19 nt, Artificial Sequence
  Description of Artificial Sequence: Synthetic oligonucleotide
  Sense strand starting at position 2176 of SEQ ID NO: 1888508
gaggguugcacuuguuuac

SEQ ID NO: 2538217 - RNA, 19 nt, Artificial Sequence
  Description of Artificial Sequence: Synthetic oligonucleotide
  Antisense strand to SEQ ID NO: 2538216
guaaacaagugcaacccuc

SEQ ID NO: 2538218 - RNA, 19 nt, Artificial Sequence
  Description of Artificial Sequence: Synthetic oligonucleotide
  Sense strand starting at position 584 of SEQ ID NO: 1888509
cgggcuauugugaguuuga

SEQ ID NO: 2538219 - RNA, 19 nt, Artificial Sequence
  Description of Artificial Sequence: Synthetic oligonucleotide
  Antisense strand to SEQ ID NO: 2538218
ucaaacucacaauagcccg

SEQ ID NO: 2538220 - RNA, 19 nt, Artificial Sequence
  Description of Artificial Sequence: Synthetic oligonucleotide
  Sense strand starting at position 593 of SEQ ID NO: 1888509
gugaguuugacugacuuga

SEQ ID NO: 2538221 - RNA, 19 nt, Artificial Sequence
  Description of Artificial Sequence: Synthetic oligonucleotide
  Antisense strand to SEQ ID NO: 2538220
ucaagucagucaaacucac

SEQ ID NO: 2538222 - RNA, 19 nt, Artificial Sequence
  Description of Artificial Sequence: Synthetic oligonucleotide
  Sense strand starting at position 3438 of SEQ ID NO: 1888509
uaacaacuccgaggaaagu

SEQ ID NO: 2538223 - RNA, 19 nt, Artificial Sequence
  Description of Artificial Sequence: Synthetic oligonucleotide
  Antisense strand to SEQ ID NO: 2538222
acuuuccucggaguuguua

SEQ ID NO: 2538224 - RNA, 19 nt, Artificial Sequence
  Description of Artificial Sequence: Synthetic oligonucleotide
  Sense strand starting at position 595 of SEQ ID NO: 1888509
gaguuugacugacuugaau

SEQ ID NO: 2538225 - RNA, 19 nt, Artificial Sequence
  Description of Artificial Sequence: Synthetic oligonucleotide
  Antisense strand to SEQ ID NO: 2538224
auucaagucagucaaacuc

SEQ ID NO: 2538226 - RNA, 19 nt, Artificial Sequence
  Description of Artificial Sequence: Synthetic oligonucleotide
  Sense strand starting at position 3969 of SEQ ID NO: 1888509
auggaucuauuacuuguaa

SEQ ID NO: 2538227 - RNA, 19 nt, Artificial Sequence
  Description of Artificial Sequence: Synthetic oligonucleotide
  Antisense strand to SEQ ID NO: 2538226
uuacaaguaauagauccau

SEQ ID NO: 2538228 - RNA, 19 nt, Artificial Sequence
  Description of Artificial Sequence: Synthetic oligonucleotide
  Sense strand starting at position 2858 of SEQ ID NO: 1888509
agccgaagcuugacgaguu

SEQ ID NO: 2538229 - RNA, 19 nt, Artificial Sequence
  Description of Artificial Sequence: Synthetic oligonucleotide
  Antisense strand to SEQ ID NO: 2538228
aacucgucaagcuucggcu

SEQ ID NO: 2538230 - RNA, 19 nt, Artificial Sequence
  Description of Artificial Sequence: Synthetic oligonucleotide
  Sense strand starting at position 540 of SEQ ID NO: 1888509
auugcaauccuagagagcu

SEQ ID NO: 2538231 - RNA, 19 nt, Artificial Sequence
  Description of Artificial Sequence: Synthetic oligonucleotide
  Antisense strand to SEQ ID NO: 2538230
agcucucuaggauugcaau

SEQ ID NO: 2538232 - RNA, 19 nt, Artificial Sequence
  Description of Artificial Sequence: Synthetic oligonucleotide
  Sense strand starting at position 3903 of SEQ ID NO: 1888509
gucuguuagcggcuucacu

SEQ ID NO: 2538233 - RNA, 19 nt, Artificial Sequence
  Description of Artificial Sequence: Synthetic oligonucleotide
  Antisense strand to SEQ ID NO: 2538232
agugaagccgcuaacagac

SEQ ID NO: 2538234 - RNA, 19 nt, Artificial Sequence
  Description of Artificial Sequence: Synthetic oligonucleotide
  Sense strand starting at position 3807 of SEQ ID NO: 1888509
ccgaaaugucuccaaguga

SEQ ID NO: 2538235 - RNA, 19 nt, Artificial Sequence
  Description of Artificial Sequence: Synthetic oligonucleotide
  Antisense strand to SEQ ID NO: 2538234
ucacuuggagacauuucgg

SEQ ID NO: 2538236 - RNA, 19 nt, Artificial Sequence
  Description of Artificial Sequence: Synthetic oligonucleotide
  Sense strand starting at position 3005 of SEQ ID NO: 1888509
cuucuaaacgcacaaguaa

SEQ ID NO: 2538237 - RNA, 19 nt, Artificial Sequence
  Description of Artificial Sequence: Synthetic oligonucleotide
  Antisense strand to SEQ ID NO: 2538236
uuacuugugcguuuagaag

SEQ ID NO: 2538238 - RNA, 19 nt, Artificial Sequence
  Description of Artificial Sequence: Synthetic oligonucleotide
  Sense strand starting at position 3970 of SEQ ID NO: 1888509
uggaucuauuacuuguaau

SEQ ID NO: 2538239 - RNA, 19 nt, Artificial Sequence
  Description of Artificial Sequence: Synthetic oligonucleotide
  Antisense strand to SEQ ID NO: 2538238
auuacaaguaauagaucca

SEQ ID NO: 2538240 - RNA, 19 nt, Artificial Sequence
  Description of Artificial Sequence: Synthetic oligonucleotide
  Sense strand starting at position 3872 of SEQ ID NO: 1888509
gagcacgagcuuuagaauu

SEQ ID NO: 2538241 - RNA, 19 nt, Artificial Sequence
  Description of Artificial Sequence: Synthetic oligonucleotide
  Antisense strand to SEQ ID NO: 2538240
aauucuaaagcucgugcuc

SEQ ID NO: 2538242 - RNA, 19 nt, Artificial Sequence
  Description of Artificial Sequence: Synthetic oligonucleotide
  Sense strand starting at position 620 of SEQ ID NO: 1888509
uccaaauucugauuagcug

SEQ ID NO: 2538243 - RNA, 19 nt, Artificial Sequence
  Description of Artificial Sequence: Synthetic oligonucleotide
  Antisense strand to SEQ ID NO: 2538242
cagcuaaucagaauuugga

SEQ ID NO: 2538244 - RNA, 19 nt, Artificial Sequence
  Description of Artificial Sequence: Synthetic oligonucleotide
  Sense strand starting at position 1527 of SEQ ID NO: 1888509
cccucucuggaguagucau

SEQ ID NO: 2538245 - RNA, 19 nt, Artificial Sequence
  Description of Artificial Sequence: Synthetic oligonucleotide
  Antisense strand to SEQ ID NO: 2538244
augacuacuccagagaggg

SEQ ID NO: 2538246 - RNA, 19 nt, Artificial Sequence
  Description of Artificial Sequence: Synthetic oligonucleotide
  Sense strand starting at position 494 of SEQ ID NO: 1888509
cuaaaucaguuucuaggua

SEQ ID NO: 2538247 - RNA, 19 nt, Artificial Sequence
  Description of Artificial Sequence: Synthetic oligonucleotide
  Antisense strand to SEQ ID NO: 2538246
uaccuagaaacugauuuag

SEQ ID NO: 2538248 - RNA, 19 nt, Artificial Sequence
  Description of Artificial Sequence: Synthetic oligonucleotide
  Sense strand starting at position 499 of SEQ ID NO: 1888509
ucaguuucuagguaguuua

SEQ ID NO: 2538249 - RNA, 19 nt, Artificial Sequence
  Description of Artificial Sequence: Synthetic oligonucleotide
  Antisense strand to SEQ ID NO: 2538248
uaaacuaccuagaaacuga

SEQ ID NO: 2538250 - RNA, 19 nt, Artificial Sequence
  Description of Artificial Sequence: Synthetic oligonucleotide
  Sense strand starting at position 3663 of SEQ ID NO: 1888509
gucacauagcuagacguga

SEQ ID NO: 2538251 - RNA, 19 nt, Artificial Sequence
  Description of Artificial Sequence: Synthetic oligonucleotide
  Antisense strand to SEQ ID NO: 2538250
ucacgucuagcuaugugac

SEQ ID NO: 2538252 - RNA, 19 nt, Artificial Sequence
  Description of Artificial Sequence: Synthetic oligonucleotide
  Sense strand starting at position 627 of SEQ ID NO: 1888509
ucugauuagcuguaguuga

SEQ ID NO: 2538253 - RNA, 19 nt, Artificial Sequence
  Description of Artificial Sequence: Synthetic oligonucleotide
  Antisense strand to SEQ ID NO: 2538252
ucaacuacagcuaaucaga

SEQ ID NO: 2538254 - RNA, 19 nt, Artificial Sequence
  Description of Artificial Sequence: Synthetic oligonucleotide
  Sense strand starting at position 3823 of SEQ ID NO: 1888509
ugacucuuccgguagagca

SEQ ID NO: 2538255 - RNA, 19 nt, Artificial Sequence
  Description of Artificial Sequence: Synthetic oligonucleotide
  Antisense strand to SEQ ID NO: 2538254
ugcucuaccggaagaguca

SEQ ID NO: 2538256 - RNA, 19 nt, Artificial Sequence
  Description of Artificial Sequence: Synthetic oligonucleotide
  Sense strand starting at position 425 of SEQ ID NO: 1888509
ugaggagccgauugucaaa

SEQ ID NO: 2538257 - RNA, 19 nt, Artificial Sequence
  Description of Artificial Sequence: Synthetic oligonucleotide
  Antisense strand to SEQ ID NO: 2538256
uuugacaaucggcuccuca

SEQ ID NO: 2538258 - RNA, 19 nt, Artificial Sequence
  Description of Artificial Sequence: Synthetic oligonucleotide
  Sense strand starting at position 2840 of SEQ ID NO: 1888509
gaccuuguguggucaggaa

SEQ ID NO: 2538259 - RNA, 19 nt, Artificial Sequence
  Description of Artificial Sequence: Synthetic oligonucleotide
  Antisense strand to SEQ ID NO: 2538258
uuccugaccacacaagguc

SEQ ID NO: 2538260 - RNA, 19 nt, Artificial Sequence
  Description of Artificial Sequence: Synthetic oligonucleotide
  Sense strand starting at position 352 of SEQ ID NO: 1888509
agaugauccgccugacuug

SEQ ID NO: 2538261 - RNA, 19 nt, Artificial Sequence
  Description of Artificial Sequence: Synthetic oligonucleotide
  Antisense strand to SEQ ID NO: 2538260
caagucaggcggaucaucu

SEQ ID NO: 2538262 - RNA, 19 nt, Artificial Sequence
  Description of Artificial Sequence: Synthetic oligonucleotide
  Sense strand starting at position 502 of SEQ ID NO: 1888509
guuucuagguaguuuaaua

SEQ ID NO: 2538263 - RNA, 19 nt, Artificial Sequence
  Description of Artificial Sequence: Synthetic oligonucleotide
  Antisense strand to SEQ ID NO: 2538262
uauuaaacuaccuagaaac

SEQ ID NO: 2538264 - RNA, 19 nt, Artificial Sequence
  Description of Artificial Sequence: Synthetic oligonucleotide
  Sense strand starting at position 3806 of SEQ ID NO: 1888509
cccgaaaugucuccaagug

SEQ ID NO: 2538265 - RNA, 19 nt, Artificial Sequence
  Description of Artificial Sequence: Synthetic oligonucleotide
  Antisense strand to SEQ ID NO: 2538264
cacuuggagacauuucggg

SEQ ID NO: 2538266 - RNA, 19 nt, Artificial Sequence
  Description of Artificial Sequence: Synthetic oligonucleotide
  Sense strand starting at position 1455 of SEQ ID NO: 1888509
uugugucuacuccgggaaa

SEQ ID NO: 2538267 - RNA, 19 nt, Artificial Sequence
  Description of Artificial Sequence: Synthetic oligonucleotide
  Antisense strand to SEQ ID NO: 2538266
uuucccggaguagacacaa

SEQ ID NO: 2538268 - RNA, 19 nt, Artificial Sequence
  Description of Artificial Sequence: Synthetic oligonucleotide
  Sense strand starting at position 3866 of SEQ ID NO: 1888509
gaguuugagcacgagcuuu

SEQ ID NO: 2538269 - RNA, 19 nt, Artificial Sequence
  Description of Artificial Sequence: Synthetic oligonucleotide
  Antisense strand to SEQ ID NO: 2538268
aaagcucgugcucaaacuc

SEQ ID NO: 2538270 - RNA, 19 nt, Artificial Sequence
  Description of Artificial Sequence: Synthetic oligonucleotide
  Sense strand starting at position 585 of SEQ ID NO: 1888509
gggcuauugugaguuugac

SEQ ID NO: 2538271 - RNA, 19 nt, Artificial Sequence
  Description of Artificial Sequence: Synthetic oligonucleotide
  Antisense strand to SEQ ID NO: 2538270
gucaaacucacaauagccc

SEQ ID NO: 2538272 - RNA, 19 nt, Artificial Sequence
  Description of Artificial Sequence: Synthetic oligonucleotide
  Sense strand starting at position 498 of SEQ ID NO: 1888509
aucaguuucuagguaguuu

SEQ ID NO: 2538273 - RNA, 19 nt, Artificial Sequence
  Description of Artificial Sequence: Synthetic oligonucleotide
  Antisense strand to SEQ ID NO: 2538272
aaacuaccuagaaacugau

SEQ ID NO: 2538274 - RNA, 19 nt, Artificial Sequence
  Description of Artificial Sequence: Synthetic oligonucleotide
  Sense strand starting at position 3818 of SEQ ID NO: 1888509
ccaagugacucuuccggua

SEQ ID NO: 2538275 - RNA, 19 nt, Artificial Sequence
  Description of Artificial Sequence: Synthetic oligonucleotide
  Antisense strand to SEQ ID NO: 2538274
uaccggaagagucacuugg

SEQ ID NO: 2538276 - RNA, 19 nt, Artificial Sequence
  Description of Artificial Sequence: Synthetic oligonucleotide
  Sense strand starting at position 3887 of SEQ ID NO: 1888509
aauugaauccugugcaguc

SEQ ID NO: 2538277 - RNA, 19 nt, Artificial Sequence
  Description of Artificial Sequence: Synthetic oligonucleotide
  Antisense strand to SEQ ID NO: 2538276
gacugcacaggauucaauu

SEQ ID NO: 2538278 - RNA, 19 nt, Artificial Sequence
  Description of Artificial Sequence: Synthetic oligonucleotide
  Sense strand starting at position 3571 of SEQ ID NO: 1888509
gccagagucuaagcucuua

SEQ ID NO: 2538279 - RNA, 19 nt, Artificial Sequence
  Description of Artificial Sequence: Synthetic oligonucleotide
  Antisense strand to SEQ ID NO: 2538278
uaagagcuuagacucuggc

SEQ ID NO: 2538280 - RNA, 19 nt, Artificial Sequence
  Description of Artificial Sequence: Synthetic oligonucleotide
  Sense strand starting at position 3865 of SEQ ID NO: 1888509
agaguuugagcacgagcuu

SEQ ID NO: 2538281 - RNA, 19 nt, Artificial Sequence
  Description of Artificial Sequence: Synthetic oligonucleotide
  Antisense strand to SEQ ID NO: 2538280
aagcucgugcucaaacucu

SEQ ID NO: 2538282 - RNA, 19 nt, Artificial Sequence
  Description of Artificial Sequence: Synthetic oligonucleotide
  Sense strand starting at position 3787 of SEQ ID NO: 1888509
ucuagcaucucugcagagu

SEQ ID NO: 2538283 - RNA, 19 nt, Artificial Sequence
  Description of Artificial Sequence: Synthetic oligonucleotide
  Antisense strand to SEQ ID NO: 2538282
acucugcagagaugcuaga

SEQ ID NO: 2538284 - RNA, 19 nt, Artificial Sequence
  Description of Artificial Sequence: Synthetic oligonucleotide
  Sense strand starting at position 1497 of SEQ ID NO: 1888509
cccuaaguguuugcugacu

SEQ ID NO: 2538285 - RNA, 19 nt, Artificial Sequence
  Description of Artificial Sequence: Synthetic oligonucleotide
  Antisense strand to SEQ ID NO: 2538284
agucagcaaacacuuaggg

SEQ ID NO: 2538286 - RNA, 19 nt, Artificial Sequence
  Description of Artificial Sequence: Synthetic oligonucleotide
  Sense strand starting at position 1177 of SEQ ID NO: 1888509
agugcagucucuguccaua

SEQ ID NO: 2538287 - RNA, 19 nt, Artificial Sequence
  Description of Artificial Sequence: Synthetic oligonucleotide
  Antisense strand to SEQ ID NO: 2538286
uauggacagagacugcacu

SEQ ID NO: 2538288 - RNA, 19 nt, Artificial Sequence
  Description of Artificial Sequence: Synthetic oligonucleotide
  Sense strand starting at position 3723 of SEQ ID NO: 1888509
cuuacaaacugucaggaua

SEQ ID NO: 2538289 - RNA, 19 nt, Artificial Sequence
  Description of Artificial Sequence: Synthetic oligonucleotide
  Antisense strand to SEQ ID NO: 2538288
uauccugacaguuuguaag

SEQ ID NO: 2538290 - RNA, 19 nt, Artificial Sequence
  Description of Artificial Sequence: Synthetic oligonucleotide
  Sense strand starting at position 1159 of SEQ ID NO: 1888509
ccugcuaaugugugagcua

SEQ ID NO: 2538291 - RNA, 19 nt, Artificial Sequence
  Description of Artificial Sequence: Synthetic oligonucleotide
  Antisense strand to SEQ ID NO: 2538290
uagcucacacauuagcagg

SEQ ID NO: 2538292 - RNA, 19 nt, Artificial Sequence
  Description of Artificial Sequence: Synthetic oligonucleotide
  Sense strand starting at position 2589 of SEQ ID NO: 1888509
ggacguuugggucgugauu

SEQ ID NO: 2538293 - RNA, 19 nt, Artificial Sequence
  Description of Artificial Sequence: Synthetic oligonucleotide
  Antisense strand to SEQ ID NO: 2538292
aaucacgacccaaacgucc

SEQ ID NO: 2538294 - RNA, 19 nt, Artificial Sequence
  Description of Artificial Sequence: Synthetic oligonucleotide
  Sense strand starting at position 1488 of SEQ ID NO: 1888509
agucguguucccuaagugu

SEQ ID NO: 2538295 - RNA, 19 nt, Artificial Sequence
  Description of Artificial Sequence: Synthetic oligonucleotide
  Antisense strand to SEQ ID NO: 2538294
acacuuagggaacacgacu

SEQ ID NO: 2538296 - RNA, 19 nt, Artificial Sequence
  Description of Artificial Sequence: Synthetic oligonucleotide
  Sense strand starting at position 1486 of SEQ ID NO: 1888509
acagucguguucccuaagu

SEQ ID NO: 2538297 - RNA, 19 nt, Artificial Sequence
  Description of Artificial Sequence: Synthetic oligonucleotide
  Antisense strand to SEQ ID NO: 2538296
acuuagggaacacgacugu

SEQ ID NO: 2538298 - RNA, 19 nt, Artificial Sequence
  Description of Artificial Sequence: Synthetic oligonucleotide
  Sense strand starting at position 55 of SEQ ID NO: 1888510
uaauaugggugaccacaau

SEQ ID NO: 2538299 - RNA, 19 nt, Artificial Sequence
  Description of Artificial Sequence: Synthetic oligonucleotide
  Antisense strand to SEQ ID NO: 2538298
auuguggucacccauauua

SEQ ID NO: 2538300 - RNA, 19 nt, Artificial Sequence
  Description of Artificial Sequence: Synthetic oligonucleotide
  Sense strand starting at position 2007 of SEQ ID NO: 1888510
ccgguaucggucucuguga

SEQ ID NO: 2538301 - RNA, 19 nt, Artificial Sequence
  Description of Artificial Sequence: Synthetic oligonucleotide
  Antisense strand to SEQ ID NO: 2538300
ucacagagaccgauaccgg

SEQ ID NO: 2538302 - RNA, 19 nt, Artificial Sequence
  Description of Artificial Sequence: Synthetic oligonucleotide
  Sense strand starting at position 3484 of SEQ ID NO: 1888510
gagauugaugcauacuuuc

SEQ ID NO: 2538303 - RNA, 19 nt, Artificial Sequence
  Description of Artificial Sequence: Synthetic oligonucleotide
  Antisense strand to SEQ ID NO: 2538302
gaaaguaugcaucaaucuc

SEQ ID NO: 2538304 - RNA, 19 nt, Artificial Sequence
  Description of Artificial Sequence: Synthetic oligonucleotide
  Sense strand starting at position 301 of SEQ ID NO: 1888510
cggacaauucugcacagau

SEQ ID NO: 2538305 - RNA, 19 nt, Artificial Sequence
  Description of Artificial Sequence: Synthetic oligonucleotide
  Antisense strand to SEQ ID NO: 2538304
aucugugcagaauuguccg

SEQ ID NO: 2538306 - RNA, 19 nt, Artificial Sequence
  Description of Artificial Sequence: Synthetic oligonucleotide
  Sense strand starting at position 412 of SEQ ID NO: 1888510
guuauugaauauuccuaga

SEQ ID NO: 2538307 - RNA, 19 nt, Artificial Sequence
  Description of Artificial Sequence: Synthetic oligonucleotide
  Antisense strand to SEQ ID NO: 2538306
ucuaggaauauucaauaac

SEQ ID NO: 2538308 - RNA, 19 nt, Artificial Sequence
  Description of Artificial Sequence: Synthetic oligonucleotide
  Sense strand starting at position 2213 of SEQ ID NO: 1888510
gaaagacauguguagcuuu

SEQ ID NO: 2538309 - RNA, 19 nt, Artificial Sequence
  Description of Artificial Sequence: Synthetic oligonucleotide
  Antisense strand to SEQ ID NO: 2538308
aaagcuacacaugucuuuc

SEQ ID NO: 2538310 - RNA, 19 nt, Artificial Sequence
  Description of Artificial Sequence: Synthetic oligonucleotide
  Sense strand starting at position 300 of SEQ ID NO: 1888510
acggacaauucugcacaga

SEQ ID NO: 2538311 - RNA, 19 nt, Artificial Sequence
  Description of Artificial Sequence: Synthetic oligonucleotide
  Antisense strand to SEQ ID NO: 2538310
ucugugcagaauuguccgu

SEQ ID NO: 2538312 - RNA, 19 nt, Artificial Sequence
  Description of Artificial Sequence: Synthetic oligonucleotide
  Sense strand starting at position 842 of SEQ ID NO: 1888510
agcuaaauagcuggaaacu

SEQ ID NO: 2538313 - RNA, 19 nt, Artificial Sequence
  Description of Artificial Sequence: Synthetic oligonucleotide
  Antisense strand to SEQ ID NO: 2538312
aguuuccagcuauuuagcu

SEQ ID NO: 2538314 - RNA, 19 nt, Artificial Sequence
  Description of Artificial Sequence: Synthetic oligonucleotide
  Sense strand starting at position 2878 of SEQ ID NO: 1888510
cugagacccuguuucuaag

SEQ ID NO: 2538315 - RNA, 19 nt, Artificial Sequence
  Description of Artificial Sequence: Synthetic oligonucleotide
  Antisense strand to SEQ ID NO: 2538314
cuuagaaacagggucucag

SEQ ID NO: 2538316 - RNA, 19 nt, Artificial Sequence
  Description of Artificial Sequence: Synthetic oligonucleotide
  Sense strand starting at position 3392 of SEQ ID NO: 1888510
aggucugacuuuguugaaa

SEQ ID NO: 2538317 - RNA, 19 nt, Artificial Sequence
  Description of Artificial Sequence: Synthetic oligonucleotide
  Antisense strand to SEQ ID NO: 2538316
uuucaacaaagucagaccu

SEQ ID NO: 2538318 - RNA, 19 nt, Artificial Sequence
  Description of Artificial Sequence: Synthetic oligonucleotide
  Sense strand starting at position 3391 of SEQ ID NO: 1888510
aaggucugacuuuguugaa

SEQ ID NO: 2538319 - RNA, 19 nt, Artificial Sequence
  Description of Artificial Sequence: Synthetic oligonucleotide
  Antisense strand to SEQ ID NO: 2538318
uucaacaaagucagaccuu

SEQ ID NO: 2538320 - RNA, 19 nt, Artificial Sequence
  Description of Artificial Sequence: Synthetic oligonucleotide
  Sense strand starting at position 910 of SEQ ID NO: 1888510
ucuaaaggucccgaggcau

SEQ ID NO: 2538321 - RNA, 19 nt, Artificial Sequence
  Description of Artificial Sequence: Synthetic oligonucleotide
  Antisense strand to SEQ ID NO: 2538320
augccucgggaccuuuaga

SEQ ID NO: 2538322 - RNA, 19 nt, Artificial Sequence
  Description of Artificial Sequence: Synthetic oligonucleotide
  Sense strand starting at position 3692 of SEQ ID NO: 1888510
gcuaauaaaugcucaagua

SEQ ID NO: 2538323 - RNA, 19 nt, Artificial Sequence
  Description of Artificial Sequence: Synthetic oligonucleotide
  Antisense strand to SEQ ID NO: 2538322
uacuugagcauuuauuagc

SEQ ID NO: 2538324 - RNA, 19 nt, Artificial Sequence
  Description of Artificial Sequence: Synthetic oligonucleotide
  Sense strand starting at position 276 of SEQ ID NO: 1888510
ucuaauauuucgcaaagaa

SEQ ID NO: 2538325 - RNA, 19 nt, Artificial Sequence
  Description of Artificial Sequence: Synthetic oligonucleotide
  Antisense strand to SEQ ID NO: 2538324
uucuuugcgaaauauuaga

SEQ ID NO: 2538326 - RNA, 19 nt, Artificial Sequence
  Description of Artificial Sequence: Synthetic oligonucleotide
  Sense strand starting at position 3492 of SEQ ID NO: 1888510
ugcauacuuucuguuauua

SEQ ID NO: 2538327 - RNA, 19 nt, Artificial Sequence
  Description of Artificial Sequence: Synthetic oligonucleotide
  Antisense strand to SEQ ID NO: 2538326
uaauaacagaaaguaugca

SEQ ID NO: 2538328 - RNA, 19 nt, Artificial Sequence
  Description of Artificial Sequence: Synthetic oligonucleotide
  Sense strand starting at position 3405 of SEQ ID NO: 1888510
uugaaauaauuugggcuuu

SEQ ID NO: 2538329 - RNA, 19 nt, Artificial Sequence
  Description of Artificial Sequence: Synthetic oligonucleotide
  Antisense strand to SEQ ID NO: 2538328
aaagcccaaauuauuucaa

SEQ ID NO: 2538330 - RNA, 19 nt, Artificial Sequence
  Description of Artificial Sequence: Synthetic oligonucleotide
  Sense strand starting at position 2009 of SEQ ID NO: 1888510
gguaucggucucugugaca

SEQ ID NO: 2538331 - RNA, 19 nt, Artificial Sequence
  Description of Artificial Sequence: Synthetic oligonucleotide
  Antisense strand to SEQ ID NO: 2538330
ugucacagagaccgauacc

SEQ ID NO: 2538332 - RNA, 19 nt, Artificial Sequence
  Description of Artificial Sequence: Synthetic oligonucleotide
  Sense strand starting at position 2535 of SEQ ID NO: 1888510
cguucuucauucguuggaa

SEQ ID NO: 2538333 - RNA, 19 nt, Artificial Sequence
  Description of Artificial Sequence: Synthetic oligonucleotide
  Antisense strand to SEQ ID NO: 2538332
uuccaacgaaugaagaacg

SEQ ID NO: 2538334 - RNA, 19 nt, Artificial Sequence
  Description of Artificial Sequence: Synthetic oligonucleotide
  Sense strand starting at position 3682 of SEQ ID NO: 1888510
agcacaaguugcuaauaaa

SEQ ID NO: 2538335 - RNA, 19 nt, Artificial Sequence
  Description of Artificial Sequence: Synthetic oligonucleotide
  Antisense strand to SEQ ID NO: 2538334
uuuauuagcaacuugugcu

SEQ ID NO: 2538336 - RNA, 19 nt, Artificial Sequence
  Description of Artificial Sequence: Synthetic oligonucleotide
  Sense strand starting at position 396 of SEQ ID NO: 1888510
cgcagauaaucucacaguu

SEQ ID NO: 2538337 - RNA, 19 nt, Artificial Sequence
  Description of Artificial Sequence: Synthetic oligonucleotide
  Antisense strand to SEQ ID NO: 2538336
aacugugagauuaucugcg

SEQ ID NO: 2538338 - RNA, 19 nt, Artificial Sequence
  Description of Artificial Sequence: Synthetic oligonucleotide
  Sense strand starting at position 3394 of SEQ ID NO: 1888510
gucugacuuuguugaaaua

SEQ ID NO: 2538339 - RNA, 19 nt, Artificial Sequence
  Description of Artificial Sequence: Synthetic oligonucleotide
  Antisense strand to SEQ ID NO: 2538338
uauuucaacaaagucagac

SEQ ID NO: 2538340 - RNA, 19 nt, Artificial Sequence
  Description of Artificial Sequence: Synthetic oligonucleotide
  Sense strand starting at position 3874 of SEQ ID NO: 1888510
gcucuauccuccgaugagu

SEQ ID NO: 2538341 - RNA, 19 nt, Artificial Sequence
  Description of Artificial Sequence: Synthetic oligonucleotide
  Antisense strand to SEQ ID NO: 2538340
acucaucggaggauagagc

SEQ ID NO: 2538342 - RNA, 19 nt, Artificial Sequence
  Description of Artificial Sequence: Synthetic oligonucleotide
  Sense strand starting at position 3491 of SEQ ID NO: 1888510
augcauacuuucuguuauu

SEQ ID NO: 2538343 - RNA, 19 nt, Artificial Sequence
  Description of Artificial Sequence: Synthetic oligonucleotide
  Antisense strand to SEQ ID NO: 2538342
aauaacagaaaguaugcau

SEQ ID NO: 2538344 - RNA, 19 nt, Artificial Sequence
  Description of Artificial Sequence: Synthetic oligonucleotide
  Sense strand starting at position 3101 of SEQ ID NO: 1888511
uccugagaucaguaucauc

SEQ ID NO: 2538345 - RNA, 19 nt, Artificial Sequence
  Description of Artificial Sequence: Synthetic oligonucleotide
  Antisense strand to SEQ ID NO: 2538344
gaugauacugaucucagga

SEQ ID NO: 2538346 - RNA, 19 nt, Artificial Sequence
  Description of Artificial Sequence: Synthetic oligonucleotide
  Sense strand starting at position 2459 of SEQ ID NO: 1888511
gucugcugagauuaggaga

SEQ ID NO: 2538347 - RNA, 19 nt, Artificial Sequence
  Description of Artificial Sequence: Synthetic oligonucleotide
  Antisense strand to SEQ ID NO: 2538346
ucuccuaaucucagcagac

SEQ ID NO: 2538348 - RNA, 19 nt, Artificial Sequence
  Description of Artificial Sequence: Synthetic oligonucleotide
  Sense strand starting at position 1489 of SEQ ID NO: 1888511
uggagugauuacuccagga

SEQ ID NO: 2538349 - RNA, 19 nt, Artificial Sequence
  Description of Artificial Sequence: Synthetic oligonucleotide
  Antisense strand to SEQ ID NO: 2538348
uccuggaguaaucacucca

SEQ ID NO: 2538350 - RNA, 19 nt, Artificial Sequence
  Description of Artificial Sequence: Synthetic oligonucleotide
  Sense strand starting at position 785 of SEQ ID NO: 1888511
uggugauggagguagugau

SEQ ID NO: 2538351 - RNA, 19 nt, Artificial Sequence
  Description of Artificial Sequence: Synthetic oligonucleotide
  Antisense strand to SEQ ID NO: 2538350
aucacuaccuccaucacca

SEQ ID NO: 2538352 - RNA, 19 nt, Artificial Sequence
  Description of Artificial Sequence: Synthetic oligonucleotide
  Sense strand starting at position 3218 of SEQ ID NO: 1888511
cccaguucccgagauaaau

SEQ ID NO: 2538353 - RNA, 19 nt, Artificial Sequence
  Description of Artificial Sequence: Synthetic oligonucleotide
  Antisense strand to SEQ ID NO: 2538352
auuuaucucgggaacuggg

SEQ ID NO: 2538354 - RNA, 19 nt, Artificial Sequence
  Description of Artificial Sequence: Synthetic oligonucleotide
  Sense strand starting at position 1828 of SEQ ID NO: 1888511
uguacucaccuaggaaaug

SEQ ID NO: 2538355 - RNA, 19 nt, Artificial Sequence
  Description of Artificial Sequence: Synthetic oligonucleotide
  Antisense strand to SEQ ID NO: 2538354
cauuuccuaggugaguaca

SEQ ID NO: 2538356 - RNA, 19 nt, Artificial Sequence
  Description of Artificial Sequence: Synthetic oligonucleotide
  Sense strand starting at position 1898 of SEQ ID NO: 1888511
caguguucccaugacaaug

SEQ ID NO: 2538357 - RNA, 19 nt, Artificial Sequence
  Description of Artificial Sequence: Synthetic oligonucleotide
  Antisense strand to SEQ ID NO: 2538356
cauugucaugggaacacug

SEQ ID NO: 2538358 - RNA, 19 nt, Artificial Sequence
  Description of Artificial Sequence: Synthetic oligonucleotide
  Sense strand starting at position 9 of SEQ ID NO: 1888511
cacuauucucagugagagg

SEQ ID NO: 2538359 - RNA, 19 nt, Artificial Sequence
  Description of Artificial Sequence: Synthetic oligonucleotide
  Antisense strand to SEQ ID NO: 2538358
ccucucacugagaauagug

SEQ ID NO: 2538360 - RNA, 19 nt, Artificial Sequence
  Description of Artificial Sequence: Synthetic oligonucleotide
  Sense strand starting at position 3090 of SEQ ID NO: 1888511
cccagauccucuccugaga

SEQ ID NO: 2538361 - RNA, 19 nt, Artificial Sequence
  Description of Artificial Sequence: Synthetic oligonucleotide
  Antisense strand to SEQ ID NO: 2538360
ucucaggagaggaucuggg

SEQ ID NO: 2538362 - RNA, 19 nt, Artificial Sequence
  Description of Artificial Sequence: Synthetic oligonucleotide
  Sense strand starting at position 718 of SEQ ID NO: 1888511
gacagugcugaugacagua

SEQ ID NO: 2538363 - RNA, 19 nt, Artificial Sequence
  Description of Artificial Sequence: Synthetic oligonucleotide
  Antisense strand to SEQ ID NO: 2538362
uacugucaucagcacuguc

SEQ ID NO: 2538364 - RNA, 19 nt, Artificial Sequence
  Description of Artificial Sequence: Synthetic oligonucleotide
  Sense strand starting at position 8 of SEQ ID NO: 1888511
ccacuauucucagugagag

SEQ ID NO: 2538365 - RNA, 19 nt, Artificial Sequence
  Description of Artificial Sequence: Synthetic oligonucleotide
  Antisense strand to SEQ ID NO: 2538364
cucucacugagaauagugg

SEQ ID NO: 2538366 - RNA, 19 nt, Artificial Sequence
  Description of Artificial Sequence: Synthetic oligonucleotide
  Sense strand starting at position 2554 of SEQ ID NO: 1888511
aggagcugccauuauaauu

SEQ ID NO: 2538367 - RNA, 19 nt, Artificial Sequence
  Description of Artificial Sequence: Synthetic oligonucleotide
  Antisense strand to SEQ ID NO: 2538366
aauuauaauggcagcuccu

SEQ ID NO: 2538368 - RNA, 19 nt, Artificial Sequence
  Description of Artificial Sequence: Synthetic oligonucleotide
  Sense strand starting at position 3148 of SEQ ID NO: 1888511
uugauuaccgaggguaaca

SEQ ID NO: 2538369 - RNA, 19 nt, Artificial Sequence
  Description of Artificial Sequence: Synthetic oligonucleotide
  Antisense strand to SEQ ID NO: 2538368
uguuacccucgguaaucaa

SEQ ID NO: 2538370 - RNA, 19 nt, Artificial Sequence
  Description of Artificial Sequence: Synthetic oligonucleotide
  Sense strand starting at position 792 of SEQ ID NO: 1888511
ggagguagugauggugaua

SEQ ID NO: 2538371 - RNA, 19 nt, Artificial Sequence
  Description of Artificial Sequence: Synthetic oligonucleotide
  Antisense strand to SEQ ID NO: 2538370
uaucaccaucacuaccucc

SEQ ID NO: 2538372 - RNA, 19 nt, Artificial Sequence
  Description of Artificial Sequence: Synthetic oligonucleotide
  Sense strand starting at position 1216 of SEQ ID NO: 1888511
gugguuauggccgugcuca

SEQ ID NO: 2538373 - RNA, 19 nt, Artificial Sequence
  Description of Artificial Sequence: Synthetic oligonucleotide
  Antisense strand to SEQ ID NO: 2538372
ugagcacggccauaaccac

SEQ ID NO: 2538374 - RNA, 19 nt, Artificial Sequence
  Description of Artificial Sequence: Synthetic oligonucleotide
  Sense strand starting at position 2562 of SEQ ID NO: 1888511
ccauuauaauuagugugga

SEQ ID NO: 2538375 - RNA, 19 nt, Artificial Sequence
  Description of Artificial Sequence: Synthetic oligonucleotide
  Antisense strand to SEQ ID NO: 2538374
uccacacuaauuauaaugg

SEQ ID NO: 2538376 - RNA, 19 nt, Artificial Sequence
  Description of Artificial Sequence: Synthetic oligonucleotide
  Sense strand starting at position 3147 of SEQ ID NO: 1888511
cuugauuaccgaggguaac

SEQ ID NO: 2538377 - RNA, 19 nt, Artificial Sequence
  Description of Artificial Sequence: Synthetic oligonucleotide
  Antisense strand to SEQ ID NO: 2538376
guuacccucgguaaucaag

SEQ ID NO: 2538378 - RNA, 19 nt, Artificial Sequence
  Description of Artificial Sequence: Synthetic oligonucleotide
  Sense strand starting at position 1081 of SEQ ID NO: 1888511
ggaaguugugguuacagug

SEQ ID NO: 2538379 - RNA, 19 nt, Artificial Sequence
  Description of Artificial Sequence: Synthetic oligonucleotide
  Antisense strand to SEQ ID NO: 2538378
cacuguaaccacaacuucc

SEQ ID NO: 2538380 - RNA, 19 nt, Artificial Sequence
  Description of Artificial Sequence: Synthetic oligonucleotide
  Sense strand starting at position 3503 of SEQ ID NO: 1888511
gucagaaucuuagcccaga

SEQ ID NO: 2538381 - RNA, 19 nt, Artificial Sequence
  Description of Artificial Sequence: Synthetic oligonucleotide
  Antisense strand to SEQ ID NO: 2538380
ucugggcuaagauucugac

SEQ ID NO: 2538382 - RNA, 19 nt, Artificial Sequence
  Description of Artificial Sequence: Synthetic oligonucleotide
  Sense strand starting at position 518 of SEQ ID NO: 1888511
ggagaaugcccauggcaug

SEQ ID NO: 2538383 - RNA, 19 nt, Artificial Sequence
  Description of Artificial Sequence: Synthetic oligonucleotide
  Antisense strand to SEQ ID NO: 2538382
caugccaugggcauucucc

SEQ ID NO: 2538384 - RNA, 19 nt, Artificial Sequence
  Description of Artificial Sequence: Synthetic oligonucleotide
  Sense strand starting at position 1493 of SEQ ID NO: 1888511
gugauuacuccaggagguu

SEQ ID NO: 2538385 - RNA, 19 nt, Artificial Sequence
  Description of Artificial Sequence: Synthetic oligonucleotide
  Antisense strand to SEQ ID NO: 2538384
aaccuccuggaguaaucac

SEQ ID NO: 2538386 - RNA, 19 nt, Artificial Sequence
  Description of Artificial Sequence: Synthetic oligonucleotide
  Sense strand starting at position 929 of SEQ ID NO: 1888511
gaugguagucauggugaug

SEQ ID NO: 2538387 - RNA, 19 nt, Artificial Sequence
  Description of Artificial Sequence: Synthetic oligonucleotide
  Antisense strand to SEQ ID NO: 2538386
caucaccaugacuaccauc

SEQ ID NO: 2538388 - RNA, 19 nt, Artificial Sequence
  Description of Artificial Sequence: Synthetic oligonucleotide
  Sense strand starting at position 2029 of SEQ ID NO: 1888511
cggccaagugcugagacaa

SEQ ID NO: 2538389 - RNA, 19 nt, Artificial Sequence
  Description of Artificial Sequence: Synthetic oligonucleotide
  Antisense strand to SEQ ID NO: 2538388
uugucucagcacuuggccg

SEQ ID NO: 2538390 - RNA, 19 nt, Artificial Sequence
  Description of Artificial Sequence: Synthetic oligonucleotide
  Sense strand starting at position 925 of SEQ ID NO: 1888511
ugaugaugguagucauggu

SEQ ID NO: 2538391 - RNA, 19 nt, Artificial Sequence
  Description of Artificial Sequence: Synthetic oligonucleotide
  Antisense strand to SEQ ID NO: 2538390
accaugacuaccaucauca

SEQ ID NO: 2538392 - RNA, 19 nt, Artificial Sequence
  Description of Artificial Sequence: Synthetic oligonucleotide
  Sense strand starting at position 2717 of SEQ ID NO: 1888511
agauguuauuuagagccaa

SEQ ID NO: 2538393 - RNA, 19 nt, Artificial Sequence
  Description of Artificial Sequence: Synthetic oligonucleotide
  Antisense strand to SEQ ID NO: 2538392
uuggcucuaaauaacaucu

SEQ ID NO: 2538394 - RNA, 19 nt, Artificial Sequence
  Description of Artificial Sequence: Synthetic oligonucleotide
  Sense strand starting at position 1261 of SEQ ID NO: 1888511
gauucuccuccuggaguuu

SEQ ID NO: 2538395 - RNA, 19 nt, Artificial Sequence
  Description of Artificial Sequence: Synthetic oligonucleotide
  Antisense strand to SEQ ID NO: 2538394
aaacuccaggaggagaauc

SEQ ID NO: 2538396 - RNA, 19 nt, Artificial Sequence
  Description of Artificial Sequence: Synthetic oligonucleotide
  Sense strand starting at position 3312 of SEQ ID NO: 1888511
gggacuuacuaagaagaau

SEQ ID NO: 2538397 - RNA, 19 nt, Artificial Sequence
  Description of Artificial Sequence: Synthetic oligonucleotide
  Antisense strand to SEQ ID NO: 2538396
auucuucuuaguaaguccc

SEQ ID NO: 2538398 - RNA, 19 nt, Artificial Sequence
  Description of Artificial Sequence: Synthetic oligonucleotide
  Sense strand starting at position 992 of SEQ ID NO: 1888511
ggugauggugguggucaaa

SEQ ID NO: 2538399 - RNA, 19 nt, Artificial Sequence
  Description of Artificial Sequence: Synthetic oligonucleotide
  Antisense strand to SEQ ID NO: 2538398
uuugaccaccaccaucacc

SEQ ID NO: 2538400 - RNA, 19 nt, Artificial Sequence
  Description of Artificial Sequence: Synthetic oligonucleotide
  Sense strand starting at position 3556 of SEQ ID NO: 1888511
agcgacagcuuucugagaa

SEQ ID NO: 2538401 - RNA, 19 nt, Artificial Sequence
  Description of Artificial Sequence: Synthetic oligonucleotide
  Antisense strand to SEQ ID NO: 2538400
uucucagaaagcugucgcu

SEQ ID NO: 2538402 - RNA, 19 nt, Artificial Sequence
  Description of Artificial Sequence: Synthetic oligonucleotide
  Sense strand starting at position 3216 of SEQ ID NO: 1888511
cgcccaguucccgagauaa

SEQ ID NO: 2538403 - RNA, 19 nt, Artificial Sequence
  Description of Artificial Sequence: Synthetic oligonucleotide
  Antisense strand to SEQ ID NO: 2538402
uuaucucgggaacugggcg

SEQ ID NO: 2538404 - RNA, 19 nt, Artificial Sequence
  Description of Artificial Sequence: Synthetic oligonucleotide
  Sense strand starting at position 711 of SEQ ID NO: 1888511
guacuaugacagugcugau

SEQ ID NO: 2538405 - RNA, 19 nt, Artificial Sequence
  Description of Artificial Sequence: Synthetic oligonucleotide
  Antisense strand to SEQ ID NO: 2538404
aucagcacugucauaguac

SEQ ID NO: 2538406 - RNA, 19 nt, Artificial Sequence
  Description of Artificial Sequence: Synthetic oligonucleotide
  Sense strand starting at position 2761 of SEQ ID NO: 1888511
guccgcacuccaugaggaa

SEQ ID NO: 2538407 - RNA, 19 nt, Artificial Sequence
  Description of Artificial Sequence: Synthetic oligonucleotide
  Antisense strand to SEQ ID NO: 2538406
uuccucauggagugcggac

SEQ ID NO: 2538408 - RNA, 19 nt, Artificial Sequence
  Description of Artificial Sequence: Synthetic oligonucleotide
  Sense strand starting at position 3140 of SEQ ID NO: 1888511
uuguuuccuugauuaccga

SEQ ID NO: 2538409 - RNA, 19 nt, Artificial Sequence
  Description of Artificial Sequence: Synthetic oligonucleotide
  Antisense strand to SEQ ID NO: 2538408
ucgguaaucaaggaaacaa

SEQ ID NO: 2538410 - RNA, 19 nt, Artificial Sequence
  Description of Artificial Sequence: Synthetic oligonucleotide
  Sense strand starting at position 695 of SEQ ID NO: 1888511
ugggcuugucagcauggua

SEQ ID NO: 2538411 - RNA, 19 nt, Artificial Sequence
  Description of Artificial Sequence: Synthetic oligonucleotide
  Antisense strand to SEQ ID NO: 2538410
uaccaugcugacaagccca

SEQ ID NO: 2538412 - RNA, 19 nt, Artificial Sequence
  Description of Artificial Sequence: Synthetic oligonucleotide
  Sense strand starting at position 1917 of SEQ ID NO: 1888511
accuauuggcugugcagaa

SEQ ID NO: 2538413 - RNA, 19 nt, Artificial Sequence
  Description of Artificial Sequence: Synthetic oligonucleotide
  Antisense strand to SEQ ID NO: 2538412
uucugcacagccaauaggu

SEQ ID NO: 2538414 - RNA, 19 nt, Artificial Sequence
  Description of Artificial Sequence: Synthetic oligonucleotide
  Sense strand starting at position 3297 of SEQ ID NO: 1888511
cuuuaucaucgaugcggga

SEQ ID NO: 2538415 - RNA, 19 nt, Artificial Sequence
  Description of Artificial Sequence: Synthetic oligonucleotide
  Antisense strand to SEQ ID NO: 2538414
ucccgcaucgaugauaaag

SEQ ID NO: 2538416 - RNA, 19 nt, Artificial Sequence
  Description of Artificial Sequence: Synthetic oligonucleotide
  Sense strand starting at position 2180 of SEQ ID NO: 1888511
gggagacagucagauccaa

SEQ ID NO: 2538417 - RNA, 19 nt, Artificial Sequence
  Description of Artificial Sequence: Synthetic oligonucleotide
  Antisense strand to SEQ ID NO: 2538416
uuggaucugacugucuccc

SEQ ID NO: 2538418 - RNA, 19 nt, Artificial Sequence
  Description of Artificial Sequence: Synthetic oligonucleotide
  Sense strand starting at position 3284 of SEQ ID NO: 1888511
ggcugauacugcccuuuau

SEQ ID NO: 2538419 - RNA, 19 nt, Artificial Sequence
  Description of Artificial Sequence: Synthetic oligonucleotide
  Antisense strand to SEQ ID NO: 2538418
auaaagggcaguaucagcc

SEQ ID NO: 2538420 - RNA, 19 nt, Artificial Sequence
  Description of Artificial Sequence: Synthetic oligonucleotide
  Sense strand starting at position 2542 of SEQ ID NO: 1888511
ugaugaaugucgaggagcu

SEQ ID NO: 2538421 - RNA, 19 nt, Artificial Sequence
  Description of Artificial Sequence: Synthetic oligonucleotide
  Antisense strand to SEQ ID NO: 2538420
agcuccucgacauucauca

SEQ ID NO: 2538422 - RNA, 19 nt, Artificial Sequence
  Description of Artificial Sequence: Synthetic oligonucleotide
  Sense strand starting at position 641 of SEQ ID NO: 1888511
gccuccugugccugaggaa

SEQ ID NO: 2538423 - RNA, 19 nt, Artificial Sequence
  Description of Artificial Sequence: Synthetic oligonucleotide
  Antisense strand to SEQ ID NO: 2538422
uuccucaggcacaggaggc

SEQ ID NO: 2538424 - RNA, 19 nt, Artificial Sequence
  Description of Artificial Sequence: Synthetic oligonucleotide
  Sense strand starting at position 777 of SEQ ID NO: 1888512
gccucugcugccuucuaau

SEQ ID NO: 2538425 - RNA, 19 nt, Artificial Sequence
  Description of Artificial Sequence: Synthetic oligonucleotide
  Antisense strand to SEQ ID NO: 2538424
auuagaaggcagcagaggc

SEQ ID NO: 2538426 - RNA, 19 nt, Artificial Sequence
  Description of Artificial Sequence: Synthetic oligonucleotide
  Sense strand starting at position 2215 of SEQ ID NO: 1888512
gcgacagugccuucuguua

SEQ ID NO: 2538427 - RNA, 19 nt, Artificial Sequence
  Description of Artificial Sequence: Synthetic oligonucleotide
  Antisense strand to SEQ ID NO: 2538426
uaacagaaggcacugucgc

SEQ ID NO: 2538428 - RNA, 19 nt, Artificial Sequence
  Description of Artificial Sequence: Synthetic oligonucleotide
  Sense strand starting at position 3258 of SEQ ID NO: 1888512
gggacugucccucaucacu

SEQ ID NO: 2538429 - RNA, 19 nt, Artificial Sequence
  Description of Artificial Sequence: Synthetic oligonucleotide
  Antisense strand to SEQ ID NO: 2538428
agugaugagggacaguccc

SEQ ID NO: 2538430 - RNA, 19 nt, Artificial Sequence
  Description of Artificial Sequence: Synthetic oligonucleotide
  Sense strand starting at position 2858 of SEQ ID NO: 1888512
cuucgagaacuugagguuu

SEQ ID NO: 2538431 - RNA, 19 nt, Artificial Sequence
  Description of Artificial Sequence: Synthetic oligonucleotide
  Antisense strand to SEQ ID NO: 2538430
aaaccucaaguucucgaag

SEQ ID NO: 2538432 - RNA, 19 nt, Artificial Sequence
  Description of Artificial Sequence: Synthetic oligonucleotide
  Sense strand starting at position 215 of SEQ ID NO: 1888512
cucugagugguggaacagu

SEQ ID NO: 2538433 - RNA, 19 nt, Artificial Sequence
  Description of Artificial Sequence: Synthetic oligonucleotide
  Antisense strand to SEQ ID NO: 2538432
acuguuccaccacucagag

SEQ ID NO: 2538434 - RNA, 19 nt, Artificial Sequence
  Description of Artificial Sequence: Synthetic oligonucleotide
  Sense strand starting at position 3487 of SEQ ID NO: 1888512
augcaugcucuccauggaa

SEQ ID NO: 2538435 - RNA, 19 nt, Artificial Sequence
  Description of Artificial Sequence: Synthetic oligonucleotide
  Antisense strand to SEQ ID NO: 2538434
uuccauggagagcaugcau

SEQ ID NO: 2538436 - RNA, 19 nt, Artificial Sequence
  Description of Artificial Sequence: Synthetic oligonucleotide
  Sense strand starting at position 3788 of SEQ ID NO: 1888512
gccuaaacugcagagaguu

SEQ ID NO: 2538437 - RNA, 19 nt, Artificial Sequence
  Description of Artificial Sequence: Synthetic oligonucleotide
  Antisense strand to SEQ ID NO: 2538436
aacucucugcaguuuaggc

SEQ ID NO: 2538438 - RNA, 19 nt, Artificial Sequence
  Description of Artificial Sequence: Synthetic oligonucleotide
  Sense strand starting at position 1642 of SEQ ID NO: 1888512
aggguuaauccuggccaga

SEQ ID NO: 2538439 - RNA, 19 nt, Artificial Sequence
  Description of Artificial Sequence: Synthetic oligonucleotide
  Antisense strand to SEQ ID NO: 2538438
ucuggccaggauuaacccu

SEQ ID NO: 2538440 - RNA, 19 nt, Artificial Sequence
  Description of Artificial Sequence: Synthetic oligonucleotide
  Sense strand starting at position 1224 of SEQ ID NO: 1888512
gaagccugccucuaaguga

SEQ ID NO: 2538441 - RNA, 19 nt, Artificial Sequence
  Description of Artificial Sequence: Synthetic oligonucleotide
  Antisense strand to SEQ ID NO: 2538440
ucacuuagaggcaggcuuc

SEQ ID NO: 2538442 - RNA, 19 nt, Artificial Sequence
  Description of Artificial Sequence: Synthetic oligonucleotide
  Sense strand starting at position 1292 of SEQ ID NO: 1888512
ggcugaagcaauggugaau

SEQ ID NO: 2538443 - RNA, 19 nt, Artificial Sequence
  Description of Artificial Sequence: Synthetic oligonucleotide
  Antisense strand to SEQ ID NO: 2538442
auucaccauugcuucagcc

SEQ ID NO: 2538444 - RNA, 19 nt, Artificial Sequence
  Description of Artificial Sequence: Synthetic oligonucleotide
  Sense strand starting at position 211 of SEQ ID NO: 1888512
gucacucugagugguggaa

SEQ ID NO: 2538445 - RNA, 19 nt, Artificial Sequence
  Description of Artificial Sequence: Synthetic oligonucleotide
  Antisense strand to SEQ ID NO: 2538444
uuccaccacucagagugac

SEQ ID NO: 2538446 - RNA, 19 nt, Artificial Sequence
  Description of Artificial Sequence: Synthetic oligonucleotide
  Sense strand starting at position 3216 of SEQ ID NO: 1888512
cuuugcaguggucauauua

SEQ ID NO: 2538447 - RNA, 19 nt, Artificial Sequence
  Description of Artificial Sequence: Synthetic oligonucleotide
  Antisense strand to SEQ ID NO: 2538446
uaauaugaccacugcaaag

SEQ ID NO: 2538448 - RNA, 19 nt, Artificial Sequence
  Description of Artificial Sequence: Synthetic oligonucleotide
  Sense strand starting at position 1362 of SEQ ID NO: 1888512
agauaauccugccucaguu

SEQ ID NO: 2538449 - RNA, 19 nt, Artificial Sequence
  Description of Artificial Sequence: Synthetic oligonucleotide
  Antisense strand to SEQ ID NO: 2538448
aacugaggcaggauuaucu

SEQ ID NO: 2538450 - RNA, 19 nt, Artificial Sequence
  Description of Artificial Sequence: Synthetic oligonucleotide
  Sense strand starting at position 1349 of SEQ ID NO: 1888512
cuguguggccucgagauaa

SEQ ID NO: 2538451 - RNA, 19 nt, Artificial Sequence
  Description of Artificial Sequence: Synthetic oligonucleotide
  Antisense strand to SEQ ID NO: 2538450
uuaucucgaggccacacag

SEQ ID NO: 2538452 - RNA, 19 nt, Artificial Sequence
  Description of Artificial Sequence: Synthetic oligonucleotide
  Sense strand starting at position 3352 of SEQ ID NO: 1888512
gggugugggucaccaagua

SEQ ID NO: 2538453 - RNA, 19 nt, Artificial Sequence
  Description of Artificial Sequence: Synthetic oligonucleotide
  Antisense strand to SEQ ID NO: 2538452
uacuuggugacccacaccc

SEQ ID NO: 2538454 - RNA, 19 nt, Artificial Sequence
  Description of Artificial Sequence: Synthetic oligonucleotide
  Sense strand starting at position 3794 of SEQ ID NO: 1888512
acugcagagaguuguuacu

SEQ ID NO: 2538455 - RNA, 19 nt, Artificial Sequence
  Description of Artificial Sequence: Synthetic oligonucleotide
  Antisense strand to SEQ ID NO: 2538454
aguaacaacucucugcagu

SEQ ID NO: 2538456 - RNA, 19 nt, Artificial Sequence
  Description of Artificial Sequence: Synthetic oligonucleotide
  Sense strand starting at position 2759 of SEQ ID NO: 1888512
ucaaaucuagcgcaaguuu

SEQ ID NO: 2538457 - RNA, 19 nt, Artificial Sequence
  Description of Artificial Sequence: Synthetic oligonucleotide
  Antisense strand to SEQ ID NO: 2538456
aaacuugcgcuagauuuga

SEQ ID NO: 2538458 - RNA, 19 nt, Artificial Sequence
  Description of Artificial Sequence: Synthetic oligonucleotide
  Sense strand starting at position 327 of SEQ ID NO: 1888512
gcaggaucagcuuggaguu

SEQ ID NO: 2538459 - RNA, 19 nt, Artificial Sequence
  Description of Artificial Sequence: Synthetic oligonucleotide
  Antisense strand to SEQ ID NO: 2538458
aacuccaagcugauccugc

SEQ ID NO: 2538460 - RNA, 19 nt, Artificial Sequence
  Description of Artificial Sequence: Synthetic oligonucleotide
  Sense strand starting at position 3796 of SEQ ID NO: 1888512
ugcagagaguuguuacuuc

SEQ ID NO: 2538461 - RNA, 19 nt, Artificial Sequence
  Description of Artificial Sequence: Synthetic oligonucleotide
  Antisense strand to SEQ ID NO: 2538460
gaaguaacaacucucugca

SEQ ID NO: 2538462 - RNA, 19 nt, Artificial Sequence
  Description of Artificial Sequence: Synthetic oligonucleotide
  Sense strand starting at position 237 of SEQ ID NO: 1888512
ggaacugccugaucucgua

SEQ ID NO: 2538463 - RNA, 19 nt, Artificial Sequence
  Description of Artificial Sequence: Synthetic oligonucleotide
  Antisense strand to SEQ ID NO: 2538462
uacgagaucaggcaguucc

SEQ ID NO: 2538464 - RNA, 19 nt, Artificial Sequence
  Description of Artificial Sequence: Synthetic oligonucleotide
  Sense strand starting at position 243 of SEQ ID NO: 1888512
gccugaucucguaggcgca

SEQ ID NO: 2538465 - RNA, 19 nt, Artificial Sequence
  Description of Artificial Sequence: Synthetic oligonucleotide
  Antisense strand to SEQ ID NO: 2538464
ugcgccuacgagaucaggc

SEQ ID NO: 2538466 - RNA, 19 nt, Artificial Sequence
  Description of Artificial Sequence: Synthetic oligonucleotide
  Sense strand starting at position 3213 of SEQ ID NO: 1888512
ugacuuugcaguggucaua

SEQ ID NO: 2538467 - RNA, 19 nt, Artificial Sequence
  Description of Artificial Sequence: Synthetic oligonucleotide
  Antisense strand to SEQ ID NO: 2538466
uaugaccacugcaaaguca

SEQ ID NO: 2538468 - RNA, 19 nt, Artificial Sequence
  Description of Artificial Sequence: Synthetic oligonucleotide
  Sense strand starting at position 2848 of SEQ ID NO: 1888512
cuuuccugcucuucgagaa

SEQ ID NO: 2538469 - RNA, 19 nt, Artificial Sequence
  Description of Artificial Sequence: Synthetic oligonucleotide
  Antisense strand to SEQ ID NO: 2538468
uucucgaagagcaggaaag

SEQ ID NO: 2538470 - RNA, 19 nt, Artificial Sequence
  Description of Artificial Sequence: Synthetic oligonucleotide
  Sense strand starting at position 3489 of SEQ ID NO: 1888512
gcaugcucuccauggaagu

SEQ ID NO: 2538471 - RNA, 19 nt, Artificial Sequence
  Description of Artificial Sequence: Synthetic oligonucleotide
  Antisense strand to SEQ ID NO: 2538470
acuuccauggagagcaugc

SEQ ID NO: 2538472 - RNA, 19 nt, Artificial Sequence
  Description of Artificial Sequence: Synthetic oligonucleotide
  Sense strand starting at position 2108 of SEQ ID NO: 1888512
ccgggucucggcuggaaau

SEQ ID NO: 2538473 - RNA, 19 nt, Artificial Sequence
  Description of Artificial Sequence: Synthetic oligonucleotide
  Antisense strand to SEQ ID NO: 2538472
auuuccagccgagacccgg

SEQ ID NO: 2538474 - RNA, 19 nt, Artificial Sequence
  Description of Artificial Sequence: Synthetic oligonucleotide
  Sense strand starting at position 3212 of SEQ ID NO: 1888512
gugacuuugcaguggucau

SEQ ID NO: 2538475 - RNA, 19 nt, Artificial Sequence
  Description of Artificial Sequence: Synthetic oligonucleotide
  Antisense strand to SEQ ID NO: 2538474
augaccacugcaaagucac

SEQ ID NO: 2538476 - RNA, 19 nt, Artificial Sequence
  Description of Artificial Sequence: Synthetic oligonucleotide
  Sense strand starting at position 3885 of SEQ ID NO: 1888512
uuaaguggguuacacaaau

SEQ ID NO: 2538477 - RNA, 19 nt, Artificial Sequence
  Description of Artificial Sequence: Synthetic oligonucleotide
  Antisense strand to SEQ ID NO: 2538476
auuuguguaacccacuuaa

SEQ ID NO: 2538478 - RNA, 19 nt, Artificial Sequence
  Description of Artificial Sequence: Synthetic oligonucleotide
  Sense strand starting at position 856 of SEQ ID NO: 1888512
ccuguacucucagaguaug

SEQ ID NO: 2538479 - RNA, 19 nt, Artificial Sequence
  Description of Artificial Sequence: Synthetic oligonucleotide
  Antisense strand to SEQ ID NO: 2538478
cauacucugagaguacagg

SEQ ID NO: 2538480 - RNA, 19 nt, Artificial Sequence
  Description of Artificial Sequence: Synthetic oligonucleotide
  Sense strand starting at position 1231 of SEQ ID NO: 1888512
gccucuaagugacagugaa

SEQ ID NO: 2538481 - RNA, 19 nt, Artificial Sequence
  Description of Artificial Sequence: Synthetic oligonucleotide
  Antisense strand to SEQ ID NO: 2538480
uucacugucacuuagaggc

SEQ ID NO: 2538482 - RNA, 19 nt, Artificial Sequence
  Description of Artificial Sequence: Synthetic oligonucleotide
  Sense strand starting at position 213 of SEQ ID NO: 1888512
cacucugagugguggaaca

SEQ ID NO: 2538483 - RNA, 19 nt, Artificial Sequence
  Description of Artificial Sequence: Synthetic oligonucleotide
  Antisense strand to SEQ ID NO: 2538482
uguuccaccacucagagug

SEQ ID NO: 2538484 - RNA, 19 nt, Artificial Sequence
  Description of Artificial Sequence: Synthetic oligonucleotide
  Sense strand starting at position 1359 of SEQ ID NO: 1888512
ucgagauaauccugccuca

SEQ ID NO: 2538485 - RNA, 19 nt, Artificial Sequence
  Description of Artificial Sequence: Synthetic oligonucleotide
  Antisense strand to SEQ ID NO: 2538484
ugaggcaggauuaucucga

SEQ ID NO: 2538486 - RNA, 19 nt, Artificial Sequence
  Description of Artificial Sequence: Synthetic oligonucleotide
  Sense strand starting at position 3662 of SEQ ID NO: 1888512
gccauucuuuccuggcaga

SEQ ID NO: 2538487 - RNA, 19 nt, Artificial Sequence
  Description of Artificial Sequence: Synthetic oligonucleotide
  Antisense strand to SEQ ID NO: 2538486
ucugccaggaaagaauggc

SEQ ID NO: 2538488 - RNA, 19 nt, Artificial Sequence
  Description of Artificial Sequence: Synthetic oligonucleotide
  Sense strand starting at position 2757 of SEQ ID NO: 1888512
ggucaaaucuagcgcaagu

SEQ ID NO: 2538489 - RNA, 19 nt, Artificial Sequence
  Description of Artificial Sequence: Synthetic oligonucleotide
  Antisense strand to SEQ ID NO: 2538488
acuugcgcuagauuugacc

SEQ ID NO: 2538490 - RNA, 19 nt, Artificial Sequence
  Description of Artificial Sequence: Synthetic oligonucleotide
  Sense strand starting at position 464 of SEQ ID NO: 1888512
gcauguuucugcugccuuu

SEQ ID NO: 2538491 - RNA, 19 nt, Artificial Sequence
  Description of Artificial Sequence: Synthetic oligonucleotide
  Antisense strand to SEQ ID NO: 2538490
aaaggcagcagaaacaugc

SEQ ID NO: 2538492 - RNA, 19 nt, Artificial Sequence
  Description of Artificial Sequence: Synthetic oligonucleotide
  Sense strand starting at position 15 of SEQ ID NO: 1888513
cugacuuacuaucuuggaa

SEQ ID NO: 2538493 - RNA, 19 nt, Artificial Sequence
  Description of Artificial Sequence: Synthetic oligonucleotide
  Antisense strand to SEQ ID NO: 2538492
uuccaagauaguaagucag

SEQ ID NO: 2538494 - RNA, 19 nt, Artificial Sequence
  Description of Artificial Sequence: Synthetic oligonucleotide
  Sense strand starting at position 1028 of SEQ ID NO: 1888513
guaagauccuuccugagag

SEQ ID NO: 2538495 - RNA, 19 nt, Artificial Sequence
  Description of Artificial Sequence: Synthetic oligonucleotide
  Antisense strand to SEQ ID NO: 2538494
cucucaggaaggaucuuac

SEQ ID NO: 2538496 - RNA, 19 nt, Artificial Sequence
  Description of Artificial Sequence: Synthetic oligonucleotide
  Sense strand starting at position 192 of SEQ ID NO: 1888513
gggaauucugcuuaucauc

SEQ ID NO: 2538497 - RNA, 19 nt, Artificial Sequence
  Description of Artificial Sequence: Synthetic oligonucleotide
  Antisense strand to SEQ ID NO: 2538496
gaugauaagcagaauuccc

SEQ ID NO: 2538498 - RNA, 19 nt, Artificial Sequence
  Description of Artificial Sequence: Synthetic oligonucleotide
  Sense strand starting at position 1544 of SEQ ID NO: 1888513
cguguagacugggcauuua

SEQ ID NO: 2538499 - RNA, 19 nt, Artificial Sequence
  Description of Artificial Sequence: Synthetic oligonucleotide
  Antisense strand to SEQ ID NO: 2538498
uaaaugcccagucuacacg

SEQ ID NO: 2538500 - RNA, 19 nt, Artificial Sequence
  Description of Artificial Sequence: Synthetic oligonucleotide
  Sense strand starting at position 1025 of SEQ ID NO: 1888513
auuguaagauccuuccuga

SEQ ID NO: 2538501 - RNA, 19 nt, Artificial Sequence
  Description of Artificial Sequence: Synthetic oligonucleotide
  Antisense strand to SEQ ID NO: 2538500
ucaggaaggaucuuacaau

SEQ ID NO: 2538502 - RNA, 19 nt, Artificial Sequence
  Description of Artificial Sequence: Synthetic oligonucleotide
  Sense strand starting at position 2125 of SEQ ID NO: 1888513
ccgaguaugaccggagaag

SEQ ID NO: 2538503 - RNA, 19 nt, Artificial Sequence
  Description of Artificial Sequence: Synthetic oligonucleotide
  Antisense strand to SEQ ID NO: 2538502
cuucuccggucauacucgg

SEQ ID NO: 2538504 - RNA, 19 nt, Artificial Sequence
  Description of Artificial Sequence: Synthetic oligonucleotide
  Sense strand starting at position 191 of SEQ ID NO: 1888513
ugggaauucugcuuaucau

SEQ ID NO: 2538505 - RNA, 19 nt, Artificial Sequence
  Description of Artificial Sequence: Synthetic oligonucleotide
  Antisense strand to SEQ ID NO: 2538504
augauaagcagaauuccca

SEQ ID NO: 2538506 - RNA, 19 nt, Artificial Sequence
  Description of Artificial Sequence: Synthetic oligonucleotide
  Sense strand starting at position 266 of SEQ ID NO: 1888513
gaaacagugucagcucaga

SEQ ID NO: 2538507 - RNA, 19 nt, Artificial Sequence
  Description of Artificial Sequence: Synthetic oligonucleotide
  Antisense strand to SEQ ID NO: 2538506
ucugagcugacacuguuuc

SEQ ID NO: 2538508 - RNA, 19 nt, Artificial Sequence
  Description of Artificial Sequence: Synthetic oligonucleotide
  Sense strand starting at position 1001 of SEQ ID NO: 1888513
cuugguauaugcucagaug

SEQ ID NO: 2538509 - RNA, 19 nt, Artificial Sequence
  Description of Artificial Sequence: Synthetic oligonucleotide
  Antisense strand to SEQ ID NO: 2538508
caucugagcauauaccaag

SEQ ID NO: 2538510 - RNA, 19 nt, Artificial Sequence
  Description of Artificial Sequence: Synthetic oligonucleotide
  Sense strand starting at position 11 of SEQ ID NO: 1888513
guuucugacuuacuaucuu

SEQ ID NO: 2538511 - RNA, 19 nt, Artificial Sequence
  Description of Artificial Sequence: Synthetic oligonucleotide
  Antisense strand to SEQ ID NO: 2538510
aagauaguaagucagaaac

SEQ ID NO: 2538512 - RNA, 19 nt, Artificial Sequence
  Description of Artificial Sequence: Synthetic oligonucleotide
  Sense strand starting at position 3469 of SEQ ID NO: 1888513
ugcagagucggccauugaa

SEQ ID NO: 2538513 - RNA, 19 nt, Artificial Sequence
  Description of Artificial Sequence: Synthetic oligonucleotide
  Antisense strand to SEQ ID NO: 2538512
uucaauggccgacucugca

SEQ ID NO: 2538514 - RNA, 19 nt, Artificial Sequence
  Description of Artificial Sequence: Synthetic oligonucleotide
  Sense strand starting at position 2025 of SEQ ID NO: 1888513
ggcagagaucugcggaauu

SEQ ID NO: 2538515 - RNA, 19 nt, Artificial Sequence
  Description of Artificial Sequence: Synthetic oligonucleotide
  Antisense strand to SEQ ID NO: 2538514
aauuccgcagaucucugcc

SEQ ID NO: 2538516 - RNA, 19 nt, Artificial Sequence
  Description of Artificial Sequence: Synthetic oligonucleotide
  Sense strand starting at position 991 of SEQ ID NO: 1888513
aggaauauuucuugguaua

SEQ ID NO: 2538517 - RNA, 19 nt, Artificial Sequence
  Description of Artificial Sequence: Synthetic oligonucleotide
  Antisense strand to SEQ ID NO: 2538516
uauaccaagaaauauuccu

SEQ ID NO: 2538518 - RNA, 19 nt, Artificial Sequence
  Description of Artificial Sequence: Synthetic oligonucleotide
  Sense strand starting at position 3709 of SEQ ID NO: 1888513
gaugucaugggcugucaca

SEQ ID NO: 2538519 - RNA, 19 nt, Artificial Sequence
  Description of Artificial Sequence: Synthetic oligonucleotide
  Antisense strand to SEQ ID NO: 2538518
ugugacagcccaugacauc

SEQ ID NO: 2538520 - RNA, 19 nt, Artificial Sequence
  Description of Artificial Sequence: Synthetic oligonucleotide
  Sense strand starting at position 2876 of SEQ ID NO: 1888513
agguucacggucugaguaa

SEQ ID NO: 2538521 - RNA, 19 nt, Artificial Sequence
  Description of Artificial Sequence: Synthetic oligonucleotide
  Antisense strand to SEQ ID NO: 2538520
uuacucagaccgugaaccu

SEQ ID NO: 2538522 - RNA, 19 nt, Artificial Sequence
  Description of Artificial Sequence: Synthetic oligonucleotide
  Sense strand starting at position 3520 of SEQ ID NO: 1888513
cagccauugccacgaagau

SEQ ID NO: 2538523 - RNA, 19 nt, Artificial Sequence
  Description of Artificial Sequence: Synthetic oligonucleotide
  Antisense strand to SEQ ID NO: 2538522
aucuucguggcaauggcug

SEQ ID NO: 2538524 - RNA, 19 nt, Artificial Sequence
  Description of Artificial Sequence: Synthetic oligonucleotide
  Sense strand starting at position 3456 of SEQ ID NO: 1888513
auagcuuccugggugcaga

SEQ ID NO: 2538525 - RNA, 19 nt, Artificial Sequence
  Description of Artificial Sequence: Synthetic oligonucleotide
  Antisense strand to SEQ ID NO: 2538524
ucugcacccaggaagcuau

SEQ ID NO: 2538526 - RNA, 19 nt, Artificial Sequence
  Description of Artificial Sequence: Synthetic oligonucleotide
  Sense strand starting at position 3182 of SEQ ID NO: 1888513
gcuagaaagcgugauguuc

SEQ ID NO: 2538527 - RNA, 19 nt, Artificial Sequence
  Description of Artificial Sequence: Synthetic oligonucleotide
  Antisense strand to SEQ ID NO: 2538526
gaacaucacgcuuucuagc

SEQ ID NO: 2538528 - RNA, 19 nt, Artificial Sequence
  Description of Artificial Sequence: Synthetic oligonucleotide
  Sense strand starting at position 1032 of SEQ ID NO: 1888513
gauccuuccugagaggaac

SEQ ID NO: 2538529 - RNA, 19 nt, Artificial Sequence
  Description of Artificial Sequence: Synthetic oligonucleotide
  Antisense strand to SEQ ID NO: 2538528
guuccucucaggaaggauc

SEQ ID NO: 2538530 - RNA, 19 nt, Artificial Sequence
  Description of Artificial Sequence: Synthetic oligonucleotide
  Sense strand starting at position 3508 of SEQ ID NO: 1888513
caguguugucagcagccau

SEQ ID NO: 2538531 - RNA, 19 nt, Artificial Sequence
  Description of Artificial Sequence: Synthetic oligonucleotide
  Antisense strand to SEQ ID NO: 2538530
auggcugcugacaacacug

SEQ ID NO: 2538532 - RNA, 19 nt, Artificial Sequence
  Description of Artificial Sequence: Synthetic oligonucleotide
  Sense strand starting at position 3 of SEQ ID NO: 1888513
gcagcauuguuucugacuu

SEQ ID NO: 2538533 - RNA, 19 nt, Artificial Sequence
  Description of Artificial Sequence: Synthetic oligonucleotide
  Antisense strand to SEQ ID NO: 2538532
aagucagaaacaaugcugc

SEQ ID NO: 2538534 - RNA, 19 nt, Artificial Sequence
  Description of Artificial Sequence: Synthetic oligonucleotide
  Sense strand starting at position 3191 of SEQ ID NO: 1888513
cgugauguucgccauacuu

SEQ ID NO: 2538535 - RNA, 19 nt, Artificial Sequence
  Description of Artificial Sequence: Synthetic oligonucleotide
  Antisense strand to SEQ ID NO: 2538534
aaguauggcgaacaucacg

SEQ ID NO: 2538536 - RNA, 19 nt, Artificial Sequence
  Description of Artificial Sequence: Synthetic oligonucleotide
  Sense strand starting at position 1607 of SEQ ID NO: 1888513
agcaaauguuuacugcgua

SEQ ID NO: 2538537 - RNA, 19 nt, Artificial Sequence
  Description of Artificial Sequence: Synthetic oligonucleotide
  Antisense strand to SEQ ID NO: 2538536
uacgcaguaaacauuugcu

SEQ ID NO: 2538538 - RNA, 19 nt, Artificial Sequence
  Description of Artificial Sequence: Synthetic oligonucleotide
  Sense strand starting at position 70 of SEQ ID NO: 1888513
cuuugcgcuuccuuacaua

SEQ ID NO: 2538539 - RNA, 19 nt, Artificial Sequence
  Description of Artificial Sequence: Synthetic oligonucleotide
  Antisense strand to SEQ ID NO: 2538538
uauguaaggaagcgcaaag

SEQ ID NO: 2538540 - RNA, 19 nt, Artificial Sequence
  Description of Artificial Sequence: Synthetic oligonucleotide
  Sense strand starting at position 19 of SEQ ID NO: 1888513
cuuacuaucuuggaaaggu

SEQ ID NO: 2538541 - RNA, 19 nt, Artificial Sequence
  Description of Artificial Sequence: Synthetic oligonucleotide
  Antisense strand to SEQ ID NO: 2538540
accuuuccaagauaguaag

SEQ ID NO: 2538542 - RNA, 19 nt, Artificial Sequence
  Description of Artificial Sequence: Synthetic oligonucleotide
  Sense strand starting at position 2830 of SEQ ID NO: 1888513
acgcgaugcggguaguauu

SEQ ID NO: 2538543 - RNA, 19 nt, Artificial Sequence
  Description of Artificial Sequence: Synthetic oligonucleotide
  Antisense strand to SEQ ID NO: 2538542
aauacuacccgcaucgcgu

SEQ ID NO: 2538544 - RNA, 19 nt, Artificial Sequence
  Description of Artificial Sequence: Synthetic oligonucleotide
  Sense strand starting at position 3697 of SEQ ID NO: 1888513
uugaguggaucugauguca

SEQ ID NO: 2538545 - RNA, 19 nt, Artificial Sequence
  Description of Artificial Sequence: Synthetic oligonucleotide
  Antisense strand to SEQ ID NO: 2538544
ugacaucagauccacucaa

SEQ ID NO: 2538546 - RNA, 19 nt, Artificial Sequence
  Description of Artificial Sequence: Synthetic oligonucleotide
  Sense strand starting at position 3188 of SEQ ID NO: 1888513
aagcgugauguucgccaua

SEQ ID NO: 2538547 - RNA, 19 nt, Artificial Sequence
  Description of Artificial Sequence: Synthetic oligonucleotide
  Antisense strand to SEQ ID NO: 2538546
uauggcgaacaucacgcuu

SEQ ID NO: 2538548 - RNA, 19 nt, Artificial Sequence
  Description of Artificial Sequence: Synthetic oligonucleotide
  Sense strand starting at position 1020 of SEQ ID NO: 1888513
cugguauuguaagauccuu

SEQ ID NO: 2538549 - RNA, 19 nt, Artificial Sequence
  Description of Artificial Sequence: Synthetic oligonucleotide
  Antisense strand to SEQ ID NO: 2538548
aaggaucuuacaauaccag

SEQ ID NO: 2538550 - RNA, 19 nt, Artificial Sequence
  Description of Artificial Sequence: Synthetic oligonucleotide
  Sense strand starting at position 3190 of SEQ ID NO: 1888513
gcgugauguucgccauacu

SEQ ID NO: 2538551 - RNA, 19 nt, Artificial Sequence
  Description of Artificial Sequence: Synthetic oligonucleotide
  Antisense strand to SEQ ID NO: 2538550
aguauggcgaacaucacgc

SEQ ID NO: 2538552 - RNA, 19 nt, Artificial Sequence
  Description of Artificial Sequence: Synthetic oligonucleotide
  Sense strand starting at position 3539 of SEQ ID NO: 1888513
ggcgcaauuucauggcaug

SEQ ID NO: 2538553 - RNA, 19 nt, Artificial Sequence
  Description of Artificial Sequence: Synthetic oligonucleotide
  Antisense strand to SEQ ID NO: 2538552
caugccaugaaauugcgcc

SEQ ID NO: 2538554 - RNA, 19 nt, Artificial Sequence
  Description of Artificial Sequence: Synthetic oligonucleotide
  Sense strand starting at position 1012 of SEQ ID NO: 1888513
cucagaugcugguauugua

SEQ ID NO: 2538555 - RNA, 19 nt, Artificial Sequence
  Description of Artificial Sequence: Synthetic oligonucleotide
  Antisense strand to SEQ ID NO: 2538554
uacaauaccagcaucugag

SEQ ID NO: 2538556 - RNA, 19 nt, Artificial Sequence
  Description of Artificial Sequence: Synthetic oligonucleotide
  Sense strand starting at position 1015 of SEQ ID NO: 1888513
agaugcugguauuguaaga

SEQ ID NO: 2538557 - RNA, 19 nt, Artificial Sequence
  Description of Artificial Sequence: Synthetic oligonucleotide
  Antisense strand to SEQ ID NO: 2538556
ucuuacaauaccagcaucu

SEQ ID NO: 2538558 - RNA, 19 nt, Artificial Sequence
  Description of Artificial Sequence: Synthetic oligonucleotide
  Sense strand starting at position 1004 of SEQ ID NO: 1888513
gguauaugcucagaugcug

SEQ ID NO: 2538559 - RNA, 19 nt, Artificial Sequence
  Description of Artificial Sequence: Synthetic oligonucleotide
  Antisense strand to SEQ ID NO: 2538558
cagcaucugagcauauacc

SEQ ID NO: 2538560 - RNA, 19 nt, Artificial Sequence
  Description of Artificial Sequence: Synthetic oligonucleotide
  Sense strand starting at position 744 of SEQ ID NO: 1888513
aagggauugucacgccuca

SEQ ID NO: 2538561 - RNA, 19 nt, Artificial Sequence
  Description of Artificial Sequence: Synthetic oligonucleotide
  Antisense strand to SEQ ID NO: 2538560
ugaggcgugacaaucccuu

SEQ ID NO: 2538562 - RNA, 19 nt, Artificial Sequence
  Description of Artificial Sequence: Synthetic oligonucleotide
  Sense strand starting at position 2947 of SEQ ID NO: 1888514
ccuagagcccauuaauuga

SEQ ID NO: 2538563 - RNA, 19 nt, Artificial Sequence
  Description of Artificial Sequence: Synthetic oligonucleotide
  Antisense strand to SEQ ID NO: 2538562
ucaauuaaugggcucuagg

SEQ ID NO: 2538564 - RNA, 19 nt, Artificial Sequence
  Description of Artificial Sequence: Synthetic oligonucleotide
  Sense strand starting at position 2426 of SEQ ID NO: 1888514
gaaugugacccuugggaca

SEQ ID NO: 2538565 - RNA, 19 nt, Artificial Sequence
  Description of Artificial Sequence: Synthetic oligonucleotide
  Antisense strand to SEQ ID NO: 2538564
ugucccaagggucacauuc

SEQ ID NO: 2538566 - RNA, 19 nt, Artificial Sequence
  Description of Artificial Sequence: Synthetic oligonucleotide
  Sense strand starting at position 2542 of SEQ ID NO: 1888514
uugagaugcgcgucuucau

SEQ ID NO: 2538567 - RNA, 19 nt, Artificial Sequence
  Description of Artificial Sequence: Synthetic oligonucleotide
  Antisense strand to SEQ ID NO: 2538566
augaagacgcgcaucucaa

SEQ ID NO: 2538568 - RNA, 19 nt, Artificial Sequence
  Description of Artificial Sequence: Synthetic oligonucleotide
  Sense strand starting at position 2543 of SEQ ID NO: 1888514
ugagaugcgcgucuucauu

SEQ ID NO: 2538569 - RNA, 19 nt, Artificial Sequence
  Description of Artificial Sequence: Synthetic oligonucleotide
  Antisense strand to SEQ ID NO: 2538568
aaugaagacgcgcaucuca

SEQ ID NO: 2538570 - RNA, 19 nt, Artificial Sequence
  Description of Artificial Sequence: Synthetic oligonucleotide
  Sense strand starting at position 372 of SEQ ID NO: 1888514
ggagguucagcucaggagu

SEQ ID NO: 2538571 - RNA, 19 nt, Artificial Sequence
  Description of Artificial Sequence: Synthetic oligonucleotide
  Antisense strand to SEQ ID NO: 2538570
acuccugagcugaaccucc

SEQ ID NO: 2538572 - RNA, 19 nt, Artificial Sequence
  Description of Artificial Sequence: Synthetic oligonucleotide
  Sense strand starting at position 3688 of SEQ ID NO: 1888514
aaacuaguuuacuucggaa

SEQ ID NO: 2538573 - RNA, 19 nt, Artificial Sequence
  Description of Artificial Sequence: Synthetic oligonucleotide
  Antisense strand to SEQ ID NO: 2538572
uuccgaaguaaacuaguuu

SEQ ID NO: 2538574 - RNA, 19 nt, Artificial Sequence
  Description of Artificial Sequence: Synthetic oligonucleotide
  Sense strand starting at position 3648 of SEQ ID NO: 1888514
cagcaagacugucugaaca

SEQ ID NO: 2538575 - RNA, 19 nt, Artificial Sequence
  Description of Artificial Sequence: Synthetic oligonucleotide
  Antisense strand to SEQ ID NO: 2538574
uguucagacagucuugcug

SEQ ID NO: 2538576 - RNA, 19 nt, Artificial Sequence
  Description of Artificial Sequence: Synthetic oligonucleotide
  Sense strand starting at position 375 of SEQ ID NO: 1888514
gguucagcucaggaguaca

SEQ ID NO: 2538577 - RNA, 19 nt, Artificial Sequence
  Description of Artificial Sequence: Synthetic oligonucleotide
  Antisense strand to SEQ ID NO: 2538576
uguacuccugagcugaacc

SEQ ID NO: 2538578 - RNA, 19 nt, Artificial Sequence
  Description of Artificial Sequence: Synthetic oligonucleotide
  Sense strand starting at position 3004 of SEQ ID NO: 1888514
accagcaucugagcauaua

SEQ ID NO: 2538579 - RNA, 19 nt, Artificial Sequence
  Description of Artificial Sequence: Synthetic oligonucleotide
  Antisense strand to SEQ ID NO: 2538578
uauaugcucagaugcuggu

SEQ ID NO: 2538580 - RNA, 19 nt, Artificial Sequence
  Description of Artificial Sequence: Synthetic oligonucleotide
  Sense strand starting at position 2462 of SEQ ID NO: 1888514
ugcauaaaugcccagucua

SEQ ID NO: 2538581 - RNA, 19 nt, Artificial Sequence
  Description of Artificial Sequence: Synthetic oligonucleotide
  Antisense strand to SEQ ID NO: 2538580
uagacugggcauuuaugca

SEQ ID NO: 2538582 - RNA, 19 nt, Artificial Sequence
  Description of Artificial Sequence: Synthetic oligonucleotide
  Sense strand starting at position 566 of SEQ ID NO: 1888514
aagcuaucaggguggugau

SEQ ID NO: 2538583 - RNA, 19 nt, Artificial Sequence
  Description of Artificial Sequence: Synthetic oligonucleotide
  Antisense strand to SEQ ID NO: 2538582
aucaccacccugauagcuu

SEQ ID NO: 2538584 - RNA, 19 nt, Artificial Sequence
  Description of Artificial Sequence: Synthetic oligonucleotide
  Sense strand starting at position 2398 of SEQ ID NO: 1888514
guggguacgcaguaaacau

SEQ ID NO: 2538585 - RNA, 19 nt, Artificial Sequence
  Description of Artificial Sequence: Synthetic oligonucleotide
  Antisense strand to SEQ ID NO: 2538584
auguuuacugcguacccac

SEQ ID NO: 2538586 - RNA, 19 nt, Artificial Sequence
  Description of Artificial Sequence: Synthetic oligonucleotide
  Sense strand starting at position 477 of SEQ ID NO: 1888514
augaaauugcgccaucuuc

SEQ ID NO: 2538587 - RNA, 19 nt, Artificial Sequence
  Description of Artificial Sequence: Synthetic oligonucleotide
  Antisense strand to SEQ ID NO: 2538586
gaagauggcgcaauuucau

SEQ ID NO: 2538588 - RNA, 19 nt, Artificial Sequence
  Description of Artificial Sequence: Synthetic oligonucleotide
  Sense strand starting at position 2922 of SEQ ID NO: 1888514
guuuaaaucugagucaguu

SEQ ID NO: 2538589 - RNA, 19 nt, Artificial Sequence
  Description of Artificial Sequence: Synthetic oligonucleotide
  Antisense strand to SEQ ID NO: 2538588
aacugacucagauuuaaac

SEQ ID NO: 2538590 - RNA, 19 nt, Artificial Sequence
  Description of Artificial Sequence: Synthetic oligonucleotide
  Sense strand starting at position 1982 of SEQ ID NO: 1888514
ccgaauuccgcagaucucu

SEQ ID NO: 2538591 - RNA, 19 nt, Artificial Sequence
  Description of Artificial Sequence: Synthetic oligonucleotide
  Antisense strand to SEQ ID NO: 2538590
agagaucugcggaauucgg

SEQ ID NO: 2538592 - RNA, 19 nt, Artificial Sequence
  Description of Artificial Sequence: Synthetic oligonucleotide
  Sense strand starting at position 946 of SEQ ID NO: 1888514
ugcgacuucugauccaauu

SEQ ID NO: 2538593 - RNA, 19 nt, Artificial Sequence
  Description of Artificial Sequence: Synthetic oligonucleotide
  Antisense strand to SEQ ID NO: 2538592
aauuggaucagaagucgca

SEQ ID NO: 2538594 - RNA, 19 nt, Artificial Sequence
  Description of Artificial Sequence: Synthetic oligonucleotide
  Sense strand starting at position 3270 of SEQ ID NO: 1888514
gcgugacaaucccuugaac

SEQ ID NO: 2538595 - RNA, 19 nt, Artificial Sequence
  Description of Artificial Sequence: Synthetic oligonucleotide
  Antisense strand to SEQ ID NO: 2538594
guucaagggauugucacgc

SEQ ID NO: 2538596 - RNA, 19 nt, Artificial Sequence
  Description of Artificial Sequence: Synthetic oligonucleotide
  Sense strand starting at position 1120 of SEQ ID NO: 1888514
gguguaaugagguguuacu

SEQ ID NO: 2538597 - RNA, 19 nt, Artificial Sequence
  Description of Artificial Sequence: Synthetic oligonucleotide
  Antisense strand to SEQ ID NO: 2538596
aguaacaccucauuacacc

SEQ ID NO: 2538598 - RNA, 19 nt, Artificial Sequence
  Description of Artificial Sequence: Synthetic oligonucleotide
  Sense strand starting at position 1980 of SEQ ID NO: 1888514
ggccgaauuccgcagaucu

SEQ ID NO: 2538599 - RNA, 19 nt, Artificial Sequence
  Description of Artificial Sequence: Synthetic oligonucleotide
  Antisense strand to SEQ ID NO: 2538598
agaucugcggaauucggcc

SEQ ID NO: 2538600 - RNA, 19 nt, Artificial Sequence
  Description of Artificial Sequence: Synthetic oligonucleotide
  Sense strand starting at position 1252 of SEQ ID NO: 1888514
gcaagauggcuccguacag

SEQ ID NO: 2538601 - RNA, 19 nt, Artificial Sequence
  Description of Artificial Sequence: Synthetic oligonucleotide
  Antisense strand to SEQ ID NO: 2538600
cuguacggagccaucuugc

SEQ ID NO: 2538602 - RNA, 19 nt, Artificial Sequence
  Description of Artificial Sequence: Synthetic oligonucleotide
  Sense strand starting at position 3838 of SEQ ID NO: 1888514
acccgaguccugugguuac

SEQ ID NO: 2538603 - RNA, 19 nt, Artificial Sequence
  Description of Artificial Sequence: Synthetic oligonucleotide
  Antisense strand to SEQ ID NO: 2538602
guaaccacaggacucgggu

SEQ ID NO: 2538604 - RNA, 19 nt, Artificial Sequence
  Description of Artificial Sequence: Synthetic oligonucleotide
  Sense strand starting at position 3958 of SEQ ID NO: 1888514
guagaaaccuuugaaacuc

SEQ ID NO: 2538605 - RNA, 19 nt, Artificial Sequence
  Description of Artificial Sequence: Synthetic oligonucleotide
  Antisense strand to SEQ ID NO: 2538604
gaguuucaaagguuucuac

SEQ ID NO: 2538606 - RNA, 19 nt, Artificial Sequence
  Description of Artificial Sequence: Synthetic oligonucleotide
  Sense strand starting at position 985 of SEQ ID NO: 1888514
aggcuuuagcguuggucua

SEQ ID NO: 2538607 - RNA, 19 nt, Artificial Sequence
  Description of Artificial Sequence: Synthetic oligonucleotide
  Antisense strand to SEQ ID NO: 2538606
uagaccaacgcuaaagccu

SEQ ID NO: 2538608 - RNA, 19 nt, Artificial Sequence
  Description of Artificial Sequence: Synthetic oligonucleotide
  Sense strand starting at position 2438 of SEQ ID NO: 1888514
ugggacaguuccgaugacu

SEQ ID NO: 2538609 - RNA, 19 nt, Artificial Sequence
  Description of Artificial Sequence: Synthetic oligonucleotide
  Antisense strand to SEQ ID NO: 2538608
agucaucggaacuguccca

SEQ ID NO: 2538610 - RNA, 19 nt, Artificial Sequence
  Description of Artificial Sequence: Synthetic oligonucleotide
  Sense strand starting at position 986 of SEQ ID NO: 1888514
ggcuuuagcguuggucuau

SEQ ID NO: 2538611 - RNA, 19 nt, Artificial Sequence
  Description of Artificial Sequence: Synthetic oligonucleotide
  Antisense strand to SEQ ID NO: 2538610
auagaccaacgcuaaagcc

SEQ ID NO: 2538612 - RNA, 19 nt, Artificial Sequence
  Description of Artificial Sequence: Synthetic oligonucleotide
  Sense strand starting at position 2452 of SEQ ID NO: 1888514
ugacuccaguugcauaaau

SEQ ID NO: 2538613 - RNA, 19 nt, Artificial Sequence
  Description of Artificial Sequence: Synthetic oligonucleotide
  Antisense strand to SEQ ID NO: 2538612
auuuaugcaacuggaguca

SEQ ID NO: 2538614 - RNA, 19 nt, Artificial Sequence
  Description of Artificial Sequence: Synthetic oligonucleotide
  Sense strand starting at position 987 of SEQ ID NO: 1888514
gcuuuagcguuggucuauu

SEQ ID NO: 2538615 - RNA, 19 nt, Artificial Sequence
  Description of Artificial Sequence: Synthetic oligonucleotide
  Antisense strand to SEQ ID NO: 2538614
aauagaccaacgcuaaagc

SEQ ID NO: 2538616 - RNA, 19 nt, Artificial Sequence
  Description of Artificial Sequence: Synthetic oligonucleotide
  Sense strand starting at position 3870 of SEQ ID NO: 1888514
augcauacuugggauguuu

SEQ ID NO: 2538617 - RNA, 19 nt, Artificial Sequence
  Description of Artificial Sequence: Synthetic oligonucleotide
  Antisense strand to SEQ ID NO: 2538616
aaacaucccaaguaugcau

SEQ ID NO: 2538618 - RNA, 19 nt, Artificial Sequence
  Description of Artificial Sequence: Synthetic oligonucleotide
  Sense strand starting at position 464 of SEQ ID NO: 1888514
gcaucuccaugccaugaaa

SEQ ID NO: 2538619 - RNA, 19 nt, Artificial Sequence
  Description of Artificial Sequence: Synthetic oligonucleotide
  Antisense strand to SEQ ID NO: 2538618
uuucauggcauggagaugc

SEQ ID NO: 2538620 - RNA, 19 nt, Artificial Sequence
  Description of Artificial Sequence: Synthetic oligonucleotide
  Sense strand starting at position 3869 of SEQ ID NO: 1888514
aaugcauacuugggauguu

SEQ ID NO: 2538621 - RNA, 19 nt, Artificial Sequence
  Description of Artificial Sequence: Synthetic oligonucleotide
  Antisense strand to SEQ ID NO: 2538620
aacaucccaaguaugcauu

SEQ ID NO: 2538622 - RNA, 19 nt, Artificial Sequence
  Description of Artificial Sequence: Synthetic oligonucleotide
  Sense strand starting at position 3797 of SEQ ID NO: 1888514
ggugcaggcuuauggaaau

SEQ ID NO: 2538623 - RNA, 19 nt, Artificial Sequence
  Description of Artificial Sequence: Synthetic oligonucleotide
  Antisense strand to SEQ ID NO: 2538622
auuuccauaagccugcacc

SEQ ID NO: 2538624 - RNA, 19 nt, Artificial Sequence
  Description of Artificial Sequence: Synthetic oligonucleotide
  Sense strand starting at position 3851 of SEQ ID NO: 1888514
gguuacuucucuggucuca

SEQ ID NO: 2538625 - RNA, 19 nt, Artificial Sequence
  Description of Artificial Sequence: Synthetic oligonucleotide
  Antisense strand to SEQ ID NO: 2538624
ugagaccagagaaguaacc

SEQ ID NO: 2538626 - RNA, 19 nt, Artificial Sequence
  Description of Artificial Sequence: Synthetic oligonucleotide
  Sense strand starting at position 523 of SEQ ID NO: 1888514
ucucgaagcucuugaguuu

SEQ ID NO: 2538627 - RNA, 19 nt, Artificial Sequence
  Description of Artificial Sequence: Synthetic oligonucleotide
  Antisense strand to SEQ ID NO: 2538626
aaacucaagagcuucgaga

SEQ ID NO: 2538628 - RNA, 19 nt, Artificial Sequence
  Description of Artificial Sequence: Synthetic oligonucleotide
  Sense strand starting at position 1880 of SEQ ID NO: 1888514
cugggcuucuccggucaua

SEQ ID NO: 2538629 - RNA, 19 nt, Artificial Sequence
  Description of Artificial Sequence: Synthetic oligonucleotide
  Antisense strand to SEQ ID NO: 2538628
uaugaccggagaagcccag

SEQ ID NO: 2538630 - RNA, 19 nt, Artificial Sequence
  Description of Artificial Sequence: Synthetic oligonucleotide
  Sense strand starting at position 815 of SEQ ID NO: 1888514
ccgcaaguauggcgaacau

SEQ ID NO: 2538631 - RNA, 19 nt, Artificial Sequence
  Description of Artificial Sequence: Synthetic oligonucleotide
  Antisense strand to SEQ ID NO: 2538630
auguucgccauacuugcgg

SEQ ID NO: 2538632 - RNA, 19 nt, Artificial Sequence
  Description of Artificial Sequence: Synthetic oligonucleotide
  Sense strand starting at position 1108 of SEQ ID NO: 1888514
ggcccaggcuucgguguaa

SEQ ID NO: 2538633 - RNA, 19 nt, Artificial Sequence
  Description of Artificial Sequence: Synthetic oligonucleotide
  Antisense strand to SEQ ID NO: 2538632
uuacaccgaagccugggcc

SEQ ID NO: 2538634 - RNA, 19 nt, Artificial Sequence
  Description of Artificial Sequence: Synthetic oligonucleotide
  Sense strand starting at position 485 of SEQ ID NO: 1888514
gcgccaucuucguggcaau

SEQ ID NO: 2538635 - RNA, 19 nt, Artificial Sequence
  Description of Artificial Sequence: Synthetic oligonucleotide
  Antisense strand to SEQ ID NO: 2538634
auugccacgaagauggcgc

SEQ ID NO: 2538636 - RNA, 19 nt, Artificial Sequence
  Description of Artificial Sequence: Synthetic oligonucleotide
  Sense strand starting at position 3234 of SEQ ID NO: 1888515
ugcuuagccugauuugauc

SEQ ID NO: 2538637 - RNA, 19 nt, Artificial Sequence
  Description of Artificial Sequence: Synthetic oligonucleotide
  Antisense strand to SEQ ID NO: 2538636
gaucaaaucaggcuaagca

SEQ ID NO: 2538638 - RNA, 19 nt, Artificial Sequence
  Description of Artificial Sequence: Synthetic oligonucleotide
  Sense strand starting at position 566 of SEQ ID NO: 1888515
uuguaagguccaggaaaca

SEQ ID NO: 2538639 - RNA, 19 nt, Artificial Sequence
  Description of Artificial Sequence: Synthetic oligonucleotide
  Antisense strand to SEQ ID NO: 2538638
uguuuccuggaccuuacaa

SEQ ID NO: 2538640 - RNA, 19 nt, Artificial Sequence
  Description of Artificial Sequence: Synthetic oligonucleotide
  Sense strand starting at position 597 of SEQ ID NO: 1888515
uggacagaaucuucuccuu

SEQ ID NO: 2538641 - RNA, 19 nt, Artificial Sequence
  Description of Artificial Sequence: Synthetic oligonucleotide
  Antisense strand to SEQ ID NO: 2538640
aaggagaagauucugucca

SEQ ID NO: 2538642 - RNA, 19 nt, Artificial Sequence
  Description of Artificial Sequence: Synthetic oligonucleotide
  Sense strand starting at position 1159 of SEQ ID NO: 1888515
gccauuaguccucagggag

SEQ ID NO: 2538643 - RNA, 19 nt, Artificial Sequence
  Description of Artificial Sequence: Synthetic oligonucleotide
  Antisense strand to SEQ ID NO: 2538642
cucccugaggacuaauggc

SEQ ID NO: 2538644 - RNA, 19 nt, Artificial Sequence
  Description of Artificial Sequence: Synthetic oligonucleotide
  Sense strand starting at position 549 of SEQ ID NO: 1888515
acauaugcucuggaguauu

SEQ ID NO: 2538645 - RNA, 19 nt, Artificial Sequence
  Description of Artificial Sequence: Synthetic oligonucleotide
  Antisense strand to SEQ ID NO: 2538644
aauacuccagagcauaugu

SEQ ID NO: 2538646 - RNA, 19 nt, Artificial Sequence
  Description of Artificial Sequence: Synthetic oligonucleotide
  Sense strand starting at position 209 of SEQ ID NO: 1888515
gugcgaagugcuccaagcu

SEQ ID NO: 2538647 - RNA, 19 nt, Artificial Sequence
  Description of Artificial Sequence: Synthetic oligonucleotide
  Antisense strand to SEQ ID NO: 2538646
agcuuggagcacuucgcac

SEQ ID NO: 2538648 - RNA, 19 nt, Artificial Sequence
  Description of Artificial Sequence: Synthetic oligonucleotide
  Sense strand starting at position 3308 of SEQ ID NO: 1888515
gucauucccuaaucugaga

SEQ ID NO: 2538649 - RNA, 19 nt, Artificial Sequence
  Description of Artificial Sequence: Synthetic oligonucleotide
  Antisense strand to SEQ ID NO: 2538648
ucucagauuagggaaugac

SEQ ID NO: 2538650 - RNA, 19 nt, Artificial Sequence
  Description of Artificial Sequence: Synthetic oligonucleotide
  Sense strand starting at position 360 of SEQ ID NO: 1888515
ggauuucccugaggagaaa

SEQ ID NO: 2538651 - RNA, 19 nt, Artificial Sequence
  Description of Artificial Sequence: Synthetic oligonucleotide
  Antisense strand to SEQ ID NO: 2538650
uuucuccucagggaaaucc

SEQ ID NO: 2538652 - RNA, 19 nt, Artificial Sequence
  Description of Artificial Sequence: Synthetic oligonucleotide
  Sense strand starting at position 319 of SEQ ID NO: 1888515
caagaaucaugagaagaag

SEQ ID NO: 2538653 - RNA, 19 nt, Artificial Sequence
  Description of Artificial Sequence: Synthetic oligonucleotide
  Antisense strand to SEQ ID NO: 2538652
cuucuucucaugauucuug

SEQ ID NO: 2538654 - RNA, 19 nt, Artificial Sequence
  Description of Artificial Sequence: Synthetic oligonucleotide
  Sense strand starting at position 547 of SEQ ID NO: 1888515
uaacauaugcucuggagua

SEQ ID NO: 2538655 - RNA, 19 nt, Artificial Sequence
  Description of Artificial Sequence: Synthetic oligonucleotide
  Antisense strand to SEQ ID NO: 2538654
uacuccagagcauauguua

SEQ ID NO: 2538656 - RNA, 19 nt, Artificial Sequence
  Description of Artificial Sequence: Synthetic oligonucleotide
  Sense strand starting at position 1158 of SEQ ID NO: 1888515
agccauuaguccucaggga

SEQ ID NO: 2538657 - RNA, 19 nt, Artificial Sequence
  Description of Artificial Sequence: Synthetic oligonucleotide
  Antisense strand to SEQ ID NO: 2538656
ucccugaggacuaauggcu

SEQ ID NO: 2538658 - RNA, 19 nt, Artificial Sequence
  Description of Artificial Sequence: Synthetic oligonucleotide
  Sense strand starting at position 2019 of SEQ ID NO: 1888515
ccgcuauugguugauggga

SEQ ID NO: 2538659 - RNA, 19 nt, Artificial Sequence
  Description of Artificial Sequence: Synthetic oligonucleotide
  Antisense strand to SEQ ID NO: 2538658
ucccaucaaccaauagcgg

SEQ ID NO: 2538660 - RNA, 19 nt, Artificial Sequence
  Description of Artificial Sequence: Synthetic oligonucleotide
  Sense strand starting at position 168 of SEQ ID NO: 1888515
acgcuaaagcaugagguua

SEQ ID NO: 2538661 - RNA, 19 nt, Artificial Sequence
  Description of Artificial Sequence: Synthetic oligonucleotide
  Antisense strand to SEQ ID NO: 2538660
uaaccucaugcuuuagcgu

SEQ ID NO: 2538662 - RNA, 19 nt, Artificial Sequence
  Description of Artificial Sequence: Synthetic oligonucleotide
  Sense strand starting at position 2865 of SEQ ID NO: 1888515
agaacuccugccuguggaa

SEQ ID NO: 2538663 - RNA, 19 nt, Artificial Sequence
  Description of Artificial Sequence: Synthetic oligonucleotide
  Antisense strand to SEQ ID NO: 2538662
uuccacaggcaggaguucu

SEQ ID NO: 2538664 - RNA, 19 nt, Artificial Sequence
  Description of Artificial Sequence: Synthetic oligonucleotide
  Sense strand starting at position 2892 of SEQ ID NO: 1888515
ugcagauaacacugcacau

SEQ ID NO: 2538665 - RNA, 19 nt, Artificial Sequence
  Description of Artificial Sequence: Synthetic oligonucleotide
  Antisense strand to SEQ ID NO: 2538664
augugcaguguuaucugca

SEQ ID NO: 2538666 - RNA, 19 nt, Artificial Sequence
  Description of Artificial Sequence: Synthetic oligonucleotide
  Sense strand starting at position 552 of SEQ ID NO: 1888515
uaugcucuggaguauugua

SEQ ID NO: 2538667 - RNA, 19 nt, Artificial Sequence
  Description of Artificial Sequence: Synthetic oligonucleotide
  Antisense strand to SEQ ID NO: 2538666
uacaauacuccagagcaua

SEQ ID NO: 2538668 - RNA, 19 nt, Artificial Sequence
  Description of Artificial Sequence: Synthetic oligonucleotide
  Sense strand starting at position 3328 of SEQ ID NO: 1888515
gccauuguucuguaaacca

SEQ ID NO: 2538669 - RNA, 19 nt, Artificial Sequence
  Description of Artificial Sequence: Synthetic oligonucleotide
  Antisense strand to SEQ ID NO: 2538668
ugguuuacagaacaauggc

SEQ ID NO: 2538670 - RNA, 19 nt, Artificial Sequence
  Description of Artificial Sequence: Synthetic oligonucleotide
  Sense strand starting at position 535 of SEQ ID NO: 1888515
ugcagcugaacguaacaua

SEQ ID NO: 2538671 - RNA, 19 nt, Artificial Sequence
  Description of Artificial Sequence: Synthetic oligonucleotide
  Antisense strand to SEQ ID NO: 2538670
uauguuacguucagcugca

SEQ ID NO: 2538672 - RNA, 19 nt, Artificial Sequence
  Description of Artificial Sequence: Synthetic oligonucleotide
  Sense strand starting at position 89 of SEQ ID NO: 1888515
aguggacucagcugugaac

SEQ ID NO: 2538673 - RNA, 19 nt, Artificial Sequence
  Description of Artificial Sequence: Synthetic oligonucleotide
  Antisense strand to SEQ ID NO: 2538672
guucacagcugaguccacu

SEQ ID NO: 2538674 - RNA, 19 nt, Artificial Sequence
  Description of Artificial Sequence: Synthetic oligonucleotide
  Sense strand starting at position 688 of SEQ ID NO: 1888515
gugggagcucccuacuguu

SEQ ID NO: 2538675 - RNA, 19 nt, Artificial Sequence
  Description of Artificial Sequence: Synthetic oligonucleotide
  Antisense strand to SEQ ID NO: 2538674
aacaguagggagcucccac

SEQ ID NO: 2538676 - RNA, 19 nt, Artificial Sequence
  Description of Artificial Sequence: Synthetic oligonucleotide
  Sense strand starting at position 3866 of SEQ ID NO: 1888515
agcccaaguuggucuugaa

SEQ ID NO: 2538677 - RNA, 19 nt, Artificial Sequence
  Description of Artificial Sequence: Synthetic oligonucleotide
  Antisense strand to SEQ ID NO: 2538676
uucaagaccaacuugggcu

SEQ ID NO: 2538678 - RNA, 19 nt, Artificial Sequence
  Description of Artificial Sequence: Synthetic oligonucleotide
  Sense strand starting at position 713 of SEQ ID NO: 1888515
ccuuucuaagucugagguu

SEQ ID NO: 2538679 - RNA, 19 nt, Artificial Sequence
  Description of Artificial Sequence: Synthetic oligonucleotide
  Antisense strand to SEQ ID NO: 2538678
aaccucagacuuagaaagg

SEQ ID NO: 2538680 - RNA, 19 nt, Artificial Sequence
  Description of Artificial Sequence: Synthetic oligonucleotide
  Sense strand starting at position 3321 of SEQ ID NO: 1888515
cugagaugccauuguucug

SEQ ID NO: 2538681 - RNA, 19 nt, Artificial Sequence
  Description of Artificial Sequence: Synthetic oligonucleotide
  Antisense strand to SEQ ID NO: 2538680
cagaacaauggcaucucag

SEQ ID NO: 2538682 - RNA, 19 nt, Artificial Sequence
  Description of Artificial Sequence: Synthetic oligonucleotide
  Sense strand starting at position 3669 of SEQ ID NO: 1888515
agagucagcacguaauguu

SEQ ID NO: 2538683 - RNA, 19 nt, Artificial Sequence
  Description of Artificial Sequence: Synthetic oligonucleotide
  Antisense strand to SEQ ID NO: 2538682
aacauuacgugcugacucu

SEQ ID NO: 2538684 - RNA, 19 nt, Artificial Sequence
  Description of Artificial Sequence: Synthetic oligonucleotide
  Sense strand starting at position 3304 of SEQ ID NO: 1888515
gcaggucauucccuaaucu

SEQ ID NO: 2538685 - RNA, 19 nt, Artificial Sequence
  Description of Artificial Sequence: Synthetic oligonucleotide
  Antisense strand to SEQ ID NO: 2538684
agauuagggaaugaccugc

SEQ ID NO: 2538686 - RNA, 19 nt, Artificial Sequence
  Description of Artificial Sequence: Synthetic oligonucleotide
  Sense strand starting at position 3324 of SEQ ID NO: 1888515
agaugccauuguucuguaa

SEQ ID NO: 2538687 - RNA, 19 nt, Artificial Sequence
  Description of Artificial Sequence: Synthetic oligonucleotide
  Antisense strand to SEQ ID NO: 2538686
uuacagaacaauggcaucu

SEQ ID NO: 2538688 - RNA, 19 nt, Artificial Sequence
  Description of Artificial Sequence: Synthetic oligonucleotide
  Sense strand starting at position 3794 of SEQ ID NO: 1888515
cacaucuuggcacguagau

SEQ ID NO: 2538689 - RNA, 19 nt, Artificial Sequence
  Description of Artificial Sequence: Synthetic oligonucleotide
  Antisense strand to SEQ ID NO: 2538688
aucuacgugccaagaugug

SEQ ID NO: 2538690 - RNA, 19 nt, Artificial Sequence
  Description of Artificial Sequence: Synthetic oligonucleotide
  Sense strand starting at position 2777 of SEQ ID NO: 1888515
aggcgcuugaggugaugaa

SEQ ID NO: 2538691 - RNA, 19 nt, Artificial Sequence
  Description of Artificial Sequence: Synthetic oligonucleotide
  Antisense strand to SEQ ID NO: 2538690
uucaucaccucaagcgccu

SEQ ID NO: 2538692 - RNA, 19 nt, Artificial Sequence
  Description of Artificial Sequence: Synthetic oligonucleotide
  Sense strand starting at position 2062 of SEQ ID NO: 1888515
auccgaguucgccacgaga

SEQ ID NO: 2538693 - RNA, 19 nt, Artificial Sequence
  Description of Artificial Sequence: Synthetic oligonucleotide
  Antisense strand to SEQ ID NO: 2538692
ucucguggcgaacucggau

SEQ ID NO: 2538694 - RNA, 19 nt, Artificial Sequence
  Description of Artificial Sequence: Synthetic oligonucleotide
  Sense strand starting at position 3295 of SEQ ID NO: 1888515
agggucuuugcaggucauu

SEQ ID NO: 2538695 - RNA, 19 nt, Artificial Sequence
  Description of Artificial Sequence: Synthetic oligonucleotide
  Antisense strand to SEQ ID NO: 2538694
aaugaccugcaaagacccu

SEQ ID NO: 2538696 - RNA, 19 nt, Artificial Sequence
  Description of Artificial Sequence: Synthetic oligonucleotide
  Sense strand starting at position 890 of SEQ ID NO: 1888515
aggcgaaucucgcugaaac

SEQ ID NO: 2538697 - RNA, 19 nt, Artificial Sequence
  Description of Artificial Sequence: Synthetic oligonucleotide
  Antisense strand to SEQ ID NO: 2538696
guuucagcgagauucgccu

SEQ ID NO: 2538698 - RNA, 19 nt, Artificial Sequence
  Description of Artificial Sequence: Synthetic oligonucleotide
  Sense strand starting at position 2850 of SEQ ID NO: 1888515
gcgucuggauuucagagaa

SEQ ID NO: 2538699 - RNA, 19 nt, Artificial Sequence
  Description of Artificial Sequence: Synthetic oligonucleotide
  Antisense strand to SEQ ID NO: 2538698
uucucugaaauccagacgc

SEQ ID NO: 2538700 - RNA, 19 nt, Artificial Sequence
  Description of Artificial Sequence: Synthetic oligonucleotide
  Sense strand starting at position 891 of SEQ ID NO: 1888515
ggcgaaucucgcugaaaca

SEQ ID NO: 2538701 - RNA, 19 nt, Artificial Sequence
  Description of Artificial Sequence: Synthetic oligonucleotide
  Antisense strand to SEQ ID NO: 2538700
uguuucagcgagauucgcc

SEQ ID NO: 2538702 - RNA, 19 nt, Artificial Sequence
  Description of Artificial Sequence: Synthetic oligonucleotide
  Sense strand starting at position 3576 of SEQ ID NO: 1888515
uucucaugcccucgaaagu

SEQ ID NO: 2538703 - RNA, 19 nt, Artificial Sequence
  Description of Artificial Sequence: Synthetic oligonucleotide
  Antisense strand to SEQ ID NO: 2538702
acuuucgagggcaugagaa

SEQ ID NO: 2538704 - RNA, 19 nt, Artificial Sequence
  Description of Artificial Sequence: Synthetic oligonucleotide
  Sense strand starting at position 316 of SEQ ID NO: 1888515
ucccaagaaucaugagaag

SEQ ID NO: 2538705 - RNA, 19 nt, Artificial Sequence
  Description of Artificial Sequence: Synthetic oligonucleotide
  Antisense strand to SEQ ID NO: 2538704
cuucucaugauucuuggga

SEQ ID NO: 2538706 - RNA, 19 nt, Artificial Sequence
  Description of Artificial Sequence: Synthetic oligonucleotide
  Sense strand starting at position 3246 of SEQ ID NO: 1888515
uuugaucaauuucgguaga

SEQ ID NO: 2538707 - RNA, 19 nt, Artificial Sequence
  Description of Artificial Sequence: Synthetic oligonucleotide
  Antisense strand to SEQ ID NO: 2538706
ucuaccgaaauugaucaaa

SEQ ID NO: 2538708 - RNA, 19 nt, Artificial Sequence
  Description of Artificial Sequence: Synthetic oligonucleotide
  Sense strand starting at position 3381 of SEQ ID NO: 1888515
accugugggugcucucgaa

SEQ ID NO: 2538709 - RNA, 19 nt, Artificial Sequence
  Description of Artificial Sequence: Synthetic oligonucleotide
  Antisense strand to SEQ ID NO: 2538708
uucgagagcacccacaggu

SEQ ID NO: 2538710 - RNA, 19 nt, Artificial Sequence
  Description of Artificial Sequence: Synthetic oligonucleotide
  Sense strand starting at position 1219 of SEQ ID NO: 1888515
uguucugucucccugucau

SEQ ID NO: 2538711 - RNA, 19 nt, Artificial Sequence
  Description of Artificial Sequence: Synthetic oligonucleotide
  Antisense strand to SEQ ID NO: 2538710
augacagggagacagaaca

SEQ ID NO: 2538712 - RNA, 19 nt, Artificial Sequence
  Description of Artificial Sequence: Synthetic oligonucleotide
  Sense strand starting at position 3066 of SEQ ID NO: 1888515
cuccuaaguugggauuaca

SEQ ID NO: 2538713 - RNA, 19 nt, Artificial Sequence
  Description of Artificial Sequence: Synthetic oligonucleotide
  Antisense strand to SEQ ID NO: 2538712
uguaaucccaacuuaggag

SEQ ID NO: 2538714 - RNA, 19 nt, Artificial Sequence
  Description of Artificial Sequence: Synthetic oligonucleotide
  Sense strand starting at position 3313 of SEQ ID NO: 1888515
ucccuaaucugagaugcca

SEQ ID NO: 2538715 - RNA, 19 nt, Artificial Sequence
  Description of Artificial Sequence: Synthetic oligonucleotide
  Antisense strand to SEQ ID NO: 2538714
uggcaucucagauuaggga

SEQ ID NO: 2538716 - RNA, 19 nt, Artificial Sequence
  Description of Artificial Sequence: Synthetic oligonucleotide
  Sense strand starting at position 1612 of SEQ ID NO: 1888516
gggacagguucccucagaa

SEQ ID NO: 2538717 - RNA, 19 nt, Artificial Sequence
  Description of Artificial Sequence: Synthetic oligonucleotide
  Antisense strand to SEQ ID NO: 2538716
uucugagggaaccuguccc

SEQ ID NO: 2538718 - RNA, 19 nt, Artificial Sequence
  Description of Artificial Sequence: Synthetic oligonucleotide
  Sense strand starting at position 3194 of SEQ ID NO: 1888516
auggaaccaucuguauuaa

SEQ ID NO: 2538719 - RNA, 19 nt, Artificial Sequence
  Description of Artificial Sequence: Synthetic oligonucleotide
  Antisense strand to SEQ ID NO: 2538718
uuaauacagaugguuccau

SEQ ID NO: 2538720 - RNA, 19 nt, Artificial Sequence
  Description of Artificial Sequence: Synthetic oligonucleotide
  Sense strand starting at position 954 of SEQ ID NO: 1888516
aaaucucgucgagaaugga

SEQ ID NO: 2538721 - RNA, 19 nt, Artificial Sequence
  Description of Artificial Sequence: Synthetic oligonucleotide
  Antisense strand to SEQ ID NO: 2538720
uccauucucgacgagauuu

SEQ ID NO: 2538722 - RNA, 19 nt, Artificial Sequence
  Description of Artificial Sequence: Synthetic oligonucleotide
  Sense strand starting at position 2648 of SEQ ID NO: 1888516
cagucugagguccaagauu

SEQ ID NO: 2538723 - RNA, 19 nt, Artificial Sequence
  Description of Artificial Sequence: Synthetic oligonucleotide
  Antisense strand to SEQ ID NO: 2538722
aaucuuggaccucagacug

SEQ ID NO: 2538724 - RNA, 19 nt, Artificial Sequence
  Description of Artificial Sequence: Synthetic oligonucleotide
  Sense strand starting at position 1262 of SEQ ID NO: 1888516
ggacguaacacugagcaga

SEQ ID NO: 2538725 - RNA, 19 nt, Artificial Sequence
  Description of Artificial Sequence: Synthetic oligonucleotide
  Antisense strand to SEQ ID NO: 2538724
ucugcucaguguuacgucc

SEQ ID NO: 2538726 - RNA, 19 nt, Artificial Sequence
  Description of Artificial Sequence: Synthetic oligonucleotide
  Sense strand starting at position 3172 of SEQ ID NO: 1888516
ucggaugaucccuggagaa

SEQ ID NO: 2538727 - RNA, 19 nt, Artificial Sequence
  Description of Artificial Sequence: Synthetic oligonucleotide
  Antisense strand to SEQ ID NO: 2538726
uucuccagggaucauccga

SEQ ID NO: 2538728 - RNA, 19 nt, Artificial Sequence
  Description of Artificial Sequence: Synthetic oligonucleotide
  Sense strand starting at position 1166 of SEQ ID NO: 1888516
aaagauaugcaauacguua

SEQ ID NO: 2538729 - RNA, 19 nt, Artificial Sequence
  Description of Artificial Sequence: Synthetic oligonucleotide
  Antisense strand to SEQ ID NO: 2538728
uaacguauugcauaucuuu

SEQ ID NO: 2538730 - RNA, 19 nt, Artificial Sequence
  Description of Artificial Sequence: Synthetic oligonucleotide
  Sense strand starting at position 2473 of SEQ ID NO: 1888516
gggaauuuauagggagaau

SEQ ID NO: 2538731 - RNA, 19 nt, Artificial Sequence
  Description of Artificial Sequence: Synthetic oligonucleotide
  Antisense strand to SEQ ID NO: 2538730
auucucccuauaaauuccc

SEQ ID NO: 2538732 - RNA, 19 nt, Artificial Sequence
  Description of Artificial Sequence: Synthetic oligonucleotide
  Sense strand starting at position 628 of SEQ ID NO: 1888516
uggguauaccuccaaagca

SEQ ID NO: 2538733 - RNA, 19 nt, Artificial Sequence
  Description of Artificial Sequence: Synthetic oligonucleotide
  Antisense strand to SEQ ID NO: 2538732
ugcuuuggagguauaccca

SEQ ID NO: 2538734 - RNA, 19 nt, Artificial Sequence
  Description of Artificial Sequence: Synthetic oligonucleotide
  Sense strand starting at position 1135 of SEQ ID NO: 1888516
ggaagcauauaucuccuaa

SEQ ID NO: 2538735 - RNA, 19 nt, Artificial Sequence
  Description of Artificial Sequence: Synthetic oligonucleotide
  Antisense strand to SEQ ID NO: 2538734
uuaggagauauaugcuucc

SEQ ID NO: 2538736 - RNA, 19 nt, Artificial Sequence
  Description of Artificial Sequence: Synthetic oligonucleotide
  Sense strand starting at position 2978 of SEQ ID NO: 1888516
ucauaagaguuguugagag

SEQ ID NO: 2538737 - RNA, 19 nt, Artificial Sequence
  Description of Artificial Sequence: Synthetic oligonucleotide
  Antisense strand to SEQ ID NO: 2538736
cucucaacaacucuuauga

SEQ ID NO: 2538738 - RNA, 19 nt, Artificial Sequence
  Description of Artificial Sequence: Synthetic oligonucleotide
  Sense strand starting at position 2679 of SEQ ID NO: 1888516
guguuugcuggugcaagua

SEQ ID NO: 2538739 - RNA, 19 nt, Artificial Sequence
  Description of Artificial Sequence: Synthetic oligonucleotide
  Antisense strand to SEQ ID NO: 2538738
uacuugcaccagcaaacac

SEQ ID NO: 2538740 - RNA, 19 nt, Artificial Sequence
  Description of Artificial Sequence: Synthetic oligonucleotide
  Sense strand starting at position 1480 of SEQ ID NO: 1888516
ucaucaaauccuggaggca

SEQ ID NO: 2538741 - RNA, 19 nt, Artificial Sequence
  Description of Artificial Sequence: Synthetic oligonucleotide
  Antisense strand to SEQ ID NO: 2538740
ugccuccaggauuugauga

SEQ ID NO: 2538742 - RNA, 19 nt, Artificial Sequence
  Description of Artificial Sequence: Synthetic oligonucleotide
  Sense strand starting at position 1770 of SEQ ID NO: 1888516
gggaacguucgaggaaaca

SEQ ID NO: 2538743 - RNA, 19 nt, Artificial Sequence
  Description of Artificial Sequence: Synthetic oligonucleotide
  Antisense strand to SEQ ID NO: 2538742
uguuuccucgaacguuccc

SEQ ID NO: 2538744 - RNA, 19 nt, Artificial Sequence
  Description of Artificial Sequence: Synthetic oligonucleotide
  Sense strand starting at position 2487 of SEQ ID NO: 1888516
agaauuggcucaccuaauu

SEQ ID NO: 2538745 - RNA, 19 nt, Artificial Sequence
  Description of Artificial Sequence: Synthetic oligonucleotide
  Antisense strand to SEQ ID NO: 2538744
aauuaggugagccaauucu

SEQ ID NO: 2538746 - RNA, 19 nt, Artificial Sequence
  Description of Artificial Sequence: Synthetic oligonucleotide
  Sense strand starting at position 2656 of SEQ ID NO: 1888516
gguccaagauuugagaauc

SEQ ID NO: 2538747 - RNA, 19 nt, Artificial Sequence
  Description of Artificial Sequence: Synthetic oligonucleotide
  Antisense strand to SEQ ID NO: 2538746
gauucucaaaucuuggacc

SEQ ID NO: 2538748 - RNA, 19 nt, Artificial Sequence
  Description of Artificial Sequence: Synthetic oligonucleotide
  Sense strand starting at position 832 of SEQ ID NO: 1888516
ucaucaaaugucuguaaga

SEQ ID NO: 2538749 - RNA, 19 nt, Artificial Sequence
  Description of Artificial Sequence: Synthetic oligonucleotide
  Antisense strand to SEQ ID NO: 2538748
ucuuacagacauuugauga

SEQ ID NO: 2538750 - RNA, 19 nt, Artificial Sequence
  Description of Artificial Sequence: Synthetic oligonucleotide
  Sense strand starting at position 3171 of SEQ ID NO: 1888516
gucggaugaucccuggaga

SEQ ID NO: 2538751 - RNA, 19 nt, Artificial Sequence
  Description of Artificial Sequence: Synthetic oligonucleotide
  Antisense strand to SEQ ID NO: 2538750
ucuccagggaucauccgac

SEQ ID NO: 2538752 - RNA, 19 nt, Artificial Sequence
  Description of Artificial Sequence: Synthetic oligonucleotide
  Sense strand starting at position 2976 of SEQ ID NO: 1888516
ucucauaagaguuguugag

SEQ ID NO: 2538753 - RNA, 19 nt, Artificial Sequence
  Description of Artificial Sequence: Synthetic oligonucleotide
  Antisense strand to SEQ ID NO: 2538752
cucaacaacucuuaugaga

SEQ ID NO: 2538754 - RNA, 19 nt, Artificial Sequence
  Description of Artificial Sequence: Synthetic oligonucleotide
  Sense strand starting at position 1264 of SEQ ID NO: 1888516
acguaacacugagcagaau

SEQ ID NO: 2538755 - RNA, 19 nt, Artificial Sequence
  Description of Artificial Sequence: Synthetic oligonucleotide
  Antisense strand to SEQ ID NO: 2538754
auucugcucaguguuacgu

SEQ ID NO: 2538756 - RNA, 19 nt, Artificial Sequence
  Description of Artificial Sequence: Synthetic oligonucleotide
  Sense strand starting at position 2710 of SEQ ID NO: 1888516
ggcccaaaucauggaguuu

SEQ ID NO: 2538757 - RNA, 19 nt, Artificial Sequence
  Description of Artificial Sequence: Synthetic oligonucleotide
  Antisense strand to SEQ ID NO: 2538756
aaacuccaugauuugggcc

SEQ ID NO: 2538758 - RNA, 19 nt, Artificial Sequence
  Description of Artificial Sequence: Synthetic oligonucleotide
  Sense strand starting at position 3920 of SEQ ID NO: 1888516
cuaacauucguguaucuca

SEQ ID NO: 2538759 - RNA, 19 nt, Artificial Sequence
  Description of Artificial Sequence: Synthetic oligonucleotide
  Antisense strand to SEQ ID NO: 2538758
ugagauacacgaauguuag

SEQ ID NO: 2538760 - RNA, 19 nt, Artificial Sequence
  Description of Artificial Sequence: Synthetic oligonucleotide
  Sense strand starting at position 2667 of SEQ ID NO: 1888516
ugagaauccuuuguguuug

SEQ ID NO: 2538761 - RNA, 19 nt, Artificial Sequence
  Description of Artificial Sequence: Synthetic oligonucleotide
  Antisense strand to SEQ ID NO: 2538760
caaacacaaaggauucuca

SEQ ID NO: 2538762 - RNA, 19 nt, Artificial Sequence
  Description of Artificial Sequence: Synthetic oligonucleotide
  Sense strand starting at position 1769 of SEQ ID NO: 1888516
agggaacguucgaggaaac

SEQ ID NO: 2538763 - RNA, 19 nt, Artificial Sequence
  Description of Artificial Sequence: Synthetic oligonucleotide
  Antisense strand to SEQ ID NO: 2538762
guuuccucgaacguucccu

SEQ ID NO: 2538764 - RNA, 19 nt, Artificial Sequence
  Description of Artificial Sequence: Synthetic oligonucleotide
  Sense strand starting at position 3923 of SEQ ID NO: 1888516
acauucguguaucucagaa

SEQ ID NO: 2538765 - RNA, 19 nt, Artificial Sequence
  Description of Artificial Sequence: Synthetic oligonucleotide
  Antisense strand to SEQ ID NO: 2538764
uucugagauacacgaaugu

SEQ ID NO: 2538766 - RNA, 19 nt, Artificial Sequence
  Description of Artificial Sequence: Synthetic oligonucleotide
  Sense strand starting at position 3574 of SEQ ID NO: 1888516
caauguuagcguuauauca

SEQ ID NO: 2538767 - RNA, 19 nt, Artificial Sequence
  Description of Artificial Sequence: Synthetic oligonucleotide
  Antisense strand to SEQ ID NO: 2538766
ugauauaacgcuaacauug

SEQ ID NO: 2538768 - RNA, 19 nt, Artificial Sequence
  Description of Artificial Sequence: Synthetic oligonucleotide
  Sense strand starting at position 2460 of SEQ ID NO: 1888516
guguguuguaaaugggaau

SEQ ID NO: 2538769 - RNA, 19 nt, Artificial Sequence
  Description of Artificial Sequence: Synthetic oligonucleotide
  Antisense strand to SEQ ID NO: 2538768
auucccauuuacaacacac

SEQ ID NO: 2538770 - RNA, 19 nt, Artificial Sequence
  Description of Artificial Sequence: Synthetic oligonucleotide
  Sense strand starting at position 2666 of SEQ ID NO: 1888516
uugagaauccuuuguguuu

SEQ ID NO: 2538771 - RNA, 19 nt, Artificial Sequence
  Description of Artificial Sequence: Synthetic oligonucleotide
  Antisense strand to SEQ ID NO: 2538770
aaacacaaaggauucucaa

SEQ ID NO: 2538772 - RNA, 19 nt, Artificial Sequence
  Description of Artificial Sequence: Synthetic oligonucleotide
  Sense strand starting at position 2950 of SEQ ID NO: 1888516
gcuucuccaucugcagaaa

SEQ ID NO: 2538773 - RNA, 19 nt, Artificial Sequence
  Description of Artificial Sequence: Synthetic oligonucleotide
  Antisense strand to SEQ ID NO: 2538772
uuucugcagauggagaagc

SEQ ID NO: 2538774 - RNA, 19 nt, Artificial Sequence
  Description of Artificial Sequence: Synthetic oligonucleotide
  Sense strand starting at position 3037 of SEQ ID NO: 1888516
ugucucuguguguauagau

SEQ ID NO: 2538775 - RNA, 19 nt, Artificial Sequence
  Description of Artificial Sequence: Synthetic oligonucleotide
  Antisense strand to SEQ ID NO: 2538774
aucuauacacacagagaca

SEQ ID NO: 2538776 - RNA, 19 nt, Artificial Sequence
  Description of Artificial Sequence: Synthetic oligonucleotide
  Sense strand starting at position 217 of SEQ ID NO: 1888516
uaugcauuguugguguaaa

SEQ ID NO: 2538777 - RNA, 19 nt, Artificial Sequence
  Description of Artificial Sequence: Synthetic oligonucleotide
  Antisense strand to SEQ ID NO: 2538776
uuuacaccaacaaugcaua

SEQ ID NO: 2538778 - RNA, 19 nt, Artificial Sequence
  Description of Artificial Sequence: Synthetic oligonucleotide
  Sense strand starting at position 1794 of SEQ ID NO: 1888516
cuguacucaccguguagaa

SEQ ID NO: 2538779 - RNA, 19 nt, Artificial Sequence
  Description of Artificial Sequence: Synthetic oligonucleotide
  Antisense strand to SEQ ID NO: 2538778
uucuacacggugaguacag

SEQ ID NO: 2538780 - RNA, 19 nt, Artificial Sequence
  Description of Artificial Sequence: Synthetic oligonucleotide
  Sense strand starting at position 3909 of SEQ ID NO: 1888516
ccacgcucggccuaacauu

SEQ ID NO: 2538781 - RNA, 19 nt, Artificial Sequence
  Description of Artificial Sequence: Synthetic oligonucleotide
  Antisense strand to SEQ ID NO: 2538780
aauguuaggccgagcgugg

SEQ ID NO: 2538782 - RNA, 19 nt, Artificial Sequence
  Description of Artificial Sequence: Synthetic oligonucleotide
  Sense strand starting at position 2982 of SEQ ID NO: 1888516
aagaguuguugagaggaua

SEQ ID NO: 2538783 - RNA, 19 nt, Artificial Sequence
  Description of Artificial Sequence: Synthetic oligonucleotide
  Antisense strand to SEQ ID NO: 2538782
uauccucucaacaacucuu

SEQ ID NO: 2538784 - RNA, 19 nt, Artificial Sequence
  Description of Artificial Sequence: Synthetic oligonucleotide
  Sense strand starting at position 143 of SEQ ID NO: 1888516
uggaauacauguuacugaa

SEQ ID NO: 2538785 - RNA, 19 nt, Artificial Sequence
  Description of Artificial Sequence: Synthetic oligonucleotide
  Antisense strand to SEQ ID NO: 2538784
uucaguaacauguauucca

SEQ ID NO: 2538786 - RNA, 19 nt, Artificial Sequence
  Description of Artificial Sequence: Synthetic oligonucleotide
  Sense strand starting at position 216 of SEQ ID NO: 1888516
uuaugcauuguugguguaa

SEQ ID NO: 2538787 - RNA, 19 nt, Artificial Sequence
  Description of Artificial Sequence: Synthetic oligonucleotide
  Antisense strand to SEQ ID NO: 2538786
uuacaccaacaaugcauaa

SEQ ID NO: 2538788 - RNA, 19 nt, Artificial Sequence
  Description of Artificial Sequence: Synthetic oligonucleotide
  Sense strand starting at position 3046 of SEQ ID NO: 1888516
guguauagauaauacaaac

SEQ ID NO: 2538789 - RNA, 19 nt, Artificial Sequence
  Description of Artificial Sequence: Synthetic oligonucleotide
  Antisense strand to SEQ ID NO: 2538788
guuuguauuaucuauacac

SEQ ID NO: 2538790 - RNA, 19 nt, Artificial Sequence
  Description of Artificial Sequence: Synthetic oligonucleotide
  Sense strand starting at position 3917 of SEQ ID NO: 1888516
ggccuaacauucguguauc

SEQ ID NO: 2538791 - RNA, 19 nt, Artificial Sequence
  Description of Artificial Sequence: Synthetic oligonucleotide
  Antisense strand to SEQ ID NO: 2538790
gauacacgaauguuaggcc

SEQ ID NO: 2538792 - RNA, 19 nt, Artificial Sequence
  Description of Artificial Sequence: Synthetic oligonucleotide
  Sense strand starting at position 1431 of SEQ ID NO: 1888516
gugaaagagucccgauuug

SEQ ID NO: 2538793 - RNA, 19 nt, Artificial Sequence
  Description of Artificial Sequence: Synthetic oligonucleotide
  Antisense strand to SEQ ID NO: 2538792
caaaucgggacucuuucac

SEQ ID NO: 2538794 - RNA, 19 nt, Artificial Sequence
  Description of Artificial Sequence: Synthetic oligonucleotide
  Sense strand starting at position 969 of SEQ ID NO: 1888516
uggaaugacuuaugaauau

SEQ ID NO: 2538795 - RNA, 19 nt, Artificial Sequence
  Description of Artificial Sequence: Synthetic oligonucleotide
  Antisense strand to SEQ ID NO: 2538794
auauucauaagucauucca

SEQ ID NO: 2538796 - RNA, 19 nt, Artificial Sequence
  Description of Artificial Sequence: Synthetic oligonucleotide
  Sense strand starting at position 2709 of SEQ ID NO: 1888517
cgagguuuccuggauggga

SEQ ID NO: 2538797 - RNA, 19 nt, Artificial Sequence
  Description of Artificial Sequence: Synthetic oligonucleotide
  Antisense strand to SEQ ID NO: 2538796
ucccauccaggaaaccucg

SEQ ID NO: 2538798 - RNA, 19 nt, Artificial Sequence
  Description of Artificial Sequence: Synthetic oligonucleotide
  Sense strand starting at position 3382 of SEQ ID NO: 1888517
ggcaucugauaauuaaacu

SEQ ID NO: 2538799 - RNA, 19 nt, Artificial Sequence
  Description of Artificial Sequence: Synthetic oligonucleotide
  Antisense strand to SEQ ID NO: 2538798
aguuuaauuaucagaugcc

SEQ ID NO: 2538800 - RNA, 19 nt, Artificial Sequence
  Description of Artificial Sequence: Synthetic oligonucleotide
  Sense strand starting at position 3495 of SEQ ID NO: 1888517
ccaccuuuccaguggaaac

SEQ ID NO: 2538801 - RNA, 19 nt, Artificial Sequence
  Description of Artificial Sequence: Synthetic oligonucleotide
  Antisense strand to SEQ ID NO: 2538800
guuuccacuggaaaggugg

SEQ ID NO: 2538802 - RNA, 19 nt, Artificial Sequence
  Description of Artificial Sequence: Synthetic oligonucleotide
  Sense strand starting at position 3463 of SEQ ID NO: 1888517
gcaguagagcuccaauaca

SEQ ID NO: 2538803 - RNA, 19 nt, Artificial Sequence
  Description of Artificial Sequence: Synthetic oligonucleotide
  Antisense strand to SEQ ID NO: 2538802
uguauuggagcucuacugc

SEQ ID NO: 2538804 - RNA, 19 nt, Artificial Sequence
  Description of Artificial Sequence: Synthetic oligonucleotide
  Sense strand starting at position 3579 of SEQ ID NO: 1888517
agaauaacguaucuggcaa

SEQ ID NO: 2538805 - RNA, 19 nt, Artificial Sequence
  Description of Artificial Sequence: Synthetic oligonucleotide
  Antisense strand to SEQ ID NO: 2538804
uugccagauacguuauucu

SEQ ID NO: 2538806 - RNA, 19 nt, Artificial Sequence
  Description of Artificial Sequence: Synthetic oligonucleotide
  Sense strand starting at position 2987 of SEQ ID NO: 1888517
uccuuuauuuaggauaugu

SEQ ID NO: 2538807 - RNA, 19 nt, Artificial Sequence
  Description of Artificial Sequence: Synthetic oligonucleotide
  Antisense strand to SEQ ID NO: 2538806
acauauccuaaauaaagga

SEQ ID NO: 2538808 - RNA, 19 nt, Artificial Sequence
  Description of Artificial Sequence: Synthetic oligonucleotide
  Sense strand starting at position 2817 of SEQ ID NO: 1888517
ugacuuccuguuugcaaca

SEQ ID NO: 2538809 - RNA, 19 nt, Artificial Sequence
  Description of Artificial Sequence: Synthetic oligonucleotide
  Antisense strand to SEQ ID NO: 2538808
uguugcaaacaggaaguca

SEQ ID NO: 2538810 - RNA, 19 nt, Artificial Sequence
  Description of Artificial Sequence: Synthetic oligonucleotide
  Sense strand starting at position 1618 of SEQ ID NO: 1888517
ugauccagccugugguuua

SEQ ID NO: 2538811 - RNA, 19 nt, Artificial Sequence
  Description of Artificial Sequence: Synthetic oligonucleotide
  Antisense strand to SEQ ID NO: 2538810
uaaaccacaggcuggauca

SEQ ID NO: 2538812 - RNA, 19 nt, Artificial Sequence
  Description of Artificial Sequence: Synthetic oligonucleotide
  Sense strand starting at position 2969 of SEQ ID NO: 1888517
uggaaacauuauggaggau

SEQ ID NO: 2538813 - RNA, 19 nt, Artificial Sequence
  Description of Artificial Sequence: Synthetic oligonucleotide
  Antisense strand to SEQ ID NO: 2538812
auccuccauaauguuucca

SEQ ID NO: 2538814 - RNA, 19 nt, Artificial Sequence
  Description of Artificial Sequence: Synthetic oligonucleotide
  Sense strand starting at position 2909 of SEQ ID NO: 1888517
gccugagggucgucauucu

SEQ ID NO: 2538815 - RNA, 19 nt, Artificial Sequence
  Description of Artificial Sequence: Synthetic oligonucleotide
  Antisense strand to SEQ ID NO: 2538814
agaaugacgacccucaggc

SEQ ID NO: 2538816 - RNA, 19 nt, Artificial Sequence
  Description of Artificial Sequence: Synthetic oligonucleotide
  Sense strand starting at position 2957 of SEQ ID NO: 1888517
uuagaaaucugguggaaac

SEQ ID NO: 2538817 - RNA, 19 nt, Artificial Sequence
  Description of Artificial Sequence: Synthetic oligonucleotide
  Antisense strand to SEQ ID NO: 2538816
guuuccaccagauuucuaa

SEQ ID NO: 2538818 - RNA, 19 nt, Artificial Sequence
  Description of Artificial Sequence: Synthetic oligonucleotide
  Sense strand starting at position 2217 of SEQ ID NO: 1888517
cacacaggcuucugggaua

SEQ ID NO: 2538819 - RNA, 19 nt, Artificial Sequence
  Description of Artificial Sequence: Synthetic oligonucleotide
  Antisense strand to SEQ ID NO: 2538818
uaucccagaagccugugug

SEQ ID NO: 2538820 - RNA, 19 nt, Artificial Sequence
  Description of Artificial Sequence: Synthetic oligonucleotide
  Sense strand starting at position 1619 of SEQ ID NO: 1888517
gauccagccugugguuuaa

SEQ ID NO: 2538821 - RNA, 19 nt, Artificial Sequence
  Description of Artificial Sequence: Synthetic oligonucleotide
  Antisense strand to SEQ ID NO: 2538820
uuaaaccacaggcuggauc

SEQ ID NO: 2538822 - RNA, 19 nt, Artificial Sequence
  Description of Artificial Sequence: Synthetic oligonucleotide
  Sense strand starting at position 560 of SEQ ID NO: 1888518
cagaguagauacucagacu

SEQ ID NO: 2538823 - RNA, 19 nt, Artificial Sequence
  Description of Artificial Sequence: Synthetic oligonucleotide
  Antisense strand to SEQ ID NO: 2538822
agucugaguaucuacucug

SEQ ID NO: 2538824 - RNA, 19 nt, Artificial Sequence
  Description of Artificial Sequence: Synthetic oligonucleotide
  Sense strand starting at position 970 of SEQ ID NO: 1888518
guguaauuucuagguauug

SEQ ID NO: 2538825 - RNA, 19 nt, Artificial Sequence
  Description of Artificial Sequence: Synthetic oligonucleotide
  Antisense strand to SEQ ID NO: 2538824
caauaccuagaaauuacac

SEQ ID NO: 2538826 - RNA, 19 nt, Artificial Sequence
  Description of Artificial Sequence: Synthetic oligonucleotide
  Sense strand starting at position 1740 of SEQ ID NO: 1888518
gagagacuuguccaagguc

SEQ ID NO: 2538827 - RNA, 19 nt, Artificial Sequence
  Description of Artificial Sequence: Synthetic oligonucleotide
  Antisense strand to SEQ ID NO: 2538826
gaccuuggacaagucucuc

SEQ ID NO: 2538828 - RNA, 19 nt, Artificial Sequence
  Description of Artificial Sequence: Synthetic oligonucleotide
  Sense strand starting at position 1519 of SEQ ID NO: 1888518
agaugaugaaagugugacu

SEQ ID NO: 2538829 - RNA, 19 nt, Artificial Sequence
  Description of Artificial Sequence: Synthetic oligonucleotide
  Antisense strand to SEQ ID NO: 2538828
agucacacuuucaucaucu

SEQ ID NO: 2538830 - RNA, 19 nt, Artificial Sequence
  Description of Artificial Sequence: Synthetic oligonucleotide
  Sense strand starting at position 3975 of SEQ ID NO: 1888518
cuucuuagcccucaaggga

SEQ ID NO: 2538831 - RNA, 19 nt, Artificial Sequence
  Description of Artificial Sequence: Synthetic oligonucleotide
  Antisense strand to SEQ ID NO: 2538830
ucccuugagggcuaagaag

SEQ ID NO: 2538832 - RNA, 19 nt, Artificial Sequence
  Description of Artificial Sequence: Synthetic oligonucleotide
  Sense strand starting at position 2798 of SEQ ID NO: 1888518
ggauaucuuucucuccaag

SEQ ID NO: 2538833 - RNA, 19 nt, Artificial Sequence
  Description of Artificial Sequence: Synthetic oligonucleotide
  Antisense strand to SEQ ID NO: 2538832
cuuggagagaaagauaucc

SEQ ID NO: 2538834 - RNA, 19 nt, Artificial Sequence
  Description of Artificial Sequence: Synthetic oligonucleotide
  Sense strand starting at position 927 of SEQ ID NO: 1888518
cuguuuagucgccuguuua

SEQ ID NO: 2538835 - RNA, 19 nt, Artificial Sequence
  Description of Artificial Sequence: Synthetic oligonucleotide
  Antisense strand to SEQ ID NO: 2538834
uaaacaggcgacuaaacag

SEQ ID NO: 2538836 - RNA, 19 nt, Artificial Sequence
  Description of Artificial Sequence: Synthetic oligonucleotide
  Sense strand starting at position 2364 of SEQ ID NO: 1888518
uuauaugaacgagguuaau

SEQ ID NO: 2538837 - RNA, 19 nt, Artificial Sequence
  Description of Artificial Sequence: Synthetic oligonucleotide
  Antisense strand to SEQ ID NO: 2538836
auuaaccucguucauauaa

SEQ ID NO: 2538838 - RNA, 19 nt, Artificial Sequence
  Description of Artificial Sequence: Synthetic oligonucleotide
  Sense strand starting at position 3164 of SEQ ID NO: 1888518
cauguuacacuguagugaa

SEQ ID NO: 2538839 - RNA, 19 nt, Artificial Sequence
  Description of Artificial Sequence: Synthetic oligonucleotide
  Antisense strand to SEQ ID NO: 2538838
uucacuacaguguaacaug

SEQ ID NO: 2538840 - RNA, 19 nt, Artificial Sequence
  Description of Artificial Sequence: Synthetic oligonucleotide
  Sense strand starting at position 960 of SEQ ID NO: 1888518
acgagucaguguguaauuu

SEQ ID NO: 2538841 - RNA, 19 nt, Artificial Sequence
  Description of Artificial Sequence: Synthetic oligonucleotide
  Antisense strand to SEQ ID NO: 2538840
aaauuacacacugacucgu

SEQ ID NO: 2538842 - RNA, 19 nt, Artificial Sequence
  Description of Artificial Sequence: Synthetic oligonucleotide
  Sense strand starting at position 2332 of SEQ ID NO: 1888518
ggaaacgagauccgucaga

SEQ ID NO: 2538843 - RNA, 19 nt, Artificial Sequence
  Description of Artificial Sequence: Synthetic oligonucleotide
  Antisense strand to SEQ ID NO: 2538842
ucugacggaucucguuucc

SEQ ID NO: 2538844 - RNA, 19 nt, Artificial Sequence
  Description of Artificial Sequence: Synthetic oligonucleotide
  Sense strand starting at position 578 of SEQ ID NO: 1888518
uauagcucagugcagaaua

SEQ ID NO: 2538845 - RNA, 19 nt, Artificial Sequence
  Description of Artificial Sequence: Synthetic oligonucleotide
  Antisense strand to SEQ ID NO: 2538844
uauucugcacugagcuaua

SEQ ID NO: 2538846 - RNA, 19 nt, Artificial Sequence
  Description of Artificial Sequence: Synthetic oligonucleotide
  Sense strand starting at position 3764 of SEQ ID NO: 1888518
gcugaaauuguuuaucuug

SEQ ID NO: 2538847 - RNA, 19 nt, Artificial Sequence
  Description of Artificial Sequence: Synthetic oligonucleotide
  Antisense strand to SEQ ID NO: 2538846
caagauaaacaauuucagc

SEQ ID NO: 2538848 - RNA, 19 nt, Artificial Sequence
  Description of Artificial Sequence: Synthetic oligonucleotide
  Sense strand starting at position 777 of SEQ ID NO: 1888518
acggaagauuuguaauuaa

SEQ ID NO: 2538849 - RNA, 19 nt, Artificial Sequence
  Description of Artificial Sequence: Synthetic oligonucleotide
  Antisense strand to SEQ ID NO: 2538848
uuaauuacaaaucuuccgu

SEQ ID NO: 2538850 - RNA, 19 nt, Artificial Sequence
  Description of Artificial Sequence: Synthetic oligonucleotide
  Sense strand starting at position 1288 of SEQ ID NO: 1888518
agaagucacuccuccaguu

SEQ ID NO: 2538851 - RNA, 19 nt, Artificial Sequence
  Description of Artificial Sequence: Synthetic oligonucleotide
  Antisense strand to SEQ ID NO: 2538850
aacuggaggagugacuucu

SEQ ID NO: 2538852 - RNA, 19 nt, Artificial Sequence
  Description of Artificial Sequence: Synthetic oligonucleotide
  Sense strand starting at position 2373 of SEQ ID NO: 1888518
cgagguuaaugacucaugu

SEQ ID NO: 2538853 - RNA, 19 nt, Artificial Sequence
  Description of Artificial Sequence: Synthetic oligonucleotide
  Antisense strand to SEQ ID NO: 2538852
acaugagucauuaaccucg

SEQ ID NO: 2538854 - RNA, 19 nt, Artificial Sequence
  Description of Artificial Sequence: Synthetic oligonucleotide
  Sense strand starting at position 2361 of SEQ ID NO: 1888518
cuguuauaugaacgagguu

SEQ ID NO: 2538855 - RNA, 19 nt, Artificial Sequence
  Description of Artificial Sequence: Synthetic oligonucleotide
  Antisense strand to SEQ ID NO: 2538854
aaccucguucauauaacag

SEQ ID NO: 2538856 - RNA, 19 nt, Artificial Sequence
  Description of Artificial Sequence: Synthetic oligonucleotide
  Sense strand starting at position 3224 of SEQ ID NO: 1888518
caacguucuuaagcaugga

SEQ ID NO: 2538857 - RNA, 19 nt, Artificial Sequence
  Description of Artificial Sequence: Synthetic oligonucleotide
  Antisense strand to SEQ ID NO: 2538856
uccaugcuuaagaacguug

SEQ ID NO: 2538858 - RNA, 19 nt, Artificial Sequence
  Description of Artificial Sequence: Synthetic oligonucleotide
  Sense strand starting at position 3763 of SEQ ID NO: 1888518
ggcugaaauuguuuaucuu

SEQ ID NO: 2538859 - RNA, 19 nt, Artificial Sequence
  Description of Artificial Sequence: Synthetic oligonucleotide
  Antisense strand to SEQ ID NO: 2538858
aagauaaacaauuucagcc

SEQ ID NO: 2538860 - RNA, 19 nt, Artificial Sequence
  Description of Artificial Sequence: Synthetic oligonucleotide
  Sense strand starting at position 576 of SEQ ID NO: 1888518
acuauagcucagugcagaa

SEQ ID NO: 2538861 - RNA, 19 nt, Artificial Sequence
  Description of Artificial Sequence: Synthetic oligonucleotide
  Antisense strand to SEQ ID NO: 2538860
uucugcacugagcuauagu

SEQ ID NO: 2538862 - RNA, 19 nt, Artificial Sequence
  Description of Artificial Sequence: Synthetic oligonucleotide
  Sense strand starting at position 575 of SEQ ID NO: 1888518
gacuauagcucagugcaga

SEQ ID NO: 2538863 - RNA, 19 nt, Artificial Sequence
  Description of Artificial Sequence: Synthetic oligonucleotide
  Antisense strand to SEQ ID NO: 2538862
ucugcacugagcuauaguc

SEQ ID NO: 2538864 - RNA, 19 nt, Artificial Sequence
  Description of Artificial Sequence: Synthetic oligonucleotide
  Sense strand starting at position 2997 of SEQ ID NO: 1888518
uaacuagaaucggugucuu

SEQ ID NO: 2538865 - RNA, 19 nt, Artificial Sequence
  Description of Artificial Sequence: Synthetic oligonucleotide
  Antisense strand to SEQ ID NO: 2538864
aagacaccgauucuaguua

SEQ ID NO: 2538866 - RNA, 19 nt, Artificial Sequence
  Description of Artificial Sequence: Synthetic oligonucleotide
  Sense strand starting at position 896 of SEQ ID NO: 1888518
auuguuacuguaugacagu

SEQ ID NO: 2538867 - RNA, 19 nt, Artificial Sequence
  Description of Artificial Sequence: Synthetic oligonucleotide
  Antisense strand to SEQ ID NO: 2538866
acugucauacaguaacaau

SEQ ID NO: 2538868 - RNA, 19 nt, Artificial Sequence
  Description of Artificial Sequence: Synthetic oligonucleotide
  Sense strand starting at position 3116 of SEQ ID NO: 1888518
gcccauuucuuacggauuu

SEQ ID NO: 2538869 - RNA, 19 nt, Artificial Sequence
  Description of Artificial Sequence: Synthetic oligonucleotide
  Antisense strand to SEQ ID NO: 2538868
aaauccguaagaaaugggc

SEQ ID NO: 2538870 - RNA, 19 nt, Artificial Sequence
  Description of Artificial Sequence: Synthetic oligonucleotide
  Sense strand starting at position 1375 of SEQ ID NO: 1888518
agucaaaccuaggagaaga

SEQ ID NO: 2538871 - RNA, 19 nt, Artificial Sequence
  Description of Artificial Sequence: Synthetic oligonucleotide
  Antisense strand to SEQ ID NO: 2538870
ucuucuccuagguuugacu

SEQ ID NO: 2538872 - RNA, 19 nt, Artificial Sequence
  Description of Artificial Sequence: Synthetic oligonucleotide
  Sense strand starting at position 3286 of SEQ ID NO: 1888518
aguguuaaguaauugcaau

SEQ ID NO: 2538873 - RNA, 19 nt, Artificial Sequence
  Description of Artificial Sequence: Synthetic oligonucleotide
  Antisense strand to SEQ ID NO: 2538872
auugcaauuacuuaacacu

SEQ ID NO: 2538874 - RNA, 19 nt, Artificial Sequence
  Description of Artificial Sequence: Synthetic oligonucleotide
  Sense strand starting at position 2382 of SEQ ID NO: 1888518
ugacucauguggccucauu

SEQ ID NO: 2538875 - RNA, 19 nt, Artificial Sequence
  Description of Artificial Sequence: Synthetic oligonucleotide
  Antisense strand to SEQ ID NO: 2538874
aaugaggccacaugaguca

SEQ ID NO: 2538876 - RNA, 19 nt, Artificial Sequence
  Description of Artificial Sequence: Synthetic oligonucleotide
  Sense strand starting at position 938 of SEQ ID NO: 1888518
ccuguuuagccucaauugu

SEQ ID NO: 2538877 - RNA, 19 nt, Artificial Sequence
  Description of Artificial Sequence: Synthetic oligonucleotide
  Antisense strand to SEQ ID NO: 2538876
acaauugaggcuaaacagg

SEQ ID NO: 2538878 - RNA, 19 nt, Artificial Sequence
  Description of Artificial Sequence: Synthetic oligonucleotide
  Sense strand starting at position 819 of SEQ ID NO: 1888518
guaguaaaccggcagcauu

SEQ ID NO: 2538879 - RNA, 19 nt, Artificial Sequence
  Description of Artificial Sequence: Synthetic oligonucleotide
  Antisense strand to SEQ ID NO: 2538878
aaugcugccgguuuacuac

SEQ ID NO: 2538880 - RNA, 19 nt, Artificial Sequence
  Description of Artificial Sequence: Synthetic oligonucleotide
  Sense strand starting at position 2302 of SEQ ID NO: 1888518
ucguuuccgacucagugau

SEQ ID NO: 2538881 - RNA, 19 nt, Artificial Sequence
  Description of Artificial Sequence: Synthetic oligonucleotide
  Antisense strand to SEQ ID NO: 2538880
aucacugagucggaaacga

SEQ ID NO: 2538882 - RNA, 19 nt, Artificial Sequence
  Description of Artificial Sequence: Synthetic oligonucleotide
  Sense strand starting at position 2422 of SEQ ID NO: 1888518
gagaguuucugggaggacu

SEQ ID NO: 2538883 - RNA, 19 nt, Artificial Sequence
  Description of Artificial Sequence: Synthetic oligonucleotide
  Antisense strand to SEQ ID NO: 2538882
aguccucccagaaacucuc

SEQ ID NO: 2538884 - RNA, 19 nt, Artificial Sequence
  Description of Artificial Sequence: Synthetic oligonucleotide
  Sense strand starting at position 2787 of SEQ ID NO: 1888518
cgcgucugucaggauaucu

SEQ ID NO: 2538885 - RNA, 19 nt, Artificial Sequence
  Description of Artificial Sequence: Synthetic oligonucleotide
  Antisense strand to SEQ ID NO: 2538884
agauauccugacagacgcg

SEQ ID NO: 2538886 - RNA, 19 nt, Artificial Sequence
  Description of Artificial Sequence: Synthetic oligonucleotide
  Sense strand starting at position 1274 of SEQ ID NO: 1888518
aagugacucucggaagaag

SEQ ID NO: 2538887 - RNA, 19 nt, Artificial Sequence
  Description of Artificial Sequence: Synthetic oligonucleotide
  Antisense strand to SEQ ID NO: 2538886
cuucuuccgagagucacuu

SEQ ID NO: 2538888 - RNA, 19 nt, Artificial Sequence
  Description of Artificial Sequence: Synthetic oligonucleotide
  Sense strand starting at position 3912 of SEQ ID NO: 1888518
gucuuuagcaauggugguu

SEQ ID NO: 2538889 - RNA, 19 nt, Artificial Sequence
  Description of Artificial Sequence: Synthetic oligonucleotide
  Antisense strand to SEQ ID NO: 2538888
aaccaccauugcuaaagac

SEQ ID NO: 2538890 - RNA, 19 nt, Artificial Sequence
  Description of Artificial Sequence: Synthetic oligonucleotide
  Sense strand starting at position 2293 of SEQ ID NO: 1888518
cacagagcuucguuuccga

SEQ ID NO: 2538891 - RNA, 19 nt, Artificial Sequence
  Description of Artificial Sequence: Synthetic oligonucleotide
  Antisense strand to SEQ ID NO: 2538890
ucggaaacgaagcucugug

SEQ ID NO: 2538892 - RNA, 19 nt, Artificial Sequence
  Description of Artificial Sequence: Synthetic oligonucleotide
  Sense strand starting at position 968 of SEQ ID NO: 1888518
guguguaauuucuagguau

SEQ ID NO: 2538893 - RNA, 19 nt, Artificial Sequence
  Description of Artificial Sequence: Synthetic oligonucleotide
  Antisense strand to SEQ ID NO: 2538892
auaccuagaaauuacacac

SEQ ID NO: 2538894 - RNA, 19 nt, Artificial Sequence
  Description of Artificial Sequence: Synthetic oligonucleotide
  Sense strand starting at position 2556 of SEQ ID NO: 1888518
cccucagguuauuaauaag

SEQ ID NO: 2538895 - RNA, 19 nt, Artificial Sequence
  Description of Artificial Sequence: Synthetic oligonucleotide
  Antisense strand to SEQ ID NO: 2538894
cuuauuaauaaccugaggg

SEQ ID NO: 2538896 - RNA, 19 nt, Artificial Sequence
  Description of Artificial Sequence: Synthetic oligonucleotide
  Sense strand starting at position 3114 of SEQ ID NO: 1888518
gugcccauuucuuacggau

SEQ ID NO: 2538897 - RNA, 19 nt, Artificial Sequence
  Description of Artificial Sequence: Synthetic oligonucleotide
  Antisense strand to SEQ ID NO: 2538896
auccguaagaaaugggcac

SEQ ID NO: 2538898 - RNA, 19 nt, Artificial Sequence
  Description of Artificial Sequence: Synthetic oligonucleotide
  Sense strand starting at position 1246 of SEQ ID NO: 1888518
ugguguuccucugcuguga

SEQ ID NO: 2538899 - RNA, 19 nt, Artificial Sequence
  Description of Artificial Sequence: Synthetic oligonucleotide
  Antisense strand to SEQ ID NO: 2538898
ucacagcagaggaacacca

SEQ ID NO: 2538900 - RNA, 19 nt, Artificial Sequence
  Description of Artificial Sequence: Synthetic oligonucleotide
  Sense strand starting at position 917 of SEQ ID NO: 1888518
cugcuuuagucuguuuagu

SEQ ID NO: 2538901 - RNA, 19 nt, Artificial Sequence
  Description of Artificial Sequence: Synthetic oligonucleotide
  Antisense strand to SEQ ID NO: 2538900
acuaaacagacuaaagcag

SEQ ID NO: 2538902 - RNA, 19 nt, Artificial Sequence
  Description of Artificial Sequence: Synthetic oligonucleotide
  Sense strand starting at position 2688 of SEQ ID NO: 1888519
gcauuaaaucuguagaaca

SEQ ID NO: 2538903 - RNA, 19 nt, Artificial Sequence
  Description of Artificial Sequence: Synthetic oligonucleotide
  Antisense strand to SEQ ID NO: 2538902
uguucuacagauuuaaugc

SEQ ID NO: 2538904 - RNA, 19 nt, Artificial Sequence
  Description of Artificial Sequence: Synthetic oligonucleotide
  Sense strand starting at position 2981 of SEQ ID NO: 1888519
gucucaccacuguauaaga

SEQ ID NO: 2538905 - RNA, 19 nt, Artificial Sequence
  Description of Artificial Sequence: Synthetic oligonucleotide
  Antisense strand to SEQ ID NO: 2538904
ucuuauacaguggugagac

SEQ ID NO: 2538906 - RNA, 19 nt, Artificial Sequence
  Description of Artificial Sequence: Synthetic oligonucleotide
  Sense strand starting at position 3956 of SEQ ID NO: 1888519
uucuuuaaggugcaucaua

SEQ ID NO: 2538907 - RNA, 19 nt, Artificial Sequence
  Description of Artificial Sequence: Synthetic oligonucleotide
  Antisense strand to SEQ ID NO: 2538906
uaugaugcaccuuaaagaa

SEQ ID NO: 2538908 - RNA, 19 nt, Artificial Sequence
  Description of Artificial Sequence: Synthetic oligonucleotide
  Sense strand starting at position 2687 of SEQ ID NO: 1888519
ugcauuaaaucuguagaac

SEQ ID NO: 2538909 - RNA, 19 nt, Artificial Sequence
  Description of Artificial Sequence: Synthetic oligonucleotide
  Antisense strand to SEQ ID NO: 2538908
guucuacagauuuaaugca

SEQ ID NO: 2538910 - RNA, 19 nt, Artificial Sequence
  Description of Artificial Sequence: Synthetic oligonucleotide
  Sense strand starting at position 3848 of SEQ ID NO: 1888519
cuugauuucuguguuguuu

SEQ ID NO: 2538911 - RNA, 19 nt, Artificial Sequence
  Description of Artificial Sequence: Synthetic oligonucleotide
  Antisense strand to SEQ ID NO: 2538910
aaacaacacagaaaucaag

SEQ ID NO: 2538912 - RNA, 19 nt, Artificial Sequence
  Description of Artificial Sequence: Synthetic oligonucleotide
  Sense strand starting at position 3847 of SEQ ID NO: 1888519
ucuugauuucuguguuguu

SEQ ID NO: 2538913 - RNA, 19 nt, Artificial Sequence
  Description of Artificial Sequence: Synthetic oligonucleotide
  Antisense strand to SEQ ID NO: 2538912
aacaacacagaaaucaaga

SEQ ID NO: 2538914 - RNA, 19 nt, Artificial Sequence
  Description of Artificial Sequence: Synthetic oligonucleotide
  Sense strand starting at position 2860 of SEQ ID NO: 1888519
ucaguuaccuuaguuccua

SEQ ID NO: 2538915 - RNA, 19 nt, Artificial Sequence
  Description of Artificial Sequence: Synthetic oligonucleotide
  Antisense strand to SEQ ID NO: 2538914
uaggaacuaagguaacuga

SEQ ID NO: 2538916 - RNA, 19 nt, Artificial Sequence
  Description of Artificial Sequence: Synthetic oligonucleotide
  Sense strand starting at position 3399 of SEQ ID NO: 1888519
cuauuacuguguuucuaug

SEQ ID NO: 2538917 - RNA, 19 nt, Artificial Sequence
  Description of Artificial Sequence: Synthetic oligonucleotide
  Antisense strand to SEQ ID NO: 2538916
cauagaaacacaguaauag

SEQ ID NO: 2538918 - RNA, 19 nt, Artificial Sequence
  Description of Artificial Sequence: Synthetic oligonucleotide
  Sense strand starting at position 3964 of SEQ ID NO: 1888519
ggugcaucauaaguuuauu

SEQ ID NO: 2538919 - RNA, 19 nt, Artificial Sequence
  Description of Artificial Sequence: Synthetic oligonucleotide
  Antisense strand to SEQ ID NO: 2538918
aauaaacuuaugaugcacc

SEQ ID NO: 2538920 - RNA, 19 nt, Artificial Sequence
  Description of Artificial Sequence: Synthetic oligonucleotide
  Sense strand starting at position 3397 of SEQ ID NO: 1888519
uucuauuacuguguuucua

SEQ ID NO: 2538921 - RNA, 19 nt, Artificial Sequence
  Description of Artificial Sequence: Synthetic oligonucleotide
  Antisense strand to SEQ ID NO: 2538920
uagaaacacaguaauagaa

SEQ ID NO: 2538922 - RNA, 19 nt, Artificial Sequence
  Description of Artificial Sequence: Synthetic oligonucleotide
  Sense strand starting at position 124 of SEQ ID NO: 1888519
ugcagaaucucaucaccgu

SEQ ID NO: 2538923 - RNA, 19 nt, Artificial Sequence
  Description of Artificial Sequence: Synthetic oligonucleotide
  Antisense strand to SEQ ID NO: 2538922
acggugaugagauucugca

SEQ ID NO: 2538924 - RNA, 19 nt, Artificial Sequence
  Description of Artificial Sequence: Synthetic oligonucleotide
  Sense strand starting at position 2656 of SEQ ID NO: 1888519
cccagccucuuguugaauu

SEQ ID NO: 2538925 - RNA, 19 nt, Artificial Sequence
  Description of Artificial Sequence: Synthetic oligonucleotide
  Antisense strand to SEQ ID NO: 2538924
aauucaacaagaggcuggg

SEQ ID NO: 2538926 - RNA, 19 nt, Artificial Sequence
  Description of Artificial Sequence: Synthetic oligonucleotide
  Sense strand starting at position 3350 of SEQ ID NO: 1888519
ucauucuccuguuaaugga

SEQ ID NO: 2538927 - RNA, 19 nt, Artificial Sequence
  Description of Artificial Sequence: Synthetic oligonucleotide
  Antisense strand to SEQ ID NO: 2538926
uccauuaacaggagaauga

SEQ ID NO: 2538928 - RNA, 19 nt, Artificial Sequence
  Description of Artificial Sequence: Synthetic oligonucleotide
  Sense strand starting at position 2657 of SEQ ID NO: 1888519
ccagccucuuguugaauuu

SEQ ID NO: 2538929 - RNA, 19 nt, Artificial Sequence
  Description of Artificial Sequence: Synthetic oligonucleotide
  Antisense strand to SEQ ID NO: 2538928
aaauucaacaagaggcugg

SEQ ID NO: 2538930 - RNA, 19 nt, Artificial Sequence
  Description of Artificial Sequence: Synthetic oligonucleotide
  Sense strand starting at position 3961 of SEQ ID NO: 1888519
uaaggugcaucauaaguuu

SEQ ID NO: 2538931 - RNA, 19 nt, Artificial Sequence
  Description of Artificial Sequence: Synthetic oligonucleotide
  Antisense strand to SEQ ID NO: 2538930
aaacuuaugaugcaccuua

SEQ ID NO: 2538932 - RNA, 19 nt, Artificial Sequence
  Description of Artificial Sequence: Synthetic oligonucleotide
  Sense strand starting at position 537 of SEQ ID NO: 1888519
gggucucugugucaggauu

SEQ ID NO: 2538933 - RNA, 19 nt, Artificial Sequence
  Description of Artificial Sequence: Synthetic oligonucleotide
  Antisense strand to SEQ ID NO: 2538932
aauccugacacagagaccc

SEQ ID NO: 2538934 - RNA, 19 nt, Artificial Sequence
  Description of Artificial Sequence: Synthetic oligonucleotide
  Sense strand starting at position 3405 of SEQ ID NO: 1888519
cuguguuucuauggacauu

SEQ ID NO: 2538935 - RNA, 19 nt, Artificial Sequence
  Description of Artificial Sequence: Synthetic oligonucleotide
  Antisense strand to SEQ ID NO: 2538934
aauguccauagaaacacag

SEQ ID NO: 2538936 - RNA, 19 nt, Artificial Sequence
  Description of Artificial Sequence: Synthetic oligonucleotide
  Sense strand starting at position 2868 of SEQ ID NO: 1888519
cuuaguuccuauuguuauu

SEQ ID NO: 2538937 - RNA, 19 nt, Artificial Sequence
  Description of Artificial Sequence: Synthetic oligonucleotide
  Antisense strand to SEQ ID NO: 2538936
aauaacaauaggaacuaag

SEQ ID NO: 2538938 - RNA, 19 nt, Artificial Sequence
  Description of Artificial Sequence: Synthetic oligonucleotide
  Sense strand starting at position 2654 of SEQ ID NO: 1888519
cgcccagccucuuguugaa

SEQ ID NO: 2538939 - RNA, 19 nt, Artificial Sequence
  Description of Artificial Sequence: Synthetic oligonucleotide
  Antisense strand to SEQ ID NO: 2538938
uucaacaagaggcugggcg

SEQ ID NO: 2538940 - RNA, 19 nt, Artificial Sequence
  Description of Artificial Sequence: Synthetic oligonucleotide
  Sense strand starting at position 2770 of SEQ ID NO: 1888520
ugaaguagauuacuuauga

SEQ ID NO: 2538941 - RNA, 19 nt, Artificial Sequence
  Description of Artificial Sequence: Synthetic oligonucleotide
  Antisense strand to SEQ ID NO: 2538940
ucauaaguaaucuacuuca

SEQ ID NO: 2538942 - RNA, 19 nt, Artificial Sequence
  Description of Artificial Sequence: Synthetic oligonucleotide
  Sense strand starting at position 2840 of SEQ ID NO: 1888520
ucagaauguguguaaggaa

SEQ ID NO: 2538943 - RNA, 19 nt, Artificial Sequence
  Description of Artificial Sequence: Synthetic oligonucleotide
  Antisense strand to SEQ ID NO: 2538942
uuccuuacacacauucuga

SEQ ID NO: 2538944 - RNA, 19 nt, Artificial Sequence
  Description of Artificial Sequence: Synthetic oligonucleotide
  Sense strand starting at position 2988 of SEQ ID NO: 1888520
ugcaaaugccuggaggaga

SEQ ID NO: 2538945 - RNA, 19 nt, Artificial Sequence
  Description of Artificial Sequence: Synthetic oligonucleotide
  Antisense strand to SEQ ID NO: 2538944
ucuccuccaggcauuugca

SEQ ID NO: 2538946 - RNA, 19 nt, Artificial Sequence
  Description of Artificial Sequence: Synthetic oligonucleotide
  Sense strand starting at position 493 of SEQ ID NO: 1888520
ccacaaaugggucauccuu

SEQ ID NO: 2538947 - RNA, 19 nt, Artificial Sequence
  Description of Artificial Sequence: Synthetic oligonucleotide
  Antisense strand to SEQ ID NO: 2538946
aaggaugacccauuugugg

SEQ ID NO: 2538948 - RNA, 19 nt, Artificial Sequence
  Description of Artificial Sequence: Synthetic oligonucleotide
  Sense strand starting at position 1917 of SEQ ID NO: 1888520
gagacaucucugugacaaa

SEQ ID NO: 2538949 - RNA, 19 nt, Artificial Sequence
  Description of Artificial Sequence: Synthetic oligonucleotide
  Antisense strand to SEQ ID NO: 2538948
uuugucacagagaugucuc

SEQ ID NO: 2538950 - RNA, 19 nt, Artificial Sequence
  Description of Artificial Sequence: Synthetic oligonucleotide
  Sense strand starting at position 2427 of SEQ ID NO: 1888520
agacaugcccacuagagua

SEQ ID NO: 2538951 - RNA, 19 nt, Artificial Sequence
  Description of Artificial Sequence: Synthetic oligonucleotide
  Antisense strand to SEQ ID NO: 2538950
uacucuagugggcaugucu

SEQ ID NO: 2538952 - RNA, 19 nt, Artificial Sequence
  Description of Artificial Sequence: Synthetic oligonucleotide
  Sense strand starting at position 2424 of SEQ ID NO: 1888520
gugagacaugcccacuaga

SEQ ID NO: 2538953 - RNA, 19 nt, Artificial Sequence
  Description of Artificial Sequence: Synthetic oligonucleotide
  Antisense strand to SEQ ID NO: 2538952
ucuagugggcaugucucac

SEQ ID NO: 2538954 - RNA, 19 nt, Artificial Sequence
  Description of Artificial Sequence: Synthetic oligonucleotide
  Sense strand starting at position 1950 of SEQ ID NO: 1888520
cugcgcgaugcuccauaaa

SEQ ID NO: 2538955 - RNA, 19 nt, Artificial Sequence
  Description of Artificial Sequence: Synthetic oligonucleotide
  Antisense strand to SEQ ID NO: 2538954
uuuauggagcaucgcgcag

SEQ ID NO: 2538956 - RNA, 19 nt, Artificial Sequence
  Description of Artificial Sequence: Synthetic oligonucleotide
  Sense strand starting at position 1378 of SEQ ID NO: 1888520
gagucugaucucgaaacug

SEQ ID NO: 2538957 - RNA, 19 nt, Artificial Sequence
  Description of Artificial Sequence: Synthetic oligonucleotide
  Antisense strand to SEQ ID NO: 2538956
caguuucgagaucagacuc

SEQ ID NO: 2538958 - RNA, 19 nt, Artificial Sequence
  Description of Artificial Sequence: Synthetic oligonucleotide
  Sense strand starting at position 1916 of SEQ ID NO: 1888520
ugagacaucucugugacaa

SEQ ID NO: 2538959 - RNA, 19 nt, Artificial Sequence
  Description of Artificial Sequence: Synthetic oligonucleotide
  Antisense strand to SEQ ID NO: 2538958
uugucacagagaugucuca

SEQ ID NO: 2538960 - RNA, 19 nt, Artificial Sequence
  Description of Artificial Sequence: Synthetic oligonucleotide
  Sense strand starting at position 2555 of SEQ ID NO: 1888520
acugaagacuuggccagau

SEQ ID NO: 2538961 - RNA, 19 nt, Artificial Sequence
  Description of Artificial Sequence: Synthetic oligonucleotide
  Antisense strand to SEQ ID NO: 2538960
aucuggccaagucuucagu

SEQ ID NO: 2538962 - RNA, 19 nt, Artificial Sequence
  Description of Artificial Sequence: Synthetic oligonucleotide
  Sense strand starting at position 3942 of SEQ ID NO: 1888520
ugggauaacugcucacaga

SEQ ID NO: 2538963 - RNA, 19 nt, Artificial Sequence
  Description of Artificial Sequence: Synthetic oligonucleotide
  Antisense strand to SEQ ID NO: 2538962
ucugugagcaguuauccca

SEQ ID NO: 2538964 - RNA, 19 nt, Artificial Sequence
  Description of Artificial Sequence: Synthetic oligonucleotide
  Sense strand starting at position 1977 of SEQ ID NO: 1888520
aguccucaccacugaggaa

SEQ ID NO: 2538965 - RNA, 19 nt, Artificial Sequence
  Description of Artificial Sequence: Synthetic oligonucleotide
  Antisense strand to SEQ ID NO: 2538964
uuccucaguggugaggacu

SEQ ID NO: 2538966 - RNA, 19 nt, Artificial Sequence
  Description of Artificial Sequence: Synthetic oligonucleotide
  Sense strand starting at position 2768 of SEQ ID NO: 1888520
gcugaaguagauuacuuau

SEQ ID NO: 2538967 - RNA, 19 nt, Artificial Sequence
  Description of Artificial Sequence: Synthetic oligonucleotide
  Antisense strand to SEQ ID NO: 2538966
auaaguaaucuacuucagc

SEQ ID NO: 2538968 - RNA, 19 nt, Artificial Sequence
  Description of Artificial Sequence: Synthetic oligonucleotide
  Sense strand starting at position 1441 of SEQ ID NO: 1888520
ggaugacuguaagcaauga

SEQ ID NO: 2538969 - RNA, 19 nt, Artificial Sequence
  Description of Artificial Sequence: Synthetic oligonucleotide
  Antisense strand to SEQ ID NO: 2538968
ucauugcuuacagucaucc

SEQ ID NO: 2538970 - RNA, 19 nt, Artificial Sequence
  Description of Artificial Sequence: Synthetic oligonucleotide
  Sense strand starting at position 2286 of SEQ ID NO: 1888520
uguguacagauguauacaa

SEQ ID NO: 2538971 - RNA, 19 nt, Artificial Sequence
  Description of Artificial Sequence: Synthetic oligonucleotide
  Antisense strand to SEQ ID NO: 2538970
uuguauacaucuguacaca

SEQ ID NO: 2538972 - RNA, 19 nt, Artificial Sequence
  Description of Artificial Sequence: Synthetic oligonucleotide
  Sense strand starting at position 2293 of SEQ ID NO: 1888520
agauguauacaaugccaaa

SEQ ID NO: 2538973 - RNA, 19 nt, Artificial Sequence
  Description of Artificial Sequence: Synthetic oligonucleotide
  Antisense strand to SEQ ID NO: 2538972
uuuggcauuguauacaucu

SEQ ID NO: 2538974 - RNA, 19 nt, Artificial Sequence
  Description of Artificial Sequence: Synthetic oligonucleotide
  Sense strand starting at position 2245 of SEQ ID NO: 1888520
ccuugaugucaacacaugu

SEQ ID NO: 2538975 - RNA, 19 nt, Artificial Sequence
  Description of Artificial Sequence: Synthetic oligonucleotide
  Antisense strand to SEQ ID NO: 2538974
acauguguugacaucaagg

SEQ ID NO: 2538976 - RNA, 19 nt, Artificial Sequence
  Description of Artificial Sequence: Synthetic oligonucleotide
  Sense strand starting at position 1915 of SEQ ID NO: 1888520
cugagacaucucugugaca

SEQ ID NO: 2538977 - RNA, 19 nt, Artificial Sequence
  Description of Artificial Sequence: Synthetic oligonucleotide
  Antisense strand to SEQ ID NO: 2538976
ugucacagagaugucucag

SEQ ID NO: 2538978 - RNA, 19 nt, Artificial Sequence
  Description of Artificial Sequence: Synthetic oligonucleotide
  Sense strand starting at position 2280 of SEQ ID NO: 1888520
auacauuguguacagaugu

SEQ ID NO: 2538979 - RNA, 19 nt, Artificial Sequence
  Description of Artificial Sequence: Synthetic oligonucleotide
  Antisense strand to SEQ ID NO: 2538978
acaucuguacacaauguau

SEQ ID NO: 2538980 - RNA, 19 nt, Artificial Sequence
  Description of Artificial Sequence: Synthetic oligonucleotide
  Sense strand starting at position 2938 of SEQ ID NO: 1888520
aggaauggccauggcuaaa

SEQ ID NO: 2538981 - RNA, 19 nt, Artificial Sequence
  Description of Artificial Sequence: Synthetic oligonucleotide
  Antisense strand to SEQ ID NO: 2538980
uuuagccauggccauuccu

SEQ ID NO: 2538982 - RNA, 19 nt, Artificial Sequence
  Description of Artificial Sequence: Synthetic oligonucleotide
  Sense strand starting at position 2839 of SEQ ID NO: 1888520
aucagaauguguguaagga

SEQ ID NO: 2538983 - RNA, 19 nt, Artificial Sequence
  Description of Artificial Sequence: Synthetic oligonucleotide
  Antisense strand to SEQ ID NO: 2538982
uccuuacacacauucugau

SEQ ID NO: 2538984 - RNA, 19 nt, Artificial Sequence
  Description of Artificial Sequence: Synthetic oligonucleotide
  Sense strand starting at position 1374 of SEQ ID NO: 1888520
ugaggagucugaucucgaa

SEQ ID NO: 2538985 - RNA, 19 nt, Artificial Sequence
  Description of Artificial Sequence: Synthetic oligonucleotide
  Antisense strand to SEQ ID NO: 2538984
uucgagaucagacuccuca

SEQ ID NO: 2538986 - RNA, 19 nt, Artificial Sequence
  Description of Artificial Sequence: Synthetic oligonucleotide
  Sense strand starting at position 2937 of SEQ ID NO: 1888520
gaggaauggccauggcuaa

SEQ ID NO: 2538987 - RNA, 19 nt, Artificial Sequence
  Description of Artificial Sequence: Synthetic oligonucleotide
  Antisense strand to SEQ ID NO: 2538986
uuagccauggccauuccuc

SEQ ID NO: 2538988 - RNA, 19 nt, Artificial Sequence
  Description of Artificial Sequence: Synthetic oligonucleotide
  Sense strand starting at position 603 of SEQ ID NO: 1888520
auggcuugugaacagaguu

SEQ ID NO: 2538989 - RNA, 19 nt, Artificial Sequence
  Description of Artificial Sequence: Synthetic oligonucleotide
  Antisense strand to SEQ ID NO: 2538988
aacucuguucacaagccau

SEQ ID NO: 2538990 - RNA, 19 nt, Artificial Sequence
  Description of Artificial Sequence: Synthetic oligonucleotide
  Sense strand starting at position 3141 of SEQ ID NO: 1888520
aggucuaugccucacuuaa

SEQ ID NO: 2538991 - RNA, 19 nt, Artificial Sequence
  Description of Artificial Sequence: Synthetic oligonucleotide
  Antisense strand to SEQ ID NO: 2538990
uuaagugaggcauagaccu

SEQ ID NO: 2538992 - RNA, 19 nt, Artificial Sequence
  Description of Artificial Sequence: Synthetic oligonucleotide
  Sense strand starting at position 40 of SEQ ID NO: 1888520
ccuguagauucccuaggau

SEQ ID NO: 2538993 - RNA, 19 nt, Artificial Sequence
  Description of Artificial Sequence: Synthetic oligonucleotide
  Antisense strand to SEQ ID NO: 2538992
auccuagggaaucuacagg

SEQ ID NO: 2538994 - RNA, 19 nt, Artificial Sequence
  Description of Artificial Sequence: Synthetic oligonucleotide
  Sense strand starting at position 3062 of SEQ ID NO: 1888520
augagaagguagcuucuua

SEQ ID NO: 2538995 - RNA, 19 nt, Artificial Sequence
  Description of Artificial Sequence: Synthetic oligonucleotide
  Antisense strand to SEQ ID NO: 2538994
uaagaagcuaccuucucau

SEQ ID NO: 2538996 - RNA, 19 nt, Artificial Sequence
  Description of Artificial Sequence: Synthetic oligonucleotide
  Sense strand starting at position 742 of SEQ ID NO: 1888520
gagaaacugcccugcagaa

SEQ ID NO: 2538997 - RNA, 19 nt, Artificial Sequence
  Description of Artificial Sequence: Synthetic oligonucleotide
  Antisense strand to SEQ ID NO: 2538996
uucugcagggcaguuucuc

SEQ ID NO: 2538998 - RNA, 19 nt, Artificial Sequence
  Description of Artificial Sequence: Synthetic oligonucleotide
  Sense strand starting at position 2278 of SEQ ID NO: 1888520
gcauacauuguguacagau

SEQ ID NO: 2538999 - RNA, 19 nt, Artificial Sequence
  Description of Artificial Sequence: Synthetic oligonucleotide
  Antisense strand to SEQ ID NO: 2538998
aucuguacacaauguaugc

SEQ ID NO: 2539000 - RNA, 19 nt, Artificial Sequence
  Description of Artificial Sequence: Synthetic oligonucleotide
  Sense strand starting at position 1903 of SEQ ID NO: 1888520
gcaucaaagucucugagac

SEQ ID NO: 2539001 - RNA, 19 nt, Artificial Sequence
  Description of Artificial Sequence: Synthetic oligonucleotide
  Antisense strand to SEQ ID NO: 2539000
gucucagagacuuugaugc

SEQ ID NO: 2539002 - RNA, 19 nt, Artificial Sequence
  Description of Artificial Sequence: Synthetic oligonucleotide
  Sense strand starting at position 1328 of SEQ ID NO: 1888520
agaucagauucccuguagu

SEQ ID NO: 2539003 - RNA, 19 nt, Artificial Sequence
  Description of Artificial Sequence: Synthetic oligonucleotide
  Antisense strand to SEQ ID NO: 2539002
acuacagggaaucugaucu

SEQ ID NO: 2539004 - RNA, 19 nt, Artificial Sequence
  Description of Artificial Sequence: Synthetic oligonucleotide
  Sense strand starting at position 2811 of SEQ ID NO: 1888520
agcugcuaugaguauuaac

SEQ ID NO: 2539005 - RNA, 19 nt, Artificial Sequence
  Description of Artificial Sequence: Synthetic oligonucleotide
  Antisense strand to SEQ ID NO: 2539004
guuaauacucauagcagcu

SEQ ID NO: 2539006 - RNA, 19 nt, Artificial Sequence
  Description of Artificial Sequence: Synthetic oligonucleotide
  Sense strand starting at position 472 of SEQ ID NO: 1888520
ggcucuuuaggccauacau

SEQ ID NO: 2539007 - RNA, 19 nt, Artificial Sequence
  Description of Artificial Sequence: Synthetic oligonucleotide
  Antisense strand to SEQ ID NO: 2539006
auguauggccuaaagagcc

SEQ ID NO: 2539008 - RNA, 19 nt, Artificial Sequence
  Description of Artificial Sequence: Synthetic oligonucleotide
  Sense strand starting at position 2256 of SEQ ID NO: 1888520
acacauguuugaccugcaa

SEQ ID NO: 2539009 - RNA, 19 nt, Artificial Sequence
  Description of Artificial Sequence: Synthetic oligonucleotide
  Antisense strand to SEQ ID NO: 2539008
uugcaggucaaacaugugu

SEQ ID NO: 2539010 - RNA, 19 nt, Artificial Sequence
  Description of Artificial Sequence: Synthetic oligonucleotide
  Sense strand starting at position 2747 of SEQ ID NO: 1888520
agaaguguuugccuggaag

SEQ ID NO: 2539011 - RNA, 19 nt, Artificial Sequence
  Description of Artificial Sequence: Synthetic oligonucleotide
  Antisense strand to SEQ ID NO: 2539010
cuuccaggcaaacacuucu

SEQ ID NO: 2539012 - RNA, 19 nt, Artificial Sequence
  Description of Artificial Sequence: Synthetic oligonucleotide
  Sense strand starting at position 2277 of SEQ ID NO: 1888520
agcauacauuguguacaga

SEQ ID NO: 2539013 - RNA, 19 nt, Artificial Sequence
  Description of Artificial Sequence: Synthetic oligonucleotide
  Antisense strand to SEQ ID NO: 2539012
ucuguacacaauguaugcu

SEQ ID NO: 2539014 - RNA, 19 nt, Artificial Sequence
  Description of Artificial Sequence: Synthetic oligonucleotide
  Sense strand starting at position 3865 of SEQ ID NO: 1888520
gugacuuguuacuucuaag

SEQ ID NO: 2539015 - RNA, 19 nt, Artificial Sequence
  Description of Artificial Sequence: Synthetic oligonucleotide
  Antisense strand to SEQ ID NO: 2539014
cuuagaaguaacaagucac

SEQ ID NO: 2539016 - RNA, 19 nt, Artificial Sequence
  Description of Artificial Sequence: Synthetic oligonucleotide
  Sense strand starting at position 2463 of SEQ ID NO: 1888520
aagacagcucugugagcaa

SEQ ID NO: 2539017 - RNA, 19 nt, Artificial Sequence
  Description of Artificial Sequence: Synthetic oligonucleotide
  Antisense strand to SEQ ID NO: 2539016
uugcucacagagcugucuu

SEQ ID NO: 2539018 - RNA, 19 nt, Artificial Sequence
  Description of Artificial Sequence: Synthetic oligonucleotide
  Sense strand starting at position 86 of SEQ ID NO: 1888520
gggagaugguuucauuucu

SEQ ID NO: 2539019 - RNA, 19 nt, Artificial Sequence
  Description of Artificial Sequence: Synthetic oligonucleotide
  Antisense strand to SEQ ID NO: 2539018
agaaaugaaaccaucuccc

SEQ ID NO: 2539020 - RNA, 19 nt, Artificial Sequence
  Description of Artificial Sequence: Synthetic oligonucleotide
  Sense strand starting at position 348 of SEQ ID NO: 1888521
ccuccaagagccuauauga

SEQ ID NO: 2539021 - RNA, 19 nt, Artificial Sequence
  Description of Artificial Sequence: Synthetic oligonucleotide
  Antisense strand to SEQ ID NO: 2539020
ucauauaggcucuuggagg

SEQ ID NO: 2539022 - RNA, 19 nt, Artificial Sequence
  Description of Artificial Sequence: Synthetic oligonucleotide
  Sense strand starting at position 201 of SEQ ID NO: 1888521
auaauauggccucaccuga

SEQ ID NO: 2539023 - RNA, 19 nt, Artificial Sequence
  Description of Artificial Sequence: Synthetic oligonucleotide
  Antisense strand to SEQ ID NO: 2539022
ucaggugaggccauauuau

SEQ ID NO: 2539024 - RNA, 19 nt, Artificial Sequence
  Description of Artificial Sequence: Synthetic oligonucleotide
  Sense strand starting at position 3084 of SEQ ID NO: 1888521
aaaugaagccuccagguau

SEQ ID NO: 2539025 - RNA, 19 nt, Artificial Sequence
  Description of Artificial Sequence: Synthetic oligonucleotide
  Antisense strand to SEQ ID NO: 2539024
auaccuggaggcuucauuu

SEQ ID NO: 2539026 - RNA, 19 nt, Artificial Sequence
  Description of Artificial Sequence: Synthetic oligonucleotide
  Sense strand starting at position 3652 of SEQ ID NO: 1888521
gcugucaugcugguaucuu

SEQ ID NO: 2539027 - RNA, 19 nt, Artificial Sequence
  Description of Artificial Sequence: Synthetic oligonucleotide
  Antisense strand to SEQ ID NO: 2539026
aagauaccagcaugacagc

SEQ ID NO: 2539028 - RNA, 19 nt, Artificial Sequence
  Description of Artificial Sequence: Synthetic oligonucleotide
  Sense strand starting at position 3649 of SEQ ID NO: 1888521
ccugcugucaugcugguau

SEQ ID NO: 2539029 - RNA, 19 nt, Artificial Sequence
  Description of Artificial Sequence: Synthetic oligonucleotide
  Antisense strand to SEQ ID NO: 2539028
auaccagcaugacagcagg

SEQ ID NO: 2539030 - RNA, 19 nt, Artificial Sequence
  Description of Artificial Sequence: Synthetic oligonucleotide
  Sense strand starting at position 2800 of SEQ ID NO: 1888521
ugaccaauagccugggaca

SEQ ID NO: 2539031 - RNA, 19 nt, Artificial Sequence
  Description of Artificial Sequence: Synthetic oligonucleotide
  Antisense strand to SEQ ID NO: 2539030
ugucccaggcuauugguca

SEQ ID NO: 2539032 - RNA, 19 nt, Artificial Sequence
  Description of Artificial Sequence: Synthetic oligonucleotide
  Sense strand starting at position 772 of SEQ ID NO: 1888521
guauaaagaugacuguauu

SEQ ID NO: 2539033 - RNA, 19 nt, Artificial Sequence
  Description of Artificial Sequence: Synthetic oligonucleotide
  Antisense strand to SEQ ID NO: 2539032
aauacagucaucuuuauac

SEQ ID NO: 2539034 - RNA, 19 nt, Artificial Sequence
  Description of Artificial Sequence: Synthetic oligonucleotide
  Sense strand starting at position 3648 of SEQ ID NO: 1888521
gccugcugucaugcuggua

SEQ ID NO: 2539035 - RNA, 19 nt, Artificial Sequence
  Description of Artificial Sequence: Synthetic oligonucleotide
  Antisense strand to SEQ ID NO: 2539034
uaccagcaugacagcaggc

SEQ ID NO: 2539036 - RNA, 19 nt, Artificial Sequence
  Description of Artificial Sequence: Synthetic oligonucleotide
  Sense strand starting at position 2027 of SEQ ID NO: 1888521
gccaaugaccgucaagaug

SEQ ID NO: 2539037 - RNA, 19 nt, Artificial Sequence
  Description of Artificial Sequence: Synthetic oligonucleotide
  Antisense strand to SEQ ID NO: 2539036
caucuugacggucauuggc

SEQ ID NO: 2539038 - RNA, 19 nt, Artificial Sequence
  Description of Artificial Sequence: Synthetic oligonucleotide
  Sense strand starting at position 3499 of SEQ ID NO: 1888521
cuaguuaauucucucagga

SEQ ID NO: 2539039 - RNA, 19 nt, Artificial Sequence
  Description of Artificial Sequence: Synthetic oligonucleotide
  Antisense strand to SEQ ID NO: 2539038
uccugagagaauuaacuag

SEQ ID NO: 2539040 - RNA, 19 nt, Artificial Sequence
  Description of Artificial Sequence: Synthetic oligonucleotide
  Sense strand starting at position 2791 of SEQ ID NO: 1888521
gccaauaugugaccaauag

SEQ ID NO: 2539041 - RNA, 19 nt, Artificial Sequence
  Description of Artificial Sequence: Synthetic oligonucleotide
  Antisense strand to SEQ ID NO: 2539040
cuauuggucacauauuggc

SEQ ID NO: 2539042 - RNA, 19 nt, Artificial Sequence
  Description of Artificial Sequence: Synthetic oligonucleotide
  Sense strand starting at position 718 of SEQ ID NO: 1888521
ugggaccuuuccuccauua

SEQ ID NO: 2539043 - RNA, 19 nt, Artificial Sequence
  Description of Artificial Sequence: Synthetic oligonucleotide
  Antisense strand to SEQ ID NO: 2539042
uaauggaggaaagguccca

SEQ ID NO: 2539044 - RNA, 19 nt, Artificial Sequence
  Description of Artificial Sequence: Synthetic oligonucleotide
  Sense strand starting at position 1316 of SEQ ID NO: 1888521
ugggaggacgucugugaaa

SEQ ID NO: 2539045 - RNA, 19 nt, Artificial Sequence
  Description of Artificial Sequence: Synthetic oligonucleotide
  Antisense strand to SEQ ID NO: 2539044
uuucacagacguccuccca

SEQ ID NO: 2539046 - RNA, 19 nt, Artificial Sequence
  Description of Artificial Sequence: Synthetic oligonucleotide
  Sense strand starting at position 3488 of SEQ ID NO: 1888521
ggugccagacucuaguuaa

SEQ ID NO: 2539047 - RNA, 19 nt, Artificial Sequence
  Description of Artificial Sequence: Synthetic oligonucleotide
  Antisense strand to SEQ ID NO: 2539046
uuaacuagagucuggcacc

SEQ ID NO: 2539048 - RNA, 19 nt, Artificial Sequence
  Description of Artificial Sequence: Synthetic oligonucleotide
  Sense strand starting at position 910 of SEQ ID NO: 1888521
auuccugugccugauggau

SEQ ID NO: 2539049 - RNA, 19 nt, Artificial Sequence
  Description of Artificial Sequence: Synthetic oligonucleotide
  Antisense strand to SEQ ID NO: 2539048
auccaucaggcacaggaau

SEQ ID NO: 2539050 - RNA, 19 nt, Artificial Sequence
  Description of Artificial Sequence: Synthetic oligonucleotide
  Sense strand starting at position 3070 of SEQ ID NO: 1888521
caaguuucuuaggcaaaug

SEQ ID NO: 2539051 - RNA, 19 nt, Artificial Sequence
  Description of Artificial Sequence: Synthetic oligonucleotide
  Antisense strand to SEQ ID NO: 2539050
cauuugccuaagaaacuug

SEQ ID NO: 2539052 - RNA, 19 nt, Artificial Sequence
  Description of Artificial Sequence: Synthetic oligonucleotide
  Sense strand starting at position 3066 of SEQ ID NO: 1888521
agaccaaguuucuuaggca

SEQ ID NO: 2539053 - RNA, 19 nt, Artificial Sequence
  Description of Artificial Sequence: Synthetic oligonucleotide
  Antisense strand to SEQ ID NO: 2539052
ugccuaagaaacuuggucu

SEQ ID NO: 2539054 - RNA, 19 nt, Artificial Sequence
  Description of Artificial Sequence: Synthetic oligonucleotide
  Sense strand starting at position 2628 of SEQ ID NO: 1888521
gccacaugugcaggaaaga

SEQ ID NO: 2539055 - RNA, 19 nt, Artificial Sequence
  Description of Artificial Sequence: Synthetic oligonucleotide
  Antisense strand to SEQ ID NO: 2539054
ucuuuccugcacauguggc

SEQ ID NO: 2539056 - RNA, 19 nt, Artificial Sequence
  Description of Artificial Sequence: Synthetic oligonucleotide
  Sense strand starting at position 3780 of SEQ ID NO: 1888521
ccuaucacggccugaaaua

SEQ ID NO: 2539057 - RNA, 19 nt, Artificial Sequence
  Description of Artificial Sequence: Synthetic oligonucleotide
  Antisense strand to SEQ ID NO: 2539056
uauuucaggccgugauagg

SEQ ID NO: 2539058 - RNA, 19 nt, Artificial Sequence
  Description of Artificial Sequence: Synthetic oligonucleotide
  Sense strand starting at position 502 of SEQ ID NO: 1888521
cacugaaucuguccagguu

SEQ ID NO: 2539059 - RNA, 19 nt, Artificial Sequence
  Description of Artificial Sequence: Synthetic oligonucleotide
  Antisense strand to SEQ ID NO: 2539058
aaccuggacagauucagug

SEQ ID NO: 2539060 - RNA, 19 nt, Artificial Sequence
  Description of Artificial Sequence: Synthetic oligonucleotide
  Sense strand starting at position 2179 of SEQ ID NO: 1888521
gccauugguuaagcagaga

SEQ ID NO: 2539061 - RNA, 19 nt, Artificial Sequence
  Description of Artificial Sequence: Synthetic oligonucleotide
  Antisense strand to SEQ ID NO: 2539060
ucucugcuuaaccaauggc

SEQ ID NO: 2539062 - RNA, 19 nt, Artificial Sequence
  Description of Artificial Sequence: Synthetic oligonucleotide
  Sense strand starting at position 1215 of SEQ ID NO: 1888521
ugaggacuuccuuagcgca

SEQ ID NO: 2539063 - RNA, 19 nt, Artificial Sequence
  Description of Artificial Sequence: Synthetic oligonucleotide
  Antisense strand to SEQ ID NO: 2539062
ugcgcuaaggaaguccuca

SEQ ID NO: 2539064 - RNA, 19 nt, Artificial Sequence
  Description of Artificial Sequence: Synthetic oligonucleotide
  Sense strand starting at position 3491 of SEQ ID NO: 1888521
gccagacucuaguuaauuc

SEQ ID NO: 2539065 - RNA, 19 nt, Artificial Sequence
  Description of Artificial Sequence: Synthetic oligonucleotide
  Antisense strand to SEQ ID NO: 2539064
gaauuaacuagagucuggc

SEQ ID NO: 2539066 - RNA, 19 nt, Artificial Sequence
  Description of Artificial Sequence: Synthetic oligonucleotide
  Sense strand starting at position 909 of SEQ ID NO: 1888521
gauuccugugccugaugga

SEQ ID NO: 2539067 - RNA, 19 nt, Artificial Sequence
  Description of Artificial Sequence: Synthetic oligonucleotide
  Antisense strand to SEQ ID NO: 2539066
uccaucaggcacaggaauc

SEQ ID NO: 2539068 - RNA, 19 nt, Artificial Sequence
  Description of Artificial Sequence: Synthetic oligonucleotide
  Sense strand starting at position 906 of SEQ ID NO: 1888521
caggauuccugugccugau

SEQ ID NO: 2539069 - RNA, 19 nt, Artificial Sequence
  Description of Artificial Sequence: Synthetic oligonucleotide
  Antisense strand to SEQ ID NO: 2539068
aucaggcacaggaauccug

SEQ ID NO: 2539070 - RNA, 19 nt, Artificial Sequence
  Description of Artificial Sequence: Synthetic oligonucleotide
  Sense strand starting at position 3977 of SEQ ID NO: 1888521
ggcagucagcguuagggaa

SEQ ID NO: 2539071 - RNA, 19 nt, Artificial Sequence
  Description of Artificial Sequence: Synthetic oligonucleotide
  Antisense strand to SEQ ID NO: 2539070
uucccuaacgcugacugcc

SEQ ID NO: 2539072 - RNA, 19 nt, Artificial Sequence
  Description of Artificial Sequence: Synthetic oligonucleotide
  Sense strand starting at position 905 of SEQ ID NO: 1888521
ccaggauuccugugccuga

SEQ ID NO: 2539073 - RNA, 19 nt, Artificial Sequence
  Description of Artificial Sequence: Synthetic oligonucleotide
  Antisense strand to SEQ ID NO: 2539072
ucaggcacaggaauccugg

SEQ ID NO: 2539074 - RNA, 19 nt, Artificial Sequence
  Description of Artificial Sequence: Synthetic oligonucleotide
  Sense strand starting at position 1274 of SEQ ID NO: 1888521
cgaggaguuuccaggacug

SEQ ID NO: 2539075 - RNA, 19 nt, Artificial Sequence
  Description of Artificial Sequence: Synthetic oligonucleotide
  Antisense strand to SEQ ID NO: 2539074
caguccuggaaacuccucg

SEQ ID NO: 2539076 - RNA, 19 nt, Artificial Sequence
  Description of Artificial Sequence: Synthetic oligonucleotide
  Sense strand starting at position 308 of SEQ ID NO: 1888521
agaaguuaaucacaagaau

SEQ ID NO: 2539077 - RNA, 19 nt, Artificial Sequence
  Description of Artificial Sequence: Synthetic oligonucleotide
  Antisense strand to SEQ ID NO: 2539076
auucuugugauuaacuucu

SEQ ID NO: 2539078 - RNA, 19 nt, Artificial Sequence
  Description of Artificial Sequence: Synthetic oligonucleotide
  Sense strand starting at position 127 of SEQ ID NO: 1888521
ggacgucagucaccucuau

SEQ ID NO: 2539079 - RNA, 19 nt, Artificial Sequence
  Description of Artificial Sequence: Synthetic oligonucleotide
  Antisense strand to SEQ ID NO: 2539078
auagaggugacugacgucc

SEQ ID NO: 2539080 - RNA, 19 nt, Artificial Sequence
  Description of Artificial Sequence: Synthetic oligonucleotide
  Sense strand starting at position 5 of SEQ ID NO: 1888521
uuguucuugucacuuggau

SEQ ID NO: 2539081 - RNA, 19 nt, Artificial Sequence
  Description of Artificial Sequence: Synthetic oligonucleotide
  Antisense strand to SEQ ID NO: 2539080
auccaagugacaagaacaa

SEQ ID NO: 2539082 - RNA, 19 nt, Artificial Sequence
  Description of Artificial Sequence: Synthetic oligonucleotide
  Sense strand starting at position 395 of SEQ ID NO: 1888521
uggcuucuguucuuaccaa

SEQ ID NO: 2539083 - RNA, 19 nt, Artificial Sequence
  Description of Artificial Sequence: Synthetic oligonucleotide
  Antisense strand to SEQ ID NO: 2539082
uugguaagaacagaagcca

SEQ ID NO: 2539084 - RNA, 19 nt, Artificial Sequence
  Description of Artificial Sequence: Synthetic oligonucleotide
  Sense strand starting at position 83 of SEQ ID NO: 1888521
guuggcaggcuaugugaaa

SEQ ID NO: 2539085 - RNA, 19 nt, Artificial Sequence
  Description of Artificial Sequence: Synthetic oligonucleotide
  Antisense strand to SEQ ID NO: 2539084
uuucacauagccugccaac

SEQ ID NO: 2539086 - RNA, 19 nt, Artificial Sequence
  Description of Artificial Sequence: Synthetic oligonucleotide
  Sense strand starting at position 3700 of SEQ ID NO: 1888521
agucucugugucgauguua

SEQ ID NO: 2539087 - RNA, 19 nt, Artificial Sequence
  Description of Artificial Sequence: Synthetic oligonucleotide
  Antisense strand to SEQ ID NO: 2539086
uaacaucgacacagagacu

SEQ ID NO: 2539088 - RNA, 19 nt, Artificial Sequence
  Description of Artificial Sequence: Synthetic oligonucleotide
  Sense strand starting at position 2776 of SEQ ID NO: 1888521
agacauuucuucugagcca

SEQ ID NO: 2539089 - RNA, 19 nt, Artificial Sequence
  Description of Artificial Sequence: Synthetic oligonucleotide
  Antisense strand to SEQ ID NO: 2539088
uggcucagaagaaaugucu

SEQ ID NO: 2539090 - RNA, 19 nt, Artificial Sequence
  Description of Artificial Sequence: Synthetic oligonucleotide
  Sense strand starting at position 3501 of SEQ ID NO: 1888521
aguuaauucucucaggaga

SEQ ID NO: 2539091 - RNA, 19 nt, Artificial Sequence
  Description of Artificial Sequence: Synthetic oligonucleotide
  Antisense strand to SEQ ID NO: 2539090
ucuccugagagaauuaacu

SEQ ID NO: 2539092 - RNA, 19 nt, Artificial Sequence
  Description of Artificial Sequence: Synthetic oligonucleotide
  Sense strand starting at position 2736 of SEQ ID NO: 1888521
ggcagugucggcgaagagu

SEQ ID NO: 2539093 - RNA, 19 nt, Artificial Sequence
  Description of Artificial Sequence: Synthetic oligonucleotide
  Antisense strand to SEQ ID NO: 2539092
acucuucgccgacacugcc

SEQ ID NO: 2539094 - RNA, 19 nt, Artificial Sequence
  Description of Artificial Sequence: Synthetic oligonucleotide
  Sense strand starting at position 3503 of SEQ ID NO: 1888521
uuaauucucucaggagaaa

SEQ ID NO: 2539095 - RNA, 19 nt, Artificial Sequence
  Description of Artificial Sequence: Synthetic oligonucleotide
  Antisense strand to SEQ ID NO: 2539094
uuucuccugagagaauuaa

SEQ ID NO: 2539096 - RNA, 19 nt, Artificial Sequence
  Description of Artificial Sequence: Synthetic oligonucleotide
  Sense strand starting at position 2789 of SEQ ID NO: 1888521
gagccaauaugugaccaau

SEQ ID NO: 2539097 - RNA, 19 nt, Artificial Sequence
  Description of Artificial Sequence: Synthetic oligonucleotide
  Antisense strand to SEQ ID NO: 2539096
auuggucacauauuggcuc

SEQ ID NO: 2539098 - RNA, 19 nt, Artificial Sequence
  Description of Artificial Sequence: Synthetic oligonucleotide
  Sense strand starting at position 3067 of SEQ ID NO: 1888521
gaccaaguuucuuaggcaa

SEQ ID NO: 2539099 - RNA, 19 nt, Artificial Sequence
  Description of Artificial Sequence: Synthetic oligonucleotide
  Antisense strand to SEQ ID NO: 2539098
uugccuaagaaacuugguc

SEQ ID NO: 2539100 - RNA, 19 nt, Artificial Sequence
  Description of Artificial Sequence: Synthetic oligonucleotide
  Sense strand starting at position 3672 of SEQ ID NO: 1888522
gacccuagaugagucauga

SEQ ID NO: 2539101 - RNA, 19 nt, Artificial Sequence
  Description of Artificial Sequence: Synthetic oligonucleotide
  Antisense strand to SEQ ID NO: 2539100
ucaugacucaucuaggguc

SEQ ID NO: 2539102 - RNA, 19 nt, Artificial Sequence
  Description of Artificial Sequence: Synthetic oligonucleotide
  Sense strand starting at position 217 of SEQ ID NO: 1888522
gguccucaccauggagaaa

SEQ ID NO: 2539103 - RNA, 19 nt, Artificial Sequence
  Description of Artificial Sequence: Synthetic oligonucleotide
  Antisense strand to SEQ ID NO: 2539102
uuucuccauggugaggacc

SEQ ID NO: 2539104 - RNA, 19 nt, Artificial Sequence
  Description of Artificial Sequence: Synthetic oligonucleotide
  Sense strand starting at position 216 of SEQ ID NO: 1888522
agguccucaccauggagaa

SEQ ID NO: 2539105 - RNA, 19 nt, Artificial Sequence
  Description of Artificial Sequence: Synthetic oligonucleotide
  Antisense strand to SEQ ID NO: 2539104
uucuccauggugaggaccu

SEQ ID NO: 2539106 - RNA, 19 nt, Artificial Sequence
  Description of Artificial Sequence: Synthetic oligonucleotide
  Sense strand starting at position 985 of SEQ ID NO: 1888522
ugugcaguccguguagaca

SEQ ID NO: 2539107 - RNA, 19 nt, Artificial Sequence
  Description of Artificial Sequence: Synthetic oligonucleotide
  Antisense strand to SEQ ID NO: 2539106
ugucuacacggacugcaca

SEQ ID NO: 2539108 - RNA, 19 nt, Artificial Sequence
  Description of Artificial Sequence: Synthetic oligonucleotide
  Sense strand starting at position 365 of SEQ ID NO: 1888522
ugggucuucccugaccaga

SEQ ID NO: 2539109 - RNA, 19 nt, Artificial Sequence
  Description of Artificial Sequence: Synthetic oligonucleotide
  Antisense strand to SEQ ID NO: 2539108
ucuggucagggaagaccca

SEQ ID NO: 2539110 - RNA, 19 nt, Artificial Sequence
  Description of Artificial Sequence: Synthetic oligonucleotide
  Sense strand starting at position 210 of SEQ ID NO: 1888522
ccaagaagguccucaccau

SEQ ID NO: 2539111 - RNA, 19 nt, Artificial Sequence
  Description of Artificial Sequence: Synthetic oligonucleotide
  Antisense strand to SEQ ID NO: 2539110
auggugaggaccuucuugg

SEQ ID NO: 2539112 - RNA, 19 nt, Artificial Sequence
  Description of Artificial Sequence: Synthetic oligonucleotide
  Sense strand starting at position 3101 of SEQ ID NO: 1888522
cugccuuguccagaggaag

SEQ ID NO: 2539113 - RNA, 19 nt, Artificial Sequence
  Description of Artificial Sequence: Synthetic oligonucleotide
  Antisense strand to SEQ ID NO: 2539112
cuuccucuggacaaggcag

SEQ ID NO: 2539114 - RNA, 19 nt, Artificial Sequence
  Description of Artificial Sequence: Synthetic oligonucleotide
  Sense strand starting at position 2509 of SEQ ID NO: 1888522
ggacccaggccugauguua

SEQ ID NO: 2539115 - RNA, 19 nt, Artificial Sequence
  Description of Artificial Sequence: Synthetic oligonucleotide
  Antisense strand to SEQ ID NO: 2539114
uaacaucaggccugggucc

SEQ ID NO: 2539116 - RNA, 19 nt, Artificial Sequence
  Description of Artificial Sequence: Synthetic oligonucleotide
  Sense strand starting at position 360 of SEQ ID NO: 1888522
ugaaaugggucuucccuga

SEQ ID NO: 2539117 - RNA, 19 nt, Artificial Sequence
  Description of Artificial Sequence: Synthetic oligonucleotide
  Antisense strand to SEQ ID NO: 2539116
ucagggaagacccauuuca

SEQ ID NO: 2539118 - RNA, 19 nt, Artificial Sequence
  Description of Artificial Sequence: Synthetic oligonucleotide
  Sense strand starting at position 348 of SEQ ID NO: 1888522
gaccucauggccugaaaug

SEQ ID NO: 2539119 - RNA, 19 nt, Artificial Sequence
  Description of Artificial Sequence: Synthetic oligonucleotide
  Antisense strand to SEQ ID NO: 2539118
cauuucaggccaugagguc

SEQ ID NO: 2539120 - RNA, 19 nt, Artificial Sequence
  Description of Artificial Sequence: Synthetic oligonucleotide
  Sense strand starting at position 367 of SEQ ID NO: 1888522
ggucuucccugaccagaca

SEQ ID NO: 2539121 - RNA, 19 nt, Artificial Sequence
  Description of Artificial Sequence: Synthetic oligonucleotide
  Antisense strand to SEQ ID NO: 2539120
ugucuggucagggaagacc

SEQ ID NO: 2539122 - RNA, 19 nt, Artificial Sequence
  Description of Artificial Sequence: Synthetic oligonucleotide
  Sense strand starting at position 2983 of SEQ ID NO: 1888522
gguccacugauaugaagca

SEQ ID NO: 2539123 - RNA, 19 nt, Artificial Sequence
  Description of Artificial Sequence: Synthetic oligonucleotide
  Antisense strand to SEQ ID NO: 2539122
ugcuucauaucaguggacc

SEQ ID NO: 2539124 - RNA, 19 nt, Artificial Sequence
  Description of Artificial Sequence: Synthetic oligonucleotide
  Sense strand starting at position 2664 of SEQ ID NO: 1888522
gcgucauggagccagagaa

SEQ ID NO: 2539125 - RNA, 19 nt, Artificial Sequence
  Description of Artificial Sequence: Synthetic oligonucleotide
  Antisense strand to SEQ ID NO: 2539124
uucucuggcuccaugacgc

SEQ ID NO: 2539126 - RNA, 19 nt, Artificial Sequence
  Description of Artificial Sequence: Synthetic oligonucleotide
  Sense strand starting at position 505 of SEQ ID NO: 1888522
gggccucugcuccagauua

SEQ ID NO: 2539127 - RNA, 19 nt, Artificial Sequence
  Description of Artificial Sequence: Synthetic oligonucleotide
  Antisense strand to SEQ ID NO: 2539126
uaaucuggagcagaggccc

SEQ ID NO: 2539128 - RNA, 19 nt, Artificial Sequence
  Description of Artificial Sequence: Synthetic oligonucleotide
  Sense strand starting at position 2517 of SEQ ID NO: 1888522
gccugauguuacccauaac

SEQ ID NO: 2539129 - RNA, 19 nt, Artificial Sequence
  Description of Artificial Sequence: Synthetic oligonucleotide
  Antisense strand to SEQ ID NO: 2539128
guuauggguaacaucaggc

SEQ ID NO: 2539130 - RNA, 19 nt, Artificial Sequence
  Description of Artificial Sequence: Synthetic oligonucleotide
  Sense strand starting at position 2950 of SEQ ID NO: 1888522
gccugaggucuugauggcu

SEQ ID NO: 2539131 - RNA, 19 nt, Artificial Sequence
  Description of Artificial Sequence: Synthetic oligonucleotide
  Antisense strand to SEQ ID NO: 2539130
agccaucaagaccucaggc

SEQ ID NO: 2539132 - RNA, 19 nt, Artificial Sequence
  Description of Artificial Sequence: Synthetic oligonucleotide
  Sense strand starting at position 2334 of SEQ ID NO: 1888522
gcuuccuggccucacgaaa

SEQ ID NO: 2539133 - RNA, 19 nt, Artificial Sequence
  Description of Artificial Sequence: Synthetic oligonucleotide
  Antisense strand to SEQ ID NO: 2539132
uuucgugaggccaggaagc

SEQ ID NO: 2539134 - RNA, 19 nt, Artificial Sequence
  Description of Artificial Sequence: Synthetic oligonucleotide
  Sense strand starting at position 576 of SEQ ID NO: 1888522
gacauaugccuaugugcuc

SEQ ID NO: 2539135 - RNA, 19 nt, Artificial Sequence
  Description of Artificial Sequence: Synthetic oligonucleotide
  Antisense strand to SEQ ID NO: 2539134
gagcacauaggcauauguc

SEQ ID NO: 2539136 - RNA, 19 nt, Artificial Sequence
  Description of Artificial Sequence: Synthetic oligonucleotide
  Sense strand starting at position 62 of SEQ ID NO: 1888522
ggagguguggccugccaau

SEQ ID NO: 2539137 - RNA, 19 nt, Artificial Sequence
  Description of Artificial Sequence: Synthetic oligonucleotide
  Antisense strand to SEQ ID NO: 2539136
auuggcaggccacaccucc

SEQ ID NO: 2539138 - RNA, 19 nt, Artificial Sequence
  Description of Artificial Sequence: Synthetic oligonucleotide
  Sense strand starting at position 3775 of SEQ ID NO: 1888522
gaggacacuugcgugcuua

SEQ ID NO: 2539139 - RNA, 19 nt, Artificial Sequence
  Description of Artificial Sequence: Synthetic oligonucleotide
  Antisense strand to SEQ ID NO: 2539138
uaagcacgcaaguguccuc

SEQ ID NO: 2539140 - RNA, 19 nt, Artificial Sequence
  Description of Artificial Sequence: Synthetic oligonucleotide
  Sense strand starting at position 3660 of SEQ ID NO: 1888522
agggauguaucagacccua

SEQ ID NO: 2539141 - RNA, 19 nt, Artificial Sequence
  Description of Artificial Sequence: Synthetic oligonucleotide
  Antisense strand to SEQ ID NO: 2539140
uagggucugauacaucccu

SEQ ID NO: 2539142 - RNA, 19 nt, Artificial Sequence
  Description of Artificial Sequence: Synthetic oligonucleotide
  Sense strand starting at position 3697 of SEQ ID NO: 1888522
gaccaucagucugaggaca

SEQ ID NO: 2539143 - RNA, 19 nt, Artificial Sequence
  Description of Artificial Sequence: Synthetic oligonucleotide
  Antisense strand to SEQ ID NO: 2539142
uguccucagacugaugguc

SEQ ID NO: 2539144 - RNA, 19 nt, Artificial Sequence
  Description of Artificial Sequence: Synthetic oligonucleotide
  Sense strand starting at position 998 of SEQ ID NO: 1888522
uagacaugugcacgugcaa

SEQ ID NO: 2539145 - RNA, 19 nt, Artificial Sequence
  Description of Artificial Sequence: Synthetic oligonucleotide
  Antisense strand to SEQ ID NO: 2539144
uugcacgugcacaugucua

SEQ ID NO: 2539146 - RNA, 19 nt, Artificial Sequence
  Description of Artificial Sequence: Synthetic oligonucleotide
  Sense strand starting at position 3779 of SEQ ID NO: 1888522
acacuugcgugcuuacuau

SEQ ID NO: 2539147 - RNA, 19 nt, Artificial Sequence
  Description of Artificial Sequence: Synthetic oligonucleotide
  Antisense strand to SEQ ID NO: 2539146
auaguaagcacgcaagugu

SEQ ID NO: 2539148 - RNA, 19 nt, Artificial Sequence
  Description of Artificial Sequence: Synthetic oligonucleotide
  Sense strand starting at position 3676 of SEQ ID NO: 1888522
cuagaugagucaugaggca

SEQ ID NO: 2539149 - RNA, 19 nt, Artificial Sequence
  Description of Artificial Sequence: Synthetic oligonucleotide
  Antisense strand to SEQ ID NO: 2539148
ugccucaugacucaucuag

SEQ ID NO: 2539150 - RNA, 19 nt, Artificial Sequence
  Description of Artificial Sequence: Synthetic oligonucleotide
  Sense strand starting at position 778 of SEQ ID NO: 1888522
gggaguggguauugugaaa

SEQ ID NO: 2539151 - RNA, 19 nt, Artificial Sequence
  Description of Artificial Sequence: Synthetic oligonucleotide
  Antisense strand to SEQ ID NO: 2539150
uuucacaauacccacuccc

SEQ ID NO: 2539152 - RNA, 19 nt, Artificial Sequence
  Description of Artificial Sequence: Synthetic oligonucleotide
  Sense strand starting at position 629 of SEQ ID NO: 1888522
gcagaugcauaccaaguua

SEQ ID NO: 2539153 - RNA, 19 nt, Artificial Sequence
  Description of Artificial Sequence: Synthetic oligonucleotide
  Antisense strand to SEQ ID NO: 2539152
uaacuugguaugcaucugc

SEQ ID NO: 2539154 - RNA, 19 nt, Artificial Sequence
  Description of Artificial Sequence: Synthetic oligonucleotide
  Sense strand starting at position 3746 of SEQ ID NO: 1888522
gcugcucugugcuugcaga

SEQ ID NO: 2539155 - RNA, 19 nt, Artificial Sequence
  Description of Artificial Sequence: Synthetic oligonucleotide
  Antisense strand to SEQ ID NO: 2539154
ucugcaagcacagagcagc

SEQ ID NO: 2539156 - RNA, 19 nt, Artificial Sequence
  Description of Artificial Sequence: Synthetic oligonucleotide
  Sense strand starting at position 329 of SEQ ID NO: 1888522
gccuguuggucacaguguu

SEQ ID NO: 2539157 - RNA, 19 nt, Artificial Sequence
  Description of Artificial Sequence: Synthetic oligonucleotide
  Antisense strand to SEQ ID NO: 2539156
aacacugugaccaacaggc

SEQ ID NO: 2539158 - RNA, 19 nt, Artificial Sequence
  Description of Artificial Sequence: Synthetic oligonucleotide
  Sense strand starting at position 831 of SEQ ID NO: 1888522
gcaggcaugucgcguacau

SEQ ID NO: 2539159 - RNA, 19 nt, Artificial Sequence
  Description of Artificial Sequence: Synthetic oligonucleotide
  Antisense strand to SEQ ID NO: 2539158
auguacgcgacaugccugc

SEQ ID NO: 2539160 - RNA, 19 nt, Artificial Sequence
  Description of Artificial Sequence: Synthetic oligonucleotide
  Sense strand starting at position 3617 of SEQ ID NO: 1888523
cucucugaaccaugagaac

SEQ ID NO: 2539161 - RNA, 19 nt, Artificial Sequence
  Description of Artificial Sequence: Synthetic oligonucleotide
  Antisense strand to SEQ ID NO: 2539160
guucucaugguucagagag

SEQ ID NO: 2539162 - RNA, 19 nt, Artificial Sequence
  Description of Artificial Sequence: Synthetic oligonucleotide
  Sense strand starting at position 2529 of SEQ ID NO: 1888523
cgucuuguuccuguuuaca

SEQ ID NO: 2539163 - RNA, 19 nt, Artificial Sequence
  Description of Artificial Sequence: Synthetic oligonucleotide
  Antisense strand to SEQ ID NO: 2539162
uguaaacaggaacaagacg

SEQ ID NO: 2539164 - RNA, 19 nt, Artificial Sequence
  Description of Artificial Sequence: Synthetic oligonucleotide
  Sense strand starting at position 3626 of SEQ ID NO: 1888523
ccaugagaacuuggguuau

SEQ ID NO: 2539165 - RNA, 19 nt, Artificial Sequence
  Description of Artificial Sequence: Synthetic oligonucleotide
  Antisense strand to SEQ ID NO: 2539164
auaacccaaguucucaugg

SEQ ID NO: 2539166 - RNA, 19 nt, Artificial Sequence
  Description of Artificial Sequence: Synthetic oligonucleotide
  Sense strand starting at position 2012 of SEQ ID NO: 1888523
uucugugagagaugacacu

SEQ ID NO: 2539167 - RNA, 19 nt, Artificial Sequence
  Description of Artificial Sequence: Synthetic oligonucleotide
  Antisense strand to SEQ ID NO: 2539166
agugucaucucucacagaa

SEQ ID NO: 2539168 - RNA, 19 nt, Artificial Sequence
  Description of Artificial Sequence: Synthetic oligonucleotide
  Sense strand starting at position 2104 of SEQ ID NO: 1888523
cuuccaugagcaugaaaug

SEQ ID NO: 2539169 - RNA, 19 nt, Artificial Sequence
  Description of Artificial Sequence: Synthetic oligonucleotide
  Antisense strand to SEQ ID NO: 2539168
cauuucaugcucauggaag

SEQ ID NO: 2539170 - RNA, 19 nt, Artificial Sequence
  Description of Artificial Sequence: Synthetic oligonucleotide
  Sense strand starting at position 3630 of SEQ ID NO: 1888523
gagaacuuggguuaugcga

SEQ ID NO: 2539171 - RNA, 19 nt, Artificial Sequence
  Description of Artificial Sequence: Synthetic oligonucleotide
  Antisense strand to SEQ ID NO: 2539170
ucgcauaacccaaguucuc

SEQ ID NO: 2539172 - RNA, 19 nt, Artificial Sequence
  Description of Artificial Sequence: Synthetic oligonucleotide
  Sense strand starting at position 3412 of SEQ ID NO: 1888523
aauacagagccaugugaug

SEQ ID NO: 2539173 - RNA, 19 nt, Artificial Sequence
  Description of Artificial Sequence: Synthetic oligonucleotide
  Antisense strand to SEQ ID NO: 2539172
caucacauggcucuguauu

SEQ ID NO: 2539174 - RNA, 19 nt, Artificial Sequence
  Description of Artificial Sequence: Synthetic oligonucleotide
  Sense strand starting at position 2489 of SEQ ID NO: 1888523
uugugugaugucuaauaaa

SEQ ID NO: 2539175 - RNA, 19 nt, Artificial Sequence
  Description of Artificial Sequence: Synthetic oligonucleotide
  Antisense strand to SEQ ID NO: 2539174
uuuauuagacaucacacaa

SEQ ID NO: 2539176 - RNA, 19 nt, Artificial Sequence
  Description of Artificial Sequence: Synthetic oligonucleotide
  Sense strand starting at position 2048 of SEQ ID NO: 1888523
uguauugaaucucuagacu

SEQ ID NO: 2539177 - RNA, 19 nt, Artificial Sequence
  Description of Artificial Sequence: Synthetic oligonucleotide
  Antisense strand to SEQ ID NO: 2539176
agucuagagauucaauaca

SEQ ID NO: 2539178 - RNA, 19 nt, Artificial Sequence
  Description of Artificial Sequence: Synthetic oligonucleotide
  Sense strand starting at position 2481 of SEQ ID NO: 1888523
uugcauauuugugugaugu

SEQ ID NO: 2539179 - RNA, 19 nt, Artificial Sequence
  Description of Artificial Sequence: Synthetic oligonucleotide
  Antisense strand to SEQ ID NO: 2539178
acaucacacaaauaugcaa

SEQ ID NO: 2539180 - RNA, 19 nt, Artificial Sequence
  Description of Artificial Sequence: Synthetic oligonucleotide
  Sense strand starting at position 3536 of SEQ ID NO: 1888523
ucccguuugagagaugcaa

SEQ ID NO: 2539181 - RNA, 19 nt, Artificial Sequence
  Description of Artificial Sequence: Synthetic oligonucleotide
  Antisense strand to SEQ ID NO: 2539180
uugcaucucucaaacggga

SEQ ID NO: 2539182 - RNA, 19 nt, Artificial Sequence
  Description of Artificial Sequence: Synthetic oligonucleotide
  Sense strand starting at position 2482 of SEQ ID NO: 1888523
ugcauauuugugugauguc

SEQ ID NO: 2539183 - RNA, 19 nt, Artificial Sequence
  Description of Artificial Sequence: Synthetic oligonucleotide
  Antisense strand to SEQ ID NO: 2539182
gacaucacacaaauaugca

SEQ ID NO: 2539184 - RNA, 19 nt, Artificial Sequence
  Description of Artificial Sequence: Synthetic oligonucleotide
  Sense strand starting at position 2113 of SEQ ID NO: 1888523
gcaugaaaugacuguccau

SEQ ID NO: 2539185 - RNA, 19 nt, Artificial Sequence
  Description of Artificial Sequence: Synthetic oligonucleotide
  Antisense strand to SEQ ID NO: 2539184
auggacagucauuucaugc

SEQ ID NO: 2539186 - RNA, 19 nt, Artificial Sequence
  Description of Artificial Sequence: Synthetic oligonucleotide
  Sense strand starting at position 3559 of SEQ ID NO: 1888523
gccgucuuccaggaaacca

SEQ ID NO: 2539187 - RNA, 19 nt, Artificial Sequence
  Description of Artificial Sequence: Synthetic oligonucleotide
  Antisense strand to SEQ ID NO: 2539186
ugguuuccuggaagacggc

SEQ ID NO: 2539188 - RNA, 19 nt, Artificial Sequence
  Description of Artificial Sequence: Synthetic oligonucleotide
  Sense strand starting at position 3461 of SEQ ID NO: 1888523
ggcaccaucuaguuuggga

SEQ ID NO: 2539189 - RNA, 19 nt, Artificial Sequence
  Description of Artificial Sequence: Synthetic oligonucleotide
  Antisense strand to SEQ ID NO: 2539188
ucccaaacuagauggugcc

SEQ ID NO: 2539190 - RNA, 19 nt, Artificial Sequence
  Description of Artificial Sequence: Synthetic oligonucleotide
  Sense strand starting at position 2005 of SEQ ID NO: 1888523
uuuccaguucugugagaga

SEQ ID NO: 2539191 - RNA, 19 nt, Artificial Sequence
  Description of Artificial Sequence: Synthetic oligonucleotide
  Antisense strand to SEQ ID NO: 2539190
ucucucacagaacuggaaa

SEQ ID NO: 2539192 - RNA, 19 nt, Artificial Sequence
  Description of Artificial Sequence: Synthetic oligonucleotide
  Sense strand starting at position 2211 of SEQ ID NO: 1888523
uccucuguggcauaucauu

SEQ ID NO: 2539193 - RNA, 19 nt, Artificial Sequence
  Description of Artificial Sequence: Synthetic oligonucleotide
  Antisense strand to SEQ ID NO: 2539192
aaugauaugccacagagga

SEQ ID NO: 2539194 - RNA, 19 nt, Artificial Sequence
  Description of Artificial Sequence: Synthetic oligonucleotide
  Sense strand starting at position 3399 of SEQ ID NO: 1888523
ugccguuuccuggaauaca

SEQ ID NO: 2539195 - RNA, 19 nt, Artificial Sequence
  Description of Artificial Sequence: Synthetic oligonucleotide
  Antisense strand to SEQ ID NO: 2539194
uguauuccaggaaacggca

SEQ ID NO: 2539196 - RNA, 19 nt, Artificial Sequence
  Description of Artificial Sequence: Synthetic oligonucleotide
  Sense strand starting at position 2387 of SEQ ID NO: 1888523
cuuuacauguuuguaaauc

SEQ ID NO: 2539197 - RNA, 19 nt, Artificial Sequence
  Description of Artificial Sequence: Synthetic oligonucleotide
  Antisense strand to SEQ ID NO: 2539196
gauuuacaaacauguaaag

SEQ ID NO: 2539198 - RNA, 19 nt, Artificial Sequence
  Description of Artificial Sequence: Synthetic oligonucleotide
  Sense strand starting at position 2641 of SEQ ID NO: 1888523
gauggauucuggcucuugu

SEQ ID NO: 2539199 - RNA, 19 nt, Artificial Sequence
  Description of Artificial Sequence: Synthetic oligonucleotide
  Antisense strand to SEQ ID NO: 2539198
acaagagccagaauccauc

SEQ ID NO: 2539200 - RNA, 19 nt, Artificial Sequence
  Description of Artificial Sequence: Synthetic oligonucleotide
  Sense strand starting at position 3827 of SEQ ID NO: 1888523
aagggcugagcaugucauu

SEQ ID NO: 2539201 - RNA, 19 nt, Artificial Sequence
  Description of Artificial Sequence: Synthetic oligonucleotide
  Antisense strand to SEQ ID NO: 2539200
aaugacaugcucagcccuu

SEQ ID NO: 2539202 - RNA, 19 nt, Artificial Sequence
  Description of Artificial Sequence: Synthetic oligonucleotide
  Sense strand starting at position 2575 of SEQ ID NO: 1888523
ucuguaguagguuagcuau

SEQ ID NO: 2539203 - RNA, 19 nt, Artificial Sequence
  Description of Artificial Sequence: Synthetic oligonucleotide
  Antisense strand to SEQ ID NO: 2539202
auagcuaaccuacuacaga

SEQ ID NO: 2539204 - RNA, 19 nt, Artificial Sequence
  Description of Artificial Sequence: Synthetic oligonucleotide
  Sense strand starting at position 2385 of SEQ ID NO: 1888523
ggcuuuacauguuuguaaa

SEQ ID NO: 2539205 - RNA, 19 nt, Artificial Sequence
  Description of Artificial Sequence: Synthetic oligonucleotide
  Antisense strand to SEQ ID NO: 2539204
uuuacaaacauguaaagcc

SEQ ID NO: 2539206 - RNA, 19 nt, Artificial Sequence
  Description of Artificial Sequence: Synthetic oligonucleotide
  Sense strand starting at position 3005 of SEQ ID NO: 1888523
ccaucauagcuguagcuuu

SEQ ID NO: 2539207 - RNA, 19 nt, Artificial Sequence
  Description of Artificial Sequence: Synthetic oligonucleotide
  Antisense strand to SEQ ID NO: 2539206
aaagcuacagcuaugaugg

SEQ ID NO: 2539208 - RNA, 19 nt, Artificial Sequence
  Description of Artificial Sequence: Synthetic oligonucleotide
  Sense strand starting at position 3531 of SEQ ID NO: 1888523
ucuggucccguuugagaga

SEQ ID NO: 2539209 - RNA, 19 nt, Artificial Sequence
  Description of Artificial Sequence: Synthetic oligonucleotide
  Antisense strand to SEQ ID NO: 2539208
ucucucaaacgggaccaga

SEQ ID NO: 2539210 - RNA, 19 nt, Artificial Sequence
  Description of Artificial Sequence: Synthetic oligonucleotide
  Sense strand starting at position 2382 of SEQ ID NO: 1888523
ggaggcuuuacauguuugu

SEQ ID NO: 2539211 - RNA, 19 nt, Artificial Sequence
  Description of Artificial Sequence: Synthetic oligonucleotide
  Antisense strand to SEQ ID NO: 2539210
acaaacauguaaagccucc

SEQ ID NO: 2539212 - RNA, 19 nt, Artificial Sequence
  Description of Artificial Sequence: Synthetic oligonucleotide
  Sense strand starting at position 3873 of SEQ ID NO: 1888523
cuguuagggagcuguuauu

SEQ ID NO: 2539213 - RNA, 19 nt, Artificial Sequence
  Description of Artificial Sequence: Synthetic oligonucleotide
  Antisense strand to SEQ ID NO: 2539212
aauaacagcucccuaacag

SEQ ID NO: 2539214 - RNA, 19 nt, Artificial Sequence
  Description of Artificial Sequence: Synthetic oligonucleotide
  Sense strand starting at position 2386 of SEQ ID NO: 1888523
gcuuuacauguuuguaaau

SEQ ID NO: 2539215 - RNA, 19 nt, Artificial Sequence
  Description of Artificial Sequence: Synthetic oligonucleotide
  Antisense strand to SEQ ID NO: 2539214
auuuacaaacauguaaagc

SEQ ID NO: 2539216 - RNA, 19 nt, Artificial Sequence
  Description of Artificial Sequence: Synthetic oligonucleotide
  Sense strand starting at position 3853 of SEQ ID NO: 1888523
uucuguuuaucuuuccgga

SEQ ID NO: 2539217 - RNA, 19 nt, Artificial Sequence
  Description of Artificial Sequence: Synthetic oligonucleotide
  Antisense strand to SEQ ID NO: 2539216
uccggaaagauaaacagaa

SEQ ID NO: 2539218 - RNA, 19 nt, Artificial Sequence
  Description of Artificial Sequence: Synthetic oligonucleotide
  Sense strand starting at position 3266 of SEQ ID NO: 1888523
aaguuucgccagugacuga

SEQ ID NO: 2539219 - RNA, 19 nt, Artificial Sequence
  Description of Artificial Sequence: Synthetic oligonucleotide
  Antisense strand to SEQ ID NO: 2539218
ucagucacuggcgaaacuu

SEQ ID NO: 2539220 - RNA, 19 nt, Artificial Sequence
  Description of Artificial Sequence: Synthetic oligonucleotide
  Sense strand starting at position 2594 of SEQ ID NO: 1888523
ggcuuugucguauacagcu

SEQ ID NO: 2539221 - RNA, 19 nt, Artificial Sequence
  Description of Artificial Sequence: Synthetic oligonucleotide
  Antisense strand to SEQ ID NO: 2539220
agcuguauacgacaaagcc

SEQ ID NO: 2539222 - RNA, 19 nt, Artificial Sequence
  Description of Artificial Sequence: Synthetic oligonucleotide
  Sense strand starting at position 2581 of SEQ ID NO: 1888523
guagguuagcuauggcuuu

SEQ ID NO: 2539223 - RNA, 19 nt, Artificial Sequence
  Description of Artificial Sequence: Synthetic oligonucleotide
  Antisense strand to SEQ ID NO: 2539222
aaagccauagcuaaccuac

SEQ ID NO: 2539224 - RNA, 19 nt, Artificial Sequence
  Description of Artificial Sequence: Synthetic oligonucleotide
  Sense strand starting at position 3653 of SEQ ID NO: 1888523
cugccugucaguugagcau

SEQ ID NO: 2539225 - RNA, 19 nt, Artificial Sequence
  Description of Artificial Sequence: Synthetic oligonucleotide
  Antisense strand to SEQ ID NO: 2539224
augcucaacugacaggcag

SEQ ID NO: 2539226 - RNA, 19 nt, Artificial Sequence
  Description of Artificial Sequence: Synthetic oligonucleotide
  Sense strand starting at position 2485 of SEQ ID NO: 1888523
auauuugugugaugucuaa

SEQ ID NO: 2539227 - RNA, 19 nt, Artificial Sequence
  Description of Artificial Sequence: Synthetic oligonucleotide
  Antisense strand to SEQ ID NO: 2539226
uuagacaucacacaaauau

SEQ ID NO: 2539228 - RNA, 19 nt, Artificial Sequence
  Description of Artificial Sequence: Synthetic oligonucleotide
  Sense strand starting at position 2008 of SEQ ID NO: 1888523
ccaguucugugagagauga

SEQ ID NO: 2539229 - RNA, 19 nt, Artificial Sequence
  Description of Artificial Sequence: Synthetic oligonucleotide
  Antisense strand to SEQ ID NO: 2539228
ucaucucucacagaacugg

SEQ ID NO: 2539230 - RNA, 19 nt, Artificial Sequence
  Description of Artificial Sequence: Synthetic oligonucleotide
  Sense strand starting at position 3262 of SEQ ID NO: 1888523
gcucaaguuucgccaguga

SEQ ID NO: 2539231 - RNA, 19 nt, Artificial Sequence
  Description of Artificial Sequence: Synthetic oligonucleotide
  Antisense strand to SEQ ID NO: 2539230
ucacuggcgaaacuugagc

SEQ ID NO: 2539232 - RNA, 19 nt, Artificial Sequence
  Description of Artificial Sequence: Synthetic oligonucleotide
  Sense strand starting at position 2483 of SEQ ID NO: 1888523
gcauauuugugugaugucu

SEQ ID NO: 2539233 - RNA, 19 nt, Artificial Sequence
  Description of Artificial Sequence: Synthetic oligonucleotide
  Antisense strand to SEQ ID NO: 2539232
agacaucacacaaauaugc

SEQ ID NO: 2539234 - RNA, 19 nt, Artificial Sequence
  Description of Artificial Sequence: Synthetic oligonucleotide
  Sense strand starting at position 2587 of SEQ ID NO: 1888523
uagcuauggcuuugucgua

SEQ ID NO: 2539235 - RNA, 19 nt, Artificial Sequence
  Description of Artificial Sequence: Synthetic oligonucleotide
  Antisense strand to SEQ ID NO: 2539234
uacgacaaagccauagcua

SEQ ID NO: 2539236 - RNA, 19 nt, Artificial Sequence
  Description of Artificial Sequence: Synthetic oligonucleotide
  Sense strand starting at position 2480 of SEQ ID NO: 1888523
cuugcauauuugugugaug

SEQ ID NO: 2539237 - RNA, 19 nt, Artificial Sequence
  Description of Artificial Sequence: Synthetic oligonucleotide
  Antisense strand to SEQ ID NO: 2539236
caucacacaaauaugcaag

SEQ ID NO: 2539238 - RNA, 19 nt, Artificial Sequence
  Description of Artificial Sequence: Synthetic oligonucleotide
  Sense strand starting at position 2145 of SEQ ID NO: 1888523
cuuaaacuuugucaucagu

SEQ ID NO: 2539239 - RNA, 19 nt, Artificial Sequence
  Description of Artificial Sequence: Synthetic oligonucleotide
  Antisense strand to SEQ ID NO: 2539238
acugaugacaaaguuuaag

SEQ ID NO: 2539240 - RNA, 19 nt, Artificial Sequence
  Description of Artificial Sequence: Synthetic oligonucleotide
  Sense strand starting at position 1779 of SEQ ID NO: 1888524
ggaagcgcgccuucucaaa

SEQ ID NO: 2539241 - RNA, 19 nt, Artificial Sequence
  Description of Artificial Sequence: Synthetic oligonucleotide
  Antisense strand to SEQ ID NO: 2539240
uuugagaaggcgcgcuucc

SEQ ID NO: 2539242 - RNA, 19 nt, Artificial Sequence
  Description of Artificial Sequence: Synthetic oligonucleotide
  Sense strand starting at position 2357 of SEQ ID NO: 1888524
gcuaaaguccgggagaaga

SEQ ID NO: 2539243 - RNA, 19 nt, Artificial Sequence
  Description of Artificial Sequence: Synthetic oligonucleotide
  Antisense strand to SEQ ID NO: 2539242
ucuucucccggacuuuagc

SEQ ID NO: 2539244 - RNA, 19 nt, Artificial Sequence
  Description of Artificial Sequence: Synthetic oligonucleotide
  Sense strand starting at position 3434 of SEQ ID NO: 1888524
aucuuaucuggguaucaua

SEQ ID NO: 2539245 - RNA, 19 nt, Artificial Sequence
  Description of Artificial Sequence: Synthetic oligonucleotide
  Antisense strand to SEQ ID NO: 2539244
uaugauacccagauaagau

SEQ ID NO: 2539246 - RNA, 19 nt, Artificial Sequence
  Description of Artificial Sequence: Synthetic oligonucleotide
  Sense strand starting at position 3948 of SEQ ID NO: 1888524
gucaauuauuaacuggaua

SEQ ID NO: 2539247 - RNA, 19 nt, Artificial Sequence
  Description of Artificial Sequence: Synthetic oligonucleotide
  Antisense strand to SEQ ID NO: 2539246
uauccaguuaauaauugac

SEQ ID NO: 2539248 - RNA, 19 nt, Artificial Sequence
  Description of Artificial Sequence: Synthetic oligonucleotide
  Sense strand starting at position 2850 of SEQ ID NO: 1888524
ggaaacauuugagagagca

SEQ ID NO: 2539249 - RNA, 19 nt, Artificial Sequence
  Description of Artificial Sequence: Synthetic oligonucleotide
  Antisense strand to SEQ ID NO: 2539248
ugcucucucaaauguuucc

SEQ ID NO: 2539250 - RNA, 19 nt, Artificial Sequence
  Description of Artificial Sequence: Synthetic oligonucleotide
  Sense strand starting at position 3843 of SEQ ID NO: 1888524
caugaaagauuguuaagua

SEQ ID NO: 2539251 - RNA, 19 nt, Artificial Sequence
  Description of Artificial Sequence: Synthetic oligonucleotide
  Antisense strand to SEQ ID NO: 2539250
uacuuaacaaucuuucaug

SEQ ID NO: 2539252 - RNA, 19 nt, Artificial Sequence
  Description of Artificial Sequence: Synthetic oligonucleotide
  Sense strand starting at position 1095 of SEQ ID NO: 1888524
cgugauuguguuuauuuau

SEQ ID NO: 2539253 - RNA, 19 nt, Artificial Sequence
  Description of Artificial Sequence: Synthetic oligonucleotide
  Antisense strand to SEQ ID NO: 2539252
auaaauaaacacaaucacg

SEQ ID NO: 2539254 - RNA, 19 nt, Artificial Sequence
  Description of Artificial Sequence: Synthetic oligonucleotide
  Sense strand starting at position 242 of SEQ ID NO: 1888524
gugacauuauuucuugugu

SEQ ID NO: 2539255 - RNA, 19 nt, Artificial Sequence
  Description of Artificial Sequence: Synthetic oligonucleotide
  Antisense strand to SEQ ID NO: 2539254
acacaagaaauaaugucac

SEQ ID NO: 2539256 - RNA, 19 nt, Artificial Sequence
  Description of Artificial Sequence: Synthetic oligonucleotide
  Sense strand starting at position 3284 of SEQ ID NO: 1888524
caagaugauuuagggaaau

SEQ ID NO: 2539257 - RNA, 19 nt, Artificial Sequence
  Description of Artificial Sequence: Synthetic oligonucleotide
  Antisense strand to SEQ ID NO: 2539256
auuucccuaaaucaucuug

SEQ ID NO: 2539258 - RNA, 19 nt, Artificial Sequence
  Description of Artificial Sequence: Synthetic oligonucleotide
  Sense strand starting at position 3448 of SEQ ID NO: 1888524
ucauaucgaugguuagaga

SEQ ID NO: 2539259 - RNA, 19 nt, Artificial Sequence
  Description of Artificial Sequence: Synthetic oligonucleotide
  Antisense strand to SEQ ID NO: 2539258
ucucuaaccaucgauauga

SEQ ID NO: 2539260 - RNA, 19 nt, Artificial Sequence
  Description of Artificial Sequence: Synthetic oligonucleotide
  Sense strand starting at position 2890 of SEQ ID NO: 1888524
auguaucuuggaugaaucu

SEQ ID NO: 2539261 - RNA, 19 nt, Artificial Sequence
  Description of Artificial Sequence: Synthetic oligonucleotide
  Antisense strand to SEQ ID NO: 2539260
agauucauccaagauacau

SEQ ID NO: 2539262 - RNA, 19 nt, Artificial Sequence
  Description of Artificial Sequence: Synthetic oligonucleotide
  Sense strand starting at position 608 of SEQ ID NO: 1888524
uggguacuccuguaacauc

SEQ ID NO: 2539263 - RNA, 19 nt, Artificial Sequence
  Description of Artificial Sequence: Synthetic oligonucleotide
  Antisense strand to SEQ ID NO: 2539262
gauguuacaggaguaccca

SEQ ID NO: 2539264 - RNA, 19 nt, Artificial Sequence
  Description of Artificial Sequence: Synthetic oligonucleotide
  Sense strand starting at position 1450 of SEQ ID NO: 1888524
gacugaaccguuggauuga

SEQ ID NO: 2539265 - RNA, 19 nt, Artificial Sequence
  Description of Artificial Sequence: Synthetic oligonucleotide
  Antisense strand to SEQ ID NO: 2539264
ucaauccaacgguucaguc

SEQ ID NO: 2539266 - RNA, 19 nt, Artificial Sequence
  Description of Artificial Sequence: Synthetic oligonucleotide
  Sense strand starting at position 459 of SEQ ID NO: 1888524
cuuguuuauguuuaacaac

SEQ ID NO: 2539267 - RNA, 19 nt, Artificial Sequence
  Description of Artificial Sequence: Synthetic oligonucleotide
  Antisense strand to SEQ ID NO: 2539266
guuguuaaacauaaacaag

SEQ ID NO: 2539268 - RNA, 19 nt, Artificial Sequence
  Description of Artificial Sequence: Synthetic oligonucleotide
  Sense strand starting at position 2899 of SEQ ID NO: 1888524
ggaugaaucucugugcaaa

SEQ ID NO: 2539269 - RNA, 19 nt, Artificial Sequence
  Description of Artificial Sequence: Synthetic oligonucleotide
  Antisense strand to SEQ ID NO: 2539268
uuugcacagagauucaucc

SEQ ID NO: 2539270 - RNA, 19 nt, Artificial Sequence
  Description of Artificial Sequence: Synthetic oligonucleotide
  Sense strand starting at position 3443 of SEQ ID NO: 1888524
ggguaucauaucgaugguu

SEQ ID NO: 2539271 - RNA, 19 nt, Artificial Sequence
  Description of Artificial Sequence: Synthetic oligonucleotide
  Antisense strand to SEQ ID NO: 2539270
aaccaucgauaugauaccc

SEQ ID NO: 2539272 - RNA, 19 nt, Artificial Sequence
  Description of Artificial Sequence: Synthetic oligonucleotide
  Sense strand starting at position 2694 of SEQ ID NO: 1888524
cugucuuaacuugaaguuu

SEQ ID NO: 2539273 - RNA, 19 nt, Artificial Sequence
  Description of Artificial Sequence: Synthetic oligonucleotide
  Antisense strand to SEQ ID NO: 2539272
aaacuucaaguuaagacag

SEQ ID NO: 2539274 - RNA, 19 nt, Artificial Sequence
  Description of Artificial Sequence: Synthetic oligonucleotide
  Sense strand starting at position 3446 of SEQ ID NO: 1888524
uaucauaucgaugguuaga

SEQ ID NO: 2539275 - RNA, 19 nt, Artificial Sequence
  Description of Artificial Sequence: Synthetic oligonucleotide
  Antisense strand to SEQ ID NO: 2539274
ucuaaccaucgauaugaua

SEQ ID NO: 2539276 - RNA, 19 nt, Artificial Sequence
  Description of Artificial Sequence: Synthetic oligonucleotide
  Sense strand starting at position 3586 of SEQ ID NO: 1888524
auaucaugaagguggcauu

SEQ ID NO: 2539277 - RNA, 19 nt, Artificial Sequence
  Description of Artificial Sequence: Synthetic oligonucleotide
  Antisense strand to SEQ ID NO: 2539276
aaugccaccuucaugauau

SEQ ID NO: 2539278 - RNA, 19 nt, Artificial Sequence
  Description of Artificial Sequence: Synthetic oligonucleotide
  Sense strand starting at position 2901 of SEQ ID NO: 1888524
augaaucucugugcaaaca

SEQ ID NO: 2539279 - RNA, 19 nt, Artificial Sequence
  Description of Artificial Sequence: Synthetic oligonucleotide
  Antisense strand to SEQ ID NO: 2539278
uguuugcacagagauucau

SEQ ID NO: 2539280 - RNA, 19 nt, Artificial Sequence
  Description of Artificial Sequence: Synthetic oligonucleotide
  Sense strand starting at position 2590 of SEQ ID NO: 1888524
cccucagcguuccuaauuu

SEQ ID NO: 2539281 - RNA, 19 nt, Artificial Sequence
  Description of Artificial Sequence: Synthetic oligonucleotide
  Antisense strand to SEQ ID NO: 2539280
aaauuaggaacgcugaggg

SEQ ID NO: 2539282 - RNA, 19 nt, Artificial Sequence
  Description of Artificial Sequence: Synthetic oligonucleotide
  Sense strand starting at position 430 of SEQ ID NO: 1888524
uuuagaauugcauauugcu

SEQ ID NO: 2539283 - RNA, 19 nt, Artificial Sequence
  Description of Artificial Sequence: Synthetic oligonucleotide
  Antisense strand to SEQ ID NO: 2539282
agcaauaugcaauucuaaa

SEQ ID NO: 2539284 - RNA, 19 nt, Artificial Sequence
  Description of Artificial Sequence: Synthetic oligonucleotide
  Sense strand starting at position 2900 of SEQ ID NO: 1888524
gaugaaucucugugcaaac

SEQ ID NO: 2539285 - RNA, 19 nt, Artificial Sequence
  Description of Artificial Sequence: Synthetic oligonucleotide
  Antisense strand to SEQ ID NO: 2539284
guuugcacagagauucauc

SEQ ID NO: 2539286 - RNA, 19 nt, Artificial Sequence
  Description of Artificial Sequence: Synthetic oligonucleotide
  Sense strand starting at position 590 of SEQ ID NO: 1888524
cugccugcugauuaugaau

SEQ ID NO: 2539287 - RNA, 19 nt, Artificial Sequence
  Description of Artificial Sequence: Synthetic oligonucleotide
  Antisense strand to SEQ ID NO: 2539286
auucauaaucagcaggcag

SEQ ID NO: 2539288 - RNA, 19 nt, Artificial Sequence
  Description of Artificial Sequence: Synthetic oligonucleotide
  Sense strand starting at position 3879 of SEQ ID NO: 1888524
auauauccugcauggcaaa

SEQ ID NO: 2539289 - RNA, 19 nt, Artificial Sequence
  Description of Artificial Sequence: Synthetic oligonucleotide
  Antisense strand to SEQ ID NO: 2539288
uuugccaugcaggauauau

SEQ ID NO: 2539290 - RNA, 19 nt, Artificial Sequence
  Description of Artificial Sequence: Synthetic oligonucleotide
  Sense strand starting at position 2475 of SEQ ID NO: 1888524
gauggagccuuggcuuaga

SEQ ID NO: 2539291 - RNA, 19 nt, Artificial Sequence
  Description of Artificial Sequence: Synthetic oligonucleotide
  Antisense strand to SEQ ID NO: 2539290
ucuaagccaaggcuccauc

SEQ ID NO: 2539292 - RNA, 19 nt, Artificial Sequence
  Description of Artificial Sequence: Synthetic oligonucleotide
  Sense strand starting at position 2639 of SEQ ID NO: 1888524
cuugucugugauugagaca

SEQ ID NO: 2539293 - RNA, 19 nt, Artificial Sequence
  Description of Artificial Sequence: Synthetic oligonucleotide
  Antisense strand to SEQ ID NO: 2539292
ugucucaaucacagacaag

SEQ ID NO: 2539294 - RNA, 19 nt, Artificial Sequence
  Description of Artificial Sequence: Synthetic oligonucleotide
  Sense strand starting at position 3126 of SEQ ID NO: 1888524
guccuuguuauauggagau

SEQ ID NO: 2539295 - RNA, 19 nt, Artificial Sequence
  Description of Artificial Sequence: Synthetic oligonucleotide
  Antisense strand to SEQ ID NO: 2539294
aucuccauauaacaaggac

SEQ ID NO: 2539296 - RNA, 19 nt, Artificial Sequence
  Description of Artificial Sequence: Synthetic oligonucleotide
  Sense strand starting at position 3226 of SEQ ID NO: 1888524
ugagcaacucguuagguga

SEQ ID NO: 2539297 - RNA, 19 nt, Artificial Sequence
  Description of Artificial Sequence: Synthetic oligonucleotide
  Antisense strand to SEQ ID NO: 2539296
ucaccuaacgaguugcuca

SEQ ID NO: 2539298 - RNA, 19 nt, Artificial Sequence
  Description of Artificial Sequence: Synthetic oligonucleotide
  Sense strand starting at position 2439 of SEQ ID NO: 1888524
ugacuuuggcgauaggucu

SEQ ID NO: 2539299 - RNA, 19 nt, Artificial Sequence
  Description of Artificial Sequence: Synthetic oligonucleotide
  Antisense strand to SEQ ID NO: 2539298
agaccuaucgccaaaguca

SEQ ID NO: 2539300 - RNA, 19 nt, Artificial Sequence
  Description of Artificial Sequence: Synthetic oligonucleotide
  Sense strand starting at position 2638 of SEQ ID NO: 1888524
ucuugucugugauugagac

SEQ ID NO: 2539301 - RNA, 19 nt, Artificial Sequence
  Description of Artificial Sequence: Synthetic oligonucleotide
  Antisense strand to SEQ ID NO: 2539300
gucucaaucacagacaaga

SEQ ID NO: 2539302 - RNA, 19 nt, Artificial Sequence
  Description of Artificial Sequence: Synthetic oligonucleotide
  Sense strand starting at position 371 of SEQ ID NO: 1888524
cuuaucaucugguuuccau

SEQ ID NO: 2539303 - RNA, 19 nt, Artificial Sequence
  Description of Artificial Sequence: Synthetic oligonucleotide
  Antisense strand to SEQ ID NO: 2539302
auggaaaccagaugauaag

SEQ ID NO: 2539304 - RNA, 19 nt, Artificial Sequence
  Description of Artificial Sequence: Synthetic oligonucleotide
  Sense strand starting at position 1094 of SEQ ID NO: 1888524
gcgugauuguguuuauuua

SEQ ID NO: 2539305 - RNA, 19 nt, Artificial Sequence
  Description of Artificial Sequence: Synthetic oligonucleotide
  Antisense strand to SEQ ID NO: 2539304
uaaauaaacacaaucacgc

SEQ ID NO: 2539306 - RNA, 19 nt, Artificial Sequence
  Description of Artificial Sequence: Synthetic oligonucleotide
  Sense strand starting at position 3445 of SEQ ID NO: 1888524
guaucauaucgaugguuag

SEQ ID NO: 2539307 - RNA, 19 nt, Artificial Sequence
  Description of Artificial Sequence: Synthetic oligonucleotide
  Antisense strand to SEQ ID NO: 2539306
cuaaccaucgauaugauac

SEQ ID NO: 2539308 - RNA, 19 nt, Artificial Sequence
  Description of Artificial Sequence: Synthetic oligonucleotide
  Sense strand starting at position 3360 of SEQ ID NO: 1888524
gaagguugugugcaguaca

SEQ ID NO: 2539309 - RNA, 19 nt, Artificial Sequence
  Description of Artificial Sequence: Synthetic oligonucleotide
  Antisense strand to SEQ ID NO: 2539308
uguacugcacacaaccuuc

SEQ ID NO: 2539310 - RNA, 19 nt, Artificial Sequence
  Description of Artificial Sequence: Synthetic oligonucleotide
  Sense strand starting at position 2635 of SEQ ID NO: 1888524
cacucuugucugugauuga

SEQ ID NO: 2539311 - RNA, 19 nt, Artificial Sequence
  Description of Artificial Sequence: Synthetic oligonucleotide
  Antisense strand to SEQ ID NO: 2539310
ucaaucacagacaagagug

SEQ ID NO: 2539312 - RNA, 19 nt, Artificial Sequence
  Description of Artificial Sequence: Synthetic oligonucleotide
  Sense strand starting at position 3229 of SEQ ID NO: 1888524
gcaacucguuaggugaaga

SEQ ID NO: 2539313 - RNA, 19 nt, Artificial Sequence
  Description of Artificial Sequence: Synthetic oligonucleotide
  Antisense strand to SEQ ID NO: 2539312
ucuucaccuaacgaguugc

SEQ ID NO: 2539314 - RNA, 19 nt, Artificial Sequence
  Description of Artificial Sequence: Synthetic oligonucleotide
  Sense strand starting at position 225 of SEQ ID NO: 1888524
uucuuucugcgagacaugu

SEQ ID NO: 2539315 - RNA, 19 nt, Artificial Sequence
  Description of Artificial Sequence: Synthetic oligonucleotide
  Antisense strand to SEQ ID NO: 2539314
acaugucucgcagaaagaa

SEQ ID NO: 2539316 - RNA, 19 nt, Artificial Sequence
  Description of Artificial Sequence: Synthetic oligonucleotide
  Sense strand starting at position 231 of SEQ ID NO: 1888524
cugcgagacaugugacauu

SEQ ID NO: 2539317 - RNA, 19 nt, Artificial Sequence
  Description of Artificial Sequence: Synthetic oligonucleotide
  Antisense strand to SEQ ID NO: 2539316
aaugucacaugucucgcag

SEQ ID NO: 2539318 - RNA, 19 nt, Artificial Sequence
  Description of Artificial Sequence: Synthetic oligonucleotide
  Sense strand starting at position 192 of SEQ ID NO: 1888524
gcauuuagcuuggaaagau

SEQ ID NO: 2539319 - RNA, 19 nt, Artificial Sequence
  Description of Artificial Sequence: Synthetic oligonucleotide
  Antisense strand to SEQ ID NO: 2539318
aucuuuccaagcuaaaugc

SEQ ID NO: 2539320 - RNA, 19 nt, Artificial Sequence
  Description of Artificial Sequence: Synthetic oligonucleotide
  Sense strand starting at position 572 of SEQ ID NO: 1888526
uccagcuugagagauaagu

SEQ ID NO: 2539321 - RNA, 19 nt, Artificial Sequence
  Description of Artificial Sequence: Synthetic oligonucleotide
  Antisense strand to SEQ ID NO: 2539320
acuuaucucucaagcugga

SEQ ID NO: 2539322 - RNA, 19 nt, Artificial Sequence
  Description of Artificial Sequence: Synthetic oligonucleotide
  Sense strand starting at position 3636 of SEQ ID NO: 1888526
ucgcaaauacuggaaacuu

SEQ ID NO: 2539323 - RNA, 19 nt, Artificial Sequence
  Description of Artificial Sequence: Synthetic oligonucleotide
  Antisense strand to SEQ ID NO: 2539322
aaguuuccaguauuugcga

SEQ ID NO: 2539324 - RNA, 19 nt, Artificial Sequence
  Description of Artificial Sequence: Synthetic oligonucleotide
  Sense strand starting at position 3343 of SEQ ID NO: 1888526
cugucauucgcuucgguaa

SEQ ID NO: 2539325 - RNA, 19 nt, Artificial Sequence
  Description of Artificial Sequence: Synthetic oligonucleotide
  Antisense strand to SEQ ID NO: 2539324
uuaccgaagcgaaugacag

SEQ ID NO: 2539326 - RNA, 19 nt, Artificial Sequence
  Description of Artificial Sequence: Synthetic oligonucleotide
  Sense strand starting at position 751 of SEQ ID NO: 1888526
cccagucacccugacugau

SEQ ID NO: 2539327 - RNA, 19 nt, Artificial Sequence
  Description of Artificial Sequence: Synthetic oligonucleotide
  Antisense strand to SEQ ID NO: 2539326
aucagucagggugacuggg

SEQ ID NO: 2539328 - RNA, 19 nt, Artificial Sequence
  Description of Artificial Sequence: Synthetic oligonucleotide
  Sense strand starting at position 1041 of SEQ ID NO: 1888526
guuauauuccuuggagagg

SEQ ID NO: 2539329 - RNA, 19 nt, Artificial Sequence
  Description of Artificial Sequence: Synthetic oligonucleotide
  Antisense strand to SEQ ID NO: 2539328
ccucuccaaggaauauaac

SEQ ID NO: 2539330 - RNA, 19 nt, Artificial Sequence
  Description of Artificial Sequence: Synthetic oligonucleotide
  Sense strand starting at position 2641 of SEQ ID NO: 1888526
aggaguguccgggagguaa

SEQ ID NO: 2539331 - RNA, 19 nt, Artificial Sequence
  Description of Artificial Sequence: Synthetic oligonucleotide
  Antisense strand to SEQ ID NO: 2539330
uuaccucccggacacuccu

SEQ ID NO: 2539332 - RNA, 19 nt, Artificial Sequence
  Description of Artificial Sequence: Synthetic oligonucleotide
  Sense strand starting at position 1819 of SEQ ID NO: 1888526
guuugaaaggcugggaaau

SEQ ID NO: 2539333 - RNA, 19 nt, Artificial Sequence
  Description of Artificial Sequence: Synthetic oligonucleotide
  Antisense strand to SEQ ID NO: 2539332
auuucccagccuuucaaac

SEQ ID NO: 2539334 - RNA, 19 nt, Artificial Sequence
  Description of Artificial Sequence: Synthetic oligonucleotide
  Sense strand starting at position 3342 of SEQ ID NO: 1888526
ucugucauucgcuucggua

SEQ ID NO: 2539335 - RNA, 19 nt, Artificial Sequence
  Description of Artificial Sequence: Synthetic oligonucleotide
  Antisense strand to SEQ ID NO: 2539334
uaccgaagcgaaugacaga

SEQ ID NO: 2539336 - RNA, 19 nt, Artificial Sequence
  Description of Artificial Sequence: Synthetic oligonucleotide
  Sense strand starting at position 568 of SEQ ID NO: 1888526
gcacuccagcuugagagau

SEQ ID NO: 2539337 - RNA, 19 nt, Artificial Sequence
  Description of Artificial Sequence: Synthetic oligonucleotide
  Antisense strand to SEQ ID NO: 2539336
aucucucaagcuggagugc

SEQ ID NO: 2539338 - RNA, 19 nt, Artificial Sequence
  Description of Artificial Sequence: Synthetic oligonucleotide
  Sense strand starting at position 1040 of SEQ ID NO: 1888526
uguuauauuccuuggagag

SEQ ID NO: 2539339 - RNA, 19 nt, Artificial Sequence
  Description of Artificial Sequence: Synthetic oligonucleotide
  Antisense strand to SEQ ID NO: 2539338
cucuccaaggaauauaaca

SEQ ID NO: 2539340 - RNA, 19 nt, Artificial Sequence
  Description of Artificial Sequence: Synthetic oligonucleotide
  Sense strand starting at position 1377 of SEQ ID NO: 1888526
gugauugucaaaugacgaa

SEQ ID NO: 2539341 - RNA, 19 nt, Artificial Sequence
  Description of Artificial Sequence: Synthetic oligonucleotide
  Antisense strand to SEQ ID NO: 2539340
uucgucauuugacaaucac

SEQ ID NO: 2539342 - RNA, 19 nt, Artificial Sequence
  Description of Artificial Sequence: Synthetic oligonucleotide
  Sense strand starting at position 1518 of SEQ ID NO: 1888526
accauauguccaggccaua

SEQ ID NO: 2539343 - RNA, 19 nt, Artificial Sequence
  Description of Artificial Sequence: Synthetic oligonucleotide
  Antisense strand to SEQ ID NO: 2539342
uauggccuggacauauggu

SEQ ID NO: 2539344 - RNA, 19 nt, Artificial Sequence
  Description of Artificial Sequence: Synthetic oligonucleotide
  Sense strand starting at position 2060 of SEQ ID NO: 1888526
aagacaucuccguggaggu

SEQ ID NO: 2539345 - RNA, 19 nt, Artificial Sequence
  Description of Artificial Sequence: Synthetic oligonucleotide
  Antisense strand to SEQ ID NO: 2539344
accuccacggagaugucuu

SEQ ID NO: 2539346 - RNA, 19 nt, Artificial Sequence
  Description of Artificial Sequence: Synthetic oligonucleotide
  Sense strand starting at position 2628 of SEQ ID NO: 1888526
uagguaugugcccaggagu

SEQ ID NO: 2539347 - RNA, 19 nt, Artificial Sequence
  Description of Artificial Sequence: Synthetic oligonucleotide
  Antisense strand to SEQ ID NO: 2539346
acuccugggcacauaccua

SEQ ID NO: 2539348 - RNA, 19 nt, Artificial Sequence
  Description of Artificial Sequence: Synthetic oligonucleotide
  Sense strand starting at position 1429 of SEQ ID NO: 1888526
cuuugugaccuuggcaaag

SEQ ID NO: 2539349 - RNA, 19 nt, Artificial Sequence
  Description of Artificial Sequence: Synthetic oligonucleotide
  Antisense strand to SEQ ID NO: 2539348
cuuugccaaggucacaaag

SEQ ID NO: 2539350 - RNA, 19 nt, Artificial Sequence
  Description of Artificial Sequence: Synthetic oligonucleotide
  Sense strand starting at position 2876 of SEQ ID NO: 1888526
ugacauagcuggucccauu

SEQ ID NO: 2539351 - RNA, 19 nt, Artificial Sequence
  Description of Artificial Sequence: Synthetic oligonucleotide
  Antisense strand to SEQ ID NO: 2539350
aaugggaccagcuauguca

SEQ ID NO: 2539352 - RNA, 19 nt, Artificial Sequence
  Description of Artificial Sequence: Synthetic oligonucleotide
  Sense strand starting at position 2295 of SEQ ID NO: 1888526
guggucuccuuauucuuaa

SEQ ID NO: 2539353 - RNA, 19 nt, Artificial Sequence
  Description of Artificial Sequence: Synthetic oligonucleotide
  Antisense strand to SEQ ID NO: 2539352
uuaagaauaaggagaccac

SEQ ID NO: 2539354 - RNA, 19 nt, Artificial Sequence
  Description of Artificial Sequence: Synthetic oligonucleotide
  Sense strand starting at position 1486 of SEQ ID NO: 1888526
gugauugccucuuuccaga

SEQ ID NO: 2539355 - RNA, 19 nt, Artificial Sequence
  Description of Artificial Sequence: Synthetic oligonucleotide
  Antisense strand to SEQ ID NO: 2539354
ucuggaaagaggcaaucac

SEQ ID NO: 2539356 - RNA, 19 nt, Artificial Sequence
  Description of Artificial Sequence: Synthetic oligonucleotide
  Sense strand starting at position 3626 of SEQ ID NO: 1888526
cgcaaauacuucgcaaaua

SEQ ID NO: 2539357 - RNA, 19 nt, Artificial Sequence
  Description of Artificial Sequence: Synthetic oligonucleotide
  Antisense strand to SEQ ID NO: 2539356
uauuugcgaaguauuugcg

SEQ ID NO: 2539358 - RNA, 19 nt, Artificial Sequence
  Description of Artificial Sequence: Synthetic oligonucleotide
  Sense strand starting at position 179 of SEQ ID NO: 1888526
ggcagcauuucgcucuguu

SEQ ID NO: 2539359 - RNA, 19 nt, Artificial Sequence
  Description of Artificial Sequence: Synthetic oligonucleotide
  Antisense strand to SEQ ID NO: 2539358
aacagagcgaaaugcugcc

SEQ ID NO: 2539360 - RNA, 19 nt, Artificial Sequence
  Description of Artificial Sequence: Synthetic oligonucleotide
  Sense strand starting at position 2428 of SEQ ID NO: 1888526
gggucagguucuuugccau

SEQ ID NO: 2539361 - RNA, 19 nt, Artificial Sequence
  Description of Artificial Sequence: Synthetic oligonucleotide
  Antisense strand to SEQ ID NO: 2539360
auggcaaagaaccugaccc

SEQ ID NO: 2539362 - RNA, 19 nt, Artificial Sequence
  Description of Artificial Sequence: Synthetic oligonucleotide
  Sense strand starting at position 3615 of SEQ ID NO: 1888526
acuucuugcuucgcaaaua

SEQ ID NO: 2539363 - RNA, 19 nt, Artificial Sequence
  Description of Artificial Sequence: Synthetic oligonucleotide
  Antisense strand to SEQ ID NO: 2539362
uauuugcgaagcaagaagu

SEQ ID NO: 2539364 - RNA, 19 nt, Artificial Sequence
  Description of Artificial Sequence: Synthetic oligonucleotide
  Sense strand starting at position 3625 of SEQ ID NO: 1888526
ucgcaaauacuucgcaaau

SEQ ID NO: 2539365 - RNA, 19 nt, Artificial Sequence
  Description of Artificial Sequence: Synthetic oligonucleotide
  Antisense strand to SEQ ID NO: 2539364
auuugcgaaguauuugcga

SEQ ID NO: 2539366 - RNA, 19 nt, Artificial Sequence
  Description of Artificial Sequence: Synthetic oligonucleotide
  Sense strand starting at position 1028 of SEQ ID NO: 1888526
caugcugggcucuguuaua

SEQ ID NO: 2539367 - RNA, 19 nt, Artificial Sequence
  Description of Artificial Sequence: Synthetic oligonucleotide
  Antisense strand to SEQ ID NO: 2539366
uauaacagagcccagcaug

SEQ ID NO: 2539368 - RNA, 19 nt, Artificial Sequence
  Description of Artificial Sequence: Synthetic oligonucleotide
  Sense strand starting at position 471 of SEQ ID NO: 1888526
ggugcuugccuguaauagu

SEQ ID NO: 2539369 - RNA, 19 nt, Artificial Sequence
  Description of Artificial Sequence: Synthetic oligonucleotide
  Antisense strand to SEQ ID NO: 2539368
acuauuacaggcaagcacc

SEQ ID NO: 2539370 - RNA, 19 nt, Artificial Sequence
  Description of Artificial Sequence: Synthetic oligonucleotide
  Sense strand starting at position 3337 of SEQ ID NO: 1888526
ggaucucugucauucgcuu

SEQ ID NO: 2539371 - RNA, 19 nt, Artificial Sequence
  Description of Artificial Sequence: Synthetic oligonucleotide
  Antisense strand to SEQ ID NO: 2539370
aagcgaaugacagagaucc

SEQ ID NO: 2539372 - RNA, 19 nt, Artificial Sequence
  Description of Artificial Sequence: Synthetic oligonucleotide
  Sense strand starting at position 570 of SEQ ID NO: 1888526
acuccagcuugagagauaa

SEQ ID NO: 2539373 - RNA, 19 nt, Artificial Sequence
  Description of Artificial Sequence: Synthetic oligonucleotide
  Antisense strand to SEQ ID NO: 2539372
uuaucucucaagcuggagu

SEQ ID NO: 2539374 - RNA, 19 nt, Artificial Sequence
  Description of Artificial Sequence: Synthetic oligonucleotide
  Sense strand starting at position 656 of SEQ ID NO: 1888526
ucgacuuaccguuggguuu

SEQ ID NO: 2539375 - RNA, 19 nt, Artificial Sequence
  Description of Artificial Sequence: Synthetic oligonucleotide
  Antisense strand to SEQ ID NO: 2539374
aaacccaacgguaagucga

SEQ ID NO: 2539376 - RNA, 19 nt, Artificial Sequence
  Description of Artificial Sequence: Synthetic oligonucleotide
  Sense strand starting at position 1373 of SEQ ID NO: 1888526
uggagugauugucaaauga

SEQ ID NO: 2539377 - RNA, 19 nt, Artificial Sequence
  Description of Artificial Sequence: Synthetic oligonucleotide
  Antisense strand to SEQ ID NO: 2539376
ucauuugacaaucacucca

SEQ ID NO: 2539378 - RNA, 19 nt, Artificial Sequence
  Description of Artificial Sequence: Synthetic oligonucleotide
  Sense strand starting at position 2434 of SEQ ID NO: 1888526
gguucuuugccaugcacuu

SEQ ID NO: 2539379 - RNA, 19 nt, Artificial Sequence
  Description of Artificial Sequence: Synthetic oligonucleotide
  Antisense strand to SEQ ID NO: 2539378
aagugcauggcaaagaacc

SEQ ID NO: 2539380 - RNA, 19 nt, Artificial Sequence
  Description of Artificial Sequence: Synthetic oligonucleotide
  Sense strand starting at position 3612 of SEQ ID NO: 1888526
gucacuucuugcuucgcaa

SEQ ID NO: 2539381 - RNA, 19 nt, Artificial Sequence
  Description of Artificial Sequence: Synthetic oligonucleotide
  Antisense strand to SEQ ID NO: 2539380
uugcgaagcaagaagugac

SEQ ID NO: 2539382 - RNA, 19 nt, Artificial Sequence
  Description of Artificial Sequence: Synthetic oligonucleotide
  Sense strand starting at position 3344 of SEQ ID NO: 1888526
ugucauucgcuucgguaac

SEQ ID NO: 2539383 - RNA, 19 nt, Artificial Sequence
  Description of Artificial Sequence: Synthetic oligonucleotide
  Antisense strand to SEQ ID NO: 2539382
guuaccgaagcgaaugaca

SEQ ID NO: 2539384 - RNA, 19 nt, Artificial Sequence
  Description of Artificial Sequence: Synthetic oligonucleotide
  Sense strand starting at position 1402 of SEQ ID NO: 1888526
ggcuccaacucaggauuaa

SEQ ID NO: 2539385 - RNA, 19 nt, Artificial Sequence
  Description of Artificial Sequence: Synthetic oligonucleotide
  Antisense strand to SEQ ID NO: 2539384
uuaauccugaguuggagcc

SEQ ID NO: 2539386 - RNA, 19 nt, Artificial Sequence
  Description of Artificial Sequence: Synthetic oligonucleotide
  Sense strand starting at position 1832 of SEQ ID NO: 1888526
ggaaauacgucuuaucucc

SEQ ID NO: 2539387 - RNA, 19 nt, Artificial Sequence
  Description of Artificial Sequence: Synthetic oligonucleotide
  Antisense strand to SEQ ID NO: 2539386
ggagauaagacguauuucc

SEQ ID NO: 2539388 - RNA, 19 nt, Artificial Sequence
  Description of Artificial Sequence: Synthetic oligonucleotide
  Sense strand starting at position 3511 of SEQ ID NO: 1888526
ccgcguguucacugaggca

SEQ ID NO: 2539389 - RNA, 19 nt, Artificial Sequence
  Description of Artificial Sequence: Synthetic oligonucleotide
  Antisense strand to SEQ ID NO: 2539388
ugccucagugaacacgcgg

SEQ ID NO: 2539390 - RNA, 19 nt, Artificial Sequence
  Description of Artificial Sequence: Synthetic oligonucleotide
  Sense strand starting at position 3627 of SEQ ID NO: 1888526
gcaaauacuucgcaaauac

SEQ ID NO: 2539391 - RNA, 19 nt, Artificial Sequence
  Description of Artificial Sequence: Synthetic oligonucleotide
  Antisense strand to SEQ ID NO: 2539390
guauuugcgaaguauuugc

SEQ ID NO: 2539392 - RNA, 19 nt, Artificial Sequence
  Description of Artificial Sequence: Synthetic oligonucleotide
  Sense strand starting at position 1872 of SEQ ID NO: 1888526
ugcuuaccuuuccaaguga

SEQ ID NO: 2539393 - RNA, 19 nt, Artificial Sequence
  Description of Artificial Sequence: Synthetic oligonucleotide
  Antisense strand to SEQ ID NO: 2539392
ucacuuggaaagguaagca

SEQ ID NO: 2539394 - RNA, 19 nt, Artificial Sequence
  Description of Artificial Sequence: Synthetic oligonucleotide
  Sense strand starting at position 3648 of SEQ ID NO: 1888526
gaaacuuugugcuguggga

SEQ ID NO: 2539395 - RNA, 19 nt, Artificial Sequence
  Description of Artificial Sequence: Synthetic oligonucleotide
  Antisense strand to SEQ ID NO: 2539394
ucccacagcacaaaguuuc

SEQ ID NO: 2539396 - RNA, 19 nt, Artificial Sequence
  Description of Artificial Sequence: Synthetic oligonucleotide
  Sense strand starting at position 3345 of SEQ ID NO: 1888526
gucauucgcuucgguaaca

SEQ ID NO: 2539397 - RNA, 19 nt, Artificial Sequence
  Description of Artificial Sequence: Synthetic oligonucleotide
  Antisense strand to SEQ ID NO: 2539396
uguuaccgaagcgaaugac

SEQ ID NO: 2539398 - RNA, 19 nt, Artificial Sequence
  Description of Artificial Sequence: Synthetic oligonucleotide
  Sense strand starting at position 2681 of SEQ ID NO: 1888527
gccuacagacaguauuaga

SEQ ID NO: 2539399 - RNA, 19 nt, Artificial Sequence
  Description of Artificial Sequence: Synthetic oligonucleotide
  Antisense strand to SEQ ID NO: 2539398
ucuaauacugucuguaggc

SEQ ID NO: 2539400 - RNA, 19 nt, Artificial Sequence
  Description of Artificial Sequence: Synthetic oligonucleotide
  Sense strand starting at position 3882 of SEQ ID NO: 1888527
ugcugcucuguuuccgaga

SEQ ID NO: 2539401 - RNA, 19 nt, Artificial Sequence
  Description of Artificial Sequence: Synthetic oligonucleotide
  Antisense strand to SEQ ID NO: 2539400
ucucggaaacagagcagca

SEQ ID NO: 2539402 - RNA, 19 nt, Artificial Sequence
  Description of Artificial Sequence: Synthetic oligonucleotide
  Sense strand starting at position 3708 of SEQ ID NO: 1888527
cggaucccucgagaaauua

SEQ ID NO: 2539403 - RNA, 19 nt, Artificial Sequence
  Description of Artificial Sequence: Synthetic oligonucleotide
  Antisense strand to SEQ ID NO: 2539402
uaauuucucgagggauccg

SEQ ID NO: 2539404 - RNA, 19 nt, Artificial Sequence
  Description of Artificial Sequence: Synthetic oligonucleotide
  Sense strand starting at position 3767 of SEQ ID NO: 1888527
cccagacacuuucugagau

SEQ ID NO: 2539405 - RNA, 19 nt, Artificial Sequence
  Description of Artificial Sequence: Synthetic oligonucleotide
  Antisense strand to SEQ ID NO: 2539404
aucucagaaagugucuggg

SEQ ID NO: 2539406 - RNA, 19 nt, Artificial Sequence
  Description of Artificial Sequence: Synthetic oligonucleotide
  Sense strand starting at position 3310 of SEQ ID NO: 1888527
uggguauuaguagagcaga

SEQ ID NO: 2539407 - RNA, 19 nt, Artificial Sequence
  Description of Artificial Sequence: Synthetic oligonucleotide
  Antisense strand to SEQ ID NO: 2539406
ucugcucuacuaauaccca

SEQ ID NO: 2539408 - RNA, 19 nt, Artificial Sequence
  Description of Artificial Sequence: Synthetic oligonucleotide
  Sense strand starting at position 2754 of SEQ ID NO: 1888527
aggaguagguccaagggau

SEQ ID NO: 2539409 - RNA, 19 nt, Artificial Sequence
  Description of Artificial Sequence: Synthetic oligonucleotide
  Antisense strand to SEQ ID NO: 2539408
aucccuuggaccuacuccu

SEQ ID NO: 2539410 - RNA, 19 nt, Artificial Sequence
  Description of Artificial Sequence: Synthetic oligonucleotide
  Sense strand starting at position 1803 of SEQ ID NO: 1888527
cucggauccagaggaauuc

SEQ ID NO: 2539411 - RNA, 19 nt, Artificial Sequence
  Description of Artificial Sequence: Synthetic oligonucleotide
  Antisense strand to SEQ ID NO: 2539410
gaauuccucuggauccgag

SEQ ID NO: 2539412 - RNA, 19 nt, Artificial Sequence
  Description of Artificial Sequence: Synthetic oligonucleotide
  Sense strand starting at position 67 of SEQ ID NO: 1888527
gggagcaaccuccgacaaa

SEQ ID NO: 2539413 - RNA, 19 nt, Artificial Sequence
  Description of Artificial Sequence: Synthetic oligonucleotide
  Antisense strand to SEQ ID NO: 2539412
uuugucggagguugcuccc

SEQ ID NO: 2539414 - RNA, 19 nt, Artificial Sequence
  Description of Artificial Sequence: Synthetic oligonucleotide
  Sense strand starting at position 3292 of SEQ ID NO: 1888527
cagggaacuccacggaguu

SEQ ID NO: 2539415 - RNA, 19 nt, Artificial Sequence
  Description of Artificial Sequence: Synthetic oligonucleotide
  Antisense strand to SEQ ID NO: 2539414
aacuccguggaguucccug

SEQ ID NO: 2539416 - RNA, 19 nt, Artificial Sequence
  Description of Artificial Sequence: Synthetic oligonucleotide
  Sense strand starting at position 3329 of SEQ ID NO: 1888527
aagaacgucuguccagaaa

SEQ ID NO: 2539417 - RNA, 19 nt, Artificial Sequence
  Description of Artificial Sequence: Synthetic oligonucleotide
  Antisense strand to SEQ ID NO: 2539416
uuucuggacagacguucuu

SEQ ID NO: 2539418 - RNA, 19 nt, Artificial Sequence
  Description of Artificial Sequence: Synthetic oligonucleotide
  Sense strand starting at position 3706 of SEQ ID NO: 1888527
ggcggaucccucgagaaau

SEQ ID NO: 2539419 - RNA, 19 nt, Artificial Sequence
  Description of Artificial Sequence: Synthetic oligonucleotide
  Antisense strand to SEQ ID NO: 2539418
auuucucgagggauccgcc

SEQ ID NO: 2539420 - RNA, 19 nt, Artificial Sequence
  Description of Artificial Sequence: Synthetic oligonucleotide
  Sense strand starting at position 434 of SEQ ID NO: 1888527
gucccaucucaugaugcaa

SEQ ID NO: 2539421 - RNA, 19 nt, Artificial Sequence
  Description of Artificial Sequence: Synthetic oligonucleotide
  Antisense strand to SEQ ID NO: 2539420
uugcaucaugagaugggac

SEQ ID NO: 2539422 - RNA, 19 nt, Artificial Sequence
  Description of Artificial Sequence: Synthetic oligonucleotide
  Sense strand starting at position 3606 of SEQ ID NO: 1888527
guguguaucccugacaagg

SEQ ID NO: 2539423 - RNA, 19 nt, Artificial Sequence
  Description of Artificial Sequence: Synthetic oligonucleotide
  Antisense strand to SEQ ID NO: 2539422
ccuugucagggauacacac

SEQ ID NO: 2539424 - RNA, 19 nt, Artificial Sequence
  Description of Artificial Sequence: Synthetic oligonucleotide
  Sense strand starting at position 3332 of SEQ ID NO: 1888527
aacgucuguccagaaauuc

SEQ ID NO: 2539425 - RNA, 19 nt, Artificial Sequence
  Description of Artificial Sequence: Synthetic oligonucleotide
  Antisense strand to SEQ ID NO: 2539424
gaauuucuggacagacguu

SEQ ID NO: 2539426 - RNA, 19 nt, Artificial Sequence
  Description of Artificial Sequence: Synthetic oligonucleotide
  Sense strand starting at position 3327 of SEQ ID NO: 1888527
gaaagaacgucuguccaga

SEQ ID NO: 2539427 - RNA, 19 nt, Artificial Sequence
  Description of Artificial Sequence: Synthetic oligonucleotide
  Antisense strand to SEQ ID NO: 2539426
ucuggacagacguucuuuc

SEQ ID NO: 2539428 - RNA, 19 nt, Artificial Sequence
  Description of Artificial Sequence: Synthetic oligonucleotide
  Sense strand starting at position 3887 of SEQ ID NO: 1888527
cucuguuuccgagacauuc

SEQ ID NO: 2539429 - RNA, 19 nt, Artificial Sequence
  Description of Artificial Sequence: Synthetic oligonucleotide
  Antisense strand to SEQ ID NO: 2539428
gaaugucucggaaacagag

SEQ ID NO: 2539430 - RNA, 19 nt, Artificial Sequence
  Description of Artificial Sequence: Synthetic oligonucleotide
  Sense strand starting at position 3908 of SEQ ID NO: 1888527
agucaucuuccagagugca

SEQ ID NO: 2539431 - RNA, 19 nt, Artificial Sequence
  Description of Artificial Sequence: Synthetic oligonucleotide
  Antisense strand to SEQ ID NO: 2539430
ugcacucuggaagaugacu

SEQ ID NO: 2539432 - RNA, 19 nt, Artificial Sequence
  Description of Artificial Sequence: Synthetic oligonucleotide
  Sense strand starting at position 3302 of SEQ ID NO: 1888527
cacggaguuggguauuagu

SEQ ID NO: 2539433 - RNA, 19 nt, Artificial Sequence
  Description of Artificial Sequence: Synthetic oligonucleotide
  Antisense strand to SEQ ID NO: 2539432
acuaauacccaacuccgug

SEQ ID NO: 2539434 - RNA, 19 nt, Artificial Sequence
  Description of Artificial Sequence: Synthetic oligonucleotide
  Sense strand starting at position 3189 of SEQ ID NO: 1888527
guaggaguuggccagcuaa

SEQ ID NO: 2539435 - RNA, 19 nt, Artificial Sequence
  Description of Artificial Sequence: Synthetic oligonucleotide
  Antisense strand to SEQ ID NO: 2539434
uuagcuggccaacuccuac

SEQ ID NO: 2539436 - RNA, 19 nt, Artificial Sequence
  Description of Artificial Sequence: Synthetic oligonucleotide
  Sense strand starting at position 3949 of SEQ ID NO: 1888527
guuuccuccuuugugaaag

SEQ ID NO: 2539437 - RNA, 19 nt, Artificial Sequence
  Description of Artificial Sequence: Synthetic oligonucleotide
  Antisense strand to SEQ ID NO: 2539436
cuuucacaaaggaggaaac

SEQ ID NO: 2539438 - RNA, 19 nt, Artificial Sequence
  Description of Artificial Sequence: Synthetic oligonucleotide
  Sense strand starting at position 3268 of SEQ ID NO: 1888527
augaaacagcuuuguaugu

SEQ ID NO: 2539439 - RNA, 19 nt, Artificial Sequence
  Description of Artificial Sequence: Synthetic oligonucleotide
  Antisense strand to SEQ ID NO: 2539438
acauacaaagcuguuucau

SEQ ID NO: 2539440 - RNA, 19 nt, Artificial Sequence
  Description of Artificial Sequence: Synthetic oligonucleotide
  Sense strand starting at position 3604 of SEQ ID NO: 1888527
ugguguguaucccugacaa

SEQ ID NO: 2539441 - RNA, 19 nt, Artificial Sequence
  Description of Artificial Sequence: Synthetic oligonucleotide
  Antisense strand to SEQ ID NO: 2539440
uugucagggauacacacca

SEQ ID NO: 2539442 - RNA, 19 nt, Artificial Sequence
  Description of Artificial Sequence: Synthetic oligonucleotide
  Sense strand starting at position 2778 of SEQ ID NO: 1888527
gcucaucuguagcuagaga

SEQ ID NO: 2539443 - RNA, 19 nt, Artificial Sequence
  Description of Artificial Sequence: Synthetic oligonucleotide
  Antisense strand to SEQ ID NO: 2539442
ucucuagcuacagaugagc

SEQ ID NO: 2539444 - RNA, 19 nt, Artificial Sequence
  Description of Artificial Sequence: Synthetic oligonucleotide
  Sense strand starting at position 919 of SEQ ID NO: 1888527
uccaaacauuccgaggaaa

SEQ ID NO: 2539445 - RNA, 19 nt, Artificial Sequence
  Description of Artificial Sequence: Synthetic oligonucleotide
  Antisense strand to SEQ ID NO: 2539444
uuuccucggaauguuugga

SEQ ID NO: 2539446 - RNA, 19 nt, Artificial Sequence
  Description of Artificial Sequence: Synthetic oligonucleotide
  Sense strand starting at position 2931 of SEQ ID NO: 1888527
ggccuauaacuuggugcuu

SEQ ID NO: 2539447 - RNA, 19 nt, Artificial Sequence
  Description of Artificial Sequence: Synthetic oligonucleotide
  Antisense strand to SEQ ID NO: 2539446
aagcaccaaguuauaggcc

SEQ ID NO: 2539448 - RNA, 19 nt, Artificial Sequence
  Description of Artificial Sequence: Synthetic oligonucleotide
  Sense strand starting at position 1227 of SEQ ID NO: 1888527
gcugcagugucugcgauuu

SEQ ID NO: 2539449 - RNA, 19 nt, Artificial Sequence
  Description of Artificial Sequence: Synthetic oligonucleotide
  Antisense strand to SEQ ID NO: 2539448
aaaucgcagacacugcagc

SEQ ID NO: 2539450 - RNA, 19 nt, Artificial Sequence
  Description of Artificial Sequence: Synthetic oligonucleotide
  Sense strand starting at position 3275 of SEQ ID NO: 1888527
agcuuuguauguguguaca

SEQ ID NO: 2539451 - RNA, 19 nt, Artificial Sequence
  Description of Artificial Sequence: Synthetic oligonucleotide
  Antisense strand to SEQ ID NO: 2539450
uguacacacauacaaagcu

SEQ ID NO: 2539452 - RNA, 19 nt, Artificial Sequence
  Description of Artificial Sequence: Synthetic oligonucleotide
  Sense strand starting at position 3273 of SEQ ID NO: 1888527
acagcuuuguaugugugua

SEQ ID NO: 2539453 - RNA, 19 nt, Artificial Sequence
  Description of Artificial Sequence: Synthetic oligonucleotide
  Antisense strand to SEQ ID NO: 2539452
uacacacauacaaagcugu

SEQ ID NO: 2539454 - RNA, 19 nt, Artificial Sequence
  Description of Artificial Sequence: Synthetic oligonucleotide
  Sense strand starting at position 3058 of SEQ ID NO: 1888527
ccuguucucagguguugca

SEQ ID NO: 2539455 - RNA, 19 nt, Artificial Sequence
  Description of Artificial Sequence: Synthetic oligonucleotide
  Antisense strand to SEQ ID NO: 2539454
ugcaacaccugagaacagg

SEQ ID NO: 2539456 - RNA, 19 nt, Artificial Sequence
  Description of Artificial Sequence: Synthetic oligonucleotide
  Sense strand starting at position 3768 of SEQ ID NO: 1888527
ccagacacuuucugagaug

SEQ ID NO: 2539457 - RNA, 19 nt, Artificial Sequence
  Description of Artificial Sequence: Synthetic oligonucleotide
  Antisense strand to SEQ ID NO: 2539456
caucucagaaagugucugg

SEQ ID NO: 2539458 - RNA, 19 nt, Artificial Sequence
  Description of Artificial Sequence: Synthetic oligonucleotide
  Sense strand starting at position 3305 of SEQ ID NO: 1888527
ggaguuggguauuaguaga

SEQ ID NO: 2539459 - RNA, 19 nt, Artificial Sequence
  Description of Artificial Sequence: Synthetic oligonucleotide
  Antisense strand to SEQ ID NO: 2539458
ucuacuaauacccaacucc

SEQ ID NO: 2539460 - RNA, 19 nt, Artificial Sequence
  Description of Artificial Sequence: Synthetic oligonucleotide
  Sense strand starting at position 918 of SEQ ID NO: 1888527
cuccaaacauuccgaggaa

SEQ ID NO: 2539461 - RNA, 19 nt, Artificial Sequence
  Description of Artificial Sequence: Synthetic oligonucleotide
  Antisense strand to SEQ ID NO: 2539460
uuccucggaauguuuggag

SEQ ID NO: 2539462 - RNA, 19 nt, Artificial Sequence
  Description of Artificial Sequence: Synthetic oligonucleotide
  Sense strand starting at position 3650 of SEQ ID NO: 1888527
ccaagaccuugcuggaaga

SEQ ID NO: 2539463 - RNA, 19 nt, Artificial Sequence
  Description of Artificial Sequence: Synthetic oligonucleotide
  Antisense strand to SEQ ID NO: 2539462
ucuuccagcaaggucuugg

SEQ ID NO: 2539464 - RNA, 19 nt, Artificial Sequence
  Description of Artificial Sequence: Synthetic oligonucleotide
  Sense strand starting at position 3170 of SEQ ID NO: 1888527
gcugaaucuugauggauga

SEQ ID NO: 2539465 - RNA, 19 nt, Artificial Sequence
  Description of Artificial Sequence: Synthetic oligonucleotide
  Antisense strand to SEQ ID NO: 2539464
ucauccaucaagauucagc

SEQ ID NO: 2539466 - RNA, 19 nt, Artificial Sequence
  Description of Artificial Sequence: Synthetic oligonucleotide
  Sense strand starting at position 3167 of SEQ ID NO: 1888527
ugagcugaaucuugaugga

SEQ ID NO: 2539467 - RNA, 19 nt, Artificial Sequence
  Description of Artificial Sequence: Synthetic oligonucleotide
  Antisense strand to SEQ ID NO: 2539466
uccaucaagauucagcuca

SEQ ID NO: 2539468 - RNA, 19 nt, Artificial Sequence
  Description of Artificial Sequence: Synthetic oligonucleotide
  Sense strand starting at position 3895 of SEQ ID NO: 1888527
ccgagacauucccagucau

SEQ ID NO: 2539469 - RNA, 19 nt, Artificial Sequence
  Description of Artificial Sequence: Synthetic oligonucleotide
  Antisense strand to SEQ ID NO: 2539468
augacugggaaugucucgg

SEQ ID NO: 2539470 - RNA, 19 nt, Artificial Sequence
  Description of Artificial Sequence: Synthetic oligonucleotide
  Sense strand starting at position 115 of SEQ ID NO: 1888527
gagcuuaugucacaccuga

SEQ ID NO: 2539471 - RNA, 19 nt, Artificial Sequence
  Description of Artificial Sequence: Synthetic oligonucleotide
  Antisense strand to SEQ ID NO: 2539470
ucaggugugacauaagcuc

SEQ ID NO: 2539472 - RNA, 19 nt, Artificial Sequence
  Description of Artificial Sequence: Synthetic oligonucleotide
  Sense strand starting at position 3906 of SEQ ID NO: 1888527
ccagucaucuuccagagug

SEQ ID NO: 2539473 - RNA, 19 nt, Artificial Sequence
  Description of Artificial Sequence: Synthetic oligonucleotide
  Antisense strand to SEQ ID NO: 2539472
cacucuggaagaugacugg

SEQ ID NO: 2539474 - RNA, 19 nt, Artificial Sequence
  Description of Artificial Sequence: Synthetic oligonucleotide
  Sense strand starting at position 445 of SEQ ID NO: 1888527
ugaugcaacuugcauauua

SEQ ID NO: 2539475 - RNA, 19 nt, Artificial Sequence
  Description of Artificial Sequence: Synthetic oligonucleotide
  Antisense strand to SEQ ID NO: 2539474
uaauaugcaaguugcauca

SEQ ID NO: 2539476 - RNA, 19 nt, Artificial Sequence
  Description of Artificial Sequence: Synthetic oligonucleotide
  Sense strand starting at position 3121 of SEQ ID NO: 1888527
ucaugcaggucuggaauaa

SEQ ID NO: 2539477 - RNA, 19 nt, Artificial Sequence
  Description of Artificial Sequence: Synthetic oligonucleotide
  Antisense strand to SEQ ID NO: 2539476
uuauuccagaccugcauga

SEQ ID NO: 2539478 - RNA, 19 nt, Artificial Sequence
  Description of Artificial Sequence: Synthetic oligonucleotide
  Sense strand starting at position 1151 of SEQ ID NO: 1888528
ugacgaauuaucuacgaca

SEQ ID NO: 2539479 - RNA, 19 nt, Artificial Sequence
  Description of Artificial Sequence: Synthetic oligonucleotide
  Antisense strand to SEQ ID NO: 2539478
ugucguagauaauucguca

SEQ ID NO: 2539480 - RNA, 19 nt, Artificial Sequence
  Description of Artificial Sequence: Synthetic oligonucleotide
  Sense strand starting at position 2712 of SEQ ID NO: 1888528
aagugauggcaguagggau

SEQ ID NO: 2539481 - RNA, 19 nt, Artificial Sequence
  Description of Artificial Sequence: Synthetic oligonucleotide
  Antisense strand to SEQ ID NO: 2539480
aucccuacugccaucacuu

SEQ ID NO: 2539482 - RNA, 19 nt, Artificial Sequence
  Description of Artificial Sequence: Synthetic oligonucleotide
  Sense strand starting at position 1176 of SEQ ID NO: 1888528
uggaaagugcuuuacagau

SEQ ID NO: 2539483 - RNA, 19 nt, Artificial Sequence
  Description of Artificial Sequence: Synthetic oligonucleotide
  Antisense strand to SEQ ID NO: 2539482
aucuguaaagcacuuucca

SEQ ID NO: 2539484 - RNA, 19 nt, Artificial Sequence
  Description of Artificial Sequence: Synthetic oligonucleotide
  Sense strand starting at position 236 of SEQ ID NO: 1888528
ggugguuguguugccgaga

SEQ ID NO: 2539485 - RNA, 19 nt, Artificial Sequence
  Description of Artificial Sequence: Synthetic oligonucleotide
  Antisense strand to SEQ ID NO: 2539484
ucucggcaacacaaccacc

SEQ ID NO: 2539486 - RNA, 19 nt, Artificial Sequence
  Description of Artificial Sequence: Synthetic oligonucleotide
  Sense strand starting at position 400 of SEQ ID NO: 1888528
gauguauaagaguaaggcu

SEQ ID NO: 2539487 - RNA, 19 nt, Artificial Sequence
  Description of Artificial Sequence: Synthetic oligonucleotide
  Antisense strand to SEQ ID NO: 2539486
agccuuacucuuauacauc

SEQ ID NO: 2539488 - RNA, 19 nt, Artificial Sequence
  Description of Artificial Sequence: Synthetic oligonucleotide
  Sense strand starting at position 3448 of SEQ ID NO: 1888528
gguaguuaugaucauccua

SEQ ID NO: 2539489 - RNA, 19 nt, Artificial Sequence
  Description of Artificial Sequence: Synthetic oligonucleotide
  Antisense strand to SEQ ID NO: 2539488
uaggaugaucauaacuacc

SEQ ID NO: 2539490 - RNA, 19 nt, Artificial Sequence
  Description of Artificial Sequence: Synthetic oligonucleotide
  Sense strand starting at position 1527 of SEQ ID NO: 1888528
ggcggccgagugcuuaaua

SEQ ID NO: 2539491 - RNA, 19 nt, Artificial Sequence
  Description of Artificial Sequence: Synthetic oligonucleotide
  Antisense strand to SEQ ID NO: 2539490
uauuaagcacucggccgcc

SEQ ID NO: 2539492 - RNA, 19 nt, Artificial Sequence
  Description of Artificial Sequence: Synthetic oligonucleotide
  Sense strand starting at position 2197 of SEQ ID NO: 1888528
ggcagagucccguugugca

SEQ ID NO: 2539493 - RNA, 19 nt, Artificial Sequence
  Description of Artificial Sequence: Synthetic oligonucleotide
  Antisense strand to SEQ ID NO: 2539492
ugcacaacgggacucugcc

SEQ ID NO: 2539494 - RNA, 19 nt, Artificial Sequence
  Description of Artificial Sequence: Synthetic oligonucleotide
  Sense strand starting at position 1174 of SEQ ID NO: 1888528
aauggaaagugcuuuacag

SEQ ID NO: 2539495 - RNA, 19 nt, Artificial Sequence
  Description of Artificial Sequence: Synthetic oligonucleotide
  Antisense strand to SEQ ID NO: 2539494
cuguaaagcacuuuccauu

SEQ ID NO: 2539496 - RNA, 19 nt, Artificial Sequence
  Description of Artificial Sequence: Synthetic oligonucleotide
  Sense strand starting at position 2407 of SEQ ID NO: 1888528
cgcgguacauuauuugaau

SEQ ID NO: 2539497 - RNA, 19 nt, Artificial Sequence
  Description of Artificial Sequence: Synthetic oligonucleotide
  Antisense strand to SEQ ID NO: 2539496
auucaaauaauguaccgcg

SEQ ID NO: 2539498 - RNA, 19 nt, Artificial Sequence
  Description of Artificial Sequence: Synthetic oligonucleotide
  Sense strand starting at position 1073 of SEQ ID NO: 1888528
aauaaacgucucugggaca

SEQ ID NO: 2539499 - RNA, 19 nt, Artificial Sequence
  Description of Artificial Sequence: Synthetic oligonucleotide
  Antisense strand to SEQ ID NO: 2539498
ugucccagagacguuuauu

SEQ ID NO: 2539500 - RNA, 19 nt, Artificial Sequence
  Description of Artificial Sequence: Synthetic oligonucleotide
  Sense strand starting at position 2410 of SEQ ID NO: 1888528
gguacauuauuugaaugaa

SEQ ID NO: 2539501 - RNA, 19 nt, Artificial Sequence
  Description of Artificial Sequence: Synthetic oligonucleotide
  Antisense strand to SEQ ID NO: 2539500
uucauucaaauaauguacc

SEQ ID NO: 2539502 - RNA, 19 nt, Artificial Sequence
  Description of Artificial Sequence: Synthetic oligonucleotide
  Sense strand starting at position 2611 of SEQ ID NO: 1888528
aaagauugcuacguagaaa

SEQ ID NO: 2539503 - RNA, 19 nt, Artificial Sequence
  Description of Artificial Sequence: Synthetic oligonucleotide
  Antisense strand to SEQ ID NO: 2539502
uuucuacguagcaaucuuu

SEQ ID NO: 2539504 - RNA, 19 nt, Artificial Sequence
  Description of Artificial Sequence: Synthetic oligonucleotide
  Sense strand starting at position 3442 of SEQ ID NO: 1888528
guauaugguaguuaugauc

SEQ ID NO: 2539505 - RNA, 19 nt, Artificial Sequence
  Description of Artificial Sequence: Synthetic oligonucleotide
  Antisense strand to SEQ ID NO: 2539504
gaucauaacuaccauauac

SEQ ID NO: 2539506 - RNA, 19 nt, Artificial Sequence
  Description of Artificial Sequence: Synthetic oligonucleotide
  Sense strand starting at position 72 of SEQ ID NO: 1888528
cgucacuuuggguagaaac

SEQ ID NO: 2539507 - RNA, 19 nt, Artificial Sequence
  Description of Artificial Sequence: Synthetic oligonucleotide
  Antisense strand to SEQ ID NO: 2539506
guuucuacccaaagugacg

SEQ ID NO: 2539508 - RNA, 19 nt, Artificial Sequence
  Description of Artificial Sequence: Synthetic oligonucleotide
  Sense strand starting at position 2691 of SEQ ID NO: 1888528
auaugaugguggucuggau

SEQ ID NO: 2539509 - RNA, 19 nt, Artificial Sequence
  Description of Artificial Sequence: Synthetic oligonucleotide
  Antisense strand to SEQ ID NO: 2539508
auccagaccaccaucauau

SEQ ID NO: 2539510 - RNA, 19 nt, Artificial Sequence
  Description of Artificial Sequence: Synthetic oligonucleotide
  Sense strand starting at position 63 of SEQ ID NO: 1888528
caaaguaaucgucacuuug

SEQ ID NO: 2539511 - RNA, 19 nt, Artificial Sequence
  Description of Artificial Sequence: Synthetic oligonucleotide
  Antisense strand to SEQ ID NO: 2539510
caaagugacgauuacuuug

SEQ ID NO: 2539512 - RNA, 19 nt, Artificial Sequence
  Description of Artificial Sequence: Synthetic oligonucleotide
  Sense strand starting at position 3947 of SEQ ID NO: 1888528
ggugcuggacucugggaaa

SEQ ID NO: 2539513 - RNA, 19 nt, Artificial Sequence
  Description of Artificial Sequence: Synthetic oligonucleotide
  Antisense strand to SEQ ID NO: 2539512
uuucccagaguccagcacc

SEQ ID NO: 2539514 - RNA, 19 nt, Artificial Sequence
  Description of Artificial Sequence: Synthetic oligonucleotide
  Sense strand starting at position 2560 of SEQ ID NO: 1888528
ccugcaaaucagugacaca

SEQ ID NO: 2539515 - RNA, 19 nt, Artificial Sequence
  Description of Artificial Sequence: Synthetic oligonucleotide
  Antisense strand to SEQ ID NO: 2539514
ugugucacugauuugcagg

SEQ ID NO: 2539516 - RNA, 19 nt, Artificial Sequence
  Description of Artificial Sequence: Synthetic oligonucleotide
  Sense strand starting at position 2661 of SEQ ID NO: 1888528
cuaggagcuucagugggau

SEQ ID NO: 2539517 - RNA, 19 nt, Artificial Sequence
  Description of Artificial Sequence: Synthetic oligonucleotide
  Antisense strand to SEQ ID NO: 2539516
aucccacugaagcuccuag

SEQ ID NO: 2539518 - RNA, 19 nt, Artificial Sequence
  Description of Artificial Sequence: Synthetic oligonucleotide
  Sense strand starting at position 297 of SEQ ID NO: 1888528
agaauugugcccuaagcca

SEQ ID NO: 2539519 - RNA, 19 nt, Artificial Sequence
  Description of Artificial Sequence: Synthetic oligonucleotide
  Antisense strand to SEQ ID NO: 2539518
uggcuuagggcacaauucu

SEQ ID NO: 2539520 - RNA, 19 nt, Artificial Sequence
  Description of Artificial Sequence: Synthetic oligonucleotide
  Sense strand starting at position 3441 of SEQ ID NO: 1888528
aguauaugguaguuaugau

SEQ ID NO: 2539521 - RNA, 19 nt, Artificial Sequence
  Description of Artificial Sequence: Synthetic oligonucleotide
  Antisense strand to SEQ ID NO: 2539520
aucauaacuaccauauacu

SEQ ID NO: 2539522 - RNA, 19 nt, Artificial Sequence
  Description of Artificial Sequence: Synthetic oligonucleotide
  Sense strand starting at position 2307 of SEQ ID NO: 1888528
ccuuccuucggauggaauu

SEQ ID NO: 2539523 - RNA, 19 nt, Artificial Sequence
  Description of Artificial Sequence: Synthetic oligonucleotide
  Antisense strand to SEQ ID NO: 2539522
aauuccauccgaaggaagg

SEQ ID NO: 2539524 - RNA, 19 nt, Artificial Sequence
  Description of Artificial Sequence: Synthetic oligonucleotide
  Sense strand starting at position 1042 of SEQ ID NO: 1888528
agaguaaggcucuauugcu

SEQ ID NO: 2539525 - RNA, 19 nt, Artificial Sequence
  Description of Artificial Sequence: Synthetic oligonucleotide
  Antisense strand to SEQ ID NO: 2539524
agcaauagagccuuacucu

SEQ ID NO: 2539526 - RNA, 19 nt, Artificial Sequence
  Description of Artificial Sequence: Synthetic oligonucleotide
  Sense strand starting at position 3094 of SEQ ID NO: 1888528
gguagugcuauguauuaaa

SEQ ID NO: 2539527 - RNA, 19 nt, Artificial Sequence
  Description of Artificial Sequence: Synthetic oligonucleotide
  Antisense strand to SEQ ID NO: 2539526
uuuaauacauagcacuacc

SEQ ID NO: 2539528 - RNA, 19 nt, Artificial Sequence
  Description of Artificial Sequence: Synthetic oligonucleotide
  Sense strand starting at position 1171 of SEQ ID NO: 1888528
cggaauggaaagugcuuua

SEQ ID NO: 2539529 - RNA, 19 nt, Artificial Sequence
  Description of Artificial Sequence: Synthetic oligonucleotide
  Antisense strand to SEQ ID NO: 2539528
uaaagcacuuuccauuccg

SEQ ID NO: 2539530 - RNA, 19 nt, Artificial Sequence
  Description of Artificial Sequence: Synthetic oligonucleotide
  Sense strand starting at position 1218 of SEQ ID NO: 1888528
guaauuaguguucacaggu

SEQ ID NO: 2539531 - RNA, 19 nt, Artificial Sequence
  Description of Artificial Sequence: Synthetic oligonucleotide
  Antisense strand to SEQ ID NO: 2539530
accugugaacacuaauuac

SEQ ID NO: 2539532 - RNA, 19 nt, Artificial Sequence
  Description of Artificial Sequence: Synthetic oligonucleotide
  Sense strand starting at position 1183 of SEQ ID NO: 1888528
ugcuuuacagauugcaaag

SEQ ID NO: 2539533 - RNA, 19 nt, Artificial Sequence
  Description of Artificial Sequence: Synthetic oligonucleotide
  Antisense strand to SEQ ID NO: 2539532
cuuugcaaucuguaaagca

SEQ ID NO: 2539534 - RNA, 19 nt, Artificial Sequence
  Description of Artificial Sequence: Synthetic oligonucleotide
  Sense strand starting at position 3414 of SEQ ID NO: 1888528
aaauaauaagugugcagua

SEQ ID NO: 2539535 - RNA, 19 nt, Artificial Sequence
  Description of Artificial Sequence: Synthetic oligonucleotide
  Antisense strand to SEQ ID NO: 2539534
uacugcacacuuauuauuu

SEQ ID NO: 2539536 - RNA, 19 nt, Artificial Sequence
  Description of Artificial Sequence: Synthetic oligonucleotide
  Sense strand starting at position 71 of SEQ ID NO: 1888528
ucgucacuuuggguagaaa

SEQ ID NO: 2539537 - RNA, 19 nt, Artificial Sequence
  Description of Artificial Sequence: Synthetic oligonucleotide
  Antisense strand to SEQ ID NO: 2539536
uuucuacccaaagugacga

SEQ ID NO: 2539538 - RNA, 19 nt, Artificial Sequence
  Description of Artificial Sequence: Synthetic oligonucleotide
  Sense strand starting at position 131 of SEQ ID NO: 1888528
auccaacugucuccaaguu

SEQ ID NO: 2539539 - RNA, 19 nt, Artificial Sequence
  Description of Artificial Sequence: Synthetic oligonucleotide
  Antisense strand to SEQ ID NO: 2539538
aacuuggagacaguuggau

SEQ ID NO: 2539540 - RNA, 19 nt, Artificial Sequence
  Description of Artificial Sequence: Synthetic oligonucleotide
  Sense strand starting at position 3482 of SEQ ID NO: 1888528
guagcaaccgguugagaaa

SEQ ID NO: 2539541 - RNA, 19 nt, Artificial Sequence
  Description of Artificial Sequence: Synthetic oligonucleotide
  Antisense strand to SEQ ID NO: 2539540
uuucucaaccgguugcuac

SEQ ID NO: 2539542 - RNA, 19 nt, Artificial Sequence
  Description of Artificial Sequence: Synthetic oligonucleotide
  Sense strand starting at position 1350 of SEQ ID NO: 1888528
uucucaaagccugguuuaa

SEQ ID NO: 2539543 - RNA, 19 nt, Artificial Sequence
  Description of Artificial Sequence: Synthetic oligonucleotide
  Antisense strand to SEQ ID NO: 2539542
uuaaaccaggcuuugagaa

SEQ ID NO: 2539544 - RNA, 19 nt, Artificial Sequence
  Description of Artificial Sequence: Synthetic oligonucleotide
  Sense strand starting at position 1349 of SEQ ID NO: 1888528
auucucaaagccugguuua

SEQ ID NO: 2539545 - RNA, 19 nt, Artificial Sequence
  Description of Artificial Sequence: Synthetic oligonucleotide
  Antisense strand to SEQ ID NO: 2539544
uaaaccaggcuuugagaau

SEQ ID NO: 2539546 - RNA, 19 nt, Artificial Sequence
  Description of Artificial Sequence: Synthetic oligonucleotide
  Sense strand starting at position 1279 of SEQ ID NO: 1888528
ccaaacgucuuucuaaagu

SEQ ID NO: 2539547 - RNA, 19 nt, Artificial Sequence
  Description of Artificial Sequence: Synthetic oligonucleotide
  Antisense strand to SEQ ID NO: 2539546
acuuuagaaagacguuugg

SEQ ID NO: 2539548 - RNA, 19 nt, Artificial Sequence
  Description of Artificial Sequence: Synthetic oligonucleotide
  Sense strand starting at position 1352 of SEQ ID NO: 1888528
cucaaagccugguuuaagu

SEQ ID NO: 2539549 - RNA, 19 nt, Artificial Sequence
  Description of Artificial Sequence: Synthetic oligonucleotide
  Antisense strand to SEQ ID NO: 2539548
acuuaaaccaggcuuugag

SEQ ID NO: 2539550 - RNA, 19 nt, Artificial Sequence
  Description of Artificial Sequence: Synthetic oligonucleotide
  Sense strand starting at position 1307 of SEQ ID NO: 1888528
caacgaagggcucggugau

SEQ ID NO: 2539551 - RNA, 19 nt, Artificial Sequence
  Description of Artificial Sequence: Synthetic oligonucleotide
  Antisense strand to SEQ ID NO: 2539550
aucaccgagcccuucguug

SEQ ID NO: 2539552 - RNA, 19 nt, Artificial Sequence
  Description of Artificial Sequence: Synthetic oligonucleotide
  Sense strand starting at position 3378 of SEQ ID NO: 1888528
gggcgacagucaguuucaa

SEQ ID NO: 2539553 - RNA, 19 nt, Artificial Sequence
  Description of Artificial Sequence: Synthetic oligonucleotide
  Antisense strand to SEQ ID NO: 2539552
uugaaacugacugucgccc

SEQ ID NO: 2539554 - RNA, 19 nt, Artificial Sequence
  Description of Artificial Sequence: Synthetic oligonucleotide
  Sense strand starting at position 2814 of SEQ ID NO: 1888528
uuuaauuauccgugugauu

SEQ ID NO: 2539555 - RNA, 19 nt, Artificial Sequence
  Description of Artificial Sequence: Synthetic oligonucleotide
  Antisense strand to SEQ ID NO: 2539554
aaucacacggauaauuaaa

SEQ ID NO: 2539556 - RNA, 19 nt, Artificial Sequence
  Description of Artificial Sequence: Synthetic oligonucleotide
  Sense strand starting at position 3248 of SEQ ID NO: 1888528
cagcaauuagccuggcaug

SEQ ID NO: 2539557 - RNA, 19 nt, Artificial Sequence
  Description of Artificial Sequence: Synthetic oligonucleotide
  Antisense strand to SEQ ID NO: 2539556
caugccaggcuaauugcug

SEQ ID NO: 2539558 - RNA, 19 nt, Artificial Sequence
  Description of Artificial Sequence: Synthetic oligonucleotide
  Sense strand starting at position 469 of SEQ ID NO: 1888529
ggauguaacguugaaggau

SEQ ID NO: 2539559 - RNA, 19 nt, Artificial Sequence
  Description of Artificial Sequence: Synthetic oligonucleotide
  Antisense strand to SEQ ID NO: 2539558
auccuucaacguuacaucc

SEQ ID NO: 2539560 - RNA, 19 nt, Artificial Sequence
  Description of Artificial Sequence: Synthetic oligonucleotide
  Sense strand starting at position 3486 of SEQ ID NO: 1888530
gacagucaugguuaccuga

SEQ ID NO: 2539561 - RNA, 19 nt, Artificial Sequence
  Description of Artificial Sequence: Synthetic oligonucleotide
  Antisense strand to SEQ ID NO: 2539560
ucagguaaccaugacuguc

SEQ ID NO: 2539562 - RNA, 19 nt, Artificial Sequence
  Description of Artificial Sequence: Synthetic oligonucleotide
  Sense strand starting at position 2597 of SEQ ID NO: 1888530
ggaagccugcuuuagggaa

SEQ ID NO: 2539563 - RNA, 19 nt, Artificial Sequence
  Description of Artificial Sequence: Synthetic oligonucleotide
  Antisense strand to SEQ ID NO: 2539562
uucccuaaagcaggcuucc

SEQ ID NO: 2539564 - RNA, 19 nt, Artificial Sequence
  Description of Artificial Sequence: Synthetic oligonucleotide
  Sense strand starting at position 3902 of SEQ ID NO: 1888530
cuuguugaccucuggacaa

SEQ ID NO: 2539565 - RNA, 19 nt, Artificial Sequence
  Description of Artificial Sequence: Synthetic oligonucleotide
  Antisense strand to SEQ ID NO: 2539564
uuguccagaggucaacaag

SEQ ID NO: 2539566 - RNA, 19 nt, Artificial Sequence
  Description of Artificial Sequence: Synthetic oligonucleotide
  Sense strand starting at position 3488 of SEQ ID NO: 1888530
cagucaugguuaccugaca

SEQ ID NO: 2539567 - RNA, 19 nt, Artificial Sequence
  Description of Artificial Sequence: Synthetic oligonucleotide
  Antisense strand to SEQ ID NO: 2539566
ugucagguaaccaugacug

SEQ ID NO: 2539568 - RNA, 19 nt, Artificial Sequence
  Description of Artificial Sequence: Synthetic oligonucleotide
  Sense strand starting at position 3489 of SEQ ID NO: 1888530
agucaugguuaccugacau

SEQ ID NO: 2539569 - RNA, 19 nt, Artificial Sequence
  Description of Artificial Sequence: Synthetic oligonucleotide
  Antisense strand to SEQ ID NO: 2539568
augucagguaaccaugacu

SEQ ID NO: 2539570 - RNA, 19 nt, Artificial Sequence
  Description of Artificial Sequence: Synthetic oligonucleotide
  Sense strand starting at position 3403 of SEQ ID NO: 1888530
ggcuucaugggcuggaaga

SEQ ID NO: 2539571 - RNA, 19 nt, Artificial Sequence
  Description of Artificial Sequence: Synthetic oligonucleotide
  Antisense strand to SEQ ID NO: 2539570
ucuuccagcccaugaagcc

SEQ ID NO: 2539572 - RNA, 19 nt, Artificial Sequence
  Description of Artificial Sequence: Synthetic oligonucleotide
  Sense strand starting at position 3812 of SEQ ID NO: 1888530
gcucacucugcaggagaaa

SEQ ID NO: 2539573 - RNA, 19 nt, Artificial Sequence
  Description of Artificial Sequence: Synthetic oligonucleotide
  Antisense strand to SEQ ID NO: 2539572
uuucuccugcagagugagc

SEQ ID NO: 2539574 - RNA, 19 nt, Artificial Sequence
  Description of Artificial Sequence: Synthetic oligonucleotide
  Sense strand starting at position 2844 of SEQ ID NO: 1888530
accaucaguuugccuaaga

SEQ ID NO: 2539575 - RNA, 19 nt, Artificial Sequence
  Description of Artificial Sequence: Synthetic oligonucleotide
  Antisense strand to SEQ ID NO: 2539574
ucuuaggcaaacugauggu

SEQ ID NO: 2539576 - RNA, 19 nt, Artificial Sequence
  Description of Artificial Sequence: Synthetic oligonucleotide
  Sense strand starting at position 2845 of SEQ ID NO: 1888530
ccaucaguuugccuaagaa

SEQ ID NO: 2539577 - RNA, 19 nt, Artificial Sequence
  Description of Artificial Sequence: Synthetic oligonucleotide
  Antisense strand to SEQ ID NO: 2539576
uucuuaggcaaacugaugg

SEQ ID NO: 2539578 - RNA, 19 nt, Artificial Sequence
  Description of Artificial Sequence: Synthetic oligonucleotide
  Sense strand starting at position 3480 of SEQ ID NO: 1888530
gcaguagacagucaugguu

SEQ ID NO: 2539579 - RNA, 19 nt, Artificial Sequence
  Description of Artificial Sequence: Synthetic oligonucleotide
  Antisense strand to SEQ ID NO: 2539578
aaccaugacugucuacugc

SEQ ID NO: 2539580 - RNA, 19 nt, Artificial Sequence
  Description of Artificial Sequence: Synthetic oligonucleotide
  Sense strand starting at position 2911 of SEQ ID NO: 1888530
gcugaugagcaguggaauu

SEQ ID NO: 2539581 - RNA, 19 nt, Artificial Sequence
  Description of Artificial Sequence: Synthetic oligonucleotide
  Antisense strand to SEQ ID NO: 2539580
aauuccacugcucaucagc

SEQ ID NO: 2539582 - RNA, 19 nt, Artificial Sequence
  Description of Artificial Sequence: Synthetic oligonucleotide
  Sense strand starting at position 2923 of SEQ ID NO: 1888530
uggaauugcgccugugaau

SEQ ID NO: 2539583 - RNA, 19 nt, Artificial Sequence
  Description of Artificial Sequence: Synthetic oligonucleotide
  Antisense strand to SEQ ID NO: 2539582
auucacaggcgcaauucca

SEQ ID NO: 2539584 - RNA, 19 nt, Artificial Sequence
  Description of Artificial Sequence: Synthetic oligonucleotide
  Sense strand starting at position 2318 of SEQ ID NO: 1888530
ugccuucuguguuccucaa

SEQ ID NO: 2539585 - RNA, 19 nt, Artificial Sequence
  Description of Artificial Sequence: Synthetic oligonucleotide
  Antisense strand to SEQ ID NO: 2539584
uugaggaacacagaaggca

SEQ ID NO: 2539586 - RNA, 19 nt, Artificial Sequence
  Description of Artificial Sequence: Synthetic oligonucleotide
  Sense strand starting at position 2468 of SEQ ID NO: 1888530
agagcugugugucucggua

SEQ ID NO: 2539587 - RNA, 19 nt, Artificial Sequence
  Description of Artificial Sequence: Synthetic oligonucleotide
  Antisense strand to SEQ ID NO: 2539586
uaccgagacacacagcucu

SEQ ID NO: 2539588 - RNA, 19 nt, Artificial Sequence
  Description of Artificial Sequence: Synthetic oligonucleotide
  Sense strand starting at position 2578 of SEQ ID NO: 1888530
ggacuuguuucccagcgga

SEQ ID NO: 2539589 - RNA, 19 nt, Artificial Sequence
  Description of Artificial Sequence: Synthetic oligonucleotide
  Antisense strand to SEQ ID NO: 2539588
uccgcugggaaacaagucc

SEQ ID NO: 2539590 - RNA, 19 nt, Artificial Sequence
  Description of Artificial Sequence: Synthetic oligonucleotide
  Sense strand starting at position 3469 of SEQ ID NO: 1888530
ugcauuguauggcaguaga

SEQ ID NO: 2539591 - RNA, 19 nt, Artificial Sequence
  Description of Artificial Sequence: Synthetic oligonucleotide
  Antisense strand to SEQ ID NO: 2539590
ucuacugccauacaaugca

SEQ ID NO: 2539592 - RNA, 19 nt, Artificial Sequence
  Description of Artificial Sequence: Synthetic oligonucleotide
  Sense strand starting at position 3467 of SEQ ID NO: 1888530
ggugcauuguauggcagua

SEQ ID NO: 2539593 - RNA, 19 nt, Artificial Sequence
  Description of Artificial Sequence: Synthetic oligonucleotide
  Antisense strand to SEQ ID NO: 2539592
uacugccauacaaugcacc

SEQ ID NO: 2539594 - RNA, 19 nt, Artificial Sequence
  Description of Artificial Sequence: Synthetic oligonucleotide
  Sense strand starting at position 1593 of SEQ ID NO: 1888531
cagaaucuuugaguuaaag

SEQ ID NO: 2539595 - RNA, 19 nt, Artificial Sequence
  Description of Artificial Sequence: Synthetic oligonucleotide
  Antisense strand to SEQ ID NO: 2539594
cuuuaacucaaagauucug

SEQ ID NO: 2539596 - RNA, 19 nt, Artificial Sequence
  Description of Artificial Sequence: Synthetic oligonucleotide
  Sense strand starting at position 1697 of SEQ ID NO: 1888531
agcagacuuccagaccauu

SEQ ID NO: 2539597 - RNA, 19 nt, Artificial Sequence
  Description of Artificial Sequence: Synthetic oligonucleotide
  Antisense strand to SEQ ID NO: 2539596
aauggucuggaagucugcu

SEQ ID NO: 2539598 - RNA, 19 nt, Artificial Sequence
  Description of Artificial Sequence: Synthetic oligonucleotide
  Sense strand starting at position 2874 of SEQ ID NO: 1888531
uuacuaaugagaugcagag

SEQ ID NO: 2539599 - RNA, 19 nt, Artificial Sequence
  Description of Artificial Sequence: Synthetic oligonucleotide
  Antisense strand to SEQ ID NO: 2539598
cucugcaucucauuaguaa

SEQ ID NO: 2539600 - RNA, 19 nt, Artificial Sequence
  Description of Artificial Sequence: Synthetic oligonucleotide
  Sense strand starting at position 1599 of SEQ ID NO: 1888531
cuuugaguuaaagggaacu

SEQ ID NO: 2539601 - RNA, 19 nt, Artificial Sequence
  Description of Artificial Sequence: Synthetic oligonucleotide
  Antisense strand to SEQ ID NO: 2539600
aguucccuuuaacucaaag

SEQ ID NO: 2539602 - RNA, 19 nt, Artificial Sequence
  Description of Artificial Sequence: Synthetic oligonucleotide
  Sense strand starting at position 2622 of SEQ ID NO: 1888531
augagacccugacucuuua

SEQ ID NO: 2539603 - RNA, 19 nt, Artificial Sequence
  Description of Artificial Sequence: Synthetic oligonucleotide
  Antisense strand to SEQ ID NO: 2539602
uaaagagucagggucucau

SEQ ID NO: 2539604 - RNA, 19 nt, Artificial Sequence
  Description of Artificial Sequence: Synthetic oligonucleotide
  Sense strand starting at position 1803 of SEQ ID NO: 1888531
ugcggagugacauagaaca

SEQ ID NO: 2539605 - RNA, 19 nt, Artificial Sequence
  Description of Artificial Sequence: Synthetic oligonucleotide
  Antisense strand to SEQ ID NO: 2539604
uguucuaugucacuccgca

SEQ ID NO: 2539606 - RNA, 19 nt, Artificial Sequence
  Description of Artificial Sequence: Synthetic oligonucleotide
  Sense strand starting at position 3273 of SEQ ID NO: 1888531
ugcaguaaauuuguuccua

SEQ ID NO: 2539607 - RNA, 19 nt, Artificial Sequence
  Description of Artificial Sequence: Synthetic oligonucleotide
  Antisense strand to SEQ ID NO: 2539606
uaggaacaaauuuacugca

SEQ ID NO: 2539608 - RNA, 19 nt, Artificial Sequence
  Description of Artificial Sequence: Synthetic oligonucleotide
  Sense strand starting at position 2739 of SEQ ID NO: 1888531
ggauuacaagcucauucuu

SEQ ID NO: 2539609 - RNA, 19 nt, Artificial Sequence
  Description of Artificial Sequence: Synthetic oligonucleotide
  Antisense strand to SEQ ID NO: 2539608
aagaaugagcuuguaaucc

SEQ ID NO: 2539610 - RNA, 19 nt, Artificial Sequence
  Description of Artificial Sequence: Synthetic oligonucleotide
  Sense strand starting at position 3074 of SEQ ID NO: 1888531
guauaaaguggucaaguaa

SEQ ID NO: 2539611 - RNA, 19 nt, Artificial Sequence
  Description of Artificial Sequence: Synthetic oligonucleotide
  Antisense strand to SEQ ID NO: 2539610
uuacuugaccacuuuauac

SEQ ID NO: 2539612 - RNA, 19 nt, Artificial Sequence
  Description of Artificial Sequence: Synthetic oligonucleotide
  Sense strand starting at position 3859 of SEQ ID NO: 1888531
ggacuagauucccucccau

SEQ ID NO: 2539613 - RNA, 19 nt, Artificial Sequence
  Description of Artificial Sequence: Synthetic oligonucleotide
  Antisense strand to SEQ ID NO: 2539612
augggagggaaucuagucc

SEQ ID NO: 2539614 - RNA, 19 nt, Artificial Sequence
  Description of Artificial Sequence: Synthetic oligonucleotide
  Sense strand starting at position 1649 of SEQ ID NO: 1888531
guagauauccuauaagcuc

SEQ ID NO: 2539615 - RNA, 19 nt, Artificial Sequence
  Description of Artificial Sequence: Synthetic oligonucleotide
  Antisense strand to SEQ ID NO: 2539614
gagcuuauaggauaucuac

SEQ ID NO: 2539616 - RNA, 19 nt, Artificial Sequence
  Description of Artificial Sequence: Synthetic oligonucleotide
  Sense strand starting at position 339 of SEQ ID NO: 1888531
aggcuaccucauuggaaua

SEQ ID NO: 2539617 - RNA, 19 nt, Artificial Sequence
  Description of Artificial Sequence: Synthetic oligonucleotide
  Antisense strand to SEQ ID NO: 2539616
uauuccaaugagguagccu

SEQ ID NO: 2539618 - RNA, 19 nt, Artificial Sequence
  Description of Artificial Sequence: Synthetic oligonucleotide
  Sense strand starting at position 565 of SEQ ID NO: 1888531
aagauuuguucccugcugu

SEQ ID NO: 2539619 - RNA, 19 nt, Artificial Sequence
  Description of Artificial Sequence: Synthetic oligonucleotide
  Antisense strand to SEQ ID NO: 2539618
acagcagggaacaaaucuu

SEQ ID NO: 2539620 - RNA, 19 nt, Artificial Sequence
  Description of Artificial Sequence: Synthetic oligonucleotide
  Sense strand starting at position 2884 of SEQ ID NO: 1888531
gaugcagagugaccuugaa

SEQ ID NO: 2539621 - RNA, 19 nt, Artificial Sequence
  Description of Artificial Sequence: Synthetic oligonucleotide
  Antisense strand to SEQ ID NO: 2539620
uucaaggucacucugcauc

SEQ ID NO: 2539622 - RNA, 19 nt, Artificial Sequence
  Description of Artificial Sequence: Synthetic oligonucleotide
  Sense strand starting at position 1589 of SEQ ID NO: 1888531
cucacagaaucuuugaguu

SEQ ID NO: 2539623 - RNA, 19 nt, Artificial Sequence
  Description of Artificial Sequence: Synthetic oligonucleotide
  Antisense strand to SEQ ID NO: 2539622
aacucaaagauucugugag

SEQ ID NO: 2539624 - RNA, 19 nt, Artificial Sequence
  Description of Artificial Sequence: Synthetic oligonucleotide
  Sense strand starting at position 262 of SEQ ID NO: 1888531
gaaaccuguucugcaaaga

SEQ ID NO: 2539625 - RNA, 19 nt, Artificial Sequence
  Description of Artificial Sequence: Synthetic oligonucleotide
  Antisense strand to SEQ ID NO: 2539624
ucuuugcagaacagguuuc

SEQ ID NO: 2539626 - RNA, 19 nt, Artificial Sequence
  Description of Artificial Sequence: Synthetic oligonucleotide
  Sense strand starting at position 2314 of SEQ ID NO: 1888531
ggaagaccuuucuuucucu

SEQ ID NO: 2539627 - RNA, 19 nt, Artificial Sequence
  Description of Artificial Sequence: Synthetic oligonucleotide
  Antisense strand to SEQ ID NO: 2539626
agagaaagaaaggucuucc

SEQ ID NO: 2539628 - RNA, 19 nt, Artificial Sequence
  Description of Artificial Sequence: Synthetic oligonucleotide
  Sense strand starting at position 1616 of SEQ ID NO: 1888531
cuuggaagucauggaguca

SEQ ID NO: 2539629 - RNA, 19 nt, Artificial Sequence
  Description of Artificial Sequence: Synthetic oligonucleotide
  Antisense strand to SEQ ID NO: 2539628
ugacuccaugacuuccaag

SEQ ID NO: 2539630 - RNA, 19 nt, Artificial Sequence
  Description of Artificial Sequence: Synthetic oligonucleotide
  Sense strand starting at position 3149 of SEQ ID NO: 1888531
guaauuaaacucugugaac

SEQ ID NO: 2539631 - RNA, 19 nt, Artificial Sequence
  Description of Artificial Sequence: Synthetic oligonucleotide
  Antisense strand to SEQ ID NO: 2539630
guucacagaguuuaauuac

SEQ ID NO: 2539632 - RNA, 19 nt, Artificial Sequence
  Description of Artificial Sequence: Synthetic oligonucleotide
  Sense strand starting at position 2061 of SEQ ID NO: 1888531
caguuacuccgugaaacau

SEQ ID NO: 2539633 - RNA, 19 nt, Artificial Sequence
  Description of Artificial Sequence: Synthetic oligonucleotide
  Antisense strand to SEQ ID NO: 2539632
auguuucacggaguaacug

SEQ ID NO: 2539634 - RNA, 19 nt, Artificial Sequence
  Description of Artificial Sequence: Synthetic oligonucleotide
  Sense strand starting at position 2907 of SEQ ID NO: 1888531
acaguuaaccucuguagag

SEQ ID NO: 2539635 - RNA, 19 nt, Artificial Sequence
  Description of Artificial Sequence: Synthetic oligonucleotide
  Antisense strand to SEQ ID NO: 2539634
cucuacagagguuaacugu

SEQ ID NO: 2539636 - RNA, 19 nt, Artificial Sequence
  Description of Artificial Sequence: Synthetic oligonucleotide
  Sense strand starting at position 259 of SEQ ID NO: 1888531
acagaaaccuguucugcaa

SEQ ID NO: 2539637 - RNA, 19 nt, Artificial Sequence
  Description of Artificial Sequence: Synthetic oligonucleotide
  Antisense strand to SEQ ID NO: 2539636
uugcagaacagguuucugu

SEQ ID NO: 2539638 - RNA, 19 nt, Artificial Sequence
  Description of Artificial Sequence: Synthetic oligonucleotide
  Sense strand starting at position 566 of SEQ ID NO: 1888531
agauuuguucccugcuguu

SEQ ID NO: 2539639 - RNA, 19 nt, Artificial Sequence
  Description of Artificial Sequence: Synthetic oligonucleotide
  Antisense strand to SEQ ID NO: 2539638
aacagcagggaacaaaucu

SEQ ID NO: 2539640 - RNA, 19 nt, Artificial Sequence
  Description of Artificial Sequence: Synthetic oligonucleotide
  Sense strand starting at position 806 of SEQ ID NO: 1888531
ugguuaugagacuggcuaa

SEQ ID NO: 2539641 - RNA, 19 nt, Artificial Sequence
  Description of Artificial Sequence: Synthetic oligonucleotide
  Antisense strand to SEQ ID NO: 2539640
uuagccagucucauaacca

SEQ ID NO: 2539642 - RNA, 19 nt, Artificial Sequence
  Description of Artificial Sequence: Synthetic oligonucleotide
  Sense strand starting at position 2969 of SEQ ID NO: 1888531
cucguaggucucuaggaau

SEQ ID NO: 2539643 - RNA, 19 nt, Artificial Sequence
  Description of Artificial Sequence: Synthetic oligonucleotide
  Antisense strand to SEQ ID NO: 2539642
auuccuagagaccuacgag

SEQ ID NO: 2539644 - RNA, 19 nt, Artificial Sequence
  Description of Artificial Sequence: Synthetic oligonucleotide
  Sense strand starting at position 1062 of SEQ ID NO: 1888531
uuucuacuggcaugaacua

SEQ ID NO: 2539645 - RNA, 19 nt, Artificial Sequence
  Description of Artificial Sequence: Synthetic oligonucleotide
  Antisense strand to SEQ ID NO: 2539644
uaguucaugccaguagaaa

SEQ ID NO: 2539646 - RNA, 19 nt, Artificial Sequence
  Description of Artificial Sequence: Synthetic oligonucleotide
  Sense strand starting at position 2959 of SEQ ID NO: 1888531
agagaaugaccucguaggu

SEQ ID NO: 2539647 - RNA, 19 nt, Artificial Sequence
  Description of Artificial Sequence: Synthetic oligonucleotide
  Antisense strand to SEQ ID NO: 2539646
accuacgaggucauucucu

SEQ ID NO: 2539648 - RNA, 19 nt, Artificial Sequence
  Description of Artificial Sequence: Synthetic oligonucleotide
  Sense strand starting at position 2807 of SEQ ID NO: 1888531
ugauuagcuagcuauggua

SEQ ID NO: 2539649 - RNA, 19 nt, Artificial Sequence
  Description of Artificial Sequence: Synthetic oligonucleotide
  Antisense strand to SEQ ID NO: 2539648
uaccauagcuagcuaauca

SEQ ID NO: 2539650 - RNA, 19 nt, Artificial Sequence
  Description of Artificial Sequence: Synthetic oligonucleotide
  Sense strand starting at position 3073 of SEQ ID NO: 1888531
gguauaaaguggucaagua

SEQ ID NO: 2539651 - RNA, 19 nt, Artificial Sequence
  Description of Artificial Sequence: Synthetic oligonucleotide
  Antisense strand to SEQ ID NO: 2539650
uacuugaccacuuuauacc

SEQ ID NO: 2539652 - RNA, 19 nt, Artificial Sequence
  Description of Artificial Sequence: Synthetic oligonucleotide
  Sense strand starting at position 2161 of SEQ ID NO: 1888531
gaaccuguugguugacuua

SEQ ID NO: 2539653 - RNA, 19 nt, Artificial Sequence
  Description of Artificial Sequence: Synthetic oligonucleotide
  Antisense strand to SEQ ID NO: 2539652
uaagucaaccaacagguuc

SEQ ID NO: 2539654 - RNA, 19 nt, Artificial Sequence
  Description of Artificial Sequence: Synthetic oligonucleotide
  Sense strand starting at position 1717 of SEQ ID NO: 1888531
uguggugaguccgcaauuu

SEQ ID NO: 2539655 - RNA, 19 nt, Artificial Sequence
  Description of Artificial Sequence: Synthetic oligonucleotide
  Antisense strand to SEQ ID NO: 2539654
aaauugcggacucaccaca

SEQ ID NO: 2539656 - RNA, 19 nt, Artificial Sequence
  Description of Artificial Sequence: Synthetic oligonucleotide
  Sense strand starting at position 940 of SEQ ID NO: 1888531
gugucuggccuggauucaa

SEQ ID NO: 2539657 - RNA, 19 nt, Artificial Sequence
  Description of Artificial Sequence: Synthetic oligonucleotide
  Antisense strand to SEQ ID NO: 2539656
uugaauccaggccagacac

SEQ ID NO: 2539658 - RNA, 19 nt, Artificial Sequence
  Description of Artificial Sequence: Synthetic oligonucleotide
  Sense strand starting at position 2098 of SEQ ID NO: 1888531
cuaauauagcucugagguu

SEQ ID NO: 2539659 - RNA, 19 nt, Artificial Sequence
  Description of Artificial Sequence: Synthetic oligonucleotide
  Antisense strand to SEQ ID NO: 2539658
aaccucagagcuauauuag

SEQ ID NO: 2539660 - RNA, 19 nt, Artificial Sequence
  Description of Artificial Sequence: Synthetic oligonucleotide
  Sense strand starting at position 1009 of SEQ ID NO: 1888531
gacaaaucauuugaaucgu

SEQ ID NO: 2539661 - RNA, 19 nt, Artificial Sequence
  Description of Artificial Sequence: Synthetic oligonucleotide
  Antisense strand to SEQ ID NO: 2539660
acgauucaaaugauuuguc

SEQ ID NO: 2539662 - RNA, 19 nt, Artificial Sequence
  Description of Artificial Sequence: Synthetic oligonucleotide
  Sense strand starting at position 2046 of SEQ ID NO: 1888531
ccaagauuccugggccagu

SEQ ID NO: 2539663 - RNA, 19 nt, Artificial Sequence
  Description of Artificial Sequence: Synthetic oligonucleotide
  Antisense strand to SEQ ID NO: 2539662
acuggcccaggaaucuugg

SEQ ID NO: 2539664 - RNA, 19 nt, Artificial Sequence
  Description of Artificial Sequence: Synthetic oligonucleotide
  Sense strand starting at position 2991 of SEQ ID NO: 1888531
aguguaccuuaugcaaaua

SEQ ID NO: 2539665 - RNA, 19 nt, Artificial Sequence
  Description of Artificial Sequence: Synthetic oligonucleotide
  Antisense strand to SEQ ID NO: 2539664
uauuugcauaagguacacu

SEQ ID NO: 2539666 - RNA, 19 nt, Artificial Sequence
  Description of Artificial Sequence: Synthetic oligonucleotide
  Sense strand starting at position 3085 of SEQ ID NO: 1888531
ucaaguaaauguucuaugu

SEQ ID NO: 2539667 - RNA, 19 nt, Artificial Sequence
  Description of Artificial Sequence: Synthetic oligonucleotide
  Antisense strand to SEQ ID NO: 2539666
acauagaacauuuacuuga

SEQ ID NO: 2539668 - RNA, 19 nt, Artificial Sequence
  Description of Artificial Sequence: Synthetic oligonucleotide
  Sense strand starting at position 2214 of SEQ ID NO: 1888531
gccucuacugugcaauaua

SEQ ID NO: 2539669 - RNA, 19 nt, Artificial Sequence
  Description of Artificial Sequence: Synthetic oligonucleotide
  Antisense strand to SEQ ID NO: 2539668
uauauugcacaguagaggc

SEQ ID NO: 2539670 - RNA, 19 nt, Artificial Sequence
  Description of Artificial Sequence: Synthetic oligonucleotide
  Sense strand starting at position 2060 of SEQ ID NO: 1888531
ccaguuacuccgugaaaca

SEQ ID NO: 2539671 - RNA, 19 nt, Artificial Sequence
  Description of Artificial Sequence: Synthetic oligonucleotide
  Antisense strand to SEQ ID NO: 2539670
uguuucacggaguaacugg

SEQ ID NO: 2539672 - RNA, 19 nt, Artificial Sequence
  Description of Artificial Sequence: Synthetic oligonucleotide
  Sense strand starting at position 2968 of SEQ ID NO: 1888531
ccucguaggucucuaggaa

SEQ ID NO: 2539673 - RNA, 19 nt, Artificial Sequence
  Description of Artificial Sequence: Synthetic oligonucleotide
  Antisense strand to SEQ ID NO: 2539672
uuccuagagaccuacgagg

SEQ ID NO: 2539674 - RNA, 19 nt, Artificial Sequence
  Description of Artificial Sequence: Synthetic oligonucleotide
  Sense strand starting at position 638 of SEQ ID NO: 1888532
ugagaaucgcuuuaacuug

SEQ ID NO: 2539675 - RNA, 19 nt, Artificial Sequence
  Description of Artificial Sequence: Synthetic oligonucleotide
  Antisense strand to SEQ ID NO: 2539674
caaguuaaagcgauucuca

SEQ ID NO: 2539676 - RNA, 19 nt, Artificial Sequence
  Description of Artificial Sequence: Synthetic oligonucleotide
  Sense strand starting at position 3562 of SEQ ID NO: 1888534
aguaauaaucaaggaagca

SEQ ID NO: 2539677 - RNA, 19 nt, Artificial Sequence
  Description of Artificial Sequence: Synthetic oligonucleotide
  Antisense strand to SEQ ID NO: 2539676
ugcuuccuugauuauuacu

SEQ ID NO: 2539678 - RNA, 19 nt, Artificial Sequence
  Description of Artificial Sequence: Synthetic oligonucleotide
  Sense strand starting at position 3118 of SEQ ID NO: 1888534
aguaauguccuuuaagaug

SEQ ID NO: 2539679 - RNA, 19 nt, Artificial Sequence
  Description of Artificial Sequence: Synthetic oligonucleotide
  Antisense strand to SEQ ID NO: 2539678
caucuuaaaggacauuacu

SEQ ID NO: 2539680 - RNA, 19 nt, Artificial Sequence
  Description of Artificial Sequence: Synthetic oligonucleotide
  Sense strand starting at position 3636 of SEQ ID NO: 1888534
ugaaaugaguacuccuaau

SEQ ID NO: 2539681 - RNA, 19 nt, Artificial Sequence
  Description of Artificial Sequence: Synthetic oligonucleotide
  Antisense strand to SEQ ID NO: 2539680
auuaggaguacucauuuca

SEQ ID NO: 2539682 - RNA, 19 nt, Artificial Sequence
  Description of Artificial Sequence: Synthetic oligonucleotide
  Sense strand starting at position 2681 of SEQ ID NO: 1888534
gggacucuagcugaaucuu

SEQ ID NO: 2539683 - RNA, 19 nt, Artificial Sequence
  Description of Artificial Sequence: Synthetic oligonucleotide
  Antisense strand to SEQ ID NO: 2539682
aagauucagcuagaguccc

SEQ ID NO: 2539684 - RNA, 19 nt, Artificial Sequence
  Description of Artificial Sequence: Synthetic oligonucleotide
  Sense strand starting at position 2589 of SEQ ID NO: 1888534
aggaaugacuguccgggaa

SEQ ID NO: 2539685 - RNA, 19 nt, Artificial Sequence
  Description of Artificial Sequence: Synthetic oligonucleotide
  Antisense strand to SEQ ID NO: 2539684
uucccggacagucauuccu

SEQ ID NO: 2539686 - RNA, 19 nt, Artificial Sequence
  Description of Artificial Sequence: Synthetic oligonucleotide
  Sense strand starting at position 1193 of SEQ ID NO: 1888534
ggacuagaggccuggauca

SEQ ID NO: 2539687 - RNA, 19 nt, Artificial Sequence
  Description of Artificial Sequence: Synthetic oligonucleotide
  Antisense strand to SEQ ID NO: 2539686
ugauccaggccucuagucc

SEQ ID NO: 2539688 - RNA, 19 nt, Artificial Sequence
  Description of Artificial Sequence: Synthetic oligonucleotide
  Sense strand starting at position 1068 of SEQ ID NO: 1888534
gcucuugugcugcccugaa

SEQ ID NO: 2539689 - RNA, 19 nt, Artificial Sequence
  Description of Artificial Sequence: Synthetic oligonucleotide
  Antisense strand to SEQ ID NO: 2539688
uucagggcagcacaagagc

SEQ ID NO: 2539690 - RNA, 19 nt, Artificial Sequence
  Description of Artificial Sequence: Synthetic oligonucleotide
  Sense strand starting at position 3941 of SEQ ID NO: 1888534
ggucaauggacugggagua

SEQ ID NO: 2539691 - RNA, 19 nt, Artificial Sequence
  Description of Artificial Sequence: Synthetic oligonucleotide
  Antisense strand to SEQ ID NO: 2539690
uacucccaguccauugacc

SEQ ID NO: 2539692 - RNA, 19 nt, Artificial Sequence
  Description of Artificial Sequence: Synthetic oligonucleotide
  Sense strand starting at position 3204 of SEQ ID NO: 1888534
cagagaugggcggaucagu

SEQ ID NO: 2539693 - RNA, 19 nt, Artificial Sequence
  Description of Artificial Sequence: Synthetic oligonucleotide
  Antisense strand to SEQ ID NO: 2539692
acugauccgcccaucucug

SEQ ID NO: 2539694 - RNA, 19 nt, Artificial Sequence
  Description of Artificial Sequence: Synthetic oligonucleotide
  Sense strand starting at position 3116 of SEQ ID NO: 1888534
gaaguaauguccuuuaaga

SEQ ID NO: 2539695 - RNA, 19 nt, Artificial Sequence
  Description of Artificial Sequence: Synthetic oligonucleotide
  Antisense strand to SEQ ID NO: 2539694
ucuuaaaggacauuacuuc

SEQ ID NO: 2539696 - RNA, 19 nt, Artificial Sequence
  Description of Artificial Sequence: Synthetic oligonucleotide
  Sense strand starting at position 3126 of SEQ ID NO: 1888534
ccuuuaagauguucuuaga

SEQ ID NO: 2539697 - RNA, 19 nt, Artificial Sequence
  Description of Artificial Sequence: Synthetic oligonucleotide
  Antisense strand to SEQ ID NO: 2539696
ucuaagaacaucuuaaagg

SEQ ID NO: 2539698 - RNA, 19 nt, Artificial Sequence
  Description of Artificial Sequence: Synthetic oligonucleotide
  Sense strand starting at position 3767 of SEQ ID NO: 1888534
ggaggauccaucgggcaau

SEQ ID NO: 2539699 - RNA, 19 nt, Artificial Sequence
  Description of Artificial Sequence: Synthetic oligonucleotide
  Antisense strand to SEQ ID NO: 2539698
auugcccgauggauccucc

SEQ ID NO: 2539700 - RNA, 19 nt, Artificial Sequence
  Description of Artificial Sequence: Synthetic oligonucleotide
  Sense strand starting at position 1430 of SEQ ID NO: 1888534
gaauuuauaugcgugcauu

SEQ ID NO: 2539701 - RNA, 19 nt, Artificial Sequence
  Description of Artificial Sequence: Synthetic oligonucleotide
  Antisense strand to SEQ ID NO: 2539700
aaugcacgcauauaaauuc

SEQ ID NO: 2539702 - RNA, 19 nt, Artificial Sequence
  Description of Artificial Sequence: Synthetic oligonucleotide
  Sense strand starting at position 2743 of SEQ ID NO: 1888534
ccagaaugcuuccuuggga

SEQ ID NO: 2539703 - RNA, 19 nt, Artificial Sequence
  Description of Artificial Sequence: Synthetic oligonucleotide
  Antisense strand to SEQ ID NO: 2539702
ucccaaggaagcauucugg

SEQ ID NO: 2539704 - RNA, 19 nt, Artificial Sequence
  Description of Artificial Sequence: Synthetic oligonucleotide
  Sense strand starting at position 1429 of SEQ ID NO: 1888534
ugaauuuauaugcgugcau

SEQ ID NO: 2539705 - RNA, 19 nt, Artificial Sequence
  Description of Artificial Sequence: Synthetic oligonucleotide
  Antisense strand to SEQ ID NO: 2539704
augcacgcauauaaauuca

SEQ ID NO: 2539706 - RNA, 19 nt, Artificial Sequence
  Description of Artificial Sequence: Synthetic oligonucleotide
  Sense strand starting at position 2956 of SEQ ID NO: 1888534
ucugaugucuggguaugaa

SEQ ID NO: 2539707 - RNA, 19 nt, Artificial Sequence
  Description of Artificial Sequence: Synthetic oligonucleotide
  Antisense strand to SEQ ID NO: 2539706
uucauacccagacaucaga

SEQ ID NO: 2539708 - RNA, 19 nt, Artificial Sequence
  Description of Artificial Sequence: Synthetic oligonucleotide
  Sense strand starting at position 2944 of SEQ ID NO: 1888534
gggaucuguuucucugaug

SEQ ID NO: 2539709 - RNA, 19 nt, Artificial Sequence
  Description of Artificial Sequence: Synthetic oligonucleotide
  Antisense strand to SEQ ID NO: 2539708
caucagagaaacagauccc

SEQ ID NO: 2539710 - RNA, 19 nt, Artificial Sequence
  Description of Artificial Sequence: Synthetic oligonucleotide
  Sense strand starting at position 1431 of SEQ ID NO: 1888534
aauuuauaugcgugcauuc

SEQ ID NO: 2539711 - RNA, 19 nt, Artificial Sequence
  Description of Artificial Sequence: Synthetic oligonucleotide
  Antisense strand to SEQ ID NO: 2539710
gaaugcacgcauauaaauu

SEQ ID NO: 2539712 - RNA, 19 nt, Artificial Sequence
  Description of Artificial Sequence: Synthetic oligonucleotide
  Sense strand starting at position 1428 of SEQ ID NO: 1888534
gugaauuuauaugcgugca

SEQ ID NO: 2539713 - RNA, 19 nt, Artificial Sequence
  Description of Artificial Sequence: Synthetic oligonucleotide
  Antisense strand to SEQ ID NO: 2539712
ugcacgcauauaaauucac

SEQ ID NO: 2539714 - RNA, 19 nt, Artificial Sequence
  Description of Artificial Sequence: Synthetic oligonucleotide
  Sense strand starting at position 3916 of SEQ ID NO: 1888534
uguagacucuuccuaucca

SEQ ID NO: 2539715 - RNA, 19 nt, Artificial Sequence
  Description of Artificial Sequence: Synthetic oligonucleotide
  Antisense strand to SEQ ID NO: 2539714
uggauaggaagagucuaca

SEQ ID NO: 2539716 - RNA, 19 nt, Artificial Sequence
  Description of Artificial Sequence: Synthetic oligonucleotide
  Sense strand starting at position 990 of SEQ ID NO: 1888534
gcaucuuucggucaagaug

SEQ ID NO: 2539717 - RNA, 19 nt, Artificial Sequence
  Description of Artificial Sequence: Synthetic oligonucleotide
  Antisense strand to SEQ ID NO: 2539716
caucuugaccgaaagaugc

SEQ ID NO: 2539718 - RNA, 19 nt, Artificial Sequence
  Description of Artificial Sequence: Synthetic oligonucleotide
  Sense strand starting at position 2955 of SEQ ID NO: 1888534
cucugaugucuggguauga

SEQ ID NO: 2539719 - RNA, 19 nt, Artificial Sequence
  Description of Artificial Sequence: Synthetic oligonucleotide
  Antisense strand to SEQ ID NO: 2539718
ucauacccagacaucagag

SEQ ID NO: 2539720 - RNA, 19 nt, Artificial Sequence
  Description of Artificial Sequence: Synthetic oligonucleotide
  Sense strand starting at position 2838 of SEQ ID NO: 1888534
uccugaguucgaggaguag

SEQ ID NO: 2539721 - RNA, 19 nt, Artificial Sequence
  Description of Artificial Sequence: Synthetic oligonucleotide
  Antisense strand to SEQ ID NO: 2539720
cuacuccucgaacucagga

SEQ ID NO: 2539722 - RNA, 19 nt, Artificial Sequence
  Description of Artificial Sequence: Synthetic oligonucleotide
  Sense strand starting at position 2296 of SEQ ID NO: 1888534
aucugaggguucguucaga

SEQ ID NO: 2539723 - RNA, 19 nt, Artificial Sequence
  Description of Artificial Sequence: Synthetic oligonucleotide
  Antisense strand to SEQ ID NO: 2539722
ucugaacgaacccucagau

SEQ ID NO: 2539724 - RNA, 19 nt, Artificial Sequence
  Description of Artificial Sequence: Synthetic oligonucleotide
  Sense strand starting at position 3914 of SEQ ID NO: 1888534
aguguagacucuuccuauc

SEQ ID NO: 2539725 - RNA, 19 nt, Artificial Sequence
  Description of Artificial Sequence: Synthetic oligonucleotide
  Antisense strand to SEQ ID NO: 2539724
gauaggaagagucuacacu

SEQ ID NO: 2539726 - RNA, 19 nt, Artificial Sequence
  Description of Artificial Sequence: Synthetic oligonucleotide
  Sense strand starting at position 1451 of SEQ ID NO: 1888534
acgcaagaacucugucaac

SEQ ID NO: 2539727 - RNA, 19 nt, Artificial Sequence
  Description of Artificial Sequence: Synthetic oligonucleotide
  Antisense strand to SEQ ID NO: 2539726
guugacagaguucuugcgu

SEQ ID NO: 2539728 - RNA, 19 nt, Artificial Sequence
  Description of Artificial Sequence: Synthetic oligonucleotide
  Sense strand starting at position 2746 of SEQ ID NO: 1888534
gaaugcuuccuugggaguu

SEQ ID NO: 2539729 - RNA, 19 nt, Artificial Sequence
  Description of Artificial Sequence: Synthetic oligonucleotide
  Antisense strand to SEQ ID NO: 2539728
aacucccaaggaagcauuc

SEQ ID NO: 2539730 - RNA, 19 nt, Artificial Sequence
  Description of Artificial Sequence: Synthetic oligonucleotide
  Sense strand starting at position 1442 of SEQ ID NO: 1888534
gugcauuccacgcaagaac

SEQ ID NO: 2539731 - RNA, 19 nt, Artificial Sequence
  Description of Artificial Sequence: Synthetic oligonucleotide
  Antisense strand to SEQ ID NO: 2539730
guucuugcguggaaugcac

SEQ ID NO: 2539732 - RNA, 19 nt, Artificial Sequence
  Description of Artificial Sequence: Synthetic oligonucleotide
  Sense strand starting at position 2945 of SEQ ID NO: 1888534
ggaucuguuucucugaugu

SEQ ID NO: 2539733 - RNA, 19 nt, Artificial Sequence
  Description of Artificial Sequence: Synthetic oligonucleotide
  Antisense strand to SEQ ID NO: 2539732
acaucagagaaacagaucc

SEQ ID NO: 2539734 - RNA, 19 nt, Artificial Sequence
  Description of Artificial Sequence: Synthetic oligonucleotide
  Sense strand starting at position 2943 of SEQ ID NO: 1888534
cgggaucuguuucucugau

SEQ ID NO: 2539735 - RNA, 19 nt, Artificial Sequence
  Description of Artificial Sequence: Synthetic oligonucleotide
  Antisense strand to SEQ ID NO: 2539734
aucagagaaacagaucccg

SEQ ID NO: 2539736 - RNA, 19 nt, Artificial Sequence
  Description of Artificial Sequence: Synthetic oligonucleotide
  Sense strand starting at position 988 of SEQ ID NO: 1888534
gggcaucuuucggucaaga

SEQ ID NO: 2539737 - RNA, 19 nt, Artificial Sequence
  Description of Artificial Sequence: Synthetic oligonucleotide
  Antisense strand to SEQ ID NO: 2539736
ucuugaccgaaagaugccc

SEQ ID NO: 2539738 - RNA, 19 nt, Artificial Sequence
  Description of Artificial Sequence: Synthetic oligonucleotide
  Sense strand starting at position 2953 of SEQ ID NO: 1888534
uucucugaugucuggguau

SEQ ID NO: 2539739 - RNA, 19 nt, Artificial Sequence
  Description of Artificial Sequence: Synthetic oligonucleotide
  Antisense strand to SEQ ID NO: 2539738
auacccagacaucagagaa

SEQ ID NO: 2539740 - RNA, 19 nt, Artificial Sequence
  Description of Artificial Sequence: Synthetic oligonucleotide
  Sense strand starting at position 14 of SEQ ID NO: 1888534
gguagucugcgacaaguca

SEQ ID NO: 2539741 - RNA, 19 nt, Artificial Sequence
  Description of Artificial Sequence: Synthetic oligonucleotide
  Antisense strand to SEQ ID NO: 2539740
ugacuugucgcagacuacc

SEQ ID NO: 2539742 - RNA, 19 nt, Artificial Sequence
  Description of Artificial Sequence: Synthetic oligonucleotide
  Sense strand starting at position 2873 of SEQ ID NO: 1888534
aaagcugacucagagaaag

SEQ ID NO: 2539743 - RNA, 19 nt, Artificial Sequence
  Description of Artificial Sequence: Synthetic oligonucleotide
  Antisense strand to SEQ ID NO: 2539742
cuuucucugagucagcuuu

SEQ ID NO: 2539744 - RNA, 19 nt, Artificial Sequence
  Description of Artificial Sequence: Synthetic oligonucleotide
  Sense strand starting at position 3100 of SEQ ID NO: 1888534
aaagauacgucagaaggaa

SEQ ID NO: 2539745 - RNA, 19 nt, Artificial Sequence
  Description of Artificial Sequence: Synthetic oligonucleotide
  Antisense strand to SEQ ID NO: 2539744
uuccuucugacguaucuuu

SEQ ID NO: 2539746 - RNA, 19 nt, Artificial Sequence
  Description of Artificial Sequence: Synthetic oligonucleotide
  Sense strand starting at position 1415 of SEQ ID NO: 1888534
ucuucugggcuuugugaau

SEQ ID NO: 2539747 - RNA, 19 nt, Artificial Sequence
  Description of Artificial Sequence: Synthetic oligonucleotide
  Antisense strand to SEQ ID NO: 2539746
auucacaaagcccagaaga

SEQ ID NO: 2539748 - RNA, 19 nt, Artificial Sequence
  Description of Artificial Sequence: Synthetic oligonucleotide
  Sense strand starting at position 2829 of SEQ ID NO: 1888534
agugacauuuccugaguuc

SEQ ID NO: 2539749 - RNA, 19 nt, Artificial Sequence
  Description of Artificial Sequence: Synthetic oligonucleotide
  Antisense strand to SEQ ID NO: 2539748
gaacucaggaaaugucacu

SEQ ID NO: 2539750 - RNA, 19 nt, Artificial Sequence
  Description of Artificial Sequence: Synthetic oligonucleotide
  Sense strand starting at position 3865 of SEQ ID NO: 1888534
ggaagcgugguguguuuga

SEQ ID NO: 2539751 - RNA, 19 nt, Artificial Sequence
  Description of Artificial Sequence: Synthetic oligonucleotide
  Antisense strand to SEQ ID NO: 2539750
ucaaacacaccacgcuucc

SEQ ID NO: 2539752 - RNA, 19 nt, Artificial Sequence
  Description of Artificial Sequence: Synthetic oligonucleotide
  Sense strand starting at position 49 of SEQ ID NO: 1888534
gcuagcauuuguugaacaa

SEQ ID NO: 2539753 - RNA, 19 nt, Artificial Sequence
  Description of Artificial Sequence: Synthetic oligonucleotide
  Antisense strand to SEQ ID NO: 2539752
uuguucaacaaaugcuagc

SEQ ID NO: 2539754 - RNA, 19 nt, Artificial Sequence
  Description of Artificial Sequence: Synthetic oligonucleotide
  Sense strand starting at position 3083 of SEQ ID NO: 1888534
ugggaaggaucucgguaaa

SEQ ID NO: 2539755 - RNA, 19 nt, Artificial Sequence
  Description of Artificial Sequence: Synthetic oligonucleotide
  Antisense strand to SEQ ID NO: 2539754
uuuaccgagauccuuccca

SEQ ID NO: 2539756 - RNA, 19 nt, Artificial Sequence
  Description of Artificial Sequence: Synthetic oligonucleotide
  Sense strand starting at position 3561 of SEQ ID NO: 1888533
aguaauaaucaaggaagca

SEQ ID NO: 2539757 - RNA, 19 nt, Artificial Sequence
  Description of Artificial Sequence: Synthetic oligonucleotide
  Antisense strand to SEQ ID NO: 2539756
ugcuuccuugauuauuacu

SEQ ID NO: 2539758 - RNA, 19 nt, Artificial Sequence
  Description of Artificial Sequence: Synthetic oligonucleotide
  Sense strand starting at position 3117 of SEQ ID NO: 1888533
aguaauguccuuuaagaug

SEQ ID NO: 2539759 - RNA, 19 nt, Artificial Sequence
  Description of Artificial Sequence: Synthetic oligonucleotide
  Antisense strand to SEQ ID NO: 2539758
caucuuaaaggacauuacu

SEQ ID NO: 2539760 - RNA, 19 nt, Artificial Sequence
  Description of Artificial Sequence: Synthetic oligonucleotide
  Sense strand starting at position 992 of SEQ ID NO: 1888533
ccuuucggucaagaugaaa

SEQ ID NO: 2539761 - RNA, 19 nt, Artificial Sequence
  Description of Artificial Sequence: Synthetic oligonucleotide
  Antisense strand to SEQ ID NO: 2539760
uuucaucuugaccgaaagg

SEQ ID NO: 2539762 - RNA, 19 nt, Artificial Sequence
  Description of Artificial Sequence: Synthetic oligonucleotide
  Sense strand starting at position 3635 of SEQ ID NO: 1888533
ugaaaugaguacuccuaau

SEQ ID NO: 2539763 - RNA, 19 nt, Artificial Sequence
  Description of Artificial Sequence: Synthetic oligonucleotide
  Antisense strand to SEQ ID NO: 2539762
auuaggaguacucauuuca

SEQ ID NO: 2539764 - RNA, 19 nt, Artificial Sequence
  Description of Artificial Sequence: Synthetic oligonucleotide
  Sense strand starting at position 2680 of SEQ ID NO: 1888533
gggacucuagcugaaucuu

SEQ ID NO: 2539765 - RNA, 19 nt, Artificial Sequence
  Description of Artificial Sequence: Synthetic oligonucleotide
  Antisense strand to SEQ ID NO: 2539764
aagauucagcuagaguccc

SEQ ID NO: 2539766 - RNA, 19 nt, Artificial Sequence
  Description of Artificial Sequence: Synthetic oligonucleotide
  Sense strand starting at position 2588 of SEQ ID NO: 1888533
aggaaugacuguccgggaa

SEQ ID NO: 2539767 - RNA, 19 nt, Artificial Sequence
  Description of Artificial Sequence: Synthetic oligonucleotide
  Antisense strand to SEQ ID NO: 2539766
uucccggacagucauuccu

SEQ ID NO: 2539768 - RNA, 19 nt, Artificial Sequence
  Description of Artificial Sequence: Synthetic oligonucleotide
  Sense strand starting at position 1192 of SEQ ID NO: 1888533
ggacuagaggccuggauca

SEQ ID NO: 2539769 - RNA, 19 nt, Artificial Sequence
  Description of Artificial Sequence: Synthetic oligonucleotide
  Antisense strand to SEQ ID NO: 2539768
ugauccaggccucuagucc

SEQ ID NO: 2539770 - RNA, 19 nt, Artificial Sequence
  Description of Artificial Sequence: Synthetic oligonucleotide
  Sense strand starting at position 1067 of SEQ ID NO: 1888533
gcucuugugcugcccugaa

SEQ ID NO: 2539771 - RNA, 19 nt, Artificial Sequence
  Description of Artificial Sequence: Synthetic oligonucleotide
  Antisense strand to SEQ ID NO: 2539770
uucagggcagcacaagagc

SEQ ID NO: 2539772 - RNA, 19 nt, Artificial Sequence
  Description of Artificial Sequence: Synthetic oligonucleotide
  Sense strand starting at position 3940 of SEQ ID NO: 1888533
ggucaauggacugggagua

SEQ ID NO: 2539773 - RNA, 19 nt, Artificial Sequence
  Description of Artificial Sequence: Synthetic oligonucleotide
  Antisense strand to SEQ ID NO: 2539772
uacucccaguccauugacc

SEQ ID NO: 2539774 - RNA, 19 nt, Artificial Sequence
  Description of Artificial Sequence: Synthetic oligonucleotide
  Sense strand starting at position 3203 of SEQ ID NO: 1888533
cagagaugggcggaucagu

SEQ ID NO: 2539775 - RNA, 19 nt, Artificial Sequence
  Description of Artificial Sequence: Synthetic oligonucleotide
  Antisense strand to SEQ ID NO: 2539774
acugauccgcccaucucug

SEQ ID NO: 2539776 - RNA, 19 nt, Artificial Sequence
  Description of Artificial Sequence: Synthetic oligonucleotide
  Sense strand starting at position 3115 of SEQ ID NO: 1888533
gaaguaauguccuuuaaga

SEQ ID NO: 2539777 - RNA, 19 nt, Artificial Sequence
  Description of Artificial Sequence: Synthetic oligonucleotide
  Antisense strand to SEQ ID NO: 2539776
ucuuaaaggacauuacuuc

SEQ ID NO: 2539778 - RNA, 19 nt, Artificial Sequence
  Description of Artificial Sequence: Synthetic oligonucleotide
  Sense strand starting at position 3125 of SEQ ID NO: 1888533
ccuuuaagauguucuuaga

SEQ ID NO: 2539779 - RNA, 19 nt, Artificial Sequence
  Description of Artificial Sequence: Synthetic oligonucleotide
  Antisense strand to SEQ ID NO: 2539778
ucuaagaacaucuuaaagg

SEQ ID NO: 2539780 - RNA, 19 nt, Artificial Sequence
  Description of Artificial Sequence: Synthetic oligonucleotide
  Sense strand starting at position 3766 of SEQ ID NO: 1888533
ggaggauccaucgggcaau

SEQ ID NO: 2539781 - RNA, 19 nt, Artificial Sequence
  Description of Artificial Sequence: Synthetic oligonucleotide
  Antisense strand to SEQ ID NO: 2539780
auugcccgauggauccucc

SEQ ID NO: 2539782 - RNA, 19 nt, Artificial Sequence
  Description of Artificial Sequence: Synthetic oligonucleotide
  Sense strand starting at position 1429 of SEQ ID NO: 1888533
gaauuuauaugcgugcauu

SEQ ID NO: 2539783 - RNA, 19 nt, Artificial Sequence
  Description of Artificial Sequence: Synthetic oligonucleotide
  Antisense strand to SEQ ID NO: 2539782
aaugcacgcauauaaauuc

SEQ ID NO: 2539784 - RNA, 19 nt, Artificial Sequence
  Description of Artificial Sequence: Synthetic oligonucleotide
  Sense strand starting at position 1428 of SEQ ID NO: 1888533
ugaauuuauaugcgugcau

SEQ ID NO: 2539785 - RNA, 19 nt, Artificial Sequence
  Description of Artificial Sequence: Synthetic oligonucleotide
  Antisense strand to SEQ ID NO: 2539784
augcacgcauauaaauuca

SEQ ID NO: 2539786 - RNA, 19 nt, Artificial Sequence
  Description of Artificial Sequence: Synthetic oligonucleotide
  Sense strand starting at position 2955 of SEQ ID NO: 1888533
ucugaugucuggguaugaa

SEQ ID NO: 2539787 - RNA, 19 nt, Artificial Sequence
  Description of Artificial Sequence: Synthetic oligonucleotide
  Antisense strand to SEQ ID NO: 2539786
uucauacccagacaucaga

SEQ ID NO: 2539788 - RNA, 19 nt, Artificial Sequence
  Description of Artificial Sequence: Synthetic oligonucleotide
  Sense strand starting at position 2943 of SEQ ID NO: 1888533
gggaucuguuucucugaug

SEQ ID NO: 2539789 - RNA, 19 nt, Artificial Sequence
  Description of Artificial Sequence: Synthetic oligonucleotide
  Antisense strand to SEQ ID NO: 2539788
caucagagaaacagauccc

SEQ ID NO: 2539790 - RNA, 19 nt, Artificial Sequence
  Description of Artificial Sequence: Synthetic oligonucleotide
  Sense strand starting at position 1430 of SEQ ID NO: 1888533
aauuuauaugcgugcauuc

SEQ ID NO: 2539791 - RNA, 19 nt, Artificial Sequence
  Description of Artificial Sequence: Synthetic oligonucleotide
  Antisense strand to SEQ ID NO: 2539790
gaaugcacgcauauaaauu

SEQ ID NO: 2539792 - RNA, 19 nt, Artificial Sequence
  Description of Artificial Sequence: Synthetic oligonucleotide
  Sense strand starting at position 1427 of SEQ ID NO: 1888533
gugaauuuauaugcgugca

SEQ ID NO: 2539793 - RNA, 19 nt, Artificial Sequence
  Description of Artificial Sequence: Synthetic oligonucleotide
  Antisense strand to SEQ ID NO: 2539792
ugcacgcauauaaauucac

SEQ ID NO: 2539794 - RNA, 19 nt, Artificial Sequence
  Description of Artificial Sequence: Synthetic oligonucleotide
  Sense strand starting at position 1043 of SEQ ID NO: 1888533
gcuguugaucugcaagaac

SEQ ID NO: 2539795 - RNA, 19 nt, Artificial Sequence
  Description of Artificial Sequence: Synthetic oligonucleotide
  Antisense strand to SEQ ID NO: 2539794
guucuugcagaucaacagc

SEQ ID NO: 2539796 - RNA, 19 nt, Artificial Sequence
  Description of Artificial Sequence: Synthetic oligonucleotide
  Sense strand starting at position 3915 of SEQ ID NO: 1888533
uguagacucuuccuaucca

SEQ ID NO: 2539797 - RNA, 19 nt, Artificial Sequence
  Description of Artificial Sequence: Synthetic oligonucleotide
  Antisense strand to SEQ ID NO: 2539796
uggauaggaagagucuaca

SEQ ID NO: 2539798 - RNA, 19 nt, Artificial Sequence
  Description of Artificial Sequence: Synthetic oligonucleotide
  Sense strand starting at position 13 of SEQ ID NO: 1888533
gguagucugcaacaaguca

SEQ ID NO: 2539799 - RNA, 19 nt, Artificial Sequence
  Description of Artificial Sequence: Synthetic oligonucleotide
  Antisense strand to SEQ ID NO: 2539798
ugacuuguugcagacuacc

SEQ ID NO: 2539800 - RNA, 19 nt, Artificial Sequence
  Description of Artificial Sequence: Synthetic oligonucleotide
  Sense strand starting at position 989 of SEQ ID NO: 1888533
gcaccuuucggucaagaug

SEQ ID NO: 2539801 - RNA, 19 nt, Artificial Sequence
  Description of Artificial Sequence: Synthetic oligonucleotide
  Antisense strand to SEQ ID NO: 2539800
caucuugaccgaaaggugc

SEQ ID NO: 2539802 - RNA, 19 nt, Artificial Sequence
  Description of Artificial Sequence: Synthetic oligonucleotide
  Sense strand starting at position 2954 of SEQ ID NO: 1888533
cucugaugucuggguauga

SEQ ID NO: 2539803 - RNA, 19 nt, Artificial Sequence
  Description of Artificial Sequence: Synthetic oligonucleotide
  Antisense strand to SEQ ID NO: 2539802
ucauacccagacaucagag

SEQ ID NO: 2539804 - RNA, 19 nt, Artificial Sequence
  Description of Artificial Sequence: Synthetic oligonucleotide
  Sense strand starting at position 2837 of SEQ ID NO: 1888533
uccugaguucgaggaguag

SEQ ID NO: 2539805 - RNA, 19 nt, Artificial Sequence
  Description of Artificial Sequence: Synthetic oligonucleotide
  Antisense strand to SEQ ID NO: 2539804
cuacuccucgaacucagga

SEQ ID NO: 2539806 - RNA, 19 nt, Artificial Sequence
  Description of Artificial Sequence: Synthetic oligonucleotide
  Sense strand starting at position 6 of SEQ ID NO: 1888533
uagauuggguagucugcaa

SEQ ID NO: 2539807 - RNA, 19 nt, Artificial Sequence
  Description of Artificial Sequence: Synthetic oligonucleotide
  Antisense strand to SEQ ID NO: 2539806
uugcagacuacccaaucua

SEQ ID NO: 2539808 - RNA, 19 nt, Artificial Sequence
  Description of Artificial Sequence: Synthetic oligonucleotide
  Sense strand starting at position 2295 of SEQ ID NO: 1888533
aucugaggguucguucaga

SEQ ID NO: 2539809 - RNA, 19 nt, Artificial Sequence
  Description of Artificial Sequence: Synthetic oligonucleotide
  Antisense strand to SEQ ID NO: 2539808
ucugaacgaacccucagau

SEQ ID NO: 2539810 - RNA, 19 nt, Artificial Sequence
  Description of Artificial Sequence: Synthetic oligonucleotide
  Sense strand starting at position 3913 of SEQ ID NO: 1888533
aguguagacucuuccuauc

SEQ ID NO: 2539811 - RNA, 19 nt, Artificial Sequence
  Description of Artificial Sequence: Synthetic oligonucleotide
  Antisense strand to SEQ ID NO: 2539810
gauaggaagagucuacacu

SEQ ID NO: 2539812 - RNA, 19 nt, Artificial Sequence
  Description of Artificial Sequence: Synthetic oligonucleotide
  Sense strand starting at position 1450 of SEQ ID NO: 1888533
acgcaagaacucugucaac

SEQ ID NO: 2539813 - RNA, 19 nt, Artificial Sequence
  Description of Artificial Sequence: Synthetic oligonucleotide
  Antisense strand to SEQ ID NO: 2539812
guugacagaguucuugcgu

SEQ ID NO: 2539814 - RNA, 19 nt, Artificial Sequence
  Description of Artificial Sequence: Synthetic oligonucleotide
  Sense strand starting at position 2745 of SEQ ID NO: 1888533
gaaugcuuccuugggaguu

SEQ ID NO: 2539815 - RNA, 19 nt, Artificial Sequence
  Description of Artificial Sequence: Synthetic oligonucleotide
  Antisense strand to SEQ ID NO: 2539814
aacucccaaggaagcauuc

SEQ ID NO: 2539816 - RNA, 19 nt, Artificial Sequence
  Description of Artificial Sequence: Synthetic oligonucleotide
  Sense strand starting at position 1757 of SEQ ID NO: 1888533
ccauucuucuuggcgaaga

SEQ ID NO: 2539817 - RNA, 19 nt, Artificial Sequence
  Description of Artificial Sequence: Synthetic oligonucleotide
  Antisense strand to SEQ ID NO: 2539816
ucuucgccaagaagaaugg

SEQ ID NO: 2539818 - RNA, 19 nt, Artificial Sequence
  Description of Artificial Sequence: Synthetic oligonucleotide
  Sense strand starting at position 1441 of SEQ ID NO: 1888533
gugcauuccacgcaagaac

SEQ ID NO: 2539819 - RNA, 19 nt, Artificial Sequence
  Description of Artificial Sequence: Synthetic oligonucleotide
  Antisense strand to SEQ ID NO: 2539818
guucuugcguggaaugcac

SEQ ID NO: 2539820 - RNA, 19 nt, Artificial Sequence
  Description of Artificial Sequence: Synthetic oligonucleotide
  Sense strand starting at position 1042 of SEQ ID NO: 1888533
ggcuguugaucugcaagaa

SEQ ID NO: 2539821 - RNA, 19 nt, Artificial Sequence
  Description of Artificial Sequence: Synthetic oligonucleotide
  Antisense strand to SEQ ID NO: 2539820
uucuugcagaucaacagcc

SEQ ID NO: 2539822 - RNA, 19 nt, Artificial Sequence
  Description of Artificial Sequence: Synthetic oligonucleotide
  Sense strand starting at position 2944 of SEQ ID NO: 1888533
ggaucuguuucucugaugu

SEQ ID NO: 2539823 - RNA, 19 nt, Artificial Sequence
  Description of Artificial Sequence: Synthetic oligonucleotide
  Antisense strand to SEQ ID NO: 2539822
acaucagagaaacagaucc

SEQ ID NO: 2539824 - RNA, 19 nt, Artificial Sequence
  Description of Artificial Sequence: Synthetic oligonucleotide
  Sense strand starting at position 2942 of SEQ ID NO: 1888533
cgggaucuguuucucugau

SEQ ID NO: 2539825 - RNA, 19 nt, Artificial Sequence
  Description of Artificial Sequence: Synthetic oligonucleotide
  Antisense strand to SEQ ID NO: 2539824
aucagagaaacagaucccg

SEQ ID NO: 2539826 - RNA, 19 nt, Artificial Sequence
  Description of Artificial Sequence: Synthetic oligonucleotide
  Sense strand starting at position 987 of SEQ ID NO: 1888533
gggcaccuuucggucaaga

SEQ ID NO: 2539827 - RNA, 19 nt, Artificial Sequence
  Description of Artificial Sequence: Synthetic oligonucleotide
  Antisense strand to SEQ ID NO: 2539826
ucuugaccgaaaggugccc

SEQ ID NO: 2539828 - RNA, 19 nt, Artificial Sequence
  Description of Artificial Sequence: Synthetic oligonucleotide
  Sense strand starting at position 2952 of SEQ ID NO: 1888533
uucucugaugucuggguau

SEQ ID NO: 2539829 - RNA, 19 nt, Artificial Sequence
  Description of Artificial Sequence: Synthetic oligonucleotide
  Antisense strand to SEQ ID NO: 2539828
auacccagacaucagagaa

SEQ ID NO: 2539830 - RNA, 19 nt, Artificial Sequence
  Description of Artificial Sequence: Synthetic oligonucleotide
  Sense strand starting at position 3099 of SEQ ID NO: 1888533
aaagauacgucagaaggaa

SEQ ID NO: 2539831 - RNA, 19 nt, Artificial Sequence
  Description of Artificial Sequence: Synthetic oligonucleotide
  Antisense strand to SEQ ID NO: 2539830
uuccuucugacguaucuuu

SEQ ID NO: 2539832 - RNA, 19 nt, Artificial Sequence
  Description of Artificial Sequence: Synthetic oligonucleotide
  Sense strand starting at position 1414 of SEQ ID NO: 1888533
ucuucugggcuuugugaau

SEQ ID NO: 2539833 - RNA, 19 nt, Artificial Sequence
  Description of Artificial Sequence: Synthetic oligonucleotide
  Antisense strand to SEQ ID NO: 2539832
auucacaaagcccagaaga

SEQ ID NO: 2539834 - RNA, 19 nt, Artificial Sequence
  Description of Artificial Sequence: Synthetic oligonucleotide
  Sense strand starting at position 1054 of SEQ ID NO: 1888533
gcaagaacuccuugcucuu

SEQ ID NO: 2539835 - RNA, 19 nt, Artificial Sequence
  Description of Artificial Sequence: Synthetic oligonucleotide
  Antisense strand to SEQ ID NO: 2539834
aagagcaaggaguucuugc

SEQ ID NO: 2539836 - RNA, 19 nt, Artificial Sequence
  Description of Artificial Sequence: Synthetic oligonucleotide
  Sense strand starting at position 3467 of SEQ ID NO: 1888535
gaaggaguacugugauaga

SEQ ID NO: 2539837 - RNA, 19 nt, Artificial Sequence
  Description of Artificial Sequence: Synthetic oligonucleotide
  Antisense strand to SEQ ID NO: 2539836
ucuaucacaguacuccuuc

SEQ ID NO: 2539838 - RNA, 19 nt, Artificial Sequence
  Description of Artificial Sequence: Synthetic oligonucleotide
  Sense strand starting at position 2125 of SEQ ID NO: 1888535
ucuuguuucccuuuguguu

SEQ ID NO: 2539839 - RNA, 19 nt, Artificial Sequence
  Description of Artificial Sequence: Synthetic oligonucleotide
  Antisense strand to SEQ ID NO: 2539838
aacacaaagggaaacaaga

SEQ ID NO: 2539840 - RNA, 19 nt, Artificial Sequence
  Description of Artificial Sequence: Synthetic oligonucleotide
  Sense strand starting at position 869 of SEQ ID NO: 1888535
cugucuccacuuuaaggaa

SEQ ID NO: 2539841 - RNA, 19 nt, Artificial Sequence
  Description of Artificial Sequence: Synthetic oligonucleotide
  Antisense strand to SEQ ID NO: 2539840
uuccuuaaaguggagacag

SEQ ID NO: 2539842 - RNA, 19 nt, Artificial Sequence
  Description of Artificial Sequence: Synthetic oligonucleotide
  Sense strand starting at position 2313 of SEQ ID NO: 1888535
agggauuaugccugggaau

SEQ ID NO: 2539843 - RNA, 19 nt, Artificial Sequence
  Description of Artificial Sequence: Synthetic oligonucleotide
  Antisense strand to SEQ ID NO: 2539842
auucccaggcauaaucccu

SEQ ID NO: 2539844 - RNA, 19 nt, Artificial Sequence
  Description of Artificial Sequence: Synthetic oligonucleotide
  Sense strand starting at position 2508 of SEQ ID NO: 1888535
ugaaucgagccugaacuau

SEQ ID NO: 2539845 - RNA, 19 nt, Artificial Sequence
  Description of Artificial Sequence: Synthetic oligonucleotide
  Antisense strand to SEQ ID NO: 2539844
auaguucaggcucgauuca

SEQ ID NO: 2539846 - RNA, 19 nt, Artificial Sequence
  Description of Artificial Sequence: Synthetic oligonucleotide
  Sense strand starting at position 2442 of SEQ ID NO: 1888535
ggaguauccacagguaaau

SEQ ID NO: 2539847 - RNA, 19 nt, Artificial Sequence
  Description of Artificial Sequence: Synthetic oligonucleotide
  Antisense strand to SEQ ID NO: 2539846
auuuaccuguggauacucc

SEQ ID NO: 2539848 - RNA, 19 nt, Artificial Sequence
  Description of Artificial Sequence: Synthetic oligonucleotide
  Sense strand starting at position 3167 of SEQ ID NO: 1888535
caagucuuccagggagauc

SEQ ID NO: 2539849 - RNA, 19 nt, Artificial Sequence
  Description of Artificial Sequence: Synthetic oligonucleotide
  Antisense strand to SEQ ID NO: 2539848
gaucucccuggaagacuug

SEQ ID NO: 2539850 - RNA, 19 nt, Artificial Sequence
  Description of Artificial Sequence: Synthetic oligonucleotide
  Sense strand starting at position 3166 of SEQ ID NO: 1888535
ccaagucuuccagggagau

SEQ ID NO: 2539851 - RNA, 19 nt, Artificial Sequence
  Description of Artificial Sequence: Synthetic oligonucleotide
  Antisense strand to SEQ ID NO: 2539850
aucucccuggaagacuugg

SEQ ID NO: 2539852 - RNA, 19 nt, Artificial Sequence
  Description of Artificial Sequence: Synthetic oligonucleotide
  Sense strand starting at position 1924 of SEQ ID NO: 1888535
augcuucuucgagaagaug

SEQ ID NO: 2539853 - RNA, 19 nt, Artificial Sequence
  Description of Artificial Sequence: Synthetic oligonucleotide
  Antisense strand to SEQ ID NO: 2539852
caucuucucgaagaagcau

SEQ ID NO: 2539854 - RNA, 19 nt, Artificial Sequence
  Description of Artificial Sequence: Synthetic oligonucleotide
  Sense strand starting at position 2806 of SEQ ID NO: 1888535
cagaguaagccuggagaca

SEQ ID NO: 2539855 - RNA, 19 nt, Artificial Sequence
  Description of Artificial Sequence: Synthetic oligonucleotide
  Antisense strand to SEQ ID NO: 2539854
ugucuccaggcuuacucug

SEQ ID NO: 2539856 - RNA, 19 nt, Artificial Sequence
  Description of Artificial Sequence: Synthetic oligonucleotide
  Sense strand starting at position 2763 of SEQ ID NO: 1888535
auaggucuaggcugagaaa

SEQ ID NO: 2539857 - RNA, 19 nt, Artificial Sequence
  Description of Artificial Sequence: Synthetic oligonucleotide
  Antisense strand to SEQ ID NO: 2539856
uuucucagccuagaccuau

SEQ ID NO: 2539858 - RNA, 19 nt, Artificial Sequence
  Description of Artificial Sequence: Synthetic oligonucleotide
  Sense strand starting at position 3472 of SEQ ID NO: 1888535
aguacugugauagauuagu

SEQ ID NO: 2539859 - RNA, 19 nt, Artificial Sequence
  Description of Artificial Sequence: Synthetic oligonucleotide
  Antisense strand to SEQ ID NO: 2539858
acuaaucuaucacaguacu

SEQ ID NO: 2539860 - RNA, 19 nt, Artificial Sequence
  Description of Artificial Sequence: Synthetic oligonucleotide
  Sense strand starting at position 1399 of SEQ ID NO: 1888535
gugagcacugacuaaggua

SEQ ID NO: 2539861 - RNA, 19 nt, Artificial Sequence
  Description of Artificial Sequence: Synthetic oligonucleotide
  Antisense strand to SEQ ID NO: 2539860
uaccuuagucagugcucac

SEQ ID NO: 2539862 - RNA, 19 nt, Artificial Sequence
  Description of Artificial Sequence: Synthetic oligonucleotide
  Sense strand starting at position 2314 of SEQ ID NO: 1888535
gggauuaugccugggaauu

SEQ ID NO: 2539863 - RNA, 19 nt, Artificial Sequence
  Description of Artificial Sequence: Synthetic oligonucleotide
  Antisense strand to SEQ ID NO: 2539862
aauucccaggcauaauccc

SEQ ID NO: 2539864 - RNA, 19 nt, Artificial Sequence
  Description of Artificial Sequence: Synthetic oligonucleotide
  Sense strand starting at position 917 of SEQ ID NO: 1888535
aagggaagcuucucggaca

SEQ ID NO: 2539865 - RNA, 19 nt, Artificial Sequence
  Description of Artificial Sequence: Synthetic oligonucleotide
  Antisense strand to SEQ ID NO: 2539864
uguccgagaagcuucccuu

SEQ ID NO: 2539866 - RNA, 19 nt, Artificial Sequence
  Description of Artificial Sequence: Synthetic oligonucleotide
  Sense strand starting at position 2315 of SEQ ID NO: 1888535
ggauuaugccugggaauuc

SEQ ID NO: 2539867 - RNA, 19 nt, Artificial Sequence
  Description of Artificial Sequence: Synthetic oligonucleotide
  Antisense strand to SEQ ID NO: 2539866
gaauucccaggcauaaucc

SEQ ID NO: 2539868 - RNA, 19 nt, Artificial Sequence
  Description of Artificial Sequence: Synthetic oligonucleotide
  Sense strand starting at position 807 of SEQ ID NO: 1888535
gccuuugaaucaccugaag

SEQ ID NO: 2539869 - RNA, 19 nt, Artificial Sequence
  Description of Artificial Sequence: Synthetic oligonucleotide
  Antisense strand to SEQ ID NO: 2539868
cuucaggugauucaaaggc

SEQ ID NO: 2539870 - RNA, 19 nt, Artificial Sequence
  Description of Artificial Sequence: Synthetic oligonucleotide
  Sense strand starting at position 1395 of SEQ ID NO: 1888535
auuagugagcacugacuaa

SEQ ID NO: 2539871 - RNA, 19 nt, Artificial Sequence
  Description of Artificial Sequence: Synthetic oligonucleotide
  Antisense strand to SEQ ID NO: 2539870
uuagucagugcucacuaau

SEQ ID NO: 2539872 - RNA, 19 nt, Artificial Sequence
  Description of Artificial Sequence: Synthetic oligonucleotide
  Sense strand starting at position 1498 of SEQ ID NO: 1888535
gucucugcuccucagaaac

SEQ ID NO: 2539873 - RNA, 19 nt, Artificial Sequence
  Description of Artificial Sequence: Synthetic oligonucleotide
  Antisense strand to SEQ ID NO: 2539872
guuucugaggagcagagac

SEQ ID NO: 2539874 - RNA, 19 nt, Artificial Sequence
  Description of Artificial Sequence: Synthetic oligonucleotide
  Sense strand starting at position 3727 of SEQ ID NO: 1888535
guacuuucgacucagguau

SEQ ID NO: 2539875 - RNA, 19 nt, Artificial Sequence
  Description of Artificial Sequence: Synthetic oligonucleotide
  Antisense strand to SEQ ID NO: 2539874
auaccugagucgaaaguac

SEQ ID NO: 2539876 - RNA, 19 nt, Artificial Sequence
  Description of Artificial Sequence: Synthetic oligonucleotide
  Sense strand starting at position 2455 of SEQ ID NO: 1888535
guaaaucgagccugaacua

SEQ ID NO: 2539877 - RNA, 19 nt, Artificial Sequence
  Description of Artificial Sequence: Synthetic oligonucleotide
  Antisense strand to SEQ ID NO: 2539876
uaguucaggcucgauuuac

SEQ ID NO: 2539878 - RNA, 19 nt, Artificial Sequence
  Description of Artificial Sequence: Synthetic oligonucleotide
  Sense strand starting at position 3478 of SEQ ID NO: 1888535
gugauagauuaguuauguc

SEQ ID NO: 2539879 - RNA, 19 nt, Artificial Sequence
  Description of Artificial Sequence: Synthetic oligonucleotide
  Antisense strand to SEQ ID NO: 2539878
gacauaacuaaucuaucac

SEQ ID NO: 2539880 - RNA, 19 nt, Artificial Sequence
  Description of Artificial Sequence: Synthetic oligonucleotide
  Sense strand starting at position 3477 of SEQ ID NO: 1888535
ugugauagauuaguuaugu

SEQ ID NO: 2539881 - RNA, 19 nt, Artificial Sequence
  Description of Artificial Sequence: Synthetic oligonucleotide
  Antisense strand to SEQ ID NO: 2539880
acauaacuaaucuaucaca

SEQ ID NO: 2539882 - RNA, 19 nt, Artificial Sequence
  Description of Artificial Sequence: Synthetic oligonucleotide
  Sense strand starting at position 2507 of SEQ ID NO: 1888535
gugaaucgagccugaacua

SEQ ID NO: 2539883 - RNA, 19 nt, Artificial Sequence
  Description of Artificial Sequence: Synthetic oligonucleotide
  Antisense strand to SEQ ID NO: 2539882
uaguucaggcucgauucac

SEQ ID NO: 2539884 - RNA, 19 nt, Artificial Sequence
  Description of Artificial Sequence: Synthetic oligonucleotide
  Sense strand starting at position 3821 of SEQ ID NO: 1888535
gcucauacucagggugauu

SEQ ID NO: 2539885 - RNA, 19 nt, Artificial Sequence
  Description of Artificial Sequence: Synthetic oligonucleotide
  Antisense strand to SEQ ID NO: 2539884
aaucacccugaguaugagc

SEQ ID NO: 2539886 - RNA, 19 nt, Artificial Sequence
  Description of Artificial Sequence: Synthetic oligonucleotide
  Sense strand starting at position 1391 of SEQ ID NO: 1888535
ugucauuagugagcacuga

SEQ ID NO: 2539887 - RNA, 19 nt, Artificial Sequence
  Description of Artificial Sequence: Synthetic oligonucleotide
  Antisense strand to SEQ ID NO: 2539886
ucagugcucacuaaugaca

SEQ ID NO: 2539888 - RNA, 19 nt, Artificial Sequence
  Description of Artificial Sequence: Synthetic oligonucleotide
  Sense strand starting at position 2842 of SEQ ID NO: 1888535
guguuuauugcagacagca

SEQ ID NO: 2539889 - RNA, 19 nt, Artificial Sequence
  Description of Artificial Sequence: Synthetic oligonucleotide
  Antisense strand to SEQ ID NO: 2539888
ugcugucugcaauaaacac

SEQ ID NO: 2539890 - RNA, 19 nt, Artificial Sequence
  Description of Artificial Sequence: Synthetic oligonucleotide
  Sense strand starting at position 1497 of SEQ ID NO: 1888535
ugucucugcuccucagaaa

SEQ ID NO: 2539891 - RNA, 19 nt, Artificial Sequence
  Description of Artificial Sequence: Synthetic oligonucleotide
  Antisense strand to SEQ ID NO: 2539890
uuucugaggagcagagaca

SEQ ID NO: 2539892 - RNA, 19 nt, Artificial Sequence
  Description of Artificial Sequence: Synthetic oligonucleotide
  Sense strand starting at position 451 of SEQ ID NO: 1888535
gguugaugucaauguaucc

SEQ ID NO: 2539893 - RNA, 19 nt, Artificial Sequence
  Description of Artificial Sequence: Synthetic oligonucleotide
  Antisense strand to SEQ ID NO: 2539892
ggauacauugacaucaacc

SEQ ID NO: 2539894 - RNA, 19 nt, Artificial Sequence
  Description of Artificial Sequence: Synthetic oligonucleotide
  Sense strand starting at position 1074 of SEQ ID NO: 1888535
cucuguguucuagaggcuu

SEQ ID NO: 2539895 - RNA, 19 nt, Artificial Sequence
  Description of Artificial Sequence: Synthetic oligonucleotide
  Antisense strand to SEQ ID NO: 2539894
aagccucuagaacacagag

SEQ ID NO: 2539896 - RNA, 19 nt, Artificial Sequence
  Description of Artificial Sequence: Synthetic oligonucleotide
  Sense strand starting at position 3288 of SEQ ID NO: 1888535
gcaggcuguccggagaagu

SEQ ID NO: 2539897 - RNA, 19 nt, Artificial Sequence
  Description of Artificial Sequence: Synthetic oligonucleotide
  Antisense strand to SEQ ID NO: 2539896
acuucuccggacagccugc

SEQ ID NO: 2539898 - RNA, 19 nt, Artificial Sequence
  Description of Artificial Sequence: Synthetic oligonucleotide
  Sense strand starting at position 3485 of SEQ ID NO: 1888535
auuaguuaugucugcugag

SEQ ID NO: 2539899 - RNA, 19 nt, Artificial Sequence
  Description of Artificial Sequence: Synthetic oligonucleotide
  Antisense strand to SEQ ID NO: 2539898
cucagcagacauaacuaau

SEQ ID NO: 2539900 - RNA, 19 nt, Artificial Sequence
  Description of Artificial Sequence: Synthetic oligonucleotide
  Sense strand starting at position 1479 of SEQ ID NO: 1888535
gggugauucccuugucucu

SEQ ID NO: 2539901 - RNA, 19 nt, Artificial Sequence
  Description of Artificial Sequence: Synthetic oligonucleotide
  Antisense strand to SEQ ID NO: 2539900
agagacaagggaaucaccc

SEQ ID NO: 2539902 - RNA, 19 nt, Artificial Sequence
  Description of Artificial Sequence: Synthetic oligonucleotide
  Sense strand starting at position 265 of SEQ ID NO: 1888535
gucccucauuaguuaguau

SEQ ID NO: 2539903 - RNA, 19 nt, Artificial Sequence
  Description of Artificial Sequence: Synthetic oligonucleotide
  Antisense strand to SEQ ID NO: 2539902
auacuaacuaaugagggac

SEQ ID NO: 2539904 - RNA, 19 nt, Artificial Sequence
  Description of Artificial Sequence: Synthetic oligonucleotide
  Sense strand starting at position 1920 of SEQ ID NO: 1888535
ugucaugcuucuucgagaa

SEQ ID NO: 2539905 - RNA, 19 nt, Artificial Sequence
  Description of Artificial Sequence: Synthetic oligonucleotide
  Antisense strand to SEQ ID NO: 2539904
uucucgaagaagcaugaca

SEQ ID NO: 2539906 - RNA, 19 nt, Artificial Sequence
  Description of Artificial Sequence: Synthetic oligonucleotide
  Sense strand starting at position 1919 of SEQ ID NO: 1888535
augucaugcuucuucgaga

SEQ ID NO: 2539907 - RNA, 19 nt, Artificial Sequence
  Description of Artificial Sequence: Synthetic oligonucleotide
  Antisense strand to SEQ ID NO: 2539906
ucucgaagaagcaugacau

SEQ ID NO: 2539908 - RNA, 19 nt, Artificial Sequence
  Description of Artificial Sequence: Synthetic oligonucleotide
  Sense strand starting at position 3393 of SEQ ID NO: 1888535
ggcugccacucauuaguga

SEQ ID NO: 2539909 - RNA, 19 nt, Artificial Sequence
  Description of Artificial Sequence: Synthetic oligonucleotide
  Antisense strand to SEQ ID NO: 2539908
ucacuaaugaguggcagcc

SEQ ID NO: 2539910 - RNA, 19 nt, Artificial Sequence
  Description of Artificial Sequence: Synthetic oligonucleotide
  Sense strand starting at position 2133 of SEQ ID NO: 1888535
cccuuuguguugucauaag

SEQ ID NO: 2539911 - RNA, 19 nt, Artificial Sequence
  Description of Artificial Sequence: Synthetic oligonucleotide
  Antisense strand to SEQ ID NO: 2539910
cuuaugacaacacaaaggg

SEQ ID NO: 2539912 - RNA, 19 nt, Artificial Sequence
  Description of Artificial Sequence: Synthetic oligonucleotide
  Sense strand starting at position 942 of SEQ ID NO: 1888535
gggucaucuuaacagggaa

SEQ ID NO: 2539913 - RNA, 19 nt, Artificial Sequence
  Description of Artificial Sequence: Synthetic oligonucleotide
  Antisense strand to SEQ ID NO: 2539912
uucccuguuaagaugaccc

SEQ ID NO: 2539914 - RNA, 19 nt, Artificial Sequence
  Description of Artificial Sequence: Synthetic oligonucleotide
  Sense strand starting at position 259 of SEQ ID NO: 1888535
ccucgugucccucauuagu

SEQ ID NO: 2539915 - RNA, 19 nt, Artificial Sequence
  Description of Artificial Sequence: Synthetic oligonucleotide
  Antisense strand to SEQ ID NO: 2539914
acuaaugagggacacgagg

SEQ ID NO: 2539916 - RNA, 19 nt, Artificial Sequence
  Description of Artificial Sequence: Synthetic oligonucleotide
  Sense strand starting at position 3375 of SEQ ID NO: 1888536
gaaggaguacugugauaga

SEQ ID NO: 2539917 - RNA, 19 nt, Artificial Sequence
  Description of Artificial Sequence: Synthetic oligonucleotide
  Antisense strand to SEQ ID NO: 2539916
ucuaucacaguacuccuuc

SEQ ID NO: 2539918 - RNA, 19 nt, Artificial Sequence
  Description of Artificial Sequence: Synthetic oligonucleotide
  Sense strand starting at position 2033 of SEQ ID NO: 1888536
ucuuguuucccuuuguguu

SEQ ID NO: 2539919 - RNA, 19 nt, Artificial Sequence
  Description of Artificial Sequence: Synthetic oligonucleotide
  Antisense strand to SEQ ID NO: 2539918
aacacaaagggaaacaaga

SEQ ID NO: 2539920 - RNA, 19 nt, Artificial Sequence
  Description of Artificial Sequence: Synthetic oligonucleotide
  Sense strand starting at position 777 of SEQ ID NO: 1888536
cugucuccacuuuaaggaa

SEQ ID NO: 2539921 - RNA, 19 nt, Artificial Sequence
  Description of Artificial Sequence: Synthetic oligonucleotide
  Antisense strand to SEQ ID NO: 2539920
uuccuuaaaguggagacag

SEQ ID NO: 2539922 - RNA, 19 nt, Artificial Sequence
  Description of Artificial Sequence: Synthetic oligonucleotide
  Sense strand starting at position 2221 of SEQ ID NO: 1888536
agggauuaugccugggaau

SEQ ID NO: 2539923 - RNA, 19 nt, Artificial Sequence
  Description of Artificial Sequence: Synthetic oligonucleotide
  Antisense strand to SEQ ID NO: 2539922
auucccaggcauaaucccu

SEQ ID NO: 2539924 - RNA, 19 nt, Artificial Sequence
  Description of Artificial Sequence: Synthetic oligonucleotide
  Sense strand starting at position 2416 of SEQ ID NO: 1888536
ugaaucgagccugaacuau

SEQ ID NO: 2539925 - RNA, 19 nt, Artificial Sequence
  Description of Artificial Sequence: Synthetic oligonucleotide
  Antisense strand to SEQ ID NO: 2539924
auaguucaggcucgauuca

SEQ ID NO: 2539926 - RNA, 19 nt, Artificial Sequence
  Description of Artificial Sequence: Synthetic oligonucleotide
  Sense strand starting at position 2350 of SEQ ID NO: 1888536
ggaguauccacagguaaau

SEQ ID NO: 2539927 - RNA, 19 nt, Artificial Sequence
  Description of Artificial Sequence: Synthetic oligonucleotide
  Antisense strand to SEQ ID NO: 2539926
auuuaccuguggauacucc

SEQ ID NO: 2539928 - RNA, 19 nt, Artificial Sequence
  Description of Artificial Sequence: Synthetic oligonucleotide
  Sense strand starting at position 3075 of SEQ ID NO: 1888536
caagucuuccagggagauc

SEQ ID NO: 2539929 - RNA, 19 nt, Artificial Sequence
  Description of Artificial Sequence: Synthetic oligonucleotide
  Antisense strand to SEQ ID NO: 2539928
gaucucccuggaagacuug

SEQ ID NO: 2539930 - RNA, 19 nt, Artificial Sequence
  Description of Artificial Sequence: Synthetic oligonucleotide
  Sense strand starting at position 3074 of SEQ ID NO: 1888536
ccaagucuuccagggagau

SEQ ID NO: 2539931 - RNA, 19 nt, Artificial Sequence
  Description of Artificial Sequence: Synthetic oligonucleotide
  Antisense strand to SEQ ID NO: 2539930
aucucccuggaagacuugg

SEQ ID NO: 2539932 - RNA, 19 nt, Artificial Sequence
  Description of Artificial Sequence: Synthetic oligonucleotide
  Sense strand starting at position 1832 of SEQ ID NO: 1888536
augcuucuucgagaagaug

SEQ ID NO: 2539933 - RNA, 19 nt, Artificial Sequence
  Description of Artificial Sequence: Synthetic oligonucleotide
  Antisense strand to SEQ ID NO: 2539932
caucuucucgaagaagcau

SEQ ID NO: 2539934 - RNA, 19 nt, Artificial Sequence
  Description of Artificial Sequence: Synthetic oligonucleotide
  Sense strand starting at position 2714 of SEQ ID NO: 1888536
cagaguaagccuggagaca

SEQ ID NO: 2539935 - RNA, 19 nt, Artificial Sequence
  Description of Artificial Sequence: Synthetic oligonucleotide
  Antisense strand to SEQ ID NO: 2539934
ugucuccaggcuuacucug

SEQ ID NO: 2539936 - RNA, 19 nt, Artificial Sequence
  Description of Artificial Sequence: Synthetic oligonucleotide
  Sense strand starting at position 2671 of SEQ ID NO: 1888536
auaggucuaggcugagaaa

SEQ ID NO: 2539937 - RNA, 19 nt, Artificial Sequence
  Description of Artificial Sequence: Synthetic oligonucleotide
  Antisense strand to SEQ ID NO: 2539936
uuucucagccuagaccuau

SEQ ID NO: 2539938 - RNA, 19 nt, Artificial Sequence
  Description of Artificial Sequence: Synthetic oligonucleotide
  Sense strand starting at position 3380 of SEQ ID NO: 1888536
aguacugugauagauuagu

SEQ ID NO: 2539939 - RNA, 19 nt, Artificial Sequence
  Description of Artificial Sequence: Synthetic oligonucleotide
  Antisense strand to SEQ ID NO: 2539938
acuaaucuaucacaguacu

SEQ ID NO: 2539940 - RNA, 19 nt, Artificial Sequence
  Description of Artificial Sequence: Synthetic oligonucleotide
  Sense strand starting at position 1307 of SEQ ID NO: 1888536
gugagcacugacuaaggua

SEQ ID NO: 2539941 - RNA, 19 nt, Artificial Sequence
  Description of Artificial Sequence: Synthetic oligonucleotide
  Antisense strand to SEQ ID NO: 2539940
uaccuuagucagugcucac

SEQ ID NO: 2539942 - RNA, 19 nt, Artificial Sequence
  Description of Artificial Sequence: Synthetic oligonucleotide
  Sense strand starting at position 2222 of SEQ ID NO: 1888536
gggauuaugccugggaauu

SEQ ID NO: 2539943 - RNA, 19 nt, Artificial Sequence
  Description of Artificial Sequence: Synthetic oligonucleotide
  Antisense strand to SEQ ID NO: 2539942
aauucccaggcauaauccc

SEQ ID NO: 2539944 - RNA, 19 nt, Artificial Sequence
  Description of Artificial Sequence: Synthetic oligonucleotide
  Sense strand starting at position 825 of SEQ ID NO: 1888536
aagggaagcuucucggaca

SEQ ID NO: 2539945 - RNA, 19 nt, Artificial Sequence
  Description of Artificial Sequence: Synthetic oligonucleotide
  Antisense strand to SEQ ID NO: 2539944
uguccgagaagcuucccuu

SEQ ID NO: 2539946 - RNA, 19 nt, Artificial Sequence
  Description of Artificial Sequence: Synthetic oligonucleotide
  Sense strand starting at position 2223 of SEQ ID NO: 1888536
ggauuaugccugggaauuc

SEQ ID NO: 2539947 - RNA, 19 nt, Artificial Sequence
  Description of Artificial Sequence: Synthetic oligonucleotide
  Antisense strand to SEQ ID NO: 2539946
gaauucccaggcauaaucc

SEQ ID NO: 2539948 - RNA, 19 nt, Artificial Sequence
  Description of Artificial Sequence: Synthetic oligonucleotide
  Sense strand starting at position 715 of SEQ ID NO: 1888536
gccuuugaaucaccugaag

SEQ ID NO: 2539949 - RNA, 19 nt, Artificial Sequence
  Description of Artificial Sequence: Synthetic oligonucleotide
  Antisense strand to SEQ ID NO: 2539948
cuucaggugauucaaaggc

SEQ ID NO: 2539950 - RNA, 19 nt, Artificial Sequence
  Description of Artificial Sequence: Synthetic oligonucleotide
  Sense strand starting at position 1303 of SEQ ID NO: 1888536
auuagugagcacugacuaa

SEQ ID NO: 2539951 - RNA, 19 nt, Artificial Sequence
  Description of Artificial Sequence: Synthetic oligonucleotide
  Antisense strand to SEQ ID NO: 2539950
uuagucagugcucacuaau

SEQ ID NO: 2539952 - RNA, 19 nt, Artificial Sequence
  Description of Artificial Sequence: Synthetic oligonucleotide
  Sense strand starting at position 1406 of SEQ ID NO: 1888536
gucucugcuccucagaaac

SEQ ID NO: 2539953 - RNA, 19 nt, Artificial Sequence
  Description of Artificial Sequence: Synthetic oligonucleotide
  Antisense strand to SEQ ID NO: 2539952
guuucugaggagcagagac

SEQ ID NO: 2539954 - RNA, 19 nt, Artificial Sequence
  Description of Artificial Sequence: Synthetic oligonucleotide
  Sense strand starting at position 3635 of SEQ ID NO: 1888536
guacuuucgacucagguau

SEQ ID NO: 2539955 - RNA, 19 nt, Artificial Sequence
  Description of Artificial Sequence: Synthetic oligonucleotide
  Antisense strand to SEQ ID NO: 2539954
auaccugagucgaaaguac

SEQ ID NO: 2539956 - RNA, 19 nt, Artificial Sequence
  Description of Artificial Sequence: Synthetic oligonucleotide
  Sense strand starting at position 2363 of SEQ ID NO: 1888536
guaaaucgagccugaacua

SEQ ID NO: 2539957 - RNA, 19 nt, Artificial Sequence
  Description of Artificial Sequence: Synthetic oligonucleotide
  Antisense strand to SEQ ID NO: 2539956
uaguucaggcucgauuuac

SEQ ID NO: 2539958 - RNA, 19 nt, Artificial Sequence
  Description of Artificial Sequence: Synthetic oligonucleotide
  Sense strand starting at position 3386 of SEQ ID NO: 1888536
gugauagauuaguuauguc

SEQ ID NO: 2539959 - RNA, 19 nt, Artificial Sequence
  Description of Artificial Sequence: Synthetic oligonucleotide
  Antisense strand to SEQ ID NO: 2539958
gacauaacuaaucuaucac

SEQ ID NO: 2539960 - RNA, 19 nt, Artificial Sequence
  Description of Artificial Sequence: Synthetic oligonucleotide
  Sense strand starting at position 3385 of SEQ ID NO: 1888536
ugugauagauuaguuaugu

SEQ ID NO: 2539961 - RNA, 19 nt, Artificial Sequence
  Description of Artificial Sequence: Synthetic oligonucleotide
  Antisense strand to SEQ ID NO: 2539960
acauaacuaaucuaucaca

SEQ ID NO: 2539962 - RNA, 19 nt, Artificial Sequence
  Description of Artificial Sequence: Synthetic oligonucleotide
  Sense strand starting at position 2415 of SEQ ID NO: 1888536
gugaaucgagccugaacua

SEQ ID NO: 2539963 - RNA, 19 nt, Artificial Sequence
  Description of Artificial Sequence: Synthetic oligonucleotide
  Antisense strand to SEQ ID NO: 2539962
uaguucaggcucgauucac

SEQ ID NO: 2539964 - RNA, 19 nt, Artificial Sequence
  Description of Artificial Sequence: Synthetic oligonucleotide
  Sense strand starting at position 3729 of SEQ ID NO: 1888536
gcucauacucagggugauu

SEQ ID NO: 2539965 - RNA, 19 nt, Artificial Sequence
  Description of Artificial Sequence: Synthetic oligonucleotide
  Antisense strand to SEQ ID NO: 2539964
aaucacccugaguaugagc

SEQ ID NO: 2539966 - RNA, 19 nt, Artificial Sequence
  Description of Artificial Sequence: Synthetic oligonucleotide
  Sense strand starting at position 1299 of SEQ ID NO: 1888536
ugucauuagugagcacuga

SEQ ID NO: 2539967 - RNA, 19 nt, Artificial Sequence
  Description of Artificial Sequence: Synthetic oligonucleotide
  Antisense strand to SEQ ID NO: 2539966
ucagugcucacuaaugaca

SEQ ID NO: 2539968 - RNA, 19 nt, Artificial Sequence
  Description of Artificial Sequence: Synthetic oligonucleotide
  Sense strand starting at position 2750 of SEQ ID NO: 1888536
guguuuauugcagacagca

SEQ ID NO: 2539969 - RNA, 19 nt, Artificial Sequence
  Description of Artificial Sequence: Synthetic oligonucleotide
  Antisense strand to SEQ ID NO: 2539968
ugcugucugcaauaaacac

SEQ ID NO: 2539970 - RNA, 19 nt, Artificial Sequence
  Description of Artificial Sequence: Synthetic oligonucleotide
  Sense strand starting at position 1405 of SEQ ID NO: 1888536
ugucucugcuccucagaaa

SEQ ID NO: 2539971 - RNA, 19 nt, Artificial Sequence
  Description of Artificial Sequence: Synthetic oligonucleotide
  Antisense strand to SEQ ID NO: 2539970
uuucugaggagcagagaca

SEQ ID NO: 2539972 - RNA, 19 nt, Artificial Sequence
  Description of Artificial Sequence: Synthetic oligonucleotide
  Sense strand starting at position 359 of SEQ ID NO: 1888536
gguugaugucaauguaucc

SEQ ID NO: 2539973 - RNA, 19 nt, Artificial Sequence
  Description of Artificial Sequence: Synthetic oligonucleotide
  Antisense strand to SEQ ID NO: 2539972
ggauacauugacaucaacc

SEQ ID NO: 2539974 - RNA, 19 nt, Artificial Sequence
  Description of Artificial Sequence: Synthetic oligonucleotide
  Sense strand starting at position 982 of SEQ ID NO: 1888536
cucuguguucuagaggcuu

SEQ ID NO: 2539975 - RNA, 19 nt, Artificial Sequence
  Description of Artificial Sequence: Synthetic oligonucleotide
  Antisense strand to SEQ ID NO: 2539974
aagccucuagaacacagag

SEQ ID NO: 2539976 - RNA, 19 nt, Artificial Sequence
  Description of Artificial Sequence: Synthetic oligonucleotide
  Sense strand starting at position 3196 of SEQ ID NO: 1888536
gcaggcuguccggagaagu

SEQ ID NO: 2539977 - RNA, 19 nt, Artificial Sequence
  Description of Artificial Sequence: Synthetic oligonucleotide
  Antisense strand to SEQ ID NO: 2539976
acuucuccggacagccugc

SEQ ID NO: 2539978 - RNA, 19 nt, Artificial Sequence
  Description of Artificial Sequence: Synthetic oligonucleotide
  Sense strand starting at position 3393 of SEQ ID NO: 1888536
auuaguuaugucugcugag

SEQ ID NO: 2539979 - RNA, 19 nt, Artificial Sequence
  Description of Artificial Sequence: Synthetic oligonucleotide
  Antisense strand to SEQ ID NO: 2539978
cucagcagacauaacuaau

SEQ ID NO: 2539980 - RNA, 19 nt, Artificial Sequence
  Description of Artificial Sequence: Synthetic oligonucleotide
  Sense strand starting at position 1387 of SEQ ID NO: 1888536
gggugauucccuugucucu

SEQ ID NO: 2539981 - RNA, 19 nt, Artificial Sequence
  Description of Artificial Sequence: Synthetic oligonucleotide
  Antisense strand to SEQ ID NO: 2539980
agagacaagggaaucaccc

SEQ ID NO: 2539982 - RNA, 19 nt, Artificial Sequence
  Description of Artificial Sequence: Synthetic oligonucleotide
  Sense strand starting at position 173 of SEQ ID NO: 1888536
gucccucauuaguuaguau

SEQ ID NO: 2539983 - RNA, 19 nt, Artificial Sequence
  Description of Artificial Sequence: Synthetic oligonucleotide
  Antisense strand to SEQ ID NO: 2539982
auacuaacuaaugagggac

SEQ ID NO: 2539984 - RNA, 19 nt, Artificial Sequence
  Description of Artificial Sequence: Synthetic oligonucleotide
  Sense strand starting at position 1828 of SEQ ID NO: 1888536
ugucaugcuucuucgagaa

SEQ ID NO: 2539985 - RNA, 19 nt, Artificial Sequence
  Description of Artificial Sequence: Synthetic oligonucleotide
  Antisense strand to SEQ ID NO: 2539984
uucucgaagaagcaugaca

SEQ ID NO: 2539986 - RNA, 19 nt, Artificial Sequence
  Description of Artificial Sequence: Synthetic oligonucleotide
  Sense strand starting at position 1827 of SEQ ID NO: 1888536
augucaugcuucuucgaga

SEQ ID NO: 2539987 - RNA, 19 nt, Artificial Sequence
  Description of Artificial Sequence: Synthetic oligonucleotide
  Antisense strand to SEQ ID NO: 2539986
ucucgaagaagcaugacau

SEQ ID NO: 2539988 - RNA, 19 nt, Artificial Sequence
  Description of Artificial Sequence: Synthetic oligonucleotide
  Sense strand starting at position 3301 of SEQ ID NO: 1888536
ggcugccacucauuaguga

SEQ ID NO: 2539989 - RNA, 19 nt, Artificial Sequence
  Description of Artificial Sequence: Synthetic oligonucleotide
  Antisense strand to SEQ ID NO: 2539988
ucacuaaugaguggcagcc

SEQ ID NO: 2539990 - RNA, 19 nt, Artificial Sequence
  Description of Artificial Sequence: Synthetic oligonucleotide
  Sense strand starting at position 2041 of SEQ ID NO: 1888536
cccuuuguguugucauaag

SEQ ID NO: 2539991 - RNA, 19 nt, Artificial Sequence
  Description of Artificial Sequence: Synthetic oligonucleotide
  Antisense strand to SEQ ID NO: 2539990
cuuaugacaacacaaaggg

SEQ ID NO: 2539992 - RNA, 19 nt, Artificial Sequence
  Description of Artificial Sequence: Synthetic oligonucleotide
  Sense strand starting at position 850 of SEQ ID NO: 1888536
gggucaucuuaacagggaa

SEQ ID NO: 2539993 - RNA, 19 nt, Artificial Sequence
  Description of Artificial Sequence: Synthetic oligonucleotide
  Antisense strand to SEQ ID NO: 2539992
uucccuguuaagaugaccc

SEQ ID NO: 2539994 - RNA, 19 nt, Artificial Sequence
  Description of Artificial Sequence: Synthetic oligonucleotide
  Sense strand starting at position 167 of SEQ ID NO: 1888536
ccucgugucccucauuagu

SEQ ID NO: 2539995 - RNA, 19 nt, Artificial Sequence
  Description of Artificial Sequence: Synthetic oligonucleotide
  Antisense strand to SEQ ID NO: 2539994
acuaaugagggacacgagg

SEQ ID NO: 2539996 - RNA, 19 nt, Artificial Sequence
  Description of Artificial Sequence: Synthetic oligonucleotide
  Sense strand starting at position 1134 of SEQ ID NO: 1888537
cagucuucuggugaaggaa

SEQ ID NO: 2539997 - RNA, 19 nt, Artificial Sequence
  Description of Artificial Sequence: Synthetic oligonucleotide
  Antisense strand to SEQ ID NO: 2539996
uuccuucaccagaagacug

SEQ ID NO: 2539998 - RNA, 19 nt, Artificial Sequence
  Description of Artificial Sequence: Synthetic oligonucleotide
  Sense strand starting at position 2496 of SEQ ID NO: 1888537
uuccguuaucucgucugau

SEQ ID NO: 2539999 - RNA, 19 nt, Artificial Sequence
  Description of Artificial Sequence: Synthetic oligonucleotide
  Antisense strand to SEQ ID NO: 2539998
aucagacgagauaacggaa

SEQ ID NO: 2540000 - RNA, 19 nt, Artificial Sequence
  Description of Artificial Sequence: Synthetic oligonucleotide
  Sense strand starting at position 470 of SEQ ID NO: 1888537
accugacgcuagguaauuu

SEQ ID NO: 2540001 - RNA, 19 nt, Artificial Sequence
  Description of Artificial Sequence: Synthetic oligonucleotide
  Antisense strand to SEQ ID NO: 2540000
aaauuaccuagcgucaggu

SEQ ID NO: 2540002 - RNA, 19 nt, Artificial Sequence
  Description of Artificial Sequence: Synthetic oligonucleotide
  Sense strand starting at position 851 of SEQ ID NO: 1888537
agaaaugaaucugccauac

SEQ ID NO: 2540003 - RNA, 19 nt, Artificial Sequence
  Description of Artificial Sequence: Synthetic oligonucleotide
  Antisense strand to SEQ ID NO: 2540002
guauggcagauucauuucu

SEQ ID NO: 2540004 - RNA, 19 nt, Artificial Sequence
  Description of Artificial Sequence: Synthetic oligonucleotide
  Sense strand starting at position 2864 of SEQ ID NO: 1888537
guagagauggagggugauu

SEQ ID NO: 2540005 - RNA, 19 nt, Artificial Sequence
  Description of Artificial Sequence: Synthetic oligonucleotide
  Antisense strand to SEQ ID NO: 2540004
aaucacccuccaucucuac

SEQ ID NO: 2540006 - RNA, 19 nt, Artificial Sequence
  Description of Artificial Sequence: Synthetic oligonucleotide
  Sense strand starting at position 1454 of SEQ ID NO: 1888537
guauuauaccucguucgca

SEQ ID NO: 2540007 - RNA, 19 nt, Artificial Sequence
  Description of Artificial Sequence: Synthetic oligonucleotide
  Antisense strand to SEQ ID NO: 2540006
ugcgaacgagguauaauac

SEQ ID NO: 2540008 - RNA, 19 nt, Artificial Sequence
  Description of Artificial Sequence: Synthetic oligonucleotide
  Sense strand starting at position 3976 of SEQ ID NO: 1888537
aggaacuguccuggagacu

SEQ ID NO: 2540009 - RNA, 19 nt, Artificial Sequence
  Description of Artificial Sequence: Synthetic oligonucleotide
  Antisense strand to SEQ ID NO: 2540008
agucuccaggacaguuccu

SEQ ID NO: 2540010 - RNA, 19 nt, Artificial Sequence
  Description of Artificial Sequence: Synthetic oligonucleotide
  Sense strand starting at position 944 of SEQ ID NO: 1888537
ccauucucccaugagcaga

SEQ ID NO: 2540011 - RNA, 19 nt, Artificial Sequence
  Description of Artificial Sequence: Synthetic oligonucleotide
  Antisense strand to SEQ ID NO: 2540010
ucugcucaugggagaaugg

SEQ ID NO: 2540012 - RNA, 19 nt, Artificial Sequence
  Description of Artificial Sequence: Synthetic oligonucleotide
  Sense strand starting at position 1165 of SEQ ID NO: 1888537
gagugauugguauggauga

SEQ ID NO: 2540013 - RNA, 19 nt, Artificial Sequence
  Description of Artificial Sequence: Synthetic oligonucleotide
  Antisense strand to SEQ ID NO: 2540012
ucauccauaccaaucacuc

SEQ ID NO: 2540014 - RNA, 19 nt, Artificial Sequence
  Description of Artificial Sequence: Synthetic oligonucleotide
  Sense strand starting at position 2852 of SEQ ID NO: 1888537
ucaggauguucaguagaga

SEQ ID NO: 2540015 - RNA, 19 nt, Artificial Sequence
  Description of Artificial Sequence: Synthetic oligonucleotide
  Antisense strand to SEQ ID NO: 2540014
ucucuacugaacauccuga

SEQ ID NO: 2540016 - RNA, 19 nt, Artificial Sequence
  Description of Artificial Sequence: Synthetic oligonucleotide
  Sense strand starting at position 2896 of SEQ ID NO: 1888537
agaaauucuuucucaagug

SEQ ID NO: 2540017 - RNA, 19 nt, Artificial Sequence
  Description of Artificial Sequence: Synthetic oligonucleotide
  Antisense strand to SEQ ID NO: 2540016
cacuugagaaagaauuucu

SEQ ID NO: 2540018 - RNA, 19 nt, Artificial Sequence
  Description of Artificial Sequence: Synthetic oligonucleotide
  Sense strand starting at position 1552 of SEQ ID NO: 1888537
ucaggucaggguuauccua

SEQ ID NO: 2540019 - RNA, 19 nt, Artificial Sequence
  Description of Artificial Sequence: Synthetic oligonucleotide
  Antisense strand to SEQ ID NO: 2540018
uaggauaacccugaccuga

SEQ ID NO: 2540020 - RNA, 19 nt, Artificial Sequence
  Description of Artificial Sequence: Synthetic oligonucleotide
  Sense strand starting at position 881 of SEQ ID NO: 1888537
cuacuaugugcugacauga

SEQ ID NO: 2540021 - RNA, 19 nt, Artificial Sequence
  Description of Artificial Sequence: Synthetic oligonucleotide
  Antisense strand to SEQ ID NO: 2540020
ucaugucagcacauaguag

SEQ ID NO: 2540022 - RNA, 19 nt, Artificial Sequence
  Description of Artificial Sequence: Synthetic oligonucleotide
  Sense strand starting at position 2881 of SEQ ID NO: 1888537
uuuaauguuucccugagaa

SEQ ID NO: 2540023 - RNA, 19 nt, Artificial Sequence
  Description of Artificial Sequence: Synthetic oligonucleotide
  Antisense strand to SEQ ID NO: 2540022
uucucagggaaacauuaaa

SEQ ID NO: 2540024 - RNA, 19 nt, Artificial Sequence
  Description of Artificial Sequence: Synthetic oligonucleotide
  Sense strand starting at position 390 of SEQ ID NO: 1888537
cagugaaaguuggugaaug

SEQ ID NO: 2540025 - RNA, 19 nt, Artificial Sequence
  Description of Artificial Sequence: Synthetic oligonucleotide
  Antisense strand to SEQ ID NO: 2540024
cauucaccaacuuucacug

SEQ ID NO: 2540026 - RNA, 19 nt, Artificial Sequence
  Description of Artificial Sequence: Synthetic oligonucleotide
  Sense strand starting at position 3144 of SEQ ID NO: 1888537
agacuuauuuaggaucuuu

SEQ ID NO: 2540027 - RNA, 19 nt, Artificial Sequence
  Description of Artificial Sequence: Synthetic oligonucleotide
  Antisense strand to SEQ ID NO: 2540026
aaagauccuaaauaagucu

SEQ ID NO: 2540028 - RNA, 19 nt, Artificial Sequence
  Description of Artificial Sequence: Synthetic oligonucleotide
  Sense strand starting at position 1789 of SEQ ID NO: 1888537
caaugagucucccucaggu

SEQ ID NO: 2540029 - RNA, 19 nt, Artificial Sequence
  Description of Artificial Sequence: Synthetic oligonucleotide
  Antisense strand to SEQ ID NO: 2540028
accugagggagacucauug

SEQ ID NO: 2540030 - RNA, 19 nt, Artificial Sequence
  Description of Artificial Sequence: Synthetic oligonucleotide
  Sense strand starting at position 388 of SEQ ID NO: 1888537
gucagugaaaguuggugaa

SEQ ID NO: 2540031 - RNA, 19 nt, Artificial Sequence
  Description of Artificial Sequence: Synthetic oligonucleotide
  Antisense strand to SEQ ID NO: 2540030
uucaccaacuuucacugac

SEQ ID NO: 2540032 - RNA, 19 nt, Artificial Sequence
  Description of Artificial Sequence: Synthetic oligonucleotide
  Sense strand starting at position 3615 of SEQ ID NO: 1888537
uugacaucccuuggguagu

SEQ ID NO: 2540033 - RNA, 19 nt, Artificial Sequence
  Description of Artificial Sequence: Synthetic oligonucleotide
  Antisense strand to SEQ ID NO: 2540032
acuacccaagggaugucaa

SEQ ID NO: 2540034 - RNA, 19 nt, Artificial Sequence
  Description of Artificial Sequence: Synthetic oligonucleotide
  Sense strand starting at position 3213 of SEQ ID NO: 1888537
cuuugacugguuuggguau

SEQ ID NO: 2540035 - RNA, 19 nt, Artificial Sequence
  Description of Artificial Sequence: Synthetic oligonucleotide
  Antisense strand to SEQ ID NO: 2540034
auacccaaaccagucaaag

SEQ ID NO: 2540036 - RNA, 19 nt, Artificial Sequence
  Description of Artificial Sequence: Synthetic oligonucleotide
  Sense strand starting at position 101 of SEQ ID NO: 1888537
cgccuucucuacccaagaa

SEQ ID NO: 2540037 - RNA, 19 nt, Artificial Sequence
  Description of Artificial Sequence: Synthetic oligonucleotide
  Antisense strand to SEQ ID NO: 2540036
uucuuggguagagaaggcg

SEQ ID NO: 2540038 - RNA, 19 nt, Artificial Sequence
  Description of Artificial Sequence: Synthetic oligonucleotide
  Sense strand starting at position 2490 of SEQ ID NO: 1888537
cgagaauuccguuaucucg

SEQ ID NO: 2540039 - RNA, 19 nt, Artificial Sequence
  Description of Artificial Sequence: Synthetic oligonucleotide
  Antisense strand to SEQ ID NO: 2540038
cgagauaacggaauucucg

SEQ ID NO: 2540040 - RNA, 19 nt, Artificial Sequence
  Description of Artificial Sequence: Synthetic oligonucleotide
  Sense strand starting at position 3008 of SEQ ID NO: 1888537
ccaggauucucauccguuu

SEQ ID NO: 2540041 - RNA, 19 nt, Artificial Sequence
  Description of Artificial Sequence: Synthetic oligonucleotide
  Antisense strand to SEQ ID NO: 2540040
aaacggaugagaauccugg

SEQ ID NO: 2540042 - RNA, 19 nt, Artificial Sequence
  Description of Artificial Sequence: Synthetic oligonucleotide
  Sense strand starting at position 382 of SEQ ID NO: 1888537
guagcugucagugaaaguu

SEQ ID NO: 2540043 - RNA, 19 nt, Artificial Sequence
  Description of Artificial Sequence: Synthetic oligonucleotide
  Antisense strand to SEQ ID NO: 2540042
aacuuucacugacagcuac

SEQ ID NO: 2540044 - RNA, 19 nt, Artificial Sequence
  Description of Artificial Sequence: Synthetic oligonucleotide
  Sense strand starting at position 176 of SEQ ID NO: 1888537
acaugacuuggcugugcaa

SEQ ID NO: 2540045 - RNA, 19 nt, Artificial Sequence
  Description of Artificial Sequence: Synthetic oligonucleotide
  Antisense strand to SEQ ID NO: 2540044
uugcacagccaagucaugu

SEQ ID NO: 2540046 - RNA, 19 nt, Artificial Sequence
  Description of Artificial Sequence: Synthetic oligonucleotide
  Sense strand starting at position 3091 of SEQ ID NO: 1888537
uuguauugaauucgauguu

SEQ ID NO: 2540047 - RNA, 19 nt, Artificial Sequence
  Description of Artificial Sequence: Synthetic oligonucleotide
  Antisense strand to SEQ ID NO: 2540046
aacaucgaauucaauacaa

SEQ ID NO: 2540048 - RNA, 19 nt, Artificial Sequence
  Description of Artificial Sequence: Synthetic oligonucleotide
  Sense strand starting at position 3128 of SEQ ID NO: 1888537
ugguuucuguuugcuaaga

SEQ ID NO: 2540049 - RNA, 19 nt, Artificial Sequence
  Description of Artificial Sequence: Synthetic oligonucleotide
  Antisense strand to SEQ ID NO: 2540048
ucuuagcaaacagaaacca

SEQ ID NO: 2540050 - RNA, 19 nt, Artificial Sequence
  Description of Artificial Sequence: Synthetic oligonucleotide
  Sense strand starting at position 178 of SEQ ID NO: 1888537
augacuuggcugugcaauu

SEQ ID NO: 2540051 - RNA, 19 nt, Artificial Sequence
  Description of Artificial Sequence: Synthetic oligonucleotide
  Antisense strand to SEQ ID NO: 2540050
aauugcacagccaagucau

SEQ ID NO: 2540052 - RNA, 19 nt, Artificial Sequence
  Description of Artificial Sequence: Synthetic oligonucleotide
  Sense strand starting at position 381 of SEQ ID NO: 1888537
aguagcugucagugaaagu

SEQ ID NO: 2540053 - RNA, 19 nt, Artificial Sequence
  Description of Artificial Sequence: Synthetic oligonucleotide
  Antisense strand to SEQ ID NO: 2540052
acuuucacugacagcuacu

SEQ ID NO: 2540054 - RNA, 19 nt, Artificial Sequence
  Description of Artificial Sequence: Synthetic oligonucleotide
  Sense strand starting at position 907 of SEQ ID NO: 1888537
agaggaguaucaggaauga

SEQ ID NO: 2540055 - RNA, 19 nt, Artificial Sequence
  Description of Artificial Sequence: Synthetic oligonucleotide
  Antisense strand to SEQ ID NO: 2540054
ucauuccugauacuccucu

SEQ ID NO: 2540056 - RNA, 19 nt, Artificial Sequence
  Description of Artificial Sequence: Synthetic oligonucleotide
  Sense strand starting at position 3127 of SEQ ID NO: 1888537
cugguuucuguuugcuaag

SEQ ID NO: 2540057 - RNA, 19 nt, Artificial Sequence
  Description of Artificial Sequence: Synthetic oligonucleotide
  Antisense strand to SEQ ID NO: 2540056
cuuagcaaacagaaaccag

SEQ ID NO: 2540058 - RNA, 19 nt, Artificial Sequence
  Description of Artificial Sequence: Synthetic oligonucleotide
  Sense strand starting at position 1300 of SEQ ID NO: 1888537
agcuuaucuucgucccuga

SEQ ID NO: 2540059 - RNA, 19 nt, Artificial Sequence
  Description of Artificial Sequence: Synthetic oligonucleotide
  Antisense strand to SEQ ID NO: 2540058
ucagggacgaagauaagcu

SEQ ID NO: 2540060 - RNA, 19 nt, Artificial Sequence
  Description of Artificial Sequence: Synthetic oligonucleotide
  Sense strand starting at position 3354 of SEQ ID NO: 1888537
gugcaaaggcgugaucugu

SEQ ID NO: 2540061 - RNA, 19 nt, Artificial Sequence
  Description of Artificial Sequence: Synthetic oligonucleotide
  Antisense strand to SEQ ID NO: 2540060
acagaucacgccuuugcac

SEQ ID NO: 2540062 - RNA, 19 nt, Artificial Sequence
  Description of Artificial Sequence: Synthetic oligonucleotide
  Sense strand starting at position 2497 of SEQ ID NO: 1888537
uccguuaucucgucugaug

SEQ ID NO: 2540063 - RNA, 19 nt, Artificial Sequence
  Description of Artificial Sequence: Synthetic oligonucleotide
  Antisense strand to SEQ ID NO: 2540062
caucagacgagauaacgga

SEQ ID NO: 2540064 - RNA, 19 nt, Artificial Sequence
  Description of Artificial Sequence: Synthetic oligonucleotide
  Sense strand starting at position 1163 of SEQ ID NO: 1888537
uggagugauugguauggau

SEQ ID NO: 2540065 - RNA, 19 nt, Artificial Sequence
  Description of Artificial Sequence: Synthetic oligonucleotide
  Antisense strand to SEQ ID NO: 2540064
auccauaccaaucacucca

SEQ ID NO: 2540066 - RNA, 19 nt, Artificial Sequence
  Description of Artificial Sequence: Synthetic oligonucleotide
  Sense strand starting at position 2885 of SEQ ID NO: 1888537
auguuucccugagaaauuc

SEQ ID NO: 2540067 - RNA, 19 nt, Artificial Sequence
  Description of Artificial Sequence: Synthetic oligonucleotide
  Antisense strand to SEQ ID NO: 2540066
gaauuucucagggaaacau

SEQ ID NO: 2540068 - RNA, 19 nt, Artificial Sequence
  Description of Artificial Sequence: Synthetic oligonucleotide
  Sense strand starting at position 3126 of SEQ ID NO: 1888537
gcugguuucuguuugcuaa

SEQ ID NO: 2540069 - RNA, 19 nt, Artificial Sequence
  Description of Artificial Sequence: Synthetic oligonucleotide
  Antisense strand to SEQ ID NO: 2540068
uuagcaaacagaaaccagc

SEQ ID NO: 2540070 - RNA, 19 nt, Artificial Sequence
  Description of Artificial Sequence: Synthetic oligonucleotide
  Sense strand starting at position 572 of SEQ ID NO: 1888537
agcuuaagaucaugacaua

SEQ ID NO: 2540071 - RNA, 19 nt, Artificial Sequence
  Description of Artificial Sequence: Synthetic oligonucleotide
  Antisense strand to SEQ ID NO: 2540070
uaugucaugaucuuaagcu

SEQ ID NO: 2540072 - RNA, 19 nt, Artificial Sequence
  Description of Artificial Sequence: Synthetic oligonucleotide
  Sense strand starting at position 2840 of SEQ ID NO: 1888537
cgcuguuguuguucaggau

SEQ ID NO: 2540073 - RNA, 19 nt, Artificial Sequence
  Description of Artificial Sequence: Synthetic oligonucleotide
  Antisense strand to SEQ ID NO: 2540072
auccugaacaacaacagcg

SEQ ID NO: 2540074 - RNA, 19 nt, Artificial Sequence
  Description of Artificial Sequence: Synthetic oligonucleotide
  Sense strand starting at position 72 of SEQ ID NO: 1888537
ggguaauuauaguaguauu

SEQ ID NO: 2540075 - RNA, 19 nt, Artificial Sequence
  Description of Artificial Sequence: Synthetic oligonucleotide
  Antisense strand to SEQ ID NO: 2540074
aauacuacuauaauuaccc

SEQ ID NO: 2540076 - RNA, 19 nt, Artificial Sequence
  Description of Artificial Sequence: Synthetic oligonucleotide
  Sense strand starting at position 1301 of SEQ ID NO: 1888538
ccagccucuugauuuaagu

SEQ ID NO: 2540077 - RNA, 19 nt, Artificial Sequence
  Description of Artificial Sequence: Synthetic oligonucleotide
  Antisense strand to SEQ ID NO: 2540076
acuuaaaucaagaggcugg

SEQ ID NO: 2540078 - RNA, 19 nt, Artificial Sequence
  Description of Artificial Sequence: Synthetic oligonucleotide
  Sense strand starting at position 2998 of SEQ ID NO: 1888538
gcauuuccugcauauagca

SEQ ID NO: 2540079 - RNA, 19 nt, Artificial Sequence
  Description of Artificial Sequence: Synthetic oligonucleotide
  Antisense strand to SEQ ID NO: 2540078
ugcuauaugcaggaaaugc

SEQ ID NO: 2540080 - RNA, 19 nt, Artificial Sequence
  Description of Artificial Sequence: Synthetic oligonucleotide
  Sense strand starting at position 2196 of SEQ ID NO: 1888538
aaagacuugcugcauggaa

SEQ ID NO: 2540081 - RNA, 19 nt, Artificial Sequence
  Description of Artificial Sequence: Synthetic oligonucleotide
  Antisense strand to SEQ ID NO: 2540080
uuccaugcagcaagucuuu

SEQ ID NO: 2540082 - RNA, 19 nt, Artificial Sequence
  Description of Artificial Sequence: Synthetic oligonucleotide
  Sense strand starting at position 1580 of SEQ ID NO: 1888538
uccaacugucuuuagggau

SEQ ID NO: 2540083 - RNA, 19 nt, Artificial Sequence
  Description of Artificial Sequence: Synthetic oligonucleotide
  Antisense strand to SEQ ID NO: 2540082
aucccuaaagacaguugga

SEQ ID NO: 2540084 - RNA, 19 nt, Artificial Sequence
  Description of Artificial Sequence: Synthetic oligonucleotide
  Sense strand starting at position 235 of SEQ ID NO: 1888538
auagaacacucccugugaa

SEQ ID NO: 2540085 - RNA, 19 nt, Artificial Sequence
  Description of Artificial Sequence: Synthetic oligonucleotide
  Antisense strand to SEQ ID NO: 2540084
uucacagggaguguucuau

SEQ ID NO: 2540086 - RNA, 19 nt, Artificial Sequence
  Description of Artificial Sequence: Synthetic oligonucleotide
  Sense strand starting at position 375 of SEQ ID NO: 1888538
gggaacacucccugggagu

SEQ ID NO: 2540087 - RNA, 19 nt, Artificial Sequence
  Description of Artificial Sequence: Synthetic oligonucleotide
  Antisense strand to SEQ ID NO: 2540086
acucccagggaguguuccc

SEQ ID NO: 2540088 - RNA, 19 nt, Artificial Sequence
  Description of Artificial Sequence: Synthetic oligonucleotide
  Sense strand starting at position 3969 of SEQ ID NO: 1888538
gugauuuccuaagugccua

SEQ ID NO: 2540089 - RNA, 19 nt, Artificial Sequence
  Description of Artificial Sequence: Synthetic oligonucleotide
  Antisense strand to SEQ ID NO: 2540088
uaggcacuuaggaaaucac

SEQ ID NO: 2540090 - RNA, 19 nt, Artificial Sequence
  Description of Artificial Sequence: Synthetic oligonucleotide
  Sense strand starting at position 3184 of SEQ ID NO: 1888538
gaauauggccacugggauu

SEQ ID NO: 2540091 - RNA, 19 nt, Artificial Sequence
  Description of Artificial Sequence: Synthetic oligonucleotide
  Antisense strand to SEQ ID NO: 2540090
aaucccaguggccauauuc

SEQ ID NO: 2540092 - RNA, 19 nt, Artificial Sequence
  Description of Artificial Sequence: Synthetic oligonucleotide
  Sense strand starting at position 58 of SEQ ID NO: 1888538
aguggcugucacuaaggaa

SEQ ID NO: 2540093 - RNA, 19 nt, Artificial Sequence
  Description of Artificial Sequence: Synthetic oligonucleotide
  Antisense strand to SEQ ID NO: 2540092
uuccuuagugacagccacu

SEQ ID NO: 2540094 - RNA, 19 nt, Artificial Sequence
  Description of Artificial Sequence: Synthetic oligonucleotide
  Sense strand starting at position 3067 of SEQ ID NO: 1888538
ggguuaaagggcugaauua

SEQ ID NO: 2540095 - RNA, 19 nt, Artificial Sequence
  Description of Artificial Sequence: Synthetic oligonucleotide
  Antisense strand to SEQ ID NO: 2540094
uaauucagcccuuuaaccc

SEQ ID NO: 2540096 - RNA, 19 nt, Artificial Sequence
  Description of Artificial Sequence: Synthetic oligonucleotide
  Sense strand starting at position 3411 of SEQ ID NO: 1888538
gguccuuuagcugaagauu

SEQ ID NO: 2540097 - RNA, 19 nt, Artificial Sequence
  Description of Artificial Sequence: Synthetic oligonucleotide
  Antisense strand to SEQ ID NO: 2540096
aaucuucagcuaaaggacc

SEQ ID NO: 2540098 - RNA, 19 nt, Artificial Sequence
  Description of Artificial Sequence: Synthetic oligonucleotide
  Sense strand starting at position 455 of SEQ ID NO: 1888538
agaguuuacuagcuagaac

SEQ ID NO: 2540099 - RNA, 19 nt, Artificial Sequence
  Description of Artificial Sequence: Synthetic oligonucleotide
  Antisense strand to SEQ ID NO: 2540098
guucuagcuaguaaacucu

SEQ ID NO: 2540100 - RNA, 19 nt, Artificial Sequence
  Description of Artificial Sequence: Synthetic oligonucleotide
  Sense strand starting at position 172 of SEQ ID NO: 1888538
guucguuaugaggauuaau

SEQ ID NO: 2540101 - RNA, 19 nt, Artificial Sequence
  Description of Artificial Sequence: Synthetic oligonucleotide
  Antisense strand to SEQ ID NO: 2540100
auuaauccucauaacgaac

SEQ ID NO: 2540102 - RNA, 19 nt, Artificial Sequence
  Description of Artificial Sequence: Synthetic oligonucleotide
  Sense strand starting at position 3907 of SEQ ID NO: 1888538
cugugucuugaaggacaga

SEQ ID NO: 2540103 - RNA, 19 nt, Artificial Sequence
  Description of Artificial Sequence: Synthetic oligonucleotide
  Antisense strand to SEQ ID NO: 2540102
ucuguccuucaagacacag

SEQ ID NO: 2540104 - RNA, 19 nt, Artificial Sequence
  Description of Artificial Sequence: Synthetic oligonucleotide
  Sense strand starting at position 3171 of SEQ ID NO: 1888538
cguugaggacuuggaauau

SEQ ID NO: 2540105 - RNA, 19 nt, Artificial Sequence
  Description of Artificial Sequence: Synthetic oligonucleotide
  Antisense strand to SEQ ID NO: 2540104
auauuccaaguccucaacg

SEQ ID NO: 2540106 - RNA, 19 nt, Artificial Sequence
  Description of Artificial Sequence: Synthetic oligonucleotide
  Sense strand starting at position 3934 of SEQ ID NO: 1888538
uguugagggucucuggaaa

SEQ ID NO: 2540107 - RNA, 19 nt, Artificial Sequence
  Description of Artificial Sequence: Synthetic oligonucleotide
  Antisense strand to SEQ ID NO: 2540106
uuuccagagacccucaaca

SEQ ID NO: 2540108 - RNA, 19 nt, Artificial Sequence
  Description of Artificial Sequence: Synthetic oligonucleotide
  Sense strand starting at position 1579 of SEQ ID NO: 1888538
cuccaacugucuuuaggga

SEQ ID NO: 2540109 - RNA, 19 nt, Artificial Sequence
  Description of Artificial Sequence: Synthetic oligonucleotide
  Antisense strand to SEQ ID NO: 2540108
ucccuaaagacaguuggag

SEQ ID NO: 2540110 - RNA, 19 nt, Artificial Sequence
  Description of Artificial Sequence: Synthetic oligonucleotide
  Sense strand starting at position 1703 of SEQ ID NO: 1888538
ugaaauugugacgggaagu

SEQ ID NO: 2540111 - RNA, 19 nt, Artificial Sequence
  Description of Artificial Sequence: Synthetic oligonucleotide
  Antisense strand to SEQ ID NO: 2540110
acuucccgucacaauuuca

SEQ ID NO: 2540112 - RNA, 19 nt, Artificial Sequence
  Description of Artificial Sequence: Synthetic oligonucleotide
  Sense strand starting at position 1704 of SEQ ID NO: 1888538
gaaauugugacgggaaguc

SEQ ID NO: 2540113 - RNA, 19 nt, Artificial Sequence
  Description of Artificial Sequence: Synthetic oligonucleotide
  Antisense strand to SEQ ID NO: 2540112
gacuucccgucacaauuuc

SEQ ID NO: 2540114 - RNA, 19 nt, Artificial Sequence
  Description of Artificial Sequence: Synthetic oligonucleotide
  Sense strand starting at position 2193 of SEQ ID NO: 1888538
gagaaagacuugcugcaug

SEQ ID NO: 2540115 - RNA, 19 nt, Artificial Sequence
  Description of Artificial Sequence: Synthetic oligonucleotide
  Antisense strand to SEQ ID NO: 2540114
caugcagcaagucuuucuc

SEQ ID NO: 2540116 - RNA, 19 nt, Artificial Sequence
  Description of Artificial Sequence: Synthetic oligonucleotide
  Sense strand starting at position 2191 of SEQ ID NO: 1888538
uggagaaagacuugcugca

SEQ ID NO: 2540117 - RNA, 19 nt, Artificial Sequence
  Description of Artificial Sequence: Synthetic oligonucleotide
  Antisense strand to SEQ ID NO: 2540116
ugcagcaagucuuucucca

SEQ ID NO: 2540118 - RNA, 19 nt, Artificial Sequence
  Description of Artificial Sequence: Synthetic oligonucleotide
  Sense strand starting at position 2337 of SEQ ID NO: 1888538
ucuguaucucuccagguga

SEQ ID NO: 2540119 - RNA, 19 nt, Artificial Sequence
  Description of Artificial Sequence: Synthetic oligonucleotide
  Antisense strand to SEQ ID NO: 2540118
ucaccuggagagauacaga

SEQ ID NO: 2540120 - RNA, 19 nt, Artificial Sequence
  Description of Artificial Sequence: Synthetic oligonucleotide
  Sense strand starting at position 3945 of SEQ ID NO: 1888538
ucuggaaauuguucucauu

SEQ ID NO: 2540121 - RNA, 19 nt, Artificial Sequence
  Description of Artificial Sequence: Synthetic oligonucleotide
  Antisense strand to SEQ ID NO: 2540120
aaugagaacaauuuccaga

SEQ ID NO: 2540122 - RNA, 19 nt, Artificial Sequence
  Description of Artificial Sequence: Synthetic oligonucleotide
  Sense strand starting at position 238 of SEQ ID NO: 1888538
gaacacucccugugaaugu

SEQ ID NO: 2540123 - RNA, 19 nt, Artificial Sequence
  Description of Artificial Sequence: Synthetic oligonucleotide
  Antisense strand to SEQ ID NO: 2540122
acauucacagggaguguuc

SEQ ID NO: 2540124 - RNA, 19 nt, Artificial Sequence
  Description of Artificial Sequence: Synthetic oligonucleotide
  Sense strand starting at position 2665 of SEQ ID NO: 1888538
uuaacuguugcagaaguuu

SEQ ID NO: 2540125 - RNA, 19 nt, Artificial Sequence
  Description of Artificial Sequence: Synthetic oligonucleotide
  Antisense strand to SEQ ID NO: 2540124
aaacuucugcaacaguuaa

SEQ ID NO: 2540126 - RNA, 19 nt, Artificial Sequence
  Description of Artificial Sequence: Synthetic oligonucleotide
  Sense strand starting at position 2387 of SEQ ID NO: 1888538
gaagucauuucugauugac

SEQ ID NO: 2540127 - RNA, 19 nt, Artificial Sequence
  Description of Artificial Sequence: Synthetic oligonucleotide
  Antisense strand to SEQ ID NO: 2540126
gucaaucagaaaugacuuc

SEQ ID NO: 2540128 - RNA, 19 nt, Artificial Sequence
  Description of Artificial Sequence: Synthetic oligonucleotide
  Sense strand starting at position 2375 of SEQ ID NO: 1888538
ggcaguaaucucgaaguca

SEQ ID NO: 2540129 - RNA, 19 nt, Artificial Sequence
  Description of Artificial Sequence: Synthetic oligonucleotide
  Antisense strand to SEQ ID NO: 2540128
ugacuucgagauuacugcc

SEQ ID NO: 2540130 - RNA, 19 nt, Artificial Sequence
  Description of Artificial Sequence: Synthetic oligonucleotide
  Sense strand starting at position 1448 of SEQ ID NO: 1888538
gcucgugcauuuccugaau

SEQ ID NO: 2540131 - RNA, 19 nt, Artificial Sequence
  Description of Artificial Sequence: Synthetic oligonucleotide
  Antisense strand to SEQ ID NO: 2540130
auucaggaaaugcacgagc

SEQ ID NO: 2540132 - RNA, 19 nt, Artificial Sequence
  Description of Artificial Sequence: Synthetic oligonucleotide
  Sense strand starting at position 2278 of SEQ ID NO: 1888538
ucacuagcuccuggaagua

SEQ ID NO: 2540133 - RNA, 19 nt, Artificial Sequence
  Description of Artificial Sequence: Synthetic oligonucleotide
  Antisense strand to SEQ ID NO: 2540132
uacuuccaggagcuaguga

SEQ ID NO: 2540134 - RNA, 19 nt, Artificial Sequence
  Description of Artificial Sequence: Synthetic oligonucleotide
  Sense strand starting at position 2907 of SEQ ID NO: 1888538
agaguuguugcucaucuca

SEQ ID NO: 2540135 - RNA, 19 nt, Artificial Sequence
  Description of Artificial Sequence: Synthetic oligonucleotide
  Antisense strand to SEQ ID NO: 2540134
ugagaugagcaacaacucu

SEQ ID NO: 2540136 - RNA, 19 nt, Artificial Sequence
  Description of Artificial Sequence: Synthetic oligonucleotide
  Sense strand starting at position 3410 of SEQ ID NO: 1888538
ugguccuuuagcugaagau

SEQ ID NO: 2540137 - RNA, 19 nt, Artificial Sequence
  Description of Artificial Sequence: Synthetic oligonucleotide
  Antisense strand to SEQ ID NO: 2540136
aucuucagcuaaaggacca

SEQ ID NO: 2540138 - RNA, 19 nt, Artificial Sequence
  Description of Artificial Sequence: Synthetic oligonucleotide
  Sense strand starting at position 3544 of SEQ ID NO: 1888538
gccagauaguuuccuccaa

SEQ ID NO: 2540139 - RNA, 19 nt, Artificial Sequence
  Description of Artificial Sequence: Synthetic oligonucleotide
  Antisense strand to SEQ ID NO: 2540138
uuggaggaaacuaucuggc

SEQ ID NO: 2540140 - RNA, 19 nt, Artificial Sequence
  Description of Artificial Sequence: Synthetic oligonucleotide
  Sense strand starting at position 3299 of SEQ ID NO: 1888538
gggccuguauuauucucaa

SEQ ID NO: 2540141 - RNA, 19 nt, Artificial Sequence
  Description of Artificial Sequence: Synthetic oligonucleotide
  Antisense strand to SEQ ID NO: 2540140
uugagaauaauacaggccc

SEQ ID NO: 2540142 - RNA, 19 nt, Artificial Sequence
  Description of Artificial Sequence: Synthetic oligonucleotide
  Sense strand starting at position 532 of SEQ ID NO: 1888538
cuacgucuugggcaagcaa

SEQ ID NO: 2540143 - RNA, 19 nt, Artificial Sequence
  Description of Artificial Sequence: Synthetic oligonucleotide
  Antisense strand to SEQ ID NO: 2540142
uugcuugcccaagacguag

SEQ ID NO: 2540144 - RNA, 19 nt, Artificial Sequence
  Description of Artificial Sequence: Synthetic oligonucleotide
  Sense strand starting at position 470 of SEQ ID NO: 1888538
gaacuccguuugucaucaa

SEQ ID NO: 2540145 - RNA, 19 nt, Artificial Sequence
  Description of Artificial Sequence: Synthetic oligonucleotide
  Antisense strand to SEQ ID NO: 2540144
uugaugacaaacggaguuc

SEQ ID NO: 2540146 - RNA, 19 nt, Artificial Sequence
  Description of Artificial Sequence: Synthetic oligonucleotide
  Sense strand starting at position 2753 of SEQ ID NO: 1888538
ugcgucauucuuuacauau

SEQ ID NO: 2540147 - RNA, 19 nt, Artificial Sequence
  Description of Artificial Sequence: Synthetic oligonucleotide
  Antisense strand to SEQ ID NO: 2540146
auauguaaagaaugacgca

SEQ ID NO: 2540148 - RNA, 19 nt, Artificial Sequence
  Description of Artificial Sequence: Synthetic oligonucleotide
  Sense strand starting at position 2902 of SEQ ID NO: 1888538
aacuuagaguuguugcuca

SEQ ID NO: 2540149 - RNA, 19 nt, Artificial Sequence
  Description of Artificial Sequence: Synthetic oligonucleotide
  Antisense strand to SEQ ID NO: 2540148
ugagcaacaacucuaaguu

SEQ ID NO: 2540150 - RNA, 19 nt, Artificial Sequence
  Description of Artificial Sequence: Synthetic oligonucleotide
  Sense strand starting at position 287 of SEQ ID NO: 1888538
gcaaguaucuugucucaga

SEQ ID NO: 2540151 - RNA, 19 nt, Artificial Sequence
  Description of Artificial Sequence: Synthetic oligonucleotide
  Antisense strand to SEQ ID NO: 2540150
ucugagacaagauacuugc

SEQ ID NO: 2540152 - RNA, 19 nt, Artificial Sequence
  Description of Artificial Sequence: Synthetic oligonucleotide
  Sense strand starting at position 3896 of SEQ ID NO: 1888538
gaggaauggcccugugucu

SEQ ID NO: 2540153 - RNA, 19 nt, Artificial Sequence
  Description of Artificial Sequence: Synthetic oligonucleotide
  Antisense strand to SEQ ID NO: 2540152
agacacagggccauuccuc

SEQ ID NO: 2540154 - RNA, 19 nt, Artificial Sequence
  Description of Artificial Sequence: Synthetic oligonucleotide
  Sense strand starting at position 3534 of SEQ ID NO: 1888538
gcacauauuugccagauag

SEQ ID NO: 2540155 - RNA, 19 nt, Artificial Sequence
  Description of Artificial Sequence: Synthetic oligonucleotide
  Antisense strand to SEQ ID NO: 2540154
cuaucuggcaaauaugugc

SEQ ID NO: 2540156 - RNA, 19 nt, Artificial Sequence
  Description of Artificial Sequence: Synthetic oligonucleotide
  Sense strand starting at position 2051 of SEQ ID NO: 1888539
gggcuaggccuuuagggaa

SEQ ID NO: 2540157 - RNA, 19 nt, Artificial Sequence
  Description of Artificial Sequence: Synthetic oligonucleotide
  Antisense strand to SEQ ID NO: 2540156
uucccuaaaggccuagccc

SEQ ID NO: 2540158 - RNA, 19 nt, Artificial Sequence
  Description of Artificial Sequence: Synthetic oligonucleotide
  Sense strand starting at position 3380 of SEQ ID NO: 1888539
ugggcuauagagugagaua

SEQ ID NO: 2540159 - RNA, 19 nt, Artificial Sequence
  Description of Artificial Sequence: Synthetic oligonucleotide
  Antisense strand to SEQ ID NO: 2540158
uaucucacucuauagccca

SEQ ID NO: 2540160 - RNA, 19 nt, Artificial Sequence
  Description of Artificial Sequence: Synthetic oligonucleotide
  Sense strand starting at position 871 of SEQ ID NO: 1888539
uagcgagaccuauaucuua

SEQ ID NO: 2540161 - RNA, 19 nt, Artificial Sequence
  Description of Artificial Sequence: Synthetic oligonucleotide
  Antisense strand to SEQ ID NO: 2540160
uaagauauaggucucgcua

SEQ ID NO: 2540162 - RNA, 19 nt, Artificial Sequence
  Description of Artificial Sequence: Synthetic oligonucleotide
  Sense strand starting at position 2963 of SEQ ID NO: 1888539
gguggaagguauccaacuu

SEQ ID NO: 2540163 - RNA, 19 nt, Artificial Sequence
  Description of Artificial Sequence: Synthetic oligonucleotide
  Antisense strand to SEQ ID NO: 2540162
aaguuggauaccuuccacc

SEQ ID NO: 2540164 - RNA, 19 nt, Artificial Sequence
  Description of Artificial Sequence: Synthetic oligonucleotide
  Sense strand starting at position 865 of SEQ ID NO: 1888539
guaacuuagcgagaccuau

SEQ ID NO: 2540165 - RNA, 19 nt, Artificial Sequence
  Description of Artificial Sequence: Synthetic oligonucleotide
  Antisense strand to SEQ ID NO: 2540164
auaggucucgcuaaguuac

SEQ ID NO: 2540166 - RNA, 19 nt, Artificial Sequence
  Description of Artificial Sequence: Synthetic oligonucleotide
  Sense strand starting at position 1707 of SEQ ID NO: 1888539
gucgguugucggagaaguc

SEQ ID NO: 2540167 - RNA, 19 nt, Artificial Sequence
  Description of Artificial Sequence: Synthetic oligonucleotide
  Antisense strand to SEQ ID NO: 2540166
gacuucuccgacaaccgac

SEQ ID NO: 2540168 - RNA, 19 nt, Artificial Sequence
  Description of Artificial Sequence: Synthetic oligonucleotide
  Sense strand starting at position 3353 of SEQ ID NO: 1888539
acgagauugagcuacugca

SEQ ID NO: 2540169 - RNA, 19 nt, Artificial Sequence
  Description of Artificial Sequence: Synthetic oligonucleotide
  Antisense strand to SEQ ID NO: 2540168
ugcaguagcucaaucucgu

SEQ ID NO: 2540170 - RNA, 19 nt, Artificial Sequence
  Description of Artificial Sequence: Synthetic oligonucleotide
  Sense strand starting at position 2975 of SEQ ID NO: 1888539
ccaacuucccaguggugaa

SEQ ID NO: 2540171 - RNA, 19 nt, Artificial Sequence
  Description of Artificial Sequence: Synthetic oligonucleotide
  Antisense strand to SEQ ID NO: 2540170
uucaccacugggaaguugg

SEQ ID NO: 2540172 - RNA, 19 nt, Artificial Sequence
  Description of Artificial Sequence: Synthetic oligonucleotide
  Sense strand starting at position 121 of SEQ ID NO: 1888539
gggugcuuugcuuaggaca

SEQ ID NO: 2540173 - RNA, 19 nt, Artificial Sequence
  Description of Artificial Sequence: Synthetic oligonucleotide
  Antisense strand to SEQ ID NO: 2540172
uguccuaagcaaagcaccc

SEQ ID NO: 2540174 - RNA, 19 nt, Artificial Sequence
  Description of Artificial Sequence: Synthetic oligonucleotide
  Sense strand starting at position 190 of SEQ ID NO: 1888539
uacugaaugccguaaaguc

SEQ ID NO: 2540175 - RNA, 19 nt, Artificial Sequence
  Description of Artificial Sequence: Synthetic oligonucleotide
  Antisense strand to SEQ ID NO: 2540174
gacuuuacggcauucagua

SEQ ID NO: 2540176 - RNA, 19 nt, Artificial Sequence
  Description of Artificial Sequence: Synthetic oligonucleotide
  Sense strand starting at position 2951 of SEQ ID NO: 1888539
cgaccaguuaccgguggaa

SEQ ID NO: 2540177 - RNA, 19 nt, Artificial Sequence
  Description of Artificial Sequence: Synthetic oligonucleotide
  Antisense strand to SEQ ID NO: 2540176
uuccaccgguaacuggucg

SEQ ID NO: 2540178 - RNA, 19 nt, Artificial Sequence
  Description of Artificial Sequence: Synthetic oligonucleotide
  Sense strand starting at position 634 of SEQ ID NO: 1888539
gucacauucuguccucuau

SEQ ID NO: 2540179 - RNA, 19 nt, Artificial Sequence
  Description of Artificial Sequence: Synthetic oligonucleotide
  Antisense strand to SEQ ID NO: 2540178
auagaggacagaaugugac

SEQ ID NO: 2540180 - RNA, 19 nt, Artificial Sequence
  Description of Artificial Sequence: Synthetic oligonucleotide
  Sense strand starting at position 1989 of SEQ ID NO: 1888539
aucuuuguugagggcgauu

SEQ ID NO: 2540181 - RNA, 19 nt, Artificial Sequence
  Description of Artificial Sequence: Synthetic oligonucleotide
  Antisense strand to SEQ ID NO: 2540180
aaucgcccucaacaaagau

SEQ ID NO: 2540182 - RNA, 19 nt, Artificial Sequence
  Description of Artificial Sequence: Synthetic oligonucleotide
  Sense strand starting at position 3554 of SEQ ID NO: 1888539
ggcaucguuccaggaucuu

SEQ ID NO: 2540183 - RNA, 19 nt, Artificial Sequence
  Description of Artificial Sequence: Synthetic oligonucleotide
  Antisense strand to SEQ ID NO: 2540182
aagauccuggaacgaugcc

SEQ ID NO: 2540184 - RNA, 19 nt, Artificial Sequence
  Description of Artificial Sequence: Synthetic oligonucleotide
  Sense strand starting at position 2128 of SEQ ID NO: 1888539
cugcucugugcuggaugau

SEQ ID NO: 2540185 - RNA, 19 nt, Artificial Sequence
  Description of Artificial Sequence: Synthetic oligonucleotide
  Antisense strand to SEQ ID NO: 2540184
aucauccagcacagagcag

SEQ ID NO: 2540186 - RNA, 19 nt, Artificial Sequence
  Description of Artificial Sequence: Synthetic oligonucleotide
  Sense strand starting at position 1716 of SEQ ID NO: 1888539
cggagaagucggcgcggaa

SEQ ID NO: 2540187 - RNA, 19 nt, Artificial Sequence
  Description of Artificial Sequence: Synthetic oligonucleotide
  Antisense strand to SEQ ID NO: 2540186
uuccgcgccgacuucuccg

SEQ ID NO: 2540188 - RNA, 19 nt, Artificial Sequence
  Description of Artificial Sequence: Synthetic oligonucleotide
  Sense strand starting at position 3383 of SEQ ID NO: 1888539
gcuauagagugagauagua

SEQ ID NO: 2540189 - RNA, 19 nt, Artificial Sequence
  Description of Artificial Sequence: Synthetic oligonucleotide
  Antisense strand to SEQ ID NO: 2540188
uacuaucucacucuauagc

SEQ ID NO: 2540190 - RNA, 19 nt, Artificial Sequence
  Description of Artificial Sequence: Synthetic oligonucleotide
  Sense strand starting at position 3084 of SEQ ID NO: 1888539
guugcagaguaggaguaaa

SEQ ID NO: 2540191 - RNA, 19 nt, Artificial Sequence
  Description of Artificial Sequence: Synthetic oligonucleotide
  Antisense strand to SEQ ID NO: 2540190
uuuacuccuacucugcaac

SEQ ID NO: 2540192 - RNA, 19 nt, Artificial Sequence
  Description of Artificial Sequence: Synthetic oligonucleotide
  Sense strand starting at position 3954 of SEQ ID NO: 1888539
aagucauucuaaggguaca

SEQ ID NO: 2540193 - RNA, 19 nt, Artificial Sequence
  Description of Artificial Sequence: Synthetic oligonucleotide
  Antisense strand to SEQ ID NO: 2540192
uguacccuuagaaugacuu

SEQ ID NO: 2540194 - RNA, 19 nt, Artificial Sequence
  Description of Artificial Sequence: Synthetic oligonucleotide
  Sense strand starting at position 2172 of SEQ ID NO: 1888539
cccugagauuggugggauc

SEQ ID NO: 2540195 - RNA, 19 nt, Artificial Sequence
  Description of Artificial Sequence: Synthetic oligonucleotide
  Antisense strand to SEQ ID NO: 2540194
gaucccaccaaucucaggg

SEQ ID NO: 2540196 - RNA, 19 nt, Artificial Sequence
  Description of Artificial Sequence: Synthetic oligonucleotide
  Sense strand starting at position 1706 of SEQ ID NO: 1888539
cgucgguugucggagaagu

SEQ ID NO: 2540197 - RNA, 19 nt, Artificial Sequence
  Description of Artificial Sequence: Synthetic oligonucleotide
  Antisense strand to SEQ ID NO: 2540196
acuucuccgacaaccgacg

SEQ ID NO: 2540198 - RNA, 19 nt, Artificial Sequence
  Description of Artificial Sequence: Synthetic oligonucleotide
  Sense strand starting at position 2088 of SEQ ID NO: 1888540
gcuggcacuuauuuauuga

SEQ ID NO: 2540199 - RNA, 19 nt, Artificial Sequence
  Description of Artificial Sequence: Synthetic oligonucleotide
  Antisense strand to SEQ ID NO: 2540198
ucaauaaauaagugccagc

SEQ ID NO: 2540200 - RNA, 19 nt, Artificial Sequence
  Description of Artificial Sequence: Synthetic oligonucleotide
  Sense strand starting at position 3775 of SEQ ID NO: 1888540
gucacuuccagggagguaa

SEQ ID NO: 2540201 - RNA, 19 nt, Artificial Sequence
  Description of Artificial Sequence: Synthetic oligonucleotide
  Antisense strand to SEQ ID NO: 2540200
uuaccucccuggaagugac

SEQ ID NO: 2540202 - RNA, 19 nt, Artificial Sequence
  Description of Artificial Sequence: Synthetic oligonucleotide
  Sense strand starting at position 156 of SEQ ID NO: 1888540
guuugucucagugugcuaa

SEQ ID NO: 2540203 - RNA, 19 nt, Artificial Sequence
  Description of Artificial Sequence: Synthetic oligonucleotide
  Antisense strand to SEQ ID NO: 2540202
uuagcacacugagacaaac

SEQ ID NO: 2540204 - RNA, 19 nt, Artificial Sequence
  Description of Artificial Sequence: Synthetic oligonucleotide
  Sense strand starting at position 339 of SEQ ID NO: 1888540
gguagauaagcauacaagu

SEQ ID NO: 2540205 - RNA, 19 nt, Artificial Sequence
  Description of Artificial Sequence: Synthetic oligonucleotide
  Antisense strand to SEQ ID NO: 2540204
acuuguaugcuuaucuacc

SEQ ID NO: 2540206 - RNA, 19 nt, Artificial Sequence
  Description of Artificial Sequence: Synthetic oligonucleotide
  Sense strand starting at position 3060 of SEQ ID NO: 1888540
cuguaaagcagagaaguua

SEQ ID NO: 2540207 - RNA, 19 nt, Artificial Sequence
  Description of Artificial Sequence: Synthetic oligonucleotide
  Antisense strand to SEQ ID NO: 2540206
uaacuucucugcuuuacag

SEQ ID NO: 2540208 - RNA, 19 nt, Artificial Sequence
  Description of Artificial Sequence: Synthetic oligonucleotide
  Sense strand starting at position 3374 of SEQ ID NO: 1888540
ugaguagaagauugauucu

SEQ ID NO: 2540209 - RNA, 19 nt, Artificial Sequence
  Description of Artificial Sequence: Synthetic oligonucleotide
  Antisense strand to SEQ ID NO: 2540208
agaaucaaucuucuacuca

SEQ ID NO: 2540210 - RNA, 19 nt, Artificial Sequence
  Description of Artificial Sequence: Synthetic oligonucleotide
  Sense strand starting at position 2631 of SEQ ID NO: 1888540
cuugguuugauaugaagaa

SEQ ID NO: 2540211 - RNA, 19 nt, Artificial Sequence
  Description of Artificial Sequence: Synthetic oligonucleotide
  Antisense strand to SEQ ID NO: 2540210
uucuucauaucaaaccaag

SEQ ID NO: 2540212 - RNA, 19 nt, Artificial Sequence
  Description of Artificial Sequence: Synthetic oligonucleotide
  Sense strand starting at position 615 of SEQ ID NO: 1888540
gagagccauguccaagauu

SEQ ID NO: 2540213 - RNA, 19 nt, Artificial Sequence
  Description of Artificial Sequence: Synthetic oligonucleotide
  Antisense strand to SEQ ID NO: 2540212
aaucuuggacauggcucuc

SEQ ID NO: 2540214 - RNA, 19 nt, Artificial Sequence
  Description of Artificial Sequence: Synthetic oligonucleotide
  Sense strand starting at position 3368 of SEQ ID NO: 1888540
cugcacugaguagaagauu

SEQ ID NO: 2540215 - RNA, 19 nt, Artificial Sequence
  Description of Artificial Sequence: Synthetic oligonucleotide
  Antisense strand to SEQ ID NO: 2540214
aaucuucuacucagugcag

SEQ ID NO: 2540216 - RNA, 19 nt, Artificial Sequence
  Description of Artificial Sequence: Synthetic oligonucleotide
  Sense strand starting at position 3281 of SEQ ID NO: 1888540
ucuaaucagugaucagaua

SEQ ID NO: 2540217 - RNA, 19 nt, Artificial Sequence
  Description of Artificial Sequence: Synthetic oligonucleotide
  Antisense strand to SEQ ID NO: 2540216
uaucugaucacugauuaga

SEQ ID NO: 2540218 - RNA, 19 nt, Artificial Sequence
  Description of Artificial Sequence: Synthetic oligonucleotide
  Sense strand starting at position 1015 of SEQ ID NO: 1888540
agaagccuuguccaaucaa

SEQ ID NO: 2540219 - RNA, 19 nt, Artificial Sequence
  Description of Artificial Sequence: Synthetic oligonucleotide
  Antisense strand to SEQ ID NO: 2540218
uugauuggacaaggcuucu

SEQ ID NO: 2540220 - RNA, 19 nt, Artificial Sequence
  Description of Artificial Sequence: Synthetic oligonucleotide
  Sense strand starting at position 3659 of SEQ ID NO: 1888540
uaaauccauuggucaggau

SEQ ID NO: 2540221 - RNA, 19 nt, Artificial Sequence
  Description of Artificial Sequence: Synthetic oligonucleotide
  Antisense strand to SEQ ID NO: 2540220
auccugaccaauggauuua

SEQ ID NO: 2540222 - RNA, 19 nt, Artificial Sequence
  Description of Artificial Sequence: Synthetic oligonucleotide
  Sense strand starting at position 2624 of SEQ ID NO: 1888540
uauagaacuugguuugaua

SEQ ID NO: 2540223 - RNA, 19 nt, Artificial Sequence
  Description of Artificial Sequence: Synthetic oligonucleotide
  Antisense strand to SEQ ID NO: 2540222
uaucaaaccaaguucuaua

SEQ ID NO: 2540224 - RNA, 19 nt, Artificial Sequence
  Description of Artificial Sequence: Synthetic oligonucleotide
  Sense strand starting at position 3433 of SEQ ID NO: 1888540
gagauaaaguugcugaaau

SEQ ID NO: 2540225 - RNA, 19 nt, Artificial Sequence
  Description of Artificial Sequence: Synthetic oligonucleotide
  Antisense strand to SEQ ID NO: 2540224
auuucagcaacuuuaucuc

SEQ ID NO: 2540226 - RNA, 19 nt, Artificial Sequence
  Description of Artificial Sequence: Synthetic oligonucleotide
  Sense strand starting at position 2248 of SEQ ID NO: 1888540
gaaugugagaccgaguauu

SEQ ID NO: 2540227 - RNA, 19 nt, Artificial Sequence
  Description of Artificial Sequence: Synthetic oligonucleotide
  Antisense strand to SEQ ID NO: 2540226
aauacucggucucacauuc

SEQ ID NO: 2540228 - RNA, 19 nt, Artificial Sequence
  Description of Artificial Sequence: Synthetic oligonucleotide
  Sense strand starting at position 3230 of SEQ ID NO: 1888540
cgagguagucaugagacca

SEQ ID NO: 2540229 - RNA, 19 nt, Artificial Sequence
  Description of Artificial Sequence: Synthetic oligonucleotide
  Antisense strand to SEQ ID NO: 2540228
uggucucaugacuaccucg

SEQ ID NO: 2540230 - RNA, 19 nt, Artificial Sequence
  Description of Artificial Sequence: Synthetic oligonucleotide
  Sense strand starting at position 915 of SEQ ID NO: 1888540
gggauugaauccucucauu

SEQ ID NO: 2540231 - RNA, 19 nt, Artificial Sequence
  Description of Artificial Sequence: Synthetic oligonucleotide
  Antisense strand to SEQ ID NO: 2540230
aaugagaggauucaauccc

SEQ ID NO: 2540232 - RNA, 19 nt, Artificial Sequence
  Description of Artificial Sequence: Synthetic oligonucleotide
  Sense strand starting at position 2610 of SEQ ID NO: 1888540
uagaaauuacaguguauag

SEQ ID NO: 2540233 - RNA, 19 nt, Artificial Sequence
  Description of Artificial Sequence: Synthetic oligonucleotide
  Antisense strand to SEQ ID NO: 2540232
cuauacacuguaauuucua

SEQ ID NO: 2540234 - RNA, 19 nt, Artificial Sequence
  Description of Artificial Sequence: Synthetic oligonucleotide
  Sense strand starting at position 2417 of SEQ ID NO: 1888540
auuugaacauuuggcauau

SEQ ID NO: 2540235 - RNA, 19 nt, Artificial Sequence
  Description of Artificial Sequence: Synthetic oligonucleotide
  Antisense strand to SEQ ID NO: 2540234
auaugccaaauguucaaau

SEQ ID NO: 2540236 - RNA, 19 nt, Artificial Sequence
  Description of Artificial Sequence: Synthetic oligonucleotide
  Sense strand starting at position 1362 of SEQ ID NO: 1888540
aacaaagcucugugaagag

SEQ ID NO: 2540237 - RNA, 19 nt, Artificial Sequence
  Description of Artificial Sequence: Synthetic oligonucleotide
  Antisense strand to SEQ ID NO: 2540236
cucuucacagagcuuuguu

SEQ ID NO: 2540238 - RNA, 19 nt, Artificial Sequence
  Description of Artificial Sequence: Synthetic oligonucleotide
  Sense strand starting at position 2626 of SEQ ID NO: 1888540
uagaacuugguuugauaug

SEQ ID NO: 2540239 - RNA, 19 nt, Artificial Sequence
  Description of Artificial Sequence: Synthetic oligonucleotide
  Antisense strand to SEQ ID NO: 2540238
cauaucaaaccaaguucua

SEQ ID NO: 2540240 - RNA, 19 nt, Artificial Sequence
  Description of Artificial Sequence: Synthetic oligonucleotide
  Sense strand starting at position 1312 of SEQ ID NO: 1888540
aaggcaaaccagugggauu

SEQ ID NO: 2540241 - RNA, 19 nt, Artificial Sequence
  Description of Artificial Sequence: Synthetic oligonucleotide
  Antisense strand to SEQ ID NO: 2540240
aaucccacugguuugccuu

SEQ ID NO: 2540242 - RNA, 19 nt, Artificial Sequence
  Description of Artificial Sequence: Synthetic oligonucleotide
  Sense strand starting at position 371 of SEQ ID NO: 1888540
aggccuuugggaugaccaa

SEQ ID NO: 2540243 - RNA, 19 nt, Artificial Sequence
  Description of Artificial Sequence: Synthetic oligonucleotide
  Antisense strand to SEQ ID NO: 2540242
uuggucaucccaaaggccu

SEQ ID NO: 2540244 - RNA, 19 nt, Artificial Sequence
  Description of Artificial Sequence: Synthetic oligonucleotide
  Sense strand starting at position 3736 of SEQ ID NO: 1888540
uggcucacaugauugaaau

SEQ ID NO: 2540245 - RNA, 19 nt, Artificial Sequence
  Description of Artificial Sequence: Synthetic oligonucleotide
  Antisense strand to SEQ ID NO: 2540244
auuucaaucaugugagcca

SEQ ID NO: 2540246 - RNA, 19 nt, Artificial Sequence
  Description of Artificial Sequence: Synthetic oligonucleotide
  Sense strand starting at position 3737 of SEQ ID NO: 1888540
ggcucacaugauugaaauu

SEQ ID NO: 2540247 - RNA, 19 nt, Artificial Sequence
  Description of Artificial Sequence: Synthetic oligonucleotide
  Antisense strand to SEQ ID NO: 2540246
aauuucaaucaugugagcc

SEQ ID NO: 2540248 - RNA, 19 nt, Artificial Sequence
  Description of Artificial Sequence: Synthetic oligonucleotide
  Sense strand starting at position 3395 of SEQ ID NO: 1888540
uucuuacaacugugagaug

SEQ ID NO: 2540249 - RNA, 19 nt, Artificial Sequence
  Description of Artificial Sequence: Synthetic oligonucleotide
  Antisense strand to SEQ ID NO: 2540248
caucucacaguuguaagaa

SEQ ID NO: 2540250 - RNA, 19 nt, Artificial Sequence
  Description of Artificial Sequence: Synthetic oligonucleotide
  Sense strand starting at position 3431 of SEQ ID NO: 1888540
cugagauaaaguugcugaa

SEQ ID NO: 2540251 - RNA, 19 nt, Artificial Sequence
  Description of Artificial Sequence: Synthetic oligonucleotide
  Antisense strand to SEQ ID NO: 2540250
uucagcaacuuuaucucag

SEQ ID NO: 2540252 - RNA, 19 nt, Artificial Sequence
  Description of Artificial Sequence: Synthetic oligonucleotide
  Sense strand starting at position 611 of SEQ ID NO: 1888540
ggaugagagccauguccaa

SEQ ID NO: 2540253 - RNA, 19 nt, Artificial Sequence
  Description of Artificial Sequence: Synthetic oligonucleotide
  Antisense strand to SEQ ID NO: 2540252
uuggacauggcucucaucc

SEQ ID NO: 2540254 - RNA, 19 nt, Artificial Sequence
  Description of Artificial Sequence: Synthetic oligonucleotide
  Sense strand starting at position 46 of SEQ ID NO: 1888540
acauuaaauguuggcaaau

SEQ ID NO: 2540255 - RNA, 19 nt, Artificial Sequence
  Description of Artificial Sequence: Synthetic oligonucleotide
  Antisense strand to SEQ ID NO: 2540254
auuugccaacauuuaaugu

SEQ ID NO: 2540256 - RNA, 19 nt, Artificial Sequence
  Description of Artificial Sequence: Synthetic oligonucleotide
  Sense strand starting at position 47 of SEQ ID NO: 1888540
cauuaaauguuggcaaaug

SEQ ID NO: 2540257 - RNA, 19 nt, Artificial Sequence
  Description of Artificial Sequence: Synthetic oligonucleotide
  Antisense strand to SEQ ID NO: 2540256
cauuugccaacauuuaaug

SEQ ID NO: 2540258 - RNA, 19 nt, Artificial Sequence
  Description of Artificial Sequence: Synthetic oligonucleotide
  Sense strand starting at position 523 of SEQ ID NO: 1888540
uaauguaaaugaguaucga

SEQ ID NO: 2540259 - RNA, 19 nt, Artificial Sequence
  Description of Artificial Sequence: Synthetic oligonucleotide
  Antisense strand to SEQ ID NO: 2540258
ucgauacucauuuacauua

SEQ ID NO: 2540260 - RNA, 19 nt, Artificial Sequence
  Description of Artificial Sequence: Synthetic oligonucleotide
  Sense strand starting at position 2256 of SEQ ID NO: 1888540
gaccgaguauuacuccaag

SEQ ID NO: 2540261 - RNA, 19 nt, Artificial Sequence
  Description of Artificial Sequence: Synthetic oligonucleotide
  Antisense strand to SEQ ID NO: 2540260
cuuggaguaauacucgguc

SEQ ID NO: 2540262 - RNA, 19 nt, Artificial Sequence
  Description of Artificial Sequence: Synthetic oligonucleotide
  Sense strand starting at position 1360 of SEQ ID NO: 1888540
ucaacaaagcucugugaag

SEQ ID NO: 2540263 - RNA, 19 nt, Artificial Sequence
  Description of Artificial Sequence: Synthetic oligonucleotide
  Antisense strand to SEQ ID NO: 2540262
cuucacagagcuuuguuga

SEQ ID NO: 2540264 - RNA, 19 nt, Artificial Sequence
  Description of Artificial Sequence: Synthetic oligonucleotide
  Sense strand starting at position 3774 of SEQ ID NO: 1888540
ggucacuuccagggaggua

SEQ ID NO: 2540265 - RNA, 19 nt, Artificial Sequence
  Description of Artificial Sequence: Synthetic oligonucleotide
  Antisense strand to SEQ ID NO: 2540264
uaccucccuggaagugacc

SEQ ID NO: 2540266 - RNA, 19 nt, Artificial Sequence
  Description of Artificial Sequence: Synthetic oligonucleotide
  Sense strand starting at position 599 of SEQ ID NO: 1888540
aggucuguuccaggaugag

SEQ ID NO: 2540267 - RNA, 19 nt, Artificial Sequence
  Description of Artificial Sequence: Synthetic oligonucleotide
  Antisense strand to SEQ ID NO: 2540266
cucauccuggaacagaccu

SEQ ID NO: 2540268 - RNA, 19 nt, Artificial Sequence
  Description of Artificial Sequence: Synthetic oligonucleotide
  Sense strand starting at position 3404 of SEQ ID NO: 1888540
cugugagaugcugagaugu

SEQ ID NO: 2540269 - RNA, 19 nt, Artificial Sequence
  Description of Artificial Sequence: Synthetic oligonucleotide
  Antisense strand to SEQ ID NO: 2540268
acaucucagcaucucacag

SEQ ID NO: 2540270 - RNA, 19 nt, Artificial Sequence
  Description of Artificial Sequence: Synthetic oligonucleotide
  Sense strand starting at position 3377 of SEQ ID NO: 1888540
guagaagauugauucuguu

SEQ ID NO: 2540271 - RNA, 19 nt, Artificial Sequence
  Description of Artificial Sequence: Synthetic oligonucleotide
  Antisense strand to SEQ ID NO: 2540270
aacagaaucaaucuucuac

SEQ ID NO: 2540272 - RNA, 19 nt, Artificial Sequence
  Description of Artificial Sequence: Synthetic oligonucleotide
  Sense strand starting at position 95 of SEQ ID NO: 1888540
ucaauaauuugggaguuua

SEQ ID NO: 2540273 - RNA, 19 nt, Artificial Sequence
  Description of Artificial Sequence: Synthetic oligonucleotide
  Antisense strand to SEQ ID NO: 2540272
uaaacucccaaauuauuga

SEQ ID NO: 2540274 - RNA, 19 nt, Artificial Sequence
  Description of Artificial Sequence: Synthetic oligonucleotide
  Sense strand starting at position 2622 of SEQ ID NO: 1888540
uguauagaacuugguuuga

SEQ ID NO: 2540275 - RNA, 19 nt, Artificial Sequence
  Description of Artificial Sequence: Synthetic oligonucleotide
  Antisense strand to SEQ ID NO: 2540274
ucaaaccaaguucuauaca

SEQ ID NO: 2540276 - RNA, 19 nt, Artificial Sequence
  Description of Artificial Sequence: Synthetic oligonucleotide
  Sense strand starting at position 2216 of SEQ ID NO: 1888540
aagugacgugcccaaggau

SEQ ID NO: 2540277 - RNA, 19 nt, Artificial Sequence
  Description of Artificial Sequence: Synthetic oligonucleotide
  Antisense strand to SEQ ID NO: 2540276
auccuugggcacgucacuu

SEQ ID NO: 2540278 - RNA, 19 nt, Artificial Sequence
  Description of Artificial Sequence: Synthetic oligonucleotide
  Sense strand starting at position 2813 of SEQ ID NO: 1888541
uguuguugccuggcacauu

SEQ ID NO: 2540279 - RNA, 19 nt, Artificial Sequence
  Description of Artificial Sequence: Synthetic oligonucleotide
  Antisense strand to SEQ ID NO: 2540278
aaugugccaggcaacaaca

SEQ ID NO: 2540280 - RNA, 19 nt, Artificial Sequence
  Description of Artificial Sequence: Synthetic oligonucleotide
  Sense strand starting at position 2314 of SEQ ID NO: 1888541
cauaaugagccaugaugag

SEQ ID NO: 2540281 - RNA, 19 nt, Artificial Sequence
  Description of Artificial Sequence: Synthetic oligonucleotide
  Antisense strand to SEQ ID NO: 2540280
cucaucauggcucauuaug

SEQ ID NO: 2540282 - RNA, 19 nt, Artificial Sequence
  Description of Artificial Sequence: Synthetic oligonucleotide
  Sense strand starting at position 283 of SEQ ID NO: 1888541
cucagaucugaaggcagaa

SEQ ID NO: 2540283 - RNA, 19 nt, Artificial Sequence
  Description of Artificial Sequence: Synthetic oligonucleotide
  Antisense strand to SEQ ID NO: 2540282
uucugccuucagaucugag

SEQ ID NO: 2540284 - RNA, 19 nt, Artificial Sequence
  Description of Artificial Sequence: Synthetic oligonucleotide
  Sense strand starting at position 251 of SEQ ID NO: 1888541
uaagucuuuggauauggua

SEQ ID NO: 2540285 - RNA, 19 nt, Artificial Sequence
  Description of Artificial Sequence: Synthetic oligonucleotide
  Antisense strand to SEQ ID NO: 2540284
uaccauauccaaagacuua

SEQ ID NO: 2540286 - RNA, 19 nt, Artificial Sequence
  Description of Artificial Sequence: Synthetic oligonucleotide
  Sense strand starting at position 2843 of SEQ ID NO: 1888541
guagauguugaaugaauga

SEQ ID NO: 2540287 - RNA, 19 nt, Artificial Sequence
  Description of Artificial Sequence: Synthetic oligonucleotide
  Antisense strand to SEQ ID NO: 2540286
ucauucauucaacaucuac

SEQ ID NO: 2540288 - RNA, 19 nt, Artificial Sequence
  Description of Artificial Sequence: Synthetic oligonucleotide
  Sense strand starting at position 2730 of SEQ ID NO: 1888541
gcaggaucauaaucuaauu

SEQ ID NO: 2540289 - RNA, 19 nt, Artificial Sequence
  Description of Artificial Sequence: Synthetic oligonucleotide
  Antisense strand to SEQ ID NO: 2540288
aauuagauuaugauccugc

SEQ ID NO: 2540290 - RNA, 19 nt, Artificial Sequence
  Description of Artificial Sequence: Synthetic oligonucleotide
  Sense strand starting at position 2159 of SEQ ID NO: 1888541
ccuaaaguacugugaagag

SEQ ID NO: 2540291 - RNA, 19 nt, Artificial Sequence
  Description of Artificial Sequence: Synthetic oligonucleotide
  Antisense strand to SEQ ID NO: 2540290
cucuucacaguacuuuagg

SEQ ID NO: 2540292 - RNA, 19 nt, Artificial Sequence
  Description of Artificial Sequence: Synthetic oligonucleotide
  Sense strand starting at position 2840 of SEQ ID NO: 1888541
cucguagauguugaaugaa

SEQ ID NO: 2540293 - RNA, 19 nt, Artificial Sequence
  Description of Artificial Sequence: Synthetic oligonucleotide
  Antisense strand to SEQ ID NO: 2540292
uucauucaacaucuacgag

SEQ ID NO: 2540294 - RNA, 19 nt, Artificial Sequence
  Description of Artificial Sequence: Synthetic oligonucleotide
  Sense strand starting at position 3706 of SEQ ID NO: 1888541
auguguaaggaagguaaua

SEQ ID NO: 2540295 - RNA, 19 nt, Artificial Sequence
  Description of Artificial Sequence: Synthetic oligonucleotide
  Antisense strand to SEQ ID NO: 2540294
uauuaccuuccuuacacau

SEQ ID NO: 2540296 - RNA, 19 nt, Artificial Sequence
  Description of Artificial Sequence: Synthetic oligonucleotide
  Sense strand starting at position 3430 of SEQ ID NO: 1888541
gguuuaaauccaugaucca

SEQ ID NO: 2540297 - RNA, 19 nt, Artificial Sequence
  Description of Artificial Sequence: Synthetic oligonucleotide
  Antisense strand to SEQ ID NO: 2540296
uggaucauggauuuaaacc

SEQ ID NO: 2540298 - RNA, 19 nt, Artificial Sequence
  Description of Artificial Sequence: Synthetic oligonucleotide
  Sense strand starting at position 3625 of SEQ ID NO: 1888541
cccuuccagcuuuaggaau

SEQ ID NO: 2540299 - RNA, 19 nt, Artificial Sequence
  Description of Artificial Sequence: Synthetic oligonucleotide
  Antisense strand to SEQ ID NO: 2540298
auuccuaaagcuggaaggg

SEQ ID NO: 2540300 - RNA, 19 nt, Artificial Sequence
  Description of Artificial Sequence: Synthetic oligonucleotide
  Sense strand starting at position 219 of SEQ ID NO: 1888541
guagacugccaauaguaua

SEQ ID NO: 2540301 - RNA, 19 nt, Artificial Sequence
  Description of Artificial Sequence: Synthetic oligonucleotide
  Antisense strand to SEQ ID NO: 2540300
uauacuauuggcagucuac

SEQ ID NO: 2540302 - RNA, 19 nt, Artificial Sequence
  Description of Artificial Sequence: Synthetic oligonucleotide
  Sense strand starting at position 830 of SEQ ID NO: 1888541
cacaguuaccagggcagaa

SEQ ID NO: 2540303 - RNA, 19 nt, Artificial Sequence
  Description of Artificial Sequence: Synthetic oligonucleotide
  Antisense strand to SEQ ID NO: 2540302
uucugcccugguaacugug

SEQ ID NO: 2540304 - RNA, 19 nt, Artificial Sequence
  Description of Artificial Sequence: Synthetic oligonucleotide
  Sense strand starting at position 418 of SEQ ID NO: 1888541
caguuacuuccggaaagua

SEQ ID NO: 2540305 - RNA, 19 nt, Artificial Sequence
  Description of Artificial Sequence: Synthetic oligonucleotide
  Antisense strand to SEQ ID NO: 2540304
uacuuuccggaaguaacug

SEQ ID NO: 2540306 - RNA, 19 nt, Artificial Sequence
  Description of Artificial Sequence: Synthetic oligonucleotide
  Sense strand starting at position 2547 of SEQ ID NO: 1888541
gccaauuaaucccuaugga

SEQ ID NO: 2540307 - RNA, 19 nt, Artificial Sequence
  Description of Artificial Sequence: Synthetic oligonucleotide
  Antisense strand to SEQ ID NO: 2540306
uccauagggauuaauuggc

SEQ ID NO: 2540308 - RNA, 19 nt, Artificial Sequence
  Description of Artificial Sequence: Synthetic oligonucleotide
  Sense strand starting at position 3038 of SEQ ID NO: 1888541
aaguaauugggcgaacuuu

SEQ ID NO: 2540309 - RNA, 19 nt, Artificial Sequence
  Description of Artificial Sequence: Synthetic oligonucleotide
  Antisense strand to SEQ ID NO: 2540308
aaaguucgcccaauuacuu

SEQ ID NO: 2540310 - RNA, 19 nt, Artificial Sequence
  Description of Artificial Sequence: Synthetic oligonucleotide
  Sense strand starting at position 2563 of SEQ ID NO: 1888541
ggacuuuaguucccuaaac

SEQ ID NO: 2540311 - RNA, 19 nt, Artificial Sequence
  Description of Artificial Sequence: Synthetic oligonucleotide
  Antisense strand to SEQ ID NO: 2540310
guuuagggaacuaaagucc

SEQ ID NO: 2540312 - RNA, 19 nt, Artificial Sequence
  Description of Artificial Sequence: Synthetic oligonucleotide
  Sense strand starting at position 2721 of SEQ ID NO: 1888541
uuaaucucagcaggaucau

SEQ ID NO: 2540313 - RNA, 19 nt, Artificial Sequence
  Description of Artificial Sequence: Synthetic oligonucleotide
  Antisense strand to SEQ ID NO: 2540312
augauccugcugagauuaa

SEQ ID NO: 2540314 - RNA, 19 nt, Artificial Sequence
  Description of Artificial Sequence: Synthetic oligonucleotide
  Sense strand starting at position 2403 of SEQ ID NO: 1888541
uaucuuaccugggucagau

SEQ ID NO: 2540315 - RNA, 19 nt, Artificial Sequence
  Description of Artificial Sequence: Synthetic oligonucleotide
  Antisense strand to SEQ ID NO: 2540314
aucugacccagguaagaua

SEQ ID NO: 2540316 - RNA, 19 nt, Artificial Sequence
  Description of Artificial Sequence: Synthetic oligonucleotide
  Sense strand starting at position 2402 of SEQ ID NO: 1888541
uuaucuuaccugggucaga

SEQ ID NO: 2540317 - RNA, 19 nt, Artificial Sequence
  Description of Artificial Sequence: Synthetic oligonucleotide
  Antisense strand to SEQ ID NO: 2540316
ucugacccagguaagauaa

SEQ ID NO: 2540318 - RNA, 19 nt, Artificial Sequence
  Description of Artificial Sequence: Synthetic oligonucleotide
  Sense strand starting at position 3939 of SEQ ID NO: 1888541
cuggcuaaucuuuauguga

SEQ ID NO: 2540319 - RNA, 19 nt, Artificial Sequence
  Description of Artificial Sequence: Synthetic oligonucleotide
  Antisense strand to SEQ ID NO: 2540318
ucacauaaagauuagccag

SEQ ID NO: 2540320 - RNA, 19 nt, Artificial Sequence
  Description of Artificial Sequence: Synthetic oligonucleotide
  Sense strand starting at position 3909 of SEQ ID NO: 1888541
ugguuuaggccuuaguaaa

SEQ ID NO: 2540321 - RNA, 19 nt, Artificial Sequence
  Description of Artificial Sequence: Synthetic oligonucleotide
  Antisense strand to SEQ ID NO: 2540320
uuuacuaaggccuaaacca

SEQ ID NO: 2540322 - RNA, 19 nt, Artificial Sequence
  Description of Artificial Sequence: Synthetic oligonucleotide
  Sense strand starting at position 2124 of SEQ ID NO: 1888541
uaaguuggauuugaaagua

SEQ ID NO: 2540323 - RNA, 19 nt, Artificial Sequence
  Description of Artificial Sequence: Synthetic oligonucleotide
  Antisense strand to SEQ ID NO: 2540322
uacuuucaaauccaacuua

SEQ ID NO: 2540324 - RNA, 19 nt, Artificial Sequence
  Description of Artificial Sequence: Synthetic oligonucleotide
  Sense strand starting at position 1869 of SEQ ID NO: 1888541
ccguggacgggucaugaau

SEQ ID NO: 2540325 - RNA, 19 nt, Artificial Sequence
  Description of Artificial Sequence: Synthetic oligonucleotide
  Antisense strand to SEQ ID NO: 2540324
auucaugacccguccacgg

SEQ ID NO: 2540326 - RNA, 19 nt, Artificial Sequence
  Description of Artificial Sequence: Synthetic oligonucleotide
  Sense strand starting at position 3742 of SEQ ID NO: 1888541
ccagcuauuggauaguguu

SEQ ID NO: 2540327 - RNA, 19 nt, Artificial Sequence
  Description of Artificial Sequence: Synthetic oligonucleotide
  Antisense strand to SEQ ID NO: 2540326
aacacuauccaauagcugg

SEQ ID NO: 2540328 - RNA, 19 nt, Artificial Sequence
  Description of Artificial Sequence: Synthetic oligonucleotide
  Sense strand starting at position 341 of SEQ ID NO: 1888541
gccagagaggcugguaaau

SEQ ID NO: 2540329 - RNA, 19 nt, Artificial Sequence
  Description of Artificial Sequence: Synthetic oligonucleotide
  Antisense strand to SEQ ID NO: 2540328
auuuaccagccucucuggc

SEQ ID NO: 2540330 - RNA, 19 nt, Artificial Sequence
  Description of Artificial Sequence: Synthetic oligonucleotide
  Sense strand starting at position 3036 of SEQ ID NO: 1888541
cuaaguaauugggcgaacu

SEQ ID NO: 2540331 - RNA, 19 nt, Artificial Sequence
  Description of Artificial Sequence: Synthetic oligonucleotide
  Antisense strand to SEQ ID NO: 2540330
aguucgcccaauuacuuag

SEQ ID NO: 2540332 - RNA, 19 nt, Artificial Sequence
  Description of Artificial Sequence: Synthetic oligonucleotide
  Sense strand starting at position 964 of SEQ ID NO: 1888541
ugcagaugcccucaaguau

SEQ ID NO: 2540333 - RNA, 19 nt, Artificial Sequence
  Description of Artificial Sequence: Synthetic oligonucleotide
  Antisense strand to SEQ ID NO: 2540332
auacuugagggcaucugca

SEQ ID NO: 2540334 - RNA, 19 nt, Artificial Sequence
  Description of Artificial Sequence: Synthetic oligonucleotide
  Sense strand starting at position 3014 of SEQ ID NO: 1888541
gaagcaagcucuguuggaa

SEQ ID NO: 2540335 - RNA, 19 nt, Artificial Sequence
  Description of Artificial Sequence: Synthetic oligonucleotide
  Antisense strand to SEQ ID NO: 2540334
uuccaacagagcuugcuuc

SEQ ID NO: 2540336 - RNA, 19 nt, Artificial Sequence
  Description of Artificial Sequence: Synthetic oligonucleotide
  Sense strand starting at position 3037 of SEQ ID NO: 1888541
uaaguaauugggcgaacuu

SEQ ID NO: 2540337 - RNA, 19 nt, Artificial Sequence
  Description of Artificial Sequence: Synthetic oligonucleotide
  Antisense strand to SEQ ID NO: 2540336
aaguucgcccaauuacuua

SEQ ID NO: 2540338 - RNA, 19 nt, Artificial Sequence
  Description of Artificial Sequence: Synthetic oligonucleotide
  Sense strand starting at position 3799 of SEQ ID NO: 1888541
uuugaagauugagaaagau

SEQ ID NO: 2540339 - RNA, 19 nt, Artificial Sequence
  Description of Artificial Sequence: Synthetic oligonucleotide
  Antisense strand to SEQ ID NO: 2540338
aucuuucucaaucuucaaa

SEQ ID NO: 2540340 - RNA, 19 nt, Artificial Sequence
  Description of Artificial Sequence: Synthetic oligonucleotide
  Sense strand starting at position 3942 of SEQ ID NO: 1888541
gcuaaucuuuaugugaauc

SEQ ID NO: 2540341 - RNA, 19 nt, Artificial Sequence
  Description of Artificial Sequence: Synthetic oligonucleotide
  Antisense strand to SEQ ID NO: 2540340
gauucacauaaagauuagc

SEQ ID NO: 2540342 - RNA, 19 nt, Artificial Sequence
  Description of Artificial Sequence: Synthetic oligonucleotide
  Sense strand starting at position 3463 of SEQ ID NO: 1888541
uuguauacagugugagauu

SEQ ID NO: 2540343 - RNA, 19 nt, Artificial Sequence
  Description of Artificial Sequence: Synthetic oligonucleotide
  Antisense strand to SEQ ID NO: 2540342
aaucucacacuguauacaa

SEQ ID NO: 2540344 - RNA, 19 nt, Artificial Sequence
  Description of Artificial Sequence: Synthetic oligonucleotide
  Sense strand starting at position 270 of SEQ ID NO: 1888541
gcaguugacugagcucaga

SEQ ID NO: 2540345 - RNA, 19 nt, Artificial Sequence
  Description of Artificial Sequence: Synthetic oligonucleotide
  Antisense strand to SEQ ID NO: 2540344
ucugagcucagucaacugc

SEQ ID NO: 2540346 - RNA, 19 nt, Artificial Sequence
  Description of Artificial Sequence: Synthetic oligonucleotide
  Sense strand starting at position 3034 of SEQ ID NO: 1888541
gucuaaguaauugggcgaa

SEQ ID NO: 2540347 - RNA, 19 nt, Artificial Sequence
  Description of Artificial Sequence: Synthetic oligonucleotide
  Antisense strand to SEQ ID NO: 2540346
uucgcccaauuacuuagac

SEQ ID NO: 2540348 - RNA, 19 nt, Artificial Sequence
  Description of Artificial Sequence: Synthetic oligonucleotide
  Sense strand starting at position 3033 of SEQ ID NO: 1888541
ggucuaaguaauugggcga

SEQ ID NO: 2540349 - RNA, 19 nt, Artificial Sequence
  Description of Artificial Sequence: Synthetic oligonucleotide
  Antisense strand to SEQ ID NO: 2540348
ucgcccaauuacuuagacc

SEQ ID NO: 2540350 - RNA, 19 nt, Artificial Sequence
  Description of Artificial Sequence: Synthetic oligonucleotide
  Sense strand starting at position 2119 of SEQ ID NO: 1888541
ggcuuuaaguuggauuuga

SEQ ID NO: 2540351 - RNA, 19 nt, Artificial Sequence
  Description of Artificial Sequence: Synthetic oligonucleotide
  Antisense strand to SEQ ID NO: 2540350
ucaaauccaacuuaaagcc

SEQ ID NO: 2540352 - RNA, 19 nt, Artificial Sequence
  Description of Artificial Sequence: Synthetic oligonucleotide
  Sense strand starting at position 439 of SEQ ID NO: 1888541
gggugaacgcaguaguucu

SEQ ID NO: 2540353 - RNA, 19 nt, Artificial Sequence
  Description of Artificial Sequence: Synthetic oligonucleotide
  Antisense strand to SEQ ID NO: 2540352
agaacuacugcguucaccc

SEQ ID NO: 2540354 - RNA, 19 nt, Artificial Sequence
  Description of Artificial Sequence: Synthetic oligonucleotide
  Sense strand starting at position 2670 of SEQ ID NO: 1888541
guguacucagcugguagaa

SEQ ID NO: 2540355 - RNA, 19 nt, Artificial Sequence
  Description of Artificial Sequence: Synthetic oligonucleotide
  Antisense strand to SEQ ID NO: 2540354
uucuaccagcugaguacac

SEQ ID NO: 2540356 - RNA, 19 nt, Artificial Sequence
  Description of Artificial Sequence: Synthetic oligonucleotide
  Sense strand starting at position 2529 of SEQ ID NO: 1888541
ucacuuuagugaggauuug

SEQ ID NO: 2540357 - RNA, 19 nt, Artificial Sequence
  Description of Artificial Sequence: Synthetic oligonucleotide
  Antisense strand to SEQ ID NO: 2540356
caaauccucacuaaaguga

SEQ ID NO: 2540358 - RNA, 19 nt, Artificial Sequence
  Description of Artificial Sequence: Synthetic oligonucleotide
  Sense strand starting at position 3165 of SEQ ID NO: 1888543
ccauuuggcucagccugaa

SEQ ID NO: 2540359 - RNA, 19 nt, Artificial Sequence
  Description of Artificial Sequence: Synthetic oligonucleotide
  Antisense strand to SEQ ID NO: 2540358
uucaggcugagccaaaugg

SEQ ID NO: 2540360 - RNA, 19 nt, Artificial Sequence
  Description of Artificial Sequence: Synthetic oligonucleotide
  Sense strand starting at position 621 of SEQ ID NO: 1888543
uguggacagcuauacaaau

SEQ ID NO: 2540361 - RNA, 19 nt, Artificial Sequence
  Description of Artificial Sequence: Synthetic oligonucleotide
  Antisense strand to SEQ ID NO: 2540360
auuuguauagcuguccaca

SEQ ID NO: 2540362 - RNA, 19 nt, Artificial Sequence
  Description of Artificial Sequence: Synthetic oligonucleotide
  Sense strand starting at position 438 of SEQ ID NO: 1888543
ggauuaaacgaaugguaua

SEQ ID NO: 2540363 - RNA, 19 nt, Artificial Sequence
  Description of Artificial Sequence: Synthetic oligonucleotide
  Antisense strand to SEQ ID NO: 2540362
uauaccauucguuuaaucc

SEQ ID NO: 2540364 - RNA, 19 nt, Artificial Sequence
  Description of Artificial Sequence: Synthetic oligonucleotide
  Sense strand starting at position 3135 of SEQ ID NO: 1888543
agaguuuaccucugaagag

SEQ ID NO: 2540365 - RNA, 19 nt, Artificial Sequence
  Description of Artificial Sequence: Synthetic oligonucleotide
  Antisense strand to SEQ ID NO: 2540364
cucuucagagguaaacucu

SEQ ID NO: 2540366 - RNA, 19 nt, Artificial Sequence
  Description of Artificial Sequence: Synthetic oligonucleotide
  Sense strand starting at position 3151 of SEQ ID NO: 1888543
gagaaaguugcugaccauu

SEQ ID NO: 2540367 - RNA, 19 nt, Artificial Sequence
  Description of Artificial Sequence: Synthetic oligonucleotide
  Antisense strand to SEQ ID NO: 2540366
aauggucagcaacuuucuc

SEQ ID NO: 2540368 - RNA, 19 nt, Artificial Sequence
  Description of Artificial Sequence: Synthetic oligonucleotide
  Sense strand starting at position 322 of SEQ ID NO: 1888543
ugaagacucuuauuaaacg

SEQ ID NO: 2540369 - RNA, 19 nt, Artificial Sequence
  Description of Artificial Sequence: Synthetic oligonucleotide
  Antisense strand to SEQ ID NO: 2540368
cguuuaauaagagucuuca

SEQ ID NO: 2540370 - RNA, 19 nt, Artificial Sequence
  Description of Artificial Sequence: Synthetic oligonucleotide
  Sense strand starting at position 2340 of SEQ ID NO: 1888543
aguuauugugaagaguuaa

SEQ ID NO: 2540371 - RNA, 19 nt, Artificial Sequence
  Description of Artificial Sequence: Synthetic oligonucleotide
  Antisense strand to SEQ ID NO: 2540370
uuaacucuucacaauaacu

SEQ ID NO: 2540372 - RNA, 19 nt, Artificial Sequence
  Description of Artificial Sequence: Synthetic oligonucleotide
  Sense strand starting at position 435 of SEQ ID NO: 1888543
gcaggauuaaacgaauggu

SEQ ID NO: 2540373 - RNA, 19 nt, Artificial Sequence
  Description of Artificial Sequence: Synthetic oligonucleotide
  Antisense strand to SEQ ID NO: 2540372
accauucguuuaauccugc

SEQ ID NO: 2540374 - RNA, 19 nt, Artificial Sequence
  Description of Artificial Sequence: Synthetic oligonucleotide
  Sense strand starting at position 675 of SEQ ID NO: 1888543
aaggaacugucaucuugac

SEQ ID NO: 2540375 - RNA, 19 nt, Artificial Sequence
  Description of Artificial Sequence: Synthetic oligonucleotide
  Antisense strand to SEQ ID NO: 2540374
gucaagaugacaguuccuu

SEQ ID NO: 2540376 - RNA, 19 nt, Artificial Sequence
  Description of Artificial Sequence: Synthetic oligonucleotide
  Sense strand starting at position 2362 of SEQ ID NO: 1888543
agguaacgagcucauuaaa

SEQ ID NO: 2540377 - RNA, 19 nt, Artificial Sequence
  Description of Artificial Sequence: Synthetic oligonucleotide
  Antisense strand to SEQ ID NO: 2540376
uuuaaugagcucguuaccu

SEQ ID NO: 2540378 - RNA, 19 nt, Artificial Sequence
  Description of Artificial Sequence: Synthetic oligonucleotide
  Sense strand starting at position 2331 of SEQ ID NO: 1888543
ccuuuaaggaguuauugug

SEQ ID NO: 2540379 - RNA, 19 nt, Artificial Sequence
  Description of Artificial Sequence: Synthetic oligonucleotide
  Antisense strand to SEQ ID NO: 2540378
cacaauaacuccuuaaagg

SEQ ID NO: 2540380 - RNA, 19 nt, Artificial Sequence
  Description of Artificial Sequence: Synthetic oligonucleotide
  Sense strand starting at position 108 of SEQ ID NO: 1888543
uguauauuuccaugccucu

SEQ ID NO: 2540381 - RNA, 19 nt, Artificial Sequence
  Description of Artificial Sequence: Synthetic oligonucleotide
  Antisense strand to SEQ ID NO: 2540380
agaggcauggaaauauaca

SEQ ID NO: 2540382 - RNA, 19 nt, Artificial Sequence
  Description of Artificial Sequence: Synthetic oligonucleotide
  Sense strand starting at position 2998 of SEQ ID NO: 1888543
uuuguuuaggcucaauaaa

SEQ ID NO: 2540383 - RNA, 19 nt, Artificial Sequence
  Description of Artificial Sequence: Synthetic oligonucleotide
  Antisense strand to SEQ ID NO: 2540382
uuuauugagccuaaacaaa

SEQ ID NO: 2540384 - RNA, 19 nt, Artificial Sequence
  Description of Artificial Sequence: Synthetic oligonucleotide
  Sense strand starting at position 1414 of SEQ ID NO: 1888543
cucucuuaucucugaaagg

SEQ ID NO: 2540385 - RNA, 19 nt, Artificial Sequence
  Description of Artificial Sequence: Synthetic oligonucleotide
  Antisense strand to SEQ ID NO: 2540384
ccuuucagagauaagagag

SEQ ID NO: 2540386 - RNA, 19 nt, Artificial Sequence
  Description of Artificial Sequence: Synthetic oligonucleotide
  Sense strand starting at position 1464 of SEQ ID NO: 1888543
ggaagagacgucggaacau

SEQ ID NO: 2540387 - RNA, 19 nt, Artificial Sequence
  Description of Artificial Sequence: Synthetic oligonucleotide
  Antisense strand to SEQ ID NO: 2540386
auguuccgacgucucuucc

SEQ ID NO: 2540388 - RNA, 19 nt, Artificial Sequence
  Description of Artificial Sequence: Synthetic oligonucleotide
  Sense strand starting at position 3169 of SEQ ID NO: 1888543
uuggcucagccugaauaaa

SEQ ID NO: 2540389 - RNA, 19 nt, Artificial Sequence
  Description of Artificial Sequence: Synthetic oligonucleotide
  Antisense strand to SEQ ID NO: 2540388
uuuauucaggcugagccaa

SEQ ID NO: 2540390 - RNA, 19 nt, Artificial Sequence
  Description of Artificial Sequence: Synthetic oligonucleotide
  Sense strand starting at position 3440 of SEQ ID NO: 1888543
uccuguguacaucagaacu

SEQ ID NO: 2540391 - RNA, 19 nt, Artificial Sequence
  Description of Artificial Sequence: Synthetic oligonucleotide
  Antisense strand to SEQ ID NO: 2540390
aguucugauguacacagga

SEQ ID NO: 2540392 - RNA, 19 nt, Artificial Sequence
  Description of Artificial Sequence: Synthetic oligonucleotide
  Sense strand starting at position 2894 of SEQ ID NO: 1888543
ugcucuguaccuuagaaag

SEQ ID NO: 2540393 - RNA, 19 nt, Artificial Sequence
  Description of Artificial Sequence: Synthetic oligonucleotide
  Antisense strand to SEQ ID NO: 2540392
cuuucuaagguacagagca

SEQ ID NO: 2540394 - RNA, 19 nt, Artificial Sequence
  Description of Artificial Sequence: Synthetic oligonucleotide
  Sense strand starting at position 1002 of SEQ ID NO: 1888543
gauaacgcucugcaggaaa

SEQ ID NO: 2540395 - RNA, 19 nt, Artificial Sequence
  Description of Artificial Sequence: Synthetic oligonucleotide
  Antisense strand to SEQ ID NO: 2540394
uuuccugcagagcguuauc

SEQ ID NO: 2540396 - RNA, 19 nt, Artificial Sequence
  Description of Artificial Sequence: Synthetic oligonucleotide
  Sense strand starting at position 3124 of SEQ ID NO: 1888543
aguaaugucccagaguuua

SEQ ID NO: 2540397 - RNA, 19 nt, Artificial Sequence
  Description of Artificial Sequence: Synthetic oligonucleotide
  Antisense strand to SEQ ID NO: 2540396
uaaacucugggacauuacu

SEQ ID NO: 2540398 - RNA, 19 nt, Artificial Sequence
  Description of Artificial Sequence: Synthetic oligonucleotide
  Sense strand starting at position 1153 of SEQ ID NO: 1888543
gcaaucuguggguacacaa

SEQ ID NO: 2540399 - RNA, 19 nt, Artificial Sequence
  Description of Artificial Sequence: Synthetic oligonucleotide
  Antisense strand to SEQ ID NO: 2540398
uuguguacccacagauugc

SEQ ID NO: 2540400 - RNA, 19 nt, Artificial Sequence
  Description of Artificial Sequence: Synthetic oligonucleotide
  Sense strand starting at position 2011 of SEQ ID NO: 1888543
gcugacgucagagaccaau

SEQ ID NO: 2540401 - RNA, 19 nt, Artificial Sequence
  Description of Artificial Sequence: Synthetic oligonucleotide
  Antisense strand to SEQ ID NO: 2540400
auuggucucugacgucagc

SEQ ID NO: 2540402 - RNA, 19 nt, Artificial Sequence
  Description of Artificial Sequence: Synthetic oligonucleotide
  Sense strand starting at position 1277 of SEQ ID NO: 1888543
ggaccacacucauuguauu

SEQ ID NO: 2540403 - RNA, 19 nt, Artificial Sequence
  Description of Artificial Sequence: Synthetic oligonucleotide
  Antisense strand to SEQ ID NO: 2540402
aauacaaugaguguggucc

SEQ ID NO: 2540404 - RNA, 19 nt, Artificial Sequence
  Description of Artificial Sequence: Synthetic oligonucleotide
  Sense strand starting at position 3132 of SEQ ID NO: 1888543
cccagaguuuaccucugaa

SEQ ID NO: 2540405 - RNA, 19 nt, Artificial Sequence
  Description of Artificial Sequence: Synthetic oligonucleotide
  Antisense strand to SEQ ID NO: 2540404
uucagagguaaacucuggg

SEQ ID NO: 2540406 - RNA, 19 nt, Artificial Sequence
  Description of Artificial Sequence: Synthetic oligonucleotide
  Sense strand starting at position 3836 of SEQ ID NO: 1888543
gcuaauucugagcacuuaa

SEQ ID NO: 2540407 - RNA, 19 nt, Artificial Sequence
  Description of Artificial Sequence: Synthetic oligonucleotide
  Antisense strand to SEQ ID NO: 2540406
uuaagugcucagaauuagc

SEQ ID NO: 2540408 - RNA, 19 nt, Artificial Sequence
  Description of Artificial Sequence: Synthetic oligonucleotide
  Sense strand starting at position 2301 of SEQ ID NO: 1888543
ccaucuguagaguggagau

SEQ ID NO: 2540409 - RNA, 19 nt, Artificial Sequence
  Description of Artificial Sequence: Synthetic oligonucleotide
  Antisense strand to SEQ ID NO: 2540408
aucuccacucuacagaugg

SEQ ID NO: 2540410 - RNA, 19 nt, Artificial Sequence
  Description of Artificial Sequence: Synthetic oligonucleotide
  Sense strand starting at position 3405 of SEQ ID NO: 1888543
auaucuguguacgcauuua

SEQ ID NO: 2540411 - RNA, 19 nt, Artificial Sequence
  Description of Artificial Sequence: Synthetic oligonucleotide
  Antisense strand to SEQ ID NO: 2540410
uaaaugcguacacagauau

SEQ ID NO: 2540412 - RNA, 19 nt, Artificial Sequence
  Description of Artificial Sequence: Synthetic oligonucleotide
  Sense strand starting at position 3459 of SEQ ID NO: 1888543
cucuacccucugugagaaa

SEQ ID NO: 2540413 - RNA, 19 nt, Artificial Sequence
  Description of Artificial Sequence: Synthetic oligonucleotide
  Antisense strand to SEQ ID NO: 2540412
uuucucacagaggguagag

SEQ ID NO: 2540414 - RNA, 19 nt, Artificial Sequence
  Description of Artificial Sequence: Synthetic oligonucleotide
  Sense strand starting at position 540 of SEQ ID NO: 1888543
uaguuucucgaacaguuaa

SEQ ID NO: 2540415 - RNA, 19 nt, Artificial Sequence
  Description of Artificial Sequence: Synthetic oligonucleotide
  Antisense strand to SEQ ID NO: 2540414
uuaacuguucgagaaacua

SEQ ID NO: 2540416 - RNA, 19 nt, Artificial Sequence
  Description of Artificial Sequence: Synthetic oligonucleotide
  Sense strand starting at position 3216 of SEQ ID NO: 1888543
agaggaugccagugagagu

SEQ ID NO: 2540417 - RNA, 19 nt, Artificial Sequence
  Description of Artificial Sequence: Synthetic oligonucleotide
  Antisense strand to SEQ ID NO: 2540416
acucucacuggcauccucu

SEQ ID NO: 2540418 - RNA, 19 nt, Artificial Sequence
  Description of Artificial Sequence: Synthetic oligonucleotide
  Sense strand starting at position 1445 of SEQ ID NO: 1888543
caauaauggcccuggagua

SEQ ID NO: 2540419 - RNA, 19 nt, Artificial Sequence
  Description of Artificial Sequence: Synthetic oligonucleotide
  Antisense strand to SEQ ID NO: 2540418
uacuccagggccauuauug

SEQ ID NO: 2540420 - RNA, 19 nt, Artificial Sequence
  Description of Artificial Sequence: Synthetic oligonucleotide
  Sense strand starting at position 2371 of SEQ ID NO: 1888543
gcucauuaaagauguggau

SEQ ID NO: 2540421 - RNA, 19 nt, Artificial Sequence
  Description of Artificial Sequence: Synthetic oligonucleotide
  Antisense strand to SEQ ID NO: 2540420
auccacaucuuuaaugagc

SEQ ID NO: 2540422 - RNA, 19 nt, Artificial Sequence
  Description of Artificial Sequence: Synthetic oligonucleotide
  Sense strand starting at position 1117 of SEQ ID NO: 1888543
uuagcaacauggucucaaa

SEQ ID NO: 2540423 - RNA, 19 nt, Artificial Sequence
  Description of Artificial Sequence: Synthetic oligonucleotide
  Antisense strand to SEQ ID NO: 2540422
uuugagaccauguugcuaa

SEQ ID NO: 2540424 - RNA, 19 nt, Artificial Sequence
  Description of Artificial Sequence: Synthetic oligonucleotide
  Sense strand starting at position 3889 of SEQ ID NO: 1888543
ucuguuguagacugagaau

SEQ ID NO: 2540425 - RNA, 19 nt, Artificial Sequence
  Description of Artificial Sequence: Synthetic oligonucleotide
  Antisense strand to SEQ ID NO: 2540424
auucucagucuacaacaga

SEQ ID NO: 2540426 - RNA, 19 nt, Artificial Sequence
  Description of Artificial Sequence: Synthetic oligonucleotide
  Sense strand starting at position 3366 of SEQ ID NO: 1888543
caucgcucugaguagagau

SEQ ID NO: 2540427 - RNA, 19 nt, Artificial Sequence
  Description of Artificial Sequence: Synthetic oligonucleotide
  Antisense strand to SEQ ID NO: 2540426
aucucuacucagagcgaug

SEQ ID NO: 2540428 - RNA, 19 nt, Artificial Sequence
  Description of Artificial Sequence: Synthetic oligonucleotide
  Sense strand starting at position 3458 of SEQ ID NO: 1888543
ucucuacccucugugagaa

SEQ ID NO: 2540429 - RNA, 19 nt, Artificial Sequence
  Description of Artificial Sequence: Synthetic oligonucleotide
  Antisense strand to SEQ ID NO: 2540428
uucucacagaggguagaga

SEQ ID NO: 2540430 - RNA, 19 nt, Artificial Sequence
  Description of Artificial Sequence: Synthetic oligonucleotide
  Sense strand starting at position 528 of SEQ ID NO: 1888543
gaguaagggcuuuaguuuc

SEQ ID NO: 2540431 - RNA, 19 nt, Artificial Sequence
  Description of Artificial Sequence: Synthetic oligonucleotide
  Antisense strand to SEQ ID NO: 2540430
gaaacuaaagcccuuacuc

SEQ ID NO: 2540432 - RNA, 19 nt, Artificial Sequence
  Description of Artificial Sequence: Synthetic oligonucleotide
  Sense strand starting at position 2810 of SEQ ID NO: 1888543
aacccaggucuuugugaca

SEQ ID NO: 2540433 - RNA, 19 nt, Artificial Sequence
  Description of Artificial Sequence: Synthetic oligonucleotide
  Antisense strand to SEQ ID NO: 2540432
ugucacaaagaccuggguu

SEQ ID NO: 2540434 - RNA, 19 nt, Artificial Sequence
  Description of Artificial Sequence: Synthetic oligonucleotide
  Sense strand starting at position 3435 of SEQ ID NO: 1888543
agcauuccuguguacauca

SEQ ID NO: 2540435 - RNA, 19 nt, Artificial Sequence
  Description of Artificial Sequence: Synthetic oligonucleotide
  Antisense strand to SEQ ID NO: 2540434
ugauguacacaggaaugcu

SEQ ID NO: 2540436 - RNA, 19 nt, Artificial Sequence
  Description of Artificial Sequence: Synthetic oligonucleotide
  Sense strand starting at position 793 of SEQ ID NO: 1888543
aagacagcucaguguauca

SEQ ID NO: 2540437 - RNA, 19 nt, Artificial Sequence
  Description of Artificial Sequence: Synthetic oligonucleotide
  Antisense strand to SEQ ID NO: 2540436
ugauacacugagcugucuu

SEQ ID NO: 2540438 - RNA, 19 nt, Artificial Sequence
  Description of Artificial Sequence: Synthetic oligonucleotide
  Sense strand starting at position 3201 of SEQ ID NO: 1888542
cacucuggccuggaggaua

SEQ ID NO: 2540439 - RNA, 19 nt, Artificial Sequence
  Description of Artificial Sequence: Synthetic oligonucleotide
  Antisense strand to SEQ ID NO: 2540438
uauccuccaggccagagug

SEQ ID NO: 2540440 - RNA, 19 nt, Artificial Sequence
  Description of Artificial Sequence: Synthetic oligonucleotide
  Sense strand starting at position 1544 of SEQ ID NO: 1888542
cugggauccucacugaaca

SEQ ID NO: 2540441 - RNA, 19 nt, Artificial Sequence
  Description of Artificial Sequence: Synthetic oligonucleotide
  Antisense strand to SEQ ID NO: 2540440
uguucagugaggaucccag

SEQ ID NO: 2540442 - RNA, 19 nt, Artificial Sequence
  Description of Artificial Sequence: Synthetic oligonucleotide
  Sense strand starting at position 288 of SEQ ID NO: 1888542
uuuggauccuuauuaggaa

SEQ ID NO: 2540443 - RNA, 19 nt, Artificial Sequence
  Description of Artificial Sequence: Synthetic oligonucleotide
  Antisense strand to SEQ ID NO: 2540442
uuccuaauaaggauccaaa

SEQ ID NO: 2540444 - RNA, 19 nt, Artificial Sequence
  Description of Artificial Sequence: Synthetic oligonucleotide
  Sense strand starting at position 456 of SEQ ID NO: 1888542
ucguuaggugugguaaugu

SEQ ID NO: 2540445 - RNA, 19 nt, Artificial Sequence
  Description of Artificial Sequence: Synthetic oligonucleotide
  Antisense strand to SEQ ID NO: 2540444
acauuaccacaccuaacga

SEQ ID NO: 2540446 - RNA, 19 nt, Artificial Sequence
  Description of Artificial Sequence: Synthetic oligonucleotide
  Sense strand starting at position 330 of SEQ ID NO: 1888542
gaaguaugggugcauggaa

SEQ ID NO: 2540447 - RNA, 19 nt, Artificial Sequence
  Description of Artificial Sequence: Synthetic oligonucleotide
  Antisense strand to SEQ ID NO: 2540446
uuccaugcacccauacuuc

SEQ ID NO: 2540448 - RNA, 19 nt, Artificial Sequence
  Description of Artificial Sequence: Synthetic oligonucleotide
  Sense strand starting at position 1986 of SEQ ID NO: 1888542
acaaccacauggucugaua

SEQ ID NO: 2540449 - RNA, 19 nt, Artificial Sequence
  Description of Artificial Sequence: Synthetic oligonucleotide
  Antisense strand to SEQ ID NO: 2540448
uaucagaccaugugguugu

SEQ ID NO: 2540450 - RNA, 19 nt, Artificial Sequence
  Description of Artificial Sequence: Synthetic oligonucleotide
  Sense strand starting at position 406 of SEQ ID NO: 1888542
cuggguaucagguaauauu

SEQ ID NO: 2540451 - RNA, 19 nt, Artificial Sequence
  Description of Artificial Sequence: Synthetic oligonucleotide
  Antisense strand to SEQ ID NO: 2540450
aauauuaccugauacccag

SEQ ID NO: 2540452 - RNA, 19 nt, Artificial Sequence
  Description of Artificial Sequence: Synthetic oligonucleotide
  Sense strand starting at position 2066 of SEQ ID NO: 1888542
aagugcugagcacaaagau

SEQ ID NO: 2540453 - RNA, 19 nt, Artificial Sequence
  Description of Artificial Sequence: Synthetic oligonucleotide
  Antisense strand to SEQ ID NO: 2540452
aucuuugugcucagcacuu

SEQ ID NO: 2540454 - RNA, 19 nt, Artificial Sequence
  Description of Artificial Sequence: Synthetic oligonucleotide
  Sense strand starting at position 1712 of SEQ ID NO: 1888542
uccagugaucacggcauuu

SEQ ID NO: 2540455 - RNA, 19 nt, Artificial Sequence
  Description of Artificial Sequence: Synthetic oligonucleotide
  Antisense strand to SEQ ID NO: 2540454
aaaugccgugaucacugga

SEQ ID NO: 2540456 - RNA, 19 nt, Artificial Sequence
  Description of Artificial Sequence: Synthetic oligonucleotide
  Sense strand starting at position 2033 of SEQ ID NO: 1888542
auaaguuagggauguauua

SEQ ID NO: 2540457 - RNA, 19 nt, Artificial Sequence
  Description of Artificial Sequence: Synthetic oligonucleotide
  Antisense strand to SEQ ID NO: 2540456
uaauacaucccuaacuuau

SEQ ID NO: 2540458 - RNA, 19 nt, Artificial Sequence
  Description of Artificial Sequence: Synthetic oligonucleotide
  Sense strand starting at position 2801 of SEQ ID NO: 1888542
acuucuaagucucugagaa

SEQ ID NO: 2540459 - RNA, 19 nt, Artificial Sequence
  Description of Artificial Sequence: Synthetic oligonucleotide
  Antisense strand to SEQ ID NO: 2540458
uucucagagacuuagaagu

SEQ ID NO: 2540460 - RNA, 19 nt, Artificial Sequence
  Description of Artificial Sequence: Synthetic oligonucleotide
  Sense strand starting at position 1665 of SEQ ID NO: 1888542
auaauuccaccuggcaaga

SEQ ID NO: 2540461 - RNA, 19 nt, Artificial Sequence
  Description of Artificial Sequence: Synthetic oligonucleotide
  Antisense strand to SEQ ID NO: 2540460
ucuugccagguggaauuau

SEQ ID NO: 2540462 - RNA, 19 nt, Artificial Sequence
  Description of Artificial Sequence: Synthetic oligonucleotide
  Sense strand starting at position 2051 of SEQ ID NO: 1888542
agaugcacuccucauaagu

SEQ ID NO: 2540463 - RNA, 19 nt, Artificial Sequence
  Description of Artificial Sequence: Synthetic oligonucleotide
  Antisense strand to SEQ ID NO: 2540462
acuuaugaggagugcaucu

SEQ ID NO: 2540464 - RNA, 19 nt, Artificial Sequence
  Description of Artificial Sequence: Synthetic oligonucleotide
  Sense strand starting at position 2923 of SEQ ID NO: 1888542
cccugccuuccugaugaaa

SEQ ID NO: 2540465 - RNA, 19 nt, Artificial Sequence
  Description of Artificial Sequence: Synthetic oligonucleotide
  Antisense strand to SEQ ID NO: 2540464
uuucaucaggaaggcaggg

SEQ ID NO: 2540466 - RNA, 19 nt, Artificial Sequence
  Description of Artificial Sequence: Synthetic oligonucleotide
  Sense strand starting at position 3411 of SEQ ID NO: 1888542
ccacguucucuugaugaaa

SEQ ID NO: 2540467 - RNA, 19 nt, Artificial Sequence
  Description of Artificial Sequence: Synthetic oligonucleotide
  Antisense strand to SEQ ID NO: 2540466
uuucaucaagagaacgugg

SEQ ID NO: 2540468 - RNA, 19 nt, Artificial Sequence
  Description of Artificial Sequence: Synthetic oligonucleotide
  Sense strand starting at position 910 of SEQ ID NO: 1888542
cggcaaaguauugauaauu

SEQ ID NO: 2540469 - RNA, 19 nt, Artificial Sequence
  Description of Artificial Sequence: Synthetic oligonucleotide
  Antisense strand to SEQ ID NO: 2540468
aauuaucaauacuuugccg

SEQ ID NO: 2540470 - RNA, 19 nt, Artificial Sequence
  Description of Artificial Sequence: Synthetic oligonucleotide
  Sense strand starting at position 397 of SEQ ID NO: 1888542
gaauacagucuggguauca

SEQ ID NO: 2540471 - RNA, 19 nt, Artificial Sequence
  Description of Artificial Sequence: Synthetic oligonucleotide
  Antisense strand to SEQ ID NO: 2540470
ugauacccagacuguauuc

SEQ ID NO: 2540472 - RNA, 19 nt, Artificial Sequence
  Description of Artificial Sequence: Synthetic oligonucleotide
  Sense strand starting at position 3813 of SEQ ID NO: 1888542
ccagcaaugccagacucau

SEQ ID NO: 2540473 - RNA, 19 nt, Artificial Sequence
  Description of Artificial Sequence: Synthetic oligonucleotide
  Antisense strand to SEQ ID NO: 2540472
augagucuggcauugcugg

SEQ ID NO: 2540474 - RNA, 19 nt, Artificial Sequence
  Description of Artificial Sequence: Synthetic oligonucleotide
  Sense strand starting at position 2802 of SEQ ID NO: 1888542
cuucuaagucucugagaac

SEQ ID NO: 2540475 - RNA, 19 nt, Artificial Sequence
  Description of Artificial Sequence: Synthetic oligonucleotide
  Antisense strand to SEQ ID NO: 2540474
guucucagagacuuagaag

SEQ ID NO: 2540476 - RNA, 19 nt, Artificial Sequence
  Description of Artificial Sequence: Synthetic oligonucleotide
  Sense strand starting at position 1575 of SEQ ID NO: 1888542
guggcuuaccugggaagga

SEQ ID NO: 2540477 - RNA, 19 nt, Artificial Sequence
  Description of Artificial Sequence: Synthetic oligonucleotide
  Antisense strand to SEQ ID NO: 2540476
uccuucccagguaagccac

SEQ ID NO: 2540478 - RNA, 19 nt, Artificial Sequence
  Description of Artificial Sequence: Synthetic oligonucleotide
  Sense strand starting at position 2188 of SEQ ID NO: 1888542
gcaggauagugaguccaaa

SEQ ID NO: 2540479 - RNA, 19 nt, Artificial Sequence
  Description of Artificial Sequence: Synthetic oligonucleotide
  Antisense strand to SEQ ID NO: 2540478
uuuggacucacuauccugc

SEQ ID NO: 2540480 - RNA, 19 nt, Artificial Sequence
  Description of Artificial Sequence: Synthetic oligonucleotide
  Sense strand starting at position 3863 of SEQ ID NO: 1888542
acauguuagcuuuggagag

SEQ ID NO: 2540481 - RNA, 19 nt, Artificial Sequence
  Description of Artificial Sequence: Synthetic oligonucleotide
  Antisense strand to SEQ ID NO: 2540480
cucuccaaagcuaacaugu

SEQ ID NO: 2540482 - RNA, 19 nt, Artificial Sequence
  Description of Artificial Sequence: Synthetic oligonucleotide
  Sense strand starting at position 942 of SEQ ID NO: 1888542
auggcauaugaggguucau

SEQ ID NO: 2540483 - RNA, 19 nt, Artificial Sequence
  Description of Artificial Sequence: Synthetic oligonucleotide
  Antisense strand to SEQ ID NO: 2540482
augaacccucauaugccau

SEQ ID NO: 2540484 - RNA, 19 nt, Artificial Sequence
  Description of Artificial Sequence: Synthetic oligonucleotide
  Sense strand starting at position 2344 of SEQ ID NO: 1888542
agauaucucuuuguucuga

SEQ ID NO: 2540485 - RNA, 19 nt, Artificial Sequence
  Description of Artificial Sequence: Synthetic oligonucleotide
  Antisense strand to SEQ ID NO: 2540484
ucagaacaaagagauaucu

SEQ ID NO: 2540486 - RNA, 19 nt, Artificial Sequence
  Description of Artificial Sequence: Synthetic oligonucleotide
  Sense strand starting at position 1767 of SEQ ID NO: 1888542
uuauuacuguguuugaaag

SEQ ID NO: 2540487 - RNA, 19 nt, Artificial Sequence
  Description of Artificial Sequence: Synthetic oligonucleotide
  Antisense strand to SEQ ID NO: 2540486
cuuucaaacacaguaauaa

SEQ ID NO: 2540488 - RNA, 19 nt, Artificial Sequence
  Description of Artificial Sequence: Synthetic oligonucleotide
  Sense strand starting at position 1469 of SEQ ID NO: 1888542
aaaugucauugucuggauu

SEQ ID NO: 2540489 - RNA, 19 nt, Artificial Sequence
  Description of Artificial Sequence: Synthetic oligonucleotide
  Antisense strand to SEQ ID NO: 2540488
aauccagacaaugacauuu

SEQ ID NO: 2540490 - RNA, 19 nt, Artificial Sequence
  Description of Artificial Sequence: Synthetic oligonucleotide
  Sense strand starting at position 3570 of SEQ ID NO: 1888542
augacugauguuugcuaaa

SEQ ID NO: 2540491 - RNA, 19 nt, Artificial Sequence
  Description of Artificial Sequence: Synthetic oligonucleotide
  Antisense strand to SEQ ID NO: 2540490
uuuagcaaacaucagucau

SEQ ID NO: 2540492 - RNA, 19 nt, Artificial Sequence
  Description of Artificial Sequence: Synthetic oligonucleotide
  Sense strand starting at position 497 of SEQ ID NO: 1888542
uagagauguugcuugauac

SEQ ID NO: 2540493 - RNA, 19 nt, Artificial Sequence
  Description of Artificial Sequence: Synthetic oligonucleotide
  Antisense strand to SEQ ID NO: 2540492
guaucaagcaacaucucua

SEQ ID NO: 2540494 - RNA, 19 nt, Artificial Sequence
  Description of Artificial Sequence: Synthetic oligonucleotide
  Sense strand starting at position 222 of SEQ ID NO: 1888542
cugggugaggacuguuauu

SEQ ID NO: 2540495 - RNA, 19 nt, Artificial Sequence
  Description of Artificial Sequence: Synthetic oligonucleotide
  Antisense strand to SEQ ID NO: 2540494
aauaacaguccucacccag

SEQ ID NO: 2540496 - RNA, 19 nt, Artificial Sequence
  Description of Artificial Sequence: Synthetic oligonucleotide
  Sense strand starting at position 1470 of SEQ ID NO: 1888542
aaugucauugucuggauua

SEQ ID NO: 2540497 - RNA, 19 nt, Artificial Sequence
  Description of Artificial Sequence: Synthetic oligonucleotide
  Antisense strand to SEQ ID NO: 2540496
uaauccagacaaugacauu

SEQ ID NO: 2540498 - RNA, 19 nt, Artificial Sequence
  Description of Artificial Sequence: Synthetic oligonucleotide
  Sense strand starting at position 326 of SEQ ID NO: 1888542
gauggaaguaugggugcau

SEQ ID NO: 2540499 - RNA, 19 nt, Artificial Sequence
  Description of Artificial Sequence: Synthetic oligonucleotide
  Antisense strand to SEQ ID NO: 2540498
augcacccauacuuccauc

SEQ ID NO: 2540500 - RNA, 19 nt, Artificial Sequence
  Description of Artificial Sequence: Synthetic oligonucleotide
  Sense strand starting at position 3414 of SEQ ID NO: 1888542
cguucucuugaugaaagca

SEQ ID NO: 2540501 - RNA, 19 nt, Artificial Sequence
  Description of Artificial Sequence: Synthetic oligonucleotide
  Antisense strand to SEQ ID NO: 2540500
ugcuuucaucaagagaacg

SEQ ID NO: 2540502 - RNA, 19 nt, Artificial Sequence
  Description of Artificial Sequence: Synthetic oligonucleotide
  Sense strand starting at position 498 of SEQ ID NO: 1888542
agagauguugcuugauacu

SEQ ID NO: 2540503 - RNA, 19 nt, Artificial Sequence
  Description of Artificial Sequence: Synthetic oligonucleotide
  Antisense strand to SEQ ID NO: 2540502
aguaucaagcaacaucucu

SEQ ID NO: 2540504 - RNA, 19 nt, Artificial Sequence
  Description of Artificial Sequence: Synthetic oligonucleotide
  Sense strand starting at position 2042 of SEQ ID NO: 1888542
ggauguauuagaugcacuc

SEQ ID NO: 2540505 - RNA, 19 nt, Artificial Sequence
  Description of Artificial Sequence: Synthetic oligonucleotide
  Antisense strand to SEQ ID NO: 2540504
gagugcaucuaauacaucc

SEQ ID NO: 2540506 - RNA, 19 nt, Artificial Sequence
  Description of Artificial Sequence: Synthetic oligonucleotide
  Sense strand starting at position 2434 of SEQ ID NO: 1888542
guuauuaucugauuaccuc

SEQ ID NO: 2540507 - RNA, 19 nt, Artificial Sequence
  Description of Artificial Sequence: Synthetic oligonucleotide
  Antisense strand to SEQ ID NO: 2540506
gagguaaucagauaauaac

SEQ ID NO: 2540508 - RNA, 19 nt, Artificial Sequence
  Description of Artificial Sequence: Synthetic oligonucleotide
  Sense strand starting at position 3844 of SEQ ID NO: 1888542
agaggcuugcaagguuaaa

SEQ ID NO: 2540509 - RNA, 19 nt, Artificial Sequence
  Description of Artificial Sequence: Synthetic oligonucleotide
  Antisense strand to SEQ ID NO: 2540508
uuuaaccuugcaagccucu

SEQ ID NO: 2540510 - RNA, 19 nt, Artificial Sequence
  Description of Artificial Sequence: Synthetic oligonucleotide
  Sense strand starting at position 505 of SEQ ID NO: 1888542
uugcuugauacuggugaga

SEQ ID NO: 2540511 - RNA, 19 nt, Artificial Sequence
  Description of Artificial Sequence: Synthetic oligonucleotide
  Antisense strand to SEQ ID NO: 2540510
ucucaccaguaucaagcaa

SEQ ID NO: 2540512 - RNA, 19 nt, Artificial Sequence
  Description of Artificial Sequence: Synthetic oligonucleotide
  Sense strand starting at position 3569 of SEQ ID NO: 1888542
uaugacugauguuugcuaa

SEQ ID NO: 2540513 - RNA, 19 nt, Artificial Sequence
  Description of Artificial Sequence: Synthetic oligonucleotide
  Antisense strand to SEQ ID NO: 2540512
uuagcaaacaucagucaua

SEQ ID NO: 2540514 - RNA, 19 nt, Artificial Sequence
  Description of Artificial Sequence: Synthetic oligonucleotide
  Sense strand starting at position 3563 of SEQ ID NO: 1888542
cuccucuaugacugauguu

SEQ ID NO: 2540515 - RNA, 19 nt, Artificial Sequence
  Description of Artificial Sequence: Synthetic oligonucleotide
  Antisense strand to SEQ ID NO: 2540514
aacaucagucauagaggag

SEQ ID NO: 2540516 - RNA, 19 nt, Artificial Sequence
  Description of Artificial Sequence: Synthetic oligonucleotide
  Sense strand starting at position 1465 of SEQ ID NO: 1888542
guagaaaugucauugucug

SEQ ID NO: 2540517 - RNA, 19 nt, Artificial Sequence
  Description of Artificial Sequence: Synthetic oligonucleotide
  Antisense strand to SEQ ID NO: 2540516
cagacaaugacauuucuac

SEQ ID NO: 2540518 - RNA, 19 nt, Artificial Sequence
  Description of Artificial Sequence: Synthetic oligonucleotide
  Sense strand starting at position 2009 of SEQ ID NO: 1888544
cagguaaaguaauugagau

SEQ ID NO: 2540519 - RNA, 19 nt, Artificial Sequence
  Description of Artificial Sequence: Synthetic oligonucleotide
  Antisense strand to SEQ ID NO: 2540518
aucucaauuacuuuaccug

SEQ ID NO: 2540520 - RNA, 19 nt, Artificial Sequence
  Description of Artificial Sequence: Synthetic oligonucleotide
  Sense strand starting at position 3249 of SEQ ID NO: 1888544
guguccugcaacguaaagu

SEQ ID NO: 2540521 - RNA, 19 nt, Artificial Sequence
  Description of Artificial Sequence: Synthetic oligonucleotide
  Antisense strand to SEQ ID NO: 2540520
acuuuacguugcaggacac

SEQ ID NO: 2540522 - RNA, 19 nt, Artificial Sequence
  Description of Artificial Sequence: Synthetic oligonucleotide
  Sense strand starting at position 2010 of SEQ ID NO: 1888544
agguaaaguaauugagauc

SEQ ID NO: 2540523 - RNA, 19 nt, Artificial Sequence
  Description of Artificial Sequence: Synthetic oligonucleotide
  Antisense strand to SEQ ID NO: 2540522
gaucucaauuacuuuaccu

SEQ ID NO: 2540524 - RNA, 19 nt, Artificial Sequence
  Description of Artificial Sequence: Synthetic oligonucleotide
  Sense strand starting at position 2068 of SEQ ID NO: 1888544
agaggacuuuggucaccua

SEQ ID NO: 2540525 - RNA, 19 nt, Artificial Sequence
  Description of Artificial Sequence: Synthetic oligonucleotide
  Antisense strand to SEQ ID NO: 2540524
uaggugaccaaaguccucu

SEQ ID NO: 2540526 - RNA, 19 nt, Artificial Sequence
  Description of Artificial Sequence: Synthetic oligonucleotide
  Sense strand starting at position 2001 of SEQ ID NO: 1888544
agucuacucagguaaagua

SEQ ID NO: 2540527 - RNA, 19 nt, Artificial Sequence
  Description of Artificial Sequence: Synthetic oligonucleotide
  Antisense strand to SEQ ID NO: 2540526
uacuuuaccugaguagacu

SEQ ID NO: 2540528 - RNA, 19 nt, Artificial Sequence
  Description of Artificial Sequence: Synthetic oligonucleotide
  Sense strand starting at position 3498 of SEQ ID NO: 1888544
acuggaaagaggugucauu

SEQ ID NO: 2540529 - RNA, 19 nt, Artificial Sequence
  Description of Artificial Sequence: Synthetic oligonucleotide
  Antisense strand to SEQ ID NO: 2540528
aaugacaccucuuuccagu

SEQ ID NO: 2540530 - RNA, 19 nt, Artificial Sequence
  Description of Artificial Sequence: Synthetic oligonucleotide
  Sense strand starting at position 3926 of SEQ ID NO: 1888544
ggaacuaagaugugugacu

SEQ ID NO: 2540531 - RNA, 19 nt, Artificial Sequence
  Description of Artificial Sequence: Synthetic oligonucleotide
  Antisense strand to SEQ ID NO: 2540530
agucacacaucuuaguucc

SEQ ID NO: 2540532 - RNA, 19 nt, Artificial Sequence
  Description of Artificial Sequence: Synthetic oligonucleotide
  Sense strand starting at position 3585 of SEQ ID NO: 1888544
ccauauuagcaguaaguaa

SEQ ID NO: 2540533 - RNA, 19 nt, Artificial Sequence
  Description of Artificial Sequence: Synthetic oligonucleotide
  Antisense strand to SEQ ID NO: 2540532
uuacuuacugcuaauaugg

SEQ ID NO: 2540534 - RNA, 19 nt, Artificial Sequence
  Description of Artificial Sequence: Synthetic oligonucleotide
  Sense strand starting at position 2131 of SEQ ID NO: 1888544
ucagaaauguaucugguaa

SEQ ID NO: 2540535 - RNA, 19 nt, Artificial Sequence
  Description of Artificial Sequence: Synthetic oligonucleotide
  Antisense strand to SEQ ID NO: 2540534
uuaccagauacauuucuga

SEQ ID NO: 2540536 - RNA, 19 nt, Artificial Sequence
  Description of Artificial Sequence: Synthetic oligonucleotide
  Sense strand starting at position 1082 of SEQ ID NO: 1888544
agaacaugcuuguugagaa

SEQ ID NO: 2540537 - RNA, 19 nt, Artificial Sequence
  Description of Artificial Sequence: Synthetic oligonucleotide
  Antisense strand to SEQ ID NO: 2540536
uucucaacaagcauguucu

SEQ ID NO: 2540538 - RNA, 19 nt, Artificial Sequence
  Description of Artificial Sequence: Synthetic oligonucleotide
  Sense strand starting at position 3099 of SEQ ID NO: 1888544
cccaaagagugggagauuu

SEQ ID NO: 2540539 - RNA, 19 nt, Artificial Sequence
  Description of Artificial Sequence: Synthetic oligonucleotide
  Antisense strand to SEQ ID NO: 2540538
aaaucucccacucuuuggg

SEQ ID NO: 2540540 - RNA, 19 nt, Artificial Sequence
  Description of Artificial Sequence: Synthetic oligonucleotide
  Sense strand starting at position 3980 of SEQ ID NO: 1888544
gaagaugacucagcuagug

SEQ ID NO: 2540541 - RNA, 19 nt, Artificial Sequence
  Description of Artificial Sequence: Synthetic oligonucleotide
  Antisense strand to SEQ ID NO: 2540540
cacuagcugagucaucuuc

SEQ ID NO: 2540542 - RNA, 19 nt, Artificial Sequence
  Description of Artificial Sequence: Synthetic oligonucleotide
  Sense strand starting at position 1340 of SEQ ID NO: 1888544
guauuaacauaguuacuga

SEQ ID NO: 2540543 - RNA, 19 nt, Artificial Sequence
  Description of Artificial Sequence: Synthetic oligonucleotide
  Antisense strand to SEQ ID NO: 2540542
ucaguaacuauguuaauac

SEQ ID NO: 2540544 - RNA, 19 nt, Artificial Sequence
  Description of Artificial Sequence: Synthetic oligonucleotide
  Sense strand starting at position 3235 of SEQ ID NO: 1888544
aaggaauaaucucuguguc

SEQ ID NO: 2540545 - RNA, 19 nt, Artificial Sequence
  Description of Artificial Sequence: Synthetic oligonucleotide
  Antisense strand to SEQ ID NO: 2540544
gacacagagauuauuccuu

SEQ ID NO: 2540546 - RNA, 19 nt, Artificial Sequence
  Description of Artificial Sequence: Synthetic oligonucleotide
  Sense strand starting at position 3525 of SEQ ID NO: 1888544
cuugucuugguuuaacaua

SEQ ID NO: 2540547 - RNA, 19 nt, Artificial Sequence
  Description of Artificial Sequence: Synthetic oligonucleotide
  Antisense strand to SEQ ID NO: 2540546
uauguuaaaccaagacaag

SEQ ID NO: 2540548 - RNA, 19 nt, Artificial Sequence
  Description of Artificial Sequence: Synthetic oligonucleotide
  Sense strand starting at position 3928 of SEQ ID NO: 1888544
aacuaagaugugugacucu

SEQ ID NO: 2540549 - RNA, 19 nt, Artificial Sequence
  Description of Artificial Sequence: Synthetic oligonucleotide
  Antisense strand to SEQ ID NO: 2540548
agagucacacaucuuaguu

SEQ ID NO: 2540550 - RNA, 19 nt, Artificial Sequence
  Description of Artificial Sequence: Synthetic oligonucleotide
  Sense strand starting at position 3025 of SEQ ID NO: 1888544
uugguaugucuguaaauau

SEQ ID NO: 2540551 - RNA, 19 nt, Artificial Sequence
  Description of Artificial Sequence: Synthetic oligonucleotide
  Antisense strand to SEQ ID NO: 2540550
auauuuacagacauaccaa

SEQ ID NO: 2540552 - RNA, 19 nt, Artificial Sequence
  Description of Artificial Sequence: Synthetic oligonucleotide
  Sense strand starting at position 3419 of SEQ ID NO: 1888544
gcuuuaaguguugaauaug

SEQ ID NO: 2540553 - RNA, 19 nt, Artificial Sequence
  Description of Artificial Sequence: Synthetic oligonucleotide
  Antisense strand to SEQ ID NO: 2540552
cauauucaacacuuaaagc

SEQ ID NO: 2540554 - RNA, 19 nt, Artificial Sequence
  Description of Artificial Sequence: Synthetic oligonucleotide
  Sense strand starting at position 3044 of SEQ ID NO: 1888544
cugacauguuaauuaugua

SEQ ID NO: 2540555 - RNA, 19 nt, Artificial Sequence
  Description of Artificial Sequence: Synthetic oligonucleotide
  Antisense strand to SEQ ID NO: 2540554
uacauaauuaacaugucag

SEQ ID NO: 2540556 - RNA, 19 nt, Artificial Sequence
  Description of Artificial Sequence: Synthetic oligonucleotide
  Sense strand starting at position 3165 of SEQ ID NO: 1888544
auguaugucuaagcagaaa

SEQ ID NO: 2540557 - RNA, 19 nt, Artificial Sequence
  Description of Artificial Sequence: Synthetic oligonucleotide
  Antisense strand to SEQ ID NO: 2540556
uuucugcuuagacauacau

SEQ ID NO: 2540558 - RNA, 19 nt, Artificial Sequence
  Description of Artificial Sequence: Synthetic oligonucleotide
  Sense strand starting at position 1079 of SEQ ID NO: 1888544
uuaagaacaugcuuguuga

SEQ ID NO: 2540559 - RNA, 19 nt, Artificial Sequence
  Description of Artificial Sequence: Synthetic oligonucleotide
  Antisense strand to SEQ ID NO: 2540558
ucaacaagcauguucuuaa

SEQ ID NO: 2540560 - RNA, 19 nt, Artificial Sequence
  Description of Artificial Sequence: Synthetic oligonucleotide
  Sense strand starting at position 3428 of SEQ ID NO: 1888544
guugaauauguguggaaua

SEQ ID NO: 2540561 - RNA, 19 nt, Artificial Sequence
  Description of Artificial Sequence: Synthetic oligonucleotide
  Antisense strand to SEQ ID NO: 2540560
uauuccacacauauucaac

SEQ ID NO: 2540562 - RNA, 19 nt, Artificial Sequence
  Description of Artificial Sequence: Synthetic oligonucleotide
  Sense strand starting at position 1325 of SEQ ID NO: 1888544
cugaucuuacugcauguau

SEQ ID NO: 2540563 - RNA, 19 nt, Artificial Sequence
  Description of Artificial Sequence: Synthetic oligonucleotide
  Antisense strand to SEQ ID NO: 2540562
auacaugcaguaagaucag

SEQ ID NO: 2540564 - RNA, 19 nt, Artificial Sequence
  Description of Artificial Sequence: Synthetic oligonucleotide
  Sense strand starting at position 3427 of SEQ ID NO: 1888544
uguugaauauguguggaau

SEQ ID NO: 2540565 - RNA, 19 nt, Artificial Sequence
  Description of Artificial Sequence: Synthetic oligonucleotide
  Antisense strand to SEQ ID NO: 2540564
auuccacacauauucaaca

SEQ ID NO: 2540566 - RNA, 19 nt, Artificial Sequence
  Description of Artificial Sequence: Synthetic oligonucleotide
  Sense strand starting at position 3422 of SEQ ID NO: 1888544
uuaaguguugaauaugugu

SEQ ID NO: 2540567 - RNA, 19 nt, Artificial Sequence
  Description of Artificial Sequence: Synthetic oligonucleotide
  Antisense strand to SEQ ID NO: 2540566
acacauauucaacacuuaa

SEQ ID NO: 2540568 - RNA, 19 nt, Artificial Sequence
  Description of Artificial Sequence: Synthetic oligonucleotide
  Sense strand starting at position 3935 of SEQ ID NO: 1888544
augugugacucuguaggga

SEQ ID NO: 2540569 - RNA, 19 nt, Artificial Sequence
  Description of Artificial Sequence: Synthetic oligonucleotide
  Antisense strand to SEQ ID NO: 2540568
ucccuacagagucacacau

SEQ ID NO: 2540570 - RNA, 19 nt, Artificial Sequence
  Description of Artificial Sequence: Synthetic oligonucleotide
  Sense strand starting at position 3533 of SEQ ID NO: 1888544
gguuuaacauaguuuaagu

SEQ ID NO: 2540571 - RNA, 19 nt, Artificial Sequence
  Description of Artificial Sequence: Synthetic oligonucleotide
  Antisense strand to SEQ ID NO: 2540570
acuuaaacuauguuaaacc

SEQ ID NO: 2540572 - RNA, 19 nt, Artificial Sequence
  Description of Artificial Sequence: Synthetic oligonucleotide
  Sense strand starting at position 3237 of SEQ ID NO: 1888544
ggaauaaucucuguguccu

SEQ ID NO: 2540573 - RNA, 19 nt, Artificial Sequence
  Description of Artificial Sequence: Synthetic oligonucleotide
  Antisense strand to SEQ ID NO: 2540572
aggacacagagauuauucc

SEQ ID NO: 2540574 - RNA, 19 nt, Artificial Sequence
  Description of Artificial Sequence: Synthetic oligonucleotide
  Sense strand starting at position 1207 of SEQ ID NO: 1888544
gacugaauguuguuagcaa

SEQ ID NO: 2540575 - RNA, 19 nt, Artificial Sequence
  Description of Artificial Sequence: Synthetic oligonucleotide
  Antisense strand to SEQ ID NO: 2540574
uugcuaacaacauucaguc

SEQ ID NO: 2540576 - RNA, 19 nt, Artificial Sequence
  Description of Artificial Sequence: Synthetic oligonucleotide
  Sense strand starting at position 2071 of SEQ ID NO: 1888544
ggacuuuggucaccuagca

SEQ ID NO: 2540577 - RNA, 19 nt, Artificial Sequence
  Description of Artificial Sequence: Synthetic oligonucleotide
  Antisense strand to SEQ ID NO: 2540576
ugcuaggugaccaaagucc

SEQ ID NO: 2540578 - RNA, 19 nt, Artificial Sequence
  Description of Artificial Sequence: Synthetic oligonucleotide
  Sense strand starting at position 3931 of SEQ ID NO: 1888544
uaagaugugugacucugua

SEQ ID NO: 2540579 - RNA, 19 nt, Artificial Sequence
  Description of Artificial Sequence: Synthetic oligonucleotide
  Antisense strand to SEQ ID NO: 2540578
uacagagucacacaucuua

SEQ ID NO: 2540580 - RNA, 19 nt, Artificial Sequence
  Description of Artificial Sequence: Synthetic oligonucleotide
  Sense strand starting at position 3238 of SEQ ID NO: 1888544
gaauaaucucuguguccug

SEQ ID NO: 2540581 - RNA, 19 nt, Artificial Sequence
  Description of Artificial Sequence: Synthetic oligonucleotide
  Antisense strand to SEQ ID NO: 2540580
caggacacagagauuauuc

SEQ ID NO: 2540582 - RNA, 19 nt, Artificial Sequence
  Description of Artificial Sequence: Synthetic oligonucleotide
  Sense strand starting at position 1117 of SEQ ID NO: 1888544
uuugaagcccucuggugaa

SEQ ID NO: 2540583 - RNA, 19 nt, Artificial Sequence
  Description of Artificial Sequence: Synthetic oligonucleotide
  Antisense strand to SEQ ID NO: 2540582
uucaccagagggcuucaaa

SEQ ID NO: 2540584 - RNA, 19 nt, Artificial Sequence
  Description of Artificial Sequence: Synthetic oligonucleotide
  Sense strand starting at position 2627 of SEQ ID NO: 1888544
gagcauagggccugguaau

SEQ ID NO: 2540585 - RNA, 19 nt, Artificial Sequence
  Description of Artificial Sequence: Synthetic oligonucleotide
  Antisense strand to SEQ ID NO: 2540584
auuaccaggcccuaugcuc

SEQ ID NO: 2540586 - RNA, 19 nt, Artificial Sequence
  Description of Artificial Sequence: Synthetic oligonucleotide
  Sense strand starting at position 2106 of SEQ ID NO: 1888544
ggccaagacuguuuacuuu

SEQ ID NO: 2540587 - RNA, 19 nt, Artificial Sequence
  Description of Artificial Sequence: Synthetic oligonucleotide
  Antisense strand to SEQ ID NO: 2540586
aaaguaaacagucuuggcc

SEQ ID NO: 2540588 - RNA, 19 nt, Artificial Sequence
  Description of Artificial Sequence: Synthetic oligonucleotide
  Sense strand starting at position 2823 of SEQ ID NO: 1888544
ggguuuccuguuugaugau

SEQ ID NO: 2540589 - RNA, 19 nt, Artificial Sequence
  Description of Artificial Sequence: Synthetic oligonucleotide
  Antisense strand to SEQ ID NO: 2540588
aucaucaaacaggaaaccc

SEQ ID NO: 2540590 - RNA, 19 nt, Artificial Sequence
  Description of Artificial Sequence: Synthetic oligonucleotide
  Sense strand starting at position 1996 of SEQ ID NO: 1888544
ucaguagucuacucaggua

SEQ ID NO: 2540591 - RNA, 19 nt, Artificial Sequence
  Description of Artificial Sequence: Synthetic oligonucleotide
  Antisense strand to SEQ ID NO: 2540590
uaccugaguagacuacuga

SEQ ID NO: 2540592 - RNA, 19 nt, Artificial Sequence
  Description of Artificial Sequence: Synthetic oligonucleotide
  Sense strand starting at position 3024 of SEQ ID NO: 1888544
uuugguaugucuguaaaua

SEQ ID NO: 2540593 - RNA, 19 nt, Artificial Sequence
  Description of Artificial Sequence: Synthetic oligonucleotide
  Antisense strand to SEQ ID NO: 2540592
uauuuacagacauaccaaa

SEQ ID NO: 2540594 - RNA, 19 nt, Artificial Sequence
  Description of Artificial Sequence: Synthetic oligonucleotide
  Sense strand starting at position 3954 of SEQ ID NO: 1888544
ggaagaaugccuugguguu

SEQ ID NO: 2540595 - RNA, 19 nt, Artificial Sequence
  Description of Artificial Sequence: Synthetic oligonucleotide
  Antisense strand to SEQ ID NO: 2540594
aacaccaaggcauucuucc

SEQ ID NO: 2540596 - RNA, 19 nt, Artificial Sequence
  Description of Artificial Sequence: Synthetic oligonucleotide
  Sense strand starting at position 3379 of SEQ ID NO: 1888544
ucaugcuugagagguggua

SEQ ID NO: 2540597 - RNA, 19 nt, Artificial Sequence
  Description of Artificial Sequence: Synthetic oligonucleotide
  Antisense strand to SEQ ID NO: 2540596
uaccaccucucaagcauga

SEQ ID NO: 2540598 - RNA, 19 nt, Artificial Sequence
  Description of Artificial Sequence: Synthetic oligonucleotide
  Sense strand starting at position 792 of SEQ ID NO: 1888545
auguguuucgcagucuaua

SEQ ID NO: 2540599 - RNA, 19 nt, Artificial Sequence
  Description of Artificial Sequence: Synthetic oligonucleotide
  Antisense strand to SEQ ID NO: 2540598
uauagacugcgaaacacau

SEQ ID NO: 2540600 - RNA, 19 nt, Artificial Sequence
  Description of Artificial Sequence: Synthetic oligonucleotide
  Sense strand starting at position 794 of SEQ ID NO: 1888545
guguuucgcagucuauaau

SEQ ID NO: 2540601 - RNA, 19 nt, Artificial Sequence
  Description of Artificial Sequence: Synthetic oligonucleotide
  Antisense strand to SEQ ID NO: 2540600
auuauagacugcgaaacac

SEQ ID NO: 2540602 - RNA, 19 nt, Artificial Sequence
  Description of Artificial Sequence: Synthetic oligonucleotide
  Sense strand starting at position 793 of SEQ ID NO: 1888545
uguguuucgcagucuauaa

SEQ ID NO: 2540603 - RNA, 19 nt, Artificial Sequence
  Description of Artificial Sequence: Synthetic oligonucleotide
  Antisense strand to SEQ ID NO: 2540602
uuauagacugcgaaacaca

SEQ ID NO: 2540604 - RNA, 19 nt, Artificial Sequence
  Description of Artificial Sequence: Synthetic oligonucleotide
  Sense strand starting at position 2897 of SEQ ID NO: 1888545
ggugguuguggagauggaa

SEQ ID NO: 2540605 - RNA, 19 nt, Artificial Sequence
  Description of Artificial Sequence: Synthetic oligonucleotide
  Antisense strand to SEQ ID NO: 2540604
uuccaucuccacaaccacc

SEQ ID NO: 2540606 - RNA, 19 nt, Artificial Sequence
  Description of Artificial Sequence: Synthetic oligonucleotide
  Sense strand starting at position 2069 of SEQ ID NO: 1888545
ggaguagagagcugggaua

SEQ ID NO: 2540607 - RNA, 19 nt, Artificial Sequence
  Description of Artificial Sequence: Synthetic oligonucleotide
  Antisense strand to SEQ ID NO: 2540606
uaucccagcucucuacucc

SEQ ID NO: 2540608 - RNA, 19 nt, Artificial Sequence
  Description of Artificial Sequence: Synthetic oligonucleotide
  Sense strand starting at position 982 of SEQ ID NO: 1888545
cugccuuugggagacucaa

SEQ ID NO: 2540609 - RNA, 19 nt, Artificial Sequence
  Description of Artificial Sequence: Synthetic oligonucleotide
  Antisense strand to SEQ ID NO: 2540608
uugagucucccaaaggcag

SEQ ID NO: 2540610 - RNA, 19 nt, Artificial Sequence
  Description of Artificial Sequence: Synthetic oligonucleotide
  Sense strand starting at position 2290 of SEQ ID NO: 1888545
ccaucuucgggaggaauag

SEQ ID NO: 2540611 - RNA, 19 nt, Artificial Sequence
  Description of Artificial Sequence: Synthetic oligonucleotide
  Antisense strand to SEQ ID NO: 2540610
cuauuccucccgaagaugg

SEQ ID NO: 2540612 - RNA, 19 nt, Artificial Sequence
  Description of Artificial Sequence: Synthetic oligonucleotide
  Sense strand starting at position 785 of SEQ ID NO: 1888545
caugcauauguguuucgca

SEQ ID NO: 2540613 - RNA, 19 nt, Artificial Sequence
  Description of Artificial Sequence: Synthetic oligonucleotide
  Antisense strand to SEQ ID NO: 2540612
ugcgaaacacauaugcaug

SEQ ID NO: 2540614 - RNA, 19 nt, Artificial Sequence
  Description of Artificial Sequence: Synthetic oligonucleotide
  Sense strand starting at position 2253 of SEQ ID NO: 1888545
aagagaagcuuucugauug

SEQ ID NO: 2540615 - RNA, 19 nt, Artificial Sequence
  Description of Artificial Sequence: Synthetic oligonucleotide
  Antisense strand to SEQ ID NO: 2540614
caaucagaaagcuucucuu

SEQ ID NO: 2540616 - RNA, 19 nt, Artificial Sequence
  Description of Artificial Sequence: Synthetic oligonucleotide
  Sense strand starting at position 284 of SEQ ID NO: 1888545
uggaguuggccagaucuag

SEQ ID NO: 2540617 - RNA, 19 nt, Artificial Sequence
  Description of Artificial Sequence: Synthetic oligonucleotide
  Antisense strand to SEQ ID NO: 2540616
cuagaucuggccaacucca

SEQ ID NO: 2540618 - RNA, 19 nt, Artificial Sequence
  Description of Artificial Sequence: Synthetic oligonucleotide
  Sense strand starting at position 828 of SEQ ID NO: 1888545
ucuaaaugugcagacugau

SEQ ID NO: 2540619 - RNA, 19 nt, Artificial Sequence
  Description of Artificial Sequence: Synthetic oligonucleotide
  Antisense strand to SEQ ID NO: 2540618
aucagucugcacauuuaga

SEQ ID NO: 2540620 - RNA, 19 nt, Artificial Sequence
  Description of Artificial Sequence: Synthetic oligonucleotide
  Sense strand starting at position 2495 of SEQ ID NO: 1888545
uauuaaagugcauggagaa

SEQ ID NO: 2540621 - RNA, 19 nt, Artificial Sequence
  Description of Artificial Sequence: Synthetic oligonucleotide
  Antisense strand to SEQ ID NO: 2540620
uucuccaugcacuuuaaua

SEQ ID NO: 2540622 - RNA, 19 nt, Artificial Sequence
  Description of Artificial Sequence: Synthetic oligonucleotide
  Sense strand starting at position 3399 of SEQ ID NO: 1888545
ccaggucugagugagcaaa

SEQ ID NO: 2540623 - RNA, 19 nt, Artificial Sequence
  Description of Artificial Sequence: Synthetic oligonucleotide
  Antisense strand to SEQ ID NO: 2540622
uuugcucacucagaccugg

SEQ ID NO: 2540624 - RNA, 19 nt, Artificial Sequence
  Description of Artificial Sequence: Synthetic oligonucleotide
  Sense strand starting at position 3231 of SEQ ID NO: 1888545
cuaugaauggcugaugguu

SEQ ID NO: 2540625 - RNA, 19 nt, Artificial Sequence
  Description of Artificial Sequence: Synthetic oligonucleotide
  Antisense strand to SEQ ID NO: 2540624
aaccaucagccauucauag

SEQ ID NO: 2540626 - RNA, 19 nt, Artificial Sequence
  Description of Artificial Sequence: Synthetic oligonucleotide
  Sense strand starting at position 831 of SEQ ID NO: 1888545
aaaugugcagacugauaca

SEQ ID NO: 2540627 - RNA, 19 nt, Artificial Sequence
  Description of Artificial Sequence: Synthetic oligonucleotide
  Antisense strand to SEQ ID NO: 2540626
uguaucagucugcacauuu

SEQ ID NO: 2540628 - RNA, 19 nt, Artificial Sequence
  Description of Artificial Sequence: Synthetic oligonucleotide
  Sense strand starting at position 951 of SEQ ID NO: 1888545
ugggauguaucagucaaca

SEQ ID NO: 2540629 - RNA, 19 nt, Artificial Sequence
  Description of Artificial Sequence: Synthetic oligonucleotide
  Antisense strand to SEQ ID NO: 2540628
uguugacugauacauccca

SEQ ID NO: 2540630 - RNA, 19 nt, Artificial Sequence
  Description of Artificial Sequence: Synthetic oligonucleotide
  Sense strand starting at position 143 of SEQ ID NO: 1888545
uuauucucagucuggaaga

SEQ ID NO: 2540631 - RNA, 19 nt, Artificial Sequence
  Description of Artificial Sequence: Synthetic oligonucleotide
  Antisense strand to SEQ ID NO: 2540630
ucuuccagacugagaauaa

SEQ ID NO: 2540632 - RNA, 19 nt, Artificial Sequence
  Description of Artificial Sequence: Synthetic oligonucleotide
  Sense strand starting at position 3390 of SEQ ID NO: 1888545
cucagacauccaggucuga

SEQ ID NO: 2540633 - RNA, 19 nt, Artificial Sequence
  Description of Artificial Sequence: Synthetic oligonucleotide
  Antisense strand to SEQ ID NO: 2540632
ucagaccuggaugucugag

SEQ ID NO: 2540634 - RNA, 19 nt, Artificial Sequence
  Description of Artificial Sequence: Synthetic oligonucleotide
  Sense strand starting at position 3068 of SEQ ID NO: 1888545
ugggauucugauggcugau

SEQ ID NO: 2540635 - RNA, 19 nt, Artificial Sequence
  Description of Artificial Sequence: Synthetic oligonucleotide
  Antisense strand to SEQ ID NO: 2540634
aucagccaucagaauccca

SEQ ID NO: 2540636 - RNA, 19 nt, Artificial Sequence
  Description of Artificial Sequence: Synthetic oligonucleotide
  Sense strand starting at position 1179 of SEQ ID NO: 1888545
acaguauauguuuagcuga

SEQ ID NO: 2540637 - RNA, 19 nt, Artificial Sequence
  Description of Artificial Sequence: Synthetic oligonucleotide
  Antisense strand to SEQ ID NO: 2540636
ucagcuaaacauauacugu

SEQ ID NO: 2540638 - RNA, 19 nt, Artificial Sequence
  Description of Artificial Sequence: Synthetic oligonucleotide
  Sense strand starting at position 787 of SEQ ID NO: 1888545
ugcauauguguuucgcagu

SEQ ID NO: 2540639 - RNA, 19 nt, Artificial Sequence
  Description of Artificial Sequence: Synthetic oligonucleotide
  Antisense strand to SEQ ID NO: 2540638
acugcgaaacacauaugca

SEQ ID NO: 2540640 - RNA, 19 nt, Artificial Sequence
  Description of Artificial Sequence: Synthetic oligonucleotide
  Sense strand starting at position 3285 of SEQ ID NO: 1888545
agauguucuuuccuuggga

SEQ ID NO: 2540641 - RNA, 19 nt, Artificial Sequence
  Description of Artificial Sequence: Synthetic oligonucleotide
  Antisense strand to SEQ ID NO: 2540640
ucccaaggaaagaacaucu

SEQ ID NO: 2540642 - RNA, 19 nt, Artificial Sequence
  Description of Artificial Sequence: Synthetic oligonucleotide
  Sense strand starting at position 1092 of SEQ ID NO: 1888545
ucaggucaccguuaucaga

SEQ ID NO: 2540643 - RNA, 19 nt, Artificial Sequence
  Description of Artificial Sequence: Synthetic oligonucleotide
  Antisense strand to SEQ ID NO: 2540642
ucugauaacggugaccuga

SEQ ID NO: 2540644 - RNA, 19 nt, Artificial Sequence
  Description of Artificial Sequence: Synthetic oligonucleotide
  Sense strand starting at position 977 of SEQ ID NO: 1888545
gauuccugccuuugggaga

SEQ ID NO: 2540645 - RNA, 19 nt, Artificial Sequence
  Description of Artificial Sequence: Synthetic oligonucleotide
  Antisense strand to SEQ ID NO: 2540644
ucucccaaaggcaggaauc

SEQ ID NO: 2540646 - RNA, 19 nt, Artificial Sequence
  Description of Artificial Sequence: Synthetic oligonucleotide
  Sense strand starting at position 1031 of SEQ ID NO: 1888545
caguaacuuugggucuuaa

SEQ ID NO: 2540647 - RNA, 19 nt, Artificial Sequence
  Description of Artificial Sequence: Synthetic oligonucleotide
  Antisense strand to SEQ ID NO: 2540646
uuaagacccaaaguuacug

SEQ ID NO: 2540648 - RNA, 19 nt, Artificial Sequence
  Description of Artificial Sequence: Synthetic oligonucleotide
  Sense strand starting at position 3269 of SEQ ID NO: 1888545
aaaugcaaguugucugaga

SEQ ID NO: 2540649 - RNA, 19 nt, Artificial Sequence
  Description of Artificial Sequence: Synthetic oligonucleotide
  Antisense strand to SEQ ID NO: 2540648
ucucagacaacuugcauuu

SEQ ID NO: 2540650 - RNA, 19 nt, Artificial Sequence
  Description of Artificial Sequence: Synthetic oligonucleotide
  Sense strand starting at position 1155 of SEQ ID NO: 1888545
gucacugaugccuaacuuu

SEQ ID NO: 2540651 - RNA, 19 nt, Artificial Sequence
  Description of Artificial Sequence: Synthetic oligonucleotide
  Antisense strand to SEQ ID NO: 2540650
aaaguuaggcaucagugac

SEQ ID NO: 2540652 - RNA, 19 nt, Artificial Sequence
  Description of Artificial Sequence: Synthetic oligonucleotide
  Sense strand starting at position 1298 of SEQ ID NO: 1888545
uggugaagguggucucaga

SEQ ID NO: 2540653 - RNA, 19 nt, Artificial Sequence
  Description of Artificial Sequence: Synthetic oligonucleotide
  Antisense strand to SEQ ID NO: 2540652
ucugagaccaccuucacca

SEQ ID NO: 2540654 - RNA, 19 nt, Artificial Sequence
  Description of Artificial Sequence: Synthetic oligonucleotide
  Sense strand starting at position 1306 of SEQ ID NO: 1888545
guggucucagaguauguga

SEQ ID NO: 2540655 - RNA, 19 nt, Artificial Sequence
  Description of Artificial Sequence: Synthetic oligonucleotide
  Antisense strand to SEQ ID NO: 2540654
ucacauacucugagaccac

SEQ ID NO: 2540656 - RNA, 19 nt, Artificial Sequence
  Description of Artificial Sequence: Synthetic oligonucleotide
  Sense strand starting at position 3286 of SEQ ID NO: 1888545
gauguucuuuccuugggau

SEQ ID NO: 2540657 - RNA, 19 nt, Artificial Sequence
  Description of Artificial Sequence: Synthetic oligonucleotide
  Antisense strand to SEQ ID NO: 2540656
aucccaaggaaagaacauc

SEQ ID NO: 2540658 - RNA, 19 nt, Artificial Sequence
  Description of Artificial Sequence: Synthetic oligonucleotide
  Sense strand starting at position 1308 of SEQ ID NO: 1888545
ggucucagaguaugugaca

SEQ ID NO: 2540659 - RNA, 19 nt, Artificial Sequence
  Description of Artificial Sequence: Synthetic oligonucleotide
  Antisense strand to SEQ ID NO: 2540658
ugucacauacucugagacc

SEQ ID NO: 2540660 - RNA, 19 nt, Artificial Sequence
  Description of Artificial Sequence: Synthetic oligonucleotide
  Sense strand starting at position 1181 of SEQ ID NO: 1888545
aguauauguuuagcugaag

SEQ ID NO: 2540661 - RNA, 19 nt, Artificial Sequence
  Description of Artificial Sequence: Synthetic oligonucleotide
  Antisense strand to SEQ ID NO: 2540660
cuucagcuaaacauauacu

SEQ ID NO: 2540662 - RNA, 19 nt, Artificial Sequence
  Description of Artificial Sequence: Synthetic oligonucleotide
  Sense strand starting at position 3270 of SEQ ID NO: 1888545
aaugcaaguugucugagau

SEQ ID NO: 2540663 - RNA, 19 nt, Artificial Sequence
  Description of Artificial Sequence: Synthetic oligonucleotide
  Antisense strand to SEQ ID NO: 2540662
aucucagacaacuugcauu

SEQ ID NO: 2540664 - RNA, 19 nt, Artificial Sequence
  Description of Artificial Sequence: Synthetic oligonucleotide
  Sense strand starting at position 3282 of SEQ ID NO: 1888545
cugagauguucuuuccuug

SEQ ID NO: 2540665 - RNA, 19 nt, Artificial Sequence
  Description of Artificial Sequence: Synthetic oligonucleotide
  Antisense strand to SEQ ID NO: 2540664
caaggaaagaacaucucag

SEQ ID NO: 2540666 - RNA, 19 nt, Artificial Sequence
  Description of Artificial Sequence: Synthetic oligonucleotide
  Sense strand starting at position 2257 of SEQ ID NO: 1888545
gaagcuuucugauugguca

SEQ ID NO: 2540667 - RNA, 19 nt, Artificial Sequence
  Description of Artificial Sequence: Synthetic oligonucleotide
  Antisense strand to SEQ ID NO: 2540666
ugaccaaucagaaagcuuc

SEQ ID NO: 2540668 - RNA, 19 nt, Artificial Sequence
  Description of Artificial Sequence: Synthetic oligonucleotide
  Sense strand starting at position 2104 of SEQ ID NO: 1888545
augcaauucguagaguuau

SEQ ID NO: 2540669 - RNA, 19 nt, Artificial Sequence
  Description of Artificial Sequence: Synthetic oligonucleotide
  Antisense strand to SEQ ID NO: 2540668
auaacucuacgaauugcau

SEQ ID NO: 2540670 - RNA, 19 nt, Artificial Sequence
  Description of Artificial Sequence: Synthetic oligonucleotide
  Sense strand starting at position 2565 of SEQ ID NO: 1888545
agauguaaugagcguuaaa

SEQ ID NO: 2540671 - RNA, 19 nt, Artificial Sequence
  Description of Artificial Sequence: Synthetic oligonucleotide
  Antisense strand to SEQ ID NO: 2540670
uuuaacgcucauuacaucu

SEQ ID NO: 2540672 - RNA, 19 nt, Artificial Sequence
  Description of Artificial Sequence: Synthetic oligonucleotide
  Sense strand starting at position 2926 of SEQ ID NO: 1888545
guaugagugccugggagau

SEQ ID NO: 2540673 - RNA, 19 nt, Artificial Sequence
  Description of Artificial Sequence: Synthetic oligonucleotide
  Antisense strand to SEQ ID NO: 2540672
aucucccaggcacucauac

SEQ ID NO: 2540674 - RNA, 19 nt, Artificial Sequence
  Description of Artificial Sequence: Synthetic oligonucleotide
  Sense strand starting at position 2261 of SEQ ID NO: 1888545
cuuucugauuggucagagu

SEQ ID NO: 2540675 - RNA, 19 nt, Artificial Sequence
  Description of Artificial Sequence: Synthetic oligonucleotide
  Antisense strand to SEQ ID NO: 2540674
acucugaccaaucagaaag

SEQ ID NO: 2540676 - RNA, 19 nt, Artificial Sequence
  Description of Artificial Sequence: Synthetic oligonucleotide
  Sense strand starting at position 3287 of SEQ ID NO: 1888545
auguucuuuccuugggauu

SEQ ID NO: 2540677 - RNA, 19 nt, Artificial Sequence
  Description of Artificial Sequence: Synthetic oligonucleotide
  Antisense strand to SEQ ID NO: 2540676
aaucccaaggaaagaacau

SEQ ID NO: 2540678 - RNA, 19 nt, Artificial Sequence
  Description of Artificial Sequence: Synthetic oligonucleotide
  Sense strand starting at position 2423 of SEQ ID NO: 1888546
guaucuacccauggagaug

SEQ ID NO: 2540679 - RNA, 19 nt, Artificial Sequence
  Description of Artificial Sequence: Synthetic oligonucleotide
  Antisense strand to SEQ ID NO: 2540678
caucuccauggguagauac

SEQ ID NO: 2540680 - RNA, 19 nt, Artificial Sequence
  Description of Artificial Sequence: Synthetic oligonucleotide
  Sense strand starting at position 1718 of SEQ ID NO: 1888546
gccaguugaccugagacua

SEQ ID NO: 2540681 - RNA, 19 nt, Artificial Sequence
  Description of Artificial Sequence: Synthetic oligonucleotide
  Antisense strand to SEQ ID NO: 2540680
uagucucaggucaacuggc

SEQ ID NO: 2540682 - RNA, 19 nt, Artificial Sequence
  Description of Artificial Sequence: Synthetic oligonucleotide
  Sense strand starting at position 1593 of SEQ ID NO: 1888546
agacacuugcccugggaga

SEQ ID NO: 2540683 - RNA, 19 nt, Artificial Sequence
  Description of Artificial Sequence: Synthetic oligonucleotide
  Antisense strand to SEQ ID NO: 2540682
ucucccagggcaagugucu

SEQ ID NO: 2540684 - RNA, 19 nt, Artificial Sequence
  Description of Artificial Sequence: Synthetic oligonucleotide
  Sense strand starting at position 2066 of SEQ ID NO: 1888546
gccagugucccaguagugu

SEQ ID NO: 2540685 - RNA, 19 nt, Artificial Sequence
  Description of Artificial Sequence: Synthetic oligonucleotide
  Antisense strand to SEQ ID NO: 2540684
acacuacugggacacuggc

SEQ ID NO: 2540686 - RNA, 19 nt, Artificial Sequence
  Description of Artificial Sequence: Synthetic oligonucleotide
  Sense strand starting at position 2386 of SEQ ID NO: 1888546
ggucauuccugacucaaga

SEQ ID NO: 2540687 - RNA, 19 nt, Artificial Sequence
  Description of Artificial Sequence: Synthetic oligonucleotide
  Antisense strand to SEQ ID NO: 2540686
ucuugagucaggaaugacc

SEQ ID NO: 2540688 - RNA, 19 nt, Artificial Sequence
  Description of Artificial Sequence: Synthetic oligonucleotide
  Sense strand starting at position 2422 of SEQ ID NO: 1888546
uguaucuacccauggagau

SEQ ID NO: 2540689 - RNA, 19 nt, Artificial Sequence
  Description of Artificial Sequence: Synthetic oligonucleotide
  Antisense strand to SEQ ID NO: 2540688
aucuccauggguagauaca

SEQ ID NO: 2540690 - RNA, 19 nt, Artificial Sequence
  Description of Artificial Sequence: Synthetic oligonucleotide
  Sense strand starting at position 2745 of SEQ ID NO: 1888546
gucucugcuggauaugaca

SEQ ID NO: 2540691 - RNA, 19 nt, Artificial Sequence
  Description of Artificial Sequence: Synthetic oligonucleotide
  Antisense strand to SEQ ID NO: 2540690
ugucauauccagcagagac

SEQ ID NO: 2540692 - RNA, 19 nt, Artificial Sequence
  Description of Artificial Sequence: Synthetic oligonucleotide
  Sense strand starting at position 796 of SEQ ID NO: 1888546
ggagucugaguuuggaauc

SEQ ID NO: 2540693 - RNA, 19 nt, Artificial Sequence
  Description of Artificial Sequence: Synthetic oligonucleotide
  Antisense strand to SEQ ID NO: 2540692
gauuccaaacucagacucc

SEQ ID NO: 2540694 - RNA, 19 nt, Artificial Sequence
  Description of Artificial Sequence: Synthetic oligonucleotide
  Sense strand starting at position 2324 of SEQ ID NO: 1888546
ugaaaucugccacaagugu

SEQ ID NO: 2540695 - RNA, 19 nt, Artificial Sequence
  Description of Artificial Sequence: Synthetic oligonucleotide
  Antisense strand to SEQ ID NO: 2540694
acacuuguggcagauuuca

SEQ ID NO: 2540696 - RNA, 19 nt, Artificial Sequence
  Description of Artificial Sequence: Synthetic oligonucleotide
  Sense strand starting at position 2402 of SEQ ID NO: 1888546
agaggagaguccucugcuu

SEQ ID NO: 2540697 - RNA, 19 nt, Artificial Sequence
  Description of Artificial Sequence: Synthetic oligonucleotide
  Antisense strand to SEQ ID NO: 2540696
aagcagaggacucuccucu

SEQ ID NO: 2540698 - RNA, 19 nt, Artificial Sequence
  Description of Artificial Sequence: Synthetic oligonucleotide
  Sense strand starting at position 3304 of SEQ ID NO: 1888546
cuagaugauucuccugucu

SEQ ID NO: 2540699 - RNA, 19 nt, Artificial Sequence
  Description of Artificial Sequence: Synthetic oligonucleotide
  Antisense strand to SEQ ID NO: 2540698
agacaggagaaucaucuag

SEQ ID NO: 2540700 - RNA, 19 nt, Artificial Sequence
  Description of Artificial Sequence: Synthetic oligonucleotide
  Sense strand starting at position 2743 of SEQ ID NO: 1888546
gugucucugcuggauauga

SEQ ID NO: 2540701 - RNA, 19 nt, Artificial Sequence
  Description of Artificial Sequence: Synthetic oligonucleotide
  Antisense strand to SEQ ID NO: 2540700
ucauauccagcagagacac

SEQ ID NO: 2540702 - RNA, 19 nt, Artificial Sequence
  Description of Artificial Sequence: Synthetic oligonucleotide
  Sense strand starting at position 2774 of SEQ ID NO: 1888546
cccucuuuccagugacucu

SEQ ID NO: 2540703 - RNA, 19 nt, Artificial Sequence
  Description of Artificial Sequence: Synthetic oligonucleotide
  Antisense strand to SEQ ID NO: 2540702
agagucacuggaaagaggg

SEQ ID NO: 2540704 - RNA, 19 nt, Artificial Sequence
  Description of Artificial Sequence: Synthetic oligonucleotide
  Sense strand starting at position 2102 of SEQ ID NO: 1888546
gugccuguucucuaucuga

SEQ ID NO: 2540705 - RNA, 19 nt, Artificial Sequence
  Description of Artificial Sequence: Synthetic oligonucleotide
  Antisense strand to SEQ ID NO: 2540704
ucagauagagaacaggcac

SEQ ID NO: 2540706 - RNA, 19 nt, Artificial Sequence
  Description of Artificial Sequence: Synthetic oligonucleotide
  Sense strand starting at position 2739 of SEQ ID NO: 1888546
ccuggugucucugcuggau

SEQ ID NO: 2540707 - RNA, 19 nt, Artificial Sequence
  Description of Artificial Sequence: Synthetic oligonucleotide
  Antisense strand to SEQ ID NO: 2540706
auccagcagagacaccagg

SEQ ID NO: 2540708 - RNA, 19 nt, Artificial Sequence
  Description of Artificial Sequence: Synthetic oligonucleotide
  Sense strand starting at position 2938 of SEQ ID NO: 1888546
uggugaggcuggagucuau

SEQ ID NO: 2540709 - RNA, 19 nt, Artificial Sequence
  Description of Artificial Sequence: Synthetic oligonucleotide
  Antisense strand to SEQ ID NO: 2540708
auagacuccagccucacca

SEQ ID NO: 2540710 - RNA, 19 nt, Artificial Sequence
  Description of Artificial Sequence: Synthetic oligonucleotide
  Sense strand starting at position 3177 of SEQ ID NO: 1888546
aauggcuucugcguacuua

SEQ ID NO: 2540711 - RNA, 19 nt, Artificial Sequence
  Description of Artificial Sequence: Synthetic oligonucleotide
  Antisense strand to SEQ ID NO: 2540710
uaaguacgcagaagccauu

SEQ ID NO: 2540712 - RNA, 19 nt, Artificial Sequence
  Description of Artificial Sequence: Synthetic oligonucleotide
  Sense strand starting at position 2028 of SEQ ID NO: 1888546
guguguaggcugugaucua

SEQ ID NO: 2540713 - RNA, 19 nt, Artificial Sequence
  Description of Artificial Sequence: Synthetic oligonucleotide
  Antisense strand to SEQ ID NO: 2540712
uagaucacagccuacacac

SEQ ID NO: 2540714 - RNA, 19 nt, Artificial Sequence
  Description of Artificial Sequence: Synthetic oligonucleotide
  Sense strand starting at position 2322 of SEQ ID NO: 1888546
ucugaaaucugccacaagu

SEQ ID NO: 2540715 - RNA, 19 nt, Artificial Sequence
  Description of Artificial Sequence: Synthetic oligonucleotide
  Antisense strand to SEQ ID NO: 2540714
acuuguggcagauuucaga

SEQ ID NO: 2540716 - RNA, 19 nt, Artificial Sequence
  Description of Artificial Sequence: Synthetic oligonucleotide
  Sense strand starting at position 797 of SEQ ID NO: 1888546
gagucugaguuuggaaucu

SEQ ID NO: 2540717 - RNA, 19 nt, Artificial Sequence
  Description of Artificial Sequence: Synthetic oligonucleotide
  Antisense strand to SEQ ID NO: 2540716
agauuccaaacucagacuc

SEQ ID NO: 2540718 - RNA, 19 nt, Artificial Sequence
  Description of Artificial Sequence: Synthetic oligonucleotide
  Sense strand starting at position 2705 of SEQ ID NO: 1888546
uccucauggucauguccaa

SEQ ID NO: 2540719 - RNA, 19 nt, Artificial Sequence
  Description of Artificial Sequence: Synthetic oligonucleotide
  Antisense strand to SEQ ID NO: 2540718
uuggacaugaccaugagga

SEQ ID NO: 2540720 - RNA, 19 nt, Artificial Sequence
  Description of Artificial Sequence: Synthetic oligonucleotide
  Sense strand starting at position 2741 of SEQ ID NO: 1888546
uggugucucugcuggauau

SEQ ID NO: 2540721 - RNA, 19 nt, Artificial Sequence
  Description of Artificial Sequence: Synthetic oligonucleotide
  Antisense strand to SEQ ID NO: 2540720
auauccagcagagacacca

SEQ ID NO: 2540722 - RNA, 19 nt, Artificial Sequence
  Description of Artificial Sequence: Synthetic oligonucleotide
  Sense strand starting at position 2857 of SEQ ID NO: 1888547
ggcaguagaaccuaaggua

SEQ ID NO: 2540723 - RNA, 19 nt, Artificial Sequence
  Description of Artificial Sequence: Synthetic oligonucleotide
  Antisense strand to SEQ ID NO: 2540722
uaccuuagguucuacugcc

SEQ ID NO: 2540724 - RNA, 19 nt, Artificial Sequence
  Description of Artificial Sequence: Synthetic oligonucleotide
  Sense strand starting at position 1406 of SEQ ID NO: 1888547
ucucuaaauccuggagauc

SEQ ID NO: 2540725 - RNA, 19 nt, Artificial Sequence
  Description of Artificial Sequence: Synthetic oligonucleotide
  Antisense strand to SEQ ID NO: 2540724
gaucuccaggauuuagaga

SEQ ID NO: 2540726 - RNA, 19 nt, Artificial Sequence
  Description of Artificial Sequence: Synthetic oligonucleotide
  Sense strand starting at position 1367 of SEQ ID NO: 1888547
acuccuugccuuuaggaaa

SEQ ID NO: 2540727 - RNA, 19 nt, Artificial Sequence
  Description of Artificial Sequence: Synthetic oligonucleotide
  Antisense strand to SEQ ID NO: 2540726
uuuccuaaaggcaaggagu

SEQ ID NO: 2540728 - RNA, 19 nt, Artificial Sequence
  Description of Artificial Sequence: Synthetic oligonucleotide
  Sense strand starting at position 2763 of SEQ ID NO: 1888547
gucccaguuccagaaauua

SEQ ID NO: 2540729 - RNA, 19 nt, Artificial Sequence
  Description of Artificial Sequence: Synthetic oligonucleotide
  Antisense strand to SEQ ID NO: 2540728
uaauuucuggaacugggac

SEQ ID NO: 2540730 - RNA, 19 nt, Artificial Sequence
  Description of Artificial Sequence: Synthetic oligonucleotide
  Sense strand starting at position 1395 of SEQ ID NO: 1888547
ucaugaagguuucucuaaa

SEQ ID NO: 2540731 - RNA, 19 nt, Artificial Sequence
  Description of Artificial Sequence: Synthetic oligonucleotide
  Antisense strand to SEQ ID NO: 2540730
uuuagagaaaccuucauga

SEQ ID NO: 2540732 - RNA, 19 nt, Artificial Sequence
  Description of Artificial Sequence: Synthetic oligonucleotide
  Sense strand starting at position 1597 of SEQ ID NO: 1888547
ccaccucaccugugaagga

SEQ ID NO: 2540733 - RNA, 19 nt, Artificial Sequence
  Description of Artificial Sequence: Synthetic oligonucleotide
  Antisense strand to SEQ ID NO: 2540732
uccuucacaggugaggugg

SEQ ID NO: 2540734 - RNA, 19 nt, Artificial Sequence
  Description of Artificial Sequence: Synthetic oligonucleotide
  Sense strand starting at position 3497 of SEQ ID NO: 1888547
ccuagauccucagucugaa

SEQ ID NO: 2540735 - RNA, 19 nt, Artificial Sequence
  Description of Artificial Sequence: Synthetic oligonucleotide
  Antisense strand to SEQ ID NO: 2540734
uucagacugaggaucuagg

SEQ ID NO: 2540736 - RNA, 19 nt, Artificial Sequence
  Description of Artificial Sequence: Synthetic oligonucleotide
  Sense strand starting at position 1657 of SEQ ID NO: 1888547
ucccaaaugccugaagcau

SEQ ID NO: 2540737 - RNA, 19 nt, Artificial Sequence
  Description of Artificial Sequence: Synthetic oligonucleotide
  Antisense strand to SEQ ID NO: 2540736
augcuucaggcauuuggga

SEQ ID NO: 2540738 - RNA, 19 nt, Artificial Sequence
  Description of Artificial Sequence: Synthetic oligonucleotide
  Sense strand starting at position 1380 of SEQ ID NO: 1888547
aggaaauggugaccgucau

SEQ ID NO: 2540739 - RNA, 19 nt, Artificial Sequence
  Description of Artificial Sequence: Synthetic oligonucleotide
  Antisense strand to SEQ ID NO: 2540738
augacggucaccauuuccu

SEQ ID NO: 2540740 - RNA, 19 nt, Artificial Sequence
  Description of Artificial Sequence: Synthetic oligonucleotide
  Sense strand starting at position 2024 of SEQ ID NO: 1888547
gucccagagggcugaaauu

SEQ ID NO: 2540741 - RNA, 19 nt, Artificial Sequence
  Description of Artificial Sequence: Synthetic oligonucleotide
  Antisense strand to SEQ ID NO: 2540740
aauuucagcccucugggac

SEQ ID NO: 2540742 - RNA, 19 nt, Artificial Sequence
  Description of Artificial Sequence: Synthetic oligonucleotide
  Sense strand starting at position 2390 of SEQ ID NO: 1888547
gucagcuugcuauaagaca

SEQ ID NO: 2540743 - RNA, 19 nt, Artificial Sequence
  Description of Artificial Sequence: Synthetic oligonucleotide
  Antisense strand to SEQ ID NO: 2540742
ugucuuauagcaagcugac

SEQ ID NO: 2540744 - RNA, 19 nt, Artificial Sequence
  Description of Artificial Sequence: Synthetic oligonucleotide
  Sense strand starting at position 177 of SEQ ID NO: 1888547
ggcucugcagcugagaaua

SEQ ID NO: 2540745 - RNA, 19 nt, Artificial Sequence
  Description of Artificial Sequence: Synthetic oligonucleotide
  Antisense strand to SEQ ID NO: 2540744
uauucucagcugcagagcc

SEQ ID NO: 2540746 - RNA, 19 nt, Artificial Sequence
  Description of Artificial Sequence: Synthetic oligonucleotide
  Sense strand starting at position 319 of SEQ ID NO: 1888547
cccuuauaagacuggcuuu

SEQ ID NO: 2540747 - RNA, 19 nt, Artificial Sequence
  Description of Artificial Sequence: Synthetic oligonucleotide
  Antisense strand to SEQ ID NO: 2540746
aaagccagucuuauaaggg

SEQ ID NO: 2540748 - RNA, 19 nt, Artificial Sequence
  Description of Artificial Sequence: Synthetic oligonucleotide
  Sense strand starting at position 3861 of SEQ ID NO: 1888547
cacacagucucggugaaac

SEQ ID NO: 2540749 - RNA, 19 nt, Artificial Sequence
  Description of Artificial Sequence: Synthetic oligonucleotide
  Antisense strand to SEQ ID NO: 2540748
guuucaccgagacugugug

SEQ ID NO: 2540750 - RNA, 19 nt, Artificial Sequence
  Description of Artificial Sequence: Synthetic oligonucleotide
  Sense strand starting at position 1361 of SEQ ID NO: 1888547
ugaggaacuccuugccuuu

SEQ ID NO: 2540751 - RNA, 19 nt, Artificial Sequence
  Description of Artificial Sequence: Synthetic oligonucleotide
  Antisense strand to SEQ ID NO: 2540750
aaaggcaaggaguuccuca

SEQ ID NO: 2540752 - RNA, 19 nt, Artificial Sequence
  Description of Artificial Sequence: Synthetic oligonucleotide
  Sense strand starting at position 3860 of SEQ ID NO: 1888547
ccacacagucucggugaaa

SEQ ID NO: 2540753 - RNA, 19 nt, Artificial Sequence
  Description of Artificial Sequence: Synthetic oligonucleotide
  Antisense strand to SEQ ID NO: 2540752
uuucaccgagacugugugg

SEQ ID NO: 2540754 - RNA, 19 nt, Artificial Sequence
  Description of Artificial Sequence: Synthetic oligonucleotide
  Sense strand starting at position 2102 of SEQ ID NO: 1888547
cuccacuuguuggcagaau

SEQ ID NO: 2540755 - RNA, 19 nt, Artificial Sequence
  Description of Artificial Sequence: Synthetic oligonucleotide
  Antisense strand to SEQ ID NO: 2540754
auucugccaacaaguggag

SEQ ID NO: 2540756 - RNA, 19 nt, Artificial Sequence
  Description of Artificial Sequence: Synthetic oligonucleotide
  Sense strand starting at position 2781 of SEQ ID NO: 1888547
auauuaaugcaaggcaugu

SEQ ID NO: 2540757 - RNA, 19 nt, Artificial Sequence
  Description of Artificial Sequence: Synthetic oligonucleotide
  Antisense strand to SEQ ID NO: 2540756
acaugccuugcauuaauau

SEQ ID NO: 2540758 - RNA, 19 nt, Artificial Sequence
  Description of Artificial Sequence: Synthetic oligonucleotide
  Sense strand starting at position 1180 of SEQ ID NO: 1888547
gggugaaccuuggcucagu

SEQ ID NO: 2540759 - RNA, 19 nt, Artificial Sequence
  Description of Artificial Sequence: Synthetic oligonucleotide
  Antisense strand to SEQ ID NO: 2540758
acugagccaagguucaccc

SEQ ID NO: 2540760 - RNA, 19 nt, Artificial Sequence
  Description of Artificial Sequence: Synthetic oligonucleotide
  Sense strand starting at position 1875 of SEQ ID NO: 1888547
ccagaaggccugugcucaa

SEQ ID NO: 2540761 - RNA, 19 nt, Artificial Sequence
  Description of Artificial Sequence: Synthetic oligonucleotide
  Antisense strand to SEQ ID NO: 2540760
uugagcacaggccuucugg

SEQ ID NO: 2540762 - RNA, 19 nt, Artificial Sequence
  Description of Artificial Sequence: Synthetic oligonucleotide
  Sense strand starting at position 176 of SEQ ID NO: 1888547
aggcucugcagcugagaau

SEQ ID NO: 2540763 - RNA, 19 nt, Artificial Sequence
  Description of Artificial Sequence: Synthetic oligonucleotide
  Antisense strand to SEQ ID NO: 2540762
auucucagcugcagagccu

SEQ ID NO: 2540764 - RNA, 19 nt, Artificial Sequence
  Description of Artificial Sequence: Synthetic oligonucleotide
  Sense strand starting at position 3691 of SEQ ID NO: 1888547
gcagcuaaucaucggagua

SEQ ID NO: 2540765 - RNA, 19 nt, Artificial Sequence
  Description of Artificial Sequence: Synthetic oligonucleotide
  Antisense strand to SEQ ID NO: 2540764
uacuccgaugauuagcugc

SEQ ID NO: 2540766 - RNA, 19 nt, Artificial Sequence
  Description of Artificial Sequence: Synthetic oligonucleotide
  Sense strand starting at position 3690 of SEQ ID NO: 1888547
ggcagcuaaucaucggagu

SEQ ID NO: 2540767 - RNA, 19 nt, Artificial Sequence
  Description of Artificial Sequence: Synthetic oligonucleotide
  Antisense strand to SEQ ID NO: 2540766
acuccgaugauuagcugcc

SEQ ID NO: 2540768 - RNA, 19 nt, Artificial Sequence
  Description of Artificial Sequence: Synthetic oligonucleotide
  Sense strand starting at position 2101 of SEQ ID NO: 1888547
gcuccacuuguuggcagaa

SEQ ID NO: 2540769 - RNA, 19 nt, Artificial Sequence
  Description of Artificial Sequence: Synthetic oligonucleotide
  Antisense strand to SEQ ID NO: 2540768
uucugccaacaaguggagc

SEQ ID NO: 2540770 - RNA, 19 nt, Artificial Sequence
  Description of Artificial Sequence: Synthetic oligonucleotide
  Sense strand starting at position 131 of SEQ ID NO: 1888547
gaagccaugucagaaagaa

SEQ ID NO: 2540771 - RNA, 19 nt, Artificial Sequence
  Description of Artificial Sequence: Synthetic oligonucleotide
  Antisense strand to SEQ ID NO: 2540770
uucuuucugacauggcuuc

SEQ ID NO: 2540772 - RNA, 19 nt, Artificial Sequence
  Description of Artificial Sequence: Synthetic oligonucleotide
  Sense strand starting at position 476 of SEQ ID NO: 1888547
aguggaguguucccugcau

SEQ ID NO: 2540773 - RNA, 19 nt, Artificial Sequence
  Description of Artificial Sequence: Synthetic oligonucleotide
  Antisense strand to SEQ ID NO: 2540772
augcagggaacacuccacu

SEQ ID NO: 2540774 - RNA, 19 nt, Artificial Sequence
  Description of Artificial Sequence: Synthetic oligonucleotide
  Sense strand starting at position 478 of SEQ ID NO: 1888547
uggaguguucccugcauuc

SEQ ID NO: 2540775 - RNA, 19 nt, Artificial Sequence
  Description of Artificial Sequence: Synthetic oligonucleotide
  Antisense strand to SEQ ID NO: 2540774
gaaugcagggaacacucca

SEQ ID NO: 2540776 - RNA, 19 nt, Artificial Sequence
  Description of Artificial Sequence: Synthetic oligonucleotide
  Sense strand starting at position 2254 of SEQ ID NO: 1888547
gaggauuucucaugugcug

SEQ ID NO: 2540777 - RNA, 19 nt, Artificial Sequence
  Description of Artificial Sequence: Synthetic oligonucleotide
  Antisense strand to SEQ ID NO: 2540776
cagcacaugagaaauccuc

SEQ ID NO: 2540778 - RNA, 19 nt, Artificial Sequence
  Description of Artificial Sequence: Synthetic oligonucleotide
  Sense strand starting at position 3428 of SEQ ID NO: 1888547
agacucacgucacaggauu

SEQ ID NO: 2540779 - RNA, 19 nt, Artificial Sequence
  Description of Artificial Sequence: Synthetic oligonucleotide
  Antisense strand to SEQ ID NO: 2540778
aauccugugacgugagucu

SEQ ID NO: 2540780 - RNA, 19 nt, Artificial Sequence
  Description of Artificial Sequence: Synthetic oligonucleotide
  Sense strand starting at position 1405 of SEQ ID NO: 1888547
uucucuaaauccuggagau

SEQ ID NO: 2540781 - RNA, 19 nt, Artificial Sequence
  Description of Artificial Sequence: Synthetic oligonucleotide
  Antisense strand to SEQ ID NO: 2540780
aucuccaggauuuagagaa

SEQ ID NO: 2540782 - RNA, 19 nt, Artificial Sequence
  Description of Artificial Sequence: Synthetic oligonucleotide
  Sense strand starting at position 2103 of SEQ ID NO: 1888547
uccacuuguuggcagaauu

SEQ ID NO: 2540783 - RNA, 19 nt, Artificial Sequence
  Description of Artificial Sequence: Synthetic oligonucleotide
  Antisense strand to SEQ ID NO: 2540782
aauucugccaacaagugga

SEQ ID NO: 2540784 - RNA, 19 nt, Artificial Sequence
  Description of Artificial Sequence: Synthetic oligonucleotide
  Sense strand starting at position 2388 of SEQ ID NO: 1888547
aggucagcuugcuauaaga

SEQ ID NO: 2540785 - RNA, 19 nt, Artificial Sequence
  Description of Artificial Sequence: Synthetic oligonucleotide
  Antisense strand to SEQ ID NO: 2540784
ucuuauagcaagcugaccu

SEQ ID NO: 2540786 - RNA, 19 nt, Artificial Sequence
  Description of Artificial Sequence: Synthetic oligonucleotide
  Sense strand starting at position 2033 of SEQ ID NO: 1888547
ggcugaaauugaggcaucu

SEQ ID NO: 2540787 - RNA, 19 nt, Artificial Sequence
  Description of Artificial Sequence: Synthetic oligonucleotide
  Antisense strand to SEQ ID NO: 2540786
agaugccucaauuucagcc

SEQ ID NO: 2540788 - RNA, 19 nt, Artificial Sequence
  Description of Artificial Sequence: Synthetic oligonucleotide
  Sense strand starting at position 2332 of SEQ ID NO: 1888547
ugaauaggcucaugugguu

SEQ ID NO: 2540789 - RNA, 19 nt, Artificial Sequence
  Description of Artificial Sequence: Synthetic oligonucleotide
  Antisense strand to SEQ ID NO: 2540788
aaccacaugagccuauuca

SEQ ID NO: 2540790 - RNA, 19 nt, Artificial Sequence
  Description of Artificial Sequence: Synthetic oligonucleotide
  Sense strand starting at position 3871 of SEQ ID NO: 1888547
cggugaaacucgugcuuac

SEQ ID NO: 2540791 - RNA, 19 nt, Artificial Sequence
  Description of Artificial Sequence: Synthetic oligonucleotide
  Antisense strand to SEQ ID NO: 2540790
guaagcacgaguuucaccg

SEQ ID NO: 2540792 - RNA, 19 nt, Artificial Sequence
  Description of Artificial Sequence: Synthetic oligonucleotide
  Sense strand starting at position 2210 of SEQ ID NO: 1888548
agcgaauuugccgagaguc

SEQ ID NO: 2540793 - RNA, 19 nt, Artificial Sequence
  Description of Artificial Sequence: Synthetic oligonucleotide
  Antisense strand to SEQ ID NO: 2540792
gacucucggcaaauucgcu

SEQ ID NO: 2540794 - RNA, 19 nt, Artificial Sequence
  Description of Artificial Sequence: Synthetic oligonucleotide
  Sense strand starting at position 3552 of SEQ ID NO: 1888548
agagguuccaaaugggagu

SEQ ID NO: 2540795 - RNA, 19 nt, Artificial Sequence
  Description of Artificial Sequence: Synthetic oligonucleotide
  Antisense strand to SEQ ID NO: 2540794
acucccauuuggaaccucu

SEQ ID NO: 2540796 - RNA, 19 nt, Artificial Sequence
  Description of Artificial Sequence: Synthetic oligonucleotide
  Sense strand starting at position 930 of SEQ ID NO: 1888548
ugaagugauggauggcaga

SEQ ID NO: 2540797 - RNA, 19 nt, Artificial Sequence
  Description of Artificial Sequence: Synthetic oligonucleotide
  Antisense strand to SEQ ID NO: 2540796
ucugccauccaucacuuca

SEQ ID NO: 2540798 - RNA, 19 nt, Artificial Sequence
  Description of Artificial Sequence: Synthetic oligonucleotide
  Sense strand starting at position 2988 of SEQ ID NO: 1888548
gagccuccugaugggauaa

SEQ ID NO: 2540799 - RNA, 19 nt, Artificial Sequence
  Description of Artificial Sequence: Synthetic oligonucleotide
  Antisense strand to SEQ ID NO: 2540798
uuaucccaucaggaggcuc

SEQ ID NO: 2540800 - RNA, 19 nt, Artificial Sequence
  Description of Artificial Sequence: Synthetic oligonucleotide
  Sense strand starting at position 3069 of SEQ ID NO: 1888548
ggaggauguggcuggagau

SEQ ID NO: 2540801 - RNA, 19 nt, Artificial Sequence
  Description of Artificial Sequence: Synthetic oligonucleotide
  Antisense strand to SEQ ID NO: 2540800
aucuccagccacauccucc

SEQ ID NO: 2540802 - RNA, 19 nt, Artificial Sequence
  Description of Artificial Sequence: Synthetic oligonucleotide
  Sense strand starting at position 2947 of SEQ ID NO: 1888548
aggcguauccguaauggcu

SEQ ID NO: 2540803 - RNA, 19 nt, Artificial Sequence
  Description of Artificial Sequence: Synthetic oligonucleotide
  Antisense strand to SEQ ID NO: 2540802
agccauuacggauacgccu

SEQ ID NO: 2540804 - RNA, 19 nt, Artificial Sequence
  Description of Artificial Sequence: Synthetic oligonucleotide
  Sense strand starting at position 3811 of SEQ ID NO: 1888548
ggcagaugccaauauggua

SEQ ID NO: 2540805 - RNA, 19 nt, Artificial Sequence
  Description of Artificial Sequence: Synthetic oligonucleotide
  Antisense strand to SEQ ID NO: 2540804
uaccauauuggcaucugcc

SEQ ID NO: 2540806 - RNA, 19 nt, Artificial Sequence
  Description of Artificial Sequence: Synthetic oligonucleotide
  Sense strand starting at position 995 of SEQ ID NO: 1888548
aguagauacccucagccuu

SEQ ID NO: 2540807 - RNA, 19 nt, Artificial Sequence
  Description of Artificial Sequence: Synthetic oligonucleotide
  Antisense strand to SEQ ID NO: 2540806
aaggcugaggguaucuacu

SEQ ID NO: 2540808 - RNA, 19 nt, Artificial Sequence
  Description of Artificial Sequence: Synthetic oligonucleotide
  Sense strand starting at position 2813 of SEQ ID NO: 1888548
uugugugcccguuccuuua

SEQ ID NO: 2540809 - RNA, 19 nt, Artificial Sequence
  Description of Artificial Sequence: Synthetic oligonucleotide
  Antisense strand to SEQ ID NO: 2540808
uaaaggaacgggcacacaa

SEQ ID NO: 2540810 - RNA, 19 nt, Artificial Sequence
  Description of Artificial Sequence: Synthetic oligonucleotide
  Sense strand starting at position 3933 of SEQ ID NO: 1888548
ccaguauaagcccagugau

SEQ ID NO: 2540811 - RNA, 19 nt, Artificial Sequence
  Description of Artificial Sequence: Synthetic oligonucleotide
  Antisense strand to SEQ ID NO: 2540810
aucacugggcuuauacugg

SEQ ID NO: 2540812 - RNA, 19 nt, Artificial Sequence
  Description of Artificial Sequence: Synthetic oligonucleotide
  Sense strand starting at position 3943 of SEQ ID NO: 1888548
cccagugaugugugaagaa

SEQ ID NO: 2540813 - RNA, 19 nt, Artificial Sequence
  Description of Artificial Sequence: Synthetic oligonucleotide
  Antisense strand to SEQ ID NO: 2540812
uucuucacacaucacuggg

SEQ ID NO: 2540814 - RNA, 19 nt, Artificial Sequence
  Description of Artificial Sequence: Synthetic oligonucleotide
  Sense strand starting at position 2234 of SEQ ID NO: 1888548
gucugaauccauugacucu

SEQ ID NO: 2540815 - RNA, 19 nt, Artificial Sequence
  Description of Artificial Sequence: Synthetic oligonucleotide
  Antisense strand to SEQ ID NO: 2540814
agagucaauggauucagac

SEQ ID NO: 2540816 - RNA, 19 nt, Artificial Sequence
  Description of Artificial Sequence: Synthetic oligonucleotide
  Sense strand starting at position 3905 of SEQ ID NO: 1888548
cuagaaaccugggaaggaa

SEQ ID NO: 2540817 - RNA, 19 nt, Artificial Sequence
  Description of Artificial Sequence: Synthetic oligonucleotide
  Antisense strand to SEQ ID NO: 2540816
uuccuucccagguuucuag

SEQ ID NO: 2540818 - RNA, 19 nt, Artificial Sequence
  Description of Artificial Sequence: Synthetic oligonucleotide
  Sense strand starting at position 1159 of SEQ ID NO: 1888548
gggugcgcucuggaagaau

SEQ ID NO: 2540819 - RNA, 19 nt, Artificial Sequence
  Description of Artificial Sequence: Synthetic oligonucleotide
  Antisense strand to SEQ ID NO: 2540818
auucuuccagagcgcaccc

SEQ ID NO: 2540820 - RNA, 19 nt, Artificial Sequence
  Description of Artificial Sequence: Synthetic oligonucleotide
  Sense strand starting at position 1170 of SEQ ID NO: 1888548
ggaagaaucucccagggag

SEQ ID NO: 2540821 - RNA, 19 nt, Artificial Sequence
  Description of Artificial Sequence: Synthetic oligonucleotide
  Antisense strand to SEQ ID NO: 2540820
cucccugggagauucuucc

SEQ ID NO: 2540822 - RNA, 19 nt, Artificial Sequence
  Description of Artificial Sequence: Synthetic oligonucleotide
  Sense strand starting at position 876 of SEQ ID NO: 1888548
ggaagcuuaaugugccaca

SEQ ID NO: 2540823 - RNA, 19 nt, Artificial Sequence
  Description of Artificial Sequence: Synthetic oligonucleotide
  Antisense strand to SEQ ID NO: 2540822
uguggcacauuaagcuucc

SEQ ID NO: 2540824 - RNA, 19 nt, Artificial Sequence
  Description of Artificial Sequence: Synthetic oligonucleotide
  Sense strand starting at position 309 of SEQ ID NO: 1888548
gcgacccuuucucuacaaa

SEQ ID NO: 2540825 - RNA, 19 nt, Artificial Sequence
  Description of Artificial Sequence: Synthetic oligonucleotide
  Antisense strand to SEQ ID NO: 2540824
uuuguagagaaagggucgc

SEQ ID NO: 2540826 - RNA, 19 nt, Artificial Sequence
  Description of Artificial Sequence: Synthetic oligonucleotide
  Sense strand starting at position 1052 of SEQ ID NO: 1888548
acucaauccuuggcagcau

SEQ ID NO: 2540827 - RNA, 19 nt, Artificial Sequence
  Description of Artificial Sequence: Synthetic oligonucleotide
  Antisense strand to SEQ ID NO: 2540826
augcugccaaggauugagu

SEQ ID NO: 2540828 - RNA, 19 nt, Artificial Sequence
  Description of Artificial Sequence: Synthetic oligonucleotide
  Sense strand starting at position 3624 of SEQ ID NO: 1888548
ggaggacuuugggauuaag

SEQ ID NO: 2540829 - RNA, 19 nt, Artificial Sequence
  Description of Artificial Sequence: Synthetic oligonucleotide
  Antisense strand to SEQ ID NO: 2540828
cuuaaucccaaaguccucc

SEQ ID NO: 2540830 - RNA, 19 nt, Artificial Sequence
  Description of Artificial Sequence: Synthetic oligonucleotide
  Sense strand starting at position 2820 of SEQ ID NO: 1888548
cccguuccuuuacugagau

SEQ ID NO: 2540831 - RNA, 19 nt, Artificial Sequence
  Description of Artificial Sequence: Synthetic oligonucleotide
  Antisense strand to SEQ ID NO: 2540830
aucucaguaaaggaacggg

SEQ ID NO: 2540832 - RNA, 19 nt, Artificial Sequence
  Description of Artificial Sequence: Synthetic oligonucleotide
  Sense strand starting at position 3941 of SEQ ID NO: 1888548
agcccagugaugugugaag

SEQ ID NO: 2540833 - RNA, 19 nt, Artificial Sequence
  Description of Artificial Sequence: Synthetic oligonucleotide
  Antisense strand to SEQ ID NO: 2540832
cuucacacaucacugggcu

SEQ ID NO: 2540834 - RNA, 19 nt, Artificial Sequence
  Description of Artificial Sequence: Synthetic oligonucleotide
  Sense strand starting at position 1157 of SEQ ID NO: 1888548
aagggugcgcucuggaaga

SEQ ID NO: 2540835 - RNA, 19 nt, Artificial Sequence
  Description of Artificial Sequence: Synthetic oligonucleotide
  Antisense strand to SEQ ID NO: 2540834
ucuuccagagcgcacccuu

SEQ ID NO: 2540836 - RNA, 19 nt, Artificial Sequence
  Description of Artificial Sequence: Synthetic oligonucleotide
  Sense strand starting at position 970 of SEQ ID NO: 1888548
cuuucaguucgguacgauu

SEQ ID NO: 2540837 - RNA, 19 nt, Artificial Sequence
  Description of Artificial Sequence: Synthetic oligonucleotide
  Antisense strand to SEQ ID NO: 2540836
aaucguaccgaacugaaag

SEQ ID NO: 2540838 - RNA, 19 nt, Artificial Sequence
  Description of Artificial Sequence: Synthetic oligonucleotide
  Sense strand starting at position 3936 of SEQ ID NO: 1888548
guauaagcccagugaugug

SEQ ID NO: 2540839 - RNA, 19 nt, Artificial Sequence
  Description of Artificial Sequence: Synthetic oligonucleotide
  Antisense strand to SEQ ID NO: 2540838
cacaucacugggcuuauac

SEQ ID NO: 2540840 - RNA, 19 nt, Artificial Sequence
  Description of Artificial Sequence: Synthetic oligonucleotide
  Sense strand starting at position 3468 of SEQ ID NO: 1888548
gagaauugcuguccuggcu

SEQ ID NO: 2540841 - RNA, 19 nt, Artificial Sequence
  Description of Artificial Sequence: Synthetic oligonucleotide
  Antisense strand to SEQ ID NO: 2540840
agccaggacagcaauucuc

SEQ ID NO: 2540842 - RNA, 19 nt, Artificial Sequence
  Description of Artificial Sequence: Synthetic oligonucleotide
  Sense strand starting at position 969 of SEQ ID NO: 1888548
acuuucaguucgguacgau

SEQ ID NO: 2540843 - RNA, 19 nt, Artificial Sequence
  Description of Artificial Sequence: Synthetic oligonucleotide
  Antisense strand to SEQ ID NO: 2540842
aucguaccgaacugaaagu

SEQ ID NO: 2540844 - RNA, 19 nt, Artificial Sequence
  Description of Artificial Sequence: Synthetic oligonucleotide
  Sense strand starting at position 299 of SEQ ID NO: 1888548
gcaauauagcgcgacccuu

SEQ ID NO: 2540845 - RNA, 19 nt, Artificial Sequence
  Description of Artificial Sequence: Synthetic oligonucleotide
  Antisense strand to SEQ ID NO: 2540844
aagggucgcgcuauauugc

SEQ ID NO: 2540846 - RNA, 19 nt, Artificial Sequence
  Description of Artificial Sequence: Synthetic oligonucleotide
  Sense strand starting at position 3570 of SEQ ID NO: 1888548
ugggcuuccuccuagaaag

SEQ ID NO: 2540847 - RNA, 19 nt, Artificial Sequence
  Description of Artificial Sequence: Synthetic oligonucleotide
  Antisense strand to SEQ ID NO: 2540846
cuuucuaggaggaagccca

SEQ ID NO: 2540848 - RNA, 19 nt, Artificial Sequence
  Description of Artificial Sequence: Synthetic oligonucleotide
  Sense strand starting at position 2987 of SEQ ID NO: 1888548
agagccuccugaugggaua

SEQ ID NO: 2540849 - RNA, 19 nt, Artificial Sequence
  Description of Artificial Sequence: Synthetic oligonucleotide
  Antisense strand to SEQ ID NO: 2540848
uaucccaucaggaggcucu

SEQ ID NO: 2540850 - RNA, 19 nt, Artificial Sequence
  Description of Artificial Sequence: Synthetic oligonucleotide
  Sense strand starting at position 3082 of SEQ ID NO: 1888548
ggagauggcucaugguuaa

SEQ ID NO: 2540851 - RNA, 19 nt, Artificial Sequence
  Description of Artificial Sequence: Synthetic oligonucleotide
  Antisense strand to SEQ ID NO: 2540850
uuaaccaugagccaucucc

SEQ ID NO: 2540852 - RNA, 19 nt, Artificial Sequence
  Description of Artificial Sequence: Synthetic oligonucleotide
  Sense strand starting at position 2209 of SEQ ID NO: 1888548
gagcgaauuugccgagagu

SEQ ID NO: 2540853 - RNA, 19 nt, Artificial Sequence
  Description of Artificial Sequence: Synthetic oligonucleotide
  Antisense strand to SEQ ID NO: 2540852
acucucggcaaauucgcuc

SEQ ID NO: 2540854 - RNA, 19 nt, Artificial Sequence
  Description of Artificial Sequence: Synthetic oligonucleotide
  Sense strand starting at position 2821 of SEQ ID NO: 1888548
ccguuccuuuacugagauu

SEQ ID NO: 2540855 - RNA, 19 nt, Artificial Sequence
  Description of Artificial Sequence: Synthetic oligonucleotide
  Antisense strand to SEQ ID NO: 2540854
aaucucaguaaaggaacgg

SEQ ID NO: 2540856 - RNA, 19 nt, Artificial Sequence
  Description of Artificial Sequence: Synthetic oligonucleotide
  Sense strand starting at position 841 of SEQ ID NO: 1888548
uuuguacuguucgaaguuu

SEQ ID NO: 2540857 - RNA, 19 nt, Artificial Sequence
  Description of Artificial Sequence: Synthetic oligonucleotide
  Antisense strand to SEQ ID NO: 2540856
aaacuucgaacaguacaaa

SEQ ID NO: 2540858 - RNA, 19 nt, Artificial Sequence
  Description of Artificial Sequence: Synthetic oligonucleotide
  Sense strand starting at position 2464 of SEQ ID NO: 1888549
ggguaaugagccuacugga

SEQ ID NO: 2540859 - RNA, 19 nt, Artificial Sequence
  Description of Artificial Sequence: Synthetic oligonucleotide
  Antisense strand to SEQ ID NO: 2540858
uccaguaggcucauuaccc

SEQ ID NO: 2540860 - RNA, 19 nt, Artificial Sequence
  Description of Artificial Sequence: Synthetic oligonucleotide
  Sense strand starting at position 943 of SEQ ID NO: 1888549
ggagaauccuuccuuaugg

SEQ ID NO: 2540861 - RNA, 19 nt, Artificial Sequence
  Description of Artificial Sequence: Synthetic oligonucleotide
  Antisense strand to SEQ ID NO: 2540860
ccauaaggaaggauucucc

SEQ ID NO: 2540862 - RNA, 19 nt, Artificial Sequence
  Description of Artificial Sequence: Synthetic oligonucleotide
  Sense strand starting at position 2296 of SEQ ID NO: 1888549
agaaguuaccaugacuguu

SEQ ID NO: 2540863 - RNA, 19 nt, Artificial Sequence
  Description of Artificial Sequence: Synthetic oligonucleotide
  Antisense strand to SEQ ID NO: 2540862
aacagucaugguaacuucu

SEQ ID NO: 2540864 - RNA, 19 nt, Artificial Sequence
  Description of Artificial Sequence: Synthetic oligonucleotide
  Sense strand starting at position 2409 of SEQ ID NO: 1888549
uuuggucuacauuauauca

SEQ ID NO: 2540865 - RNA, 19 nt, Artificial Sequence
  Description of Artificial Sequence: Synthetic oligonucleotide
  Antisense strand to SEQ ID NO: 2540864
ugauauaauguagaccaaa

SEQ ID NO: 2540866 - RNA, 19 nt, Artificial Sequence
  Description of Artificial Sequence: Synthetic oligonucleotide
  Sense strand starting at position 655 of SEQ ID NO: 1888549
gugucauuucuuggcagag

SEQ ID NO: 2540867 - RNA, 19 nt, Artificial Sequence
  Description of Artificial Sequence: Synthetic oligonucleotide
  Antisense strand to SEQ ID NO: 2540866
cucugccaagaaaugacac

SEQ ID NO: 2540868 - RNA, 19 nt, Artificial Sequence
  Description of Artificial Sequence: Synthetic oligonucleotide
  Sense strand starting at position 2243 of SEQ ID NO: 1888549
guaauaauugccgaaugaa

SEQ ID NO: 2540869 - RNA, 19 nt, Artificial Sequence
  Description of Artificial Sequence: Synthetic oligonucleotide
  Antisense strand to SEQ ID NO: 2540868
uucauucggcaauuauuac

SEQ ID NO: 2540870 - RNA, 19 nt, Artificial Sequence
  Description of Artificial Sequence: Synthetic oligonucleotide
  Sense strand starting at position 1529 of SEQ ID NO: 1888549
ccucuaguuccugaugaac

SEQ ID NO: 2540871 - RNA, 19 nt, Artificial Sequence
  Description of Artificial Sequence: Synthetic oligonucleotide
  Antisense strand to SEQ ID NO: 2540870
guucaucaggaacuagagg

SEQ ID NO: 2540872 - RNA, 19 nt, Artificial Sequence
  Description of Artificial Sequence: Synthetic oligonucleotide
  Sense strand starting at position 2102 of SEQ ID NO: 1888549
ugaugccuccacuguauuu

SEQ ID NO: 2540873 - RNA, 19 nt, Artificial Sequence
  Description of Artificial Sequence: Synthetic oligonucleotide
  Antisense strand to SEQ ID NO: 2540872
aaauacaguggaggcauca

SEQ ID NO: 2540874 - RNA, 19 nt, Artificial Sequence
  Description of Artificial Sequence: Synthetic oligonucleotide
  Sense strand starting at position 977 of SEQ ID NO: 1888549
ucuugugaacuguaugaca

SEQ ID NO: 2540875 - RNA, 19 nt, Artificial Sequence
  Description of Artificial Sequence: Synthetic oligonucleotide
  Antisense strand to SEQ ID NO: 2540874
ugucauacaguucacaaga

SEQ ID NO: 2540876 - RNA, 19 nt, Artificial Sequence
  Description of Artificial Sequence: Synthetic oligonucleotide
  Sense strand starting at position 545 of SEQ ID NO: 1888549
acuuguccugaagauguua

SEQ ID NO: 2540877 - RNA, 19 nt, Artificial Sequence
  Description of Artificial Sequence: Synthetic oligonucleotide
  Antisense strand to SEQ ID NO: 2540876
uaacaucuucaggacaagu

SEQ ID NO: 2540878 - RNA, 19 nt, Artificial Sequence
  Description of Artificial Sequence: Synthetic oligonucleotide
  Sense strand starting at position 2406 of SEQ ID NO: 1888549
gaguuuggucuacauuaua

SEQ ID NO: 2540879 - RNA, 19 nt, Artificial Sequence
  Description of Artificial Sequence: Synthetic oligonucleotide
  Antisense strand to SEQ ID NO: 2540878
uauaauguagaccaaacuc

SEQ ID NO: 2540880 - RNA, 19 nt, Artificial Sequence
  Description of Artificial Sequence: Synthetic oligonucleotide
  Sense strand starting at position 558 of SEQ ID NO: 1888549
auguuaaagcuggaaguca

SEQ ID NO: 2540881 - RNA, 19 nt, Artificial Sequence
  Description of Artificial Sequence: Synthetic oligonucleotide
  Antisense strand to SEQ ID NO: 2540880
ugacuuccagcuuuaacau

SEQ ID NO: 2540882 - RNA, 19 nt, Artificial Sequence
  Description of Artificial Sequence: Synthetic oligonucleotide
  Sense strand starting at position 913 of SEQ ID NO: 1888549
gugauuuauaagcgcuaga

SEQ ID NO: 2540883 - RNA, 19 nt, Artificial Sequence
  Description of Artificial Sequence: Synthetic oligonucleotide
  Antisense strand to SEQ ID NO: 2540882
ucuagcgcuuauaaaucac

SEQ ID NO: 2540884 - RNA, 19 nt, Artificial Sequence
  Description of Artificial Sequence: Synthetic oligonucleotide
  Sense strand starting at position 606 of SEQ ID NO: 1888549
agcugugugcucucagguu

SEQ ID NO: 2540885 - RNA, 19 nt, Artificial Sequence
  Description of Artificial Sequence: Synthetic oligonucleotide
  Antisense strand to SEQ ID NO: 2540884
aaccugagagcacacagcu

SEQ ID NO: 2540886 - RNA, 19 nt, Artificial Sequence
  Description of Artificial Sequence: Synthetic oligonucleotide
  Sense strand starting at position 2404 of SEQ ID NO: 1888549
uggaguuuggucuacauua

SEQ ID NO: 2540887 - RNA, 19 nt, Artificial Sequence
  Description of Artificial Sequence: Synthetic oligonucleotide
  Antisense strand to SEQ ID NO: 2540886
uaauguagaccaaacucca

SEQ ID NO: 2540888 - RNA, 19 nt, Artificial Sequence
  Description of Artificial Sequence: Synthetic oligonucleotide
  Sense strand starting at position 567 of SEQ ID NO: 1888549
cuggaagucagugaucuuc

SEQ ID NO: 2540889 - RNA, 19 nt, Artificial Sequence
  Description of Artificial Sequence: Synthetic oligonucleotide
  Antisense strand to SEQ ID NO: 2540888
gaagaucacugacuuccag

SEQ ID NO: 2540890 - RNA, 19 nt, Artificial Sequence
  Description of Artificial Sequence: Synthetic oligonucleotide
  Sense strand starting at position 496 of SEQ ID NO: 1888549
cguguuuacgaguauuuau

SEQ ID NO: 2540891 - RNA, 19 nt, Artificial Sequence
  Description of Artificial Sequence: Synthetic oligonucleotide
  Antisense strand to SEQ ID NO: 2540890
auaaauacucguaaacacg

SEQ ID NO: 2540892 - RNA, 19 nt, Artificial Sequence
  Description of Artificial Sequence: Synthetic oligonucleotide
  Sense strand starting at position 2246 of SEQ ID NO: 1888549
auaauugccgaaugaauga

SEQ ID NO: 2540893 - RNA, 19 nt, Artificial Sequence
  Description of Artificial Sequence: Synthetic oligonucleotide
  Antisense strand to SEQ ID NO: 2540892
ucauucauucggcaauuau

SEQ ID NO: 2540894 - RNA, 19 nt, Artificial Sequence
  Description of Artificial Sequence: Synthetic oligonucleotide
  Sense strand starting at position 3973 of SEQ ID NO: 1888549
cuagaaagcaagugaguaa

SEQ ID NO: 2540895 - RNA, 19 nt, Artificial Sequence
  Description of Artificial Sequence: Synthetic oligonucleotide
  Antisense strand to SEQ ID NO: 2540894
uuacucacuugcuuucuag

SEQ ID NO: 2540896 - RNA, 19 nt, Artificial Sequence
  Description of Artificial Sequence: Synthetic oligonucleotide
  Sense strand starting at position 649 of SEQ ID NO: 1888549
ggccaugugucauuucuug

SEQ ID NO: 2540897 - RNA, 19 nt, Artificial Sequence
  Description of Artificial Sequence: Synthetic oligonucleotide
  Antisense strand to SEQ ID NO: 2540896
caagaaaugacacauggcc

SEQ ID NO: 2540898 - RNA, 19 nt, Artificial Sequence
  Description of Artificial Sequence: Synthetic oligonucleotide
  Sense strand starting at position 2569 of SEQ ID NO: 1888549
ucaucagucuagucaagaa

SEQ ID NO: 2540899 - RNA, 19 nt, Artificial Sequence
  Description of Artificial Sequence: Synthetic oligonucleotide
  Antisense strand to SEQ ID NO: 2540898
uucuugacuagacugauga

SEQ ID NO: 2540900 - RNA, 19 nt, Artificial Sequence
  Description of Artificial Sequence: Synthetic oligonucleotide
  Sense strand starting at position 3425 of SEQ ID NO: 1888549
ccaaauccgccugauauca

SEQ ID NO: 2540901 - RNA, 19 nt, Artificial Sequence
  Description of Artificial Sequence: Synthetic oligonucleotide
  Antisense strand to SEQ ID NO: 2540900
ugauaucaggcggauuugg

SEQ ID NO: 2540902 - RNA, 19 nt, Artificial Sequence
  Description of Artificial Sequence: Synthetic oligonucleotide
  Sense strand starting at position 3964 of SEQ ID NO: 1888549
ccucauugccuagaaagca

SEQ ID NO: 2540903 - RNA, 19 nt, Artificial Sequence
  Description of Artificial Sequence: Synthetic oligonucleotide
  Antisense strand to SEQ ID NO: 2540902
ugcuuucuaggcaaugagg

SEQ ID NO: 2540904 - RNA, 19 nt, Artificial Sequence
  Description of Artificial Sequence: Synthetic oligonucleotide
  Sense strand starting at position 1559 of SEQ ID NO: 1888549
agggacugucugugaauca

SEQ ID NO: 2540905 - RNA, 19 nt, Artificial Sequence
  Description of Artificial Sequence: Synthetic oligonucleotide
  Antisense strand to SEQ ID NO: 2540904
ugauucacagacagucccu

SEQ ID NO: 2540906 - RNA, 19 nt, Artificial Sequence
  Description of Artificial Sequence: Synthetic oligonucleotide
  Sense strand starting at position 230 of SEQ ID NO: 1888549
ccaucugugcaguagggaa

SEQ ID NO: 2540907 - RNA, 19 nt, Artificial Sequence
  Description of Artificial Sequence: Synthetic oligonucleotide
  Antisense strand to SEQ ID NO: 2540906
uucccuacugcacagaugg

SEQ ID NO: 2540908 - RNA, 19 nt, Artificial Sequence
  Description of Artificial Sequence: Synthetic oligonucleotide
  Sense strand starting at position 3671 of SEQ ID NO: 1888549
ucuuuacaccgugaaccua

SEQ ID NO: 2540909 - RNA, 19 nt, Artificial Sequence
  Description of Artificial Sequence: Synthetic oligonucleotide
  Antisense strand to SEQ ID NO: 2540908
uagguucacgguguaaaga

SEQ ID NO: 2540910 - RNA, 19 nt, Artificial Sequence
  Description of Artificial Sequence: Synthetic oligonucleotide
  Sense strand starting at position 1558 of SEQ ID NO: 1888549
gagggacugucugugaauc

SEQ ID NO: 2540911 - RNA, 19 nt, Artificial Sequence
  Description of Artificial Sequence: Synthetic oligonucleotide
  Antisense strand to SEQ ID NO: 2540910
gauucacagacagucccuc

SEQ ID NO: 2540912 - RNA, 19 nt, Artificial Sequence
  Description of Artificial Sequence: Synthetic oligonucleotide
  Sense strand starting at position 1177 of SEQ ID NO: 1888549
augacuauucugcaguuau

SEQ ID NO: 2540913 - RNA, 19 nt, Artificial Sequence
  Description of Artificial Sequence: Synthetic oligonucleotide
  Antisense strand to SEQ ID NO: 2540912
auaacugcagaauagucau

SEQ ID NO: 2540914 - RNA, 19 nt, Artificial Sequence
  Description of Artificial Sequence: Synthetic oligonucleotide
  Sense strand starting at position 2449 of SEQ ID NO: 1888549
agauaauucucuccugggu

SEQ ID NO: 2540915 - RNA, 19 nt, Artificial Sequence
  Description of Artificial Sequence: Synthetic oligonucleotide
  Antisense strand to SEQ ID NO: 2540914
acccaggagagaauuaucu

SEQ ID NO: 2540916 - RNA, 19 nt, Artificial Sequence
  Description of Artificial Sequence: Synthetic oligonucleotide
  Sense strand starting at position 2454 of SEQ ID NO: 1888549
auucucuccuggguaauga

SEQ ID NO: 2540917 - RNA, 19 nt, Artificial Sequence
  Description of Artificial Sequence: Synthetic oligonucleotide
  Antisense strand to SEQ ID NO: 2540916
ucauuacccaggagagaau

SEQ ID NO: 2540918 - RNA, 19 nt, Artificial Sequence
  Description of Artificial Sequence: Synthetic oligonucleotide
  Sense strand starting at position 2321 of SEQ ID NO: 1888549
uugauaaaugcaugcagag

SEQ ID NO: 2540919 - RNA, 19 nt, Artificial Sequence
  Description of Artificial Sequence: Synthetic oligonucleotide
  Antisense strand to SEQ ID NO: 2540918
cucugcaugcauuuaucaa

SEQ ID NO: 2540920 - RNA, 19 nt, Artificial Sequence
  Description of Artificial Sequence: Synthetic oligonucleotide
  Sense strand starting at position 569 of SEQ ID NO: 1888549
ggaagucagugaucuucua

SEQ ID NO: 2540921 - RNA, 19 nt, Artificial Sequence
  Description of Artificial Sequence: Synthetic oligonucleotide
  Antisense strand to SEQ ID NO: 2540920
uagaagaucacugacuucc

SEQ ID NO: 2540922 - RNA, 19 nt, Artificial Sequence
  Description of Artificial Sequence: Synthetic oligonucleotide
  Sense strand starting at position 78 of SEQ ID NO: 1888549
agaugaucaucaggauuua

SEQ ID NO: 2540923 - RNA, 19 nt, Artificial Sequence
  Description of Artificial Sequence: Synthetic oligonucleotide
  Antisense strand to SEQ ID NO: 2540922
uaaauccugaugaucaucu

SEQ ID NO: 2540924 - RNA, 19 nt, Artificial Sequence
  Description of Artificial Sequence: Synthetic oligonucleotide
  Sense strand starting at position 2453 of SEQ ID NO: 1888549
aauucucuccuggguaaug

SEQ ID NO: 2540925 - RNA, 19 nt, Artificial Sequence
  Description of Artificial Sequence: Synthetic oligonucleotide
  Antisense strand to SEQ ID NO: 2540924
cauuacccaggagagaauu

SEQ ID NO: 2540926 - RNA, 19 nt, Artificial Sequence
  Description of Artificial Sequence: Synthetic oligonucleotide
  Sense strand starting at position 3197 of SEQ ID NO: 1888549
uagggaguugugugaauga

SEQ ID NO: 2540927 - RNA, 19 nt, Artificial Sequence
  Description of Artificial Sequence: Synthetic oligonucleotide
  Antisense strand to SEQ ID NO: 2540926
ucauucacacaacucccua

SEQ ID NO: 2540928 - RNA, 19 nt, Artificial Sequence
  Description of Artificial Sequence: Synthetic oligonucleotide
  Sense strand starting at position 61 of SEQ ID NO: 1888549
gguaaugauuucuauuaag

SEQ ID NO: 2540929 - RNA, 19 nt, Artificial Sequence
  Description of Artificial Sequence: Synthetic oligonucleotide
  Antisense strand to SEQ ID NO: 2540928
cuuaauagaaaucauuacc

SEQ ID NO: 2540930 - RNA, 19 nt, Artificial Sequence
  Description of Artificial Sequence: Synthetic oligonucleotide
  Sense strand starting at position 940 of SEQ ID NO: 1888549
gcuggagaauccuuccuua

SEQ ID NO: 2540931 - RNA, 19 nt, Artificial Sequence
  Description of Artificial Sequence: Synthetic oligonucleotide
  Antisense strand to SEQ ID NO: 2540930
uaaggaaggauucuccagc

SEQ ID NO: 2540932 - RNA, 19 nt, Artificial Sequence
  Description of Artificial Sequence: Synthetic oligonucleotide
  Sense strand starting at position 2566 of SEQ ID NO: 1888549
gcaucaucagucuagucaa

SEQ ID NO: 2540933 - RNA, 19 nt, Artificial Sequence
  Description of Artificial Sequence: Synthetic oligonucleotide
  Antisense strand to SEQ ID NO: 2540932
uugacuagacugaugaugc

SEQ ID NO: 2540934 - RNA, 19 nt, Artificial Sequence
  Description of Artificial Sequence: Synthetic oligonucleotide
  Sense strand starting at position 3180 of SEQ ID NO: 1888549
ucagguuaagggugguaua

SEQ ID NO: 2540935 - RNA, 19 nt, Artificial Sequence
  Description of Artificial Sequence: Synthetic oligonucleotide
  Antisense strand to SEQ ID NO: 2540934
uauaccacccuuaaccuga

SEQ ID NO: 2540936 - RNA, 19 nt, Artificial Sequence
  Description of Artificial Sequence: Synthetic oligonucleotide
  Sense strand starting at position 979 of SEQ ID NO: 1888549
uugugaacuguaugacauu

SEQ ID NO: 2540937 - RNA, 19 nt, Artificial Sequence
  Description of Artificial Sequence: Synthetic oligonucleotide
  Antisense strand to SEQ ID NO: 2540936
aaugucauacaguucacaa

SEQ ID NO: 2540938 - RNA, 19 nt, Artificial Sequence
  Description of Artificial Sequence: Synthetic oligonucleotide
  Sense strand starting at position 1257 of SEQ ID NO: 1888550
gcuugagaagcugaaacau

SEQ ID NO: 2540939 - RNA, 19 nt, Artificial Sequence
  Description of Artificial Sequence: Synthetic oligonucleotide
  Antisense strand to SEQ ID NO: 2540938
auguuucagcuucucaagc

SEQ ID NO: 2540940 - RNA, 19 nt, Artificial Sequence
  Description of Artificial Sequence: Synthetic oligonucleotide
  Sense strand starting at position 3980 of SEQ ID NO: 1888550
ccugauggucuugaaguaa

SEQ ID NO: 2540941 - RNA, 19 nt, Artificial Sequence
  Description of Artificial Sequence: Synthetic oligonucleotide
  Antisense strand to SEQ ID NO: 2540940
uuacuucaagaccaucagg

SEQ ID NO: 2540942 - RNA, 19 nt, Artificial Sequence
  Description of Artificial Sequence: Synthetic oligonucleotide
  Sense strand starting at position 1497 of SEQ ID NO: 1888550
caagaaagggucuggcaga

SEQ ID NO: 2540943 - RNA, 19 nt, Artificial Sequence
  Description of Artificial Sequence: Synthetic oligonucleotide
  Antisense strand to SEQ ID NO: 2540942
ucugccagacccuuucuug

SEQ ID NO: 2540944 - RNA, 19 nt, Artificial Sequence
  Description of Artificial Sequence: Synthetic oligonucleotide
  Sense strand starting at position 1285 of SEQ ID NO: 1888550
gcagcaugcaaagaugaga

SEQ ID NO: 2540945 - RNA, 19 nt, Artificial Sequence
  Description of Artificial Sequence: Synthetic oligonucleotide
  Antisense strand to SEQ ID NO: 2540944
ucucaucuuugcaugcugc

SEQ ID NO: 2540946 - RNA, 19 nt, Artificial Sequence
  Description of Artificial Sequence: Synthetic oligonucleotide
  Sense strand starting at position 3079 of SEQ ID NO: 1888550
gcuucugcugccuuaaugu

SEQ ID NO: 2540947 - RNA, 19 nt, Artificial Sequence
  Description of Artificial Sequence: Synthetic oligonucleotide
  Antisense strand to SEQ ID NO: 2540946
acauuaaggcagcagaagc

SEQ ID NO: 2540948 - RNA, 19 nt, Artificial Sequence
  Description of Artificial Sequence: Synthetic oligonucleotide
  Sense strand starting at position 905 of SEQ ID NO: 1888550
aggaguggccauggacaua

SEQ ID NO: 2540949 - RNA, 19 nt, Artificial Sequence
  Description of Artificial Sequence: Synthetic oligonucleotide
  Antisense strand to SEQ ID NO: 2540948
uauguccauggccacuccu

SEQ ID NO: 2540950 - RNA, 19 nt, Artificial Sequence
  Description of Artificial Sequence: Synthetic oligonucleotide
  Sense strand starting at position 2196 of SEQ ID NO: 1888550
gaucuuccaugguuuagaa

SEQ ID NO: 2540951 - RNA, 19 nt, Artificial Sequence
  Description of Artificial Sequence: Synthetic oligonucleotide
  Antisense strand to SEQ ID NO: 2540950
uucuaaaccauggaagauc

SEQ ID NO: 2540952 - RNA, 19 nt, Artificial Sequence
  Description of Artificial Sequence: Synthetic oligonucleotide
  Sense strand starting at position 2179 of SEQ ID NO: 1888550
ccuuucugugguuaaauga

SEQ ID NO: 2540953 - RNA, 19 nt, Artificial Sequence
  Description of Artificial Sequence: Synthetic oligonucleotide
  Antisense strand to SEQ ID NO: 2540952
ucauuuaaccacagaaagg

SEQ ID NO: 2540954 - RNA, 19 nt, Artificial Sequence
  Description of Artificial Sequence: Synthetic oligonucleotide
  Sense strand starting at position 1552 of SEQ ID NO: 1888550
gcauguacugaguauugga

SEQ ID NO: 2540955 - RNA, 19 nt, Artificial Sequence
  Description of Artificial Sequence: Synthetic oligonucleotide
  Antisense strand to SEQ ID NO: 2540954
uccaauacucaguacaugc

SEQ ID NO: 2540956 - RNA, 19 nt, Artificial Sequence
  Description of Artificial Sequence: Synthetic oligonucleotide
  Sense strand starting at position 1549 of SEQ ID NO: 1888550
agggcauguacugaguauu

SEQ ID NO: 2540957 - RNA, 19 nt, Artificial Sequence
  Description of Artificial Sequence: Synthetic oligonucleotide
  Antisense strand to SEQ ID NO: 2540956
aauacucaguacaugcccu

SEQ ID NO: 2540958 - RNA, 19 nt, Artificial Sequence
  Description of Artificial Sequence: Synthetic oligonucleotide
  Sense strand starting at position 2260 of SEQ ID NO: 1888550
auaguucuuggcuaucaca

SEQ ID NO: 2540959 - RNA, 19 nt, Artificial Sequence
  Description of Artificial Sequence: Synthetic oligonucleotide
  Antisense strand to SEQ ID NO: 2540958
ugugauagccaagaacuau

SEQ ID NO: 2540960 - RNA, 19 nt, Artificial Sequence
  Description of Artificial Sequence: Synthetic oligonucleotide
  Sense strand starting at position 2611 of SEQ ID NO: 1888550
guacuuauuugccauuuau

SEQ ID NO: 2540961 - RNA, 19 nt, Artificial Sequence
  Description of Artificial Sequence: Synthetic oligonucleotide
  Antisense strand to SEQ ID NO: 2540960
auaaauggcaaauaaguac

SEQ ID NO: 2540962 - RNA, 19 nt, Artificial Sequence
  Description of Artificial Sequence: Synthetic oligonucleotide
  Sense strand starting at position 3937 of SEQ ID NO: 1888550
aggcauugucuacaguaau

SEQ ID NO: 2540963 - RNA, 19 nt, Artificial Sequence
  Description of Artificial Sequence: Synthetic oligonucleotide
  Antisense strand to SEQ ID NO: 2540962
auuacuguagacaaugccu

SEQ ID NO: 2540964 - RNA, 19 nt, Artificial Sequence
  Description of Artificial Sequence: Synthetic oligonucleotide
  Sense strand starting at position 3808 of SEQ ID NO: 1888550
ugucaucauugaccuuaca

SEQ ID NO: 2540965 - RNA, 19 nt, Artificial Sequence
  Description of Artificial Sequence: Synthetic oligonucleotide
  Antisense strand to SEQ ID NO: 2540964
uguaaggucaaugaugaca

SEQ ID NO: 2540966 - RNA, 19 nt, Artificial Sequence
  Description of Artificial Sequence: Synthetic oligonucleotide
  Sense strand starting at position 3823 of SEQ ID NO: 1888550
uacagaguccauggauguu

SEQ ID NO: 2540967 - RNA, 19 nt, Artificial Sequence
  Description of Artificial Sequence: Synthetic oligonucleotide
  Antisense strand to SEQ ID NO: 2540966
aacauccauggacucugua

SEQ ID NO: 2540968 - RNA, 19 nt, Artificial Sequence
  Description of Artificial Sequence: Synthetic oligonucleotide
  Sense strand starting at position 2141 of SEQ ID NO: 1888550
gagagucauccauguauug

SEQ ID NO: 2540969 - RNA, 19 nt, Artificial Sequence
  Description of Artificial Sequence: Synthetic oligonucleotide
  Antisense strand to SEQ ID NO: 2540968
caauacauggaugacucuc

SEQ ID NO: 2540970 - RNA, 19 nt, Artificial Sequence
  Description of Artificial Sequence: Synthetic oligonucleotide
  Sense strand starting at position 3914 of SEQ ID NO: 1888550
guuguugaucugcagaaca

SEQ ID NO: 2540971 - RNA, 19 nt, Artificial Sequence
  Description of Artificial Sequence: Synthetic oligonucleotide
  Antisense strand to SEQ ID NO: 2540970
uguucugcagaucaacaac

SEQ ID NO: 2540972 - RNA, 19 nt, Artificial Sequence
  Description of Artificial Sequence: Synthetic oligonucleotide
  Sense strand starting at position 1053 of SEQ ID NO: 1888550
ggugcaaagacuggacuuu

SEQ ID NO: 2540973 - RNA, 19 nt, Artificial Sequence
  Description of Artificial Sequence: Synthetic oligonucleotide
  Antisense strand to SEQ ID NO: 2540972
aaaguccagucuuugcacc

SEQ ID NO: 2540974 - RNA, 19 nt, Artificial Sequence
  Description of Artificial Sequence: Synthetic oligonucleotide
  Sense strand starting at position 2186 of SEQ ID NO: 1888550
gugguuaaaugaucuucca

SEQ ID NO: 2540975 - RNA, 19 nt, Artificial Sequence
  Description of Artificial Sequence: Synthetic oligonucleotide
  Antisense strand to SEQ ID NO: 2540974
uggaagaucauuuaaccac

SEQ ID NO: 2540976 - RNA, 19 nt, Artificial Sequence
  Description of Artificial Sequence: Synthetic oligonucleotide
  Sense strand starting at position 1866 of SEQ ID NO: 1888550
cuuagcacaguuugaugaa

SEQ ID NO: 2540977 - RNA, 19 nt, Artificial Sequence
  Description of Artificial Sequence: Synthetic oligonucleotide
  Antisense strand to SEQ ID NO: 2540976
uucaucaaacugugcuaag

SEQ ID NO: 2540978 - RNA, 19 nt, Artificial Sequence
  Description of Artificial Sequence: Synthetic oligonucleotide
  Sense strand starting at position 2362 of SEQ ID NO: 1888550
cauagaauuguuuggucac

SEQ ID NO: 2540979 - RNA, 19 nt, Artificial Sequence
  Description of Artificial Sequence: Synthetic oligonucleotide
  Antisense strand to SEQ ID NO: 2540978
gugaccaaacaauucuaug

SEQ ID NO: 2540980 - RNA, 19 nt, Artificial Sequence
  Description of Artificial Sequence: Synthetic oligonucleotide
  Sense strand starting at position 3976 of SEQ ID NO: 1888550
gguuccugauggucuugaa

SEQ ID NO: 2540981 - RNA, 19 nt, Artificial Sequence
  Description of Artificial Sequence: Synthetic oligonucleotide
  Antisense strand to SEQ ID NO: 2540980
uucaagaccaucaggaacc

SEQ ID NO: 2540982 - RNA, 19 nt, Artificial Sequence
  Description of Artificial Sequence: Synthetic oligonucleotide
  Sense strand starting at position 2497 of SEQ ID NO: 1888550
uuguuagggucuuuaaauu

SEQ ID NO: 2540983 - RNA, 19 nt, Artificial Sequence
  Description of Artificial Sequence: Synthetic oligonucleotide
  Antisense strand to SEQ ID NO: 2540982
aauuuaaagacccuaacaa

SEQ ID NO: 2540984 - RNA, 19 nt, Artificial Sequence
  Description of Artificial Sequence: Synthetic oligonucleotide
  Sense strand starting at position 3086 of SEQ ID NO: 1888550
cugccuuaaugucucagaa

SEQ ID NO: 2540985 - RNA, 19 nt, Artificial Sequence
  Description of Artificial Sequence: Synthetic oligonucleotide
  Antisense strand to SEQ ID NO: 2540984
uucugagacauuaaggcag

SEQ ID NO: 2540986 - RNA, 19 nt, Artificial Sequence
  Description of Artificial Sequence: Synthetic oligonucleotide
  Sense strand starting at position 2056 of SEQ ID NO: 1888550
cugucuguucuagaaguuc

SEQ ID NO: 2540987 - RNA, 19 nt, Artificial Sequence
  Description of Artificial Sequence: Synthetic oligonucleotide
  Antisense strand to SEQ ID NO: 2540986
gaacuucuagaacagacag

SEQ ID NO: 2540988 - RNA, 19 nt, Artificial Sequence
  Description of Artificial Sequence: Synthetic oligonucleotide
  Sense strand starting at position 3153 of SEQ ID NO: 1888550
gggugguggucuuuggaau

SEQ ID NO: 2540989 - RNA, 19 nt, Artificial Sequence
  Description of Artificial Sequence: Synthetic oligonucleotide
  Antisense strand to SEQ ID NO: 2540988
auuccaaagaccaccaccc

SEQ ID NO: 2540990 - RNA, 19 nt, Artificial Sequence
  Description of Artificial Sequence: Synthetic oligonucleotide
  Sense strand starting at position 3154 of SEQ ID NO: 1888550
ggugguggucuuuggaaug

SEQ ID NO: 2540991 - RNA, 19 nt, Artificial Sequence
  Description of Artificial Sequence: Synthetic oligonucleotide
  Antisense strand to SEQ ID NO: 2540990
cauuccaaagaccaccacc

SEQ ID NO: 2540992 - RNA, 19 nt, Artificial Sequence
  Description of Artificial Sequence: Synthetic oligonucleotide
  Sense strand starting at position 2178 of SEQ ID NO: 1888550
uccuuucugugguuaaaug

SEQ ID NO: 2540993 - RNA, 19 nt, Artificial Sequence
  Description of Artificial Sequence: Synthetic oligonucleotide
  Antisense strand to SEQ ID NO: 2540992
cauuuaaccacagaaagga

SEQ ID NO: 2540994 - RNA, 19 nt, Artificial Sequence
  Description of Artificial Sequence: Synthetic oligonucleotide
  Sense strand starting at position 3935 of SEQ ID NO: 1888550
gcaggcauugucuacagua

SEQ ID NO: 2540995 - RNA, 19 nt, Artificial Sequence
  Description of Artificial Sequence: Synthetic oligonucleotide
  Antisense strand to SEQ ID NO: 2540994
uacuguagacaaugccugc

SEQ ID NO: 2540996 - RNA, 19 nt, Artificial Sequence
  Description of Artificial Sequence: Synthetic oligonucleotide
  Sense strand starting at position 2653 of SEQ ID NO: 1888550
guuuaaaucuuugucccau

SEQ ID NO: 2540997 - RNA, 19 nt, Artificial Sequence
  Description of Artificial Sequence: Synthetic oligonucleotide
  Antisense strand to SEQ ID NO: 2540996
augggacaaagauuuaaac

SEQ ID NO: 2540998 - RNA, 19 nt, Artificial Sequence
  Description of Artificial Sequence: Synthetic oligonucleotide
  Sense strand starting at position 2641 of SEQ ID NO: 1888550
ggugaaguguuuguuuaaa

SEQ ID NO: 2540999 - RNA, 19 nt, Artificial Sequence
  Description of Artificial Sequence: Synthetic oligonucleotide
  Antisense strand to SEQ ID NO: 2540998
uuuaaacaaacacuucacc

SEQ ID NO: 2541000 - RNA, 19 nt, Artificial Sequence
  Description of Artificial Sequence: Synthetic oligonucleotide
  Sense strand starting at position 2255 of SEQ ID NO: 1888550
ucuuaauaguucuuggcua

SEQ ID NO: 2541001 - RNA, 19 nt, Artificial Sequence
  Description of Artificial Sequence: Synthetic oligonucleotide
  Antisense strand to SEQ ID NO: 2541000
uagccaagaacuauuaaga

SEQ ID NO: 2541002 - RNA, 19 nt, Artificial Sequence
  Description of Artificial Sequence: Synthetic oligonucleotide
  Sense strand starting at position 2652 of SEQ ID NO: 1888550
uguuuaaaucuuuguccca

SEQ ID NO: 2541003 - RNA, 19 nt, Artificial Sequence
  Description of Artificial Sequence: Synthetic oligonucleotide
  Antisense strand to SEQ ID NO: 2541002
ugggacaaagauuuaaaca

SEQ ID NO: 2541004 - RNA, 19 nt, Artificial Sequence
  Description of Artificial Sequence: Synthetic oligonucleotide
  Sense strand starting at position 2257 of SEQ ID NO: 1888550
uuaauaguucuuggcuauc

SEQ ID NO: 2541005 - RNA, 19 nt, Artificial Sequence
  Description of Artificial Sequence: Synthetic oligonucleotide
  Antisense strand to SEQ ID NO: 2541004
gauagccaagaacuauuaa

SEQ ID NO: 2541006 - RNA, 19 nt, Artificial Sequence
  Description of Artificial Sequence: Synthetic oligonucleotide
  Sense strand starting at position 3913 of SEQ ID NO: 1888550
uguuguugaucugcagaac

SEQ ID NO: 2541007 - RNA, 19 nt, Artificial Sequence
  Description of Artificial Sequence: Synthetic oligonucleotide
  Antisense strand to SEQ ID NO: 2541006
guucugcagaucaacaaca

SEQ ID NO: 2541008 - RNA, 19 nt, Artificial Sequence
  Description of Artificial Sequence: Synthetic oligonucleotide
  Sense strand starting at position 3157 of SEQ ID NO: 1888550
gguggucuuuggaaugguu

SEQ ID NO: 2541009 - RNA, 19 nt, Artificial Sequence
  Description of Artificial Sequence: Synthetic oligonucleotide
  Antisense strand to SEQ ID NO: 2541008
aaccauuccaaagaccacc

SEQ ID NO: 2541010 - RNA, 19 nt, Artificial Sequence
  Description of Artificial Sequence: Synthetic oligonucleotide
  Sense strand starting at position 2541 of SEQ ID NO: 1888550
gguaucuugcugugacuaa

SEQ ID NO: 2541011 - RNA, 19 nt, Artificial Sequence
  Description of Artificial Sequence: Synthetic oligonucleotide
  Antisense strand to SEQ ID NO: 2541010
uuagucacagcaagauacc

SEQ ID NO: 2541012 - RNA, 19 nt, Artificial Sequence
  Description of Artificial Sequence: Synthetic oligonucleotide
  Sense strand starting at position 2052 of SEQ ID NO: 1888550
agcccugucuguucuagaa

SEQ ID NO: 2541013 - RNA, 19 nt, Artificial Sequence
  Description of Artificial Sequence: Synthetic oligonucleotide
  Antisense strand to SEQ ID NO: 2541012
uucuagaacagacagggcu

SEQ ID NO: 2541014 - RNA, 19 nt, Artificial Sequence
  Description of Artificial Sequence: Synthetic oligonucleotide
  Sense strand starting at position 2112 of SEQ ID NO: 1888550
caggcuuugucaccuagua

SEQ ID NO: 2541015 - RNA, 19 nt, Artificial Sequence
  Description of Artificial Sequence: Synthetic oligonucleotide
  Antisense strand to SEQ ID NO: 2541014
uacuaggugacaaagccug

SEQ ID NO: 2541016 - RNA, 19 nt, Artificial Sequence
  Description of Artificial Sequence: Synthetic oligonucleotide
  Sense strand starting at position 2640 of SEQ ID NO: 1888550
uggugaaguguuuguuuaa

SEQ ID NO: 2541017 - RNA, 19 nt, Artificial Sequence
  Description of Artificial Sequence: Synthetic oligonucleotide
  Antisense strand to SEQ ID NO: 2541016
uuaaacaaacacuucacca

SEQ ID NO: 2541018 - RNA, 19 nt, Artificial Sequence
  Description of Artificial Sequence: Synthetic oligonucleotide
  Sense strand starting at position 1336 of SEQ ID NO: 1888551
agaacugcgaucgaauaaa

SEQ ID NO: 2541019 - RNA, 19 nt, Artificial Sequence
  Description of Artificial Sequence: Synthetic oligonucleotide
  Antisense strand to SEQ ID NO: 2541018
uuuauucgaucgcaguucu

SEQ ID NO: 2541020 - RNA, 19 nt, Artificial Sequence
  Description of Artificial Sequence: Synthetic oligonucleotide
  Sense strand starting at position 3068 of SEQ ID NO: 1888551
agaguuguuaguuagagag

SEQ ID NO: 2541021 - RNA, 19 nt, Artificial Sequence
  Description of Artificial Sequence: Synthetic oligonucleotide
  Antisense strand to SEQ ID NO: 2541020
cucucuaacuaacaacucu

SEQ ID NO: 2541022 - RNA, 19 nt, Artificial Sequence
  Description of Artificial Sequence: Synthetic oligonucleotide
  Sense strand starting at position 3094 of SEQ ID NO: 1888551
gaguuagagaguuaggguu

SEQ ID NO: 2541023 - RNA, 19 nt, Artificial Sequence
  Description of Artificial Sequence: Synthetic oligonucleotide
  Antisense strand to SEQ ID NO: 2541022
aacccuaacucucuaacuc

SEQ ID NO: 2541024 - RNA, 19 nt, Artificial Sequence
  Description of Artificial Sequence: Synthetic oligonucleotide
  Sense strand starting at position 2011 of SEQ ID NO: 1888551
gugucauggaaacaacagu

SEQ ID NO: 2541025 - RNA, 19 nt, Artificial Sequence
  Description of Artificial Sequence: Synthetic oligonucleotide
  Antisense strand to SEQ ID NO: 2541024
acuguuguuuccaugacac

SEQ ID NO: 2541026 - RNA, 19 nt, Artificial Sequence
  Description of Artificial Sequence: Synthetic oligonucleotide
  Sense strand starting at position 3218 of SEQ ID NO: 1888551
agauacaaguuuccuggau

SEQ ID NO: 2541027 - RNA, 19 nt, Artificial Sequence
  Description of Artificial Sequence: Synthetic oligonucleotide
  Antisense strand to SEQ ID NO: 2541026
auccaggaaacuuguaucu

SEQ ID NO: 2541028 - RNA, 19 nt, Artificial Sequence
  Description of Artificial Sequence: Synthetic oligonucleotide
  Sense strand starting at position 3100 of SEQ ID NO: 1888551
gagaguuaggguuaggguu

SEQ ID NO: 2541029 - RNA, 19 nt, Artificial Sequence
  Description of Artificial Sequence: Synthetic oligonucleotide
  Antisense strand to SEQ ID NO: 2541028
aacccuaacccuaacucuc

SEQ ID NO: 2541030 - RNA, 19 nt, Artificial Sequence
  Description of Artificial Sequence: Synthetic oligonucleotide
  Sense strand starting at position 3219 of SEQ ID NO: 1888551
gauacaaguuuccuggaug

SEQ ID NO: 2541031 - RNA, 19 nt, Artificial Sequence
  Description of Artificial Sequence: Synthetic oligonucleotide
  Antisense strand to SEQ ID NO: 2541030
cauccaggaaacuuguauc

SEQ ID NO: 2541032 - RNA, 19 nt, Artificial Sequence
  Description of Artificial Sequence: Synthetic oligonucleotide
  Sense strand starting at position 2392 of SEQ ID NO: 1888551
agacuuuguggacagcauu

SEQ ID NO: 2541033 - RNA, 19 nt, Artificial Sequence
  Description of Artificial Sequence: Synthetic oligonucleotide
  Antisense strand to SEQ ID NO: 2541032
aaugcuguccacaaagucu

SEQ ID NO: 2541034 - RNA, 19 nt, Artificial Sequence
  Description of Artificial Sequence: Synthetic oligonucleotide
  Sense strand starting at position 929 of SEQ ID NO: 1888551
gcugauaguggaugacaaa

SEQ ID NO: 2541035 - RNA, 19 nt, Artificial Sequence
  Description of Artificial Sequence: Synthetic oligonucleotide
  Antisense strand to SEQ ID NO: 2541034
uuugucauccacuaucagc

SEQ ID NO: 2541036 - RNA, 19 nt, Artificial Sequence
  Description of Artificial Sequence: Synthetic oligonucleotide
  Sense strand starting at position 1066 of SEQ ID NO: 1888551
cugugagaaugaccuuauu

SEQ ID NO: 2541037 - RNA, 19 nt, Artificial Sequence
  Description of Artificial Sequence: Synthetic oligonucleotide
  Antisense strand to SEQ ID NO: 2541036
aauaaggucauucucacag

SEQ ID NO: 2541038 - RNA, 19 nt, Artificial Sequence
  Description of Artificial Sequence: Synthetic oligonucleotide
  Sense strand starting at position 3733 of SEQ ID NO: 1888551
cagugaguuagcgagagaa

SEQ ID NO: 2541039 - RNA, 19 nt, Artificial Sequence
  Description of Artificial Sequence: Synthetic oligonucleotide
  Antisense strand to SEQ ID NO: 2541038
uucucucgcuaacucacug

SEQ ID NO: 2541040 - RNA, 19 nt, Artificial Sequence
  Description of Artificial Sequence: Synthetic oligonucleotide
  Sense strand starting at position 2386 of SEQ ID NO: 1888551
aggguaagacuuuguggac

SEQ ID NO: 2541041 - RNA, 19 nt, Artificial Sequence
  Description of Artificial Sequence: Synthetic oligonucleotide
  Antisense strand to SEQ ID NO: 2541040
guccacaaagucuuacccu

SEQ ID NO: 2541042 - RNA, 19 nt, Artificial Sequence
  Description of Artificial Sequence: Synthetic oligonucleotide
  Sense strand starting at position 1799 of SEQ ID NO: 1888551
ggcacacacucuuccaaga

SEQ ID NO: 2541043 - RNA, 19 nt, Artificial Sequence
  Description of Artificial Sequence: Synthetic oligonucleotide
  Antisense strand to SEQ ID NO: 2541042
ucuuggaagagugugugcc

SEQ ID NO: 2541044 - RNA, 19 nt, Artificial Sequence
  Description of Artificial Sequence: Synthetic oligonucleotide
  Sense strand starting at position 3057 of SEQ ID NO: 1888551
gagugaguuagagaguugu

SEQ ID NO: 2541045 - RNA, 19 nt, Artificial Sequence
  Description of Artificial Sequence: Synthetic oligonucleotide
  Antisense strand to SEQ ID NO: 2541044
acaacucucuaacucacuc

SEQ ID NO: 2541046 - RNA, 19 nt, Artificial Sequence
  Description of Artificial Sequence: Synthetic oligonucleotide
  Sense strand starting at position 3048 of SEQ ID NO: 1888551
uaaguuagagagugaguua

SEQ ID NO: 2541047 - RNA, 19 nt, Artificial Sequence
  Description of Artificial Sequence: Synthetic oligonucleotide
  Antisense strand to SEQ ID NO: 2541046
uaacucacucucuaacuua

SEQ ID NO: 2541048 - RNA, 19 nt, Artificial Sequence
  Description of Artificial Sequence: Synthetic oligonucleotide
  Sense strand starting at position 3315 of SEQ ID NO: 1888551
gguaaugaagacggucaua

SEQ ID NO: 2541049 - RNA, 19 nt, Artificial Sequence
  Description of Artificial Sequence: Synthetic oligonucleotide
  Antisense strand to SEQ ID NO: 2541048
uaugaccgucuucauuacc

SEQ ID NO: 2541050 - RNA, 19 nt, Artificial Sequence
  Description of Artificial Sequence: Synthetic oligonucleotide
  Sense strand starting at position 3067 of SEQ ID NO: 1888551
gagaguuguuaguuagaga

SEQ ID NO: 2541051 - RNA, 19 nt, Artificial Sequence
  Description of Artificial Sequence: Synthetic oligonucleotide
  Antisense strand to SEQ ID NO: 2541050
ucucuaacuaacaacucuc

SEQ ID NO: 2541052 - RNA, 19 nt, Artificial Sequence
  Description of Artificial Sequence: Synthetic oligonucleotide
  Sense strand starting at position 3269 of SEQ ID NO: 1888551
accacuguucuccaguuaa

SEQ ID NO: 2541053 - RNA, 19 nt, Artificial Sequence
  Description of Artificial Sequence: Synthetic oligonucleotide
  Antisense strand to SEQ ID NO: 2541052
uuaacuggagaacaguggu

SEQ ID NO: 2541054 - RNA, 19 nt, Artificial Sequence
  Description of Artificial Sequence: Synthetic oligonucleotide
  Sense strand starting at position 2502 of SEQ ID NO: 1888551
uugagauucuuagucauug

SEQ ID NO: 2541055 - RNA, 19 nt, Artificial Sequence
  Description of Artificial Sequence: Synthetic oligonucleotide
  Antisense strand to SEQ ID NO: 2541054
caaugacuaagaaucucaa

SEQ ID NO: 2541056 - RNA, 19 nt, Artificial Sequence
  Description of Artificial Sequence: Synthetic oligonucleotide
  Sense strand starting at position 2680 of SEQ ID NO: 1888551
ccgggaaacuucccugacu

SEQ ID NO: 2541057 - RNA, 19 nt, Artificial Sequence
  Description of Artificial Sequence: Synthetic oligonucleotide
  Antisense strand to SEQ ID NO: 2541056
agucagggaaguuucccgg

SEQ ID NO: 2541058 - RNA, 19 nt, Artificial Sequence
  Description of Artificial Sequence: Synthetic oligonucleotide
  Sense strand starting at position 3222 of SEQ ID NO: 1888551
acaaguuuccuggaugcuu

SEQ ID NO: 2541059 - RNA, 19 nt, Artificial Sequence
  Description of Artificial Sequence: Synthetic oligonucleotide
  Antisense strand to SEQ ID NO: 2541058
aagcauccaggaaacuugu

SEQ ID NO: 2541060 - RNA, 19 nt, Artificial Sequence
  Description of Artificial Sequence: Synthetic oligonucleotide
  Sense strand starting at position 2988 of SEQ ID NO: 1888551
ccaccuagugguugaugaa

SEQ ID NO: 2541061 - RNA, 19 nt, Artificial Sequence
  Description of Artificial Sequence: Synthetic oligonucleotide
  Antisense strand to SEQ ID NO: 2541060
uucaucaaccacuaggugg

SEQ ID NO: 2541062 - RNA, 19 nt, Artificial Sequence
  Description of Artificial Sequence: Synthetic oligonucleotide
  Sense strand starting at position 1533 of SEQ ID NO: 1888551
ccgugucagcgugcaacau

SEQ ID NO: 2541063 - RNA, 19 nt, Artificial Sequence
  Description of Artificial Sequence: Synthetic oligonucleotide
  Antisense strand to SEQ ID NO: 2541062
auguugcacgcugacacgg

SEQ ID NO: 2541064 - RNA, 19 nt, Artificial Sequence
  Description of Artificial Sequence: Synthetic oligonucleotide
  Sense strand starting at position 2507 of SEQ ID NO: 1888551
auucuuagucauuggugaa

SEQ ID NO: 2541065 - RNA, 19 nt, Artificial Sequence
  Description of Artificial Sequence: Synthetic oligonucleotide
  Antisense strand to SEQ ID NO: 2541064
uucaccaaugacuaagaau

SEQ ID NO: 2541066 - RNA, 19 nt, Artificial Sequence
  Description of Artificial Sequence: Synthetic oligonucleotide
  Sense strand starting at position 2506 of SEQ ID NO: 1888551
gauucuuagucauugguga

SEQ ID NO: 2541067 - RNA, 19 nt, Artificial Sequence
  Description of Artificial Sequence: Synthetic oligonucleotide
  Antisense strand to SEQ ID NO: 2541066
ucaccaaugacuaagaauc

SEQ ID NO: 2541068 - RNA, 19 nt, Artificial Sequence
  Description of Artificial Sequence: Synthetic oligonucleotide
  Sense strand starting at position 1127 of SEQ ID NO: 1888551
cccuaagucccaugacagu

SEQ ID NO: 2541069 - RNA, 19 nt, Artificial Sequence
  Description of Artificial Sequence: Synthetic oligonucleotide
  Antisense strand to SEQ ID NO: 2541068
acugucaugggacuuaggg

SEQ ID NO: 2541070 - RNA, 19 nt, Artificial Sequence
  Description of Artificial Sequence: Synthetic oligonucleotide
  Sense strand starting at position 1138 of SEQ ID NO: 1888551
augacaguguccuuguaag

SEQ ID NO: 2541071 - RNA, 19 nt, Artificial Sequence
  Description of Artificial Sequence: Synthetic oligonucleotide
  Antisense strand to SEQ ID NO: 2541070
cuuacaaggacacugucau

SEQ ID NO: 2541072 - RNA, 19 nt, Artificial Sequence
  Description of Artificial Sequence: Synthetic oligonucleotide
  Sense strand starting at position 3061 of SEQ ID NO: 1888551
gaguuagagaguuguuagu

SEQ ID NO: 2541073 - RNA, 19 nt, Artificial Sequence
  Description of Artificial Sequence: Synthetic oligonucleotide
  Antisense strand to SEQ ID NO: 2541072
acuaacaacucucuaacuc

SEQ ID NO: 2541074 - RNA, 19 nt, Artificial Sequence
  Description of Artificial Sequence: Synthetic oligonucleotide
  Sense strand starting at position 2756 of SEQ ID NO: 1888551
gcaggaaggguuugcugau

SEQ ID NO: 2541075 - RNA, 19 nt, Artificial Sequence
  Description of Artificial Sequence: Synthetic oligonucleotide
  Antisense strand to SEQ ID NO: 2541074
aucagcaaacccuuccugc

SEQ ID NO: 2541076 - RNA, 19 nt, Artificial Sequence
  Description of Artificial Sequence: Synthetic oligonucleotide
  Sense strand starting at position 3063 of SEQ ID NO: 1888551
guuagagaguuguuaguua

SEQ ID NO: 2541077 - RNA, 19 nt, Artificial Sequence
  Description of Artificial Sequence: Synthetic oligonucleotide
  Antisense strand to SEQ ID NO: 2541076
uaacuaacaacucucuaac

SEQ ID NO: 2541078 - RNA, 19 nt, Artificial Sequence
  Description of Artificial Sequence: Synthetic oligonucleotide
  Sense strand starting at position 2489 of SEQ ID NO: 1888551
cugccauccugucuugaga

SEQ ID NO: 2541079 - RNA, 19 nt, Artificial Sequence
  Description of Artificial Sequence: Synthetic oligonucleotide
  Antisense strand to SEQ ID NO: 2541078
ucucaagacaggauggcag

SEQ ID NO: 2541080 - RNA, 19 nt, Artificial Sequence
  Description of Artificial Sequence: Synthetic oligonucleotide
  Sense strand starting at position 1136 of SEQ ID NO: 1888551
ccaugacaguguccuugua

SEQ ID NO: 2541081 - RNA, 19 nt, Artificial Sequence
  Description of Artificial Sequence: Synthetic oligonucleotide
  Antisense strand to SEQ ID NO: 2541080
uacaaggacacugucaugg

SEQ ID NO: 2541082 - RNA, 19 nt, Artificial Sequence
  Description of Artificial Sequence: Synthetic oligonucleotide
  Sense strand starting at position 3340 of SEQ ID NO: 1888551
gugaguugcagggaucgca

SEQ ID NO: 2541083 - RNA, 19 nt, Artificial Sequence
  Description of Artificial Sequence: Synthetic oligonucleotide
  Antisense strand to SEQ ID NO: 2541082
ugcgaucccugcaacucac

SEQ ID NO: 2541084 - RNA, 19 nt, Artificial Sequence
  Description of Artificial Sequence: Synthetic oligonucleotide
  Sense strand starting at position 2042 of SEQ ID NO: 1888551
aagugacagcgucauuguu

SEQ ID NO: 2541085 - RNA, 19 nt, Artificial Sequence
  Description of Artificial Sequence: Synthetic oligonucleotide
  Antisense strand to SEQ ID NO: 2541084
aacaaugacgcugucacuu

SEQ ID NO: 2541086 - RNA, 19 nt, Artificial Sequence
  Description of Artificial Sequence: Synthetic oligonucleotide
  Sense strand starting at position 2000 of SEQ ID NO: 1888551
ccagguucccagugucaug

SEQ ID NO: 2541087 - RNA, 19 nt, Artificial Sequence
  Description of Artificial Sequence: Synthetic oligonucleotide
  Antisense strand to SEQ ID NO: 2541086
caugacacugggaaccugg

SEQ ID NO: 2541088 - RNA, 19 nt, Artificial Sequence
  Description of Artificial Sequence: Synthetic oligonucleotide
  Sense strand starting at position 748 of SEQ ID NO: 1888551
ggcggagcuuuggugacaa

SEQ ID NO: 2541089 - RNA, 19 nt, Artificial Sequence
  Description of Artificial Sequence: Synthetic oligonucleotide
  Antisense strand to SEQ ID NO: 2541088
uugucaccaaagcuccgcc

SEQ ID NO: 2541090 - RNA, 19 nt, Artificial Sequence
  Description of Artificial Sequence: Synthetic oligonucleotide
  Sense strand starting at position 1346 of SEQ ID NO: 1888551
ucgaauaaaugucuguugu

SEQ ID NO: 2541091 - RNA, 19 nt, Artificial Sequence
  Description of Artificial Sequence: Synthetic oligonucleotide
  Antisense strand to SEQ ID NO: 2541090
acaacagacauuuauucga

SEQ ID NO: 2541092 - RNA, 19 nt, Artificial Sequence
  Description of Artificial Sequence: Synthetic oligonucleotide
  Sense strand starting at position 2024 of SEQ ID NO: 1888551
aacaguggcuguuuguuaa

SEQ ID NO: 2541093 - RNA, 19 nt, Artificial Sequence
  Description of Artificial Sequence: Synthetic oligonucleotide
  Antisense strand to SEQ ID NO: 2541092
uuaacaaacagccacuguu

SEQ ID NO: 2541094 - RNA, 19 nt, Artificial Sequence
  Description of Artificial Sequence: Synthetic oligonucleotide
  Sense strand starting at position 1097 of SEQ ID NO: 1888551
cuaauugcauccuggauuu

SEQ ID NO: 2541095 - RNA, 19 nt, Artificial Sequence
  Description of Artificial Sequence: Synthetic oligonucleotide
  Antisense strand to SEQ ID NO: 2541094
aaauccaggaugcaauuag

SEQ ID NO: 2541096 - RNA, 19 nt, Artificial Sequence
  Description of Artificial Sequence: Synthetic oligonucleotide
  Sense strand starting at position 156 of SEQ ID NO: 1888551
gcugucaucaaucgagucu

SEQ ID NO: 2541097 - RNA, 19 nt, Artificial Sequence
  Description of Artificial Sequence: Synthetic oligonucleotide
  Antisense strand to SEQ ID NO: 2541096
agacucgauugaugacagc

SEQ ID NO: 2541098 - RNA, 19 nt, Artificial Sequence
  Description of Artificial Sequence: Synthetic oligonucleotide
  Sense strand starting at position 3674 of SEQ ID NO: 1888552
ugguaugucaugcugcgau

SEQ ID NO: 2541099 - RNA, 19 nt, Artificial Sequence
  Description of Artificial Sequence: Synthetic oligonucleotide
  Antisense strand to SEQ ID NO: 2541098
aucgcagcaugacauacca

SEQ ID NO: 2541100 - RNA, 19 nt, Artificial Sequence
  Description of Artificial Sequence: Synthetic oligonucleotide
  Sense strand starting at position 3136 of SEQ ID NO: 1888552
guaagaagcacuugagaga

SEQ ID NO: 2541101 - RNA, 19 nt, Artificial Sequence
  Description of Artificial Sequence: Synthetic oligonucleotide
  Antisense strand to SEQ ID NO: 2541100
ucucucaagugcuucuuac

SEQ ID NO: 2541102 - RNA, 19 nt, Artificial Sequence
  Description of Artificial Sequence: Synthetic oligonucleotide
  Sense strand starting at position 3673 of SEQ ID NO: 1888552
gugguaugucaugcugcga

SEQ ID NO: 2541103 - RNA, 19 nt, Artificial Sequence
  Description of Artificial Sequence: Synthetic oligonucleotide
  Antisense strand to SEQ ID NO: 2541102
ucgcagcaugacauaccac

SEQ ID NO: 2541104 - RNA, 19 nt, Artificial Sequence
  Description of Artificial Sequence: Synthetic oligonucleotide
  Sense strand starting at position 3711 of SEQ ID NO: 1888552
ugaagugaggccuggugaa

SEQ ID NO: 2541105 - RNA, 19 nt, Artificial Sequence
  Description of Artificial Sequence: Synthetic oligonucleotide
  Antisense strand to SEQ ID NO: 2541104
uucaccaggccucacuuca

SEQ ID NO: 2541106 - RNA, 19 nt, Artificial Sequence
  Description of Artificial Sequence: Synthetic oligonucleotide
  Sense strand starting at position 3467 of SEQ ID NO: 1888552
gccucaguccaugaaguuu

SEQ ID NO: 2541107 - RNA, 19 nt, Artificial Sequence
  Description of Artificial Sequence: Synthetic oligonucleotide
  Antisense strand to SEQ ID NO: 2541106
aaacuucauggacugaggc

SEQ ID NO: 2541108 - RNA, 19 nt, Artificial Sequence
  Description of Artificial Sequence: Synthetic oligonucleotide
  Sense strand starting at position 3466 of SEQ ID NO: 1888552
ggccucaguccaugaaguu

SEQ ID NO: 2541109 - RNA, 19 nt, Artificial Sequence
  Description of Artificial Sequence: Synthetic oligonucleotide
  Antisense strand to SEQ ID NO: 2541108
aacuucauggacugaggcc

SEQ ID NO: 2541110 - RNA, 19 nt, Artificial Sequence
  Description of Artificial Sequence: Synthetic oligonucleotide
  Sense strand starting at position 2770 of SEQ ID NO: 1888552
ucucauguauguguauauu

SEQ ID NO: 2541111 - RNA, 19 nt, Artificial Sequence
  Description of Artificial Sequence: Synthetic oligonucleotide
  Antisense strand to SEQ ID NO: 2541110
aauauacacauacaugaga

SEQ ID NO: 2541112 - RNA, 19 nt, Artificial Sequence
  Description of Artificial Sequence: Synthetic oligonucleotide
  Sense strand starting at position 2768 of SEQ ID NO: 1888552
ucucucauguauguguaua

SEQ ID NO: 2541113 - RNA, 19 nt, Artificial Sequence
  Description of Artificial Sequence: Synthetic oligonucleotide
  Antisense strand to SEQ ID NO: 2541112
uauacacauacaugagaga

SEQ ID NO: 2541114 - RNA, 19 nt, Artificial Sequence
  Description of Artificial Sequence: Synthetic oligonucleotide
  Sense strand starting at position 2843 of SEQ ID NO: 1888552
cgugcagaguucucacaaa

SEQ ID NO: 2541115 - RNA, 19 nt, Artificial Sequence
  Description of Artificial Sequence: Synthetic oligonucleotide
  Antisense strand to SEQ ID NO: 2541114
uuugugagaacucugcacg

SEQ ID NO: 2541116 - RNA, 19 nt, Artificial Sequence
  Description of Artificial Sequence: Synthetic oligonucleotide
  Sense strand starting at position 2094 of SEQ ID NO: 1888552
cgucaaaccuugcuggauu

SEQ ID NO: 2541117 - RNA, 19 nt, Artificial Sequence
  Description of Artificial Sequence: Synthetic oligonucleotide
  Antisense strand to SEQ ID NO: 2541116
aauccagcaagguuugacg

SEQ ID NO: 2541118 - RNA, 19 nt, Artificial Sequence
  Description of Artificial Sequence: Synthetic oligonucleotide
  Sense strand starting at position 3847 of SEQ ID NO: 1888552
gauguuaaagcgugaguga

SEQ ID NO: 2541119 - RNA, 19 nt, Artificial Sequence
  Description of Artificial Sequence: Synthetic oligonucleotide
  Antisense strand to SEQ ID NO: 2541118
ucacucacgcuuuaacauc

SEQ ID NO: 2541120 - RNA, 19 nt, Artificial Sequence
  Description of Artificial Sequence: Synthetic oligonucleotide
  Sense strand starting at position 3850 of SEQ ID NO: 1888552
guuaaagcgugagugacau

SEQ ID NO: 2541121 - RNA, 19 nt, Artificial Sequence
  Description of Artificial Sequence: Synthetic oligonucleotide
  Antisense strand to SEQ ID NO: 2541120
augucacucacgcuuuaac

SEQ ID NO: 2541122 - RNA, 19 nt, Artificial Sequence
  Description of Artificial Sequence: Synthetic oligonucleotide
  Sense strand starting at position 2835 of SEQ ID NO: 1888552
ccauucuucgugcagaguu

SEQ ID NO: 2541123 - RNA, 19 nt, Artificial Sequence
  Description of Artificial Sequence: Synthetic oligonucleotide
  Antisense strand to SEQ ID NO: 2541122
aacucugcacgaagaaugg

SEQ ID NO: 2541124 - RNA, 19 nt, Artificial Sequence
  Description of Artificial Sequence: Synthetic oligonucleotide
  Sense strand starting at position 3843 of SEQ ID NO: 1888552
agaggauguuaaagcguga

SEQ ID NO: 2541125 - RNA, 19 nt, Artificial Sequence
  Description of Artificial Sequence: Synthetic oligonucleotide
  Antisense strand to SEQ ID NO: 2541124
ucacgcuuuaacauccucu

SEQ ID NO: 2541126 - RNA, 19 nt, Artificial Sequence
  Description of Artificial Sequence: Synthetic oligonucleotide
  Sense strand starting at position 2832 of SEQ ID NO: 1888552
ucaccauucuucgugcaga

SEQ ID NO: 2541127 - RNA, 19 nt, Artificial Sequence
  Description of Artificial Sequence: Synthetic oligonucleotide
  Antisense strand to SEQ ID NO: 2541126
ucugcacgaagaaugguga

SEQ ID NO: 2541128 - RNA, 19 nt, Artificial Sequence
  Description of Artificial Sequence: Synthetic oligonucleotide
  Sense strand starting at position 3422 of SEQ ID NO: 1888552
cugacauuguaccaugaau

SEQ ID NO: 2541129 - RNA, 19 nt, Artificial Sequence
  Description of Artificial Sequence: Synthetic oligonucleotide
  Antisense strand to SEQ ID NO: 2541128
auucaugguacaaugucag

SEQ ID NO: 2541130 - RNA, 19 nt, Artificial Sequence
  Description of Artificial Sequence: Synthetic oligonucleotide
  Sense strand starting at position 2095 of SEQ ID NO: 1888552
gucaaaccuugcuggauuu

SEQ ID NO: 2541131 - RNA, 19 nt, Artificial Sequence
  Description of Artificial Sequence: Synthetic oligonucleotide
  Antisense strand to SEQ ID NO: 2541130
aaauccagcaagguuugac

SEQ ID NO: 2541132 - RNA, 19 nt, Artificial Sequence
  Description of Artificial Sequence: Synthetic oligonucleotide
  Sense strand starting at position 3862 of SEQ ID NO: 1888552
gugacauccucugaccuuu

SEQ ID NO: 2541133 - RNA, 19 nt, Artificial Sequence
  Description of Artificial Sequence: Synthetic oligonucleotide
  Antisense strand to SEQ ID NO: 2541132
aaaggucagaggaugucac

SEQ ID NO: 2541134 - RNA, 19 nt, Artificial Sequence
  Description of Artificial Sequence: Synthetic oligonucleotide
  Sense strand starting at position 2763 of SEQ ID NO: 1888552
aucauucucucauguaugu

SEQ ID NO: 2541135 - RNA, 19 nt, Artificial Sequence
  Description of Artificial Sequence: Synthetic oligonucleotide
  Antisense strand to SEQ ID NO: 2541134
acauacaugagagaaugau

SEQ ID NO: 2541136 - RNA, 19 nt, Artificial Sequence
  Description of Artificial Sequence: Synthetic oligonucleotide
  Sense strand starting at position 3599 of SEQ ID NO: 1888553
aguagcuuggaccacaaau

SEQ ID NO: 2541137 - RNA, 19 nt, Artificial Sequence
  Description of Artificial Sequence: Synthetic oligonucleotide
  Antisense strand to SEQ ID NO: 2541136
auuugugguccaagcuacu

SEQ ID NO: 2541138 - RNA, 19 nt, Artificial Sequence
  Description of Artificial Sequence: Synthetic oligonucleotide
  Sense strand starting at position 3932 of SEQ ID NO: 1888553
uugaaauaaguguaguuga

SEQ ID NO: 2541139 - RNA, 19 nt, Artificial Sequence
  Description of Artificial Sequence: Synthetic oligonucleotide
  Antisense strand to SEQ ID NO: 2541138
ucaacuacacuuauuucaa

SEQ ID NO: 2541140 - RNA, 19 nt, Artificial Sequence
  Description of Artificial Sequence: Synthetic oligonucleotide
  Sense strand starting at position 844 of SEQ ID NO: 1888553
gaaagaacuccagguaggu

SEQ ID NO: 2541141 - RNA, 19 nt, Artificial Sequence
  Description of Artificial Sequence: Synthetic oligonucleotide
  Antisense strand to SEQ ID NO: 2541140
accuaccuggaguucuuuc

SEQ ID NO: 2541142 - RNA, 19 nt, Artificial Sequence
  Description of Artificial Sequence: Synthetic oligonucleotide
  Sense strand starting at position 1056 of SEQ ID NO: 1888553
guauuaaagugcccuauuu

SEQ ID NO: 2541143 - RNA, 19 nt, Artificial Sequence
  Description of Artificial Sequence: Synthetic oligonucleotide
  Antisense strand to SEQ ID NO: 2541142
aaauagggcacuuuaauac

SEQ ID NO: 2541144 - RNA, 19 nt, Artificial Sequence
  Description of Artificial Sequence: Synthetic oligonucleotide
  Sense strand starting at position 2812 of SEQ ID NO: 1888553
gugacugagcuggaauuca

SEQ ID NO: 2541145 - RNA, 19 nt, Artificial Sequence
  Description of Artificial Sequence: Synthetic oligonucleotide
  Antisense strand to SEQ ID NO: 2541144
ugaauuccagcucagucac

SEQ ID NO: 2541146 - RNA, 19 nt, Artificial Sequence
  Description of Artificial Sequence: Synthetic oligonucleotide
  Sense strand starting at position 2444 of SEQ ID NO: 1888553
gacacauuggcucaaugua

SEQ ID NO: 2541147 - RNA, 19 nt, Artificial Sequence
  Description of Artificial Sequence: Synthetic oligonucleotide
  Antisense strand to SEQ ID NO: 2541146
uacauugagccaauguguc

SEQ ID NO: 2541148 - RNA, 19 nt, Artificial Sequence
  Description of Artificial Sequence: Synthetic oligonucleotide
  Sense strand starting at position 1093 of SEQ ID NO: 1888553
gagugcacugauuauccaa

SEQ ID NO: 2541149 - RNA, 19 nt, Artificial Sequence
  Description of Artificial Sequence: Synthetic oligonucleotide
  Antisense strand to SEQ ID NO: 2541148
uuggauaaucagugcacuc

SEQ ID NO: 2541150 - RNA, 19 nt, Artificial Sequence
  Description of Artificial Sequence: Synthetic oligonucleotide
  Sense strand starting at position 2288 of SEQ ID NO: 1888553
ggcugauaacucuaagguu

SEQ ID NO: 2541151 - RNA, 19 nt, Artificial Sequence
  Description of Artificial Sequence: Synthetic oligonucleotide
  Antisense strand to SEQ ID NO: 2541150
aaccuuagaguuaucagcc

SEQ ID NO: 2541152 - RNA, 19 nt, Artificial Sequence
  Description of Artificial Sequence: Synthetic oligonucleotide
  Sense strand starting at position 1625 of SEQ ID NO: 1888553
guuaccagaugaucuauau

SEQ ID NO: 2541153 - RNA, 19 nt, Artificial Sequence
  Description of Artificial Sequence: Synthetic oligonucleotide
  Antisense strand to SEQ ID NO: 2541152
auauagaucaucugguaac

SEQ ID NO: 2541154 - RNA, 19 nt, Artificial Sequence
  Description of Artificial Sequence: Synthetic oligonucleotide
  Sense strand starting at position 2422 of SEQ ID NO: 1888553
caagacugagucugagagu

SEQ ID NO: 2541155 - RNA, 19 nt, Artificial Sequence
  Description of Artificial Sequence: Synthetic oligonucleotide
  Antisense strand to SEQ ID NO: 2541154
acucucagacucagucuug

SEQ ID NO: 2541156 - RNA, 19 nt, Artificial Sequence
  Description of Artificial Sequence: Synthetic oligonucleotide
  Sense strand starting at position 3010 of SEQ ID NO: 1888553
gggaauccguucccagaaa

SEQ ID NO: 2541157 - RNA, 19 nt, Artificial Sequence
  Description of Artificial Sequence: Synthetic oligonucleotide
  Antisense strand to SEQ ID NO: 2541156
uuucugggaacggauuccc

SEQ ID NO: 2541158 - RNA, 19 nt, Artificial Sequence
  Description of Artificial Sequence: Synthetic oligonucleotide
  Sense strand starting at position 2304 of SEQ ID NO: 1888553
guuugauggucugccauuu

SEQ ID NO: 2541159 - RNA, 19 nt, Artificial Sequence
  Description of Artificial Sequence: Synthetic oligonucleotide
  Antisense strand to SEQ ID NO: 2541158
aaauggcagaccaucaaac

SEQ ID NO: 2541160 - RNA, 19 nt, Artificial Sequence
  Description of Artificial Sequence: Synthetic oligonucleotide
  Sense strand starting at position 1089 of SEQ ID NO: 1888553
ugaagagugcacugauuau

SEQ ID NO: 2541161 - RNA, 19 nt, Artificial Sequence
  Description of Artificial Sequence: Synthetic oligonucleotide
  Antisense strand to SEQ ID NO: 2541160
auaaucagugcacucuuca

SEQ ID NO: 2541162 - RNA, 19 nt, Artificial Sequence
  Description of Artificial Sequence: Synthetic oligonucleotide
  Sense strand starting at position 1484 of SEQ ID NO: 1888553
cguggucucuuccugauuu

SEQ ID NO: 2541163 - RNA, 19 nt, Artificial Sequence
  Description of Artificial Sequence: Synthetic oligonucleotide
  Antisense strand to SEQ ID NO: 2541162
aaaucaggaagagaccacg

SEQ ID NO: 2541164 - RNA, 19 nt, Artificial Sequence
  Description of Artificial Sequence: Synthetic oligonucleotide
  Sense strand starting at position 1270 of SEQ ID NO: 1888553
ugacuuaacuguguccaag

SEQ ID NO: 2541165 - RNA, 19 nt, Artificial Sequence
  Description of Artificial Sequence: Synthetic oligonucleotide
  Antisense strand to SEQ ID NO: 2541164
cuuggacacaguuaaguca

SEQ ID NO: 2541166 - RNA, 19 nt, Artificial Sequence
  Description of Artificial Sequence: Synthetic oligonucleotide
  Sense strand starting at position 1096 of SEQ ID NO: 1888553
ugcacugauuauccaaagu

SEQ ID NO: 2541167 - RNA, 19 nt, Artificial Sequence
  Description of Artificial Sequence: Synthetic oligonucleotide
  Antisense strand to SEQ ID NO: 2541166
acuuuggauaaucagugca

SEQ ID NO: 2541168 - RNA, 19 nt, Artificial Sequence
  Description of Artificial Sequence: Synthetic oligonucleotide
  Sense strand starting at position 3161 of SEQ ID NO: 1888553
gggugacugugaguucaca

SEQ ID NO: 2541169 - RNA, 19 nt, Artificial Sequence
  Description of Artificial Sequence: Synthetic oligonucleotide
  Antisense strand to SEQ ID NO: 2541168
ugugaacucacagucaccc

SEQ ID NO: 2541170 - RNA, 19 nt, Artificial Sequence
  Description of Artificial Sequence: Synthetic oligonucleotide
  Sense strand starting at position 3980 of SEQ ID NO: 1888553
cuguaaaguaugugaucca

SEQ ID NO: 2541171 - RNA, 19 nt, Artificial Sequence
  Description of Artificial Sequence: Synthetic oligonucleotide
  Antisense strand to SEQ ID NO: 2541170
uggaucacauacuuuacag

SEQ ID NO: 2541172 - RNA, 19 nt, Artificial Sequence
  Description of Artificial Sequence: Synthetic oligonucleotide
  Sense strand starting at position 3978 of SEQ ID NO: 1888553
aucuguaaaguaugugauc

SEQ ID NO: 2541173 - RNA, 19 nt, Artificial Sequence
  Description of Artificial Sequence: Synthetic oligonucleotide
  Antisense strand to SEQ ID NO: 2541172
gaucacauacuuuacagau

SEQ ID NO: 2541174 - RNA, 19 nt, Artificial Sequence
  Description of Artificial Sequence: Synthetic oligonucleotide
  Sense strand starting at position 2549 of SEQ ID NO: 1888553
uagcaaugccagggucaga

SEQ ID NO: 2541175 - RNA, 19 nt, Artificial Sequence
  Description of Artificial Sequence: Synthetic oligonucleotide
  Antisense strand to SEQ ID NO: 2541174
ucugacccuggcauugcua

SEQ ID NO: 2541176 - RNA, 19 nt, Artificial Sequence
  Description of Artificial Sequence: Synthetic oligonucleotide
  Sense strand starting at position 1263 of SEQ ID NO: 1888553
cccugugugacuuaacugu

SEQ ID NO: 2541177 - RNA, 19 nt, Artificial Sequence
  Description of Artificial Sequence: Synthetic oligonucleotide
  Antisense strand to SEQ ID NO: 2541176
acaguuaagucacacaggg

SEQ ID NO: 2541178 - RNA, 19 nt, Artificial Sequence
  Description of Artificial Sequence: Synthetic oligonucleotide
  Sense strand starting at position 623 of SEQ ID NO: 1888553
gggcaagugucacuaucca

SEQ ID NO: 2541179 - RNA, 19 nt, Artificial Sequence
  Description of Artificial Sequence: Synthetic oligonucleotide
  Antisense strand to SEQ ID NO: 2541178
uggauagugacacuugccc

SEQ ID NO: 2541180 - RNA, 19 nt, Artificial Sequence
  Description of Artificial Sequence: Synthetic oligonucleotide
  Sense strand starting at position 2801 of SEQ ID NO: 1888553
ucagcuucucagugacuga

SEQ ID NO: 2541181 - RNA, 19 nt, Artificial Sequence
  Description of Artificial Sequence: Synthetic oligonucleotide
  Antisense strand to SEQ ID NO: 2541180
ucagucacugagaagcuga

SEQ ID NO: 2541182 - RNA, 19 nt, Artificial Sequence
  Description of Artificial Sequence: Synthetic oligonucleotide
  Sense strand starting at position 1269 of SEQ ID NO: 1888553
gugacuuaacuguguccaa

SEQ ID NO: 2541183 - RNA, 19 nt, Artificial Sequence
  Description of Artificial Sequence: Synthetic oligonucleotide
  Antisense strand to SEQ ID NO: 2541182
uuggacacaguuaagucac

SEQ ID NO: 2541184 - RNA, 19 nt, Artificial Sequence
  Description of Artificial Sequence: Synthetic oligonucleotide
  Sense strand starting at position 3133 of SEQ ID NO: 1888553
gguccuuuccagcauaugu

SEQ ID NO: 2541185 - RNA, 19 nt, Artificial Sequence
  Description of Artificial Sequence: Synthetic oligonucleotide
  Antisense strand to SEQ ID NO: 2541184
acauaugcuggaaaggacc

SEQ ID NO: 2541186 - RNA, 19 nt, Artificial Sequence
  Description of Artificial Sequence: Synthetic oligonucleotide
  Sense strand starting at position 1495 of SEQ ID NO: 1888553
ccugauuucucagggaacu

SEQ ID NO: 2541187 - RNA, 19 nt, Artificial Sequence
  Description of Artificial Sequence: Synthetic oligonucleotide
  Antisense strand to SEQ ID NO: 2541186
aguucccugagaaaucagg

SEQ ID NO: 2541188 - RNA, 19 nt, Artificial Sequence
  Description of Artificial Sequence: Synthetic oligonucleotide
  Sense strand starting at position 3881 of SEQ ID NO: 1888553
gaugguggcuucuuaagua

SEQ ID NO: 2541189 - RNA, 19 nt, Artificial Sequence
  Description of Artificial Sequence: Synthetic oligonucleotide
  Antisense strand to SEQ ID NO: 2541188
uacuuaagaagccaccauc

SEQ ID NO: 2541190 - RNA, 19 nt, Artificial Sequence
  Description of Artificial Sequence: Synthetic oligonucleotide
  Sense strand starting at position 2144 of SEQ ID NO: 1888553
ccagccuucucuucuggau

SEQ ID NO: 2541191 - RNA, 19 nt, Artificial Sequence
  Description of Artificial Sequence: Synthetic oligonucleotide
  Antisense strand to SEQ ID NO: 2541190
auccagaagagaaggcugg

SEQ ID NO: 2541192 - RNA, 19 nt, Artificial Sequence
  Description of Artificial Sequence: Synthetic oligonucleotide
  Sense strand starting at position 1065 of SEQ ID NO: 1888553
ugcccuauuugugaaggaa

SEQ ID NO: 2541193 - RNA, 19 nt, Artificial Sequence
  Description of Artificial Sequence: Synthetic oligonucleotide
  Antisense strand to SEQ ID NO: 2541192
uuccuucacaaauagggca

SEQ ID NO: 2541194 - RNA, 19 nt, Artificial Sequence
  Description of Artificial Sequence: Synthetic oligonucleotide
  Sense strand starting at position 3885 of SEQ ID NO: 1888553
guggcuucuuaaguauaua

SEQ ID NO: 2541195 - RNA, 19 nt, Artificial Sequence
  Description of Artificial Sequence: Synthetic oligonucleotide
  Antisense strand to SEQ ID NO: 2541194
uauauacuuaagaagccac

SEQ ID NO: 2541196 - RNA, 19 nt, Artificial Sequence
  Description of Artificial Sequence: Synthetic oligonucleotide
  Sense strand starting at position 149 of SEQ ID NO: 1888553
gcucuaucaccuggguacu

SEQ ID NO: 2541197 - RNA, 19 nt, Artificial Sequence
  Description of Artificial Sequence: Synthetic oligonucleotide
  Antisense strand to SEQ ID NO: 2541196
aguacccaggugauagagc

SEQ ID NO: 2541198 - RNA, 19 nt, Artificial Sequence
  Description of Artificial Sequence: Synthetic oligonucleotide
  Sense strand starting at position 1668 of SEQ ID NO: 1888553
caaugugcugccugagaca

SEQ ID NO: 2541199 - RNA, 19 nt, Artificial Sequence
  Description of Artificial Sequence: Synthetic oligonucleotide
  Antisense strand to SEQ ID NO: 2541198
ugucucaggcagcacauug

SEQ ID NO: 2541200 - RNA, 19 nt, Artificial Sequence
  Description of Artificial Sequence: Synthetic oligonucleotide
  Sense strand starting at position 3949 of SEQ ID NO: 1888553
gauuauacgugucccuuau

SEQ ID NO: 2541201 - RNA, 19 nt, Artificial Sequence
  Description of Artificial Sequence: Synthetic oligonucleotide
  Antisense strand to SEQ ID NO: 2541200
auaagggacacguauaauc

SEQ ID NO: 2541202 - RNA, 19 nt, Artificial Sequence
  Description of Artificial Sequence: Synthetic oligonucleotide
  Sense strand starting at position 3877 of SEQ ID NO: 1888553
uggugaugguggcuucuua

SEQ ID NO: 2541203 - RNA, 19 nt, Artificial Sequence
  Description of Artificial Sequence: Synthetic oligonucleotide
  Antisense strand to SEQ ID NO: 2541202
uaagaagccaccaucacca

SEQ ID NO: 2541204 - RNA, 19 nt, Artificial Sequence
  Description of Artificial Sequence: Synthetic oligonucleotide
  Sense strand starting at position 198 of SEQ ID NO: 1888553
gagacuugaucaggagauc

SEQ ID NO: 2541205 - RNA, 19 nt, Artificial Sequence
  Description of Artificial Sequence: Synthetic oligonucleotide
  Antisense strand to SEQ ID NO: 2541204
gaucuccugaucaagucuc

SEQ ID NO: 2541206 - RNA, 19 nt, Artificial Sequence
  Description of Artificial Sequence: Synthetic oligonucleotide
  Sense strand starting at position 2916 of SEQ ID NO: 1888553
ccacguguugagggcuauu

SEQ ID NO: 2541207 - RNA, 19 nt, Artificial Sequence
  Description of Artificial Sequence: Synthetic oligonucleotide
  Antisense strand to SEQ ID NO: 2541206
aauagcccucaacacgugg

SEQ ID NO: 2541208 - RNA, 19 nt, Artificial Sequence
  Description of Artificial Sequence: Synthetic oligonucleotide
  Sense strand starting at position 3946 of SEQ ID NO: 1888553
guugauuauacgugucccu

SEQ ID NO: 2541209 - RNA, 19 nt, Artificial Sequence
  Description of Artificial Sequence: Synthetic oligonucleotide
  Antisense strand to SEQ ID NO: 2541208
agggacacguauaaucaac

SEQ ID NO: 2541210 - RNA, 19 nt, Artificial Sequence
  Description of Artificial Sequence: Synthetic oligonucleotide
  Sense strand starting at position 2423 of SEQ ID NO: 1888553
aagacugagucugagaguu

SEQ ID NO: 2541211 - RNA, 19 nt, Artificial Sequence
  Description of Artificial Sequence: Synthetic oligonucleotide
  Antisense strand to SEQ ID NO: 2541210
aacucucagacucagucuu

SEQ ID NO: 2541212 - RNA, 19 nt, Artificial Sequence
  Description of Artificial Sequence: Synthetic oligonucleotide
  Sense strand starting at position 1254 of SEQ ID NO: 1888553
gaggcugcucccuguguga

SEQ ID NO: 2541213 - RNA, 19 nt, Artificial Sequence
  Description of Artificial Sequence: Synthetic oligonucleotide
  Antisense strand to SEQ ID NO: 2541212
ucacacagggagcagccuc

SEQ ID NO: 2541214 - RNA, 19 nt, Artificial Sequence
  Description of Artificial Sequence: Synthetic oligonucleotide
  Sense strand starting at position 853 of SEQ ID NO: 1888553
ccagguaggucggagagaa

SEQ ID NO: 2541215 - RNA, 19 nt, Artificial Sequence
  Description of Artificial Sequence: Synthetic oligonucleotide
  Antisense strand to SEQ ID NO: 2541214
uucucuccgaccuaccugg

SEQ ID NO: 2541216 - RNA, 19 nt, Artificial Sequence
  Description of Artificial Sequence: Synthetic oligonucleotide
  Sense strand starting at position 770 of SEQ ID NO: 1888554
cuagcuuugccaucagugu

SEQ ID NO: 2541217 - RNA, 19 nt, Artificial Sequence
  Description of Artificial Sequence: Synthetic oligonucleotide
  Antisense strand to SEQ ID NO: 2541216
acacugauggcaaagcuag

SEQ ID NO: 2541218 - RNA, 19 nt, Artificial Sequence
  Description of Artificial Sequence: Synthetic oligonucleotide
  Sense strand starting at position 697 of SEQ ID NO: 1888554
ggguaucuucaguauagag

SEQ ID NO: 2541219 - RNA, 19 nt, Artificial Sequence
  Description of Artificial Sequence: Synthetic oligonucleotide
  Antisense strand to SEQ ID NO: 2541218
cucuauacugaagauaccc

SEQ ID NO: 2541220 - RNA, 19 nt, Artificial Sequence
  Description of Artificial Sequence: Synthetic oligonucleotide
  Sense strand starting at position 3284 of SEQ ID NO: 1888554
ugugauguugaggauuaca

SEQ ID NO: 2541221 - RNA, 19 nt, Artificial Sequence
  Description of Artificial Sequence: Synthetic oligonucleotide
  Antisense strand to SEQ ID NO: 2541220
uguaauccucaacaucaca

SEQ ID NO: 2541222 - RNA, 19 nt, Artificial Sequence
  Description of Artificial Sequence: Synthetic oligonucleotide
  Sense strand starting at position 1141 of SEQ ID NO: 1888554
cccguuguccaguuaugua

SEQ ID NO: 2541223 - RNA, 19 nt, Artificial Sequence
  Description of Artificial Sequence: Synthetic oligonucleotide
  Antisense strand to SEQ ID NO: 2541222
uacauaacuggacaacggg

SEQ ID NO: 2541224 - RNA, 19 nt, Artificial Sequence
  Description of Artificial Sequence: Synthetic oligonucleotide
  Sense strand starting at position 1008 of SEQ ID NO: 1888554
aucugaagucauuauggua

SEQ ID NO: 2541225 - RNA, 19 nt, Artificial Sequence
  Description of Artificial Sequence: Synthetic oligonucleotide
  Antisense strand to SEQ ID NO: 2541224
uaccauaaugacuucagau

SEQ ID NO: 2541226 - RNA, 19 nt, Artificial Sequence
  Description of Artificial Sequence: Synthetic oligonucleotide
  Sense strand starting at position 2366 of SEQ ID NO: 1888554
cuucccauuguugagauga

SEQ ID NO: 2541227 - RNA, 19 nt, Artificial Sequence
  Description of Artificial Sequence: Synthetic oligonucleotide
  Antisense strand to SEQ ID NO: 2541226
ucaucucaacaaugggaag

SEQ ID NO: 2541228 - RNA, 19 nt, Artificial Sequence
  Description of Artificial Sequence: Synthetic oligonucleotide
  Sense strand starting at position 2104 of SEQ ID NO: 1888554
aggagagaaugguucuagu

SEQ ID NO: 2541229 - RNA, 19 nt, Artificial Sequence
  Description of Artificial Sequence: Synthetic oligonucleotide
  Antisense strand to SEQ ID NO: 2541228
acuagaaccauucucuccu

SEQ ID NO: 2541230 - RNA, 19 nt, Artificial Sequence
  Description of Artificial Sequence: Synthetic oligonucleotide
  Sense strand starting at position 3891 of SEQ ID NO: 1888554
gcagaauguggaugacaag

SEQ ID NO: 2541231 - RNA, 19 nt, Artificial Sequence
  Description of Artificial Sequence: Synthetic oligonucleotide
  Antisense strand to SEQ ID NO: 2541230
cuugucauccacauucugc

SEQ ID NO: 2541232 - RNA, 19 nt, Artificial Sequence
  Description of Artificial Sequence: Synthetic oligonucleotide
  Sense strand starting at position 2611 of SEQ ID NO: 1888554
guagaugaccucugaacca

SEQ ID NO: 2541233 - RNA, 19 nt, Artificial Sequence
  Description of Artificial Sequence: Synthetic oligonucleotide
  Antisense strand to SEQ ID NO: 2541232
ugguucagaggucaucuac

SEQ ID NO: 2541234 - RNA, 19 nt, Artificial Sequence
  Description of Artificial Sequence: Synthetic oligonucleotide
  Sense strand starting at position 1467 of SEQ ID NO: 1888554
cccauuaagcaggaucagu

SEQ ID NO: 2541235 - RNA, 19 nt, Artificial Sequence
  Description of Artificial Sequence: Synthetic oligonucleotide
  Antisense strand to SEQ ID NO: 2541234
acugauccugcuuaauggg

SEQ ID NO: 2541236 - RNA, 19 nt, Artificial Sequence
  Description of Artificial Sequence: Synthetic oligonucleotide
  Sense strand starting at position 2163 of SEQ ID NO: 1888554
ggacuugaguccucaugag

SEQ ID NO: 2541237 - RNA, 19 nt, Artificial Sequence
  Description of Artificial Sequence: Synthetic oligonucleotide
  Antisense strand to SEQ ID NO: 2541236
cucaugaggacucaagucc

SEQ ID NO: 2541238 - RNA, 19 nt, Artificial Sequence
  Description of Artificial Sequence: Synthetic oligonucleotide
  Sense strand starting at position 2569 of SEQ ID NO: 1888554
ugaguucugagugggagga

SEQ ID NO: 2541239 - RNA, 19 nt, Artificial Sequence
  Description of Artificial Sequence: Synthetic oligonucleotide
  Antisense strand to SEQ ID NO: 2541238
uccucccacucagaacuca

SEQ ID NO: 2541240 - RNA, 19 nt, Artificial Sequence
  Description of Artificial Sequence: Synthetic oligonucleotide
  Sense strand starting at position 117 of SEQ ID NO: 1888554
uuguguccucuugaggaaa

SEQ ID NO: 2541241 - RNA, 19 nt, Artificial Sequence
  Description of Artificial Sequence: Synthetic oligonucleotide
  Antisense strand to SEQ ID NO: 2541240
uuuccucaagaggacacaa

SEQ ID NO: 2541242 - RNA, 19 nt, Artificial Sequence
  Description of Artificial Sequence: Synthetic oligonucleotide
  Sense strand starting at position 714 of SEQ ID NO: 1888554
aguguucugauaugggaaa

SEQ ID NO: 2541243 - RNA, 19 nt, Artificial Sequence
  Description of Artificial Sequence: Synthetic oligonucleotide
  Antisense strand to SEQ ID NO: 2541242
uuucccauaucagaacacu

SEQ ID NO: 2541244 - RNA, 19 nt, Artificial Sequence
  Description of Artificial Sequence: Synthetic oligonucleotide
  Sense strand starting at position 1305 of SEQ ID NO: 1888554
ucacuaauuccaggguaac

SEQ ID NO: 2541245 - RNA, 19 nt, Artificial Sequence
  Description of Artificial Sequence: Synthetic oligonucleotide
  Antisense strand to SEQ ID NO: 2541244
guuacccuggaauuaguga

SEQ ID NO: 2541246 - RNA, 19 nt, Artificial Sequence
  Description of Artificial Sequence: Synthetic oligonucleotide
  Sense strand starting at position 3281 of SEQ ID NO: 1888554
cccugugauguugaggauu

SEQ ID NO: 2541247 - RNA, 19 nt, Artificial Sequence
  Description of Artificial Sequence: Synthetic oligonucleotide
  Antisense strand to SEQ ID NO: 2541246
aauccucaacaucacaggg

SEQ ID NO: 2541248 - RNA, 19 nt, Artificial Sequence
  Description of Artificial Sequence: Synthetic oligonucleotide
  Sense strand starting at position 3842 of SEQ ID NO: 1888554
ccaagucaucuugaccagu

SEQ ID NO: 2541249 - RNA, 19 nt, Artificial Sequence
  Description of Artificial Sequence: Synthetic oligonucleotide
  Antisense strand to SEQ ID NO: 2541248
acuggucaagaugacuugg

SEQ ID NO: 2541250 - RNA, 19 nt, Artificial Sequence
  Description of Artificial Sequence: Synthetic oligonucleotide
  Sense strand starting at position 2979 of SEQ ID NO: 1888554
gucucaguccagggaauaa

SEQ ID NO: 2541251 - RNA, 19 nt, Artificial Sequence
  Description of Artificial Sequence: Synthetic oligonucleotide
  Antisense strand to SEQ ID NO: 2541250
uuauucccuggacugagac

SEQ ID NO: 2541252 - RNA, 19 nt, Artificial Sequence
  Description of Artificial Sequence: Synthetic oligonucleotide
  Sense strand starting at position 2978 of SEQ ID NO: 1888554
agucucaguccagggaaua

SEQ ID NO: 2541253 - RNA, 19 nt, Artificial Sequence
  Description of Artificial Sequence: Synthetic oligonucleotide
  Antisense strand to SEQ ID NO: 2541252
uauucccuggacugagacu

SEQ ID NO: 2541254 - RNA, 19 nt, Artificial Sequence
  Description of Artificial Sequence: Synthetic oligonucleotide
  Sense strand starting at position 1569 of SEQ ID NO: 1888554
aauccaaucgagggaguuu

SEQ ID NO: 2541255 - RNA, 19 nt, Artificial Sequence
  Description of Artificial Sequence: Synthetic oligonucleotide
  Antisense strand to SEQ ID NO: 2541254
aaacucccucgauuggauu

SEQ ID NO: 2541256 - RNA, 19 nt, Artificial Sequence
  Description of Artificial Sequence: Synthetic oligonucleotide
  Sense strand starting at position 1153 of SEQ ID NO: 1888554
uuauguaagccugagggua

SEQ ID NO: 2541257 - RNA, 19 nt, Artificial Sequence
  Description of Artificial Sequence: Synthetic oligonucleotide
  Antisense strand to SEQ ID NO: 2541256
uacccucaggcuuacauaa

SEQ ID NO: 2541258 - RNA, 19 nt, Artificial Sequence
  Description of Artificial Sequence: Synthetic oligonucleotide
  Sense strand starting at position 3870 of SEQ ID NO: 1888554
cuuggcgauuugccucaua

SEQ ID NO: 2541259 - RNA, 19 nt, Artificial Sequence
  Description of Artificial Sequence: Synthetic oligonucleotide
  Antisense strand to SEQ ID NO: 2541258
uaugaggcaaaucgccaag

SEQ ID NO: 2541260 - RNA, 19 nt, Artificial Sequence
  Description of Artificial Sequence: Synthetic oligonucleotide
  Sense strand starting at position 3862 of SEQ ID NO: 1888554
cacuuagccuuggcgauuu

SEQ ID NO: 2541261 - RNA, 19 nt, Artificial Sequence
  Description of Artificial Sequence: Synthetic oligonucleotide
  Antisense strand to SEQ ID NO: 2541260
aaaucgccaaggcuaagug

SEQ ID NO: 2541262 - RNA, 19 nt, Artificial Sequence
  Description of Artificial Sequence: Synthetic oligonucleotide
  Sense strand starting at position 2872 of SEQ ID NO: 1888554
gucuuuaggcguggaauuu

SEQ ID NO: 2541263 - RNA, 19 nt, Artificial Sequence
  Description of Artificial Sequence: Synthetic oligonucleotide
  Antisense strand to SEQ ID NO: 2541262
aaauuccacgccuaaagac

SEQ ID NO: 2541264 - RNA, 19 nt, Artificial Sequence
  Description of Artificial Sequence: Synthetic oligonucleotide
  Sense strand starting at position 2968 of SEQ ID NO: 1888554
gaaggaaguuagucucagu

SEQ ID NO: 2541265 - RNA, 19 nt, Artificial Sequence
  Description of Artificial Sequence: Synthetic oligonucleotide
  Antisense strand to SEQ ID NO: 2541264
acugagacuaacuuccuuc

SEQ ID NO: 2541266 - RNA, 19 nt, Artificial Sequence
  Description of Artificial Sequence: Synthetic oligonucleotide
  Sense strand starting at position 3915 of SEQ ID NO: 1888554
ccucauaauguuggaguga

SEQ ID NO: 2541267 - RNA, 19 nt, Artificial Sequence
  Description of Artificial Sequence: Synthetic oligonucleotide
  Antisense strand to SEQ ID NO: 2541266
ucacuccaacauuaugagg

SEQ ID NO: 2541268 - RNA, 19 nt, Artificial Sequence
  Description of Artificial Sequence: Synthetic oligonucleotide
  Sense strand starting at position 1655 of SEQ ID NO: 1888554
augguuucggcugcguauu

SEQ ID NO: 2541269 - RNA, 19 nt, Artificial Sequence
  Description of Artificial Sequence: Synthetic oligonucleotide
  Antisense strand to SEQ ID NO: 2541268
aauacgcagccgaaaccau

SEQ ID NO: 2541270 - RNA, 19 nt, Artificial Sequence
  Description of Artificial Sequence: Synthetic oligonucleotide
  Sense strand starting at position 3804 of SEQ ID NO: 1888554
gagcaucuccauggaggua

SEQ ID NO: 2541271 - RNA, 19 nt, Artificial Sequence
  Description of Artificial Sequence: Synthetic oligonucleotide
  Antisense strand to SEQ ID NO: 2541270
uaccuccauggagaugcuc

SEQ ID NO: 2541272 - RNA, 19 nt, Artificial Sequence
  Description of Artificial Sequence: Synthetic oligonucleotide
  Sense strand starting at position 3361 of SEQ ID NO: 1888554
ggaccugagcuuggcagaa

SEQ ID NO: 2541273 - RNA, 19 nt, Artificial Sequence
  Description of Artificial Sequence: Synthetic oligonucleotide
  Antisense strand to SEQ ID NO: 2541272
uucugccaagcucaggucc

SEQ ID NO: 2541274 - RNA, 19 nt, Artificial Sequence
  Description of Artificial Sequence: Synthetic oligonucleotide
  Sense strand starting at position 2259 of SEQ ID NO: 1888554
gcauucagugcugcgcaua

SEQ ID NO: 2541275 - RNA, 19 nt, Artificial Sequence
  Description of Artificial Sequence: Synthetic oligonucleotide
  Antisense strand to SEQ ID NO: 2541274
uaugcgcagcacugaaugc

SEQ ID NO: 2541276 - RNA, 19 nt, Artificial Sequence
  Description of Artificial Sequence: Synthetic oligonucleotide
  Sense strand starting at position 3803 of SEQ ID NO: 1888554
ggagcaucuccauggaggu

SEQ ID NO: 2541277 - RNA, 19 nt, Artificial Sequence
  Description of Artificial Sequence: Synthetic oligonucleotide
  Antisense strand to SEQ ID NO: 2541276
accuccauggagaugcucc

SEQ ID NO: 2541278 - RNA, 19 nt, Artificial Sequence
  Description of Artificial Sequence: Synthetic oligonucleotide
  Sense strand starting at position 2600 of SEQ ID NO: 1888554
gguuucgucaaguagauga

SEQ ID NO: 2541279 - RNA, 19 nt, Artificial Sequence
  Description of Artificial Sequence: Synthetic oligonucleotide
  Antisense strand to SEQ ID NO: 2541278
ucaucuacuugacgaaacc

SEQ ID NO: 2541280 - RNA, 19 nt, Artificial Sequence
  Description of Artificial Sequence: Synthetic oligonucleotide
  Sense strand starting at position 3096 of SEQ ID NO: 1888554
cuaagaugaugccuagguu

SEQ ID NO: 2541281 - RNA, 19 nt, Artificial Sequence
  Description of Artificial Sequence: Synthetic oligonucleotide
  Antisense strand to SEQ ID NO: 2541280
aaccuaggcaucaucuuag

SEQ ID NO: 2541282 - RNA, 19 nt, Artificial Sequence
  Description of Artificial Sequence: Synthetic oligonucleotide
  Sense strand starting at position 707 of SEQ ID NO: 1888554
aguauagaguguucugaua

SEQ ID NO: 2541283 - RNA, 19 nt, Artificial Sequence
  Description of Artificial Sequence: Synthetic oligonucleotide
  Antisense strand to SEQ ID NO: 2541282
uaucagaacacucuauacu

SEQ ID NO: 2541284 - RNA, 19 nt, Artificial Sequence
  Description of Artificial Sequence: Synthetic oligonucleotide
  Sense strand starting at position 3603 of SEQ ID NO: 1888554
guggagaacgguuguaaag

SEQ ID NO: 2541285 - RNA, 19 nt, Artificial Sequence
  Description of Artificial Sequence: Synthetic oligonucleotide
  Antisense strand to SEQ ID NO: 2541284
cuuuacaaccguucuccac

SEQ ID NO: 2541286 - RNA, 19 nt, Artificial Sequence
  Description of Artificial Sequence: Synthetic oligonucleotide
  Sense strand starting at position 2885 of SEQ ID NO: 1888554
gaauuuacauaagaugugu

SEQ ID NO: 2541287 - RNA, 19 nt, Artificial Sequence
  Description of Artificial Sequence: Synthetic oligonucleotide
  Antisense strand to SEQ ID NO: 2541286
acacaucuuauguaaauuc

SEQ ID NO: 2541288 - RNA, 19 nt, Artificial Sequence
  Description of Artificial Sequence: Synthetic oligonucleotide
  Sense strand starting at position 1578 of SEQ ID NO: 1888554
gagggaguuuggcuggagu

SEQ ID NO: 2541289 - RNA, 19 nt, Artificial Sequence
  Description of Artificial Sequence: Synthetic oligonucleotide
  Antisense strand to SEQ ID NO: 2541288
acuccagccaaacucccuc

SEQ ID NO: 2541290 - RNA, 19 nt, Artificial Sequence
  Description of Artificial Sequence: Synthetic oligonucleotide
  Sense strand starting at position 2717 of SEQ ID NO: 1888554
gggcauagaugugucuaga

SEQ ID NO: 2541291 - RNA, 19 nt, Artificial Sequence
  Description of Artificial Sequence: Synthetic oligonucleotide
  Antisense strand to SEQ ID NO: 2541290
ucuagacacaucuaugccc

SEQ ID NO: 2541292 - RNA, 19 nt, Artificial Sequence
  Description of Artificial Sequence: Synthetic oligonucleotide
  Sense strand starting at position 3225 of SEQ ID NO: 1888554
aggugcuucuacuugaaua

SEQ ID NO: 2541293 - RNA, 19 nt, Artificial Sequence
  Description of Artificial Sequence: Synthetic oligonucleotide
  Antisense strand to SEQ ID NO: 2541292
uauucaaguagaagcaccu

SEQ ID NO: 2541294 - RNA, 19 nt, Artificial Sequence
  Description of Artificial Sequence: Synthetic oligonucleotide
  Sense strand starting at position 1653 of SEQ ID NO: 1888554
cgaugguuucggcugcgua

SEQ ID NO: 2541295 - RNA, 19 nt, Artificial Sequence
  Description of Artificial Sequence: Synthetic oligonucleotide
  Antisense strand to SEQ ID NO: 2541294
uacgcagccgaaaccaucg

SEQ ID NO: 2541296 - RNA, 19 nt, Artificial Sequence
  Description of Artificial Sequence: Synthetic oligonucleotide
  Sense strand starting at position 3211 of SEQ ID NO: 1888555
gccagagaaggccaucaau

SEQ ID NO: 2541297 - RNA, 19 nt, Artificial Sequence
  Description of Artificial Sequence: Synthetic oligonucleotide
  Antisense strand to SEQ ID NO: 2541296
auugauggccuucucuggc

SEQ ID NO: 2541298 - RNA, 19 nt, Artificial Sequence
  Description of Artificial Sequence: Synthetic oligonucleotide
  Sense strand starting at position 2206 of SEQ ID NO: 1888555
uggacaucccgagaauguu

SEQ ID NO: 2541299 - RNA, 19 nt, Artificial Sequence
  Description of Artificial Sequence: Synthetic oligonucleotide
  Antisense strand to SEQ ID NO: 2541298
aacauucucgggaugucca

SEQ ID NO: 2541300 - RNA, 19 nt, Artificial Sequence
  Description of Artificial Sequence: Synthetic oligonucleotide
  Sense strand starting at position 2204 of SEQ ID NO: 1888555
gcuggacaucccgagaaug

SEQ ID NO: 2541301 - RNA, 19 nt, Artificial Sequence
  Description of Artificial Sequence: Synthetic oligonucleotide
  Antisense strand to SEQ ID NO: 2541300
cauucucgggauguccagc

SEQ ID NO: 2541302 - RNA, 19 nt, Artificial Sequence
  Description of Artificial Sequence: Synthetic oligonucleotide
  Sense strand starting at position 2657 of SEQ ID NO: 1888555
uguuucacuggguagagau

SEQ ID NO: 2541303 - RNA, 19 nt, Artificial Sequence
  Description of Artificial Sequence: Synthetic oligonucleotide
  Antisense strand to SEQ ID NO: 2541302
aucucuacccagugaaaca

SEQ ID NO: 2541304 - RNA, 19 nt, Artificial Sequence
  Description of Artificial Sequence: Synthetic oligonucleotide
  Sense strand starting at position 3961 of SEQ ID NO: 1888555
aacugagcaguuggacaau

SEQ ID NO: 2541305 - RNA, 19 nt, Artificial Sequence
  Description of Artificial Sequence: Synthetic oligonucleotide
  Antisense strand to SEQ ID NO: 2541304
auuguccaacugcucaguu

SEQ ID NO: 2541306 - RNA, 19 nt, Artificial Sequence
  Description of Artificial Sequence: Synthetic oligonucleotide
  Sense strand starting at position 1986 of SEQ ID NO: 1888555
ggaagugcuccguagagaa

SEQ ID NO: 2541307 - RNA, 19 nt, Artificial Sequence
  Description of Artificial Sequence: Synthetic oligonucleotide
  Antisense strand to SEQ ID NO: 2541306
uucucuacggagcacuucc

SEQ ID NO: 2541308 - RNA, 19 nt, Artificial Sequence
  Description of Artificial Sequence: Synthetic oligonucleotide
  Sense strand starting at position 3267 of SEQ ID NO: 1888555
cucuuaaagccgggaagau

SEQ ID NO: 2541309 - RNA, 19 nt, Artificial Sequence
  Description of Artificial Sequence: Synthetic oligonucleotide
  Antisense strand to SEQ ID NO: 2541308
aucuucccggcuuuaagag

SEQ ID NO: 2541310 - RNA, 19 nt, Artificial Sequence
  Description of Artificial Sequence: Synthetic oligonucleotide
  Sense strand starting at position 3266 of SEQ ID NO: 1888555
ccucuuaaagccgggaaga

SEQ ID NO: 2541311 - RNA, 19 nt, Artificial Sequence
  Description of Artificial Sequence: Synthetic oligonucleotide
  Antisense strand to SEQ ID NO: 2541310
ucuucccggcuuuaagagg

SEQ ID NO: 2541312 - RNA, 19 nt, Artificial Sequence
  Description of Artificial Sequence: Synthetic oligonucleotide
  Sense strand starting at position 2656 of SEQ ID NO: 1888555
cuguuucacuggguagaga

SEQ ID NO: 2541313 - RNA, 19 nt, Artificial Sequence
  Description of Artificial Sequence: Synthetic oligonucleotide
  Antisense strand to SEQ ID NO: 2541312
ucucuacccagugaaacag

SEQ ID NO: 2541314 - RNA, 19 nt, Artificial Sequence
  Description of Artificial Sequence: Synthetic oligonucleotide
  Sense strand starting at position 3978 of SEQ ID NO: 1888555
aucugaugucuuggagggu

SEQ ID NO: 2541315 - RNA, 19 nt, Artificial Sequence
  Description of Artificial Sequence: Synthetic oligonucleotide
  Antisense strand to SEQ ID NO: 2541314
acccuccaagacaucagau

SEQ ID NO: 2541316 - RNA, 19 nt, Artificial Sequence
  Description of Artificial Sequence: Synthetic oligonucleotide
  Sense strand starting at position 2669 of SEQ ID NO: 1888555
uagagaucucccggcugga

SEQ ID NO: 2541317 - RNA, 19 nt, Artificial Sequence
  Description of Artificial Sequence: Synthetic oligonucleotide
  Antisense strand to SEQ ID NO: 2541316
uccagccgggagaucucua

SEQ ID NO: 2541318 - RNA, 19 nt, Artificial Sequence
  Description of Artificial Sequence: Synthetic oligonucleotide
  Sense strand starting at position 2399 of SEQ ID NO: 1888555
gggucuaauugagcucacu

SEQ ID NO: 2541319 - RNA, 19 nt, Artificial Sequence
  Description of Artificial Sequence: Synthetic oligonucleotide
  Antisense strand to SEQ ID NO: 2541318
agugagcucaauuagaccc

SEQ ID NO: 2541320 - RNA, 19 nt, Artificial Sequence
  Description of Artificial Sequence: Synthetic oligonucleotide
  Sense strand starting at position 3282 of SEQ ID NO: 1888555
agauaaaucucuccgcuug

SEQ ID NO: 2541321 - RNA, 19 nt, Artificial Sequence
  Description of Artificial Sequence: Synthetic oligonucleotide
  Antisense strand to SEQ ID NO: 2541320
caagcggagagauuuaucu

SEQ ID NO: 2541322 - RNA, 19 nt, Artificial Sequence
  Description of Artificial Sequence: Synthetic oligonucleotide
  Sense strand starting at position 1985 of SEQ ID NO: 1888555
gggaagugcuccguagaga

SEQ ID NO: 2541323 - RNA, 19 nt, Artificial Sequence
  Description of Artificial Sequence: Synthetic oligonucleotide
  Antisense strand to SEQ ID NO: 2541322
ucucuacggagcacuuccc

SEQ ID NO: 2541324 - RNA, 19 nt, Artificial Sequence
  Description of Artificial Sequence: Synthetic oligonucleotide
  Sense strand starting at position 2215 of SEQ ID NO: 1888555
cgagaauguugccugacuc

SEQ ID NO: 2541325 - RNA, 19 nt, Artificial Sequence
  Description of Artificial Sequence: Synthetic oligonucleotide
  Antisense strand to SEQ ID NO: 2541324
gagucaggcaacauucucg

SEQ ID NO: 2541326 - RNA, 19 nt, Artificial Sequence
  Description of Artificial Sequence: Synthetic oligonucleotide
  Sense strand starting at position 2214 of SEQ ID NO: 1888555
ccgagaauguugccugacu

SEQ ID NO: 2541327 - RNA, 19 nt, Artificial Sequence
  Description of Artificial Sequence: Synthetic oligonucleotide
  Antisense strand to SEQ ID NO: 2541326
agucaggcaacauucucgg

SEQ ID NO: 2541328 - RNA, 19 nt, Artificial Sequence
  Description of Artificial Sequence: Synthetic oligonucleotide
  Sense strand starting at position 3255 of SEQ ID NO: 1888555
cuccguuaguaccucuuaa

SEQ ID NO: 2541329 - RNA, 19 nt, Artificial Sequence
  Description of Artificial Sequence: Synthetic oligonucleotide
  Antisense strand to SEQ ID NO: 2541328
uuaagagguacuaacggag

SEQ ID NO: 2541330 - RNA, 19 nt, Artificial Sequence
  Description of Artificial Sequence: Synthetic oligonucleotide
  Sense strand starting at position 2373 of SEQ ID NO: 1888555
auuccucuguccuuguuau

SEQ ID NO: 2541331 - RNA, 19 nt, Artificial Sequence
  Description of Artificial Sequence: Synthetic oligonucleotide
  Antisense strand to SEQ ID NO: 2541330
auaacaaggacagaggaau

SEQ ID NO: 2541332 - RNA, 19 nt, Artificial Sequence
  Description of Artificial Sequence: Synthetic oligonucleotide
  Sense strand starting at position 2374 of SEQ ID NO: 1888555
uuccucuguccuuguuaua

SEQ ID NO: 2541333 - RNA, 19 nt, Artificial Sequence
  Description of Artificial Sequence: Synthetic oligonucleotide
  Antisense strand to SEQ ID NO: 2541332
uauaacaaggacagaggaa

SEQ ID NO: 2541334 - RNA, 19 nt, Artificial Sequence
  Description of Artificial Sequence: Synthetic oligonucleotide
  Sense strand starting at position 1984 of SEQ ID NO: 1888555
cgggaagugcuccguagag

SEQ ID NO: 2541335 - RNA, 19 nt, Artificial Sequence
  Description of Artificial Sequence: Synthetic oligonucleotide
  Antisense strand to SEQ ID NO: 2541334
cucuacggagcacuucccg

SEQ ID NO: 2541336 - RNA, 19 nt, Artificial Sequence
  Description of Artificial Sequence: Synthetic oligonucleotide
  Sense strand starting at position 3819 of SEQ ID NO: 1888555
gccucaccuuucuaggaca

SEQ ID NO: 2541337 - RNA, 19 nt, Artificial Sequence
  Description of Artificial Sequence: Synthetic oligonucleotide
  Antisense strand to SEQ ID NO: 2541336
uguccuagaaaggugaggc

SEQ ID NO: 2541338 - RNA, 19 nt, Artificial Sequence
  Description of Artificial Sequence: Synthetic oligonucleotide
  Sense strand starting at position 2747 of SEQ ID NO: 1888555
ggcugaggcuguuaggaaa

SEQ ID NO: 2541339 - RNA, 19 nt, Artificial Sequence
  Description of Artificial Sequence: Synthetic oligonucleotide
  Antisense strand to SEQ ID NO: 2541338
uuuccuaacagccucagcc

SEQ ID NO: 2541340 - RNA, 19 nt, Artificial Sequence
  Description of Artificial Sequence: Synthetic oligonucleotide
  Sense strand starting at position 3972 of SEQ ID NO: 1888555
uggacaaucugaugucuug

SEQ ID NO: 2541341 - RNA, 19 nt, Artificial Sequence
  Description of Artificial Sequence: Synthetic oligonucleotide
  Antisense strand to SEQ ID NO: 2541340
caagacaucagauugucca

SEQ ID NO: 2541342 - RNA, 19 nt, Artificial Sequence
  Description of Artificial Sequence: Synthetic oligonucleotide
  Sense strand starting at position 3177 of SEQ ID NO: 1888555
ugccuugcaccgugucauu

SEQ ID NO: 2541343 - RNA, 19 nt, Artificial Sequence
  Description of Artificial Sequence: Synthetic oligonucleotide
  Antisense strand to SEQ ID NO: 2541342
aaugacacggugcaaggca

SEQ ID NO: 2541344 - RNA, 19 nt, Artificial Sequence
  Description of Artificial Sequence: Synthetic oligonucleotide
  Sense strand starting at position 3393 of SEQ ID NO: 1888555
aggcuucucugcuauuaaa

SEQ ID NO: 2541345 - RNA, 19 nt, Artificial Sequence
  Description of Artificial Sequence: Synthetic oligonucleotide
  Antisense strand to SEQ ID NO: 2541344
uuuaauagcagagaagccu

SEQ ID NO: 2541346 - RNA, 19 nt, Artificial Sequence
  Description of Artificial Sequence: Synthetic oligonucleotide
  Sense strand starting at position 398 of SEQ ID NO: 1888556
guuccugggcccgauauuu

SEQ ID NO: 2541347 - RNA, 19 nt, Artificial Sequence
  Description of Artificial Sequence: Synthetic oligonucleotide
  Antisense strand to SEQ ID NO: 2541346
aaauaucgggcccaggaac

SEQ ID NO: 2541348 - RNA, 19 nt, Artificial Sequence
  Description of Artificial Sequence: Synthetic oligonucleotide
  Sense strand starting at position 3983 of SEQ ID NO: 1888556
cuucaugagguguagauga

SEQ ID NO: 2541349 - RNA, 19 nt, Artificial Sequence
  Description of Artificial Sequence: Synthetic oligonucleotide
  Antisense strand to SEQ ID NO: 2541348
ucaucuacaccucaugaag

SEQ ID NO: 2541350 - RNA, 19 nt, Artificial Sequence
  Description of Artificial Sequence: Synthetic oligonucleotide
  Sense strand starting at position 1968 of SEQ ID NO: 1888556
gagucugaaucccugagaa

SEQ ID NO: 2541351 - RNA, 19 nt, Artificial Sequence
  Description of Artificial Sequence: Synthetic oligonucleotide
  Antisense strand to SEQ ID NO: 2541350
uucucagggauucagacuc

SEQ ID NO: 2541352 - RNA, 19 nt, Artificial Sequence
  Description of Artificial Sequence: Synthetic oligonucleotide
  Sense strand starting at position 3061 of SEQ ID NO: 1888556
uuaauaugauaggcacaua

SEQ ID NO: 2541353 - RNA, 19 nt, Artificial Sequence
  Description of Artificial Sequence: Synthetic oligonucleotide
  Antisense strand to SEQ ID NO: 2541352
uaugugccuaucauauuaa

SEQ ID NO: 2541354 - RNA, 19 nt, Artificial Sequence
  Description of Artificial Sequence: Synthetic oligonucleotide
  Sense strand starting at position 1478 of SEQ ID NO: 1888556
auaguacuugguuaucaag

SEQ ID NO: 2541355 - RNA, 19 nt, Artificial Sequence
  Description of Artificial Sequence: Synthetic oligonucleotide
  Antisense strand to SEQ ID NO: 2541354
cuugauaaccaaguacuau

SEQ ID NO: 2541356 - RNA, 19 nt, Artificial Sequence
  Description of Artificial Sequence: Synthetic oligonucleotide
  Sense strand starting at position 2860 of SEQ ID NO: 1888556
cugacaaagucauccugga

SEQ ID NO: 2541357 - RNA, 19 nt, Artificial Sequence
  Description of Artificial Sequence: Synthetic oligonucleotide
  Antisense strand to SEQ ID NO: 2541356
uccaggaugacuuugucag

SEQ ID NO: 2541358 - RNA, 19 nt, Artificial Sequence
  Description of Artificial Sequence: Synthetic oligonucleotide
  Sense strand starting at position 852 of SEQ ID NO: 1888556
guggcagcuauagagaaau

SEQ ID NO: 2541359 - RNA, 19 nt, Artificial Sequence
  Description of Artificial Sequence: Synthetic oligonucleotide
  Antisense strand to SEQ ID NO: 2541358
auuucucuauagcugccac

SEQ ID NO: 2541360 - RNA, 19 nt, Artificial Sequence
  Description of Artificial Sequence: Synthetic oligonucleotide
  Sense strand starting at position 2660 of SEQ ID NO: 1888556
ccagcuuugggaggacuaa

SEQ ID NO: 2541361 - RNA, 19 nt, Artificial Sequence
  Description of Artificial Sequence: Synthetic oligonucleotide
  Antisense strand to SEQ ID NO: 2541360
uuaguccucccaaagcugg

SEQ ID NO: 2541362 - RNA, 19 nt, Artificial Sequence
  Description of Artificial Sequence: Synthetic oligonucleotide
  Sense strand starting at position 1556 of SEQ ID NO: 1888556
gaggcucugacguaaagau

SEQ ID NO: 2541363 - RNA, 19 nt, Artificial Sequence
  Description of Artificial Sequence: Synthetic oligonucleotide
  Antisense strand to SEQ ID NO: 2541362
aucuuuacgucagagccuc

SEQ ID NO: 2541364 - RNA, 19 nt, Artificial Sequence
  Description of Artificial Sequence: Synthetic oligonucleotide
  Sense strand starting at position 2475 of SEQ ID NO: 1888556
gcgucagacguuuccagca

SEQ ID NO: 2541365 - RNA, 19 nt, Artificial Sequence
  Description of Artificial Sequence: Synthetic oligonucleotide
  Antisense strand to SEQ ID NO: 2541364
ugcuggaaacgucugacgc

SEQ ID NO: 2541366 - RNA, 19 nt, Artificial Sequence
  Description of Artificial Sequence: Synthetic oligonucleotide
  Sense strand starting at position 1023 of SEQ ID NO: 1888556
gacaauggcccaugugaaa

SEQ ID NO: 2541367 - RNA, 19 nt, Artificial Sequence
  Description of Artificial Sequence: Synthetic oligonucleotide
  Antisense strand to SEQ ID NO: 2541366
uuucacaugggccauuguc

SEQ ID NO: 2541368 - RNA, 19 nt, Artificial Sequence
  Description of Artificial Sequence: Synthetic oligonucleotide
  Sense strand starting at position 2074 of SEQ ID NO: 1888556
ccggcuuccacagauugga

SEQ ID NO: 2541369 - RNA, 19 nt, Artificial Sequence
  Description of Artificial Sequence: Synthetic oligonucleotide
  Antisense strand to SEQ ID NO: 2541368
uccaaucuguggaagccgg

SEQ ID NO: 2541370 - RNA, 19 nt, Artificial Sequence
  Description of Artificial Sequence: Synthetic oligonucleotide
  Sense strand starting at position 2375 of SEQ ID NO: 1888556
gcuugaugacgaugaugga

SEQ ID NO: 2541371 - RNA, 19 nt, Artificial Sequence
  Description of Artificial Sequence: Synthetic oligonucleotide
  Antisense strand to SEQ ID NO: 2541370
uccaucaucgucaucaagc

SEQ ID NO: 2541372 - RNA, 19 nt, Artificial Sequence
  Description of Artificial Sequence: Synthetic oligonucleotide
  Sense strand starting at position 1761 of SEQ ID NO: 1888556
gaggguuugcauuagucag

SEQ ID NO: 2541373 - RNA, 19 nt, Artificial Sequence
  Description of Artificial Sequence: Synthetic oligonucleotide
  Antisense strand to SEQ ID NO: 2541372
cugacuaaugcaaacccuc

SEQ ID NO: 2541374 - RNA, 19 nt, Artificial Sequence
  Description of Artificial Sequence: Synthetic oligonucleotide
  Sense strand starting at position 3036 of SEQ ID NO: 1888556
cuugguaauuuccaaagga

SEQ ID NO: 2541375 - RNA, 19 nt, Artificial Sequence
  Description of Artificial Sequence: Synthetic oligonucleotide
  Antisense strand to SEQ ID NO: 2541374
uccuuuggaaauuaccaag

SEQ ID NO: 2541376 - RNA, 19 nt, Artificial Sequence
  Description of Artificial Sequence: Synthetic oligonucleotide
  Sense strand starting at position 285 of SEQ ID NO: 1888556
cucagagaagcuggguuau

SEQ ID NO: 2541377 - RNA, 19 nt, Artificial Sequence
  Description of Artificial Sequence: Synthetic oligonucleotide
  Antisense strand to SEQ ID NO: 2541376
auaacccagcuucucugag

SEQ ID NO: 2541378 - RNA, 19 nt, Artificial Sequence
  Description of Artificial Sequence: Synthetic oligonucleotide
  Sense strand starting at position 1719 of SEQ ID NO: 1888556
ggaagaugugaguggguuu

SEQ ID NO: 2541379 - RNA, 19 nt, Artificial Sequence
  Description of Artificial Sequence: Synthetic oligonucleotide
  Antisense strand to SEQ ID NO: 2541378
aaacccacucacaucuucc

SEQ ID NO: 2541380 - RNA, 19 nt, Artificial Sequence
  Description of Artificial Sequence: Synthetic oligonucleotide
  Sense strand starting at position 2529 of SEQ ID NO: 1888556
ugauguguuucuuuaagaa

SEQ ID NO: 2541381 - RNA, 19 nt, Artificial Sequence
  Description of Artificial Sequence: Synthetic oligonucleotide
  Antisense strand to SEQ ID NO: 2541380
uucuuaaagaaacacauca

SEQ ID NO: 2541382 - RNA, 19 nt, Artificial Sequence
  Description of Artificial Sequence: Synthetic oligonucleotide
  Sense strand starting at position 3630 of SEQ ID NO: 1888556
uguugugugagaugaugag

SEQ ID NO: 2541383 - RNA, 19 nt, Artificial Sequence
  Description of Artificial Sequence: Synthetic oligonucleotide
  Antisense strand to SEQ ID NO: 2541382
cucaucaucucacacaaca

SEQ ID NO: 2541384 - RNA, 19 nt, Artificial Sequence
  Description of Artificial Sequence: Synthetic oligonucleotide
  Sense strand starting at position 3477 of SEQ ID NO: 1888556
agagaaguuuccuucugca

SEQ ID NO: 2541385 - RNA, 19 nt, Artificial Sequence
  Description of Artificial Sequence: Synthetic oligonucleotide
  Antisense strand to SEQ ID NO: 2541384
ugcagaaggaaacuucucu

SEQ ID NO: 2541386 - RNA, 19 nt, Artificial Sequence
  Description of Artificial Sequence: Synthetic oligonucleotide
  Sense strand starting at position 3624 of SEQ ID NO: 1888556
auggauuguugugugagau

SEQ ID NO: 2541387 - RNA, 19 nt, Artificial Sequence
  Description of Artificial Sequence: Synthetic oligonucleotide
  Antisense strand to SEQ ID NO: 2541386
aucucacacaacaauccau

SEQ ID NO: 2541388 - RNA, 19 nt, Artificial Sequence
  Description of Artificial Sequence: Synthetic oligonucleotide
  Sense strand starting at position 1838 of SEQ ID NO: 1888556
agacacuucgugcaauucu

SEQ ID NO: 2541389 - RNA, 19 nt, Artificial Sequence
  Description of Artificial Sequence: Synthetic oligonucleotide
  Antisense strand to SEQ ID NO: 2541388
agaauugcacgaagugucu

SEQ ID NO: 2541390 - RNA, 19 nt, Artificial Sequence
  Description of Artificial Sequence: Synthetic oligonucleotide
  Sense strand starting at position 1835 of SEQ ID NO: 1888556
aggagacacuucgugcaau

SEQ ID NO: 2541391 - RNA, 19 nt, Artificial Sequence
  Description of Artificial Sequence: Synthetic oligonucleotide
  Antisense strand to SEQ ID NO: 2541390
auugcacgaagugucuccu

SEQ ID NO: 2541392 - RNA, 19 nt, Artificial Sequence
  Description of Artificial Sequence: Synthetic oligonucleotide
  Sense strand starting at position 3636 of SEQ ID NO: 1888556
gugagaugaugagaaagga

SEQ ID NO: 2541393 - RNA, 19 nt, Artificial Sequence
  Description of Artificial Sequence: Synthetic oligonucleotide
  Antisense strand to SEQ ID NO: 2541392
uccuuucucaucaucucac

SEQ ID NO: 2541394 - RNA, 19 nt, Artificial Sequence
  Description of Artificial Sequence: Synthetic oligonucleotide
  Sense strand starting at position 3625 of SEQ ID NO: 1888556
uggauuguugugugagaug

SEQ ID NO: 2541395 - RNA, 19 nt, Artificial Sequence
  Description of Artificial Sequence: Synthetic oligonucleotide
  Antisense strand to SEQ ID NO: 2541394
caucucacacaacaaucca

SEQ ID NO: 2541396 - RNA, 19 nt, Artificial Sequence
  Description of Artificial Sequence: Synthetic oligonucleotide
  Sense strand starting at position 1447 of SEQ ID NO: 1888556
aacuuugggcugugaggua

SEQ ID NO: 2541397 - RNA, 19 nt, Artificial Sequence
  Description of Artificial Sequence: Synthetic oligonucleotide
  Antisense strand to SEQ ID NO: 2541396
uaccucacagcccaaaguu

SEQ ID NO: 2541398 - RNA, 19 nt, Artificial Sequence
  Description of Artificial Sequence: Synthetic oligonucleotide
  Sense strand starting at position 3977 of SEQ ID NO: 1888556
guguuacuucaugaggugu

SEQ ID NO: 2541399 - RNA, 19 nt, Artificial Sequence
  Description of Artificial Sequence: Synthetic oligonucleotide
  Antisense strand to SEQ ID NO: 2541398
acaccucaugaaguaacac

SEQ ID NO: 2541400 - RNA, 19 nt, Artificial Sequence
  Description of Artificial Sequence: Synthetic oligonucleotide
  Sense strand starting at position 1722 of SEQ ID NO: 1888556
agaugugaguggguuugua

SEQ ID NO: 2541401 - RNA, 19 nt, Artificial Sequence
  Description of Artificial Sequence: Synthetic oligonucleotide
  Antisense strand to SEQ ID NO: 2541400
uacaaacccacucacaucu

SEQ ID NO: 2541402 - RNA, 19 nt, Artificial Sequence
  Description of Artificial Sequence: Synthetic oligonucleotide
  Sense strand starting at position 3955 of SEQ ID NO: 1888556
cuggcugacaccugaguuu

SEQ ID NO: 2541403 - RNA, 19 nt, Artificial Sequence
  Description of Artificial Sequence: Synthetic oligonucleotide
  Antisense strand to SEQ ID NO: 2541402
aaacucaggugucagccag

SEQ ID NO: 2541404 - RNA, 19 nt, Artificial Sequence
  Description of Artificial Sequence: Synthetic oligonucleotide
  Sense strand starting at position 3539 of SEQ ID NO: 1888556
guuguuguugcucagaaau

SEQ ID NO: 2541405 - RNA, 19 nt, Artificial Sequence
  Description of Artificial Sequence: Synthetic oligonucleotide
  Antisense strand to SEQ ID NO: 2541404
auuucugagcaacaacaac

SEQ ID NO: 2541406 - RNA, 19 nt, Artificial Sequence
  Description of Artificial Sequence: Synthetic oligonucleotide
  Sense strand starting at position 3294 of SEQ ID NO: 1888556
ucuguuauccuguggauug

SEQ ID NO: 2541407 - RNA, 19 nt, Artificial Sequence
  Description of Artificial Sequence: Synthetic oligonucleotide
  Antisense strand to SEQ ID NO: 2541406
caauccacaggauaacaga

SEQ ID NO: 2541408 - RNA, 19 nt, Artificial Sequence
  Description of Artificial Sequence: Synthetic oligonucleotide
  Sense strand starting at position 1474 of SEQ ID NO: 1888556
gggcauaguacuugguuau

SEQ ID NO: 2541409 - RNA, 19 nt, Artificial Sequence
  Description of Artificial Sequence: Synthetic oligonucleotide
  Antisense strand to SEQ ID NO: 2541408
auaaccaaguacuaugccc

SEQ ID NO: 2541410 - RNA, 19 nt, Artificial Sequence
  Description of Artificial Sequence: Synthetic oligonucleotide
  Sense strand starting at position 3495 of SEQ ID NO: 1888556
acagucuccugaguucuuu

SEQ ID NO: 2541411 - RNA, 19 nt, Artificial Sequence
  Description of Artificial Sequence: Synthetic oligonucleotide
  Antisense strand to SEQ ID NO: 2541410
aaagaacucaggagacugu

SEQ ID NO: 2541412 - RNA, 19 nt, Artificial Sequence
  Description of Artificial Sequence: Synthetic oligonucleotide
  Sense strand starting at position 1509 of SEQ ID NO: 1888556
gccuacagucccugugaaa

SEQ ID NO: 2541413 - RNA, 19 nt, Artificial Sequence
  Description of Artificial Sequence: Synthetic oligonucleotide
  Antisense strand to SEQ ID NO: 2541412
uuucacagggacuguaggc

SEQ ID NO: 2541414 - RNA, 19 nt, Artificial Sequence
  Description of Artificial Sequence: Synthetic oligonucleotide
  Sense strand starting at position 262 of SEQ ID NO: 1888556
gcuggauccucccugaguu

SEQ ID NO: 2541415 - RNA, 19 nt, Artificial Sequence
  Description of Artificial Sequence: Synthetic oligonucleotide
  Antisense strand to SEQ ID NO: 2541414
aacucagggaggauccagc

SEQ ID NO: 2541416 - RNA, 19 nt, Artificial Sequence
  Description of Artificial Sequence: Synthetic oligonucleotide
  Sense strand starting at position 2527 of SEQ ID NO: 1888556
ugugauguguuucuuuaag

SEQ ID NO: 2541417 - RNA, 19 nt, Artificial Sequence
  Description of Artificial Sequence: Synthetic oligonucleotide
  Antisense strand to SEQ ID NO: 2541416
cuuaaagaaacacaucaca

SEQ ID NO: 2541418 - RNA, 19 nt, Artificial Sequence
  Description of Artificial Sequence: Synthetic oligonucleotide
  Sense strand starting at position 1475 of SEQ ID NO: 1888556
ggcauaguacuugguuauc

SEQ ID NO: 2541419 - RNA, 19 nt, Artificial Sequence
  Description of Artificial Sequence: Synthetic oligonucleotide
  Antisense strand to SEQ ID NO: 2541418
gauaaccaaguacuaugcc

SEQ ID NO: 2541420 - RNA, 19 nt, Artificial Sequence
  Description of Artificial Sequence: Synthetic oligonucleotide
  Sense strand starting at position 1371 of SEQ ID NO: 1888556
ugggaugcugcaugucaca

SEQ ID NO: 2541421 - RNA, 19 nt, Artificial Sequence
  Description of Artificial Sequence: Synthetic oligonucleotide
  Antisense strand to SEQ ID NO: 2541420
ugugacaugcagcauccca

SEQ ID NO: 2541422 - RNA, 19 nt, Artificial Sequence
  Description of Artificial Sequence: Synthetic oligonucleotide
  Sense strand starting at position 1741 of SEQ ID NO: 1888556
caugcacugcugugagaug

SEQ ID NO: 2541423 - RNA, 19 nt, Artificial Sequence
  Description of Artificial Sequence: Synthetic oligonucleotide
  Antisense strand to SEQ ID NO: 2541422
caucucacagcagugcaug

SEQ ID NO: 2541424 - RNA, 19 nt, Artificial Sequence
  Description of Artificial Sequence: Synthetic oligonucleotide
  Sense strand starting at position 3146 of SEQ ID NO: 1888556
ggcagagcuuugccauuaa

SEQ ID NO: 2541425 - RNA, 19 nt, Artificial Sequence
  Description of Artificial Sequence: Synthetic oligonucleotide
  Antisense strand to SEQ ID NO: 2541424
uuaauggcaaagcucugcc

SEQ ID NO: 2541426 - RNA, 19 nt, Artificial Sequence
  Description of Artificial Sequence: Synthetic oligonucleotide
  Sense strand starting at position 3972 of SEQ ID NO: 1888557
agggaaguucugcauugag

SEQ ID NO: 2541427 - RNA, 19 nt, Artificial Sequence
  Description of Artificial Sequence: Synthetic oligonucleotide
  Antisense strand to SEQ ID NO: 2541426
cucaaugcagaacuucccu

SEQ ID NO: 2541428 - RNA, 19 nt, Artificial Sequence
  Description of Artificial Sequence: Synthetic oligonucleotide
  Sense strand starting at position 2336 of SEQ ID NO: 1888557
ggaagagaaucuuucccga

SEQ ID NO: 2541429 - RNA, 19 nt, Artificial Sequence
  Description of Artificial Sequence: Synthetic oligonucleotide
  Antisense strand to SEQ ID NO: 2541428
ucgggaaagauucucuucc

SEQ ID NO: 2541430 - RNA, 19 nt, Artificial Sequence
  Description of Artificial Sequence: Synthetic oligonucleotide
  Sense strand starting at position 2339 of SEQ ID NO: 1888557
agagaaucuuucccgacau

SEQ ID NO: 2541431 - RNA, 19 nt, Artificial Sequence
  Description of Artificial Sequence: Synthetic oligonucleotide
  Antisense strand to SEQ ID NO: 2541430
augucgggaaagauucucu

SEQ ID NO: 2541432 - RNA, 19 nt, Artificial Sequence
  Description of Artificial Sequence: Synthetic oligonucleotide
  Sense strand starting at position 1016 of SEQ ID NO: 1888557
gaaauagugcucuggagga

SEQ ID NO: 2541433 - RNA, 19 nt, Artificial Sequence
  Description of Artificial Sequence: Synthetic oligonucleotide
  Antisense strand to SEQ ID NO: 2541432
uccuccagagcacuauuuc

SEQ ID NO: 2541434 - RNA, 19 nt, Artificial Sequence
  Description of Artificial Sequence: Synthetic oligonucleotide
  Sense strand starting at position 529 of SEQ ID NO: 1888557
gccucugagaaaggaucuu

SEQ ID NO: 2541435 - RNA, 19 nt, Artificial Sequence
  Description of Artificial Sequence: Synthetic oligonucleotide
  Antisense strand to SEQ ID NO: 2541434
aagauccuuucucagaggc

SEQ ID NO: 2541436 - RNA, 19 nt, Artificial Sequence
  Description of Artificial Sequence: Synthetic oligonucleotide
  Sense strand starting at position 3747 of SEQ ID NO: 1888557
gcaugaacuguccagguaa

SEQ ID NO: 2541437 - RNA, 19 nt, Artificial Sequence
  Description of Artificial Sequence: Synthetic oligonucleotide
  Antisense strand to SEQ ID NO: 2541436
uuaccuggacaguucaugc

SEQ ID NO: 2541438 - RNA, 19 nt, Artificial Sequence
  Description of Artificial Sequence: Synthetic oligonucleotide
  Sense strand starting at position 3283 of SEQ ID NO: 1888557
ccagaaucugaguggguca

SEQ ID NO: 2541439 - RNA, 19 nt, Artificial Sequence
  Description of Artificial Sequence: Synthetic oligonucleotide
  Antisense strand to SEQ ID NO: 2541438
ugacccacucagauucugg

SEQ ID NO: 2541440 - RNA, 19 nt, Artificial Sequence
  Description of Artificial Sequence: Synthetic oligonucleotide
  Sense strand starting at position 86 of SEQ ID NO: 1888557
ugaaguucccagugaggau

SEQ ID NO: 2541441 - RNA, 19 nt, Artificial Sequence
  Description of Artificial Sequence: Synthetic oligonucleotide
  Antisense strand to SEQ ID NO: 2541440
auccucacugggaacuuca

SEQ ID NO: 2541442 - RNA, 19 nt, Artificial Sequence
  Description of Artificial Sequence: Synthetic oligonucleotide
  Sense strand starting at position 3749 of SEQ ID NO: 1888557
augaacuguccagguaauu

SEQ ID NO: 2541443 - RNA, 19 nt, Artificial Sequence
  Description of Artificial Sequence: Synthetic oligonucleotide
  Antisense strand to SEQ ID NO: 2541442
aauuaccuggacaguucau

SEQ ID NO: 2541444 - RNA, 19 nt, Artificial Sequence
  Description of Artificial Sequence: Synthetic oligonucleotide
  Sense strand starting at position 3971 of SEQ ID NO: 1888557
uagggaaguucugcauuga

SEQ ID NO: 2541445 - RNA, 19 nt, Artificial Sequence
  Description of Artificial Sequence: Synthetic oligonucleotide
  Antisense strand to SEQ ID NO: 2541444
ucaaugcagaacuucccua

SEQ ID NO: 2541446 - RNA, 19 nt, Artificial Sequence
  Description of Artificial Sequence: Synthetic oligonucleotide
  Sense strand starting at position 1159 of SEQ ID NO: 1888557
ccuugcagucucgagagau

SEQ ID NO: 2541447 - RNA, 19 nt, Artificial Sequence
  Description of Artificial Sequence: Synthetic oligonucleotide
  Antisense strand to SEQ ID NO: 2541446
aucucucgagacugcaagg

SEQ ID NO: 2541448 - RNA, 19 nt, Artificial Sequence
  Description of Artificial Sequence: Synthetic oligonucleotide
  Sense strand starting at position 3422 of SEQ ID NO: 1888557
uguugcugccaugaggaua

SEQ ID NO: 2541449 - RNA, 19 nt, Artificial Sequence
  Description of Artificial Sequence: Synthetic oligonucleotide
  Antisense strand to SEQ ID NO: 2541448
uauccucauggcagcaaca

SEQ ID NO: 2541450 - RNA, 19 nt, Artificial Sequence
  Description of Artificial Sequence: Synthetic oligonucleotide
  Sense strand starting at position 3190 of SEQ ID NO: 1888557
uccagagagcauugcuaac

SEQ ID NO: 2541451 - RNA, 19 nt, Artificial Sequence
  Description of Artificial Sequence: Synthetic oligonucleotide
  Antisense strand to SEQ ID NO: 2541450
guuagcaaugcucucugga

SEQ ID NO: 2541452 - RNA, 19 nt, Artificial Sequence
  Description of Artificial Sequence: Synthetic oligonucleotide
  Sense strand starting at position 605 of SEQ ID NO: 1888557
cgaacugucagcugacaag

SEQ ID NO: 2541453 - RNA, 19 nt, Artificial Sequence
  Description of Artificial Sequence: Synthetic oligonucleotide
  Antisense strand to SEQ ID NO: 2541452
cuugucagcugacaguucg

SEQ ID NO: 2541454 - RNA, 19 nt, Artificial Sequence
  Description of Artificial Sequence: Synthetic oligonucleotide
  Sense strand starting at position 74 of SEQ ID NO: 1888557
gcagcucaggaaugaaguu

SEQ ID NO: 2541455 - RNA, 19 nt, Artificial Sequence
  Description of Artificial Sequence: Synthetic oligonucleotide
  Antisense strand to SEQ ID NO: 2541454
aacuucauuccugagcugc

SEQ ID NO: 2541456 - RNA, 19 nt, Artificial Sequence
  Description of Artificial Sequence: Synthetic oligonucleotide
  Sense strand starting at position 550 of SEQ ID NO: 1888557
gguucauuggcagguaaau

SEQ ID NO: 2541457 - RNA, 19 nt, Artificial Sequence
  Description of Artificial Sequence: Synthetic oligonucleotide
  Antisense strand to SEQ ID NO: 2541456
auuuaccugccaaugaacc

SEQ ID NO: 2541458 - RNA, 19 nt, Artificial Sequence
  Description of Artificial Sequence: Synthetic oligonucleotide
  Sense strand starting at position 2677 of SEQ ID NO: 1888557
gcaccauccugagugacuu

SEQ ID NO: 2541459 - RNA, 19 nt, Artificial Sequence
  Description of Artificial Sequence: Synthetic oligonucleotide
  Antisense strand to SEQ ID NO: 2541458
aagucacucaggauggugc

SEQ ID NO: 2541460 - RNA, 19 nt, Artificial Sequence
  Description of Artificial Sequence: Synthetic oligonucleotide
  Sense strand starting at position 184 of SEQ ID NO: 1888557
ggcugcagauucucuugaa

SEQ ID NO: 2541461 - RNA, 19 nt, Artificial Sequence
  Description of Artificial Sequence: Synthetic oligonucleotide
  Antisense strand to SEQ ID NO: 2541460
uucaagagaaucugcagcc

SEQ ID NO: 2541462 - RNA, 19 nt, Artificial Sequence
  Description of Artificial Sequence: Synthetic oligonucleotide
  Sense strand starting at position 2989 of SEQ ID NO: 1888557
cccugugacuggucugauc

SEQ ID NO: 2541463 - RNA, 19 nt, Artificial Sequence
  Description of Artificial Sequence: Synthetic oligonucleotide
  Antisense strand to SEQ ID NO: 2541462
gaucagaccagucacaggg

SEQ ID NO: 2541464 - RNA, 19 nt, Artificial Sequence
  Description of Artificial Sequence: Synthetic oligonucleotide
  Sense strand starting at position 310 of SEQ ID NO: 1888557
cagugcuuguuacugggaa

SEQ ID NO: 2541465 - RNA, 19 nt, Artificial Sequence
  Description of Artificial Sequence: Synthetic oligonucleotide
  Antisense strand to SEQ ID NO: 2541464
uucccaguaacaagcacug

SEQ ID NO: 2541466 - RNA, 19 nt, Artificial Sequence
  Description of Artificial Sequence: Synthetic oligonucleotide
  Sense strand starting at position 3975 of SEQ ID NO: 1888557
gaaguucugcauugaggca

SEQ ID NO: 2541467 - RNA, 19 nt, Artificial Sequence
  Description of Artificial Sequence: Synthetic oligonucleotide
  Antisense strand to SEQ ID NO: 2541466
ugccucaaugcagaacuuc

SEQ ID NO: 2541468 - RNA, 19 nt, Artificial Sequence
  Description of Artificial Sequence: Synthetic oligonucleotide
  Sense strand starting at position 1728 of SEQ ID NO: 1888557
cuugcuuguuuaccuaaga

SEQ ID NO: 2541469 - RNA, 19 nt, Artificial Sequence
  Description of Artificial Sequence: Synthetic oligonucleotide
  Antisense strand to SEQ ID NO: 2541468
ucuuagguaaacaagcaag

SEQ ID NO: 2541470 - RNA, 19 nt, Artificial Sequence
  Description of Artificial Sequence: Synthetic oligonucleotide
  Sense strand starting at position 428 of SEQ ID NO: 1888557
ucuuuaucuugaucguaug

SEQ ID NO: 2541471 - RNA, 19 nt, Artificial Sequence
  Description of Artificial Sequence: Synthetic oligonucleotide
  Antisense strand to SEQ ID NO: 2541470
cauacgaucaagauaaaga

SEQ ID NO: 2541472 - RNA, 19 nt, Artificial Sequence
  Description of Artificial Sequence: Synthetic oligonucleotide
  Sense strand starting at position 2960 of SEQ ID NO: 1888557
acucucuccgccugagaca

SEQ ID NO: 2541473 - RNA, 19 nt, Artificial Sequence
  Description of Artificial Sequence: Synthetic oligonucleotide
  Antisense strand to SEQ ID NO: 2541472
ugucucaggcggagagagu

SEQ ID NO: 2541474 - RNA, 19 nt, Artificial Sequence
  Description of Artificial Sequence: Synthetic oligonucleotide
  Sense strand starting at position 3591 of SEQ ID NO: 1888557
gccugaacugguuaguguu

SEQ ID NO: 2541475 - RNA, 19 nt, Artificial Sequence
  Description of Artificial Sequence: Synthetic oligonucleotide
  Antisense strand to SEQ ID NO: 2541474
aacacuaaccaguucaggc

SEQ ID NO: 2541476 - RNA, 19 nt, Artificial Sequence
  Description of Artificial Sequence: Synthetic oligonucleotide
  Sense strand starting at position 434 of SEQ ID NO: 1888557
ucuugaucguauguugaac

SEQ ID NO: 2541477 - RNA, 19 nt, Artificial Sequence
  Description of Artificial Sequence: Synthetic oligonucleotide
  Antisense strand to SEQ ID NO: 2541476
guucaacauacgaucaaga

SEQ ID NO: 2541478 - RNA, 19 nt, Artificial Sequence
  Description of Artificial Sequence: Synthetic oligonucleotide
  Sense strand starting at position 288 of SEQ ID NO: 1888557
gagaaaucaugacagcuga

SEQ ID NO: 2541479 - RNA, 19 nt, Artificial Sequence
  Description of Artificial Sequence: Synthetic oligonucleotide
  Antisense strand to SEQ ID NO: 2541478
ucagcugucaugauuucuc

SEQ ID NO: 2541480 - RNA, 19 nt, Artificial Sequence
  Description of Artificial Sequence: Synthetic oligonucleotide
  Sense strand starting at position 1722 of SEQ ID NO: 1888557
guggaacuugcuuguuuac

SEQ ID NO: 2541481 - RNA, 19 nt, Artificial Sequence
  Description of Artificial Sequence: Synthetic oligonucleotide
  Antisense strand to SEQ ID NO: 2541480
guaaacaagcaaguuccac

SEQ ID NO: 2541482 - RNA, 19 nt, Artificial Sequence
  Description of Artificial Sequence: Synthetic oligonucleotide
  Sense strand starting at position 1333 of SEQ ID NO: 1888557
gcaaaucauuccgcaaggu

SEQ ID NO: 2541483 - RNA, 19 nt, Artificial Sequence
  Description of Artificial Sequence: Synthetic oligonucleotide
  Antisense strand to SEQ ID NO: 2541482
accuugcggaaugauuugc

SEQ ID NO: 2541484 - RNA, 19 nt, Artificial Sequence
  Description of Artificial Sequence: Synthetic oligonucleotide
  Sense strand starting at position 1050 of SEQ ID NO: 1888557
agugucuucuccguaaaca

SEQ ID NO: 2541485 - RNA, 19 nt, Artificial Sequence
  Description of Artificial Sequence: Synthetic oligonucleotide
  Antisense strand to SEQ ID NO: 2541484
uguuuacggagaagacacu

SEQ ID NO: 2541486 - RNA, 19 nt, Artificial Sequence
  Description of Artificial Sequence: Synthetic oligonucleotide
  Sense strand starting at position 1049 of SEQ ID NO: 1888557
gagugucuucuccguaaac

SEQ ID NO: 2541487 - RNA, 19 nt, Artificial Sequence
  Description of Artificial Sequence: Synthetic oligonucleotide
  Antisense strand to SEQ ID NO: 2541486
guuuacggagaagacacuc

SEQ ID NO: 2541488 - RNA, 19 nt, Artificial Sequence
  Description of Artificial Sequence: Synthetic oligonucleotide
  Sense strand starting at position 1939 of SEQ ID NO: 1888557
cgcgacugugcagaaaguu

SEQ ID NO: 2541489 - RNA, 19 nt, Artificial Sequence
  Description of Artificial Sequence: Synthetic oligonucleotide
  Antisense strand to SEQ ID NO: 2541488
aacuuucugcacagucgcg

SEQ ID NO: 2541490 - RNA, 19 nt, Artificial Sequence
  Description of Artificial Sequence: Synthetic oligonucleotide
  Sense strand starting at position 772 of SEQ ID NO: 1888557
ugagaccucuuccaugaau

SEQ ID NO: 2541491 - RNA, 19 nt, Artificial Sequence
  Description of Artificial Sequence: Synthetic oligonucleotide
  Antisense strand to SEQ ID NO: 2541490
auucauggaagaggucuca

SEQ ID NO: 2541492 - RNA, 19 nt, Artificial Sequence
  Description of Artificial Sequence: Synthetic oligonucleotide
  Sense strand starting at position 3014 of SEQ ID NO: 1888557
gggcacuccugggauagaa

SEQ ID NO: 2541493 - RNA, 19 nt, Artificial Sequence
  Description of Artificial Sequence: Synthetic oligonucleotide
  Antisense strand to SEQ ID NO: 2541492
uucuaucccaggagugccc

SEQ ID NO: 2541494 - RNA, 19 nt, Artificial Sequence
  Description of Artificial Sequence: Synthetic oligonucleotide
  Sense strand starting at position 1721 of SEQ ID NO: 1888557
cguggaacuugcuuguuua

SEQ ID NO: 2541495 - RNA, 19 nt, Artificial Sequence
  Description of Artificial Sequence: Synthetic oligonucleotide
  Antisense strand to SEQ ID NO: 2541494
uaaacaagcaaguuccacg

SEQ ID NO: 2541496 - RNA, 19 nt, Artificial Sequence
  Description of Artificial Sequence: Synthetic oligonucleotide
  Sense strand starting at position 83 of SEQ ID NO: 1888557
gaaugaaguucccagugag

SEQ ID NO: 2541497 - RNA, 19 nt, Artificial Sequence
  Description of Artificial Sequence: Synthetic oligonucleotide
  Antisense strand to SEQ ID NO: 2541496
cucacugggaacuucauuc

SEQ ID NO: 2541498 - RNA, 19 nt, Artificial Sequence
  Description of Artificial Sequence: Synthetic oligonucleotide
  Sense strand starting at position 822 of SEQ ID NO: 1888557
aggaucaugucugagaagu

SEQ ID NO: 2541499 - RNA, 19 nt, Artificial Sequence
  Description of Artificial Sequence: Synthetic oligonucleotide
  Antisense strand to SEQ ID NO: 2541498
acuucucagacaugauccu

SEQ ID NO: 2541500 - RNA, 19 nt, Artificial Sequence
  Description of Artificial Sequence: Synthetic oligonucleotide
  Sense strand starting at position 305 of SEQ ID NO: 1888557
gaugccagugcuuguuacu

SEQ ID NO: 2541501 - RNA, 19 nt, Artificial Sequence
  Description of Artificial Sequence: Synthetic oligonucleotide
  Antisense strand to SEQ ID NO: 2541500
aguaacaagcacuggcauc

SEQ ID NO: 2541502 - RNA, 19 nt, Artificial Sequence
  Description of Artificial Sequence: Synthetic oligonucleotide
  Sense strand starting at position 1047 of SEQ ID NO: 1888557
cggagugucuucuccguaa

SEQ ID NO: 2541503 - RNA, 19 nt, Artificial Sequence
  Description of Artificial Sequence: Synthetic oligonucleotide
  Antisense strand to SEQ ID NO: 2541502
uuacggagaagacacuccg

SEQ ID NO: 2541504 - RNA, 19 nt, Artificial Sequence
  Description of Artificial Sequence: Synthetic oligonucleotide
  Sense strand starting at position 817 of SEQ ID NO: 1888557
cagagaggaucaugucuga

SEQ ID NO: 2541505 - RNA, 19 nt, Artificial Sequence
  Description of Artificial Sequence: Synthetic oligonucleotide
  Antisense strand to SEQ ID NO: 2541504
ucagacaugauccucucug

SEQ ID NO: 2541506 - RNA, 19 nt, Artificial Sequence
  Description of Artificial Sequence: Synthetic oligonucleotide
  Sense strand starting at position 2882 of SEQ ID NO: 1888558
cuggguguuguuagugaua

SEQ ID NO: 2541507 - RNA, 19 nt, Artificial Sequence
  Description of Artificial Sequence: Synthetic oligonucleotide
  Antisense strand to SEQ ID NO: 2541506
uaucacuaacaacacccag

SEQ ID NO: 2541508 - RNA, 19 nt, Artificial Sequence
  Description of Artificial Sequence: Synthetic oligonucleotide
  Sense strand starting at position 2170 of SEQ ID NO: 1888558
ugccauuuaggcugaacuu

SEQ ID NO: 2541509 - RNA, 19 nt, Artificial Sequence
  Description of Artificial Sequence: Synthetic oligonucleotide
  Antisense strand to SEQ ID NO: 2541508
aaguucagccuaaauggca

SEQ ID NO: 2541510 - RNA, 19 nt, Artificial Sequence
  Description of Artificial Sequence: Synthetic oligonucleotide
  Sense strand starting at position 985 of SEQ ID NO: 1888558
aguuuaauuugaguccugu

SEQ ID NO: 2541511 - RNA, 19 nt, Artificial Sequence
  Description of Artificial Sequence: Synthetic oligonucleotide
  Antisense strand to SEQ ID NO: 2541510
acaggacucaaauuaaacu

SEQ ID NO: 2541512 - RNA, 19 nt, Artificial Sequence
  Description of Artificial Sequence: Synthetic oligonucleotide
  Sense strand starting at position 2629 of SEQ ID NO: 1888558
agugauggugacugagaag

SEQ ID NO: 2541513 - RNA, 19 nt, Artificial Sequence
  Description of Artificial Sequence: Synthetic oligonucleotide
  Antisense strand to SEQ ID NO: 2541512
cuucucagucaccaucacu

SEQ ID NO: 2541514 - RNA, 19 nt, Artificial Sequence
  Description of Artificial Sequence: Synthetic oligonucleotide
  Sense strand starting at position 383 of SEQ ID NO: 1888558
gugaaagaaaucugaguca

SEQ ID NO: 2541515 - RNA, 19 nt, Artificial Sequence
  Description of Artificial Sequence: Synthetic oligonucleotide
  Antisense strand to SEQ ID NO: 2541514
ugacucagauuucuuucac

SEQ ID NO: 2541516 - RNA, 19 nt, Artificial Sequence
  Description of Artificial Sequence: Synthetic oligonucleotide
  Sense strand starting at position 57 of SEQ ID NO: 1888558
aggauuucucucuguagcu

SEQ ID NO: 2541517 - RNA, 19 nt, Artificial Sequence
  Description of Artificial Sequence: Synthetic oligonucleotide
  Antisense strand to SEQ ID NO: 2541516
agcuacagagagaaauccu

SEQ ID NO: 2541518 - RNA, 19 nt, Artificial Sequence
  Description of Artificial Sequence: Synthetic oligonucleotide
  Sense strand starting at position 3932 of SEQ ID NO: 1888558
uugacugauagaugucaga

SEQ ID NO: 2541519 - RNA, 19 nt, Artificial Sequence
  Description of Artificial Sequence: Synthetic oligonucleotide
  Antisense strand to SEQ ID NO: 2541518
ucugacaucuaucagucaa

SEQ ID NO: 2541520 - RNA, 19 nt, Artificial Sequence
  Description of Artificial Sequence: Synthetic oligonucleotide
  Sense strand starting at position 2894 of SEQ ID NO: 1888558
agugauaucacugagagcu

SEQ ID NO: 2541521 - RNA, 19 nt, Artificial Sequence
  Description of Artificial Sequence: Synthetic oligonucleotide
  Antisense strand to SEQ ID NO: 2541520
agcucucagugauaucacu

SEQ ID NO: 2541522 - RNA, 19 nt, Artificial Sequence
  Description of Artificial Sequence: Synthetic oligonucleotide
  Sense strand starting at position 1810 of SEQ ID NO: 1888558
caaagaaugguucgggaau

SEQ ID NO: 2541523 - RNA, 19 nt, Artificial Sequence
  Description of Artificial Sequence: Synthetic oligonucleotide
  Antisense strand to SEQ ID NO: 2541522
auucccgaaccauucuuug

SEQ ID NO: 2541524 - RNA, 19 nt, Artificial Sequence
  Description of Artificial Sequence: Synthetic oligonucleotide
  Sense strand starting at position 3974 of SEQ ID NO: 1888558
cagguuugugcagaaagaa

SEQ ID NO: 2541525 - RNA, 19 nt, Artificial Sequence
  Description of Artificial Sequence: Synthetic oligonucleotide
  Antisense strand to SEQ ID NO: 2541524
uucuuucugcacaaaccug

SEQ ID NO: 2541526 - RNA, 19 nt, Artificial Sequence
  Description of Artificial Sequence: Synthetic oligonucleotide
  Sense strand starting at position 2628 of SEQ ID NO: 1888558
cagugauggugacugagaa

SEQ ID NO: 2541527 - RNA, 19 nt, Artificial Sequence
  Description of Artificial Sequence: Synthetic oligonucleotide
  Antisense strand to SEQ ID NO: 2541526
uucucagucaccaucacug

SEQ ID NO: 2541528 - RNA, 19 nt, Artificial Sequence
  Description of Artificial Sequence: Synthetic oligonucleotide
  Sense strand starting at position 3088 of SEQ ID NO: 1888558
ugauuccaugagugaugga

SEQ ID NO: 2541529 - RNA, 19 nt, Artificial Sequence
  Description of Artificial Sequence: Synthetic oligonucleotide
  Antisense strand to SEQ ID NO: 2541528
uccaucacucauggaauca

SEQ ID NO: 2541530 - RNA, 19 nt, Artificial Sequence
  Description of Artificial Sequence: Synthetic oligonucleotide
  Sense strand starting at position 3909 of SEQ ID NO: 1888558
uuauucuaccauugaugga

SEQ ID NO: 2541531 - RNA, 19 nt, Artificial Sequence
  Description of Artificial Sequence: Synthetic oligonucleotide
  Antisense strand to SEQ ID NO: 2541530
uccaucaaugguagaauaa

SEQ ID NO: 2541532 - RNA, 19 nt, Artificial Sequence
  Description of Artificial Sequence: Synthetic oligonucleotide
  Sense strand starting at position 3536 of SEQ ID NO: 1888558
gaucuugauuugugauuua

SEQ ID NO: 2541533 - RNA, 19 nt, Artificial Sequence
  Description of Artificial Sequence: Synthetic oligonucleotide
  Antisense strand to SEQ ID NO: 2541532
uaaaucacaaaucaagauc

SEQ ID NO: 2541534 - RNA, 19 nt, Artificial Sequence
  Description of Artificial Sequence: Synthetic oligonucleotide
  Sense strand starting at position 3085 of SEQ ID NO: 1888558
cugugauuccaugagugau

SEQ ID NO: 2541535 - RNA, 19 nt, Artificial Sequence
  Description of Artificial Sequence: Synthetic oligonucleotide
  Antisense strand to SEQ ID NO: 2541534
aucacucauggaaucacag

SEQ ID NO: 2541536 - RNA, 19 nt, Artificial Sequence
  Description of Artificial Sequence: Synthetic oligonucleotide
  Sense strand starting at position 1998 of SEQ ID NO: 1888558
cgaugacuggcacaagagu

SEQ ID NO: 2541537 - RNA, 19 nt, Artificial Sequence
  Description of Artificial Sequence: Synthetic oligonucleotide
  Antisense strand to SEQ ID NO: 2541536
acucuugugccagucaucg

SEQ ID NO: 2541538 - RNA, 19 nt, Artificial Sequence
  Description of Artificial Sequence: Synthetic oligonucleotide
  Sense strand starting at position 1278 of SEQ ID NO: 1888558
cuggaagauucuguacuac

SEQ ID NO: 2541539 - RNA, 19 nt, Artificial Sequence
  Description of Artificial Sequence: Synthetic oligonucleotide
  Antisense strand to SEQ ID NO: 2541538
guaguacagaaucuuccag

SEQ ID NO: 2541540 - RNA, 19 nt, Artificial Sequence
  Description of Artificial Sequence: Synthetic oligonucleotide
  Sense strand starting at position 3228 of SEQ ID NO: 1888558
aaaguagaugaaugcuuua

SEQ ID NO: 2541541 - RNA, 19 nt, Artificial Sequence
  Description of Artificial Sequence: Synthetic oligonucleotide
  Antisense strand to SEQ ID NO: 2541540
uaaagcauucaucuacuuu

SEQ ID NO: 2541542 - RNA, 19 nt, Artificial Sequence
  Description of Artificial Sequence: Synthetic oligonucleotide
  Sense strand starting at position 866 of SEQ ID NO: 1888558
uuuaauuaccuaggguuga

SEQ ID NO: 2541543 - RNA, 19 nt, Artificial Sequence
  Description of Artificial Sequence: Synthetic oligonucleotide
  Antisense strand to SEQ ID NO: 2541542
ucaacccuagguaauuaaa

SEQ ID NO: 2541544 - RNA, 19 nt, Artificial Sequence
  Description of Artificial Sequence: Synthetic oligonucleotide
  Sense strand starting at position 1100 of SEQ ID NO: 1888558
ucugaugucaguggaauaa

SEQ ID NO: 2541545 - RNA, 19 nt, Artificial Sequence
  Description of Artificial Sequence: Synthetic oligonucleotide
  Antisense strand to SEQ ID NO: 2541544
uuauuccacugacaucaga

SEQ ID NO: 2541546 - RNA, 19 nt, Artificial Sequence
  Description of Artificial Sequence: Synthetic oligonucleotide
  Sense strand starting at position 362 of SEQ ID NO: 1888558
ccuguuuguacaggagaaa

SEQ ID NO: 2541547 - RNA, 19 nt, Artificial Sequence
  Description of Artificial Sequence: Synthetic oligonucleotide
  Antisense strand to SEQ ID NO: 2541546
uuucuccuguacaaacagg

SEQ ID NO: 2541548 - RNA, 19 nt, Artificial Sequence
  Description of Artificial Sequence: Synthetic oligonucleotide
  Sense strand starting at position 2 of SEQ ID NO: 1888558
ggagaugucaucugaccuc

SEQ ID NO: 2541549 - RNA, 19 nt, Artificial Sequence
  Description of Artificial Sequence: Synthetic oligonucleotide
  Antisense strand to SEQ ID NO: 2541548
gaggucagaugacaucucc

SEQ ID NO: 2541550 - RNA, 19 nt, Artificial Sequence
  Description of Artificial Sequence: Synthetic oligonucleotide
  Sense strand starting at position 2985 of SEQ ID NO: 1888558
ugggcugaacugugaaaca

SEQ ID NO: 2541551 - RNA, 19 nt, Artificial Sequence
  Description of Artificial Sequence: Synthetic oligonucleotide
  Antisense strand to SEQ ID NO: 2541550
uguuucacaguucagccca

SEQ ID NO: 2541552 - RNA, 19 nt, Artificial Sequence
  Description of Artificial Sequence: Synthetic oligonucleotide
  Sense strand starting at position 2179 of SEQ ID NO: 1888558
ggcugaacuuaugugagga

SEQ ID NO: 2541553 - RNA, 19 nt, Artificial Sequence
  Description of Artificial Sequence: Synthetic oligonucleotide
  Antisense strand to SEQ ID NO: 2541552
uccucacauaaguucagcc

SEQ ID NO: 2541554 - RNA, 19 nt, Artificial Sequence
  Description of Artificial Sequence: Synthetic oligonucleotide
  Sense strand starting at position 2180 of SEQ ID NO: 1888558
gcugaacuuaugugaggag

SEQ ID NO: 2541555 - RNA, 19 nt, Artificial Sequence
  Description of Artificial Sequence: Synthetic oligonucleotide
  Antisense strand to SEQ ID NO: 2541554
cuccucacauaaguucagc

SEQ ID NO: 2541556 - RNA, 19 nt, Artificial Sequence
  Description of Artificial Sequence: Synthetic oligonucleotide
  Sense strand starting at position 2955 of SEQ ID NO: 1888558
acauuugcuuaagaaauag

SEQ ID NO: 2541557 - RNA, 19 nt, Artificial Sequence
  Description of Artificial Sequence: Synthetic oligonucleotide
  Antisense strand to SEQ ID NO: 2541556
cuauuucuuaagcaaaugu

SEQ ID NO: 2541558 - RNA, 19 nt, Artificial Sequence
  Description of Artificial Sequence: Synthetic oligonucleotide
  Sense strand starting at position 1030 of SEQ ID NO: 1888558
gaauguggugcugaaguaa

SEQ ID NO: 2541559 - RNA, 19 nt, Artificial Sequence
  Description of Artificial Sequence: Synthetic oligonucleotide
  Antisense strand to SEQ ID NO: 2541558
uuacuucagcaccacauuc

SEQ ID NO: 2541560 - RNA, 19 nt, Artificial Sequence
  Description of Artificial Sequence: Synthetic oligonucleotide
  Sense strand starting at position 2244 of SEQ ID NO: 1888558
cggaguuugcaagaaaggu

SEQ ID NO: 2541561 - RNA, 19 nt, Artificial Sequence
  Description of Artificial Sequence: Synthetic oligonucleotide
  Antisense strand to SEQ ID NO: 2541560
accuuucuugcaaacuccg

SEQ ID NO: 2541562 - RNA, 19 nt, Artificial Sequence
  Description of Artificial Sequence: Synthetic oligonucleotide
  Sense strand starting at position 2588 of SEQ ID NO: 1888558
aggagugaguuuccacauc

SEQ ID NO: 2541563 - RNA, 19 nt, Artificial Sequence
  Description of Artificial Sequence: Synthetic oligonucleotide
  Antisense strand to SEQ ID NO: 2541562
gauguggaaacucacuccu

SEQ ID NO: 2541564 - RNA, 19 nt, Artificial Sequence
  Description of Artificial Sequence: Synthetic oligonucleotide
  Sense strand starting at position 2893 of SEQ ID NO: 1888558
uagugauaucacugagagc

SEQ ID NO: 2541565 - RNA, 19 nt, Artificial Sequence
  Description of Artificial Sequence: Synthetic oligonucleotide
  Antisense strand to SEQ ID NO: 2541564
gcucucagugauaucacua

SEQ ID NO: 2541566 - RNA, 19 nt, Artificial Sequence
  Description of Artificial Sequence: Synthetic oligonucleotide
  Sense strand starting at position 509 of SEQ ID NO: 1888558
ugaauccaguuauugcaaa

SEQ ID NO: 2541567 - RNA, 19 nt, Artificial Sequence
  Description of Artificial Sequence: Synthetic oligonucleotide
  Antisense strand to SEQ ID NO: 2541566
uuugcaauaacuggauuca

SEQ ID NO: 2541568 - RNA, 19 nt, Artificial Sequence
  Description of Artificial Sequence: Synthetic oligonucleotide
  Sense strand starting at position 1099 of SEQ ID NO: 1888558
uucugaugucaguggaaua

SEQ ID NO: 2541569 - RNA, 19 nt, Artificial Sequence
  Description of Artificial Sequence: Synthetic oligonucleotide
  Antisense strand to SEQ ID NO: 2541568
uauuccacugacaucagaa

SEQ ID NO: 2541570 - RNA, 19 nt, Artificial Sequence
  Description of Artificial Sequence: Synthetic oligonucleotide
  Sense strand starting at position 1365 of SEQ ID NO: 1888558
gugagagucuauccucaca

SEQ ID NO: 2541571 - RNA, 19 nt, Artificial Sequence
  Description of Artificial Sequence: Synthetic oligonucleotide
  Antisense strand to SEQ ID NO: 2541570
ugugaggauagacucucac

SEQ ID NO: 2541572 - RNA, 19 nt, Artificial Sequence
  Description of Artificial Sequence: Synthetic oligonucleotide
  Sense strand starting at position 2526 of SEQ ID NO: 1888558
accguugcucuacaaugau

SEQ ID NO: 2541573 - RNA, 19 nt, Artificial Sequence
  Description of Artificial Sequence: Synthetic oligonucleotide
  Antisense strand to SEQ ID NO: 2541572
aucauuguagagcaacggu

SEQ ID NO: 2541574 - RNA, 19 nt, Artificial Sequence
  Description of Artificial Sequence: Synthetic oligonucleotide
  Sense strand starting at position 544 of SEQ ID NO: 1888558
auguucgaaagcugauaau

SEQ ID NO: 2541575 - RNA, 19 nt, Artificial Sequence
  Description of Artificial Sequence: Synthetic oligonucleotide
  Antisense strand to SEQ ID NO: 2541574
auuaucagcuuucgaacau

SEQ ID NO: 2541576 - RNA, 19 nt, Artificial Sequence
  Description of Artificial Sequence: Synthetic oligonucleotide
  Sense strand starting at position 2885 of SEQ ID NO: 1888558
gguguuguuagugauauca

SEQ ID NO: 2541577 - RNA, 19 nt, Artificial Sequence
  Description of Artificial Sequence: Synthetic oligonucleotide
  Antisense strand to SEQ ID NO: 2541576
ugauaucacuaacaacacc

SEQ ID NO: 2541578 - RNA, 19 nt, Artificial Sequence
  Description of Artificial Sequence: Synthetic oligonucleotide
  Sense strand starting at position 2224 of SEQ ID NO: 1888558
cugaauucucaguggcaug

SEQ ID NO: 2541579 - RNA, 19 nt, Artificial Sequence
  Description of Artificial Sequence: Synthetic oligonucleotide
  Antisense strand to SEQ ID NO: 2541578
caugccacugagaauucag

SEQ ID NO: 2541580 - RNA, 19 nt, Artificial Sequence
  Description of Artificial Sequence: Synthetic oligonucleotide
  Sense strand starting at position 218 of SEQ ID NO: 1888558
cgauuauucuucuccacug

SEQ ID NO: 2541581 - RNA, 19 nt, Artificial Sequence
  Description of Artificial Sequence: Synthetic oligonucleotide
  Antisense strand to SEQ ID NO: 2541580
caguggagaagaauaaucg

SEQ ID NO: 2541582 - RNA, 19 nt, Artificial Sequence
  Description of Artificial Sequence: Synthetic oligonucleotide
  Sense strand starting at position 3049 of SEQ ID NO: 1888558
agugauuucucggagaacu

SEQ ID NO: 2541583 - RNA, 19 nt, Artificial Sequence
  Description of Artificial Sequence: Synthetic oligonucleotide
  Antisense strand to SEQ ID NO: 2541582
aguucuccgagaaaucacu

SEQ ID NO: 2541584 - RNA, 19 nt, Artificial Sequence
  Description of Artificial Sequence: Synthetic oligonucleotide
  Sense strand starting at position 1524 of SEQ ID NO: 1888558
uugagccuuugaucacagu

SEQ ID NO: 2541585 - RNA, 19 nt, Artificial Sequence
  Description of Artificial Sequence: Synthetic oligonucleotide
  Antisense strand to SEQ ID NO: 2541584
acugugaucaaaggcucaa

SEQ ID NO: 2541586 - RNA, 19 nt, Artificial Sequence
  Description of Artificial Sequence: Synthetic oligonucleotide
  Sense strand starting at position 724 of SEQ ID NO: 1888559
cccuguguagaugaugaau

SEQ ID NO: 2541587 - RNA, 19 nt, Artificial Sequence
  Description of Artificial Sequence: Synthetic oligonucleotide
  Antisense strand to SEQ ID NO: 2541586
auucaucaucuacacaggg

SEQ ID NO: 2541588 - RNA, 19 nt, Artificial Sequence
  Description of Artificial Sequence: Synthetic oligonucleotide
  Sense strand starting at position 3333 of SEQ ID NO: 1888559
cagugaguuggucaacaga

SEQ ID NO: 2541589 - RNA, 19 nt, Artificial Sequence
  Description of Artificial Sequence: Synthetic oligonucleotide
  Antisense strand to SEQ ID NO: 2541588
ucuguugaccaacucacug

SEQ ID NO: 2541590 - RNA, 19 nt, Artificial Sequence
  Description of Artificial Sequence: Synthetic oligonucleotide
  Sense strand starting at position 3336 of SEQ ID NO: 1888559
ugaguuggucaacagaggu

SEQ ID NO: 2541591 - RNA, 19 nt, Artificial Sequence
  Description of Artificial Sequence: Synthetic oligonucleotide
  Antisense strand to SEQ ID NO: 2541590
accucuguugaccaacuca

SEQ ID NO: 2541592 - RNA, 19 nt, Artificial Sequence
  Description of Artificial Sequence: Synthetic oligonucleotide
  Sense strand starting at position 3842 of SEQ ID NO: 1888559
agauuaacuuggguguuaa

SEQ ID NO: 2541593 - RNA, 19 nt, Artificial Sequence
  Description of Artificial Sequence: Synthetic oligonucleotide
  Antisense strand to SEQ ID NO: 2541592
uuaacacccaaguuaaucu

SEQ ID NO: 2541594 - RNA, 19 nt, Artificial Sequence
  Description of Artificial Sequence: Synthetic oligonucleotide
  Sense strand starting at position 2999 of SEQ ID NO: 1888559
gccacaucuccauggagga

SEQ ID NO: 2541595 - RNA, 19 nt, Artificial Sequence
  Description of Artificial Sequence: Synthetic oligonucleotide
  Antisense strand to SEQ ID NO: 2541594
uccuccauggagauguggc

SEQ ID NO: 2541596 - RNA, 19 nt, Artificial Sequence
  Description of Artificial Sequence: Synthetic oligonucleotide
  Sense strand starting at position 2854 of SEQ ID NO: 1888559
gucucagccaugggaaaga

SEQ ID NO: 2541597 - RNA, 19 nt, Artificial Sequence
  Description of Artificial Sequence: Synthetic oligonucleotide
  Antisense strand to SEQ ID NO: 2541596
ucuuucccauggcugagac

SEQ ID NO: 2541598 - RNA, 19 nt, Artificial Sequence
  Description of Artificial Sequence: Synthetic oligonucleotide
  Sense strand starting at position 3585 of SEQ ID NO: 1888559
ggaacauccuucucugagu

SEQ ID NO: 2541599 - RNA, 19 nt, Artificial Sequence
  Description of Artificial Sequence: Synthetic oligonucleotide
  Antisense strand to SEQ ID NO: 2541598
acucagagaaggauguucc

SEQ ID NO: 2541600 - RNA, 19 nt, Artificial Sequence
  Description of Artificial Sequence: Synthetic oligonucleotide
  Sense strand starting at position 3820 of SEQ ID NO: 1888559
cugacaauugagcgaccaa

SEQ ID NO: 2541601 - RNA, 19 nt, Artificial Sequence
  Description of Artificial Sequence: Synthetic oligonucleotide
  Antisense strand to SEQ ID NO: 2541600
uuggucgcucaauugucag

SEQ ID NO: 2541602 - RNA, 19 nt, Artificial Sequence
  Description of Artificial Sequence: Synthetic oligonucleotide
  Sense strand starting at position 848 of SEQ ID NO: 1888559
acacuaucuuggucgagga

SEQ ID NO: 2541603 - RNA, 19 nt, Artificial Sequence
  Description of Artificial Sequence: Synthetic oligonucleotide
  Antisense strand to SEQ ID NO: 2541602
uccucgaccaagauagugu

SEQ ID NO: 2541604 - RNA, 19 nt, Artificial Sequence
  Description of Artificial Sequence: Synthetic oligonucleotide
  Sense strand starting at position 3843 of SEQ ID NO: 1888559
gauuaacuuggguguuaau

SEQ ID NO: 2541605 - RNA, 19 nt, Artificial Sequence
  Description of Artificial Sequence: Synthetic oligonucleotide
  Antisense strand to SEQ ID NO: 2541604
auuaacacccaaguuaauc

SEQ ID NO: 2541606 - RNA, 19 nt, Artificial Sequence
  Description of Artificial Sequence: Synthetic oligonucleotide
  Sense strand starting at position 3599 of SEQ ID NO: 1888559
ugaguucccugauuaccca

SEQ ID NO: 2541607 - RNA, 19 nt, Artificial Sequence
  Description of Artificial Sequence: Synthetic oligonucleotide
  Antisense strand to SEQ ID NO: 2541606
uggguaaucagggaacuca

SEQ ID NO: 2541608 - RNA, 19 nt, Artificial Sequence
  Description of Artificial Sequence: Synthetic oligonucleotide
  Sense strand starting at position 2728 of SEQ ID NO: 1888559
augggagaaucguugguca

SEQ ID NO: 2541609 - RNA, 19 nt, Artificial Sequence
  Description of Artificial Sequence: Synthetic oligonucleotide
  Antisense strand to SEQ ID NO: 2541608
ugaccaacgauucucccau

SEQ ID NO: 2541610 - RNA, 19 nt, Artificial Sequence
  Description of Artificial Sequence: Synthetic oligonucleotide
  Sense strand starting at position 849 of SEQ ID NO: 1888559
cacuaucuuggucgaggau

SEQ ID NO: 2541611 - RNA, 19 nt, Artificial Sequence
  Description of Artificial Sequence: Synthetic oligonucleotide
  Antisense strand to SEQ ID NO: 2541610
auccucgaccaagauagug

SEQ ID NO: 2541612 - RNA, 19 nt, Artificial Sequence
  Description of Artificial Sequence: Synthetic oligonucleotide
  Sense strand starting at position 2731 of SEQ ID NO: 1888559
ggagaaucguuggucacug

SEQ ID NO: 2541613 - RNA, 19 nt, Artificial Sequence
  Description of Artificial Sequence: Synthetic oligonucleotide
  Antisense strand to SEQ ID NO: 2541612
cagugaccaacgauucucc

SEQ ID NO: 2541614 - RNA, 19 nt, Artificial Sequence
  Description of Artificial Sequence: Synthetic oligonucleotide
  Sense strand starting at position 3596 of SEQ ID NO: 1888559
cucugaguucccugauuac

SEQ ID NO: 2541615 - RNA, 19 nt, Artificial Sequence
  Description of Artificial Sequence: Synthetic oligonucleotide
  Antisense strand to SEQ ID NO: 2541614
guaaucagggaacucagag

SEQ ID NO: 2541616 - RNA, 19 nt, Artificial Sequence
  Description of Artificial Sequence: Synthetic oligonucleotide
  Sense strand starting at position 2730 of SEQ ID NO: 1888559
gggagaaucguuggucacu

SEQ ID NO: 2541617 - RNA, 19 nt, Artificial Sequence
  Description of Artificial Sequence: Synthetic oligonucleotide
  Antisense strand to SEQ ID NO: 2541616
agugaccaacgauucuccc

SEQ ID NO: 2541618 - RNA, 19 nt, Artificial Sequence
  Description of Artificial Sequence: Synthetic oligonucleotide
  Sense strand starting at position 2172 of SEQ ID NO: 1888559
gagauugauugggcugcuu

SEQ ID NO: 2541619 - RNA, 19 nt, Artificial Sequence
  Description of Artificial Sequence: Synthetic oligonucleotide
  Antisense strand to SEQ ID NO: 2541618
aagcagcccaaucaaucuc

SEQ ID NO: 2541620 - RNA, 19 nt, Artificial Sequence
  Description of Artificial Sequence: Synthetic oligonucleotide
  Sense strand starting at position 88 of SEQ ID NO: 1888559
aaaggugucugugcaggaa

SEQ ID NO: 2541621 - RNA, 19 nt, Artificial Sequence
  Description of Artificial Sequence: Synthetic oligonucleotide
  Antisense strand to SEQ ID NO: 2541620
uuccugcacagacaccuuu

SEQ ID NO: 2541622 - RNA, 19 nt, Artificial Sequence
  Description of Artificial Sequence: Synthetic oligonucleotide
  Sense strand starting at position 3839 of SEQ ID NO: 1888559
agcagauuaacuugggugu

SEQ ID NO: 2541623 - RNA, 19 nt, Artificial Sequence
  Description of Artificial Sequence: Synthetic oligonucleotide
  Antisense strand to SEQ ID NO: 2541622
acacccaaguuaaucugcu

SEQ ID NO: 2541624 - RNA, 19 nt, Artificial Sequence
  Description of Artificial Sequence: Synthetic oligonucleotide
  Sense strand starting at position 3594 of SEQ ID NO: 1888559
uucucugaguucccugauu

SEQ ID NO: 2541625 - RNA, 19 nt, Artificial Sequence
  Description of Artificial Sequence: Synthetic oligonucleotide
  Antisense strand to SEQ ID NO: 2541624
aaucagggaacucagagaa

SEQ ID NO: 2541626 - RNA, 19 nt, Artificial Sequence
  Description of Artificial Sequence: Synthetic oligonucleotide
  Sense strand starting at position 658 of SEQ ID NO: 1888559
cccagauuccuuggcauuc

SEQ ID NO: 2541627 - RNA, 19 nt, Artificial Sequence
  Description of Artificial Sequence: Synthetic oligonucleotide
  Antisense strand to SEQ ID NO: 2541626
gaaugccaaggaaucuggg

SEQ ID NO: 2541628 - RNA, 19 nt, Artificial Sequence
  Description of Artificial Sequence: Synthetic oligonucleotide
  Sense strand starting at position 91 of SEQ ID NO: 1888559
ggugucugugcaggaaaga

SEQ ID NO: 2541629 - RNA, 19 nt, Artificial Sequence
  Description of Artificial Sequence: Synthetic oligonucleotide
  Antisense strand to SEQ ID NO: 2541628
ucuuuccugcacagacacc

SEQ ID NO: 2541630 - RNA, 19 nt, Artificial Sequence
  Description of Artificial Sequence: Synthetic oligonucleotide
  Sense strand starting at position 744 of SEQ ID NO: 1888559
gcagucagagcuuaguauu

SEQ ID NO: 2541631 - RNA, 19 nt, Artificial Sequence
  Description of Artificial Sequence: Synthetic oligonucleotide
  Antisense strand to SEQ ID NO: 2541630
aauacuaagcucugacugc

SEQ ID NO: 2541632 - RNA, 19 nt, Artificial Sequence
  Description of Artificial Sequence: Synthetic oligonucleotide
  Sense strand starting at position 3331 of SEQ ID NO: 1888559
gucagugaguuggucaaca

SEQ ID NO: 2541633 - RNA, 19 nt, Artificial Sequence
  Description of Artificial Sequence: Synthetic oligonucleotide
  Antisense strand to SEQ ID NO: 2541632
uguugaccaacucacugac

SEQ ID NO: 2541634 - RNA, 19 nt, Artificial Sequence
  Description of Artificial Sequence: Synthetic oligonucleotide
  Sense strand starting at position 3178 of SEQ ID NO: 1888559
cggcuccauuccucagaua

SEQ ID NO: 2541635 - RNA, 19 nt, Artificial Sequence
  Description of Artificial Sequence: Synthetic oligonucleotide
  Antisense strand to SEQ ID NO: 2541634
uaucugaggaauggagccg

SEQ ID NO: 2541636 - RNA, 19 nt, Artificial Sequence
  Description of Artificial Sequence: Synthetic oligonucleotide
  Sense strand starting at position 3840 of SEQ ID NO: 1888559
gcagauuaacuuggguguu

SEQ ID NO: 2541637 - RNA, 19 nt, Artificial Sequence
  Description of Artificial Sequence: Synthetic oligonucleotide
  Antisense strand to SEQ ID NO: 2541636
aacacccaaguuaaucugc

SEQ ID NO: 2541638 - RNA, 19 nt, Artificial Sequence
  Description of Artificial Sequence: Synthetic oligonucleotide
  Sense strand starting at position 3329 of SEQ ID NO: 1888559
cugucagugaguuggucaa

SEQ ID NO: 2541639 - RNA, 19 nt, Artificial Sequence
  Description of Artificial Sequence: Synthetic oligonucleotide
  Antisense strand to SEQ ID NO: 2541638
uugaccaacucacugacag

SEQ ID NO: 2541640 - RNA, 19 nt, Artificial Sequence
  Description of Artificial Sequence: Synthetic oligonucleotide
  Sense strand starting at position 3808 of SEQ ID NO: 1888559
gcgcguucgcugcugacaa

SEQ ID NO: 2541641 - RNA, 19 nt, Artificial Sequence
  Description of Artificial Sequence: Synthetic oligonucleotide
  Antisense strand to SEQ ID NO: 2541640
uugucagcagcgaacgcgc

SEQ ID NO: 2541642 - RNA, 19 nt, Artificial Sequence
  Description of Artificial Sequence: Synthetic oligonucleotide
  Sense strand starting at position 814 of SEQ ID NO: 1888559
agagaaugcugguccgucu

SEQ ID NO: 2541643 - RNA, 19 nt, Artificial Sequence
  Description of Artificial Sequence: Synthetic oligonucleotide
  Antisense strand to SEQ ID NO: 2541642
agacggaccagcauucucu

SEQ ID NO: 2541644 - RNA, 19 nt, Artificial Sequence
  Description of Artificial Sequence: Synthetic oligonucleotide
  Sense strand starting at position 144 of SEQ ID NO: 1888559
ggagccaaguugcauuuaa

SEQ ID NO: 2541645 - RNA, 19 nt, Artificial Sequence
  Description of Artificial Sequence: Synthetic oligonucleotide
  Antisense strand to SEQ ID NO: 2541644
uuaaaugcaacuuggcucc

SEQ ID NO: 2541646 - RNA, 19 nt, Artificial Sequence
  Description of Artificial Sequence: Synthetic oligonucleotide
  Sense strand starting at position 2839 of SEQ ID NO: 1888559
guuccaaugucccuagucu

SEQ ID NO: 2541647 - RNA, 19 nt, Artificial Sequence
  Description of Artificial Sequence: Synthetic oligonucleotide
  Antisense strand to SEQ ID NO: 2541646
agacuagggacauuggaac

SEQ ID NO: 2541648 - RNA, 19 nt, Artificial Sequence
  Description of Artificial Sequence: Synthetic oligonucleotide
  Sense strand starting at position 2630 of SEQ ID NO: 1888559
cucccauccgguugucuaa

SEQ ID NO: 2541649 - RNA, 19 nt, Artificial Sequence
  Description of Artificial Sequence: Synthetic oligonucleotide
  Antisense strand to SEQ ID NO: 2541648
uuagacaaccggaugggag

SEQ ID NO: 2541650 - RNA, 19 nt, Artificial Sequence
  Description of Artificial Sequence: Synthetic oligonucleotide
  Sense strand starting at position 2736 of SEQ ID NO: 1888559
aucguuggucacugcugaa

SEQ ID NO: 2541651 - RNA, 19 nt, Artificial Sequence
  Description of Artificial Sequence: Synthetic oligonucleotide
  Antisense strand to SEQ ID NO: 2541650
uucagcagugaccaacgau

SEQ ID NO: 2541652 - RNA, 19 nt, Artificial Sequence
  Description of Artificial Sequence: Synthetic oligonucleotide
  Sense strand starting at position 284 of SEQ ID NO: 1888559
gcagaagggucuugauuuc

SEQ ID NO: 2541653 - RNA, 19 nt, Artificial Sequence
  Description of Artificial Sequence: Synthetic oligonucleotide
  Antisense strand to SEQ ID NO: 2541652
gaaaucaagacccuucugc

SEQ ID NO: 2541654 - RNA, 19 nt, Artificial Sequence
  Description of Artificial Sequence: Synthetic oligonucleotide
  Sense strand starting at position 2800 of SEQ ID NO: 1888559
uacuuaugacugcgucuuu

SEQ ID NO: 2541655 - RNA, 19 nt, Artificial Sequence
  Description of Artificial Sequence: Synthetic oligonucleotide
  Antisense strand to SEQ ID NO: 2541654
aaagacgcagucauaagua

SEQ ID NO: 2541656 - RNA, 19 nt, Artificial Sequence
  Description of Artificial Sequence: Synthetic oligonucleotide
  Sense strand starting at position 3181 of SEQ ID NO: 1888559
cuccauuccucagauagga

SEQ ID NO: 2541657 - RNA, 19 nt, Artificial Sequence
  Description of Artificial Sequence: Synthetic oligonucleotide
  Antisense strand to SEQ ID NO: 2541656
uccuaucugaggaauggag

SEQ ID NO: 2541658 - RNA, 19 nt, Artificial Sequence
  Description of Artificial Sequence: Synthetic oligonucleotide
  Sense strand starting at position 3810 of SEQ ID NO: 1888559
gcguucgcugcugacaauu

SEQ ID NO: 2541659 - RNA, 19 nt, Artificial Sequence
  Description of Artificial Sequence: Synthetic oligonucleotide
  Antisense strand to SEQ ID NO: 2541658
aauugucagcagcgaacgc

SEQ ID NO: 2541660 - RNA, 19 nt, Artificial Sequence
  Description of Artificial Sequence: Synthetic oligonucleotide
  Sense strand starting at position 3841 of SEQ ID NO: 1888559
cagauuaacuuggguguua

SEQ ID NO: 2541661 - RNA, 19 nt, Artificial Sequence
  Description of Artificial Sequence: Synthetic oligonucleotide
  Antisense strand to SEQ ID NO: 2541660
uaacacccaaguuaaucug

SEQ ID NO: 2541662 - RNA, 19 nt, Artificial Sequence
  Description of Artificial Sequence: Synthetic oligonucleotide
  Sense strand starting at position 770 of SEQ ID NO: 1888559
gccaaugacuccuguggau

SEQ ID NO: 2541663 - RNA, 19 nt, Artificial Sequence
  Description of Artificial Sequence: Synthetic oligonucleotide
  Antisense strand to SEQ ID NO: 2541662
auccacaggagucauuggc

SEQ ID NO: 2541664 - RNA, 19 nt, Artificial Sequence
  Description of Artificial Sequence: Synthetic oligonucleotide
  Sense strand starting at position 2739 of SEQ ID NO: 1888559
guuggucacugcugaagga

SEQ ID NO: 2541665 - RNA, 19 nt, Artificial Sequence
  Description of Artificial Sequence: Synthetic oligonucleotide
  Antisense strand to SEQ ID NO: 2541664
uccuucagcagugaccaac

SEQ ID NO: 2541666 - RNA, 19 nt, Artificial Sequence
  Description of Artificial Sequence: Synthetic oligonucleotide
  Sense strand starting at position 2755 of SEQ ID NO: 1888560
agcacaagauagguuagaa

SEQ ID NO: 2541667 - RNA, 19 nt, Artificial Sequence
  Description of Artificial Sequence: Synthetic oligonucleotide
  Antisense strand to SEQ ID NO: 2541666
uucuaaccuaucuugugcu

SEQ ID NO: 2541668 - RNA, 19 nt, Artificial Sequence
  Description of Artificial Sequence: Synthetic oligonucleotide
  Sense strand starting at position 1043 of SEQ ID NO: 1888560
gccaaauuggccucuucgu

SEQ ID NO: 2541669 - RNA, 19 nt, Artificial Sequence
  Description of Artificial Sequence: Synthetic oligonucleotide
  Antisense strand to SEQ ID NO: 2541668
acgaagaggccaauuuggc

SEQ ID NO: 2541670 - RNA, 19 nt, Artificial Sequence
  Description of Artificial Sequence: Synthetic oligonucleotide
  Sense strand starting at position 44 of SEQ ID NO: 1888560
ggagcuaaacauugaccaa

SEQ ID NO: 2541671 - RNA, 19 nt, Artificial Sequence
  Description of Artificial Sequence: Synthetic oligonucleotide
  Antisense strand to SEQ ID NO: 2541670
uuggucaauguuuagcucc

SEQ ID NO: 2541672 - RNA, 19 nt, Artificial Sequence
  Description of Artificial Sequence: Synthetic oligonucleotide
  Sense strand starting at position 189 of SEQ ID NO: 1888560
aaggaugaggaguguuaau

SEQ ID NO: 2541673 - RNA, 19 nt, Artificial Sequence
  Description of Artificial Sequence: Synthetic oligonucleotide
  Antisense strand to SEQ ID NO: 2541672
auuaacacuccucauccuu

SEQ ID NO: 2541674 - RNA, 19 nt, Artificial Sequence
  Description of Artificial Sequence: Synthetic oligonucleotide
  Sense strand starting at position 2655 of SEQ ID NO: 1888560
cugggacaugcuuacauua

SEQ ID NO: 2541675 - RNA, 19 nt, Artificial Sequence
  Description of Artificial Sequence: Synthetic oligonucleotide
  Antisense strand to SEQ ID NO: 2541674
uaauguaagcaugucccag

SEQ ID NO: 2541676 - RNA, 19 nt, Artificial Sequence
  Description of Artificial Sequence: Synthetic oligonucleotide
  Sense strand starting at position 2634 of SEQ ID NO: 1888560
ggaugaauggcugagcuga

SEQ ID NO: 2541677 - RNA, 19 nt, Artificial Sequence
  Description of Artificial Sequence: Synthetic oligonucleotide
  Antisense strand to SEQ ID NO: 2541676
ucagcucagccauucaucc

SEQ ID NO: 2541678 - RNA, 19 nt, Artificial Sequence
  Description of Artificial Sequence: Synthetic oligonucleotide
  Sense strand starting at position 2695 of SEQ ID NO: 1888560
cagugaugcccugugcagu

SEQ ID NO: 2541679 - RNA, 19 nt, Artificial Sequence
  Description of Artificial Sequence: Synthetic oligonucleotide
  Antisense strand to SEQ ID NO: 2541678
acugcacagggcaucacug

SEQ ID NO: 2541680 - RNA, 19 nt, Artificial Sequence
  Description of Artificial Sequence: Synthetic oligonucleotide
  Sense strand starting at position 2223 of SEQ ID NO: 1888560
gucugauuggcugagacaa

SEQ ID NO: 2541681 - RNA, 19 nt, Artificial Sequence
  Description of Artificial Sequence: Synthetic oligonucleotide
  Antisense strand to SEQ ID NO: 2541680
uugucucagccaaucagac

SEQ ID NO: 2541682 - RNA, 19 nt, Artificial Sequence
  Description of Artificial Sequence: Synthetic oligonucleotide
  Sense strand starting at position 1908 of SEQ ID NO: 1888560
gcgauaacaucgauggcga

SEQ ID NO: 2541683 - RNA, 19 nt, Artificial Sequence
  Description of Artificial Sequence: Synthetic oligonucleotide
  Antisense strand to SEQ ID NO: 2541682
ucgccaucgauguuaucgc

SEQ ID NO: 2541684 - RNA, 19 nt, Artificial Sequence
  Description of Artificial Sequence: Synthetic oligonucleotide
  Sense strand starting at position 2558 of SEQ ID NO: 1888560
gcaacaucccuaggagaua

SEQ ID NO: 2541685 - RNA, 19 nt, Artificial Sequence
  Description of Artificial Sequence: Synthetic oligonucleotide
  Antisense strand to SEQ ID NO: 2541684
uaucuccuagggauguugc

SEQ ID NO: 2541686 - RNA, 19 nt, Artificial Sequence
  Description of Artificial Sequence: Synthetic oligonucleotide
  Sense strand starting at position 2764 of SEQ ID NO: 1888560
uagguuagaagauggguua

SEQ ID NO: 2541687 - RNA, 19 nt, Artificial Sequence
  Description of Artificial Sequence: Synthetic oligonucleotide
  Antisense strand to SEQ ID NO: 2541686
uaacccaucuucuaaccua

SEQ ID NO: 2541688 - RNA, 19 nt, Artificial Sequence
  Description of Artificial Sequence: Synthetic oligonucleotide
  Sense strand starting at position 2765 of SEQ ID NO: 1888560
agguuagaagauggguuau

SEQ ID NO: 2541689 - RNA, 19 nt, Artificial Sequence
  Description of Artificial Sequence: Synthetic oligonucleotide
  Antisense strand to SEQ ID NO: 2541688
auaacccaucuucuaaccu

SEQ ID NO: 2541690 - RNA, 19 nt, Artificial Sequence
  Description of Artificial Sequence: Synthetic oligonucleotide
  Sense strand starting at position 2502 of SEQ ID NO: 1888560
uugaaugaauucguggaaa

SEQ ID NO: 2541691 - RNA, 19 nt, Artificial Sequence
  Description of Artificial Sequence: Synthetic oligonucleotide
  Antisense strand to SEQ ID NO: 2541690
uuuccacgaauucauucaa

SEQ ID NO: 2541692 - RNA, 19 nt, Artificial Sequence
  Description of Artificial Sequence: Synthetic oligonucleotide
  Sense strand starting at position 2747 of SEQ ID NO: 1888560
uguguuagagcacaagaua

SEQ ID NO: 2541693 - RNA, 19 nt, Artificial Sequence
  Description of Artificial Sequence: Synthetic oligonucleotide
  Antisense strand to SEQ ID NO: 2541692
uaucuugugcucuaacaca

SEQ ID NO: 2541694 - RNA, 19 nt, Artificial Sequence
  Description of Artificial Sequence: Synthetic oligonucleotide
  Sense strand starting at position 3957 of SEQ ID NO: 1888560
gagggcuuccucugacaaa

SEQ ID NO: 2541695 - RNA, 19 nt, Artificial Sequence
  Description of Artificial Sequence: Synthetic oligonucleotide
  Antisense strand to SEQ ID NO: 2541694
uuugucagaggaagcccuc

SEQ ID NO: 2541696 - RNA, 19 nt, Artificial Sequence
  Description of Artificial Sequence: Synthetic oligonucleotide
  Sense strand starting at position 1910 of SEQ ID NO: 1888560
gauaacaucgauggcgaaa

SEQ ID NO: 2541697 - RNA, 19 nt, Artificial Sequence
  Description of Artificial Sequence: Synthetic oligonucleotide
  Antisense strand to SEQ ID NO: 2541696
uuucgccaucgauguuauc

SEQ ID NO: 2541698 - RNA, 19 nt, Artificial Sequence
  Description of Artificial Sequence: Synthetic oligonucleotide
  Sense strand starting at position 602 of SEQ ID NO: 1888560
ggguaucuccuccagccaa

SEQ ID NO: 2541699 - RNA, 19 nt, Artificial Sequence
  Description of Artificial Sequence: Synthetic oligonucleotide
  Antisense strand to SEQ ID NO: 2541698
uuggcuggaggagauaccc

SEQ ID NO: 2541700 - RNA, 19 nt, Artificial Sequence
  Description of Artificial Sequence: Synthetic oligonucleotide
  Sense strand starting at position 687 of SEQ ID NO: 1888560
gagagugucgcauaaauac

SEQ ID NO: 2541701 - RNA, 19 nt, Artificial Sequence
  Description of Artificial Sequence: Synthetic oligonucleotide
  Antisense strand to SEQ ID NO: 2541700
guauuuaugcgacacucuc

SEQ ID NO: 2541702 - RNA, 19 nt, Artificial Sequence
  Description of Artificial Sequence: Synthetic oligonucleotide
  Sense strand starting at position 2501 of SEQ ID NO: 1888560
guugaaugaauucguggaa

SEQ ID NO: 2541703 - RNA, 19 nt, Artificial Sequence
  Description of Artificial Sequence: Synthetic oligonucleotide
  Antisense strand to SEQ ID NO: 2541702
uuccacgaauucauucaac

SEQ ID NO: 2541704 - RNA, 19 nt, Artificial Sequence
  Description of Artificial Sequence: Synthetic oligonucleotide
  Sense strand starting at position 3662 of SEQ ID NO: 1888560
uguuaaauuccugguaacc

SEQ ID NO: 2541705 - RNA, 19 nt, Artificial Sequence
  Description of Artificial Sequence: Synthetic oligonucleotide
  Antisense strand to SEQ ID NO: 2541704
gguuaccaggaauuuaaca

SEQ ID NO: 2541706 - RNA, 19 nt, Artificial Sequence
  Description of Artificial Sequence: Synthetic oligonucleotide
  Sense strand starting at position 2495 of SEQ ID NO: 1888560
cgguuaguugaaugaauuc

SEQ ID NO: 2541707 - RNA, 19 nt, Artificial Sequence
  Description of Artificial Sequence: Synthetic oligonucleotide
  Antisense strand to SEQ ID NO: 2541706
gaauucauucaacuaaccg

SEQ ID NO: 2541708 - RNA, 19 nt, Artificial Sequence
  Description of Artificial Sequence: Synthetic oligonucleotide
  Sense strand starting at position 2532 of SEQ ID NO: 1888560
gguguuuagagcuaucuuu

SEQ ID NO: 2541709 - RNA, 19 nt, Artificial Sequence
  Description of Artificial Sequence: Synthetic oligonucleotide
  Antisense strand to SEQ ID NO: 2541708
aaagauagcucuaaacacc

SEQ ID NO: 2541710 - RNA, 19 nt, Artificial Sequence
  Description of Artificial Sequence: Synthetic oligonucleotide
  Sense strand starting at position 2220 of SEQ ID NO: 1888560
gacgucugauuggcugaga

SEQ ID NO: 2541711 - RNA, 19 nt, Artificial Sequence
  Description of Artificial Sequence: Synthetic oligonucleotide
  Antisense strand to SEQ ID NO: 2541710
ucucagccaaucagacguc

SEQ ID NO: 2541712 - RNA, 19 nt, Artificial Sequence
  Description of Artificial Sequence: Synthetic oligonucleotide
  Sense strand starting at position 1121 of SEQ ID NO: 1888560
gagugagcgcuugaugauc

SEQ ID NO: 2541713 - RNA, 19 nt, Artificial Sequence
  Description of Artificial Sequence: Synthetic oligonucleotide
  Antisense strand to SEQ ID NO: 2541712
gaucaucaagcgcucacuc

SEQ ID NO: 2541714 - RNA, 19 nt, Artificial Sequence
  Description of Artificial Sequence: Synthetic oligonucleotide
  Sense strand starting at position 2360 of SEQ ID NO: 1888560
uuccguggucccuaucaua

SEQ ID NO: 2541715 - RNA, 19 nt, Artificial Sequence
  Description of Artificial Sequence: Synthetic oligonucleotide
  Antisense strand to SEQ ID NO: 2541714
uaugauagggaccacggaa

SEQ ID NO: 2541716 - RNA, 19 nt, Artificial Sequence
  Description of Artificial Sequence: Synthetic oligonucleotide
  Sense strand starting at position 3013 of SEQ ID NO: 1888560
caguguuaugauuguacca

SEQ ID NO: 2541717 - RNA, 19 nt, Artificial Sequence
  Description of Artificial Sequence: Synthetic oligonucleotide
  Antisense strand to SEQ ID NO: 2541716
ugguacaaucauaacacug

SEQ ID NO: 2541718 - RNA, 19 nt, Artificial Sequence
  Description of Artificial Sequence: Synthetic oligonucleotide
  Sense strand starting at position 1909 of SEQ ID NO: 1888560
cgauaacaucgauggcgaa

SEQ ID NO: 2541719 - RNA, 19 nt, Artificial Sequence
  Description of Artificial Sequence: Synthetic oligonucleotide
  Antisense strand to SEQ ID NO: 2541718
uucgccaucgauguuaucg

SEQ ID NO: 2541720 - RNA, 19 nt, Artificial Sequence
  Description of Artificial Sequence: Synthetic oligonucleotide
  Sense strand starting at position 591 of SEQ ID NO: 1888560
ccuagaaaugcggguaucu

SEQ ID NO: 2541721 - RNA, 19 nt, Artificial Sequence
  Description of Artificial Sequence: Synthetic oligonucleotide
  Antisense strand to SEQ ID NO: 2541720
agauacccgcauuucuagg

SEQ ID NO: 2541722 - RNA, 19 nt, Artificial Sequence
  Description of Artificial Sequence: Synthetic oligonucleotide
  Sense strand starting at position 2729 of SEQ ID NO: 1888560
cccgucuaucaagaguguu

SEQ ID NO: 2541723 - RNA, 19 nt, Artificial Sequence
  Description of Artificial Sequence: Synthetic oligonucleotide
  Antisense strand to SEQ ID NO: 2541722
aacacucuugauagacggg

SEQ ID NO: 2541724 - RNA, 19 nt, Artificial Sequence
  Description of Artificial Sequence: Synthetic oligonucleotide
  Sense strand starting at position 94 of SEQ ID NO: 1888560
ggucccaugcuaugagagu

SEQ ID NO: 2541725 - RNA, 19 nt, Artificial Sequence
  Description of Artificial Sequence: Synthetic oligonucleotide
  Antisense strand to SEQ ID NO: 2541724
acucucauagcaugggacc

SEQ ID NO: 2541726 - RNA, 19 nt, Artificial Sequence
  Description of Artificial Sequence: Synthetic oligonucleotide
  Sense strand starting at position 3624 of SEQ ID NO: 1888560
ugugcuuggcaguaugaau

SEQ ID NO: 2541727 - RNA, 19 nt, Artificial Sequence
  Description of Artificial Sequence: Synthetic oligonucleotide
  Antisense strand to SEQ ID NO: 2541726
auucauacugccaagcaca

SEQ ID NO: 2541728 - RNA, 19 nt, Artificial Sequence
  Description of Artificial Sequence: Synthetic oligonucleotide
  Sense strand starting at position 665 of SEQ ID NO: 1888560
gugucuuucuuacccuaga

SEQ ID NO: 2541729 - RNA, 19 nt, Artificial Sequence
  Description of Artificial Sequence: Synthetic oligonucleotide
  Antisense strand to SEQ ID NO: 2541728
ucuaggguaagaaagacac

SEQ ID NO: 2541730 - RNA, 19 nt, Artificial Sequence
  Description of Artificial Sequence: Synthetic oligonucleotide
  Sense strand starting at position 201 of SEQ ID NO: 1888560
uguuaauugcucugacuca

SEQ ID NO: 2541731 - RNA, 19 nt, Artificial Sequence
  Description of Artificial Sequence: Synthetic oligonucleotide
  Antisense strand to SEQ ID NO: 2541730
ugagucagagcaauuaaca

SEQ ID NO: 2541732 - RNA, 19 nt, Artificial Sequence
  Description of Artificial Sequence: Synthetic oligonucleotide
  Sense strand starting at position 3931 of SEQ ID NO: 1888560
gaugauguaugagauggga

SEQ ID NO: 2541733 - RNA, 19 nt, Artificial Sequence
  Description of Artificial Sequence: Synthetic oligonucleotide
  Antisense strand to SEQ ID NO: 2541732
ucccaucucauacaucauc

SEQ ID NO: 2541734 - RNA, 19 nt, Artificial Sequence
  Description of Artificial Sequence: Synthetic oligonucleotide
  Sense strand starting at position 199 of SEQ ID NO: 1888560
aguguuaauugcucugacu

SEQ ID NO: 2541735 - RNA, 19 nt, Artificial Sequence
  Description of Artificial Sequence: Synthetic oligonucleotide
  Antisense strand to SEQ ID NO: 2541734
agucagagcaauuaacacu

SEQ ID NO: 2541736 - RNA, 19 nt, Artificial Sequence
  Description of Artificial Sequence: Synthetic oligonucleotide
  Sense strand starting at position 568 of SEQ ID NO: 1888560
ggcugugccucccuaagaa

SEQ ID NO: 2541737 - RNA, 19 nt, Artificial Sequence
  Description of Artificial Sequence: Synthetic oligonucleotide
  Antisense strand to SEQ ID NO: 2541736
uucuuagggaggcacagcc

SEQ ID NO: 2541738 - RNA, 19 nt, Artificial Sequence
  Description of Artificial Sequence: Synthetic oligonucleotide
  Sense strand starting at position 361 of SEQ ID NO: 1888560
ugucuuagucacugcugaa

SEQ ID NO: 2541739 - RNA, 19 nt, Artificial Sequence
  Description of Artificial Sequence: Synthetic oligonucleotide
  Antisense strand to SEQ ID NO: 2541738
uucagcagugacuaagaca

SEQ ID NO: 2541740 - RNA, 19 nt, Artificial Sequence
  Description of Artificial Sequence: Synthetic oligonucleotide
  Sense strand starting at position 2569 of SEQ ID NO: 1888560
aggagauauuacuauucuc

SEQ ID NO: 2541741 - RNA, 19 nt, Artificial Sequence
  Description of Artificial Sequence: Synthetic oligonucleotide
  Antisense strand to SEQ ID NO: 2541740
gagaauaguaauaucuccu

SEQ ID NO: 2541742 - RNA, 19 nt, Artificial Sequence
  Description of Artificial Sequence: Synthetic oligonucleotide
  Sense strand starting at position 3865 of SEQ ID NO: 1888560
gcugcuguucucugaugga

SEQ ID NO: 2541743 - RNA, 19 nt, Artificial Sequence
  Description of Artificial Sequence: Synthetic oligonucleotide
  Antisense strand to SEQ ID NO: 2541742
uccaucagagaacagcagc

SEQ ID NO: 2541744 - RNA, 19 nt, Artificial Sequence
  Description of Artificial Sequence: Synthetic oligonucleotide
  Sense strand starting at position 443 of SEQ ID NO: 1888560
guaacuauuugcugaucaa

SEQ ID NO: 2541745 - RNA, 19 nt, Artificial Sequence
  Description of Artificial Sequence: Synthetic oligonucleotide
  Antisense strand to SEQ ID NO: 2541744
uugaucagcaaauaguuac

SEQ ID NO: 2541746 - RNA, 19 nt, Artificial Sequence
  Description of Artificial Sequence: Synthetic oligonucleotide
  Sense strand starting at position 328 of SEQ ID NO: 1888561
agcacuuuagcagagacaa

SEQ ID NO: 2541747 - RNA, 19 nt, Artificial Sequence
  Description of Artificial Sequence: Synthetic oligonucleotide
  Antisense strand to SEQ ID NO: 2541746
uugucucugcuaaagugcu

SEQ ID NO: 2541748 - RNA, 19 nt, Artificial Sequence
  Description of Artificial Sequence: Synthetic oligonucleotide
  Sense strand starting at position 1637 of SEQ ID NO: 1888561
ugaaaugacaggugguaga

SEQ ID NO: 2541749 - RNA, 19 nt, Artificial Sequence
  Description of Artificial Sequence: Synthetic oligonucleotide
  Antisense strand to SEQ ID NO: 2541748
ucuaccaccugucauuuca

SEQ ID NO: 2541750 - RNA, 19 nt, Artificial Sequence
  Description of Artificial Sequence: Synthetic oligonucleotide
  Sense strand starting at position 602 of SEQ ID NO: 1888561
gagcaauuuccacguccaa

SEQ ID NO: 2541751 - RNA, 19 nt, Artificial Sequence
  Description of Artificial Sequence: Synthetic oligonucleotide
  Antisense strand to SEQ ID NO: 2541750
uuggacguggaaauugcuc

SEQ ID NO: 2541752 - RNA, 19 nt, Artificial Sequence
  Description of Artificial Sequence: Synthetic oligonucleotide
  Sense strand starting at position 222 of SEQ ID NO: 1888561
uguuaauuuccugguacuu

SEQ ID NO: 2541753 - RNA, 19 nt, Artificial Sequence
  Description of Artificial Sequence: Synthetic oligonucleotide
  Antisense strand to SEQ ID NO: 2541752
aaguaccaggaaauuaaca

SEQ ID NO: 2541754 - RNA, 19 nt, Artificial Sequence
  Description of Artificial Sequence: Synthetic oligonucleotide
  Sense strand starting at position 1367 of SEQ ID NO: 1888561
gacuacuuucuguaggauu

SEQ ID NO: 2541755 - RNA, 19 nt, Artificial Sequence
  Description of Artificial Sequence: Synthetic oligonucleotide
  Antisense strand to SEQ ID NO: 2541754
aauccuacagaaaguaguc

SEQ ID NO: 2541756 - RNA, 19 nt, Artificial Sequence
  Description of Artificial Sequence: Synthetic oligonucleotide
  Sense strand starting at position 1263 of SEQ ID NO: 1888561
auagaauacuagucaguaa

SEQ ID NO: 2541757 - RNA, 19 nt, Artificial Sequence
  Description of Artificial Sequence: Synthetic oligonucleotide
  Antisense strand to SEQ ID NO: 2541756
uuacugacuaguauucuau

SEQ ID NO: 2541758 - RNA, 19 nt, Artificial Sequence
  Description of Artificial Sequence: Synthetic oligonucleotide
  Sense strand starting at position 219 of SEQ ID NO: 1888561
ugguguuaauuuccuggua

SEQ ID NO: 2541759 - RNA, 19 nt, Artificial Sequence
  Description of Artificial Sequence: Synthetic oligonucleotide
  Antisense strand to SEQ ID NO: 2541758
uaccaggaaauuaacacca

SEQ ID NO: 2541760 - RNA, 19 nt, Artificial Sequence
  Description of Artificial Sequence: Synthetic oligonucleotide
  Sense strand starting at position 2826 of SEQ ID NO: 1888561
cuuguaguuccuugauuug

SEQ ID NO: 2541761 - RNA, 19 nt, Artificial Sequence
  Description of Artificial Sequence: Synthetic oligonucleotide
  Antisense strand to SEQ ID NO: 2541760
caaaucaaggaacuacaag

SEQ ID NO: 2541762 - RNA, 19 nt, Artificial Sequence
  Description of Artificial Sequence: Synthetic oligonucleotide
  Sense strand starting at position 3549 of SEQ ID NO: 1888561
gugugagaugaaugaauac

SEQ ID NO: 2541763 - RNA, 19 nt, Artificial Sequence
  Description of Artificial Sequence: Synthetic oligonucleotide
  Antisense strand to SEQ ID NO: 2541762
guauucauucaucucacac

SEQ ID NO: 2541764 - RNA, 19 nt, Artificial Sequence
  Description of Artificial Sequence: Synthetic oligonucleotide
  Sense strand starting at position 2906 of SEQ ID NO: 1888561
gagauuaaguaaguaccua

SEQ ID NO: 2541765 - RNA, 19 nt, Artificial Sequence
  Description of Artificial Sequence: Synthetic oligonucleotide
  Antisense strand to SEQ ID NO: 2541764
uagguacuuacuuaaucuc

SEQ ID NO: 2541766 - RNA, 19 nt, Artificial Sequence
  Description of Artificial Sequence: Synthetic oligonucleotide
  Sense strand starting at position 2825 of SEQ ID NO: 1888561
ccuuguaguuccuugauuu

SEQ ID NO: 2541767 - RNA, 19 nt, Artificial Sequence
  Description of Artificial Sequence: Synthetic oligonucleotide
  Antisense strand to SEQ ID NO: 2541766
aaaucaaggaacuacaagg

SEQ ID NO: 2541768 - RNA, 19 nt, Artificial Sequence
  Description of Artificial Sequence: Synthetic oligonucleotide
  Sense strand starting at position 3564 of SEQ ID NO: 1888561
auacuaagugaguacucuu

SEQ ID NO: 2541769 - RNA, 19 nt, Artificial Sequence
  Description of Artificial Sequence: Synthetic oligonucleotide
  Antisense strand to SEQ ID NO: 2541768
aagaguacucacuuaguau

SEQ ID NO: 2541770 - RNA, 19 nt, Artificial Sequence
  Description of Artificial Sequence: Synthetic oligonucleotide
  Sense strand starting at position 3026 of SEQ ID NO: 1888561
gcacuuugauguguaauuu

SEQ ID NO: 2541771 - RNA, 19 nt, Artificial Sequence
  Description of Artificial Sequence: Synthetic oligonucleotide
  Antisense strand to SEQ ID NO: 2541770
aaauuacacaucaaagugc

SEQ ID NO: 2541772 - RNA, 19 nt, Artificial Sequence
  Description of Artificial Sequence: Synthetic oligonucleotide
  Sense strand starting at position 641 of SEQ ID NO: 1888561
ggagacuugaguggcaaga

SEQ ID NO: 2541773 - RNA, 19 nt, Artificial Sequence
  Description of Artificial Sequence: Synthetic oligonucleotide
  Antisense strand to SEQ ID NO: 2541772
ucuugccacucaagucucc

SEQ ID NO: 2541774 - RNA, 19 nt, Artificial Sequence
  Description of Artificial Sequence: Synthetic oligonucleotide
  Sense strand starting at position 1013 of SEQ ID NO: 1888561
ccagcuauugaguaccaga

SEQ ID NO: 2541775 - RNA, 19 nt, Artificial Sequence
  Description of Artificial Sequence: Synthetic oligonucleotide
  Antisense strand to SEQ ID NO: 2541774
ucugguacucaauagcugg

SEQ ID NO: 2541776 - RNA, 19 nt, Artificial Sequence
  Description of Artificial Sequence: Synthetic oligonucleotide
  Sense strand starting at position 920 of SEQ ID NO: 1888561
caaggaucugccuacgaua

SEQ ID NO: 2541777 - RNA, 19 nt, Artificial Sequence
  Description of Artificial Sequence: Synthetic oligonucleotide
  Antisense strand to SEQ ID NO: 2541776
uaucguaggcagauccuug

SEQ ID NO: 2541778 - RNA, 19 nt, Artificial Sequence
  Description of Artificial Sequence: Synthetic oligonucleotide
  Sense strand starting at position 2926 of SEQ ID NO: 1888561
uucagaggaugguuguaaa

SEQ ID NO: 2541779 - RNA, 19 nt, Artificial Sequence
  Description of Artificial Sequence: Synthetic oligonucleotide
  Antisense strand to SEQ ID NO: 2541778
uuuacaaccauccucugaa

SEQ ID NO: 2541780 - RNA, 19 nt, Artificial Sequence
  Description of Artificial Sequence: Synthetic oligonucleotide
  Sense strand starting at position 211 of SEQ ID NO: 1888561
ugcugcugugguguuaauu

SEQ ID NO: 2541781 - RNA, 19 nt, Artificial Sequence
  Description of Artificial Sequence: Synthetic oligonucleotide
  Antisense strand to SEQ ID NO: 2541780
aauuaacaccacagcagca

SEQ ID NO: 2541782 - RNA, 19 nt, Artificial Sequence
  Description of Artificial Sequence: Synthetic oligonucleotide
  Sense strand starting at position 59 of SEQ ID NO: 1888561
agaagugaccacuguggau

SEQ ID NO: 2541783 - RNA, 19 nt, Artificial Sequence
  Description of Artificial Sequence: Synthetic oligonucleotide
  Antisense strand to SEQ ID NO: 2541782
auccacaguggucacuucu

SEQ ID NO: 2541784 - RNA, 19 nt, Artificial Sequence
  Description of Artificial Sequence: Synthetic oligonucleotide
  Sense strand starting at position 1228 of SEQ ID NO: 1888561
aucaacugguagguaaauu

SEQ ID NO: 2541785 - RNA, 19 nt, Artificial Sequence
  Description of Artificial Sequence: Synthetic oligonucleotide
  Antisense strand to SEQ ID NO: 2541784
aauuuaccuaccaguugau

SEQ ID NO: 2541786 - RNA, 19 nt, Artificial Sequence
  Description of Artificial Sequence: Synthetic oligonucleotide
  Sense strand starting at position 1366 of SEQ ID NO: 1888561
agacuacuuucuguaggau

SEQ ID NO: 2541787 - RNA, 19 nt, Artificial Sequence
  Description of Artificial Sequence: Synthetic oligonucleotide
  Antisense strand to SEQ ID NO: 2541786
auccuacagaaaguagucu

SEQ ID NO: 2541788 - RNA, 19 nt, Artificial Sequence
  Description of Artificial Sequence: Synthetic oligonucleotide
  Sense strand starting at position 1227 of SEQ ID NO: 1888561
caucaacugguagguaaau

SEQ ID NO: 2541789 - RNA, 19 nt, Artificial Sequence
  Description of Artificial Sequence: Synthetic oligonucleotide
  Antisense strand to SEQ ID NO: 2541788
auuuaccuaccaguugaug

SEQ ID NO: 2541790 - RNA, 19 nt, Artificial Sequence
  Description of Artificial Sequence: Synthetic oligonucleotide
  Sense strand starting at position 1147 of SEQ ID NO: 1888561
caguuugcucaggaucaua

SEQ ID NO: 2541791 - RNA, 19 nt, Artificial Sequence
  Description of Artificial Sequence: Synthetic oligonucleotide
  Antisense strand to SEQ ID NO: 2541790
uaugauccugagcaaacug

SEQ ID NO: 2541792 - RNA, 19 nt, Artificial Sequence
  Description of Artificial Sequence: Synthetic oligonucleotide
  Sense strand starting at position 1051 of SEQ ID NO: 1888561
cagggcugagcucaucuaa

SEQ ID NO: 2541793 - RNA, 19 nt, Artificial Sequence
  Description of Artificial Sequence: Synthetic oligonucleotide
  Antisense strand to SEQ ID NO: 2541792
uuagaugagcucagcccug

SEQ ID NO: 2541794 - RNA, 19 nt, Artificial Sequence
  Description of Artificial Sequence: Synthetic oligonucleotide
  Sense strand starting at position 1107 of SEQ ID NO: 1888561
uacuguacagcugagaagu

SEQ ID NO: 2541795 - RNA, 19 nt, Artificial Sequence
  Description of Artificial Sequence: Synthetic oligonucleotide
  Antisense strand to SEQ ID NO: 2541794
acuucucagcuguacagua

SEQ ID NO: 2541796 - RNA, 19 nt, Artificial Sequence
  Description of Artificial Sequence: Synthetic oligonucleotide
  Sense strand starting at position 2478 of SEQ ID NO: 1888561
augcaaaguuagguacaaa

SEQ ID NO: 2541797 - RNA, 19 nt, Artificial Sequence
  Description of Artificial Sequence: Synthetic oligonucleotide
  Antisense strand to SEQ ID NO: 2541796
uuuguaccuaacuuugcau

SEQ ID NO: 2541798 - RNA, 19 nt, Artificial Sequence
  Description of Artificial Sequence: Synthetic oligonucleotide
  Sense strand starting at position 2777 of SEQ ID NO: 1888561
gugcaauuauuauuagaag

SEQ ID NO: 2541799 - RNA, 19 nt, Artificial Sequence
  Description of Artificial Sequence: Synthetic oligonucleotide
  Antisense strand to SEQ ID NO: 2541798
cuucuaauaauaauugcac

SEQ ID NO: 2541800 - RNA, 19 nt, Artificial Sequence
  Description of Artificial Sequence: Synthetic oligonucleotide
  Sense strand starting at position 2517 of SEQ ID NO: 1888561
gugagaaguccugaagcuu

SEQ ID NO: 2541801 - RNA, 19 nt, Artificial Sequence
  Description of Artificial Sequence: Synthetic oligonucleotide
  Antisense strand to SEQ ID NO: 2541800
aagcuucaggacuucucac

SEQ ID NO: 2541802 - RNA, 19 nt, Artificial Sequence
  Description of Artificial Sequence: Synthetic oligonucleotide
  Sense strand starting at position 891 of SEQ ID NO: 1888561
aguacuuagcugcaaauga

SEQ ID NO: 2541803 - RNA, 19 nt, Artificial Sequence
  Description of Artificial Sequence: Synthetic oligonucleotide
  Antisense strand to SEQ ID NO: 2541802
ucauuugcagcuaaguacu

SEQ ID NO: 2541804 - RNA, 19 nt, Artificial Sequence
  Description of Artificial Sequence: Synthetic oligonucleotide
  Sense strand starting at position 3983 of SEQ ID NO: 1888561
ccgagaucgugcauggcau

SEQ ID NO: 2541805 - RNA, 19 nt, Artificial Sequence
  Description of Artificial Sequence: Synthetic oligonucleotide
  Antisense strand to SEQ ID NO: 2541804
augccaugcacgaucucgg

SEQ ID NO: 2541806 - RNA, 19 nt, Artificial Sequence
  Description of Artificial Sequence: Synthetic oligonucleotide
  Sense strand starting at position 3884 of SEQ ID NO: 1888561
ucaggaauuuggcauaaau

SEQ ID NO: 2541807 - RNA, 19 nt, Artificial Sequence
  Description of Artificial Sequence: Synthetic oligonucleotide
  Antisense strand to SEQ ID NO: 2541806
auuuaugccaaauuccuga

SEQ ID NO: 2541808 - RNA, 19 nt, Artificial Sequence
  Description of Artificial Sequence: Synthetic oligonucleotide
  Sense strand starting at position 2507 of SEQ ID NO: 1888561
gucuguacaggugagaagu

SEQ ID NO: 2541809 - RNA, 19 nt, Artificial Sequence
  Description of Artificial Sequence: Synthetic oligonucleotide
  Antisense strand to SEQ ID NO: 2541808
acuucucaccuguacagac

SEQ ID NO: 2541810 - RNA, 19 nt, Artificial Sequence
  Description of Artificial Sequence: Synthetic oligonucleotide
  Sense strand starting at position 323 of SEQ ID NO: 1888561
cagugagcacuuuagcaga

SEQ ID NO: 2541811 - RNA, 19 nt, Artificial Sequence
  Description of Artificial Sequence: Synthetic oligonucleotide
  Antisense strand to SEQ ID NO: 2541810
ucugcuaaagugcucacug

SEQ ID NO: 2541812 - RNA, 19 nt, Artificial Sequence
  Description of Artificial Sequence: Synthetic oligonucleotide
  Sense strand starting at position 1508 of SEQ ID NO: 1888561
ucuauaccauggccagauu

SEQ ID NO: 2541813 - RNA, 19 nt, Artificial Sequence
  Description of Artificial Sequence: Synthetic oligonucleotide
  Antisense strand to SEQ ID NO: 2541812
aaucuggccaugguauaga

SEQ ID NO: 2541814 - RNA, 19 nt, Artificial Sequence
  Description of Artificial Sequence: Synthetic oligonucleotide
  Sense strand starting at position 1985 of SEQ ID NO: 1888561
ggagaggacgcuugugaag

SEQ ID NO: 2541815 - RNA, 19 nt, Artificial Sequence
  Description of Artificial Sequence: Synthetic oligonucleotide
  Antisense strand to SEQ ID NO: 2541814
cuucacaagcguccucucc

SEQ ID NO: 2541816 - RNA, 19 nt, Artificial Sequence
  Description of Artificial Sequence: Synthetic oligonucleotide
  Sense strand starting at position 2768 of SEQ ID NO: 1888561
ccuagaggugugcaauuau

SEQ ID NO: 2541817 - RNA, 19 nt, Artificial Sequence
  Description of Artificial Sequence: Synthetic oligonucleotide
  Antisense strand to SEQ ID NO: 2541816
auaauugcacaccucuagg

SEQ ID NO: 2541818 - RNA, 19 nt, Artificial Sequence
  Description of Artificial Sequence: Synthetic oligonucleotide
  Sense strand starting at position 531 of SEQ ID NO: 1888561
cccacuauagcauggcaaa

SEQ ID NO: 2541819 - RNA, 19 nt, Artificial Sequence
  Description of Artificial Sequence: Synthetic oligonucleotide
  Antisense strand to SEQ ID NO: 2541818
uuugccaugcuauaguggg

SEQ ID NO: 2541820 - RNA, 19 nt, Artificial Sequence
  Description of Artificial Sequence: Synthetic oligonucleotide
  Sense strand starting at position 1143 of SEQ ID NO: 1888561
uacacaguuugcucaggau

SEQ ID NO: 2541821 - RNA, 19 nt, Artificial Sequence
  Description of Artificial Sequence: Synthetic oligonucleotide
  Antisense strand to SEQ ID NO: 2541820
auccugagcaaacugugua

SEQ ID NO: 2541822 - RNA, 19 nt, Artificial Sequence
  Description of Artificial Sequence: Synthetic oligonucleotide
  Sense strand starting at position 1506 of SEQ ID NO: 1888561
guucuauaccauggccaga

SEQ ID NO: 2541823 - RNA, 19 nt, Artificial Sequence
  Description of Artificial Sequence: Synthetic oligonucleotide
  Antisense strand to SEQ ID NO: 2541822
ucuggccaugguauagaac

SEQ ID NO: 2541824 - RNA, 19 nt, Artificial Sequence
  Description of Artificial Sequence: Synthetic oligonucleotide
  Sense strand starting at position 922 of SEQ ID NO: 1888561
aggaucugccuacgauauu

SEQ ID NO: 2541825 - RNA, 19 nt, Artificial Sequence
  Description of Artificial Sequence: Synthetic oligonucleotide
  Antisense strand to SEQ ID NO: 2541824
aauaucguaggcagauccu

SEQ ID NO: 2541826 - RNA, 19 nt, Artificial Sequence
  Description of Artificial Sequence: Synthetic oligonucleotide
  Sense strand starting at position 362 of SEQ ID NO: 1888562
agagaauaaucccuacugu

SEQ ID NO: 2541827 - RNA, 19 nt, Artificial Sequence
  Description of Artificial Sequence: Synthetic oligonucleotide
  Antisense strand to SEQ ID NO: 2541826
acaguagggauuauucucu

SEQ ID NO: 2541828 - RNA, 19 nt, Artificial Sequence
  Description of Artificial Sequence: Synthetic oligonucleotide
  Sense strand starting at position 1347 of SEQ ID NO: 1888562
cgaggagucacauagguug

SEQ ID NO: 2541829 - RNA, 19 nt, Artificial Sequence
  Description of Artificial Sequence: Synthetic oligonucleotide
  Antisense strand to SEQ ID NO: 2541828
caaccuaugugacuccucg

SEQ ID NO: 2541830 - RNA, 19 nt, Artificial Sequence
  Description of Artificial Sequence: Synthetic oligonucleotide
  Sense strand starting at position 840 of SEQ ID NO: 1888562
acugaaaccuggucucaau

SEQ ID NO: 2541831 - RNA, 19 nt, Artificial Sequence
  Description of Artificial Sequence: Synthetic oligonucleotide
  Antisense strand to SEQ ID NO: 2541830
auugagaccagguuucagu

SEQ ID NO: 2541832 - RNA, 19 nt, Artificial Sequence
  Description of Artificial Sequence: Synthetic oligonucleotide
  Sense strand starting at position 1424 of SEQ ID NO: 1888562
aagggagacccgugaccau

SEQ ID NO: 2541833 - RNA, 19 nt, Artificial Sequence
  Description of Artificial Sequence: Synthetic oligonucleotide
  Antisense strand to SEQ ID NO: 2541832
auggucacgggucucccuu

SEQ ID NO: 2541834 - RNA, 19 nt, Artificial Sequence
  Description of Artificial Sequence: Synthetic oligonucleotide
  Sense strand starting at position 2071 of SEQ ID NO: 1888562
cuggguaaaguugaugcaa

SEQ ID NO: 2541835 - RNA, 19 nt, Artificial Sequence
  Description of Artificial Sequence: Synthetic oligonucleotide
  Antisense strand to SEQ ID NO: 2541834
uugcaucaacuuuacccag

SEQ ID NO: 2541836 - RNA, 19 nt, Artificial Sequence
  Description of Artificial Sequence: Synthetic oligonucleotide
  Sense strand starting at position 1378 of SEQ ID NO: 1888562
ggacuugacccugagugca

SEQ ID NO: 2541837 - RNA, 19 nt, Artificial Sequence
  Description of Artificial Sequence: Synthetic oligonucleotide
  Antisense strand to SEQ ID NO: 2541836
ugcacucagggucaagucc

SEQ ID NO: 2541838 - RNA, 19 nt, Artificial Sequence
  Description of Artificial Sequence: Synthetic oligonucleotide
  Sense strand starting at position 509 of SEQ ID NO: 1888562
gccucuuaagcucagaaua

SEQ ID NO: 2541839 - RNA, 19 nt, Artificial Sequence
  Description of Artificial Sequence: Synthetic oligonucleotide
  Antisense strand to SEQ ID NO: 2541838
uauucugagcuuaagaggc

SEQ ID NO: 2541840 - RNA, 19 nt, Artificial Sequence
  Description of Artificial Sequence: Synthetic oligonucleotide
  Sense strand starting at position 1276 of SEQ ID NO: 1888562
gacugagcuuagcuaggaa

SEQ ID NO: 2541841 - RNA, 19 nt, Artificial Sequence
  Description of Artificial Sequence: Synthetic oligonucleotide
  Antisense strand to SEQ ID NO: 2541840
uuccuagcuaagcucaguc

SEQ ID NO: 2541842 - RNA, 19 nt, Artificial Sequence
  Description of Artificial Sequence: Synthetic oligonucleotide
  Sense strand starting at position 2063 of SEQ ID NO: 1888562
gaaacagccuggguaaagu

SEQ ID NO: 2541843 - RNA, 19 nt, Artificial Sequence
  Description of Artificial Sequence: Synthetic oligonucleotide
  Antisense strand to SEQ ID NO: 2541842
acuuuacccaggcuguuuc

SEQ ID NO: 2541844 - RNA, 19 nt, Artificial Sequence
  Description of Artificial Sequence: Synthetic oligonucleotide
  Sense strand starting at position 854 of SEQ ID NO: 1888562
ucaaucucuggcugagaug

SEQ ID NO: 2541845 - RNA, 19 nt, Artificial Sequence
  Description of Artificial Sequence: Synthetic oligonucleotide
  Antisense strand to SEQ ID NO: 2541844
caucucagccagagauuga

SEQ ID NO: 2541846 - RNA, 19 nt, Artificial Sequence
  Description of Artificial Sequence: Synthetic oligonucleotide
  Sense strand starting at position 1452 of SEQ ID NO: 1888562
uuagaaaucugacugcucu

SEQ ID NO: 2541847 - RNA, 19 nt, Artificial Sequence
  Description of Artificial Sequence: Synthetic oligonucleotide
  Antisense strand to SEQ ID NO: 2541846
agagcagucagauuucuaa

SEQ ID NO: 2541848 - RNA, 19 nt, Artificial Sequence
  Description of Artificial Sequence: Synthetic oligonucleotide
  Sense strand starting at position 934 of SEQ ID NO: 1888562
gcuggaugcagagaugcau

SEQ ID NO: 2541849 - RNA, 19 nt, Artificial Sequence
  Description of Artificial Sequence: Synthetic oligonucleotide
  Antisense strand to SEQ ID NO: 2541848
augcaucucugcauccagc

SEQ ID NO: 2541850 - RNA, 19 nt, Artificial Sequence
  Description of Artificial Sequence: Synthetic oligonucleotide
  Sense strand starting at position 853 of SEQ ID NO: 1888562
cucaaucucuggcugagau

SEQ ID NO: 2541851 - RNA, 19 nt, Artificial Sequence
  Description of Artificial Sequence: Synthetic oligonucleotide
  Antisense strand to SEQ ID NO: 2541850
aucucagccagagauugag

SEQ ID NO: 2541852 - RNA, 19 nt, Artificial Sequence
  Description of Artificial Sequence: Synthetic oligonucleotide
  Sense strand starting at position 3966 of SEQ ID NO: 1888562
agcaaaucuccuggaugug

SEQ ID NO: 2541853 - RNA, 19 nt, Artificial Sequence
  Description of Artificial Sequence: Synthetic oligonucleotide
  Antisense strand to SEQ ID NO: 2541852
cacauccaggagauuugcu

SEQ ID NO: 2541854 - RNA, 19 nt, Artificial Sequence
  Description of Artificial Sequence: Synthetic oligonucleotide
  Sense strand starting at position 3453 of SEQ ID NO: 1888562
gagacaaucucggcuuacu

SEQ ID NO: 2541855 - RNA, 19 nt, Artificial Sequence
  Description of Artificial Sequence: Synthetic oligonucleotide
  Antisense strand to SEQ ID NO: 2541854
aguaagccgagauugucuc

SEQ ID NO: 2541856 - RNA, 19 nt, Artificial Sequence
  Description of Artificial Sequence: Synthetic oligonucleotide
  Sense strand starting at position 2827 of SEQ ID NO: 1888562
guauguuguugaccuagaa

SEQ ID NO: 2541857 - RNA, 19 nt, Artificial Sequence
  Description of Artificial Sequence: Synthetic oligonucleotide
  Antisense strand to SEQ ID NO: 2541856
uucuaggucaacaacauac

SEQ ID NO: 2541858 - RNA, 19 nt, Artificial Sequence
  Description of Artificial Sequence: Synthetic oligonucleotide
  Sense strand starting at position 1706 of SEQ ID NO: 1888562
ugcacaauuugugaagaac

SEQ ID NO: 2541859 - RNA, 19 nt, Artificial Sequence
  Description of Artificial Sequence: Synthetic oligonucleotide
  Antisense strand to SEQ ID NO: 2541858
guucuucacaaauugugca

SEQ ID NO: 2541860 - RNA, 19 nt, Artificial Sequence
  Description of Artificial Sequence: Synthetic oligonucleotide
  Sense strand starting at position 685 of SEQ ID NO: 1888562
gcuucccucaguggagaau

SEQ ID NO: 2541861 - RNA, 19 nt, Artificial Sequence
  Description of Artificial Sequence: Synthetic oligonucleotide
  Antisense strand to SEQ ID NO: 2541860
auucuccacugagggaagc

SEQ ID NO: 2541862 - RNA, 19 nt, Artificial Sequence
  Description of Artificial Sequence: Synthetic oligonucleotide
  Sense strand starting at position 684 of SEQ ID NO: 1888562
ugcuucccucaguggagaa

SEQ ID NO: 2541863 - RNA, 19 nt, Artificial Sequence
  Description of Artificial Sequence: Synthetic oligonucleotide
  Antisense strand to SEQ ID NO: 2541862
uucuccacugagggaagca

SEQ ID NO: 2541864 - RNA, 19 nt, Artificial Sequence
  Description of Artificial Sequence: Synthetic oligonucleotide
  Sense strand starting at position 1516 of SEQ ID NO: 1888562
ggaggugacggccgagaua

SEQ ID NO: 2541865 - RNA, 19 nt, Artificial Sequence
  Description of Artificial Sequence: Synthetic oligonucleotide
  Antisense strand to SEQ ID NO: 2541864
uaucucggccgucaccucc

SEQ ID NO: 2541866 - RNA, 19 nt, Artificial Sequence
  Description of Artificial Sequence: Synthetic oligonucleotide
  Sense strand starting at position 2823 of SEQ ID NO: 1888562
gaagguauguuguugaccu

SEQ ID NO: 2541867 - RNA, 19 nt, Artificial Sequence
  Description of Artificial Sequence: Synthetic oligonucleotide
  Antisense strand to SEQ ID NO: 2541866
aggucaacaacauaccuuc

SEQ ID NO: 2541868 - RNA, 19 nt, Artificial Sequence
  Description of Artificial Sequence: Synthetic oligonucleotide
  Sense strand starting at position 3053 of SEQ ID NO: 1888562
uagagagcuuuguuuccca

SEQ ID NO: 2541869 - RNA, 19 nt, Artificial Sequence
  Description of Artificial Sequence: Synthetic oligonucleotide
  Antisense strand to SEQ ID NO: 2541868
ugggaaacaaagcucucua

SEQ ID NO: 2541870 - RNA, 19 nt, Artificial Sequence
  Description of Artificial Sequence: Synthetic oligonucleotide
  Sense strand starting at position 3804 of SEQ ID NO: 1888562
ggccuuucugcuuaacauc

SEQ ID NO: 2541871 - RNA, 19 nt, Artificial Sequence
  Description of Artificial Sequence: Synthetic oligonucleotide
  Antisense strand to SEQ ID NO: 2541870
gauguuaagcagaaaggcc

SEQ ID NO: 2541872 - RNA, 19 nt, Artificial Sequence
  Description of Artificial Sequence: Synthetic oligonucleotide
  Sense strand starting at position 850 of SEQ ID NO: 1888562
ggucucaaucucuggcuga

SEQ ID NO: 2541873 - RNA, 19 nt, Artificial Sequence
  Description of Artificial Sequence: Synthetic oligonucleotide
  Antisense strand to SEQ ID NO: 2541872
ucagccagagauugagacc

SEQ ID NO: 2541874 - RNA, 19 nt, Artificial Sequence
  Description of Artificial Sequence: Synthetic oligonucleotide
  Sense strand starting at position 3440 of SEQ ID NO: 1888562
gcuauugcccagugagaca

SEQ ID NO: 2541875 - RNA, 19 nt, Artificial Sequence
  Description of Artificial Sequence: Synthetic oligonucleotide
  Antisense strand to SEQ ID NO: 2541874
ugucucacugggcaauagc

SEQ ID NO: 2541876 - RNA, 19 nt, Artificial Sequence
  Description of Artificial Sequence: Synthetic oligonucleotide
  Sense strand starting at position 525 of SEQ ID NO: 1888562
auaggagccucgccauauu

SEQ ID NO: 2541877 - RNA, 19 nt, Artificial Sequence
  Description of Artificial Sequence: Synthetic oligonucleotide
  Antisense strand to SEQ ID NO: 2541876
aauauggcgaggcuccuau

SEQ ID NO: 2541878 - RNA, 19 nt, Artificial Sequence
  Description of Artificial Sequence: Synthetic oligonucleotide
  Sense strand starting at position 3803 of SEQ ID NO: 1888562
gggccuuucugcuuaacau

SEQ ID NO: 2541879 - RNA, 19 nt, Artificial Sequence
  Description of Artificial Sequence: Synthetic oligonucleotide
  Antisense strand to SEQ ID NO: 2541878
auguuaagcagaaaggccc

SEQ ID NO: 2541880 - RNA, 19 nt, Artificial Sequence
  Description of Artificial Sequence: Synthetic oligonucleotide
  Sense strand starting at position 1696 of SEQ ID NO: 1888562
gccuucuggcugcacaauu

SEQ ID NO: 2541881 - RNA, 19 nt, Artificial Sequence
  Description of Artificial Sequence: Synthetic oligonucleotide
  Antisense strand to SEQ ID NO: 2541880
aauugugcagccagaaggc

SEQ ID NO: 2541882 - RNA, 19 nt, Artificial Sequence
  Description of Artificial Sequence: Synthetic oligonucleotide
  Sense strand starting at position 1705 of SEQ ID NO: 1888562
cugcacaauuugugaagaa

SEQ ID NO: 2541883 - RNA, 19 nt, Artificial Sequence
  Description of Artificial Sequence: Synthetic oligonucleotide
  Antisense strand to SEQ ID NO: 2541882
uucuucacaaauugugcag

SEQ ID NO: 2541884 - RNA, 19 nt, Artificial Sequence
  Description of Artificial Sequence: Synthetic oligonucleotide
  Sense strand starting at position 379 of SEQ ID NO: 1888562
gugcuuggccauugaauua

SEQ ID NO: 2541885 - RNA, 19 nt, Artificial Sequence
  Description of Artificial Sequence: Synthetic oligonucleotide
  Antisense strand to SEQ ID NO: 2541884
uaauucaauggccaagcac

SEQ ID NO: 2541886 - RNA, 19 nt, Artificial Sequence
  Description of Artificial Sequence: Synthetic oligonucleotide
  Sense strand starting at position 904 of SEQ ID NO: 1888562
ggcaucuacuguuugcaua

SEQ ID NO: 2541887 - RNA, 19 nt, Artificial Sequence
  Description of Artificial Sequence: Synthetic oligonucleotide
  Antisense strand to SEQ ID NO: 2541886
uaugcaaacaguagaugcc

SEQ ID NO: 2541888 - RNA, 19 nt, Artificial Sequence
  Description of Artificial Sequence: Synthetic oligonucleotide
  Sense strand starting at position 778 of SEQ ID NO: 1888562
gaaagaagguguggauaga

SEQ ID NO: 2541889 - RNA, 19 nt, Artificial Sequence
  Description of Artificial Sequence: Synthetic oligonucleotide
  Antisense strand to SEQ ID NO: 2541888
ucuauccacaccuucuuuc

SEQ ID NO: 2541890 - RNA, 19 nt, Artificial Sequence
  Description of Artificial Sequence: Synthetic oligonucleotide
  Sense strand starting at position 348 of SEQ ID NO: 1888562
acugguaauuauggagaga

SEQ ID NO: 2541891 - RNA, 19 nt, Artificial Sequence
  Description of Artificial Sequence: Synthetic oligonucleotide
  Antisense strand to SEQ ID NO: 2541890
ucucuccauaauuaccagu

SEQ ID NO: 2541892 - RNA, 19 nt, Artificial Sequence
  Description of Artificial Sequence: Synthetic oligonucleotide
  Sense strand starting at position 3436 of SEQ ID NO: 1888562
ucgugcuauugcccaguga

SEQ ID NO: 2541893 - RNA, 19 nt, Artificial Sequence
  Description of Artificial Sequence: Synthetic oligonucleotide
  Antisense strand to SEQ ID NO: 2541892
ucacugggcaauagcacga

SEQ ID NO: 2541894 - RNA, 19 nt, Artificial Sequence
  Description of Artificial Sequence: Synthetic oligonucleotide
  Sense strand starting at position 1133 of SEQ ID NO: 1888562
cagaguauuuggugcagca

SEQ ID NO: 2541895 - RNA, 19 nt, Artificial Sequence
  Description of Artificial Sequence: Synthetic oligonucleotide
  Antisense strand to SEQ ID NO: 2541894
ugcugcaccaaauacucug

SEQ ID NO: 2541896 - RNA, 19 nt, Artificial Sequence
  Description of Artificial Sequence: Synthetic oligonucleotide
  Sense strand starting at position 943 of SEQ ID NO: 1888562
agagaugcaucaggcaagu

SEQ ID NO: 2541897 - RNA, 19 nt, Artificial Sequence
  Description of Artificial Sequence: Synthetic oligonucleotide
  Antisense strand to SEQ ID NO: 2541896
acuugccugaugcaucucu

SEQ ID NO: 2541898 - RNA, 19 nt, Artificial Sequence
  Description of Artificial Sequence: Synthetic oligonucleotide
  Sense strand starting at position 2073 of SEQ ID NO: 1888562
ggguaaaguugaugcaauu

SEQ ID NO: 2541899 - RNA, 19 nt, Artificial Sequence
  Description of Artificial Sequence: Synthetic oligonucleotide
  Antisense strand to SEQ ID NO: 2541898
aauugcaucaacuuuaccc

SEQ ID NO: 2541900 - RNA, 19 nt, Artificial Sequence
  Description of Artificial Sequence: Synthetic oligonucleotide
  Sense strand starting at position 1027 of SEQ ID NO: 1888562
gugguaaguucuggaauac

SEQ ID NO: 2541901 - RNA, 19 nt, Artificial Sequence
  Description of Artificial Sequence: Synthetic oligonucleotide
  Antisense strand to SEQ ID NO: 2541900
guauuccagaacuuaccac

SEQ ID NO: 2541902 - RNA, 19 nt, Artificial Sequence
  Description of Artificial Sequence: Synthetic oligonucleotide
  Sense strand starting at position 3928 of SEQ ID NO: 1888562
caggaagaauuguguuguc

SEQ ID NO: 2541903 - RNA, 19 nt, Artificial Sequence
  Description of Artificial Sequence: Synthetic oligonucleotide
  Antisense strand to SEQ ID NO: 2541902
gacaacacaauucuuccug

SEQ ID NO: 2541904 - RNA, 19 nt, Artificial Sequence
  Description of Artificial Sequence: Synthetic oligonucleotide
  Sense strand starting at position 3965 of SEQ ID NO: 1888562
cagcaaaucuccuggaugu

SEQ ID NO: 2541905 - RNA, 19 nt, Artificial Sequence
  Description of Artificial Sequence: Synthetic oligonucleotide
  Antisense strand to SEQ ID NO: 2541904
acauccaggagauuugcug

SEQ ID NO: 2541906 - RNA, 19 nt, Artificial Sequence
  Description of Artificial Sequence: Synthetic oligonucleotide
  Sense strand starting at position 3548 of SEQ ID NO: 1888563
gagagcuuucccgaacuca

SEQ ID NO: 2541907 - RNA, 19 nt, Artificial Sequence
  Description of Artificial Sequence: Synthetic oligonucleotide
  Antisense strand to SEQ ID NO: 2541906
ugaguucgggaaagcucuc

SEQ ID NO: 2541908 - RNA, 19 nt, Artificial Sequence
  Description of Artificial Sequence: Synthetic oligonucleotide
  Sense strand starting at position 3546 of SEQ ID NO: 1888563
uggagagcuuucccgaacu

SEQ ID NO: 2541909 - RNA, 19 nt, Artificial Sequence
  Description of Artificial Sequence: Synthetic oligonucleotide
  Antisense strand to SEQ ID NO: 2541908
aguucgggaaagcucucca

SEQ ID NO: 2541910 - RNA, 19 nt, Artificial Sequence
  Description of Artificial Sequence: Synthetic oligonucleotide
  Sense strand starting at position 3705 of SEQ ID NO: 1888563
ugggcuucccuuuggacau

SEQ ID NO: 2541911 - RNA, 19 nt, Artificial Sequence
  Description of Artificial Sequence: Synthetic oligonucleotide
  Antisense strand to SEQ ID NO: 2541910
auguccaaagggaagccca

SEQ ID NO: 2541912 - RNA, 19 nt, Artificial Sequence
  Description of Artificial Sequence: Synthetic oligonucleotide
  Sense strand starting at position 3604 of SEQ ID NO: 1888563
cgagaucugccaggaaguc

SEQ ID NO: 2541913 - RNA, 19 nt, Artificial Sequence
  Description of Artificial Sequence: Synthetic oligonucleotide
  Antisense strand to SEQ ID NO: 2541912
gacuuccuggcagaucucg

SEQ ID NO: 2541914 - RNA, 19 nt, Artificial Sequence
  Description of Artificial Sequence: Synthetic oligonucleotide
  Sense strand starting at position 3591 of SEQ ID NO: 1888563
ugaggucgguuaucgagau

SEQ ID NO: 2541915 - RNA, 19 nt, Artificial Sequence
  Description of Artificial Sequence: Synthetic oligonucleotide
  Antisense strand to SEQ ID NO: 2541914
aucucgauaaccgaccuca

SEQ ID NO: 2541916 - RNA, 19 nt, Artificial Sequence
  Description of Artificial Sequence: Synthetic oligonucleotide
  Sense strand starting at position 3585 of SEQ ID NO: 1888563
ugcugaugaggucgguuau

SEQ ID NO: 2541917 - RNA, 19 nt, Artificial Sequence
  Description of Artificial Sequence: Synthetic oligonucleotide
  Antisense strand to SEQ ID NO: 2541916
auaaccgaccucaucagca

SEQ ID NO: 2541918 - RNA, 19 nt, Artificial Sequence
  Description of Artificial Sequence: Synthetic oligonucleotide
  Sense strand starting at position 3348 of SEQ ID NO: 1888563
aguacuuugagucgguguu

SEQ ID NO: 2541919 - RNA, 19 nt, Artificial Sequence
  Description of Artificial Sequence: Synthetic oligonucleotide
  Antisense strand to SEQ ID NO: 2541918
aacaccgacucaaaguacu

SEQ ID NO: 2541920 - RNA, 19 nt, Artificial Sequence
  Description of Artificial Sequence: Synthetic oligonucleotide
  Sense strand starting at position 3826 of SEQ ID NO: 1888563
agccucuuugccuguguua

SEQ ID NO: 2541921 - RNA, 19 nt, Artificial Sequence
  Description of Artificial Sequence: Synthetic oligonucleotide
  Antisense strand to SEQ ID NO: 2541920
uaacacaggcaaagaggcu

SEQ ID NO: 2541922 - RNA, 19 nt, Artificial Sequence
  Description of Artificial Sequence: Synthetic oligonucleotide
  Sense strand starting at position 3345 of SEQ ID NO: 1888563
gcgaguacuuugagucggu

SEQ ID NO: 2541923 - RNA, 19 nt, Artificial Sequence
  Description of Artificial Sequence: Synthetic oligonucleotide
  Antisense strand to SEQ ID NO: 2541922
accgacucaaaguacucgc

SEQ ID NO: 2541924 - RNA, 19 nt, Artificial Sequence
  Description of Artificial Sequence: Synthetic oligonucleotide
  Sense strand starting at position 3573 of SEQ ID NO: 1888563
ccgccaaguuccugcugau

SEQ ID NO: 2541925 - RNA, 19 nt, Artificial Sequence
  Description of Artificial Sequence: Synthetic oligonucleotide
  Antisense strand to SEQ ID NO: 2541924
aucagcaggaacuuggcgg

SEQ ID NO: 2541926 - RNA, 19 nt, Artificial Sequence
  Description of Artificial Sequence: Synthetic oligonucleotide
  Sense strand starting at position 1118 of SEQ ID NO: 1888564
cugagcuuuguagaacaaa

SEQ ID NO: 2541927 - RNA, 19 nt, Artificial Sequence
  Description of Artificial Sequence: Synthetic oligonucleotide
  Antisense strand to SEQ ID NO: 2541926
uuuguucuacaaagcucag

SEQ ID NO: 2541928 - RNA, 19 nt, Artificial Sequence
  Description of Artificial Sequence: Synthetic oligonucleotide
  Sense strand starting at position 3240 of SEQ ID NO: 1888564
aaaugugcauuugugguaa

SEQ ID NO: 2541929 - RNA, 19 nt, Artificial Sequence
  Description of Artificial Sequence: Synthetic oligonucleotide
  Antisense strand to SEQ ID NO: 2541928
uuaccacaaaugcacauuu

SEQ ID NO: 2541930 - RNA, 19 nt, Artificial Sequence
  Description of Artificial Sequence: Synthetic oligonucleotide
  Sense strand starting at position 501 of SEQ ID NO: 1888564
gcaggauugguccaggaug

SEQ ID NO: 2541931 - RNA, 19 nt, Artificial Sequence
  Description of Artificial Sequence: Synthetic oligonucleotide
  Antisense strand to SEQ ID NO: 2541930
cauccuggaccaauccugc

SEQ ID NO: 2541932 - RNA, 19 nt, Artificial Sequence
  Description of Artificial Sequence: Synthetic oligonucleotide
  Sense strand starting at position 1682 of SEQ ID NO: 1888564
gguucuauaggucauugaa

SEQ ID NO: 2541933 - RNA, 19 nt, Artificial Sequence
  Description of Artificial Sequence: Synthetic oligonucleotide
  Antisense strand to SEQ ID NO: 2541932
uucaaugaccuauagaacc

SEQ ID NO: 2541934 - RNA, 19 nt, Artificial Sequence
  Description of Artificial Sequence: Synthetic oligonucleotide
  Sense strand starting at position 1575 of SEQ ID NO: 1888564
gacaaagucacugggagua

SEQ ID NO: 2541935 - RNA, 19 nt, Artificial Sequence
  Description of Artificial Sequence: Synthetic oligonucleotide
  Antisense strand to SEQ ID NO: 2541934
uacucccagugacuuuguc

SEQ ID NO: 2541936 - RNA, 19 nt, Artificial Sequence
  Description of Artificial Sequence: Synthetic oligonucleotide
  Sense strand starting at position 1574 of SEQ ID NO: 1888564
agacaaagucacugggagu

SEQ ID NO: 2541937 - RNA, 19 nt, Artificial Sequence
  Description of Artificial Sequence: Synthetic oligonucleotide
  Antisense strand to SEQ ID NO: 2541936
acucccagugacuuugucu

SEQ ID NO: 2541938 - RNA, 19 nt, Artificial Sequence
  Description of Artificial Sequence: Synthetic oligonucleotide
  Sense strand starting at position 3290 of SEQ ID NO: 1888564
acggaagucaauugaaauu

SEQ ID NO: 2541939 - RNA, 19 nt, Artificial Sequence
  Description of Artificial Sequence: Synthetic oligonucleotide
  Antisense strand to SEQ ID NO: 2541938
aauuucaauugacuuccgu

SEQ ID NO: 2541940 - RNA, 19 nt, Artificial Sequence
  Description of Artificial Sequence: Synthetic oligonucleotide
  Sense strand starting at position 2014 of SEQ ID NO: 1888564
aauccaucugguuauguga

SEQ ID NO: 2541941 - RNA, 19 nt, Artificial Sequence
  Description of Artificial Sequence: Synthetic oligonucleotide
  Antisense strand to SEQ ID NO: 2541940
ucacauaaccagauggauu

SEQ ID NO: 2541942 - RNA, 19 nt, Artificial Sequence
  Description of Artificial Sequence: Synthetic oligonucleotide
  Sense strand starting at position 2232 of SEQ ID NO: 1888564
augaaagacaguugguuau

SEQ ID NO: 2541943 - RNA, 19 nt, Artificial Sequence
  Description of Artificial Sequence: Synthetic oligonucleotide
  Antisense strand to SEQ ID NO: 2541942
auaaccaacugucuuucau

SEQ ID NO: 2541944 - RNA, 19 nt, Artificial Sequence
  Description of Artificial Sequence: Synthetic oligonucleotide
  Sense strand starting at position 2409 of SEQ ID NO: 1888564
ugaagcuggguuuauuaau

SEQ ID NO: 2541945 - RNA, 19 nt, Artificial Sequence
  Description of Artificial Sequence: Synthetic oligonucleotide
  Antisense strand to SEQ ID NO: 2541944
auuaauaaacccagcuuca

SEQ ID NO: 2541946 - RNA, 19 nt, Artificial Sequence
  Description of Artificial Sequence: Synthetic oligonucleotide
  Sense strand starting at position 2415 of SEQ ID NO: 1888564
uggguuuauuaauuccaaa

SEQ ID NO: 2541947 - RNA, 19 nt, Artificial Sequence
  Description of Artificial Sequence: Synthetic oligonucleotide
  Antisense strand to SEQ ID NO: 2541946
uuuggaauuaauaaaccca

SEQ ID NO: 2541948 - RNA, 19 nt, Artificial Sequence
  Description of Artificial Sequence: Synthetic oligonucleotide
  Sense strand starting at position 3029 of SEQ ID NO: 1888564
gagggacuguggucaccaa

SEQ ID NO: 2541949 - RNA, 19 nt, Artificial Sequence
  Description of Artificial Sequence: Synthetic oligonucleotide
  Antisense strand to SEQ ID NO: 2541948
uuggugaccacagucccuc

SEQ ID NO: 2541950 - RNA, 19 nt, Artificial Sequence
  Description of Artificial Sequence: Synthetic oligonucleotide
  Sense strand starting at position 1345 of SEQ ID NO: 1888564
gggugucucagucacagaa

SEQ ID NO: 2541951 - RNA, 19 nt, Artificial Sequence
  Description of Artificial Sequence: Synthetic oligonucleotide
  Antisense strand to SEQ ID NO: 2541950
uucugugacugagacaccc

SEQ ID NO: 2541952 - RNA, 19 nt, Artificial Sequence
  Description of Artificial Sequence: Synthetic oligonucleotide
  Sense strand starting at position 1078 of SEQ ID NO: 1888564
agagaaguaaguuguaauc

SEQ ID NO: 2541953 - RNA, 19 nt, Artificial Sequence
  Description of Artificial Sequence: Synthetic oligonucleotide
  Antisense strand to SEQ ID NO: 2541952
gauuacaacuuacuucucu

SEQ ID NO: 2541954 - RNA, 19 nt, Artificial Sequence
  Description of Artificial Sequence: Synthetic oligonucleotide
  Sense strand starting at position 363 of SEQ ID NO: 1888564
auguaaggccacugggaau

SEQ ID NO: 2541955 - RNA, 19 nt, Artificial Sequence
  Description of Artificial Sequence: Synthetic oligonucleotide
  Antisense strand to SEQ ID NO: 2541954
auucccaguggccuuacau

SEQ ID NO: 2541956 - RNA, 19 nt, Artificial Sequence
  Description of Artificial Sequence: Synthetic oligonucleotide
  Sense strand starting at position 1684 of SEQ ID NO: 1888564
uucuauaggucauugaauu

SEQ ID NO: 2541957 - RNA, 19 nt, Artificial Sequence
  Description of Artificial Sequence: Synthetic oligonucleotide
  Antisense strand to SEQ ID NO: 2541956
aauucaaugaccuauagaa

SEQ ID NO: 2541958 - RNA, 19 nt, Artificial Sequence
  Description of Artificial Sequence: Synthetic oligonucleotide
  Sense strand starting at position 2236 of SEQ ID NO: 1888564
aagacaguugguuauguuu

SEQ ID NO: 2541959 - RNA, 19 nt, Artificial Sequence
  Description of Artificial Sequence: Synthetic oligonucleotide
  Antisense strand to SEQ ID NO: 2541958
aaacauaaccaacugucuu

SEQ ID NO: 2541960 - RNA, 19 nt, Artificial Sequence
  Description of Artificial Sequence: Synthetic oligonucleotide
  Sense strand starting at position 2690 of SEQ ID NO: 1888564
ugcauuuagcugggagcuu

SEQ ID NO: 2541961 - RNA, 19 nt, Artificial Sequence
  Description of Artificial Sequence: Synthetic oligonucleotide
  Antisense strand to SEQ ID NO: 2541960
aagcucccagcuaaaugca

SEQ ID NO: 2541962 - RNA, 19 nt, Artificial Sequence
  Description of Artificial Sequence: Synthetic oligonucleotide
  Sense strand starting at position 2547 of SEQ ID NO: 1888564
uugacugcugccuaacaaa

SEQ ID NO: 2541963 - RNA, 19 nt, Artificial Sequence
  Description of Artificial Sequence: Synthetic oligonucleotide
  Antisense strand to SEQ ID NO: 2541962
uuuguuaggcagcagucaa

SEQ ID NO: 2541964 - RNA, 19 nt, Artificial Sequence
  Description of Artificial Sequence: Synthetic oligonucleotide
  Sense strand starting at position 1685 of SEQ ID NO: 1888564
ucuauaggucauugaauuc

SEQ ID NO: 2541965 - RNA, 19 nt, Artificial Sequence
  Description of Artificial Sequence: Synthetic oligonucleotide
  Antisense strand to SEQ ID NO: 2541964
gaauucaaugaccuauaga

SEQ ID NO: 2541966 - RNA, 19 nt, Artificial Sequence
  Description of Artificial Sequence: Synthetic oligonucleotide
  Sense strand starting at position 3085 of SEQ ID NO: 1888564
acuguucuagcugaaacuu

SEQ ID NO: 2541967 - RNA, 19 nt, Artificial Sequence
  Description of Artificial Sequence: Synthetic oligonucleotide
  Antisense strand to SEQ ID NO: 2541966
aaguuucagcuagaacagu

SEQ ID NO: 2541968 - RNA, 19 nt, Artificial Sequence
  Description of Artificial Sequence: Synthetic oligonucleotide
  Sense strand starting at position 110 of SEQ ID NO: 1888564
agacacguucuuugaugaa

SEQ ID NO: 2541969 - RNA, 19 nt, Artificial Sequence
  Description of Artificial Sequence: Synthetic oligonucleotide
  Antisense strand to SEQ ID NO: 2541968
uucaucaaagaacgugucu

SEQ ID NO: 2541970 - RNA, 19 nt, Artificial Sequence
  Description of Artificial Sequence: Synthetic oligonucleotide
  Sense strand starting at position 109 of SEQ ID NO: 1888564
gagacacguucuuugauga

SEQ ID NO: 2541971 - RNA, 19 nt, Artificial Sequence
  Description of Artificial Sequence: Synthetic oligonucleotide
  Antisense strand to SEQ ID NO: 2541970
ucaucaaagaacgugucuc

SEQ ID NO: 2541972 - RNA, 19 nt, Artificial Sequence
  Description of Artificial Sequence: Synthetic oligonucleotide
  Sense strand starting at position 3503 of SEQ ID NO: 1888564
aguuguugaguuuaaaccu

SEQ ID NO: 2541973 - RNA, 19 nt, Artificial Sequence
  Description of Artificial Sequence: Synthetic oligonucleotide
  Antisense strand to SEQ ID NO: 2541972
agguuuaaacucaacaacu

SEQ ID NO: 2541974 - RNA, 19 nt, Artificial Sequence
  Description of Artificial Sequence: Synthetic oligonucleotide
  Sense strand starting at position 2234 of SEQ ID NO: 1888564
gaaagacaguugguuaugu

SEQ ID NO: 2541975 - RNA, 19 nt, Artificial Sequence
  Description of Artificial Sequence: Synthetic oligonucleotide
  Antisense strand to SEQ ID NO: 2541974
acauaaccaacugucuuuc

SEQ ID NO: 2541976 - RNA, 19 nt, Artificial Sequence
  Description of Artificial Sequence: Synthetic oligonucleotide
  Sense strand starting at position 1679 of SEQ ID NO: 1888564
agagguucuauaggucauu

SEQ ID NO: 2541977 - RNA, 19 nt, Artificial Sequence
  Description of Artificial Sequence: Synthetic oligonucleotide
  Antisense strand to SEQ ID NO: 2541976
aaugaccuauagaaccucu

SEQ ID NO: 2541978 - RNA, 19 nt, Artificial Sequence
  Description of Artificial Sequence: Synthetic oligonucleotide
  Sense strand starting at position 3554 of SEQ ID NO: 1888564
uaugguaagcuuugaggau

SEQ ID NO: 2541979 - RNA, 19 nt, Artificial Sequence
  Description of Artificial Sequence: Synthetic oligonucleotide
  Antisense strand to SEQ ID NO: 2541978
auccucaaagcuuaccaua

SEQ ID NO: 2541980 - RNA, 19 nt, Artificial Sequence
  Description of Artificial Sequence: Synthetic oligonucleotide
  Sense strand starting at position 2066 of SEQ ID NO: 1888564
auucuaaagccaggucaua

SEQ ID NO: 2541981 - RNA, 19 nt, Artificial Sequence
  Description of Artificial Sequence: Synthetic oligonucleotide
  Antisense strand to SEQ ID NO: 2541980
uaugaccuggcuuuagaau

SEQ ID NO: 2541982 - RNA, 19 nt, Artificial Sequence
  Description of Artificial Sequence: Synthetic oligonucleotide
  Sense strand starting at position 3033 of SEQ ID NO: 1888564
gacuguggucaccaaguuu

SEQ ID NO: 2541983 - RNA, 19 nt, Artificial Sequence
  Description of Artificial Sequence: Synthetic oligonucleotide
  Antisense strand to SEQ ID NO: 2541982
aaacuuggugaccacaguc

SEQ ID NO: 2541984 - RNA, 19 nt, Artificial Sequence
  Description of Artificial Sequence: Synthetic oligonucleotide
  Sense strand starting at position 248 of SEQ ID NO: 1888564
agcagagaauggcuuccua

SEQ ID NO: 2541985 - RNA, 19 nt, Artificial Sequence
  Description of Artificial Sequence: Synthetic oligonucleotide
  Antisense strand to SEQ ID NO: 2541984
uaggaagccauucucugcu

SEQ ID NO: 2541986 - RNA, 19 nt, Artificial Sequence
  Description of Artificial Sequence: Synthetic oligonucleotide
  Sense strand starting at position 1114 of SEQ ID NO: 1888564
caaucugagcuuuguagaa

SEQ ID NO: 2541987 - RNA, 19 nt, Artificial Sequence
  Description of Artificial Sequence: Synthetic oligonucleotide
  Antisense strand to SEQ ID NO: 2541986
uucuacaaagcucagauug

SEQ ID NO: 2541988 - RNA, 19 nt, Artificial Sequence
  Description of Artificial Sequence: Synthetic oligonucleotide
  Sense strand starting at position 2235 of SEQ ID NO: 1888564
aaagacaguugguuauguu

SEQ ID NO: 2541989 - RNA, 19 nt, Artificial Sequence
  Description of Artificial Sequence: Synthetic oligonucleotide
  Antisense strand to SEQ ID NO: 2541988
aacauaaccaacugucuuu

SEQ ID NO: 2541990 - RNA, 19 nt, Artificial Sequence
  Description of Artificial Sequence: Synthetic oligonucleotide
  Sense strand starting at position 3550 of SEQ ID NO: 1888564
ggaguaugguaagcuuuga

SEQ ID NO: 2541991 - RNA, 19 nt, Artificial Sequence
  Description of Artificial Sequence: Synthetic oligonucleotide
  Antisense strand to SEQ ID NO: 2541990
ucaaagcuuaccauacucc

SEQ ID NO: 2541992 - RNA, 19 nt, Artificial Sequence
  Description of Artificial Sequence: Synthetic oligonucleotide
  Sense strand starting at position 3538 of SEQ ID NO: 1888564
aguauaugucugggaguau

SEQ ID NO: 2541993 - RNA, 19 nt, Artificial Sequence
  Description of Artificial Sequence: Synthetic oligonucleotide
  Antisense strand to SEQ ID NO: 2541992
auacucccagacauauacu

SEQ ID NO: 2541994 - RNA, 19 nt, Artificial Sequence
  Description of Artificial Sequence: Synthetic oligonucleotide
  Sense strand starting at position 2455 of SEQ ID NO: 1888564
ggacauuucugacauugug

SEQ ID NO: 2541995 - RNA, 19 nt, Artificial Sequence
  Description of Artificial Sequence: Synthetic oligonucleotide
  Antisense strand to SEQ ID NO: 2541994
cacaaugucagaaaugucc

SEQ ID NO: 2541996 - RNA, 19 nt, Artificial Sequence
  Description of Artificial Sequence: Synthetic oligonucleotide
  Sense strand starting at position 2467 of SEQ ID NO: 1888564
cauugugaaugugugauca

SEQ ID NO: 2541997 - RNA, 19 nt, Artificial Sequence
  Description of Artificial Sequence: Synthetic oligonucleotide
  Antisense strand to SEQ ID NO: 2541996
ugaucacacauucacaaug

SEQ ID NO: 2541998 - RNA, 19 nt, Artificial Sequence
  Description of Artificial Sequence: Synthetic oligonucleotide
  Sense strand starting at position 2546 of SEQ ID NO: 1888564
auugacugcugccuaacaa

SEQ ID NO: 2541999 - RNA, 19 nt, Artificial Sequence
  Description of Artificial Sequence: Synthetic oligonucleotide
  Antisense strand to SEQ ID NO: 2541998
uuguuaggcagcagucaau

SEQ ID NO: 2542000 - RNA, 19 nt, Artificial Sequence
  Description of Artificial Sequence: Synthetic oligonucleotide
  Sense strand starting at position 3536 of SEQ ID NO: 1888564
cuaguauaugucugggagu

SEQ ID NO: 2542001 - RNA, 19 nt, Artificial Sequence
  Description of Artificial Sequence: Synthetic oligonucleotide
  Antisense strand to SEQ ID NO: 2542000
acucccagacauauacuag

SEQ ID NO: 2542002 - RNA, 19 nt, Artificial Sequence
  Description of Artificial Sequence: Synthetic oligonucleotide
  Sense strand starting at position 2772 of SEQ ID NO: 1888564
caggguuucugucuccaca

SEQ ID NO: 2542003 - RNA, 19 nt, Artificial Sequence
  Description of Artificial Sequence: Synthetic oligonucleotide
  Antisense strand to SEQ ID NO: 2542002
uguggagacagaaacccug

SEQ ID NO: 2542004 - RNA, 19 nt, Artificial Sequence
  Description of Artificial Sequence: Synthetic oligonucleotide
  Sense strand starting at position 2406 of SEQ ID NO: 1888564
cucugaagcuggguuuauu

SEQ ID NO: 2542005 - RNA, 19 nt, Artificial Sequence
  Description of Artificial Sequence: Synthetic oligonucleotide
  Antisense strand to SEQ ID NO: 2542004
aauaaacccagcuucagag

SEQ ID NO: 2542006 - RNA, 19 nt, Artificial Sequence
  Description of Artificial Sequence: Synthetic oligonucleotide
  Sense strand starting at position 1320 of SEQ ID NO: 1888565
ugagauaauuagcuacaac

SEQ ID NO: 2542007 - RNA, 19 nt, Artificial Sequence
  Description of Artificial Sequence: Synthetic oligonucleotide
  Antisense strand to SEQ ID NO: 2542006
guuguagcuaauuaucuca

SEQ ID NO: 2542008 - RNA, 19 nt, Artificial Sequence
  Description of Artificial Sequence: Synthetic oligonucleotide
  Sense strand starting at position 1319 of SEQ ID NO: 1888565
uugagauaauuagcuacaa

SEQ ID NO: 2542009 - RNA, 19 nt, Artificial Sequence
  Description of Artificial Sequence: Synthetic oligonucleotide
  Antisense strand to SEQ ID NO: 2542008
uuguagcuaauuaucucaa

SEQ ID NO: 2542010 - RNA, 19 nt, Artificial Sequence
  Description of Artificial Sequence: Synthetic oligonucleotide
  Sense strand starting at position 3777 of SEQ ID NO: 1888565
uggugaacucucugaggaa

SEQ ID NO: 2542011 - RNA, 19 nt, Artificial Sequence
  Description of Artificial Sequence: Synthetic oligonucleotide
  Antisense strand to SEQ ID NO: 2542010
uuccucagagaguucacca

SEQ ID NO: 2542012 - RNA, 19 nt, Artificial Sequence
  Description of Artificial Sequence: Synthetic oligonucleotide
  Sense strand starting at position 2371 of SEQ ID NO: 1888565
agaguaaguuaauugaauc

SEQ ID NO: 2542013 - RNA, 19 nt, Artificial Sequence
  Description of Artificial Sequence: Synthetic oligonucleotide
  Antisense strand to SEQ ID NO: 2542012
gauucaauuaacuuacucu

SEQ ID NO: 2542014 - RNA, 19 nt, Artificial Sequence
  Description of Artificial Sequence: Synthetic oligonucleotide
  Sense strand starting at position 2260 of SEQ ID NO: 1888565
gcguggauuucuguggaga

SEQ ID NO: 2542015 - RNA, 19 nt, Artificial Sequence
  Description of Artificial Sequence: Synthetic oligonucleotide
  Antisense strand to SEQ ID NO: 2542014
ucuccacagaaauccacgc

SEQ ID NO: 2542016 - RNA, 19 nt, Artificial Sequence
  Description of Artificial Sequence: Synthetic oligonucleotide
  Sense strand starting at position 2366 of SEQ ID NO: 1888565
uccagagaguaaguuaauu

SEQ ID NO: 2542017 - RNA, 19 nt, Artificial Sequence
  Description of Artificial Sequence: Synthetic oligonucleotide
  Antisense strand to SEQ ID NO: 2542016
aauuaacuuacucucugga

SEQ ID NO: 2542018 - RNA, 19 nt, Artificial Sequence
  Description of Artificial Sequence: Synthetic oligonucleotide
  Sense strand starting at position 1558 of SEQ ID NO: 1888565
ggaucaaugcaaugacuuc

SEQ ID NO: 2542019 - RNA, 19 nt, Artificial Sequence
  Description of Artificial Sequence: Synthetic oligonucleotide
  Antisense strand to SEQ ID NO: 2542018
gaagucauugcauugaucc

SEQ ID NO: 2542020 - RNA, 19 nt, Artificial Sequence
  Description of Artificial Sequence: Synthetic oligonucleotide
  Sense strand starting at position 2253 of SEQ ID NO: 1888565
cgugaaugcguggauuucu

SEQ ID NO: 2542021 - RNA, 19 nt, Artificial Sequence
  Description of Artificial Sequence: Synthetic oligonucleotide
  Antisense strand to SEQ ID NO: 2542020
agaaauccacgcauucacg

SEQ ID NO: 2542022 - RNA, 19 nt, Artificial Sequence
  Description of Artificial Sequence: Synthetic oligonucleotide
  Sense strand starting at position 2418 of SEQ ID NO: 1888565
guuacagaaguagguaaau

SEQ ID NO: 2542023 - RNA, 19 nt, Artificial Sequence
  Description of Artificial Sequence: Synthetic oligonucleotide
  Antisense strand to SEQ ID NO: 2542022
auuuaccuacuucuguaac

SEQ ID NO: 2542024 - RNA, 19 nt, Artificial Sequence
  Description of Artificial Sequence: Synthetic oligonucleotide
  Sense strand starting at position 2188 of SEQ ID NO: 1888565
aggagcagcccugaaugua

SEQ ID NO: 2542025 - RNA, 19 nt, Artificial Sequence
  Description of Artificial Sequence: Synthetic oligonucleotide
  Antisense strand to SEQ ID NO: 2542024
uacauucagggcugcuccu

SEQ ID NO: 2542026 - RNA, 19 nt, Artificial Sequence
  Description of Artificial Sequence: Synthetic oligonucleotide
  Sense strand starting at position 1309 of SEQ ID NO: 1888565
guuugcuuucuugagauaa

SEQ ID NO: 2542027 - RNA, 19 nt, Artificial Sequence
  Description of Artificial Sequence: Synthetic oligonucleotide
  Antisense strand to SEQ ID NO: 2542026
uuaucucaagaaagcaaac

SEQ ID NO: 2542028 - RNA, 19 nt, Artificial Sequence
  Description of Artificial Sequence: Synthetic oligonucleotide
  Sense strand starting at position 1440 of SEQ ID NO: 1888565
ggacgaaccuuugcugaau

SEQ ID NO: 2542029 - RNA, 19 nt, Artificial Sequence
  Description of Artificial Sequence: Synthetic oligonucleotide
  Antisense strand to SEQ ID NO: 2542028
auucagcaaagguucgucc

SEQ ID NO: 2542030 - RNA, 19 nt, Artificial Sequence
  Description of Artificial Sequence: Synthetic oligonucleotide
  Sense strand starting at position 1155 of SEQ ID NO: 1888565
accguacuccgugaagaug

SEQ ID NO: 2542031 - RNA, 19 nt, Artificial Sequence
  Description of Artificial Sequence: Synthetic oligonucleotide
  Antisense strand to SEQ ID NO: 2542030
caucuucacggaguacggu

SEQ ID NO: 2542032 - RNA, 19 nt, Artificial Sequence
  Description of Artificial Sequence: Synthetic oligonucleotide
  Sense strand starting at position 2539 of SEQ ID NO: 1888565
cccgcaucccacugaagaa

SEQ ID NO: 2542033 - RNA, 19 nt, Artificial Sequence
  Description of Artificial Sequence: Synthetic oligonucleotide
  Antisense strand to SEQ ID NO: 2542032
uucuucagugggaugcggg

SEQ ID NO: 2542034 - RNA, 19 nt, Artificial Sequence
  Description of Artificial Sequence: Synthetic oligonucleotide
  Sense strand starting at position 1806 of SEQ ID NO: 1888565
gaguacuucccaggccuga

SEQ ID NO: 2542035 - RNA, 19 nt, Artificial Sequence
  Description of Artificial Sequence: Synthetic oligonucleotide
  Antisense strand to SEQ ID NO: 2542034
ucaggccugggaaguacuc

SEQ ID NO: 2542036 - RNA, 19 nt, Artificial Sequence
  Description of Artificial Sequence: Synthetic oligonucleotide
  Sense strand starting at position 1487 of SEQ ID NO: 1888565
cucuguuucgaaggugaaa

SEQ ID NO: 2542037 - RNA, 19 nt, Artificial Sequence
  Description of Artificial Sequence: Synthetic oligonucleotide
  Antisense strand to SEQ ID NO: 2542036
uuucaccuucgaaacagag

SEQ ID NO: 2542038 - RNA, 19 nt, Artificial Sequence
  Description of Artificial Sequence: Synthetic oligonucleotide
  Sense strand starting at position 2251 of SEQ ID NO: 1888565
ggcgugaaugcguggauuu

SEQ ID NO: 2542039 - RNA, 19 nt, Artificial Sequence
  Description of Artificial Sequence: Synthetic oligonucleotide
  Antisense strand to SEQ ID NO: 2542038
aaauccacgcauucacgcc

SEQ ID NO: 2542040 - RNA, 19 nt, Artificial Sequence
  Description of Artificial Sequence: Synthetic oligonucleotide
  Sense strand starting at position 3979 of SEQ ID NO: 1888565
aggaguuguggcuguaagg

SEQ ID NO: 2542041 - RNA, 19 nt, Artificial Sequence
  Description of Artificial Sequence: Synthetic oligonucleotide
  Antisense strand to SEQ ID NO: 2542040
ccuuacagccacaacuccu

SEQ ID NO: 2542042 - RNA, 19 nt, Artificial Sequence
  Description of Artificial Sequence: Synthetic oligonucleotide
  Sense strand starting at position 2603 of SEQ ID NO: 1888565
ggacgucuccgugauccca

SEQ ID NO: 2542043 - RNA, 19 nt, Artificial Sequence
  Description of Artificial Sequence: Synthetic oligonucleotide
  Antisense strand to SEQ ID NO: 2542042
ugggaucacggagacgucc

SEQ ID NO: 2542044 - RNA, 19 nt, Artificial Sequence
  Description of Artificial Sequence: Synthetic oligonucleotide
  Sense strand starting at position 2252 of SEQ ID NO: 1888565
gcgugaaugcguggauuuc

SEQ ID NO: 2542045 - RNA, 19 nt, Artificial Sequence
  Description of Artificial Sequence: Synthetic oligonucleotide
  Antisense strand to SEQ ID NO: 2542044
gaaauccacgcauucacgc

SEQ ID NO: 2542046 - RNA, 19 nt, Artificial Sequence
  Description of Artificial Sequence: Synthetic oligonucleotide
  Sense strand starting at position 1408 of SEQ ID NO: 1888565
ucguaaguccuugagcauc

SEQ ID NO: 2542047 - RNA, 19 nt, Artificial Sequence
  Description of Artificial Sequence: Synthetic oligonucleotide
  Antisense strand to SEQ ID NO: 2542046
gaugcucaaggacuuacga

SEQ ID NO: 2542048 - RNA, 19 nt, Artificial Sequence
  Description of Artificial Sequence: Synthetic oligonucleotide
  Sense strand starting at position 1536 of SEQ ID NO: 1888565
gcgacaaucccaggucgaa

SEQ ID NO: 2542049 - RNA, 19 nt, Artificial Sequence
  Description of Artificial Sequence: Synthetic oligonucleotide
  Antisense strand to SEQ ID NO: 2542048
uucgaccugggauugucgc

SEQ ID NO: 2542050 - RNA, 19 nt, Artificial Sequence
  Description of Artificial Sequence: Synthetic oligonucleotide
  Sense strand starting at position 2168 of SEQ ID NO: 1888565
aggucuguauuggcgacaa

SEQ ID NO: 2542051 - RNA, 19 nt, Artificial Sequence
  Description of Artificial Sequence: Synthetic oligonucleotide
  Antisense strand to SEQ ID NO: 2542050
uugucgccaauacagaccu

SEQ ID NO: 2542052 - RNA, 19 nt, Artificial Sequence
  Description of Artificial Sequence: Synthetic oligonucleotide
  Sense strand starting at position 153 of SEQ ID NO: 1888565
gaaugucuugcagggcuau

SEQ ID NO: 2542053 - RNA, 19 nt, Artificial Sequence
  Description of Artificial Sequence: Synthetic oligonucleotide
  Antisense strand to SEQ ID NO: 2542052
auagcccugcaagacauuc

SEQ ID NO: 2542054 - RNA, 19 nt, Artificial Sequence
  Description of Artificial Sequence: Synthetic oligonucleotide
  Sense strand starting at position 1406 of SEQ ID NO: 1888565
aaucguaaguccuugagca

SEQ ID NO: 2542055 - RNA, 19 nt, Artificial Sequence
  Description of Artificial Sequence: Synthetic oligonucleotide
  Antisense strand to SEQ ID NO: 2542054
ugcucaaggacuuacgauu

SEQ ID NO: 2542056 - RNA, 19 nt, Artificial Sequence
  Description of Artificial Sequence: Synthetic oligonucleotide
  Sense strand starting at position 1307 of SEQ ID NO: 1888565
cuguuugcuuucuugagau

SEQ ID NO: 2542057 - RNA, 19 nt, Artificial Sequence
  Description of Artificial Sequence: Synthetic oligonucleotide
  Antisense strand to SEQ ID NO: 2542056
aucucaagaaagcaaacag

SEQ ID NO: 2542058 - RNA, 19 nt, Artificial Sequence
  Description of Artificial Sequence: Synthetic oligonucleotide
  Sense strand starting at position 1306 of SEQ ID NO: 1888565
ccuguuugcuuucuugaga

SEQ ID NO: 2542059 - RNA, 19 nt, Artificial Sequence
  Description of Artificial Sequence: Synthetic oligonucleotide
  Antisense strand to SEQ ID NO: 2542058
ucucaagaaagcaaacagg

SEQ ID NO: 2542060 - RNA, 19 nt, Artificial Sequence
  Description of Artificial Sequence: Synthetic oligonucleotide
  Sense strand starting at position 1154 of SEQ ID NO: 1888565
caccguacuccgugaagau

SEQ ID NO: 2542061 - RNA, 19 nt, Artificial Sequence
  Description of Artificial Sequence: Synthetic oligonucleotide
  Antisense strand to SEQ ID NO: 2542060
aucuucacggaguacggug

SEQ ID NO: 2542062 - RNA, 19 nt, Artificial Sequence
  Description of Artificial Sequence: Synthetic oligonucleotide
  Sense strand starting at position 3778 of SEQ ID NO: 1888565
ggugaacucucugaggaaa

SEQ ID NO: 2542063 - RNA, 19 nt, Artificial Sequence
  Description of Artificial Sequence: Synthetic oligonucleotide
  Antisense strand to SEQ ID NO: 2542062
uuuccucagagaguucacc

SEQ ID NO: 2542064 - RNA, 19 nt, Artificial Sequence
  Description of Artificial Sequence: Synthetic oligonucleotide
  Sense strand starting at position 1407 of SEQ ID NO: 1888565
aucguaaguccuugagcau

SEQ ID NO: 2542065 - RNA, 19 nt, Artificial Sequence
  Description of Artificial Sequence: Synthetic oligonucleotide
  Antisense strand to SEQ ID NO: 2542064
augcucaaggacuuacgau

SEQ ID NO: 2542066 - RNA, 19 nt, Artificial Sequence
  Description of Artificial Sequence: Synthetic oligonucleotide
  Sense strand starting at position 1479 of SEQ ID NO: 1888565
ggcugagucucuguuucga

SEQ ID NO: 2542067 - RNA, 19 nt, Artificial Sequence
  Description of Artificial Sequence: Synthetic oligonucleotide
  Antisense strand to SEQ ID NO: 2542066
ucgaaacagagacucagcc

SEQ ID NO: 2542068 - RNA, 19 nt, Artificial Sequence
  Description of Artificial Sequence: Synthetic oligonucleotide
  Sense strand starting at position 2262 of SEQ ID NO: 1888565
guggauuucuguggagagu

SEQ ID NO: 2542069 - RNA, 19 nt, Artificial Sequence
  Description of Artificial Sequence: Synthetic oligonucleotide
  Antisense strand to SEQ ID NO: 2542068
acucuccacagaaauccac

SEQ ID NO: 2542070 - RNA, 19 nt, Artificial Sequence
  Description of Artificial Sequence: Synthetic oligonucleotide
  Sense strand starting at position 2316 of SEQ ID NO: 1888565
cucagaaaguucugggaaa

SEQ ID NO: 2542071 - RNA, 19 nt, Artificial Sequence
  Description of Artificial Sequence: Synthetic oligonucleotide
  Antisense strand to SEQ ID NO: 2542070
uuucccagaacuuucugag

SEQ ID NO: 2542072 - RNA, 19 nt, Artificial Sequence
  Description of Artificial Sequence: Synthetic oligonucleotide
  Sense strand starting at position 2317 of SEQ ID NO: 1888565
ucagaaaguucugggaaac

SEQ ID NO: 2542073 - RNA, 19 nt, Artificial Sequence
  Description of Artificial Sequence: Synthetic oligonucleotide
  Antisense strand to SEQ ID NO: 2542072
guuucccagaacuuucuga

SEQ ID NO: 2542074 - RNA, 19 nt, Artificial Sequence
  Description of Artificial Sequence: Synthetic oligonucleotide
  Sense strand starting at position 2250 of SEQ ID NO: 1888565
gggcgugaaugcguggauu

SEQ ID NO: 2542075 - RNA, 19 nt, Artificial Sequence
  Description of Artificial Sequence: Synthetic oligonucleotide
  Antisense strand to SEQ ID NO: 2542074
aauccacgcauucacgccc

SEQ ID NO: 2542076 - RNA, 19 nt, Artificial Sequence
  Description of Artificial Sequence: Synthetic oligonucleotide
  Sense strand starting at position 1311 of SEQ ID NO: 1888565
uugcuuucuugagauaauu

SEQ ID NO: 2542077 - RNA, 19 nt, Artificial Sequence
  Description of Artificial Sequence: Synthetic oligonucleotide
  Antisense strand to SEQ ID NO: 2542076
aauuaucucaagaaagcaa

SEQ ID NO: 2542078 - RNA, 19 nt, Artificial Sequence
  Description of Artificial Sequence: Synthetic oligonucleotide
  Sense strand starting at position 128 of SEQ ID NO: 1888565
cuaaauuguugugauucca

SEQ ID NO: 2542079 - RNA, 19 nt, Artificial Sequence
  Description of Artificial Sequence: Synthetic oligonucleotide
  Antisense strand to SEQ ID NO: 2542078
uggaaucacaacaauuuag

SEQ ID NO: 2542080 - RNA, 19 nt, Artificial Sequence
  Description of Artificial Sequence: Synthetic oligonucleotide
  Sense strand starting at position 2714 of SEQ ID NO: 1888565
ccuacugucuggugggaaa

SEQ ID NO: 2542081 - RNA, 19 nt, Artificial Sequence
  Description of Artificial Sequence: Synthetic oligonucleotide
  Antisense strand to SEQ ID NO: 2542080
uuucccaccagacaguagg

SEQ ID NO: 2542082 - RNA, 19 nt, Artificial Sequence
  Description of Artificial Sequence: Synthetic oligonucleotide
  Sense strand starting at position 400 of SEQ ID NO: 1888565
gucaacaaauagugaguuu

SEQ ID NO: 2542083 - RNA, 19 nt, Artificial Sequence
  Description of Artificial Sequence: Synthetic oligonucleotide
  Antisense strand to SEQ ID NO: 2542082
aaacucacuauuuguugac

SEQ ID NO: 2542084 - RNA, 19 nt, Artificial Sequence
  Description of Artificial Sequence: Synthetic oligonucleotide
  Sense strand starting at position 3608 of SEQ ID NO: 1888565
cucacuggaucucgugaga

SEQ ID NO: 2542085 - RNA, 19 nt, Artificial Sequence
  Description of Artificial Sequence: Synthetic oligonucleotide
  Antisense strand to SEQ ID NO: 2542084
ucucacgagauccagugag

SEQ ID NO: 2542086 - RNA, 19 nt, Artificial Sequence
  Description of Artificial Sequence: Synthetic oligonucleotide
  Sense strand starting at position 1779 of SEQ ID NO: 1888566
augggaaucuucuccugaa

SEQ ID NO: 2542087 - RNA, 19 nt, Artificial Sequence
  Description of Artificial Sequence: Synthetic oligonucleotide
  Antisense strand to SEQ ID NO: 2542086
uucaggagaagauucccau

SEQ ID NO: 2542088 - RNA, 19 nt, Artificial Sequence
  Description of Artificial Sequence: Synthetic oligonucleotide
  Sense strand starting at position 2208 of SEQ ID NO: 1888566
uccuguguccuuucguuaa

SEQ ID NO: 2542089 - RNA, 19 nt, Artificial Sequence
  Description of Artificial Sequence: Synthetic oligonucleotide
  Antisense strand to SEQ ID NO: 2542088
uuaacgaaaggacacagga

SEQ ID NO: 2542090 - RNA, 19 nt, Artificial Sequence
  Description of Artificial Sequence: Synthetic oligonucleotide
  Sense strand starting at position 1063 of SEQ ID NO: 1888566
agacacagguucuuauaua

SEQ ID NO: 2542091 - RNA, 19 nt, Artificial Sequence
  Description of Artificial Sequence: Synthetic oligonucleotide
  Antisense strand to SEQ ID NO: 2542090
uauauaagaaccugugucu

SEQ ID NO: 2542092 - RNA, 19 nt, Artificial Sequence
  Description of Artificial Sequence: Synthetic oligonucleotide
  Sense strand starting at position 1214 of SEQ ID NO: 1888566
agccuaauugccuccguuu

SEQ ID NO: 2542093 - RNA, 19 nt, Artificial Sequence
  Description of Artificial Sequence: Synthetic oligonucleotide
  Antisense strand to SEQ ID NO: 2542092
aaacggaggcaauuaggcu

SEQ ID NO: 2542094 - RNA, 19 nt, Artificial Sequence
  Description of Artificial Sequence: Synthetic oligonucleotide
  Sense strand starting at position 1175 of SEQ ID NO: 1888566
cuaacuccuggccagauua

SEQ ID NO: 2542095 - RNA, 19 nt, Artificial Sequence
  Description of Artificial Sequence: Synthetic oligonucleotide
  Antisense strand to SEQ ID NO: 2542094
uaaucuggccaggaguuag

SEQ ID NO: 2542096 - RNA, 19 nt, Artificial Sequence
  Description of Artificial Sequence: Synthetic oligonucleotide
  Sense strand starting at position 1780 of SEQ ID NO: 1888566
ugggaaucuucuccugaac

SEQ ID NO: 2542097 - RNA, 19 nt, Artificial Sequence
  Description of Artificial Sequence: Synthetic oligonucleotide
  Antisense strand to SEQ ID NO: 2542096
guucaggagaagauuccca

SEQ ID NO: 2542098 - RNA, 19 nt, Artificial Sequence
  Description of Artificial Sequence: Synthetic oligonucleotide
  Sense strand starting at position 348 of SEQ ID NO: 1888566
agguucuugccauaaagau

SEQ ID NO: 2542099 - RNA, 19 nt, Artificial Sequence
  Description of Artificial Sequence: Synthetic oligonucleotide
  Antisense strand to SEQ ID NO: 2542098
aucuuuauggcaagaaccu

SEQ ID NO: 2542100 - RNA, 19 nt, Artificial Sequence
  Description of Artificial Sequence: Synthetic oligonucleotide
  Sense strand starting at position 1364 of SEQ ID NO: 1888566
uguuaugggcucuaaugaa

SEQ ID NO: 2542101 - RNA, 19 nt, Artificial Sequence
  Description of Artificial Sequence: Synthetic oligonucleotide
  Antisense strand to SEQ ID NO: 2542100
uucauuagagcccauaaca

SEQ ID NO: 2542102 - RNA, 19 nt, Artificial Sequence
  Description of Artificial Sequence: Synthetic oligonucleotide
  Sense strand starting at position 154 of SEQ ID NO: 1888566
agagaaucauagccacgau

SEQ ID NO: 2542103 - RNA, 19 nt, Artificial Sequence
  Description of Artificial Sequence: Synthetic oligonucleotide
  Antisense strand to SEQ ID NO: 2542102
aucguggcuaugauucucu

SEQ ID NO: 2542104 - RNA, 19 nt, Artificial Sequence
  Description of Artificial Sequence: Synthetic oligonucleotide
  Sense strand starting at position 465 of SEQ ID NO: 1888566
cuugucugaccuggaggaa

SEQ ID NO: 2542105 - RNA, 19 nt, Artificial Sequence
  Description of Artificial Sequence: Synthetic oligonucleotide
  Antisense strand to SEQ ID NO: 2542104
uuccuccaggucagacaag

SEQ ID NO: 2542106 - RNA, 19 nt, Artificial Sequence
  Description of Artificial Sequence: Synthetic oligonucleotide
  Sense strand starting at position 2105 of SEQ ID NO: 1888566
cuuacuucugaauguaaag

SEQ ID NO: 2542107 - RNA, 19 nt, Artificial Sequence
  Description of Artificial Sequence: Synthetic oligonucleotide
  Antisense strand to SEQ ID NO: 2542106
cuuuacauucagaaguaag

SEQ ID NO: 2542108 - RNA, 19 nt, Artificial Sequence
  Description of Artificial Sequence: Synthetic oligonucleotide
  Sense strand starting at position 1396 of SEQ ID NO: 1888566
auguaaauguaagcagaga

SEQ ID NO: 2542109 - RNA, 19 nt, Artificial Sequence
  Description of Artificial Sequence: Synthetic oligonucleotide
  Antisense strand to SEQ ID NO: 2542108
ucucugcuuacauuuacau

SEQ ID NO: 2542110 - RNA, 19 nt, Artificial Sequence
  Description of Artificial Sequence: Synthetic oligonucleotide
  Sense strand starting at position 2180 of SEQ ID NO: 1888566
cuaggaacuugcucugaga

SEQ ID NO: 2542111 - RNA, 19 nt, Artificial Sequence
  Description of Artificial Sequence: Synthetic oligonucleotide
  Antisense strand to SEQ ID NO: 2542110
ucucagagcaaguuccuag

SEQ ID NO: 2542112 - RNA, 19 nt, Artificial Sequence
  Description of Artificial Sequence: Synthetic oligonucleotide
  Sense strand starting at position 166 of SEQ ID NO: 1888566
ccacgauuaguuuaccuga

SEQ ID NO: 2542113 - RNA, 19 nt, Artificial Sequence
  Description of Artificial Sequence: Synthetic oligonucleotide
  Antisense strand to SEQ ID NO: 2542112
ucagguaaacuaaucgugg

SEQ ID NO: 2542114 - RNA, 19 nt, Artificial Sequence
  Description of Artificial Sequence: Synthetic oligonucleotide
  Sense strand starting at position 2182 of SEQ ID NO: 1888566
aggaacuugcucugagauu

SEQ ID NO: 2542115 - RNA, 19 nt, Artificial Sequence
  Description of Artificial Sequence: Synthetic oligonucleotide
  Antisense strand to SEQ ID NO: 2542114
aaucucagagcaaguuccu

SEQ ID NO: 2542116 - RNA, 19 nt, Artificial Sequence
  Description of Artificial Sequence: Synthetic oligonucleotide
  Sense strand starting at position 88 of SEQ ID NO: 1888566
uccaucagcuaauugagau

SEQ ID NO: 2542117 - RNA, 19 nt, Artificial Sequence
  Description of Artificial Sequence: Synthetic oligonucleotide
  Antisense strand to SEQ ID NO: 2542116
aucucaauuagcugaugga

SEQ ID NO: 2542118 - RNA, 19 nt, Artificial Sequence
  Description of Artificial Sequence: Synthetic oligonucleotide
  Sense strand starting at position 654 of SEQ ID NO: 1888566
accagucuuggucaugauu

SEQ ID NO: 2542119 - RNA, 19 nt, Artificial Sequence
  Description of Artificial Sequence: Synthetic oligonucleotide
  Antisense strand to SEQ ID NO: 2542118
aaucaugaccaagacuggu

SEQ ID NO: 2542120 - RNA, 19 nt, Artificial Sequence
  Description of Artificial Sequence: Synthetic oligonucleotide
  Sense strand starting at position 464 of SEQ ID NO: 1888566
ccuugucugaccuggagga

SEQ ID NO: 2542121 - RNA, 19 nt, Artificial Sequence
  Description of Artificial Sequence: Synthetic oligonucleotide
  Antisense strand to SEQ ID NO: 2542120
uccuccaggucagacaagg

SEQ ID NO: 2542122 - RNA, 19 nt, Artificial Sequence
  Description of Artificial Sequence: Synthetic oligonucleotide
  Sense strand starting at position 158 of SEQ ID NO: 1888566
aaucauagccacgauuagu

SEQ ID NO: 2542123 - RNA, 19 nt, Artificial Sequence
  Description of Artificial Sequence: Synthetic oligonucleotide
  Antisense strand to SEQ ID NO: 2542122
acuaaucguggcuaugauu

SEQ ID NO: 2542124 - RNA, 19 nt, Artificial Sequence
  Description of Artificial Sequence: Synthetic oligonucleotide
  Sense strand starting at position 1347 of SEQ ID NO: 1888566
aaauaucugugagucauug

SEQ ID NO: 2542125 - RNA, 19 nt, Artificial Sequence
  Description of Artificial Sequence: Synthetic oligonucleotide
  Antisense strand to SEQ ID NO: 2542124
caaugacucacagauauuu

SEQ ID NO: 2542126 - RNA, 19 nt, Artificial Sequence
  Description of Artificial Sequence: Synthetic oligonucleotide
  Sense strand starting at position 652 of SEQ ID NO: 1888566
aaaccagucuuggucauga

SEQ ID NO: 2542127 - RNA, 19 nt, Artificial Sequence
  Description of Artificial Sequence: Synthetic oligonucleotide
  Antisense strand to SEQ ID NO: 2542126
ucaugaccaagacugguuu

SEQ ID NO: 2542128 - RNA, 19 nt, Artificial Sequence
  Description of Artificial Sequence: Synthetic oligonucleotide
  Sense strand starting at position 168 of SEQ ID NO: 1888566
acgauuaguuuaccugaga

SEQ ID NO: 2542129 - RNA, 19 nt, Artificial Sequence
  Description of Artificial Sequence: Synthetic oligonucleotide
  Antisense strand to SEQ ID NO: 2542128
ucucagguaaacuaaucgu

SEQ ID NO: 2542130 - RNA, 19 nt, Artificial Sequence
  Description of Artificial Sequence: Synthetic oligonucleotide
  Sense strand starting at position 157 of SEQ ID NO: 1888566
gaaucauagccacgauuag

SEQ ID NO: 2542131 - RNA, 19 nt, Artificial Sequence
  Description of Artificial Sequence: Synthetic oligonucleotide
  Antisense strand to SEQ ID NO: 2542130
cuaaucguggcuaugauuc

SEQ ID NO: 2542132 - RNA, 19 nt, Artificial Sequence
  Description of Artificial Sequence: Synthetic oligonucleotide
  Sense strand starting at position 259 of SEQ ID NO: 1888566
guggacuagccugagaguu

SEQ ID NO: 2542133 - RNA, 19 nt, Artificial Sequence
  Description of Artificial Sequence: Synthetic oligonucleotide
  Antisense strand to SEQ ID NO: 2542132
aacucucaggcuaguccac

SEQ ID NO: 2542134 - RNA, 19 nt, Artificial Sequence
  Description of Artificial Sequence: Synthetic oligonucleotide
  Sense strand starting at position 2245 of SEQ ID NO: 1888566
ucagccaauguuuggaaga

SEQ ID NO: 2542135 - RNA, 19 nt, Artificial Sequence
  Description of Artificial Sequence: Synthetic oligonucleotide
  Antisense strand to SEQ ID NO: 2542134
ucuuccaaacauuggcuga

SEQ ID NO: 2542136 - RNA, 19 nt, Artificial Sequence
  Description of Artificial Sequence: Synthetic oligonucleotide
  Sense strand starting at position 2097 of SEQ ID NO: 1888566
uguuuagacuuacuucuga

SEQ ID NO: 2542137 - RNA, 19 nt, Artificial Sequence
  Description of Artificial Sequence: Synthetic oligonucleotide
  Antisense strand to SEQ ID NO: 2542136
ucagaaguaagucuaaaca

SEQ ID NO: 2542138 - RNA, 19 nt, Artificial Sequence
  Description of Artificial Sequence: Synthetic oligonucleotide
  Sense strand starting at position 169 of SEQ ID NO: 1888566
cgauuaguuuaccugagac

SEQ ID NO: 2542139 - RNA, 19 nt, Artificial Sequence
  Description of Artificial Sequence: Synthetic oligonucleotide
  Antisense strand to SEQ ID NO: 2542138
gucucagguaaacuaaucg

SEQ ID NO: 2542140 - RNA, 19 nt, Artificial Sequence
  Description of Artificial Sequence: Synthetic oligonucleotide
  Sense strand starting at position 1349 of SEQ ID NO: 1888566
auaucugugagucauuguu

SEQ ID NO: 2542141 - RNA, 19 nt, Artificial Sequence
  Description of Artificial Sequence: Synthetic oligonucleotide
  Antisense strand to SEQ ID NO: 2542140
aacaaugacucacagauau

SEQ ID NO: 2542142 - RNA, 19 nt, Artificial Sequence
  Description of Artificial Sequence: Synthetic oligonucleotide
  Sense strand starting at position 1174 of SEQ ID NO: 1888566
ucuaacuccuggccagauu

SEQ ID NO: 2542143 - RNA, 19 nt, Artificial Sequence
  Description of Artificial Sequence: Synthetic oligonucleotide
  Antisense strand to SEQ ID NO: 2542142
aaucuggccaggaguuaga

SEQ ID NO: 2542144 - RNA, 19 nt, Artificial Sequence
  Description of Artificial Sequence: Synthetic oligonucleotide
  Sense strand starting at position 2088 of SEQ ID NO: 1888566
acaucuuaguguuuagacu

SEQ ID NO: 2542145 - RNA, 19 nt, Artificial Sequence
  Description of Artificial Sequence: Synthetic oligonucleotide
  Antisense strand to SEQ ID NO: 2542144
agucuaaacacuaagaugu

SEQ ID NO: 2542146 - RNA, 19 nt, Artificial Sequence
  Description of Artificial Sequence: Synthetic oligonucleotide
  Sense strand starting at position 2233 of SEQ ID NO: 1888566
agauguuccugaucagcca

SEQ ID NO: 2542147 - RNA, 19 nt, Artificial Sequence
  Description of Artificial Sequence: Synthetic oligonucleotide
  Antisense strand to SEQ ID NO: 2542146
uggcugaucaggaacaucu

SEQ ID NO: 2542148 - RNA, 19 nt, Artificial Sequence
  Description of Artificial Sequence: Synthetic oligonucleotide
  Sense strand starting at position 1172 of SEQ ID NO: 1888566
agucuaacuccuggccaga

SEQ ID NO: 2542149 - RNA, 19 nt, Artificial Sequence
  Description of Artificial Sequence: Synthetic oligonucleotide
  Antisense strand to SEQ ID NO: 2542148
ucuggccaggaguuagacu

SEQ ID NO: 2542150 - RNA, 19 nt, Artificial Sequence
  Description of Artificial Sequence: Synthetic oligonucleotide
  Sense strand starting at position 2222 of SEQ ID NO: 1888566
guuaaucugccagauguuc

SEQ ID NO: 2542151 - RNA, 19 nt, Artificial Sequence
  Description of Artificial Sequence: Synthetic oligonucleotide
  Antisense strand to SEQ ID NO: 2542150
gaacaucuggcagauuaac

SEQ ID NO: 2542152 - RNA, 19 nt, Artificial Sequence
  Description of Artificial Sequence: Synthetic oligonucleotide
  Sense strand starting at position 2183 of SEQ ID NO: 1888566
ggaacuugcucugagauuu

SEQ ID NO: 2542153 - RNA, 19 nt, Artificial Sequence
  Description of Artificial Sequence: Synthetic oligonucleotide
  Antisense strand to SEQ ID NO: 2542152
aaaucucagagcaaguucc

SEQ ID NO: 2542154 - RNA, 19 nt, Artificial Sequence
  Description of Artificial Sequence: Synthetic oligonucleotide
  Sense strand starting at position 258 of SEQ ID NO: 1888566
uguggacuagccugagagu

SEQ ID NO: 2542155 - RNA, 19 nt, Artificial Sequence
  Description of Artificial Sequence: Synthetic oligonucleotide
  Antisense strand to SEQ ID NO: 2542154
acucucaggcuaguccaca

SEQ ID NO: 2542156 - RNA, 19 nt, Artificial Sequence
  Description of Artificial Sequence: Synthetic oligonucleotide
  Sense strand starting at position 2708 of SEQ ID NO: 1888566
aaaccuuagcgguaagugu

SEQ ID NO: 2542157 - RNA, 19 nt, Artificial Sequence
  Description of Artificial Sequence: Synthetic oligonucleotide
  Antisense strand to SEQ ID NO: 2542156
acacuuaccgcuaagguuu

SEQ ID NO: 2542158 - RNA, 19 nt, Artificial Sequence
  Description of Artificial Sequence: Synthetic oligonucleotide
  Sense strand starting at position 1351 of SEQ ID NO: 1888566
aucugugagucauuguuau

SEQ ID NO: 2542159 - RNA, 19 nt, Artificial Sequence
  Description of Artificial Sequence: Synthetic oligonucleotide
  Antisense strand to SEQ ID NO: 2542158
auaacaaugacucacagau

SEQ ID NO: 2542160 - RNA, 19 nt, Artificial Sequence
  Description of Artificial Sequence: Synthetic oligonucleotide
  Sense strand starting at position 663 of SEQ ID NO: 1888566
ggucaugauucucugucuu

SEQ ID NO: 2542161 - RNA, 19 nt, Artificial Sequence
  Description of Artificial Sequence: Synthetic oligonucleotide
  Antisense strand to SEQ ID NO: 2542160
aagacagagaaucaugacc

SEQ ID NO: 2542162 - RNA, 19 nt, Artificial Sequence
  Description of Artificial Sequence: Synthetic oligonucleotide
  Sense strand starting at position 2799 of SEQ ID NO: 1888566
aagcuucuacagcgugaaa

SEQ ID NO: 2542163 - RNA, 19 nt, Artificial Sequence
  Description of Artificial Sequence: Synthetic oligonucleotide
  Antisense strand to SEQ ID NO: 2542162
uuucacgcuguagaagcuu

SEQ ID NO: 2542164 - RNA, 19 nt, Artificial Sequence
  Description of Artificial Sequence: Synthetic oligonucleotide
  Sense strand starting at position 198 of SEQ ID NO: 1888566
ggugccuguaacugguaga

SEQ ID NO: 2542165 - RNA, 19 nt, Artificial Sequence
  Description of Artificial Sequence: Synthetic oligonucleotide
  Antisense strand to SEQ ID NO: 2542164
ucuaccaguuacaggcacc

SEQ ID NO: 2542166 - RNA, 19 nt, Artificial Sequence
  Description of Artificial Sequence: Synthetic oligonucleotide
  Sense strand starting at position 376 of SEQ ID NO: 1888567
gagagcgaggcugagaaau

SEQ ID NO: 2542167 - RNA, 19 nt, Artificial Sequence
  Description of Artificial Sequence: Synthetic oligonucleotide
  Antisense strand to SEQ ID NO: 2542166
auuucucagccucgcucuc

SEQ ID NO: 2542168 - RNA, 19 nt, Artificial Sequence
  Description of Artificial Sequence: Synthetic oligonucleotide
  Sense strand starting at position 2790 of SEQ ID NO: 1888567
ugcuauagucauuaaggga

SEQ ID NO: 2542169 - RNA, 19 nt, Artificial Sequence
  Description of Artificial Sequence: Synthetic oligonucleotide
  Antisense strand to SEQ ID NO: 2542168
ucccuuaaugacuauagca

SEQ ID NO: 2542170 - RNA, 19 nt, Artificial Sequence
  Description of Artificial Sequence: Synthetic oligonucleotide
  Sense strand starting at position 2155 of SEQ ID NO: 1888567
gcacaaguggcggugucau

SEQ ID NO: 2542171 - RNA, 19 nt, Artificial Sequence
  Description of Artificial Sequence: Synthetic oligonucleotide
  Antisense strand to SEQ ID NO: 2542170
augacaccgccacuugugc

SEQ ID NO: 2542172 - RNA, 19 nt, Artificial Sequence
  Description of Artificial Sequence: Synthetic oligonucleotide
  Sense strand starting at position 3075 of SEQ ID NO: 1888567
uuggauuuaugagacagau

SEQ ID NO: 2542173 - RNA, 19 nt, Artificial Sequence
  Description of Artificial Sequence: Synthetic oligonucleotide
  Antisense strand to SEQ ID NO: 2542172
aucugucucauaaauccaa

SEQ ID NO: 2542174 - RNA, 19 nt, Artificial Sequence
  Description of Artificial Sequence: Synthetic oligonucleotide
  Sense strand starting at position 3112 of SEQ ID NO: 1888567
ugugacuugccacagggaa

SEQ ID NO: 2542175 - RNA, 19 nt, Artificial Sequence
  Description of Artificial Sequence: Synthetic oligonucleotide
  Antisense strand to SEQ ID NO: 2542174
uucccuguggcaagucaca

SEQ ID NO: 2542176 - RNA, 19 nt, Artificial Sequence
  Description of Artificial Sequence: Synthetic oligonucleotide
  Sense strand starting at position 2717 of SEQ ID NO: 1888567
aguuuaugggagcacuuga

SEQ ID NO: 2542177 - RNA, 19 nt, Artificial Sequence
  Description of Artificial Sequence: Synthetic oligonucleotide
  Antisense strand to SEQ ID NO: 2542176
ucaagugcucccauaaacu

SEQ ID NO: 2542178 - RNA, 19 nt, Artificial Sequence
  Description of Artificial Sequence: Synthetic oligonucleotide
  Sense strand starting at position 3046 of SEQ ID NO: 1888567
cuuuguggcccagaacaaa

SEQ ID NO: 2542179 - RNA, 19 nt, Artificial Sequence
  Description of Artificial Sequence: Synthetic oligonucleotide
  Antisense strand to SEQ ID NO: 2542178
uuuguucugggccacaaag

SEQ ID NO: 2542180 - RNA, 19 nt, Artificial Sequence
  Description of Artificial Sequence: Synthetic oligonucleotide
  Sense strand starting at position 1325 of SEQ ID NO: 1888567
cuugguuugccugaagaaa

SEQ ID NO: 2542181 - RNA, 19 nt, Artificial Sequence
  Description of Artificial Sequence: Synthetic oligonucleotide
  Antisense strand to SEQ ID NO: 2542180
uuucuucaggcaaaccaag

SEQ ID NO: 2542182 - RNA, 19 nt, Artificial Sequence
  Description of Artificial Sequence: Synthetic oligonucleotide
  Sense strand starting at position 1864 of SEQ ID NO: 1888567
ggaaguuacuucuuccaga

SEQ ID NO: 2542183 - RNA, 19 nt, Artificial Sequence
  Description of Artificial Sequence: Synthetic oligonucleotide
  Antisense strand to SEQ ID NO: 2542182
ucuggaagaaguaacuucc

SEQ ID NO: 2542184 - RNA, 19 nt, Artificial Sequence
  Description of Artificial Sequence: Synthetic oligonucleotide
  Sense strand starting at position 2993 of SEQ ID NO: 1888567
gcaugacacgugucucguu

SEQ ID NO: 2542185 - RNA, 19 nt, Artificial Sequence
  Description of Artificial Sequence: Synthetic oligonucleotide
  Antisense strand to SEQ ID NO: 2542184
aacgagacacgugucaugc

SEQ ID NO: 2542186 - RNA, 19 nt, Artificial Sequence
  Description of Artificial Sequence: Synthetic oligonucleotide
  Sense strand starting at position 3423 of SEQ ID NO: 1888567
gaaccauuccguguugcgu

SEQ ID NO: 2542187 - RNA, 19 nt, Artificial Sequence
  Description of Artificial Sequence: Synthetic oligonucleotide
  Antisense strand to SEQ ID NO: 2542186
acgcaacacggaaugguuc

SEQ ID NO: 2542188 - RNA, 19 nt, Artificial Sequence
  Description of Artificial Sequence: Synthetic oligonucleotide
  Sense strand starting at position 3441 of SEQ ID NO: 1888567
ucgagaugccaccaagagu

SEQ ID NO: 2542189 - RNA, 19 nt, Artificial Sequence
  Description of Artificial Sequence: Synthetic oligonucleotide
  Antisense strand to SEQ ID NO: 2542188
acucuugguggcaucucga

SEQ ID NO: 2542190 - RNA, 19 nt, Artificial Sequence
  Description of Artificial Sequence: Synthetic oligonucleotide
  Sense strand starting at position 1755 of SEQ ID NO: 1888567
ggaaccgccagauauugua

SEQ ID NO: 2542191 - RNA, 19 nt, Artificial Sequence
  Description of Artificial Sequence: Synthetic oligonucleotide
  Antisense strand to SEQ ID NO: 2542190
uacaauaucuggcgguucc

SEQ ID NO: 2542192 - RNA, 19 nt, Artificial Sequence
  Description of Artificial Sequence: Synthetic oligonucleotide
  Sense strand starting at position 1929 of SEQ ID NO: 1888567
gaaagaggcacguagcaau

SEQ ID NO: 2542193 - RNA, 19 nt, Artificial Sequence
  Description of Artificial Sequence: Synthetic oligonucleotide
  Antisense strand to SEQ ID NO: 2542192
auugcuacgugccucuuuc

SEQ ID NO: 2542194 - RNA, 19 nt, Artificial Sequence
  Description of Artificial Sequence: Synthetic oligonucleotide
  Sense strand starting at position 3637 of SEQ ID NO: 1888567
uugguaugagauugaagca

SEQ ID NO: 2542195 - RNA, 19 nt, Artificial Sequence
  Description of Artificial Sequence: Synthetic oligonucleotide
  Antisense strand to SEQ ID NO: 2542194
ugcuucaaucucauaccaa

SEQ ID NO: 2542196 - RNA, 19 nt, Artificial Sequence
  Description of Artificial Sequence: Synthetic oligonucleotide
  Sense strand starting at position 3044 of SEQ ID NO: 1888567
uucuuuguggcccagaaca

SEQ ID NO: 2542197 - RNA, 19 nt, Artificial Sequence
  Description of Artificial Sequence: Synthetic oligonucleotide
  Antisense strand to SEQ ID NO: 2542196
uguucugggccacaaagaa

SEQ ID NO: 2542198 - RNA, 19 nt, Artificial Sequence
  Description of Artificial Sequence: Synthetic oligonucleotide
  Sense strand starting at position 257 of SEQ ID NO: 1888567
cugucucaccuggaucagu

SEQ ID NO: 2542199 - RNA, 19 nt, Artificial Sequence
  Description of Artificial Sequence: Synthetic oligonucleotide
  Antisense strand to SEQ ID NO: 2542198
acugauccaggugagacag

SEQ ID NO: 2542200 - RNA, 19 nt, Artificial Sequence
  Description of Artificial Sequence: Synthetic oligonucleotide
  Sense strand starting at position 2783 of SEQ ID NO: 1888567
ccaggagugcuauagucau

SEQ ID NO: 2542201 - RNA, 19 nt, Artificial Sequence
  Description of Artificial Sequence: Synthetic oligonucleotide
  Antisense strand to SEQ ID NO: 2542200
augacuauagcacuccugg

SEQ ID NO: 2542202 - RNA, 19 nt, Artificial Sequence
  Description of Artificial Sequence: Synthetic oligonucleotide
  Sense strand starting at position 3631 of SEQ ID NO: 1888567
aaggccuugguaugagauu

SEQ ID NO: 2542203 - RNA, 19 nt, Artificial Sequence
  Description of Artificial Sequence: Synthetic oligonucleotide
  Antisense strand to SEQ ID NO: 2542202
aaucucauaccaaggccuu

SEQ ID NO: 2542204 - RNA, 19 nt, Artificial Sequence
  Description of Artificial Sequence: Synthetic oligonucleotide
  Sense strand starting at position 1207 of SEQ ID NO: 1888567
guguguugacuuuauaacu

SEQ ID NO: 2542205 - RNA, 19 nt, Artificial Sequence
  Description of Artificial Sequence: Synthetic oligonucleotide
  Antisense strand to SEQ ID NO: 2542204
aguuauaaagucaacacac

SEQ ID NO: 2542206 - RNA, 19 nt, Artificial Sequence
  Description of Artificial Sequence: Synthetic oligonucleotide
  Sense strand starting at position 3429 of SEQ ID NO: 1888567
uuccguguugcgucgagau

SEQ ID NO: 2542207 - RNA, 19 nt, Artificial Sequence
  Description of Artificial Sequence: Synthetic oligonucleotide
  Antisense strand to SEQ ID NO: 2542206
aucucgacgcaacacggaa

SEQ ID NO: 2542208 - RNA, 19 nt, Artificial Sequence
  Description of Artificial Sequence: Synthetic oligonucleotide
  Sense strand starting at position 1878 of SEQ ID NO: 1888567
ccagaauaguugucaguca

SEQ ID NO: 2542209 - RNA, 19 nt, Artificial Sequence
  Description of Artificial Sequence: Synthetic oligonucleotide
  Antisense strand to SEQ ID NO: 2542208
ugacugacaacuauucugg

SEQ ID NO: 2542210 - RNA, 19 nt, Artificial Sequence
  Description of Artificial Sequence: Synthetic oligonucleotide
  Sense strand starting at position 3447 of SEQ ID NO: 1888567
ugccaccaagaguguaaau

SEQ ID NO: 2542211 - RNA, 19 nt, Artificial Sequence
  Description of Artificial Sequence: Synthetic oligonucleotide
  Antisense strand to SEQ ID NO: 2542210
auuuacacucuugguggca

SEQ ID NO: 2542212 - RNA, 19 nt, Artificial Sequence
  Description of Artificial Sequence: Synthetic oligonucleotide
  Sense strand starting at position 3384 of SEQ ID NO: 1888567
ucuccagcugguugaauaa

SEQ ID NO: 2542213 - RNA, 19 nt, Artificial Sequence
  Description of Artificial Sequence: Synthetic oligonucleotide
  Antisense strand to SEQ ID NO: 2542212
uuauucaaccagcuggaga

SEQ ID NO: 2542214 - RNA, 19 nt, Artificial Sequence
  Description of Artificial Sequence: Synthetic oligonucleotide
  Sense strand starting at position 2047 of SEQ ID NO: 1888567
uauguuuaagugugaacac

SEQ ID NO: 2542215 - RNA, 19 nt, Artificial Sequence
  Description of Artificial Sequence: Synthetic oligonucleotide
  Antisense strand to SEQ ID NO: 2542214
guguucacacuuaaacaua

SEQ ID NO: 2542216 - RNA, 19 nt, Artificial Sequence
  Description of Artificial Sequence: Synthetic oligonucleotide
  Sense strand starting at position 2789 of SEQ ID NO: 1888567
gugcuauagucauuaaggg

SEQ ID NO: 2542217 - RNA, 19 nt, Artificial Sequence
  Description of Artificial Sequence: Synthetic oligonucleotide
  Antisense strand to SEQ ID NO: 2542216
cccuuaaugacuauagcac

SEQ ID NO: 2542218 - RNA, 19 nt, Artificial Sequence
  Description of Artificial Sequence: Synthetic oligonucleotide
  Sense strand starting at position 3107 of SEQ ID NO: 1888567
gaaggugugacuugccaca

SEQ ID NO: 2542219 - RNA, 19 nt, Artificial Sequence
  Description of Artificial Sequence: Synthetic oligonucleotide
  Antisense strand to SEQ ID NO: 2542218
uguggcaagucacaccuuc

SEQ ID NO: 2542220 - RNA, 19 nt, Artificial Sequence
  Description of Artificial Sequence: Synthetic oligonucleotide
  Sense strand starting at position 3383 of SEQ ID NO: 1888567
cucuccagcugguugaaua

SEQ ID NO: 2542221 - RNA, 19 nt, Artificial Sequence
  Description of Artificial Sequence: Synthetic oligonucleotide
  Antisense strand to SEQ ID NO: 2542220
uauucaaccagcuggagag

SEQ ID NO: 2542222 - RNA, 19 nt, Artificial Sequence
  Description of Artificial Sequence: Synthetic oligonucleotide
  Sense strand starting at position 255 of SEQ ID NO: 1888567
ggcugucucaccuggauca

SEQ ID NO: 2542223 - RNA, 19 nt, Artificial Sequence
  Description of Artificial Sequence: Synthetic oligonucleotide
  Antisense strand to SEQ ID NO: 2542222
ugauccaggugagacagcc

SEQ ID NO: 2542224 - RNA, 19 nt, Artificial Sequence
  Description of Artificial Sequence: Synthetic oligonucleotide
  Sense strand starting at position 2435 of SEQ ID NO: 1888567
aucguaagguccuucugau

SEQ ID NO: 2542225 - RNA, 19 nt, Artificial Sequence
  Description of Artificial Sequence: Synthetic oligonucleotide
  Antisense strand to SEQ ID NO: 2542224
aucagaaggaccuuacgau

SEQ ID NO: 2542226 - RNA, 19 nt, Artificial Sequence
  Description of Artificial Sequence: Synthetic oligonucleotide
  Sense strand starting at position 3303 of SEQ ID NO: 1888567
uggugugaccaugggcauu

SEQ ID NO: 2542227 - RNA, 19 nt, Artificial Sequence
  Description of Artificial Sequence: Synthetic oligonucleotide
  Antisense strand to SEQ ID NO: 2542226
aaugcccauggucacacca

SEQ ID NO: 2542228 - RNA, 19 nt, Artificial Sequence
  Description of Artificial Sequence: Synthetic oligonucleotide
  Sense strand starting at position 3773 of SEQ ID NO: 1888567
ugcaguguugcagauaagu

SEQ ID NO: 2542229 - RNA, 19 nt, Artificial Sequence
  Description of Artificial Sequence: Synthetic oligonucleotide
  Antisense strand to SEQ ID NO: 2542228
acuuaucugcaacacugca

SEQ ID NO: 2542230 - RNA, 19 nt, Artificial Sequence
  Description of Artificial Sequence: Synthetic oligonucleotide
  Sense strand starting at position 268 of SEQ ID NO: 1888567
ggaucaguguugccuucca

SEQ ID NO: 2542231 - RNA, 19 nt, Artificial Sequence
  Description of Artificial Sequence: Synthetic oligonucleotide
  Antisense strand to SEQ ID NO: 2542230
uggaaggcaacacugaucc

SEQ ID NO: 2542232 - RNA, 19 nt, Artificial Sequence
  Description of Artificial Sequence: Synthetic oligonucleotide
  Sense strand starting at position 99 of SEQ ID NO: 1888567
gcucacgugaccuagugua

SEQ ID NO: 2542233 - RNA, 19 nt, Artificial Sequence
  Description of Artificial Sequence: Synthetic oligonucleotide
  Antisense strand to SEQ ID NO: 2542232
uacacuaggucacgugagc

SEQ ID NO: 2542234 - RNA, 19 nt, Artificial Sequence
  Description of Artificial Sequence: Synthetic oligonucleotide
  Sense strand starting at position 3938 of SEQ ID NO: 1888567
gcugguaaaugugugguga

SEQ ID NO: 2542235 - RNA, 19 nt, Artificial Sequence
  Description of Artificial Sequence: Synthetic oligonucleotide
  Antisense strand to SEQ ID NO: 2542234
ucaccacacauuuaccagc

SEQ ID NO: 2542236 - RNA, 19 nt, Artificial Sequence
  Description of Artificial Sequence: Synthetic oligonucleotide
  Sense strand starting at position 3042 of SEQ ID NO: 1888567
gcuucuuuguggcccagaa

SEQ ID NO: 2542237 - RNA, 19 nt, Artificial Sequence
  Description of Artificial Sequence: Synthetic oligonucleotide
  Antisense strand to SEQ ID NO: 2542236
uucugggccacaaagaagc

SEQ ID NO: 2542238 - RNA, 19 nt, Artificial Sequence
  Description of Artificial Sequence: Synthetic oligonucleotide
  Sense strand starting at position 3601 of SEQ ID NO: 1888567
aguuucuuccuguguccaa

SEQ ID NO: 2542239 - RNA, 19 nt, Artificial Sequence
  Description of Artificial Sequence: Synthetic oligonucleotide
  Antisense strand to SEQ ID NO: 2542238
uuggacacaggaagaaacu

SEQ ID NO: 2542240 - RNA, 19 nt, Artificial Sequence
  Description of Artificial Sequence: Synthetic oligonucleotide
  Sense strand starting at position 3166 of SEQ ID NO: 1888567
guaucucugucucugugau

SEQ ID NO: 2542241 - RNA, 19 nt, Artificial Sequence
  Description of Artificial Sequence: Synthetic oligonucleotide
  Antisense strand to SEQ ID NO: 2542240
aucacagagacagagauac

SEQ ID NO: 2542242 - RNA, 19 nt, Artificial Sequence
  Description of Artificial Sequence: Synthetic oligonucleotide
  Sense strand starting at position 1133 of SEQ ID NO: 1888567
cggcuuguuccucaaagcu

SEQ ID NO: 2542243 - RNA, 19 nt, Artificial Sequence
  Description of Artificial Sequence: Synthetic oligonucleotide
  Antisense strand to SEQ ID NO: 2542242
agcuuugaggaacaagccg

SEQ ID NO: 2542244 - RNA, 19 nt, Artificial Sequence
  Description of Artificial Sequence: Synthetic oligonucleotide
  Sense strand starting at position 3711 of SEQ ID NO: 1888567
ucuguugcuugccuagaua

SEQ ID NO: 2542245 - RNA, 19 nt, Artificial Sequence
  Description of Artificial Sequence: Synthetic oligonucleotide
  Antisense strand to SEQ ID NO: 2542244
uaucuaggcaagcaacaga

SEQ ID NO: 2542246 - RNA, 19 nt, Artificial Sequence
  Description of Artificial Sequence: Synthetic oligonucleotide
  Sense strand starting at position 3492 of SEQ ID NO: 1888568
gagaguuugguucagaggu

SEQ ID NO: 2542247 - RNA, 19 nt, Artificial Sequence
  Description of Artificial Sequence: Synthetic oligonucleotide
  Antisense strand to SEQ ID NO: 2542246
accucugaaccaaacucuc

SEQ ID NO: 2542248 - RNA, 19 nt, Artificial Sequence
  Description of Artificial Sequence: Synthetic oligonucleotide
  Sense strand starting at position 3490 of SEQ ID NO: 1888568
augagaguuugguucagag

SEQ ID NO: 2542249 - RNA, 19 nt, Artificial Sequence
  Description of Artificial Sequence: Synthetic oligonucleotide
  Antisense strand to SEQ ID NO: 2542248
cucugaaccaaacucucau

SEQ ID NO: 2542250 - RNA, 19 nt, Artificial Sequence
  Description of Artificial Sequence: Synthetic oligonucleotide
  Sense strand starting at position 2972 of SEQ ID NO: 1888568
accagagagugaucucuuu

SEQ ID NO: 2542251 - RNA, 19 nt, Artificial Sequence
  Description of Artificial Sequence: Synthetic oligonucleotide
  Antisense strand to SEQ ID NO: 2542250
aaagagaucacucucuggu

SEQ ID NO: 2542252 - RNA, 19 nt, Artificial Sequence
  Description of Artificial Sequence: Synthetic oligonucleotide
  Sense strand starting at position 2066 of SEQ ID NO: 1888568
agguuagguuucccaaaga

SEQ ID NO: 2542253 - RNA, 19 nt, Artificial Sequence
  Description of Artificial Sequence: Synthetic oligonucleotide
  Antisense strand to SEQ ID NO: 2542252
ucuuugggaaaccuaaccu

SEQ ID NO: 2542254 - RNA, 19 nt, Artificial Sequence
  Description of Artificial Sequence: Synthetic oligonucleotide
  Sense strand starting at position 2065 of SEQ ID NO: 1888568
gagguuagguuucccaaag

SEQ ID NO: 2542255 - RNA, 19 nt, Artificial Sequence
  Description of Artificial Sequence: Synthetic oligonucleotide
  Antisense strand to SEQ ID NO: 2542254
cuuugggaaaccuaaccuc

SEQ ID NO: 2542256 - RNA, 19 nt, Artificial Sequence
  Description of Artificial Sequence: Synthetic oligonucleotide
  Sense strand starting at position 2992 of SEQ ID NO: 1888568
ccgcguugcaguuuacaca

SEQ ID NO: 2542257 - RNA, 19 nt, Artificial Sequence
  Description of Artificial Sequence: Synthetic oligonucleotide
  Antisense strand to SEQ ID NO: 2542256
uguguaaacugcaacgcgg

SEQ ID NO: 2542258 - RNA, 19 nt, Artificial Sequence
  Description of Artificial Sequence: Synthetic oligonucleotide
  Sense strand starting at position 3128 of SEQ ID NO: 1888568
ggucuuggugccuaaggaa

SEQ ID NO: 2542259 - RNA, 19 nt, Artificial Sequence
  Description of Artificial Sequence: Synthetic oligonucleotide
  Antisense strand to SEQ ID NO: 2542258
uuccuuaggcaccaagacc

SEQ ID NO: 2542260 - RNA, 19 nt, Artificial Sequence
  Description of Artificial Sequence: Synthetic oligonucleotide
  Sense strand starting at position 3969 of SEQ ID NO: 1888568
ggagcagucccagguaaag

SEQ ID NO: 2542261 - RNA, 19 nt, Artificial Sequence
  Description of Artificial Sequence: Synthetic oligonucleotide
  Antisense strand to SEQ ID NO: 2542260
cuuuaccugggacugcucc

SEQ ID NO: 2542262 - RNA, 19 nt, Artificial Sequence
  Description of Artificial Sequence: Synthetic oligonucleotide
  Sense strand starting at position 3791 of SEQ ID NO: 1888568
gccaaaguguaaccuggaa

SEQ ID NO: 2542263 - RNA, 19 nt, Artificial Sequence
  Description of Artificial Sequence: Synthetic oligonucleotide
  Antisense strand to SEQ ID NO: 2542262
uuccagguuacacuuuggc

SEQ ID NO: 2542264 - RNA, 19 nt, Artificial Sequence
  Description of Artificial Sequence: Synthetic oligonucleotide
  Sense strand starting at position 2827 of SEQ ID NO: 1888568
gugcuuugggccuagagga

SEQ ID NO: 2542265 - RNA, 19 nt, Artificial Sequence
  Description of Artificial Sequence: Synthetic oligonucleotide
  Antisense strand to SEQ ID NO: 2542264
uccucuaggcccaaagcac

SEQ ID NO: 2542266 - RNA, 19 nt, Artificial Sequence
  Description of Artificial Sequence: Synthetic oligonucleotide
  Sense strand starting at position 2499 of SEQ ID NO: 1888568
acuacaguuucugucucaa

SEQ ID NO: 2542267 - RNA, 19 nt, Artificial Sequence
  Description of Artificial Sequence: Synthetic oligonucleotide
  Antisense strand to SEQ ID NO: 2542266
uugagacagaaacuguagu

SEQ ID NO: 2542268 - RNA, 19 nt, Artificial Sequence
  Description of Artificial Sequence: Synthetic oligonucleotide
  Sense strand starting at position 2205 of SEQ ID NO: 1888568
uuauccuguuccuccuaga

SEQ ID NO: 2542269 - RNA, 19 nt, Artificial Sequence
  Description of Artificial Sequence: Synthetic oligonucleotide
  Antisense strand to SEQ ID NO: 2542268
ucuaggaggaacaggauaa

SEQ ID NO: 2542270 - RNA, 19 nt, Artificial Sequence
  Description of Artificial Sequence: Synthetic oligonucleotide
  Sense strand starting at position 2888 of SEQ ID NO: 1888568
cacagaugcccuuggcuga

SEQ ID NO: 2542271 - RNA, 19 nt, Artificial Sequence
  Description of Artificial Sequence: Synthetic oligonucleotide
  Antisense strand to SEQ ID NO: 2542270
ucagccaagggcaucugug

SEQ ID NO: 2542272 - RNA, 19 nt, Artificial Sequence
  Description of Artificial Sequence: Synthetic oligonucleotide
  Sense strand starting at position 3839 of SEQ ID NO: 1888568
ccguuagaguugagggaga

SEQ ID NO: 2542273 - RNA, 19 nt, Artificial Sequence
  Description of Artificial Sequence: Synthetic oligonucleotide
  Antisense strand to SEQ ID NO: 2542272
ucucccucaacucuaacgg

SEQ ID NO: 2542274 - RNA, 19 nt, Artificial Sequence
  Description of Artificial Sequence: Synthetic oligonucleotide
  Sense strand starting at position 2547 of SEQ ID NO: 1888568
ucuuguccacacugcuaua

SEQ ID NO: 2542275 - RNA, 19 nt, Artificial Sequence
  Description of Artificial Sequence: Synthetic oligonucleotide
  Antisense strand to SEQ ID NO: 2542274
uauagcaguguggacaaga

SEQ ID NO: 2542276 - RNA, 19 nt, Artificial Sequence
  Description of Artificial Sequence: Synthetic oligonucleotide
  Sense strand starting at position 1990 of SEQ ID NO: 1888568
ccagaaguccugugcuuac

SEQ ID NO: 2542277 - RNA, 19 nt, Artificial Sequence
  Description of Artificial Sequence: Synthetic oligonucleotide
  Antisense strand to SEQ ID NO: 2542276
guaagcacaggacuucugg

SEQ ID NO: 2542278 - RNA, 19 nt, Artificial Sequence
  Description of Artificial Sequence: Synthetic oligonucleotide
  Sense strand starting at position 2780 of SEQ ID NO: 1888568
cagggauccucccagauua

SEQ ID NO: 2542279 - RNA, 19 nt, Artificial Sequence
  Description of Artificial Sequence: Synthetic oligonucleotide
  Antisense strand to SEQ ID NO: 2542278
uaaucugggaggaucccug

SEQ ID NO: 2542280 - RNA, 19 nt, Artificial Sequence
  Description of Artificial Sequence: Synthetic oligonucleotide
  Sense strand starting at position 3591 of SEQ ID NO: 1888568
gagucugcaguuuggcaau

SEQ ID NO: 2542281 - RNA, 19 nt, Artificial Sequence
  Description of Artificial Sequence: Synthetic oligonucleotide
  Antisense strand to SEQ ID NO: 2542280
auugccaaacugcagacuc

SEQ ID NO: 2542282 - RNA, 19 nt, Artificial Sequence
  Description of Artificial Sequence: Synthetic oligonucleotide
  Sense strand starting at position 3517 of SEQ ID NO: 1888568
gcaagaaaguccgcugcau

SEQ ID NO: 2542283 - RNA, 19 nt, Artificial Sequence
  Description of Artificial Sequence: Synthetic oligonucleotide
  Antisense strand to SEQ ID NO: 2542282
augcagcggacuuucuugc

SEQ ID NO: 2542284 - RNA, 19 nt, Artificial Sequence
  Description of Artificial Sequence: Synthetic oligonucleotide
  Sense strand starting at position 3494 of SEQ ID NO: 1888568
gaguuugguucagagguca

SEQ ID NO: 2542285 - RNA, 19 nt, Artificial Sequence
  Description of Artificial Sequence: Synthetic oligonucleotide
  Antisense strand to SEQ ID NO: 2542284
ugaccucugaaccaaacuc

SEQ ID NO: 2542286 - RNA, 19 nt, Artificial Sequence
  Description of Artificial Sequence: Synthetic oligonucleotide
  Sense strand starting at position 3840 of SEQ ID NO: 1888568
cguuagaguugagggagaa

SEQ ID NO: 2542287 - RNA, 19 nt, Artificial Sequence
  Description of Artificial Sequence: Synthetic oligonucleotide
  Antisense strand to SEQ ID NO: 2542286
uucucccucaacucuaacg

SEQ ID NO: 2542288 - RNA, 19 nt, Artificial Sequence
  Description of Artificial Sequence: Synthetic oligonucleotide
  Sense strand starting at position 3488 of SEQ ID NO: 1888568
ggaugagaguuugguucag

SEQ ID NO: 2542289 - RNA, 19 nt, Artificial Sequence
  Description of Artificial Sequence: Synthetic oligonucleotide
  Antisense strand to SEQ ID NO: 2542288
cugaaccaaacucucaucc

SEQ ID NO: 2542290 - RNA, 19 nt, Artificial Sequence
  Description of Artificial Sequence: Synthetic oligonucleotide
  Sense strand starting at position 3221 of SEQ ID NO: 1888568
aagccagccuugggauuaa

SEQ ID NO: 2542291 - RNA, 19 nt, Artificial Sequence
  Description of Artificial Sequence: Synthetic oligonucleotide
  Antisense strand to SEQ ID NO: 2542290
uuaaucccaaggcuggcuu

SEQ ID NO: 2542292 - RNA, 19 nt, Artificial Sequence
  Description of Artificial Sequence: Synthetic oligonucleotide
  Sense strand starting at position 3450 of SEQ ID NO: 1888568
cugguaguguccuaggguu

SEQ ID NO: 2542293 - RNA, 19 nt, Artificial Sequence
  Description of Artificial Sequence: Synthetic oligonucleotide
  Antisense strand to SEQ ID NO: 2542292
aacccuaggacacuaccag

SEQ ID NO: 2542294 - RNA, 19 nt, Artificial Sequence
  Description of Artificial Sequence: Synthetic oligonucleotide
  Sense strand starting at position 3331 of SEQ ID NO: 1888569
cuaggaccuccugagcaau

SEQ ID NO: 2542295 - RNA, 19 nt, Artificial Sequence
  Description of Artificial Sequence: Synthetic oligonucleotide
  Antisense strand to SEQ ID NO: 2542294
auugcucaggagguccuag

SEQ ID NO: 2542296 - RNA, 19 nt, Artificial Sequence
  Description of Artificial Sequence: Synthetic oligonucleotide
  Sense strand starting at position 797 of SEQ ID NO: 1888569
ucaaauggcccauaaaguu

SEQ ID NO: 2542297 - RNA, 19 nt, Artificial Sequence
  Description of Artificial Sequence: Synthetic oligonucleotide
  Antisense strand to SEQ ID NO: 2542296
aacuuuaugggccauuuga

SEQ ID NO: 2542298 - RNA, 19 nt, Artificial Sequence
  Description of Artificial Sequence: Synthetic oligonucleotide
  Sense strand starting at position 1780 of SEQ ID NO: 1888569
agaguaaauacaggacgua

SEQ ID NO: 2542299 - RNA, 19 nt, Artificial Sequence
  Description of Artificial Sequence: Synthetic oligonucleotide
  Antisense strand to SEQ ID NO: 2542298
uacguccuguauuuacucu

SEQ ID NO: 2542300 - RNA, 19 nt, Artificial Sequence
  Description of Artificial Sequence: Synthetic oligonucleotide
  Sense strand starting at position 1090 of SEQ ID NO: 1888569
gaguacauaugcccaagaa

SEQ ID NO: 2542301 - RNA, 19 nt, Artificial Sequence
  Description of Artificial Sequence: Synthetic oligonucleotide
  Antisense strand to SEQ ID NO: 2542300
uucuugggcauauguacuc

SEQ ID NO: 2542302 - RNA, 19 nt, Artificial Sequence
  Description of Artificial Sequence: Synthetic oligonucleotide
  Sense strand starting at position 3681 of SEQ ID NO: 1888569
ucaagagcccucugaaaug

SEQ ID NO: 2542303 - RNA, 19 nt, Artificial Sequence
  Description of Artificial Sequence: Synthetic oligonucleotide
  Antisense strand to SEQ ID NO: 2542302
cauuucagagggcucuuga

SEQ ID NO: 2542304 - RNA, 19 nt, Artificial Sequence
  Description of Artificial Sequence: Synthetic oligonucleotide
  Sense strand starting at position 1008 of SEQ ID NO: 1888569
cucgaaugguaucuaggaa

SEQ ID NO: 2542305 - RNA, 19 nt, Artificial Sequence
  Description of Artificial Sequence: Synthetic oligonucleotide
  Antisense strand to SEQ ID NO: 2542304
uuccuagauaccauucgag

SEQ ID NO: 2542306 - RNA, 19 nt, Artificial Sequence
  Description of Artificial Sequence: Synthetic oligonucleotide
  Sense strand starting at position 98 of SEQ ID NO: 1888569
caguuaagaggaugcuaca

SEQ ID NO: 2542307 - RNA, 19 nt, Artificial Sequence
  Description of Artificial Sequence: Synthetic oligonucleotide
  Antisense strand to SEQ ID NO: 2542306
uguagcauccucuuaacug

SEQ ID NO: 2542308 - RNA, 19 nt, Artificial Sequence
  Description of Artificial Sequence: Synthetic oligonucleotide
  Sense strand starting at position 3602 of SEQ ID NO: 1888569
ggguccuagagguggaauu

SEQ ID NO: 2542309 - RNA, 19 nt, Artificial Sequence
  Description of Artificial Sequence: Synthetic oligonucleotide
  Antisense strand to SEQ ID NO: 2542308
aauuccaccucuaggaccc

SEQ ID NO: 2542310 - RNA, 19 nt, Artificial Sequence
  Description of Artificial Sequence: Synthetic oligonucleotide
  Sense strand starting at position 96 of SEQ ID NO: 1888569
gccaguuaagaggaugcua

SEQ ID NO: 2542311 - RNA, 19 nt, Artificial Sequence
  Description of Artificial Sequence: Synthetic oligonucleotide
  Antisense strand to SEQ ID NO: 2542310
uagcauccucuuaacuggc

SEQ ID NO: 2542312 - RNA, 19 nt, Artificial Sequence
  Description of Artificial Sequence: Synthetic oligonucleotide
  Sense strand starting at position 1002 of SEQ ID NO: 1888569
ugggaacucgaaugguauc

SEQ ID NO: 2542313 - RNA, 19 nt, Artificial Sequence
  Description of Artificial Sequence: Synthetic oligonucleotide
  Antisense strand to SEQ ID NO: 2542312
gauaccauucgaguuccca

SEQ ID NO: 2542314 - RNA, 19 nt, Artificial Sequence
  Description of Artificial Sequence: Synthetic oligonucleotide
  Sense strand starting at position 1003 of SEQ ID NO: 1888569
gggaacucgaaugguaucu

SEQ ID NO: 2542315 - RNA, 19 nt, Artificial Sequence
  Description of Artificial Sequence: Synthetic oligonucleotide
  Antisense strand to SEQ ID NO: 2542314
agauaccauucgaguuccc

SEQ ID NO: 2542316 - RNA, 19 nt, Artificial Sequence
  Description of Artificial Sequence: Synthetic oligonucleotide
  Sense strand starting at position 1244 of SEQ ID NO: 1888569
ugcuccgauccacaugaau

SEQ ID NO: 2542317 - RNA, 19 nt, Artificial Sequence
  Description of Artificial Sequence: Synthetic oligonucleotide
  Antisense strand to SEQ ID NO: 2542316
auucauguggaucggagca

SEQ ID NO: 2542318 - RNA, 19 nt, Artificial Sequence
  Description of Artificial Sequence: Synthetic oligonucleotide
  Sense strand starting at position 2934 of SEQ ID NO: 1888569
ugccuuugugcuccgcaga

SEQ ID NO: 2542319 - RNA, 19 nt, Artificial Sequence
  Description of Artificial Sequence: Synthetic oligonucleotide
  Antisense strand to SEQ ID NO: 2542318
ucugcggagcacaaaggca

SEQ ID NO: 2542320 - RNA, 19 nt, Artificial Sequence
  Description of Artificial Sequence: Synthetic oligonucleotide
  Sense strand starting at position 1305 of SEQ ID NO: 1888569
gaggacgucgggcagaauu

SEQ ID NO: 2542321 - RNA, 19 nt, Artificial Sequence
  Description of Artificial Sequence: Synthetic oligonucleotide
  Antisense strand to SEQ ID NO: 2542320
aauucugcccgacguccuc

SEQ ID NO: 2542322 - RNA, 19 nt, Artificial Sequence
  Description of Artificial Sequence: Synthetic oligonucleotide
  Sense strand starting at position 1 of SEQ ID NO: 1888569
agaaaugcacucugauguu

SEQ ID NO: 2542323 - RNA, 19 nt, Artificial Sequence
  Description of Artificial Sequence: Synthetic oligonucleotide
  Antisense strand to SEQ ID NO: 2542322
aacaucagagugcauuucu

SEQ ID NO: 2542324 - RNA, 19 nt, Artificial Sequence
  Description of Artificial Sequence: Synthetic oligonucleotide
  Sense strand starting at position 2539 of SEQ ID NO: 1888569
gaugucucauuggcugaga

SEQ ID NO: 2542325 - RNA, 19 nt, Artificial Sequence
  Description of Artificial Sequence: Synthetic oligonucleotide
  Antisense strand to SEQ ID NO: 2542324
ucucagccaaugagacauc

SEQ ID NO: 2542326 - RNA, 19 nt, Artificial Sequence
  Description of Artificial Sequence: Synthetic oligonucleotide
  Sense strand starting at position 3043 of SEQ ID NO: 1888569
cccaaauugacgugagagu

SEQ ID NO: 2542327 - RNA, 19 nt, Artificial Sequence
  Description of Artificial Sequence: Synthetic oligonucleotide
  Antisense strand to SEQ ID NO: 2542326
acucucacgucaauuuggg

SEQ ID NO: 2542328 - RNA, 19 nt, Artificial Sequence
  Description of Artificial Sequence: Synthetic oligonucleotide
  Sense strand starting at position 1631 of SEQ ID NO: 1888569
uuagguaugugaccuucca

SEQ ID NO: 2542329 - RNA, 19 nt, Artificial Sequence
  Description of Artificial Sequence: Synthetic oligonucleotide
  Antisense strand to SEQ ID NO: 2542328
uggaaggucacauaccuaa

SEQ ID NO: 2542330 - RNA, 19 nt, Artificial Sequence
  Description of Artificial Sequence: Synthetic oligonucleotide
  Sense strand starting at position 205 of SEQ ID NO: 1888569
auguguccugcccaugaca

SEQ ID NO: 2542331 - RNA, 19 nt, Artificial Sequence
  Description of Artificial Sequence: Synthetic oligonucleotide
  Antisense strand to SEQ ID NO: 2542330
ugucaugggcaggacacau

SEQ ID NO: 2542332 - RNA, 19 nt, Artificial Sequence
  Description of Artificial Sequence: Synthetic oligonucleotide
  Sense strand starting at position 1042 of SEQ ID NO: 1888569
ugcccuaugacugagcgau

SEQ ID NO: 2542333 - RNA, 19 nt, Artificial Sequence
  Description of Artificial Sequence: Synthetic oligonucleotide
  Antisense strand to SEQ ID NO: 2542332
aucgcucagucauagggca

SEQ ID NO: 2542334 - RNA, 19 nt, Artificial Sequence
  Description of Artificial Sequence: Synthetic oligonucleotide
  Sense strand starting at position 3651 of SEQ ID NO: 1888569
ucuuguauguaguuugaaa

SEQ ID NO: 2542335 - RNA, 19 nt, Artificial Sequence
  Description of Artificial Sequence: Synthetic oligonucleotide
  Antisense strand to SEQ ID NO: 2542334
uuucaaacuacauacaaga

SEQ ID NO: 2542336 - RNA, 19 nt, Artificial Sequence
  Description of Artificial Sequence: Synthetic oligonucleotide
  Sense strand starting at position 2093 of SEQ ID NO: 1888569
acaugcacggucugaaauu

SEQ ID NO: 2542337 - RNA, 19 nt, Artificial Sequence
  Description of Artificial Sequence: Synthetic oligonucleotide
  Antisense strand to SEQ ID NO: 2542336
aauuucagaccgugcaugu

SEQ ID NO: 2542338 - RNA, 19 nt, Artificial Sequence
  Description of Artificial Sequence: Synthetic oligonucleotide
  Sense strand starting at position 3690 of SEQ ID NO: 1888569
cucugaaauggcugucuac

SEQ ID NO: 2542339 - RNA, 19 nt, Artificial Sequence
  Description of Artificial Sequence: Synthetic oligonucleotide
  Antisense strand to SEQ ID NO: 2542338
guagacagccauuucagag

SEQ ID NO: 2542340 - RNA, 19 nt, Artificial Sequence
  Description of Artificial Sequence: Synthetic oligonucleotide
  Sense strand starting at position 1194 of SEQ ID NO: 1888569
gcauaaauccauuguggug

SEQ ID NO: 2542341 - RNA, 19 nt, Artificial Sequence
  Description of Artificial Sequence: Synthetic oligonucleotide
  Antisense strand to SEQ ID NO: 2542340
caccacaauggauuuaugc

SEQ ID NO: 2542342 - RNA, 19 nt, Artificial Sequence
  Description of Artificial Sequence: Synthetic oligonucleotide
  Sense strand starting at position 2541 of SEQ ID NO: 1888569
ugucucauuggcugagacu

SEQ ID NO: 2542343 - RNA, 19 nt, Artificial Sequence
  Description of Artificial Sequence: Synthetic oligonucleotide
  Antisense strand to SEQ ID NO: 2542342
agucucagccaaugagaca

SEQ ID NO: 2542344 - RNA, 19 nt, Artificial Sequence
  Description of Artificial Sequence: Synthetic oligonucleotide
  Sense strand starting at position 2468 of SEQ ID NO: 1888569
ucgagucagccucauaggu

SEQ ID NO: 2542345 - RNA, 19 nt, Artificial Sequence
  Description of Artificial Sequence: Synthetic oligonucleotide
  Antisense strand to SEQ ID NO: 2542344
accuaugaggcugacucga

SEQ ID NO: 2542346 - RNA, 19 nt, Artificial Sequence
  Description of Artificial Sequence: Synthetic oligonucleotide
  Sense strand starting at position 1012 of SEQ ID NO: 1888569
aaugguaucuaggaaagag

SEQ ID NO: 2542347 - RNA, 19 nt, Artificial Sequence
  Description of Artificial Sequence: Synthetic oligonucleotide
  Antisense strand to SEQ ID NO: 2542346
cucuuuccuagauaccauu

SEQ ID NO: 2542348 - RNA, 19 nt, Artificial Sequence
  Description of Artificial Sequence: Synthetic oligonucleotide
  Sense strand starting at position 645 of SEQ ID NO: 1888569
agcguuguaagcgaaggaa

SEQ ID NO: 2542349 - RNA, 19 nt, Artificial Sequence
  Description of Artificial Sequence: Synthetic oligonucleotide
  Antisense strand to SEQ ID NO: 2542348
uuccuucgcuuacaacgcu

SEQ ID NO: 2542350 - RNA, 19 nt, Artificial Sequence
  Description of Artificial Sequence: Synthetic oligonucleotide
  Sense strand starting at position 1866 of SEQ ID NO: 1888569
gguucucacccuuguuaca

SEQ ID NO: 2542351 - RNA, 19 nt, Artificial Sequence
  Description of Artificial Sequence: Synthetic oligonucleotide
  Antisense strand to SEQ ID NO: 2542350
uguaacaagggugagaacc

SEQ ID NO: 2542352 - RNA, 19 nt, Artificial Sequence
  Description of Artificial Sequence: Synthetic oligonucleotide
  Sense strand starting at position 3318 of SEQ ID NO: 1888569
gcggucaacuucucuagga

SEQ ID NO: 2542353 - RNA, 19 nt, Artificial Sequence
  Description of Artificial Sequence: Synthetic oligonucleotide
  Antisense strand to SEQ ID NO: 2542352
uccuagagaaguugaccgc

SEQ ID NO: 2542354 - RNA, 19 nt, Artificial Sequence
  Description of Artificial Sequence: Synthetic oligonucleotide
  Sense strand starting at position 3081 of SEQ ID NO: 1888569
ucccacuugcugugauaug

SEQ ID NO: 2542355 - RNA, 19 nt, Artificial Sequence
  Description of Artificial Sequence: Synthetic oligonucleotide
  Antisense strand to SEQ ID NO: 2542354
cauaucacagcaaguggga

SEQ ID NO: 2542356 - RNA, 19 nt, Artificial Sequence
  Description of Artificial Sequence: Synthetic oligonucleotide
  Sense strand starting at position 3653 of SEQ ID NO: 1888569
uuguauguaguuugaaagu

SEQ ID NO: 2542357 - RNA, 19 nt, Artificial Sequence
  Description of Artificial Sequence: Synthetic oligonucleotide
  Antisense strand to SEQ ID NO: 2542356
acuuucaaacuacauacaa

SEQ ID NO: 2542358 - RNA, 19 nt, Artificial Sequence
  Description of Artificial Sequence: Synthetic oligonucleotide
  Sense strand starting at position 3612 of SEQ ID NO: 1888569
gguggaauuucaggguuag

SEQ ID NO: 2542359 - RNA, 19 nt, Artificial Sequence
  Description of Artificial Sequence: Synthetic oligonucleotide
  Antisense strand to SEQ ID NO: 2542358
cuaacccugaaauuccacc

SEQ ID NO: 2542360 - RNA, 19 nt, Artificial Sequence
  Description of Artificial Sequence: Synthetic oligonucleotide
  Sense strand starting at position 2666 of SEQ ID NO: 1888569
ggcuuccucucauugucaa

SEQ ID NO: 2542361 - RNA, 19 nt, Artificial Sequence
  Description of Artificial Sequence: Synthetic oligonucleotide
  Antisense strand to SEQ ID NO: 2542360
uugacaaugagaggaagcc

SEQ ID NO: 2542362 - RNA, 19 nt, Artificial Sequence
  Description of Artificial Sequence: Synthetic oligonucleotide
  Sense strand starting at position 3764 of SEQ ID NO: 1888569
ucagguacgucagcuaaau

SEQ ID NO: 2542363 - RNA, 19 nt, Artificial Sequence
  Description of Artificial Sequence: Synthetic oligonucleotide
  Antisense strand to SEQ ID NO: 2542362
auuuagcugacguaccuga

SEQ ID NO: 2542364 - RNA, 19 nt, Artificial Sequence
  Description of Artificial Sequence: Synthetic oligonucleotide
  Sense strand starting at position 3646 of SEQ ID NO: 1888569
gggagucuuguauguaguu

SEQ ID NO: 2542365 - RNA, 19 nt, Artificial Sequence
  Description of Artificial Sequence: Synthetic oligonucleotide
  Antisense strand to SEQ ID NO: 2542364
aacuacauacaagacuccc

SEQ ID NO: 2542366 - RNA, 19 nt, Artificial Sequence
  Description of Artificial Sequence: Synthetic oligonucleotide
  Sense strand starting at position 3542 of SEQ ID NO: 1888569
gggcauaugcgccaaguua

SEQ ID NO: 2542367 - RNA, 19 nt, Artificial Sequence
  Description of Artificial Sequence: Synthetic oligonucleotide
  Antisense strand to SEQ ID NO: 2542366
uaacuuggcgcauaugccc

SEQ ID NO: 2542368 - RNA, 19 nt, Artificial Sequence
  Description of Artificial Sequence: Synthetic oligonucleotide
  Sense strand starting at position 3647 of SEQ ID NO: 1888569
ggagucuuguauguaguuu

SEQ ID NO: 2542369 - RNA, 19 nt, Artificial Sequence
  Description of Artificial Sequence: Synthetic oligonucleotide
  Antisense strand to SEQ ID NO: 2542368
aaacuacauacaagacucc

SEQ ID NO: 2542370 - RNA, 19 nt, Artificial Sequence
  Description of Artificial Sequence: Synthetic oligonucleotide
  Sense strand starting at position 534 of SEQ ID NO: 1888569
guagcuuauugugcuaaga

SEQ ID NO: 2542371 - RNA, 19 nt, Artificial Sequence
  Description of Artificial Sequence: Synthetic oligonucleotide
  Antisense strand to SEQ ID NO: 2542370
ucuuagcacaauaagcuac

SEQ ID NO: 2542372 - RNA, 19 nt, Artificial Sequence
  Description of Artificial Sequence: Synthetic oligonucleotide
  Sense strand starting at position 3693 of SEQ ID NO: 1888569
ugaaauggcugucuacguu

SEQ ID NO: 2542373 - RNA, 19 nt, Artificial Sequence
  Description of Artificial Sequence: Synthetic oligonucleotide
  Antisense strand to SEQ ID NO: 2542372
aacguagacagccauuuca

SEQ ID NO: 2542374 - RNA, 19 nt, Artificial Sequence
  Description of Artificial Sequence: Synthetic oligonucleotide
  Sense strand starting at position 2037 of SEQ ID NO: 1888570
ucagaugugcaugaacaca

SEQ ID NO: 2542375 - RNA, 19 nt, Artificial Sequence
  Description of Artificial Sequence: Synthetic oligonucleotide
  Antisense strand to SEQ ID NO: 2542374
uguguucaugcacaucuga

SEQ ID NO: 2542376 - RNA, 19 nt, Artificial Sequence
  Description of Artificial Sequence: Synthetic oligonucleotide
  Sense strand starting at position 231 of SEQ ID NO: 1888570
gugagugacccauggagga

SEQ ID NO: 2542377 - RNA, 19 nt, Artificial Sequence
  Description of Artificial Sequence: Synthetic oligonucleotide
  Antisense strand to SEQ ID NO: 2542376
uccuccaugggucacucac

SEQ ID NO: 2542378 - RNA, 19 nt, Artificial Sequence
  Description of Artificial Sequence: Synthetic oligonucleotide
  Sense strand starting at position 319 of SEQ ID NO: 1888570
ugugcuaagaccugaggga

SEQ ID NO: 2542379 - RNA, 19 nt, Artificial Sequence
  Description of Artificial Sequence: Synthetic oligonucleotide
  Antisense strand to SEQ ID NO: 2542378
ucccucaggucuuagcaca

SEQ ID NO: 2542380 - RNA, 19 nt, Artificial Sequence
  Description of Artificial Sequence: Synthetic oligonucleotide
  Sense strand starting at position 991 of SEQ ID NO: 1888570
cgagacugaugucuuuaag

SEQ ID NO: 2542381 - RNA, 19 nt, Artificial Sequence
  Description of Artificial Sequence: Synthetic oligonucleotide
  Antisense strand to SEQ ID NO: 2542380
cuuaaagacaucagucucg

SEQ ID NO: 2542382 - RNA, 19 nt, Artificial Sequence
  Description of Artificial Sequence: Synthetic oligonucleotide
  Sense strand starting at position 2245 of SEQ ID NO: 1888570
cugcgaguuacaggaaaca

SEQ ID NO: 2542383 - RNA, 19 nt, Artificial Sequence
  Description of Artificial Sequence: Synthetic oligonucleotide
  Antisense strand to SEQ ID NO: 2542382
uguuuccuguaacucgcag

SEQ ID NO: 2542384 - RNA, 19 nt, Artificial Sequence
  Description of Artificial Sequence: Synthetic oligonucleotide
  Sense strand starting at position 2265 of SEQ ID NO: 1888570
gagcaacagcgcuauuaau

SEQ ID NO: 2542385 - RNA, 19 nt, Artificial Sequence
  Description of Artificial Sequence: Synthetic oligonucleotide
  Antisense strand to SEQ ID NO: 2542384
auuaauagcgcuguugcuc

SEQ ID NO: 2542386 - RNA, 19 nt, Artificial Sequence
  Description of Artificial Sequence: Synthetic oligonucleotide
  Sense strand starting at position 380 of SEQ ID NO: 1888570
ucccuuugaugucugagca

SEQ ID NO: 2542387 - RNA, 19 nt, Artificial Sequence
  Description of Artificial Sequence: Synthetic oligonucleotide
  Antisense strand to SEQ ID NO: 2542386
ugcucagacaucaaaggga

SEQ ID NO: 2542388 - RNA, 19 nt, Artificial Sequence
  Description of Artificial Sequence: Synthetic oligonucleotide
  Sense strand starting at position 997 of SEQ ID NO: 1888570
ugaugucuuuaaggaauga

SEQ ID NO: 2542389 - RNA, 19 nt, Artificial Sequence
  Description of Artificial Sequence: Synthetic oligonucleotide
  Antisense strand to SEQ ID NO: 2542388
ucauuccuuaaagacauca

SEQ ID NO: 2542390 - RNA, 19 nt, Artificial Sequence
  Description of Artificial Sequence: Synthetic oligonucleotide
  Sense strand starting at position 678 of SEQ ID NO: 1888570
gggagagacugaugucuuu

SEQ ID NO: 2542391 - RNA, 19 nt, Artificial Sequence
  Description of Artificial Sequence: Synthetic oligonucleotide
  Antisense strand to SEQ ID NO: 2542390
aaagacaucagucucuccc

SEQ ID NO: 2542392 - RNA, 19 nt, Artificial Sequence
  Description of Artificial Sequence: Synthetic oligonucleotide
  Sense strand starting at position 554 of SEQ ID NO: 1888570
uacaacuccuagugaggau

SEQ ID NO: 2542393 - RNA, 19 nt, Artificial Sequence
  Description of Artificial Sequence: Synthetic oligonucleotide
  Antisense strand to SEQ ID NO: 2542392
auccucacuaggaguugua

SEQ ID NO: 2542394 - RNA, 19 nt, Artificial Sequence
  Description of Artificial Sequence: Synthetic oligonucleotide
  Sense strand starting at position 2274 of SEQ ID NO: 1888570
cgcuauuaauaucacaaug

SEQ ID NO: 2542395 - RNA, 19 nt, Artificial Sequence
  Description of Artificial Sequence: Synthetic oligonucleotide
  Antisense strand to SEQ ID NO: 2542394
cauugugauauuaauagcg

SEQ ID NO: 2542396 - RNA, 19 nt, Artificial Sequence
  Description of Artificial Sequence: Synthetic oligonucleotide
  Sense strand starting at position 512 of SEQ ID NO: 1888570
gcucccagcucaugagaga

SEQ ID NO: 2542397 - RNA, 19 nt, Artificial Sequence
  Description of Artificial Sequence: Synthetic oligonucleotide
  Antisense strand to SEQ ID NO: 2542396
ucucucaugagcugggagc

SEQ ID NO: 2542398 - RNA, 19 nt, Artificial Sequence
  Description of Artificial Sequence: Synthetic oligonucleotide
  Sense strand starting at position 988 of SEQ ID NO: 1888570
ggccgagacugaugucuuu

SEQ ID NO: 2542399 - RNA, 19 nt, Artificial Sequence
  Description of Artificial Sequence: Synthetic oligonucleotide
  Antisense strand to SEQ ID NO: 2542398
aaagacaucagucucggcc

SEQ ID NO: 2542400 - RNA, 19 nt, Artificial Sequence
  Description of Artificial Sequence: Synthetic oligonucleotide
  Sense strand starting at position 2230 of SEQ ID NO: 1888571
guaauaacucaugaguuac

SEQ ID NO: 2542401 - RNA, 19 nt, Artificial Sequence
  Description of Artificial Sequence: Synthetic oligonucleotide
  Antisense strand to SEQ ID NO: 2542400
guaacucaugaguuauuac

SEQ ID NO: 2542402 - RNA, 19 nt, Artificial Sequence
  Description of Artificial Sequence: Synthetic oligonucleotide
  Sense strand starting at position 2629 of SEQ ID NO: 1888571
cgcugucuugaguuuaucu

SEQ ID NO: 2542403 - RNA, 19 nt, Artificial Sequence
  Description of Artificial Sequence: Synthetic oligonucleotide
  Antisense strand to SEQ ID NO: 2542402
agauaaacucaagacagcg

SEQ ID NO: 2542404 - RNA, 19 nt, Artificial Sequence
  Description of Artificial Sequence: Synthetic oligonucleotide
  Sense strand starting at position 2606 of SEQ ID NO: 1888571
cacguauuugcugaaguuu

SEQ ID NO: 2542405 - RNA, 19 nt, Artificial Sequence
  Description of Artificial Sequence: Synthetic oligonucleotide
  Antisense strand to SEQ ID NO: 2542404
aaacuucagcaaauacgug

SEQ ID NO: 2542406 - RNA, 19 nt, Artificial Sequence
  Description of Artificial Sequence: Synthetic oligonucleotide
  Sense strand starting at position 2969 of SEQ ID NO: 1888571
guguguucccugguguuua

SEQ ID NO: 2542407 - RNA, 19 nt, Artificial Sequence
  Description of Artificial Sequence: Synthetic oligonucleotide
  Antisense strand to SEQ ID NO: 2542406
uaaacaccagggaacacac

SEQ ID NO: 2542408 - RNA, 19 nt, Artificial Sequence
  Description of Artificial Sequence: Synthetic oligonucleotide
  Sense strand starting at position 2056 of SEQ ID NO: 1888571
cuggguuugcuacagggaa

SEQ ID NO: 2542409 - RNA, 19 nt, Artificial Sequence
  Description of Artificial Sequence: Synthetic oligonucleotide
  Antisense strand to SEQ ID NO: 2542408
uucccuguagcaaacccag

SEQ ID NO: 2542410 - RNA, 19 nt, Artificial Sequence
  Description of Artificial Sequence: Synthetic oligonucleotide
  Sense strand starting at position 2167 of SEQ ID NO: 1888571
ggugacuuacaggagugua

SEQ ID NO: 2542411 - RNA, 19 nt, Artificial Sequence
  Description of Artificial Sequence: Synthetic oligonucleotide
  Antisense strand to SEQ ID NO: 2542410
uacacuccuguaagucacc

SEQ ID NO: 2542412 - RNA, 19 nt, Artificial Sequence
  Description of Artificial Sequence: Synthetic oligonucleotide
  Sense strand starting at position 2811 of SEQ ID NO: 1888571
uguguauaugaguacauau

SEQ ID NO: 2542413 - RNA, 19 nt, Artificial Sequence
  Description of Artificial Sequence: Synthetic oligonucleotide
  Antisense strand to SEQ ID NO: 2542412
auauguacucauauacaca

SEQ ID NO: 2542414 - RNA, 19 nt, Artificial Sequence
  Description of Artificial Sequence: Synthetic oligonucleotide
  Sense strand starting at position 2637 of SEQ ID NO: 1888571
ugaguuuaucuuuaaagcu

SEQ ID NO: 2542415 - RNA, 19 nt, Artificial Sequence
  Description of Artificial Sequence: Synthetic oligonucleotide
  Antisense strand to SEQ ID NO: 2542414
agcuuuaaagauaaacuca

SEQ ID NO: 2542416 - RNA, 19 nt, Artificial Sequence
  Description of Artificial Sequence: Synthetic oligonucleotide
  Sense strand starting at position 2687 of SEQ ID NO: 1888571
aggaguuuguucucccaaa

SEQ ID NO: 2542417 - RNA, 19 nt, Artificial Sequence
  Description of Artificial Sequence: Synthetic oligonucleotide
  Antisense strand to SEQ ID NO: 2542416
uuugggagaacaaacuccu

SEQ ID NO: 2542418 - RNA, 19 nt, Artificial Sequence
  Description of Artificial Sequence: Synthetic oligonucleotide
  Sense strand starting at position 3735 of SEQ ID NO: 1888571
uucuguuugccucagaaac

SEQ ID NO: 2542419 - RNA, 19 nt, Artificial Sequence
  Description of Artificial Sequence: Synthetic oligonucleotide
  Antisense strand to SEQ ID NO: 2542418
guuucugaggcaaacagaa

SEQ ID NO: 2542420 - RNA, 19 nt, Artificial Sequence
  Description of Artificial Sequence: Synthetic oligonucleotide
  Sense strand starting at position 2596 of SEQ ID NO: 1888571
gucguauuaacacguauuu

SEQ ID NO: 2542421 - RNA, 19 nt, Artificial Sequence
  Description of Artificial Sequence: Synthetic oligonucleotide
  Antisense strand to SEQ ID NO: 2542420
aaauacguguuaauacgac

SEQ ID NO: 2542422 - RNA, 19 nt, Artificial Sequence
  Description of Artificial Sequence: Synthetic oligonucleotide
  Sense strand starting at position 2194 of SEQ ID NO: 1888571
accugaguugguggguaga

SEQ ID NO: 2542423 - RNA, 19 nt, Artificial Sequence
  Description of Artificial Sequence: Synthetic oligonucleotide
  Antisense strand to SEQ ID NO: 2542422
ucuacccaccaacucaggu

SEQ ID NO: 2542424 - RNA, 19 nt, Artificial Sequence
  Description of Artificial Sequence: Synthetic oligonucleotide
  Sense strand starting at position 2688 of SEQ ID NO: 1888571
ggaguuuguucucccaaau

SEQ ID NO: 2542425 - RNA, 19 nt, Artificial Sequence
  Description of Artificial Sequence: Synthetic oligonucleotide
  Antisense strand to SEQ ID NO: 2542424
auuugggagaacaaacucc

SEQ ID NO: 2542426 - RNA, 19 nt, Artificial Sequence
  Description of Artificial Sequence: Synthetic oligonucleotide
  Sense strand starting at position 2685 of SEQ ID NO: 1888571
acaggaguuuguucuccca

SEQ ID NO: 2542427 - RNA, 19 nt, Artificial Sequence
  Description of Artificial Sequence: Synthetic oligonucleotide
  Antisense strand to SEQ ID NO: 2542426
ugggagaacaaacuccugu

SEQ ID NO: 2542428 - RNA, 19 nt, Artificial Sequence
  Description of Artificial Sequence: Synthetic oligonucleotide
  Sense strand starting at position 87 of SEQ ID NO: 1888571
uauaccagccuuggugaua

SEQ ID NO: 2542429 - RNA, 19 nt, Artificial Sequence
  Description of Artificial Sequence: Synthetic oligonucleotide
  Antisense strand to SEQ ID NO: 2542428
uaucaccaaggcugguaua

SEQ ID NO: 2542430 - RNA, 19 nt, Artificial Sequence
  Description of Artificial Sequence: Synthetic oligonucleotide
  Sense strand starting at position 2676 of SEQ ID NO: 1888571
augcuaguaacaggaguuu

SEQ ID NO: 2542431 - RNA, 19 nt, Artificial Sequence
  Description of Artificial Sequence: Synthetic oligonucleotide
  Antisense strand to SEQ ID NO: 2542430
aaacuccuguuacuagcau

SEQ ID NO: 2542432 - RNA, 19 nt, Artificial Sequence
  Description of Artificial Sequence: Synthetic oligonucleotide
  Sense strand starting at position 2636 of SEQ ID NO: 1888571
uugaguuuaucuuuaaagc

SEQ ID NO: 2542433 - RNA, 19 nt, Artificial Sequence
  Description of Artificial Sequence: Synthetic oligonucleotide
  Antisense strand to SEQ ID NO: 2542432
gcuuuaaagauaaacucaa

SEQ ID NO: 2542434 - RNA, 19 nt, Artificial Sequence
  Description of Artificial Sequence: Synthetic oligonucleotide
  Sense strand starting at position 1989 of SEQ ID NO: 1888571
gucuguuguaaauggaacu

SEQ ID NO: 2542435 - RNA, 19 nt, Artificial Sequence
  Description of Artificial Sequence: Synthetic oligonucleotide
  Antisense strand to SEQ ID NO: 2542434
aguuccauuuacaacagac

SEQ ID NO: 2542436 - RNA, 19 nt, Artificial Sequence
  Description of Artificial Sequence: Synthetic oligonucleotide
  Sense strand starting at position 275 of SEQ ID NO: 1888571
gugccuugugugaagcguu

SEQ ID NO: 2542437 - RNA, 19 nt, Artificial Sequence
  Description of Artificial Sequence: Synthetic oligonucleotide
  Antisense strand to SEQ ID NO: 2542436
aacgcuucacacaaggcac

SEQ ID NO: 2542438 - RNA, 19 nt, Artificial Sequence
  Description of Artificial Sequence: Synthetic oligonucleotide
  Sense strand starting at position 2934 of SEQ ID NO: 1888571
uuccuucuucgugaucuua

SEQ ID NO: 2542439 - RNA, 19 nt, Artificial Sequence
  Description of Artificial Sequence: Synthetic oligonucleotide
  Antisense strand to SEQ ID NO: 2542438
uaagaucacgaagaaggaa

SEQ ID NO: 2542440 - RNA, 19 nt, Artificial Sequence
  Description of Artificial Sequence: Synthetic oligonucleotide
  Sense strand starting at position 2222 of SEQ ID NO: 1888571
gcauuugaguaauaacuca

SEQ ID NO: 2542441 - RNA, 19 nt, Artificial Sequence
  Description of Artificial Sequence: Synthetic oligonucleotide
  Antisense strand to SEQ ID NO: 2542440
ugaguuauuacucaaaugc

SEQ ID NO: 2542442 - RNA, 19 nt, Artificial Sequence
  Description of Artificial Sequence: Synthetic oligonucleotide
  Sense strand starting at position 2810 of SEQ ID NO: 1888571
guguguauaugaguacaua

SEQ ID NO: 2542443 - RNA, 19 nt, Artificial Sequence
  Description of Artificial Sequence: Synthetic oligonucleotide
  Antisense strand to SEQ ID NO: 2542442
uauguacucauauacacac

SEQ ID NO: 2542444 - RNA, 19 nt, Artificial Sequence
  Description of Artificial Sequence: Synthetic oligonucleotide
  Sense strand starting at position 3434 of SEQ ID NO: 1888571
uuuguuucccacuguauaa

SEQ ID NO: 2542445 - RNA, 19 nt, Artificial Sequence
  Description of Artificial Sequence: Synthetic oligonucleotide
  Antisense strand to SEQ ID NO: 2542444
uuauacagugggaaacaaa

SEQ ID NO: 2542446 - RNA, 19 nt, Artificial Sequence
  Description of Artificial Sequence: Synthetic oligonucleotide
  Sense strand starting at position 3733 of SEQ ID NO: 1888571
aguucuguuugccucagaa

SEQ ID NO: 2542447 - RNA, 19 nt, Artificial Sequence
  Description of Artificial Sequence: Synthetic oligonucleotide
  Antisense strand to SEQ ID NO: 2542446
uucugaggcaaacagaacu

SEQ ID NO: 2542448 - RNA, 19 nt, Artificial Sequence
  Description of Artificial Sequence: Synthetic oligonucleotide
  Sense strand starting at position 2586 of SEQ ID NO: 1888571
uuuacucauggucguauua

SEQ ID NO: 2542449 - RNA, 19 nt, Artificial Sequence
  Description of Artificial Sequence: Synthetic oligonucleotide
  Antisense strand to SEQ ID NO: 2542448
uaauacgaccaugaguaaa

SEQ ID NO: 2542450 - RNA, 19 nt, Artificial Sequence
  Description of Artificial Sequence: Synthetic oligonucleotide
  Sense strand starting at position 3732 of SEQ ID NO: 1888571
gaguucuguuugccucaga

SEQ ID NO: 2542451 - RNA, 19 nt, Artificial Sequence
  Description of Artificial Sequence: Synthetic oligonucleotide
  Antisense strand to SEQ ID NO: 2542450
ucugaggcaaacagaacuc

SEQ ID NO: 2542452 - RNA, 19 nt, Artificial Sequence
  Description of Artificial Sequence: Synthetic oligonucleotide
  Sense strand starting at position 2626 of SEQ ID NO: 1888571
acucgcugucuugaguuua

SEQ ID NO: 2542453 - RNA, 19 nt, Artificial Sequence
  Description of Artificial Sequence: Synthetic oligonucleotide
  Antisense strand to SEQ ID NO: 2542452
uaaacucaagacagcgagu

SEQ ID NO: 2542454 - RNA, 19 nt, Artificial Sequence
  Description of Artificial Sequence: Synthetic oligonucleotide
  Sense strand starting at position 2728 of SEQ ID NO: 1888571
agauaagggucuuaacuga

SEQ ID NO: 2542455 - RNA, 19 nt, Artificial Sequence
  Description of Artificial Sequence: Synthetic oligonucleotide
  Antisense strand to SEQ ID NO: 2542454
ucaguuaagacccuuaucu

SEQ ID NO: 2542456 - RNA, 19 nt, Artificial Sequence
  Description of Artificial Sequence: Synthetic oligonucleotide
  Sense strand starting at position 2936 of SEQ ID NO: 1888571
ccuucuucgugaucuuauu

SEQ ID NO: 2542457 - RNA, 19 nt, Artificial Sequence
  Description of Artificial Sequence: Synthetic oligonucleotide
  Antisense strand to SEQ ID NO: 2542456
aauaagaucacgaagaagg

SEQ ID NO: 2542458 - RNA, 19 nt, Artificial Sequence
  Description of Artificial Sequence: Synthetic oligonucleotide
  Sense strand starting at position 3730 of SEQ ID NO: 1888571
gggaguucuguuugccuca

SEQ ID NO: 2542459 - RNA, 19 nt, Artificial Sequence
  Description of Artificial Sequence: Synthetic oligonucleotide
  Antisense strand to SEQ ID NO: 2542458
ugaggcaaacagaacuccc

SEQ ID NO: 2542460 - RNA, 19 nt, Artificial Sequence
  Description of Artificial Sequence: Synthetic oligonucleotide
  Sense strand starting at position 2929 of SEQ ID NO: 1888571
agccauuccuucuucguga

SEQ ID NO: 2542461 - RNA, 19 nt, Artificial Sequence
  Description of Artificial Sequence: Synthetic oligonucleotide
  Antisense strand to SEQ ID NO: 2542460
ucacgaagaaggaauggcu

SEQ ID NO: 2542462 - RNA, 19 nt, Artificial Sequence
  Description of Artificial Sequence: Synthetic oligonucleotide
  Sense strand starting at position 2947 of SEQ ID NO: 1888571
aucuuauugguaugugugu

SEQ ID NO: 2542463 - RNA, 19 nt, Artificial Sequence
  Description of Artificial Sequence: Synthetic oligonucleotide
  Antisense strand to SEQ ID NO: 2542462
acacacauaccaauaagau

SEQ ID NO: 2542464 - RNA, 19 nt, Artificial Sequence
  Description of Artificial Sequence: Synthetic oligonucleotide
  Sense strand starting at position 2943 of SEQ ID NO: 1888571
cgugaucuuauugguaugu

SEQ ID NO: 2542465 - RNA, 19 nt, Artificial Sequence
  Description of Artificial Sequence: Synthetic oligonucleotide
  Antisense strand to SEQ ID NO: 2542464
acauaccaauaagaucacg

SEQ ID NO: 2542466 - RNA, 19 nt, Artificial Sequence
  Description of Artificial Sequence: Synthetic oligonucleotide
  Sense strand starting at position 3937 of SEQ ID NO: 1888571
caguuacauuguguuguuu

SEQ ID NO: 2542467 - RNA, 19 nt, Artificial Sequence
  Description of Artificial Sequence: Synthetic oligonucleotide
  Antisense strand to SEQ ID NO: 2542466
aaacaacacaauguaacug

SEQ ID NO: 2542468 - RNA, 19 nt, Artificial Sequence
  Description of Artificial Sequence: Synthetic oligonucleotide
  Sense strand starting at position 2973 of SEQ ID NO: 1888571
guucccugguguuuaaguu

SEQ ID NO: 2542469 - RNA, 19 nt, Artificial Sequence
  Description of Artificial Sequence: Synthetic oligonucleotide
  Antisense strand to SEQ ID NO: 2542468
aacuuaaacaccagggaac

SEQ ID NO: 2542470 - RNA, 19 nt, Artificial Sequence
  Description of Artificial Sequence: Synthetic oligonucleotide
  Sense strand starting at position 2930 of SEQ ID NO: 1888571
gccauuccuucuucgugau

SEQ ID NO: 2542471 - RNA, 19 nt, Artificial Sequence
  Description of Artificial Sequence: Synthetic oligonucleotide
  Antisense strand to SEQ ID NO: 2542470
aucacgaagaaggaauggc

SEQ ID NO: 2542472 - RNA, 19 nt, Artificial Sequence
  Description of Artificial Sequence: Synthetic oligonucleotide
  Sense strand starting at position 2779 of SEQ ID NO: 1888571
acgugugucaaguguacau

SEQ ID NO: 2542473 - RNA, 19 nt, Artificial Sequence
  Description of Artificial Sequence: Synthetic oligonucleotide
  Antisense strand to SEQ ID NO: 2542472
auguacacuugacacacgu

SEQ ID NO: 2542474 - RNA, 19 nt, Artificial Sequence
  Description of Artificial Sequence: Synthetic oligonucleotide
  Sense strand starting at position 2157 of SEQ ID NO: 1888571
ccgguagcccggugacuua

SEQ ID NO: 2542475 - RNA, 19 nt, Artificial Sequence
  Description of Artificial Sequence: Synthetic oligonucleotide
  Antisense strand to SEQ ID NO: 2542474
uaagucaccgggcuaccgg

SEQ ID NO: 2542476 - RNA, 19 nt, Artificial Sequence
  Description of Artificial Sequence: Synthetic oligonucleotide
  Sense strand starting at position 2229 of SEQ ID NO: 1888571
aguaauaacucaugaguua

SEQ ID NO: 2542477 - RNA, 19 nt, Artificial Sequence
  Description of Artificial Sequence: Synthetic oligonucleotide
  Antisense strand to SEQ ID NO: 2542476
uaacucaugaguuauuacu

SEQ ID NO: 2542478 - RNA, 19 nt, Artificial Sequence
  Description of Artificial Sequence: Synthetic oligonucleotide
  Sense strand starting at position 3737 of SEQ ID NO: 1888571
cuguuugccucagaaacaa

SEQ ID NO: 2542479 - RNA, 19 nt, Artificial Sequence
  Description of Artificial Sequence: Synthetic oligonucleotide
  Antisense strand to SEQ ID NO: 2542478
uuguuucugaggcaaacag

SEQ ID NO: 2542480 - RNA, 19 nt, Artificial Sequence
  Description of Artificial Sequence: Synthetic oligonucleotide
  Sense strand starting at position 107 of SEQ ID NO: 1888572
gggcuaauggaaugaugau

SEQ ID NO: 2542481 - RNA, 19 nt, Artificial Sequence
  Description of Artificial Sequence: Synthetic oligonucleotide
  Antisense strand to SEQ ID NO: 2542480
aucaucauuccauuagccc

SEQ ID NO: 2542482 - RNA, 19 nt, Artificial Sequence
  Description of Artificial Sequence: Synthetic oligonucleotide
  Sense strand starting at position 1001 of SEQ ID NO: 1888572
ugguguuaucacgcugcaa

SEQ ID NO: 2542483 - RNA, 19 nt, Artificial Sequence
  Description of Artificial Sequence: Synthetic oligonucleotide
  Antisense strand to SEQ ID NO: 2542482
uugcagcgugauaacacca

SEQ ID NO: 2542484 - RNA, 19 nt, Artificial Sequence
  Description of Artificial Sequence: Synthetic oligonucleotide
  Sense strand starting at position 135 of SEQ ID NO: 1888572
accuuuaacugagcaugga

SEQ ID NO: 2542485 - RNA, 19 nt, Artificial Sequence
  Description of Artificial Sequence: Synthetic oligonucleotide
  Antisense strand to SEQ ID NO: 2542484
uccaugcucaguuaaaggu

SEQ ID NO: 2542486 - RNA, 19 nt, Artificial Sequence
  Description of Artificial Sequence: Synthetic oligonucleotide
  Sense strand starting at position 1119 of SEQ ID NO: 1888572
gcaagcuuucugccuuguu

SEQ ID NO: 2542487 - RNA, 19 nt, Artificial Sequence
  Description of Artificial Sequence: Synthetic oligonucleotide
  Antisense strand to SEQ ID NO: 2542486
aacaaggcagaaagcuugc

SEQ ID NO: 2542488 - RNA, 19 nt, Artificial Sequence
  Description of Artificial Sequence: Synthetic oligonucleotide
  Sense strand starting at position 1156 of SEQ ID NO: 1888572
ggauguuuccauuauuggu

SEQ ID NO: 2542489 - RNA, 19 nt, Artificial Sequence
  Description of Artificial Sequence: Synthetic oligonucleotide
  Antisense strand to SEQ ID NO: 2542488
accaauaauggaaacaucc

SEQ ID NO: 2542490 - RNA, 19 nt, Artificial Sequence
  Description of Artificial Sequence: Synthetic oligonucleotide
  Sense strand starting at position 170 of SEQ ID NO: 1888572
ggcucugucaucgaagaga

SEQ ID NO: 2542491 - RNA, 19 nt, Artificial Sequence
  Description of Artificial Sequence: Synthetic oligonucleotide
  Antisense strand to SEQ ID NO: 2542490
ucucuucgaugacagagcc

SEQ ID NO: 2542492 - RNA, 19 nt, Artificial Sequence
  Description of Artificial Sequence: Synthetic oligonucleotide
  Sense strand starting at position 3748 of SEQ ID NO: 1888572
ugcuuaucgccgucuacuu

SEQ ID NO: 2542493 - RNA, 19 nt, Artificial Sequence
  Description of Artificial Sequence: Synthetic oligonucleotide
  Antisense strand to SEQ ID NO: 2542492
aaguagacggcgauaagca

SEQ ID NO: 2542494 - RNA, 19 nt, Artificial Sequence
  Description of Artificial Sequence: Synthetic oligonucleotide
  Sense strand starting at position 898 of SEQ ID NO: 1888572
aaggcagguuuggcugaaa

SEQ ID NO: 2542495 - RNA, 19 nt, Artificial Sequence
  Description of Artificial Sequence: Synthetic oligonucleotide
  Antisense strand to SEQ ID NO: 2542494
uuucagccaaaccugccuu

SEQ ID NO: 2542496 - RNA, 19 nt, Artificial Sequence
  Description of Artificial Sequence: Synthetic oligonucleotide
  Sense strand starting at position 846 of SEQ ID NO: 1888572
uuguauauuuaccagggau

SEQ ID NO: 2542497 - RNA, 19 nt, Artificial Sequence
  Description of Artificial Sequence: Synthetic oligonucleotide
  Antisense strand to SEQ ID NO: 2542496
aucccugguaaauauacaa

SEQ ID NO: 2542498 - RNA, 19 nt, Artificial Sequence
  Description of Artificial Sequence: Synthetic oligonucleotide
  Sense strand starting at position 113 of SEQ ID NO: 1888572
auggaaugaugauaacaca

SEQ ID NO: 2542499 - RNA, 19 nt, Artificial Sequence
  Description of Artificial Sequence: Synthetic oligonucleotide
  Antisense strand to SEQ ID NO: 2542498
uguguuaucaucauuccau

SEQ ID NO: 2542500 - RNA, 19 nt, Artificial Sequence
  Description of Artificial Sequence: Synthetic oligonucleotide
  Sense strand starting at position 3479 of SEQ ID NO: 1888572
ccuagaccucaucgagcua

SEQ ID NO: 2542501 - RNA, 19 nt, Artificial Sequence
  Description of Artificial Sequence: Synthetic oligonucleotide
  Antisense strand to SEQ ID NO: 2542500
uagcucgaugaggucuagg

SEQ ID NO: 2542502 - RNA, 19 nt, Artificial Sequence
  Description of Artificial Sequence: Synthetic oligonucleotide
  Sense strand starting at position 3193 of SEQ ID NO: 1888572
ccaucuucuucgccaagaa

SEQ ID NO: 2542503 - RNA, 19 nt, Artificial Sequence
  Description of Artificial Sequence: Synthetic oligonucleotide
  Antisense strand to SEQ ID NO: 2542502
uucuuggcgaagaagaugg

SEQ ID NO: 2542504 - RNA, 19 nt, Artificial Sequence
  Description of Artificial Sequence: Synthetic oligonucleotide
  Sense strand starting at position 3394 of SEQ ID NO: 1888572
gcgaguucgccuucgccua

SEQ ID NO: 2542505 - RNA, 19 nt, Artificial Sequence
  Description of Artificial Sequence: Synthetic oligonucleotide
  Antisense strand to SEQ ID NO: 2542504
uaggcgaaggcgaacucgc

SEQ ID NO: 2542506 - RNA, 19 nt, Artificial Sequence
  Description of Artificial Sequence: Synthetic oligonucleotide
  Sense strand starting at position 168 of SEQ ID NO: 1888572
cuggcucugucaucgaaga

SEQ ID NO: 2542507 - RNA, 19 nt, Artificial Sequence
  Description of Artificial Sequence: Synthetic oligonucleotide
  Antisense strand to SEQ ID NO: 2542506
ucuucgaugacagagccag

SEQ ID NO: 2542508 - RNA, 19 nt, Artificial Sequence
  Description of Artificial Sequence: Synthetic oligonucleotide
  Sense strand starting at position 3192 of SEQ ID NO: 1888572
gccaucuucuucgccaaga

SEQ ID NO: 2542509 - RNA, 19 nt, Artificial Sequence
  Description of Artificial Sequence: Synthetic oligonucleotide
  Antisense strand to SEQ ID NO: 2542508
ucuuggcgaagaagauggc

SEQ ID NO: 2542510 - RNA, 19 nt, Artificial Sequence
  Description of Artificial Sequence: Synthetic oligonucleotide
  Sense strand starting at position 692 of SEQ ID NO: 1888572
gaucaacauucugagguga

SEQ ID NO: 2542511 - RNA, 19 nt, Artificial Sequence
  Description of Artificial Sequence: Synthetic oligonucleotide
  Antisense strand to SEQ ID NO: 2542510
ucaccucagaauguugauc

SEQ ID NO: 2542512 - RNA, 19 nt, Artificial Sequence
  Description of Artificial Sequence: Synthetic oligonucleotide
  Sense strand starting at position 3190 of SEQ ID NO: 1888572
gggccaucuucuucgccaa

SEQ ID NO: 2542513 - RNA, 19 nt, Artificial Sequence
  Description of Artificial Sequence: Synthetic oligonucleotide
  Antisense strand to SEQ ID NO: 2542512
uuggcgaagaagauggccc

SEQ ID NO: 2542514 - RNA, 19 nt, Artificial Sequence
  Description of Artificial Sequence: Synthetic oligonucleotide
  Sense strand starting at position 69 of SEQ ID NO: 1888572
ccugcuaugagucgauguu

SEQ ID NO: 2542515 - RNA, 19 nt, Artificial Sequence
  Description of Artificial Sequence: Synthetic oligonucleotide
  Antisense strand to SEQ ID NO: 2542514
aacaucgacucauagcagg

SEQ ID NO: 2542516 - RNA, 19 nt, Artificial Sequence
  Description of Artificial Sequence: Synthetic oligonucleotide
  Sense strand starting at position 694 of SEQ ID NO: 1888572
ucaacauucugaggugaaa

SEQ ID NO: 2542517 - RNA, 19 nt, Artificial Sequence
  Description of Artificial Sequence: Synthetic oligonucleotide
  Antisense strand to SEQ ID NO: 2542516
uuucaccucagaauguuga

SEQ ID NO: 2542518 - RNA, 19 nt, Artificial Sequence
  Description of Artificial Sequence: Synthetic oligonucleotide
  Sense strand starting at position 1153 of SEQ ID NO: 1888572
augggauguuuccauuauu

SEQ ID NO: 2542519 - RNA, 19 nt, Artificial Sequence
  Description of Artificial Sequence: Synthetic oligonucleotide
  Antisense strand to SEQ ID NO: 2542518
aauaauggaaacaucccau

SEQ ID NO: 2542520 - RNA, 19 nt, Artificial Sequence
  Description of Artificial Sequence: Synthetic oligonucleotide
  Sense strand starting at position 678 of SEQ ID NO: 1888572
ggguccuguuuacagauca

SEQ ID NO: 2542521 - RNA, 19 nt, Artificial Sequence
  Description of Artificial Sequence: Synthetic oligonucleotide
  Antisense strand to SEQ ID NO: 2542520
ugaucuguaaacaggaccc

SEQ ID NO: 2542522 - RNA, 19 nt, Artificial Sequence
  Description of Artificial Sequence: Synthetic oligonucleotide
  Sense strand starting at position 1171 of SEQ ID NO: 1888572
uggugaaccucagauuguu

SEQ ID NO: 2542523 - RNA, 19 nt, Artificial Sequence
  Description of Artificial Sequence: Synthetic oligonucleotide
  Antisense strand to SEQ ID NO: 2542522
aacaaucugagguucacca

SEQ ID NO: 2542524 - RNA, 19 nt, Artificial Sequence
  Description of Artificial Sequence: Synthetic oligonucleotide
  Sense strand starting at position 1003 of SEQ ID NO: 1888572
guguuaucacgcugcaagc

SEQ ID NO: 2542525 - RNA, 19 nt, Artificial Sequence
  Description of Artificial Sequence: Synthetic oligonucleotide
  Antisense strand to SEQ ID NO: 2542524
gcuugcagcgugauaacac

SEQ ID NO: 2542526 - RNA, 19 nt, Artificial Sequence
  Description of Artificial Sequence: Synthetic oligonucleotide
  Sense strand starting at position 1162 of SEQ ID NO: 1888572
uuccauuauuggugaaccu

SEQ ID NO: 2542527 - RNA, 19 nt, Artificial Sequence
  Description of Artificial Sequence: Synthetic oligonucleotide
  Antisense strand to SEQ ID NO: 2542526
agguucaccaauaauggaa

SEQ ID NO: 2542528 - RNA, 19 nt, Artificial Sequence
  Description of Artificial Sequence: Synthetic oligonucleotide
  Sense strand starting at position 1251 of SEQ ID NO: 1888572
ccuucugccuuccagaguu

SEQ ID NO: 2542529 - RNA, 19 nt, Artificial Sequence
  Description of Artificial Sequence: Synthetic oligonucleotide
  Antisense strand to SEQ ID NO: 2542528
aacucuggaaggcagaagg

SEQ ID NO: 2542530 - RNA, 19 nt, Artificial Sequence
  Description of Artificial Sequence: Synthetic oligonucleotide
  Sense strand starting at position 1320 of SEQ ID NO: 1888572
ugugcucucuccugagacu

SEQ ID NO: 2542531 - RNA, 19 nt, Artificial Sequence
  Description of Artificial Sequence: Synthetic oligonucleotide
  Antisense strand to SEQ ID NO: 2542530
agucucaggagagagcaca

SEQ ID NO: 2542532 - RNA, 19 nt, Artificial Sequence
  Description of Artificial Sequence: Synthetic oligonucleotide
  Sense strand starting at position 3601 of SEQ ID NO: 1888573
uccaaauuacucuggagau

SEQ ID NO: 2542533 - RNA, 19 nt, Artificial Sequence
  Description of Artificial Sequence: Synthetic oligonucleotide
  Antisense strand to SEQ ID NO: 2542532
aucuccagaguaauuugga

SEQ ID NO: 2542534 - RNA, 19 nt, Artificial Sequence
  Description of Artificial Sequence: Synthetic oligonucleotide
  Sense strand starting at position 1175 of SEQ ID NO: 1888573
ggagacuaucuaugcaaag

SEQ ID NO: 2542535 - RNA, 19 nt, Artificial Sequence
  Description of Artificial Sequence: Synthetic oligonucleotide
  Antisense strand to SEQ ID NO: 2542534
cuuugcauagauagucucc

SEQ ID NO: 2542536 - RNA, 19 nt, Artificial Sequence
  Description of Artificial Sequence: Synthetic oligonucleotide
  Sense strand starting at position 1597 of SEQ ID NO: 1888573
gguagaaucccuggaauua

SEQ ID NO: 2542537 - RNA, 19 nt, Artificial Sequence
  Description of Artificial Sequence: Synthetic oligonucleotide
  Antisense strand to SEQ ID NO: 2542536
uaauuccagggauucuacc

SEQ ID NO: 2542538 - RNA, 19 nt, Artificial Sequence
  Description of Artificial Sequence: Synthetic oligonucleotide
  Sense strand starting at position 2094 of SEQ ID NO: 1888573
aguguagucggcguugaaa

SEQ ID NO: 2542539 - RNA, 19 nt, Artificial Sequence
  Description of Artificial Sequence: Synthetic oligonucleotide
  Antisense strand to SEQ ID NO: 2542538
uuucaacgccgacuacacu

SEQ ID NO: 2542540 - RNA, 19 nt, Artificial Sequence
  Description of Artificial Sequence: Synthetic oligonucleotide
  Sense strand starting at position 2050 of SEQ ID NO: 1888573
gauucuuauugguuaagaa

SEQ ID NO: 2542541 - RNA, 19 nt, Artificial Sequence
  Description of Artificial Sequence: Synthetic oligonucleotide
  Antisense strand to SEQ ID NO: 2542540
uucuuaaccaauaagaauc

SEQ ID NO: 2542542 - RNA, 19 nt, Artificial Sequence
  Description of Artificial Sequence: Synthetic oligonucleotide
  Sense strand starting at position 2049 of SEQ ID NO: 1888573
agauucuuauugguuaaga

SEQ ID NO: 2542543 - RNA, 19 nt, Artificial Sequence
  Description of Artificial Sequence: Synthetic oligonucleotide
  Antisense strand to SEQ ID NO: 2542542
ucuuaaccaauaagaaucu

SEQ ID NO: 2542544 - RNA, 19 nt, Artificial Sequence
  Description of Artificial Sequence: Synthetic oligonucleotide
  Sense strand starting at position 3508 of SEQ ID NO: 1888573
auaguagguguucagauga

SEQ ID NO: 2542545 - RNA, 19 nt, Artificial Sequence
  Description of Artificial Sequence: Synthetic oligonucleotide
  Antisense strand to SEQ ID NO: 2542544
ucaucugaacaccuacuau

SEQ ID NO: 2542546 - RNA, 19 nt, Artificial Sequence
  Description of Artificial Sequence: Synthetic oligonucleotide
  Sense strand starting at position 3513 of SEQ ID NO: 1888573
agguguucagaugauguaa

SEQ ID NO: 2542547 - RNA, 19 nt, Artificial Sequence
  Description of Artificial Sequence: Synthetic oligonucleotide
  Antisense strand to SEQ ID NO: 2542546
uuacaucaucugaacaccu

SEQ ID NO: 2542548 - RNA, 19 nt, Artificial Sequence
  Description of Artificial Sequence: Synthetic oligonucleotide
  Sense strand starting at position 1437 of SEQ ID NO: 1888573
aggccuccucccuaagaca

SEQ ID NO: 2542549 - RNA, 19 nt, Artificial Sequence
  Description of Artificial Sequence: Synthetic oligonucleotide
  Antisense strand to SEQ ID NO: 2542548
ugucuuagggaggaggccu

SEQ ID NO: 2542550 - RNA, 19 nt, Artificial Sequence
  Description of Artificial Sequence: Synthetic oligonucleotide
  Sense strand starting at position 724 of SEQ ID NO: 1888573
uggagaaggugauauuuaa

SEQ ID NO: 2542551 - RNA, 19 nt, Artificial Sequence
  Description of Artificial Sequence: Synthetic oligonucleotide
  Antisense strand to SEQ ID NO: 2542550
uuaaauaucaccuucucca

SEQ ID NO: 2542552 - RNA, 19 nt, Artificial Sequence
  Description of Artificial Sequence: Synthetic oligonucleotide
  Sense strand starting at position 3176 of SEQ ID NO: 1888573
gucccuguuggacagauga

SEQ ID NO: 2542553 - RNA, 19 nt, Artificial Sequence
  Description of Artificial Sequence: Synthetic oligonucleotide
  Antisense strand to SEQ ID NO: 2542552
ucaucuguccaacagggac

SEQ ID NO: 2542554 - RNA, 19 nt, Artificial Sequence
  Description of Artificial Sequence: Synthetic oligonucleotide
  Sense strand starting at position 1683 of SEQ ID NO: 1888573
ugcuacacaucggugauuu

SEQ ID NO: 2542555 - RNA, 19 nt, Artificial Sequence
  Description of Artificial Sequence: Synthetic oligonucleotide
  Antisense strand to SEQ ID NO: 2542554
aaaucaccgauguguagca

SEQ ID NO: 2542556 - RNA, 19 nt, Artificial Sequence
  Description of Artificial Sequence: Synthetic oligonucleotide
  Sense strand starting at position 203 of SEQ ID NO: 1888573
uggaucuguccucaaaccu

SEQ ID NO: 2542557 - RNA, 19 nt, Artificial Sequence
  Description of Artificial Sequence: Synthetic oligonucleotide
  Antisense strand to SEQ ID NO: 2542556
agguuugaggacagaucca

SEQ ID NO: 2542558 - RNA, 19 nt, Artificial Sequence
  Description of Artificial Sequence: Synthetic oligonucleotide
  Sense strand starting at position 1684 of SEQ ID NO: 1888573
gcuacacaucggugauuuc

SEQ ID NO: 2542559 - RNA, 19 nt, Artificial Sequence
  Description of Artificial Sequence: Synthetic oligonucleotide
  Antisense strand to SEQ ID NO: 2542558
gaaaucaccgauguguagc

SEQ ID NO: 2542560 - RNA, 19 nt, Artificial Sequence
  Description of Artificial Sequence: Synthetic oligonucleotide
  Sense strand starting at position 3403 of SEQ ID NO: 1888573
uguguaaucguguucaguu

SEQ ID NO: 2542561 - RNA, 19 nt, Artificial Sequence
  Description of Artificial Sequence: Synthetic oligonucleotide
  Antisense strand to SEQ ID NO: 2542560
aacugaacacgauuacaca

SEQ ID NO: 2542562 - RNA, 19 nt, Artificial Sequence
  Description of Artificial Sequence: Synthetic oligonucleotide
  Sense strand starting at position 3402 of SEQ ID NO: 1888573
cuguguaaucguguucagu

SEQ ID NO: 2542563 - RNA, 19 nt, Artificial Sequence
  Description of Artificial Sequence: Synthetic oligonucleotide
  Antisense strand to SEQ ID NO: 2542562
acugaacacgauuacacag

SEQ ID NO: 2542564 - RNA, 19 nt, Artificial Sequence
  Description of Artificial Sequence: Synthetic oligonucleotide
  Sense strand starting at position 3439 of SEQ ID NO: 1888573
cucugccugggugagaaau

SEQ ID NO: 2542565 - RNA, 19 nt, Artificial Sequence
  Description of Artificial Sequence: Synthetic oligonucleotide
  Antisense strand to SEQ ID NO: 2542564
auuucucacccaggcagag

SEQ ID NO: 2542566 - RNA, 19 nt, Artificial Sequence
  Description of Artificial Sequence: Synthetic oligonucleotide
  Sense strand starting at position 2095 of SEQ ID NO: 1888573
guguagucggcguugaaac

SEQ ID NO: 2542567 - RNA, 19 nt, Artificial Sequence
  Description of Artificial Sequence: Synthetic oligonucleotide
  Antisense strand to SEQ ID NO: 2542566
guuucaacgccgacuacac

SEQ ID NO: 2542568 - RNA, 19 nt, Artificial Sequence
  Description of Artificial Sequence: Synthetic oligonucleotide
  Sense strand starting at position 1595 of SEQ ID NO: 1888573
acgguagaaucccuggaau

SEQ ID NO: 2542569 - RNA, 19 nt, Artificial Sequence
  Description of Artificial Sequence: Synthetic oligonucleotide
  Antisense strand to SEQ ID NO: 2542568
auuccagggauucuaccgu

SEQ ID NO: 2542570 - RNA, 19 nt, Artificial Sequence
  Description of Artificial Sequence: Synthetic oligonucleotide
  Sense strand starting at position 1304 of SEQ ID NO: 1888573
gggucacagccuuaucuga

SEQ ID NO: 2542571 - RNA, 19 nt, Artificial Sequence
  Description of Artificial Sequence: Synthetic oligonucleotide
  Antisense strand to SEQ ID NO: 2542570
ucagauaaggcugugaccc

SEQ ID NO: 2542572 - RNA, 19 nt, Artificial Sequence
  Description of Artificial Sequence: Synthetic oligonucleotide
  Sense strand starting at position 3220 of SEQ ID NO: 1888573
gggaguugggcggaauucu

SEQ ID NO: 2542573 - RNA, 19 nt, Artificial Sequence
  Description of Artificial Sequence: Synthetic oligonucleotide
  Antisense strand to SEQ ID NO: 2542572
agaauuccgcccaacuccc

SEQ ID NO: 2542574 - RNA, 19 nt, Artificial Sequence
  Description of Artificial Sequence: Synthetic oligonucleotide
  Sense strand starting at position 248 of SEQ ID NO: 1888573
cugagcuagcuccaagacu

SEQ ID NO: 2542575 - RNA, 19 nt, Artificial Sequence
  Description of Artificial Sequence: Synthetic oligonucleotide
  Antisense strand to SEQ ID NO: 2542574
agucuuggagcuagcucag

SEQ ID NO: 2542576 - RNA, 19 nt, Artificial Sequence
  Description of Artificial Sequence: Synthetic oligonucleotide
  Sense strand starting at position 74 of SEQ ID NO: 1888573
gguauugcucuccauugaa

SEQ ID NO: 2542577 - RNA, 19 nt, Artificial Sequence
  Description of Artificial Sequence: Synthetic oligonucleotide
  Antisense strand to SEQ ID NO: 2542576
uucaauggagagcaauacc

SEQ ID NO: 2542578 - RNA, 19 nt, Artificial Sequence
  Description of Artificial Sequence: Synthetic oligonucleotide
  Sense strand starting at position 3742 of SEQ ID NO: 1888573
ggcuguagcgugcuaucau

SEQ ID NO: 2542579 - RNA, 19 nt, Artificial Sequence
  Description of Artificial Sequence: Synthetic oligonucleotide
  Antisense strand to SEQ ID NO: 2542578
augauagcacgcuacagcc

SEQ ID NO: 2542580 - RNA, 19 nt, Artificial Sequence
  Description of Artificial Sequence: Synthetic oligonucleotide
  Sense strand starting at position 1482 of SEQ ID NO: 1888573
auuacuauucugggcaauu

SEQ ID NO: 2542581 - RNA, 19 nt, Artificial Sequence
  Description of Artificial Sequence: Synthetic oligonucleotide
  Antisense strand to SEQ ID NO: 2542580
aauugcccagaauaguaau

SEQ ID NO: 2542582 - RNA, 19 nt, Artificial Sequence
  Description of Artificial Sequence: Synthetic oligonucleotide
  Sense strand starting at position 1483 of SEQ ID NO: 1888573
uuacuauucugggcaauug

SEQ ID NO: 2542583 - RNA, 19 nt, Artificial Sequence
  Description of Artificial Sequence: Synthetic oligonucleotide
  Antisense strand to SEQ ID NO: 2542582
caauugcccagaauaguaa

SEQ ID NO: 2542584 - RNA, 19 nt, Artificial Sequence
  Description of Artificial Sequence: Synthetic oligonucleotide
  Sense strand starting at position 3293 of SEQ ID NO: 1888573
cugugugaggguugaaaca

SEQ ID NO: 2542585 - RNA, 19 nt, Artificial Sequence
  Description of Artificial Sequence: Synthetic oligonucleotide
  Antisense strand to SEQ ID NO: 2542584
uguuucaacccucacacag

SEQ ID NO: 2542586 - RNA, 19 nt, Artificial Sequence
  Description of Artificial Sequence: Synthetic oligonucleotide
  Sense strand starting at position 3437 of SEQ ID NO: 1888573
aucucugccugggugagaa

SEQ ID NO: 2542587 - RNA, 19 nt, Artificial Sequence
  Description of Artificial Sequence: Synthetic oligonucleotide
  Antisense strand to SEQ ID NO: 2542586
uucucacccaggcagagau

SEQ ID NO: 2542588 - RNA, 19 nt, Artificial Sequence
  Description of Artificial Sequence: Synthetic oligonucleotide
  Sense strand starting at position 3218 of SEQ ID NO: 1888573
uagggaguugggcggaauu

SEQ ID NO: 2542589 - RNA, 19 nt, Artificial Sequence
  Description of Artificial Sequence: Synthetic oligonucleotide
  Antisense strand to SEQ ID NO: 2542588
aauuccgcccaacucccua

SEQ ID NO: 2542590 - RNA, 19 nt, Artificial Sequence
  Description of Artificial Sequence: Synthetic oligonucleotide
  Sense strand starting at position 1306 of SEQ ID NO: 1888573
gucacagccuuaucugaag

SEQ ID NO: 2542591 - RNA, 19 nt, Artificial Sequence
  Description of Artificial Sequence: Synthetic oligonucleotide
  Antisense strand to SEQ ID NO: 2542590
cuucagauaaggcugugac

SEQ ID NO: 2542592 - RNA, 19 nt, Artificial Sequence
  Description of Artificial Sequence: Synthetic oligonucleotide
  Sense strand starting at position 2046 of SEQ ID NO: 1888573
uguagauucuuauugguua

SEQ ID NO: 2542593 - RNA, 19 nt, Artificial Sequence
  Description of Artificial Sequence: Synthetic oligonucleotide
  Antisense strand to SEQ ID NO: 2542592
uaaccaauaagaaucuaca

SEQ ID NO: 2542594 - RNA, 19 nt, Artificial Sequence
  Description of Artificial Sequence: Synthetic oligonucleotide
  Sense strand starting at position 3920 of SEQ ID NO: 1888573
ccauccugccucugggaau

SEQ ID NO: 2542595 - RNA, 19 nt, Artificial Sequence
  Description of Artificial Sequence: Synthetic oligonucleotide
  Antisense strand to SEQ ID NO: 2542594
auucccagaggcaggaugg

SEQ ID NO: 2542596 - RNA, 19 nt, Artificial Sequence
  Description of Artificial Sequence: Synthetic oligonucleotide
  Sense strand starting at position 460 of SEQ ID NO: 1888573
uuaauuaacuggguguagu

SEQ ID NO: 2542597 - RNA, 19 nt, Artificial Sequence
  Description of Artificial Sequence: Synthetic oligonucleotide
  Antisense strand to SEQ ID NO: 2542596
acuacacccaguuaauuaa

SEQ ID NO: 2542598 - RNA, 19 nt, Artificial Sequence
  Description of Artificial Sequence: Synthetic oligonucleotide
  Sense strand starting at position 1127 of SEQ ID NO: 1888573
cggcccugaaggugaaauu

SEQ ID NO: 2542599 - RNA, 19 nt, Artificial Sequence
  Description of Artificial Sequence: Synthetic oligonucleotide
  Antisense strand to SEQ ID NO: 2542598
aauuucaccuucagggccg

SEQ ID NO: 2542600 - RNA, 19 nt, Artificial Sequence
  Description of Artificial Sequence: Synthetic oligonucleotide
  Sense strand starting at position 3436 of SEQ ID NO: 1888573
caucucugccugggugaga

SEQ ID NO: 2542601 - RNA, 19 nt, Artificial Sequence
  Description of Artificial Sequence: Synthetic oligonucleotide
  Antisense strand to SEQ ID NO: 2542600
ucucacccaggcagagaug

SEQ ID NO: 2542602 - RNA, 19 nt, Artificial Sequence
  Description of Artificial Sequence: Synthetic oligonucleotide
  Sense strand starting at position 1891 of SEQ ID NO: 1888573
gggacuucgcucugaacug

SEQ ID NO: 2542603 - RNA, 19 nt, Artificial Sequence
  Description of Artificial Sequence: Synthetic oligonucleotide
  Antisense strand to SEQ ID NO: 2542602
caguucagagcgaaguccc

SEQ ID NO: 2542604 - RNA, 19 nt, Artificial Sequence
  Description of Artificial Sequence: Synthetic oligonucleotide
  Sense strand starting at position 73 of SEQ ID NO: 1888573
agguauugcucuccauuga

SEQ ID NO: 2542605 - RNA, 19 nt, Artificial Sequence
  Description of Artificial Sequence: Synthetic oligonucleotide
  Antisense strand to SEQ ID NO: 2542604
ucaauggagagcaauaccu

SEQ ID NO: 2542606 - RNA, 19 nt, Artificial Sequence
  Description of Artificial Sequence: Synthetic oligonucleotide
  Sense strand starting at position 3358 of SEQ ID NO: 1888573
gguggaguuugaccucagu

SEQ ID NO: 2542607 - RNA, 19 nt, Artificial Sequence
  Description of Artificial Sequence: Synthetic oligonucleotide
  Antisense strand to SEQ ID NO: 2542606
acugaggucaaacuccacc

SEQ ID NO: 2542608 - RNA, 19 nt, Artificial Sequence
  Description of Artificial Sequence: Synthetic oligonucleotide
  Sense strand starting at position 731 of SEQ ID NO: 1888573
ggugauauuuaagggaagu

SEQ ID NO: 2542609 - RNA, 19 nt, Artificial Sequence
  Description of Artificial Sequence: Synthetic oligonucleotide
  Antisense strand to SEQ ID NO: 2542608
acuucccuuaaauaucacc

SEQ ID NO: 2542610 - RNA, 19 nt, Artificial Sequence
  Description of Artificial Sequence: Synthetic oligonucleotide
  Sense strand starting at position 585 of SEQ ID NO: 1888573
ccugggugacgguguaaga

SEQ ID NO: 2542611 - RNA, 19 nt, Artificial Sequence
  Description of Artificial Sequence: Synthetic oligonucleotide
  Antisense strand to SEQ ID NO: 2542610
ucuuacaccgucacccagg

SEQ ID NO: 2542612 - RNA, 19 nt, Artificial Sequence
  Description of Artificial Sequence: Synthetic oligonucleotide
  Sense strand starting at position 2657 of SEQ ID NO: 1888574
gauguuaucauuggaggga

SEQ ID NO: 2542613 - RNA, 19 nt, Artificial Sequence
  Description of Artificial Sequence: Synthetic oligonucleotide
  Antisense strand to SEQ ID NO: 2542612
ucccuccaaugauaacauc

SEQ ID NO: 2542614 - RNA, 19 nt, Artificial Sequence
  Description of Artificial Sequence: Synthetic oligonucleotide
  Sense strand starting at position 535 of SEQ ID NO: 1888574
ggauuuauaugugggauuu

SEQ ID NO: 2542615 - RNA, 19 nt, Artificial Sequence
  Description of Artificial Sequence: Synthetic oligonucleotide
  Antisense strand to SEQ ID NO: 2542614
aaaucccacauauaaaucc

SEQ ID NO: 2542616 - RNA, 19 nt, Artificial Sequence
  Description of Artificial Sequence: Synthetic oligonucleotide
  Sense strand starting at position 2393 of SEQ ID NO: 1888574
ugagaauuacucugaguga

SEQ ID NO: 2542617 - RNA, 19 nt, Artificial Sequence
  Description of Artificial Sequence: Synthetic oligonucleotide
  Antisense strand to SEQ ID NO: 2542616
ucacucagaguaauucuca

SEQ ID NO: 2542618 - RNA, 19 nt, Artificial Sequence
  Description of Artificial Sequence: Synthetic oligonucleotide
  Sense strand starting at position 2660 of SEQ ID NO: 1888574
guuaucauuggagggaacu

SEQ ID NO: 2542619 - RNA, 19 nt, Artificial Sequence
  Description of Artificial Sequence: Synthetic oligonucleotide
  Antisense strand to SEQ ID NO: 2542618
aguucccuccaaugauaac

SEQ ID NO: 2542620 - RNA, 19 nt, Artificial Sequence
  Description of Artificial Sequence: Synthetic oligonucleotide
  Sense strand starting at position 462 of SEQ ID NO: 1888574
gcauauuaaaguugagaag

SEQ ID NO: 2542621 - RNA, 19 nt, Artificial Sequence
  Description of Artificial Sequence: Synthetic oligonucleotide
  Antisense strand to SEQ ID NO: 2542620
cuucucaacuuuaauaugc

SEQ ID NO: 2542622 - RNA, 19 nt, Artificial Sequence
  Description of Artificial Sequence: Synthetic oligonucleotide
  Sense strand starting at position 2589 of SEQ ID NO: 1888574
gauggaaauguguauguug

SEQ ID NO: 2542623 - RNA, 19 nt, Artificial Sequence
  Description of Artificial Sequence: Synthetic oligonucleotide
  Antisense strand to SEQ ID NO: 2542622
caacauacacauuuccauc

SEQ ID NO: 2542624 - RNA, 19 nt, Artificial Sequence
  Description of Artificial Sequence: Synthetic oligonucleotide
  Sense strand starting at position 561 of SEQ ID NO: 1888574
gucuaauuaguauggaaga

SEQ ID NO: 2542625 - RNA, 19 nt, Artificial Sequence
  Description of Artificial Sequence: Synthetic oligonucleotide
  Antisense strand to SEQ ID NO: 2542624
ucuuccauacuaauuagac

SEQ ID NO: 2542626 - RNA, 19 nt, Artificial Sequence
  Description of Artificial Sequence: Synthetic oligonucleotide
  Sense strand starting at position 3644 of SEQ ID NO: 1888574
cagguuucucuagagugac

SEQ ID NO: 2542627 - RNA, 19 nt, Artificial Sequence
  Description of Artificial Sequence: Synthetic oligonucleotide
  Antisense strand to SEQ ID NO: 2542626
gucacucuagagaaaccug

SEQ ID NO: 2542628 - RNA, 19 nt, Artificial Sequence
  Description of Artificial Sequence: Synthetic oligonucleotide
  Sense strand starting at position 807 of SEQ ID NO: 1888574
uaagaauguuaagugacuu

SEQ ID NO: 2542629 - RNA, 19 nt, Artificial Sequence
  Description of Artificial Sequence: Synthetic oligonucleotide
  Antisense strand to SEQ ID NO: 2542628
aagucacuuaacauucuua

SEQ ID NO: 2542630 - RNA, 19 nt, Artificial Sequence
  Description of Artificial Sequence: Synthetic oligonucleotide
  Sense strand starting at position 3572 of SEQ ID NO: 1888574
cacuuugaaugguugaauu

SEQ ID NO: 2542631 - RNA, 19 nt, Artificial Sequence
  Description of Artificial Sequence: Synthetic oligonucleotide
  Antisense strand to SEQ ID NO: 2542630
aauucaaccauucaaagug

SEQ ID NO: 2542632 - RNA, 19 nt, Artificial Sequence
  Description of Artificial Sequence: Synthetic oligonucleotide
  Sense strand starting at position 2752 of SEQ ID NO: 1888574
acaugagcuguuuauuauu

SEQ ID NO: 2542633 - RNA, 19 nt, Artificial Sequence
  Description of Artificial Sequence: Synthetic oligonucleotide
  Antisense strand to SEQ ID NO: 2542632
aauaauaaacagcucaugu

SEQ ID NO: 2542634 - RNA, 19 nt, Artificial Sequence
  Description of Artificial Sequence: Synthetic oligonucleotide
  Sense strand starting at position 3550 of SEQ ID NO: 1888574
ugcgauaaacuauggaauu

SEQ ID NO: 2542635 - RNA, 19 nt, Artificial Sequence
  Description of Artificial Sequence: Synthetic oligonucleotide
  Antisense strand to SEQ ID NO: 2542634
aauuccauaguuuaucgca

SEQ ID NO: 2542636 - RNA, 19 nt, Artificial Sequence
  Description of Artificial Sequence: Synthetic oligonucleotide
  Sense strand starting at position 3765 of SEQ ID NO: 1888574
guuauacaggcauaugcaa

SEQ ID NO: 2542637 - RNA, 19 nt, Artificial Sequence
  Description of Artificial Sequence: Synthetic oligonucleotide
  Antisense strand to SEQ ID NO: 2542636
uugcauaugccuguauaac

SEQ ID NO: 2542638 - RNA, 19 nt, Artificial Sequence
  Description of Artificial Sequence: Synthetic oligonucleotide
  Sense strand starting at position 359 of SEQ ID NO: 1888574
acuugaauuugggagguca

SEQ ID NO: 2542639 - RNA, 19 nt, Artificial Sequence
  Description of Artificial Sequence: Synthetic oligonucleotide
  Antisense strand to SEQ ID NO: 2542638
ugaccucccaaauucaagu

SEQ ID NO: 2542640 - RNA, 19 nt, Artificial Sequence
  Description of Artificial Sequence: Synthetic oligonucleotide
  Sense strand starting at position 3197 of SEQ ID NO: 1888574
cgaaaccuaugucuacuaa

SEQ ID NO: 2542641 - RNA, 19 nt, Artificial Sequence
  Description of Artificial Sequence: Synthetic oligonucleotide
  Antisense strand to SEQ ID NO: 2542640
uuaguagacauagguuucg

SEQ ID NO: 2542642 - RNA, 19 nt, Artificial Sequence
  Description of Artificial Sequence: Synthetic oligonucleotide
  Sense strand starting at position 720 of SEQ ID NO: 1888574
uuuggcauucuagaauguu

SEQ ID NO: 2542643 - RNA, 19 nt, Artificial Sequence
  Description of Artificial Sequence: Synthetic oligonucleotide
  Antisense strand to SEQ ID NO: 2542642
aacauucuagaaugccaaa

SEQ ID NO: 2542644 - RNA, 19 nt, Artificial Sequence
  Description of Artificial Sequence: Synthetic oligonucleotide
  Sense strand starting at position 2585 of SEQ ID NO: 1888574
gggugauggaaauguguau

SEQ ID NO: 2542645 - RNA, 19 nt, Artificial Sequence
  Description of Artificial Sequence: Synthetic oligonucleotide
  Antisense strand to SEQ ID NO: 2542644
auacacauuuccaucaccc

SEQ ID NO: 2542646 - RNA, 19 nt, Artificial Sequence
  Description of Artificial Sequence: Synthetic oligonucleotide
  Sense strand starting at position 3491 of SEQ ID NO: 1888574
gugacugcugauggauaca

SEQ ID NO: 2542647 - RNA, 19 nt, Artificial Sequence
  Description of Artificial Sequence: Synthetic oligonucleotide
  Antisense strand to SEQ ID NO: 2542646
uguauccaucagcagucac

SEQ ID NO: 2542648 - RNA, 19 nt, Artificial Sequence
  Description of Artificial Sequence: Synthetic oligonucleotide
  Sense strand starting at position 3361 of SEQ ID NO: 1888574
gaacgagacucgucuuaaa

SEQ ID NO: 2542649 - RNA, 19 nt, Artificial Sequence
  Description of Artificial Sequence: Synthetic oligonucleotide
  Antisense strand to SEQ ID NO: 2542648
uuuaagacgagucucguuc

SEQ ID NO: 2542650 - RNA, 19 nt, Artificial Sequence
  Description of Artificial Sequence: Synthetic oligonucleotide
  Sense strand starting at position 723 of SEQ ID NO: 1888574
ggcauucuagaauguuuaa

SEQ ID NO: 2542651 - RNA, 19 nt, Artificial Sequence
  Description of Artificial Sequence: Synthetic oligonucleotide
  Antisense strand to SEQ ID NO: 2542650
uuaaacauucuagaaugcc

SEQ ID NO: 2542652 - RNA, 19 nt, Artificial Sequence
  Description of Artificial Sequence: Synthetic oligonucleotide
  Sense strand starting at position 3570 of SEQ ID NO: 1888574
ugcacuuugaaugguugaa

SEQ ID NO: 2542653 - RNA, 19 nt, Artificial Sequence
  Description of Artificial Sequence: Synthetic oligonucleotide
  Antisense strand to SEQ ID NO: 2542652
uucaaccauucaaagugca

SEQ ID NO: 2542654 - RNA, 19 nt, Artificial Sequence
  Description of Artificial Sequence: Synthetic oligonucleotide
  Sense strand starting at position 2592 of SEQ ID NO: 1888574
ggaaauguguauguugacu

SEQ ID NO: 2542655 - RNA, 19 nt, Artificial Sequence
  Description of Artificial Sequence: Synthetic oligonucleotide
  Antisense strand to SEQ ID NO: 2542654
agucaacauacacauuucc

SEQ ID NO: 2542656 - RNA, 19 nt, Artificial Sequence
  Description of Artificial Sequence: Synthetic oligonucleotide
  Sense strand starting at position 6 of SEQ ID NO: 1888574
aacagauacuauguccgua

SEQ ID NO: 2542657 - RNA, 19 nt, Artificial Sequence
  Description of Artificial Sequence: Synthetic oligonucleotide
  Antisense strand to SEQ ID NO: 2542656
uacggacauaguaucuguu

SEQ ID NO: 2542658 - RNA, 19 nt, Artificial Sequence
  Description of Artificial Sequence: Synthetic oligonucleotide
  Sense strand starting at position 2598 of SEQ ID NO: 1888574
guguauguugacuaacagu

SEQ ID NO: 2542659 - RNA, 19 nt, Artificial Sequence
  Description of Artificial Sequence: Synthetic oligonucleotide
  Antisense strand to SEQ ID NO: 2542658
acuguuagucaacauacac

SEQ ID NO: 2542660 - RNA, 19 nt, Artificial Sequence
  Description of Artificial Sequence: Synthetic oligonucleotide
  Sense strand starting at position 2591 of SEQ ID NO: 1888574
uggaaauguguauguugac

SEQ ID NO: 2542661 - RNA, 19 nt, Artificial Sequence
  Description of Artificial Sequence: Synthetic oligonucleotide
  Antisense strand to SEQ ID NO: 2542660
gucaacauacacauuucca

SEQ ID NO: 2542662 - RNA, 19 nt, Artificial Sequence
  Description of Artificial Sequence: Synthetic oligonucleotide
  Sense strand starting at position 546 of SEQ ID NO: 1888574
ugggauuuauaugaugucu

SEQ ID NO: 2542663 - RNA, 19 nt, Artificial Sequence
  Description of Artificial Sequence: Synthetic oligonucleotide
  Antisense strand to SEQ ID NO: 2542662
agacaucauauaaauccca

SEQ ID NO: 2542664 - RNA, 19 nt, Artificial Sequence
  Description of Artificial Sequence: Synthetic oligonucleotide
  Sense strand starting at position 3815 of SEQ ID NO: 1888574
gaaguuuauugugucugaa

SEQ ID NO: 2542665 - RNA, 19 nt, Artificial Sequence
  Description of Artificial Sequence: Synthetic oligonucleotide
  Antisense strand to SEQ ID NO: 2542664
uucagacacaauaaacuuc

SEQ ID NO: 2542666 - RNA, 19 nt, Artificial Sequence
  Description of Artificial Sequence: Synthetic oligonucleotide
  Sense strand starting at position 628 of SEQ ID NO: 1888574
cucuguguuagauaaacgu

SEQ ID NO: 2542667 - RNA, 19 nt, Artificial Sequence
  Description of Artificial Sequence: Synthetic oligonucleotide
  Antisense strand to SEQ ID NO: 2542666
acguuuaucuaacacagag

SEQ ID NO: 2542668 - RNA, 19 nt, Artificial Sequence
  Description of Artificial Sequence: Synthetic oligonucleotide
  Sense strand starting at position 2690 of SEQ ID NO: 1888574
acaugagcucuuuguauua

SEQ ID NO: 2542669 - RNA, 19 nt, Artificial Sequence
  Description of Artificial Sequence: Synthetic oligonucleotide
  Antisense strand to SEQ ID NO: 2542668
uaauacaaagagcucaugu

SEQ ID NO: 2542670 - RNA, 19 nt, Artificial Sequence
  Description of Artificial Sequence: Synthetic oligonucleotide
  Sense strand starting at position 70 of SEQ ID NO: 1888574
gccuuuguaucaccuggaa

SEQ ID NO: 2542671 - RNA, 19 nt, Artificial Sequence
  Description of Artificial Sequence: Synthetic oligonucleotide
  Antisense strand to SEQ ID NO: 2542670
uuccaggugauacaaaggc

SEQ ID NO: 2542672 - RNA, 19 nt, Artificial Sequence
  Description of Artificial Sequence: Synthetic oligonucleotide
  Sense strand starting at position 11 of SEQ ID NO: 1888574
auacuauguccguauucuu

SEQ ID NO: 2542673 - RNA, 19 nt, Artificial Sequence
  Description of Artificial Sequence: Synthetic oligonucleotide
  Antisense strand to SEQ ID NO: 2542672
aagaauacggacauaguau

SEQ ID NO: 2542674 - RNA, 19 nt, Artificial Sequence
  Description of Artificial Sequence: Synthetic oligonucleotide
  Sense strand starting at position 519 of SEQ ID NO: 1888574
ugcuaugagauguguugga

SEQ ID NO: 2542675 - RNA, 19 nt, Artificial Sequence
  Description of Artificial Sequence: Synthetic oligonucleotide
  Antisense strand to SEQ ID NO: 2542674
uccaacacaucucauagca

SEQ ID NO: 2542676 - RNA, 19 nt, Artificial Sequence
  Description of Artificial Sequence: Synthetic oligonucleotide
  Sense strand starting at position 517 of SEQ ID NO: 1888574
gaugcuaugagauguguug

SEQ ID NO: 2542677 - RNA, 19 nt, Artificial Sequence
  Description of Artificial Sequence: Synthetic oligonucleotide
  Antisense strand to SEQ ID NO: 2542676
caacacaucucauagcauc

SEQ ID NO: 2542678 - RNA, 19 nt, Artificial Sequence
  Description of Artificial Sequence: Synthetic oligonucleotide
  Sense strand starting at position 524 of SEQ ID NO: 1888574
ugagauguguuggauuuau

SEQ ID NO: 2542679 - RNA, 19 nt, Artificial Sequence
  Description of Artificial Sequence: Synthetic oligonucleotide
  Antisense strand to SEQ ID NO: 2542678
auaaauccaacacaucuca

SEQ ID NO: 2542680 - RNA, 19 nt, Artificial Sequence
  Description of Artificial Sequence: Synthetic oligonucleotide
  Sense strand starting at position 3773 of SEQ ID NO: 1888574
ggcauaugcaauugucaga

SEQ ID NO: 2542681 - RNA, 19 nt, Artificial Sequence
  Description of Artificial Sequence: Synthetic oligonucleotide
  Antisense strand to SEQ ID NO: 2542680
ucugacaauugcauaugcc

SEQ ID NO: 2542682 - RNA, 19 nt, Artificial Sequence
  Description of Artificial Sequence: Synthetic oligonucleotide
  Sense strand starting at position 2317 of SEQ ID NO: 1888574
gugggauacugcucagcaa

SEQ ID NO: 2542683 - RNA, 19 nt, Artificial Sequence
  Description of Artificial Sequence: Synthetic oligonucleotide
  Antisense strand to SEQ ID NO: 2542682
uugcugagcaguaucccac

SEQ ID NO: 2542684 - RNA, 19 nt, Artificial Sequence
  Description of Artificial Sequence: Synthetic oligonucleotide
  Sense strand starting at position 548 of SEQ ID NO: 1888574
ggauuuauaugaugucuaa

SEQ ID NO: 2542685 - RNA, 19 nt, Artificial Sequence
  Description of Artificial Sequence: Synthetic oligonucleotide
  Antisense strand to SEQ ID NO: 2542684
uuagacaucauauaaaucc

SEQ ID NO: 2542686 - RNA, 19 nt, Artificial Sequence
  Description of Artificial Sequence: Synthetic oligonucleotide
  Sense strand starting at position 3538 of SEQ ID NO: 1888574
ucuggaauuaguugcgaua

SEQ ID NO: 2542687 - RNA, 19 nt, Artificial Sequence
  Description of Artificial Sequence: Synthetic oligonucleotide
  Antisense strand to SEQ ID NO: 2542686
uaucgcaacuaauuccaga

SEQ ID NO: 2542688 - RNA, 19 nt, Artificial Sequence
  Description of Artificial Sequence: Synthetic oligonucleotide
  Sense strand starting at position 3786 of SEQ ID NO: 1888574
gucagaacgcuuugaauug

SEQ ID NO: 2542689 - RNA, 19 nt, Artificial Sequence
  Description of Artificial Sequence: Synthetic oligonucleotide
  Antisense strand to SEQ ID NO: 2542688
caauucaaagcguucugac

SEQ ID NO: 2542690 - RNA, 19 nt, Artificial Sequence
  Description of Artificial Sequence: Synthetic oligonucleotide
  Sense strand starting at position 3823 of SEQ ID NO: 1888574
uugugucugaauugaaguu

SEQ ID NO: 2542691 - RNA, 19 nt, Artificial Sequence
  Description of Artificial Sequence: Synthetic oligonucleotide
  Antisense strand to SEQ ID NO: 2542690
aacuucaauucagacacaa

SEQ ID NO: 2542692 - RNA, 19 nt, Artificial Sequence
  Description of Artificial Sequence: Synthetic oligonucleotide
  Sense strand starting at position 3307 of SEQ ID NO: 1888575
ggccguggccagcucuaaa

SEQ ID NO: 2542693 - RNA, 19 nt, Artificial Sequence
  Description of Artificial Sequence: Synthetic oligonucleotide
  Antisense strand to SEQ ID NO: 2542692
uuuagagcuggccacggcc

SEQ ID NO: 2542694 - RNA, 19 nt, Artificial Sequence
  Description of Artificial Sequence: Synthetic oligonucleotide
  Sense strand starting at position 2416 of SEQ ID NO: 1888575
gucuaauuccucgaggaaa

SEQ ID NO: 2542695 - RNA, 19 nt, Artificial Sequence
  Description of Artificial Sequence: Synthetic oligonucleotide
  Antisense strand to SEQ ID NO: 2542694
uuuccucgaggaauuagac

SEQ ID NO: 2542696 - RNA, 19 nt, Artificial Sequence
  Description of Artificial Sequence: Synthetic oligonucleotide
  Sense strand starting at position 1453 of SEQ ID NO: 1888575
cugagcauuucugucacuu

SEQ ID NO: 2542697 - RNA, 19 nt, Artificial Sequence
  Description of Artificial Sequence: Synthetic oligonucleotide
  Antisense strand to SEQ ID NO: 2542696
aagugacagaaaugcucag

SEQ ID NO: 2542698 - RNA, 19 nt, Artificial Sequence
  Description of Artificial Sequence: Synthetic oligonucleotide
  Sense strand starting at position 2823 of SEQ ID NO: 1888575
aggcaagaucuccaggcau

SEQ ID NO: 2542699 - RNA, 19 nt, Artificial Sequence
  Description of Artificial Sequence: Synthetic oligonucleotide
  Antisense strand to SEQ ID NO: 2542698
augccuggagaucuugccu

SEQ ID NO: 2542700 - RNA, 19 nt, Artificial Sequence
  Description of Artificial Sequence: Synthetic oligonucleotide
  Sense strand starting at position 2440 of SEQ ID NO: 1888575
aaaccauguccacggaaau

SEQ ID NO: 2542701 - RNA, 19 nt, Artificial Sequence
  Description of Artificial Sequence: Synthetic oligonucleotide
  Antisense strand to SEQ ID NO: 2542700
auuuccguggacaugguuu

SEQ ID NO: 2542702 - RNA, 19 nt, Artificial Sequence
  Description of Artificial Sequence: Synthetic oligonucleotide
  Sense strand starting at position 2418 of SEQ ID NO: 1888575
cuaauuccucgaggaaauu

SEQ ID NO: 2542703 - RNA, 19 nt, Artificial Sequence
  Description of Artificial Sequence: Synthetic oligonucleotide
  Antisense strand to SEQ ID NO: 2542702
aauuuccucgaggaauuag

SEQ ID NO: 2542704 - RNA, 19 nt, Artificial Sequence
  Description of Artificial Sequence: Synthetic oligonucleotide
  Sense strand starting at position 2424 of SEQ ID NO: 1888575
ccucgaggaaauugucaaa

SEQ ID NO: 2542705 - RNA, 19 nt, Artificial Sequence
  Description of Artificial Sequence: Synthetic oligonucleotide
  Antisense strand to SEQ ID NO: 2542704
uuugacaauuuccucgagg

SEQ ID NO: 2542706 - RNA, 19 nt, Artificial Sequence
  Description of Artificial Sequence: Synthetic oligonucleotide
  Sense strand starting at position 2450 of SEQ ID NO: 1888575
cacggaaauccugguaaau

SEQ ID NO: 2542707 - RNA, 19 nt, Artificial Sequence
  Description of Artificial Sequence: Synthetic oligonucleotide
  Antisense strand to SEQ ID NO: 2542706
auuuaccaggauuuccgug

SEQ ID NO: 2542708 - RNA, 19 nt, Artificial Sequence
  Description of Artificial Sequence: Synthetic oligonucleotide
  Sense strand starting at position 491 of SEQ ID NO: 1888575
gugagacuucauggguaac

SEQ ID NO: 2542709 - RNA, 19 nt, Artificial Sequence
  Description of Artificial Sequence: Synthetic oligonucleotide
  Antisense strand to SEQ ID NO: 2542708
guuacccaugaagucucac

SEQ ID NO: 2542710 - RNA, 19 nt, Artificial Sequence
  Description of Artificial Sequence: Synthetic oligonucleotide
  Sense strand starting at position 2441 of SEQ ID NO: 1888575
aaccauguccacggaaauc

SEQ ID NO: 2542711 - RNA, 19 nt, Artificial Sequence
  Description of Artificial Sequence: Synthetic oligonucleotide
  Antisense strand to SEQ ID NO: 2542710
gauuuccguggacaugguu

SEQ ID NO: 2542712 - RNA, 19 nt, Artificial Sequence
  Description of Artificial Sequence: Synthetic oligonucleotide
  Sense strand starting at position 530 of SEQ ID NO: 1888575
aaggcaagugucugaaaca

SEQ ID NO: 2542713 - RNA, 19 nt, Artificial Sequence
  Description of Artificial Sequence: Synthetic oligonucleotide
  Antisense strand to SEQ ID NO: 2542712
uguuucagacacuugccuu

SEQ ID NO: 2542714 - RNA, 19 nt, Artificial Sequence
  Description of Artificial Sequence: Synthetic oligonucleotide
  Sense strand starting at position 1802 of SEQ ID NO: 1888575
ggaguuccuuccuccagga

SEQ ID NO: 2542715 - RNA, 19 nt, Artificial Sequence
  Description of Artificial Sequence: Synthetic oligonucleotide
  Antisense strand to SEQ ID NO: 2542714
uccuggaggaaggaacucc

SEQ ID NO: 2542716 - RNA, 19 nt, Artificial Sequence
  Description of Artificial Sequence: Synthetic oligonucleotide
  Sense strand starting at position 2175 of SEQ ID NO: 1888575
uggagccugcuccagaauu

SEQ ID NO: 2542717 - RNA, 19 nt, Artificial Sequence
  Description of Artificial Sequence: Synthetic oligonucleotide
  Antisense strand to SEQ ID NO: 2542716
aauucuggagcaggcucca

SEQ ID NO: 2542718 - RNA, 19 nt, Artificial Sequence
  Description of Artificial Sequence: Synthetic oligonucleotide
  Sense strand starting at position 150 of SEQ ID NO: 1888575
cucugaaccugguuaauuc

SEQ ID NO: 2542719 - RNA, 19 nt, Artificial Sequence
  Description of Artificial Sequence: Synthetic oligonucleotide
  Antisense strand to SEQ ID NO: 2542718
gaauuaaccagguucagag

SEQ ID NO: 2542720 - RNA, 19 nt, Artificial Sequence
  Description of Artificial Sequence: Synthetic oligonucleotide
  Sense strand starting at position 526 of SEQ ID NO: 1888575
ggauaaggcaagugucuga

SEQ ID NO: 2542721 - RNA, 19 nt, Artificial Sequence
  Description of Artificial Sequence: Synthetic oligonucleotide
  Antisense strand to SEQ ID NO: 2542720
ucagacacuugccuuaucc

SEQ ID NO: 2542722 - RNA, 19 nt, Artificial Sequence
  Description of Artificial Sequence: Synthetic oligonucleotide
  Sense strand starting at position 148 of SEQ ID NO: 1888575
cccucugaaccugguuaau

SEQ ID NO: 2542723 - RNA, 19 nt, Artificial Sequence
  Description of Artificial Sequence: Synthetic oligonucleotide
  Antisense strand to SEQ ID NO: 2542722
auuaaccagguucagaggg

SEQ ID NO: 2542724 - RNA, 19 nt, Artificial Sequence
  Description of Artificial Sequence: Synthetic oligonucleotide
  Sense strand starting at position 3112 of SEQ ID NO: 1888575
gggaguguugucuacacuc

SEQ ID NO: 2542725 - RNA, 19 nt, Artificial Sequence
  Description of Artificial Sequence: Synthetic oligonucleotide
  Antisense strand to SEQ ID NO: 2542724
gaguguagacaacacuccc

SEQ ID NO: 2542726 - RNA, 19 nt, Artificial Sequence
  Description of Artificial Sequence: Synthetic oligonucleotide
  Sense strand starting at position 2415 of SEQ ID NO: 1888575
ugucuaauuccucgaggaa

SEQ ID NO: 2542727 - RNA, 19 nt, Artificial Sequence
  Description of Artificial Sequence: Synthetic oligonucleotide
  Antisense strand to SEQ ID NO: 2542726
uuccucgaggaauuagaca

SEQ ID NO: 2542728 - RNA, 19 nt, Artificial Sequence
  Description of Artificial Sequence: Synthetic oligonucleotide
  Sense strand starting at position 983 of SEQ ID NO: 1888575
gggccauuacauuagcagu

SEQ ID NO: 2542729 - RNA, 19 nt, Artificial Sequence
  Description of Artificial Sequence: Synthetic oligonucleotide
  Antisense strand to SEQ ID NO: 2542728
acugcuaauguaauggccc

SEQ ID NO: 2542730 - RNA, 19 nt, Artificial Sequence
  Description of Artificial Sequence: Synthetic oligonucleotide
  Sense strand starting at position 2380 of SEQ ID NO: 1888575
gcggcucucagauaaauug

SEQ ID NO: 2542731 - RNA, 19 nt, Artificial Sequence
  Description of Artificial Sequence: Synthetic oligonucleotide
  Antisense strand to SEQ ID NO: 2542730
caauuuaucugagagccgc

SEQ ID NO: 2542732 - RNA, 19 nt, Artificial Sequence
  Description of Artificial Sequence: Synthetic oligonucleotide
  Sense strand starting at position 158 of SEQ ID NO: 1888575
cugguuaauuccuuccuga

SEQ ID NO: 2542733 - RNA, 19 nt, Artificial Sequence
  Description of Artificial Sequence: Synthetic oligonucleotide
  Antisense strand to SEQ ID NO: 2542732
ucaggaaggaauuaaccag

SEQ ID NO: 2542734 - RNA, 19 nt, Artificial Sequence
  Description of Artificial Sequence: Synthetic oligonucleotide
  Sense strand starting at position 2414 of SEQ ID NO: 1888575
cugucuaauuccucgagga

SEQ ID NO: 2542735 - RNA, 19 nt, Artificial Sequence
  Description of Artificial Sequence: Synthetic oligonucleotide
  Antisense strand to SEQ ID NO: 2542734
uccucgaggaauuagacag

SEQ ID NO: 2542736 - RNA, 19 nt, Artificial Sequence
  Description of Artificial Sequence: Synthetic oligonucleotide
  Sense strand starting at position 59 of SEQ ID NO: 1888575
gggagcuccgucuggaaga

SEQ ID NO: 2542737 - RNA, 19 nt, Artificial Sequence
  Description of Artificial Sequence: Synthetic oligonucleotide
  Antisense strand to SEQ ID NO: 2542736
ucuuccagacggagcuccc

SEQ ID NO: 2542738 - RNA, 19 nt, Artificial Sequence
  Description of Artificial Sequence: Synthetic oligonucleotide
  Sense strand starting at position 936 of SEQ ID NO: 1888575
cagguucuccugcaauguu

SEQ ID NO: 2542739 - RNA, 19 nt, Artificial Sequence
  Description of Artificial Sequence: Synthetic oligonucleotide
  Antisense strand to SEQ ID NO: 2542738
aacauugcaggagaaccug

SEQ ID NO: 2542740 - RNA, 19 nt, Artificial Sequence
  Description of Artificial Sequence: Synthetic oligonucleotide
  Sense strand starting at position 2469 of SEQ ID NO: 1888575
cuuagaaguggcugcuaga

SEQ ID NO: 2542741 - RNA, 19 nt, Artificial Sequence
  Description of Artificial Sequence: Synthetic oligonucleotide
  Antisense strand to SEQ ID NO: 2542740
ucuagcagccacuucuaag

SEQ ID NO: 2542742 - RNA, 19 nt, Artificial Sequence
  Description of Artificial Sequence: Synthetic oligonucleotide
  Sense strand starting at position 2144 of SEQ ID NO: 1888575
cucaucucccagcgaaauu

SEQ ID NO: 2542743 - RNA, 19 nt, Artificial Sequence
  Description of Artificial Sequence: Synthetic oligonucleotide
  Antisense strand to SEQ ID NO: 2542742
aauuucgcugggagaugag

SEQ ID NO: 2542744 - RNA, 19 nt, Artificial Sequence
  Description of Artificial Sequence: Synthetic oligonucleotide
  Sense strand starting at position 985 of SEQ ID NO: 1888575
gccauuacauuagcaguga

SEQ ID NO: 2542745 - RNA, 19 nt, Artificial Sequence
  Description of Artificial Sequence: Synthetic oligonucleotide
  Antisense strand to SEQ ID NO: 2542744
ucacugcuaauguaauggc

SEQ ID NO: 2542746 - RNA, 19 nt, Artificial Sequence
  Description of Artificial Sequence: Synthetic oligonucleotide
  Sense strand starting at position 3110 of SEQ ID NO: 1888575
cugggaguguugucuacac

SEQ ID NO: 2542747 - RNA, 19 nt, Artificial Sequence
  Description of Artificial Sequence: Synthetic oligonucleotide
  Antisense strand to SEQ ID NO: 2542746
guguagacaacacucccag

SEQ ID NO: 2542748 - RNA, 19 nt, Artificial Sequence
  Description of Artificial Sequence: Synthetic oligonucleotide
  Sense strand starting at position 1260 of SEQ ID NO: 1888575
cagaaucaugcaugugcau

SEQ ID NO: 2542749 - RNA, 19 nt, Artificial Sequence
  Description of Artificial Sequence: Synthetic oligonucleotide
  Antisense strand to SEQ ID NO: 2542748
augcacaugcaugauucug

SEQ ID NO: 2542750 - RNA, 19 nt, Artificial Sequence
  Description of Artificial Sequence: Synthetic oligonucleotide
  Sense strand starting at position 2505 of SEQ ID NO: 1888575
accaaagguuauuaggaaa

SEQ ID NO: 2542751 - RNA, 19 nt, Artificial Sequence
  Description of Artificial Sequence: Synthetic oligonucleotide
  Antisense strand to SEQ ID NO: 2542750
uuuccuaauaaccuuuggu

SEQ ID NO: 2542752 - RNA, 19 nt, Artificial Sequence
  Description of Artificial Sequence: Synthetic oligonucleotide
  Sense strand starting at position 2825 of SEQ ID NO: 1888575
gcaagaucuccaggcaugu

SEQ ID NO: 2542753 - RNA, 19 nt, Artificial Sequence
  Description of Artificial Sequence: Synthetic oligonucleotide
  Antisense strand to SEQ ID NO: 2542752
acaugccuggagaucuugc

SEQ ID NO: 2542754 - RNA, 19 nt, Artificial Sequence
  Description of Artificial Sequence: Synthetic oligonucleotide
  Sense strand starting at position 1104 of SEQ ID NO: 1888575
cggaaucuuccaugcagug

SEQ ID NO: 2542755 - RNA, 19 nt, Artificial Sequence
  Description of Artificial Sequence: Synthetic oligonucleotide
  Antisense strand to SEQ ID NO: 2542754
cacugcauggaagauuccg

SEQ ID NO: 2542756 - RNA, 19 nt, Artificial Sequence
  Description of Artificial Sequence: Synthetic oligonucleotide
  Sense strand starting at position 2155 of SEQ ID NO: 1888575
gcgaaauuaucucaauuuc

SEQ ID NO: 2542757 - RNA, 19 nt, Artificial Sequence
  Description of Artificial Sequence: Synthetic oligonucleotide
  Antisense strand to SEQ ID NO: 2542756
gaaauugagauaauuucgc

SEQ ID NO: 2542758 - RNA, 19 nt, Artificial Sequence
  Description of Artificial Sequence: Synthetic oligonucleotide
  Sense strand starting at position 932 of SEQ ID NO: 1888575
guaucagguucuccugcaa

SEQ ID NO: 2542759 - RNA, 19 nt, Artificial Sequence
  Description of Artificial Sequence: Synthetic oligonucleotide
  Antisense strand to SEQ ID NO: 2542758
uugcaggagaaccugauac

SEQ ID NO: 2542760 - RNA, 19 nt, Artificial Sequence
  Description of Artificial Sequence: Synthetic oligonucleotide
  Sense strand starting at position 1194 of SEQ ID NO: 1888575
cgguuugucugacuacuac

SEQ ID NO: 2542761 - RNA, 19 nt, Artificial Sequence
  Description of Artificial Sequence: Synthetic oligonucleotide
  Antisense strand to SEQ ID NO: 2542760
guaguagucagacaaaccg

SEQ ID NO: 2542762 - RNA, 19 nt, Artificial Sequence
  Description of Artificial Sequence: Synthetic oligonucleotide
  Sense strand starting at position 1892 of SEQ ID NO: 1888575
ucuuguaucuccucagcua

SEQ ID NO: 2542763 - RNA, 19 nt, Artificial Sequence
  Description of Artificial Sequence: Synthetic oligonucleotide
  Antisense strand to SEQ ID NO: 2542762
uagcugaggagauacaaga

SEQ ID NO: 2542764 - RNA, 19 nt, Artificial Sequence
  Description of Artificial Sequence: Synthetic oligonucleotide
  Sense strand starting at position 1046 of SEQ ID NO: 1888575
uuagccuggcuuuguuuaa

SEQ ID NO: 2542765 - RNA, 19 nt, Artificial Sequence
  Description of Artificial Sequence: Synthetic oligonucleotide
  Antisense strand to SEQ ID NO: 2542764
uuaaacaaagccaggcuaa

SEQ ID NO: 2542766 - RNA, 19 nt, Artificial Sequence
  Description of Artificial Sequence: Synthetic oligonucleotide
  Sense strand starting at position 2427 of SEQ ID NO: 1888575
cgaggaaauugucaaacca

SEQ ID NO: 2542767 - RNA, 19 nt, Artificial Sequence
  Description of Artificial Sequence: Synthetic oligonucleotide
  Antisense strand to SEQ ID NO: 2542766
ugguuugacaauuuccucg

SEQ ID NO: 2542768 - RNA, 19 nt, Artificial Sequence
  Description of Artificial Sequence: Synthetic oligonucleotide
  Sense strand starting at position 2459 of SEQ ID NO: 1888575
ccugguaaaucuuagaagu

SEQ ID NO: 2542769 - RNA, 19 nt, Artificial Sequence
  Description of Artificial Sequence: Synthetic oligonucleotide
  Antisense strand to SEQ ID NO: 2542768
acuucuaagauuuaccagg

SEQ ID NO: 2542770 - RNA, 19 nt, Artificial Sequence
  Description of Artificial Sequence: Synthetic oligonucleotide
  Sense strand starting at position 2452 of SEQ ID NO: 1888575
cggaaauccugguaaaucu

SEQ ID NO: 2542771 - RNA, 19 nt, Artificial Sequence
  Description of Artificial Sequence: Synthetic oligonucleotide
  Antisense strand to SEQ ID NO: 2542770
agauuuaccaggauuuccg

SEQ ID NO: 2542772 - RNA, 19 nt, Artificial Sequence
  Description of Artificial Sequence: Synthetic oligonucleotide
  Sense strand starting at position 3483 of SEQ ID NO: 1888576
uuguuucuuccagaaugau

SEQ ID NO: 2542773 - RNA, 19 nt, Artificial Sequence
  Description of Artificial Sequence: Synthetic oligonucleotide
  Antisense strand to SEQ ID NO: 2542772
aucauucuggaagaaacaa

SEQ ID NO: 2542774 - RNA, 19 nt, Artificial Sequence
  Description of Artificial Sequence: Synthetic oligonucleotide
  Sense strand starting at position 3464 of SEQ ID NO: 1888576
caaagaugucucuggagua

SEQ ID NO: 2542775 - RNA, 19 nt, Artificial Sequence
  Description of Artificial Sequence: Synthetic oligonucleotide
  Antisense strand to SEQ ID NO: 2542774
uacuccagagacaucuuug

SEQ ID NO: 2542776 - RNA, 19 nt, Artificial Sequence
  Description of Artificial Sequence: Synthetic oligonucleotide
  Sense strand starting at position 3491 of SEQ ID NO: 1888576
uccagaaugaugugacagu

SEQ ID NO: 2542777 - RNA, 19 nt, Artificial Sequence
  Description of Artificial Sequence: Synthetic oligonucleotide
  Antisense strand to SEQ ID NO: 2542776
acugucacaucauucugga

SEQ ID NO: 2542778 - RNA, 19 nt, Artificial Sequence
  Description of Artificial Sequence: Synthetic oligonucleotide
  Sense strand starting at position 533 of SEQ ID NO: 1888576
uuuguagacucacuauauu

SEQ ID NO: 2542779 - RNA, 19 nt, Artificial Sequence
  Description of Artificial Sequence: Synthetic oligonucleotide
  Antisense strand to SEQ ID NO: 2542778
aauauagugagucuacaaa

SEQ ID NO: 2542780 - RNA, 19 nt, Artificial Sequence
  Description of Artificial Sequence: Synthetic oligonucleotide
  Sense strand starting at position 3742 of SEQ ID NO: 1888576
gcaagacacugucuuaaau

SEQ ID NO: 2542781 - RNA, 19 nt, Artificial Sequence
  Description of Artificial Sequence: Synthetic oligonucleotide
  Antisense strand to SEQ ID NO: 2542780
auuuaagacagugucuugc

SEQ ID NO: 2542782 - RNA, 19 nt, Artificial Sequence
  Description of Artificial Sequence: Synthetic oligonucleotide
  Sense strand starting at position 1406 of SEQ ID NO: 1888576
ucaaguucuuccuugggau

SEQ ID NO: 2542783 - RNA, 19 nt, Artificial Sequence
  Description of Artificial Sequence: Synthetic oligonucleotide
  Antisense strand to SEQ ID NO: 2542782
aucccaaggaagaacuuga

SEQ ID NO: 2542784 - RNA, 19 nt, Artificial Sequence
  Description of Artificial Sequence: Synthetic oligonucleotide
  Sense strand starting at position 3739 of SEQ ID NO: 1888576
ugagcaagacacugucuua

SEQ ID NO: 2542785 - RNA, 19 nt, Artificial Sequence
  Description of Artificial Sequence: Synthetic oligonucleotide
  Antisense strand to SEQ ID NO: 2542784
uaagacagugucuugcuca

SEQ ID NO: 2542786 - RNA, 19 nt, Artificial Sequence
  Description of Artificial Sequence: Synthetic oligonucleotide
  Sense strand starting at position 2925 of SEQ ID NO: 1888576
agcauugcuggccaagaua

SEQ ID NO: 2542787 - RNA, 19 nt, Artificial Sequence
  Description of Artificial Sequence: Synthetic oligonucleotide
  Antisense strand to SEQ ID NO: 2542786
uaucuuggccagcaaugcu

SEQ ID NO: 2542788 - RNA, 19 nt, Artificial Sequence
  Description of Artificial Sequence: Synthetic oligonucleotide
  Sense strand starting at position 2529 of SEQ ID NO: 1888576
agccaagaaugcuuccuaa

SEQ ID NO: 2542789 - RNA, 19 nt, Artificial Sequence
  Description of Artificial Sequence: Synthetic oligonucleotide
  Antisense strand to SEQ ID NO: 2542788
uuaggaagcauucuuggcu

SEQ ID NO: 2542790 - RNA, 19 nt, Artificial Sequence
  Description of Artificial Sequence: Synthetic oligonucleotide
  Sense strand starting at position 1407 of SEQ ID NO: 1888576
caaguucuuccuugggauc

SEQ ID NO: 2542791 - RNA, 19 nt, Artificial Sequence
  Description of Artificial Sequence: Synthetic oligonucleotide
  Antisense strand to SEQ ID NO: 2542790
gaucccaaggaagaacuug

SEQ ID NO: 2542792 - RNA, 19 nt, Artificial Sequence
  Description of Artificial Sequence: Synthetic oligonucleotide
  Sense strand starting at position 3479 of SEQ ID NO: 1888576
aguauuguuucuuccagaa

SEQ ID NO: 2542793 - RNA, 19 nt, Artificial Sequence
  Description of Artificial Sequence: Synthetic oligonucleotide
  Antisense strand to SEQ ID NO: 2542792
uucuggaagaaacaauacu

SEQ ID NO: 2542794 - RNA, 19 nt, Artificial Sequence
  Description of Artificial Sequence: Synthetic oligonucleotide
  Sense strand starting at position 3469 of SEQ ID NO: 1888576
augucucuggaguauuguu

SEQ ID NO: 2542795 - RNA, 19 nt, Artificial Sequence
  Description of Artificial Sequence: Synthetic oligonucleotide
  Antisense strand to SEQ ID NO: 2542794
aacaauacuccagagacau

SEQ ID NO: 2542796 - RNA, 19 nt, Artificial Sequence
  Description of Artificial Sequence: Synthetic oligonucleotide
  Sense strand starting at position 3478 of SEQ ID NO: 1888576
gaguauuguuucuuccaga

SEQ ID NO: 2542797 - RNA, 19 nt, Artificial Sequence
  Description of Artificial Sequence: Synthetic oligonucleotide
  Antisense strand to SEQ ID NO: 2542796
ucuggaagaaacaauacuc

SEQ ID NO: 2542798 - RNA, 19 nt, Artificial Sequence
  Description of Artificial Sequence: Synthetic oligonucleotide
  Sense strand starting at position 854 of SEQ ID NO: 1888576
gcaguuacugguuaucuac

SEQ ID NO: 2542799 - RNA, 19 nt, Artificial Sequence
  Description of Artificial Sequence: Synthetic oligonucleotide
  Antisense strand to SEQ ID NO: 2542798
guagauaaccaguaacugc

SEQ ID NO: 2542800 - RNA, 19 nt, Artificial Sequence
  Description of Artificial Sequence: Synthetic oligonucleotide
  Sense strand starting at position 3477 of SEQ ID NO: 1888576
ggaguauuguuucuuccag

SEQ ID NO: 2542801 - RNA, 19 nt, Artificial Sequence
  Description of Artificial Sequence: Synthetic oligonucleotide
  Antisense strand to SEQ ID NO: 2542800
cuggaagaaacaauacucc

SEQ ID NO: 2542802 - RNA, 19 nt, Artificial Sequence
  Description of Artificial Sequence: Synthetic oligonucleotide
  Sense strand starting at position 3576 of SEQ ID NO: 1888576
uuagccucauaguucuaua

SEQ ID NO: 2542803 - RNA, 19 nt, Artificial Sequence
  Description of Artificial Sequence: Synthetic oligonucleotide
  Antisense strand to SEQ ID NO: 2542802
uauagaacuaugaggcuaa

SEQ ID NO: 2542804 - RNA, 19 nt, Artificial Sequence
  Description of Artificial Sequence: Synthetic oligonucleotide
  Sense strand starting at position 853 of SEQ ID NO: 1888576
ggcaguuacugguuaucua

SEQ ID NO: 2542805 - RNA, 19 nt, Artificial Sequence
  Description of Artificial Sequence: Synthetic oligonucleotide
  Antisense strand to SEQ ID NO: 2542804
uagauaaccaguaacugcc

SEQ ID NO: 2542806 - RNA, 19 nt, Artificial Sequence
  Description of Artificial Sequence: Synthetic oligonucleotide
  Sense strand starting at position 1085 of SEQ ID NO: 1888576
ggcagagcucagugauccu

SEQ ID NO: 2542807 - RNA, 19 nt, Artificial Sequence
  Description of Artificial Sequence: Synthetic oligonucleotide
  Antisense strand to SEQ ID NO: 2542806
aggaucacugagcucugcc

SEQ ID NO: 2542808 - RNA, 19 nt, Artificial Sequence
  Description of Artificial Sequence: Synthetic oligonucleotide
  Sense strand starting at position 663 of SEQ ID NO: 1888576
ugcugcauccuauagcuau

SEQ ID NO: 2542809 - RNA, 19 nt, Artificial Sequence
  Description of Artificial Sequence: Synthetic oligonucleotide
  Antisense strand to SEQ ID NO: 2542808
auagcuauaggaugcagca

SEQ ID NO: 2542810 - RNA, 19 nt, Artificial Sequence
  Description of Artificial Sequence: Synthetic oligonucleotide
  Sense strand starting at position 2924 of SEQ ID NO: 1888576
cagcauugcuggccaagau

SEQ ID NO: 2542811 - RNA, 19 nt, Artificial Sequence
  Description of Artificial Sequence: Synthetic oligonucleotide
  Antisense strand to SEQ ID NO: 2542810
aucuuggccagcaaugcug

SEQ ID NO: 2542812 - RNA, 19 nt, Artificial Sequence
  Description of Artificial Sequence: Synthetic oligonucleotide
  Sense strand starting at position 2074 of SEQ ID NO: 1888576
uucccaacuucguugcaua

SEQ ID NO: 2542813 - RNA, 19 nt, Artificial Sequence
  Description of Artificial Sequence: Synthetic oligonucleotide
  Antisense strand to SEQ ID NO: 2542812
uaugcaacgaaguugggaa

SEQ ID NO: 2542814 - RNA, 19 nt, Artificial Sequence
  Description of Artificial Sequence: Synthetic oligonucleotide
  Sense strand starting at position 2075 of SEQ ID NO: 1888576
ucccaacuucguugcauau

SEQ ID NO: 2542815 - RNA, 19 nt, Artificial Sequence
  Description of Artificial Sequence: Synthetic oligonucleotide
  Antisense strand to SEQ ID NO: 2542814
auaugcaacgaaguuggga

SEQ ID NO: 2542816 - RNA, 19 nt, Artificial Sequence
  Description of Artificial Sequence: Synthetic oligonucleotide
  Sense strand starting at position 2806 of SEQ ID NO: 1888576
aggguaagguuucaagacu

SEQ ID NO: 2542817 - RNA, 19 nt, Artificial Sequence
  Description of Artificial Sequence: Synthetic oligonucleotide
  Antisense strand to SEQ ID NO: 2542816
agucuugaaaccuuacccu

SEQ ID NO: 2542818 - RNA, 19 nt, Artificial Sequence
  Description of Artificial Sequence: Synthetic oligonucleotide
  Sense strand starting at position 2004 of SEQ ID NO: 1888576
gcuacaguuccuuguccga

SEQ ID NO: 2542819 - RNA, 19 nt, Artificial Sequence
  Description of Artificial Sequence: Synthetic oligonucleotide
  Antisense strand to SEQ ID NO: 2542818
ucggacaaggaacuguagc

SEQ ID NO: 2542820 - RNA, 19 nt, Artificial Sequence
  Description of Artificial Sequence: Synthetic oligonucleotide
  Sense strand starting at position 3492 of SEQ ID NO: 1888576
ccagaaugaugugacaguu

SEQ ID NO: 2542821 - RNA, 19 nt, Artificial Sequence
  Description of Artificial Sequence: Synthetic oligonucleotide
  Antisense strand to SEQ ID NO: 2542820
aacugucacaucauucugg

SEQ ID NO: 2542822 - RNA, 19 nt, Artificial Sequence
  Description of Artificial Sequence: Synthetic oligonucleotide
  Sense strand starting at position 3275 of SEQ ID NO: 1888576
uugagauccuacuaugucu

SEQ ID NO: 2542823 - RNA, 19 nt, Artificial Sequence
  Description of Artificial Sequence: Synthetic oligonucleotide
  Antisense strand to SEQ ID NO: 2542822
agacauaguaggaucucaa

SEQ ID NO: 2542824 - RNA, 19 nt, Artificial Sequence
  Description of Artificial Sequence: Synthetic oligonucleotide
  Sense strand starting at position 3489 of SEQ ID NO: 1888576
cuuccagaaugaugugaca

SEQ ID NO: 2542825 - RNA, 19 nt, Artificial Sequence
  Description of Artificial Sequence: Synthetic oligonucleotide
  Antisense strand to SEQ ID NO: 2542824
ugucacaucauucuggaag

SEQ ID NO: 2542826 - RNA, 19 nt, Artificial Sequence
  Description of Artificial Sequence: Synthetic oligonucleotide
  Sense strand starting at position 3465 of SEQ ID NO: 1888576
aaagaugucucuggaguau

SEQ ID NO: 2542827 - RNA, 19 nt, Artificial Sequence
  Description of Artificial Sequence: Synthetic oligonucleotide
  Antisense strand to SEQ ID NO: 2542826
auacuccagagacaucuuu

SEQ ID NO: 2542828 - RNA, 19 nt, Artificial Sequence
  Description of Artificial Sequence: Synthetic oligonucleotide
  Sense strand starting at position 3579 of SEQ ID NO: 1888576
gccucauaguucuauauau

SEQ ID NO: 2542829 - RNA, 19 nt, Artificial Sequence
  Description of Artificial Sequence: Synthetic oligonucleotide
  Antisense strand to SEQ ID NO: 2542828
auauauagaacuaugaggc

SEQ ID NO: 2542830 - RNA, 19 nt, Artificial Sequence
  Description of Artificial Sequence: Synthetic oligonucleotide
  Sense strand starting at position 885 of SEQ ID NO: 1888576
ggacuugacuguugggcau

SEQ ID NO: 2542831 - RNA, 19 nt, Artificial Sequence
  Description of Artificial Sequence: Synthetic oligonucleotide
  Antisense strand to SEQ ID NO: 2542830
augcccaacagucaagucc

SEQ ID NO: 2542832 - RNA, 19 nt, Artificial Sequence
  Description of Artificial Sequence: Synthetic oligonucleotide
  Sense strand starting at position 2077 of SEQ ID NO: 1888576
ccaacuucguugcauauua

SEQ ID NO: 2542833 - RNA, 19 nt, Artificial Sequence
  Description of Artificial Sequence: Synthetic oligonucleotide
  Antisense strand to SEQ ID NO: 2542832
uaauaugcaacgaaguugg

SEQ ID NO: 2542834 - RNA, 19 nt, Artificial Sequence
  Description of Artificial Sequence: Synthetic oligonucleotide
  Sense strand starting at position 2641 of SEQ ID NO: 1888576
ucugguugcuaccggaaua

SEQ ID NO: 2542835 - RNA, 19 nt, Artificial Sequence
  Description of Artificial Sequence: Synthetic oligonucleotide
  Antisense strand to SEQ ID NO: 2542834
uauuccgguagcaaccaga

SEQ ID NO: 2542836 - RNA, 19 nt, Artificial Sequence
  Description of Artificial Sequence: Synthetic oligonucleotide
  Sense strand starting at position 3113 of SEQ ID NO: 1888577
agcuaaauugauuacgaua

SEQ ID NO: 2542837 - RNA, 19 nt, Artificial Sequence
  Description of Artificial Sequence: Synthetic oligonucleotide
  Antisense strand to SEQ ID NO: 2542836
uaucguaaucaauuuagcu

SEQ ID NO: 2542838 - RNA, 19 nt, Artificial Sequence
  Description of Artificial Sequence: Synthetic oligonucleotide
  Sense strand starting at position 2302 of SEQ ID NO: 1888577
cguaguucacgugcacaga

SEQ ID NO: 2542839 - RNA, 19 nt, Artificial Sequence
  Description of Artificial Sequence: Synthetic oligonucleotide
  Antisense strand to SEQ ID NO: 2542838
ucugugcacgugaacuacg

SEQ ID NO: 2542840 - RNA, 19 nt, Artificial Sequence
  Description of Artificial Sequence: Synthetic oligonucleotide
  Sense strand starting at position 2836 of SEQ ID NO: 1888577
acaaccaugggucauguua

SEQ ID NO: 2542841 - RNA, 19 nt, Artificial Sequence
  Description of Artificial Sequence: Synthetic oligonucleotide
  Antisense strand to SEQ ID NO: 2542840
uaacaugacccaugguugu

SEQ ID NO: 2542842 - RNA, 19 nt, Artificial Sequence
  Description of Artificial Sequence: Synthetic oligonucleotide
  Sense strand starting at position 2454 of SEQ ID NO: 1888577
ggaagucaagucugaugaa

SEQ ID NO: 2542843 - RNA, 19 nt, Artificial Sequence
  Description of Artificial Sequence: Synthetic oligonucleotide
  Antisense strand to SEQ ID NO: 2542842
uucaucagacuugacuucc

SEQ ID NO: 2542844 - RNA, 19 nt, Artificial Sequence
  Description of Artificial Sequence: Synthetic oligonucleotide
  Sense strand starting at position 188 of SEQ ID NO: 1888577
guguguuugcagccuggau

SEQ ID NO: 2542845 - RNA, 19 nt, Artificial Sequence
  Description of Artificial Sequence: Synthetic oligonucleotide
  Antisense strand to SEQ ID NO: 2542844
auccaggcugcaaacacac

SEQ ID NO: 2542846 - RNA, 19 nt, Artificial Sequence
  Description of Artificial Sequence: Synthetic oligonucleotide
  Sense strand starting at position 463 of SEQ ID NO: 1888577
agaauuucgucucuccagu

SEQ ID NO: 2542847 - RNA, 19 nt, Artificial Sequence
  Description of Artificial Sequence: Synthetic oligonucleotide
  Antisense strand to SEQ ID NO: 2542846
acuggagagacgaaauucu

SEQ ID NO: 2542848 - RNA, 19 nt, Artificial Sequence
  Description of Artificial Sequence: Synthetic oligonucleotide
  Sense strand starting at position 452 of SEQ ID NO: 1888577
acaagacuuugagaauuuc

SEQ ID NO: 2542849 - RNA, 19 nt, Artificial Sequence
  Description of Artificial Sequence: Synthetic oligonucleotide
  Antisense strand to SEQ ID NO: 2542848
gaaauucucaaagucuugu

SEQ ID NO: 2542850 - RNA, 19 nt, Artificial Sequence
  Description of Artificial Sequence: Synthetic oligonucleotide
  Sense strand starting at position 3635 of SEQ ID NO: 1888577
ccuauaauucugggaacga

SEQ ID NO: 2542851 - RNA, 19 nt, Artificial Sequence
  Description of Artificial Sequence: Synthetic oligonucleotide
  Antisense strand to SEQ ID NO: 2542850
ucguucccagaauuauagg

SEQ ID NO: 2542852 - RNA, 19 nt, Artificial Sequence
  Description of Artificial Sequence: Synthetic oligonucleotide
  Sense strand starting at position 2461 of SEQ ID NO: 1888577
aagucugaugaaggucaua

SEQ ID NO: 2542853 - RNA, 19 nt, Artificial Sequence
  Description of Artificial Sequence: Synthetic oligonucleotide
  Antisense strand to SEQ ID NO: 2542852
uaugaccuucaucagacuu

SEQ ID NO: 2542854 - RNA, 19 nt, Artificial Sequence
  Description of Artificial Sequence: Synthetic oligonucleotide
  Sense strand starting at position 1239 of SEQ ID NO: 1888577
ucgccaucggcugcaaauu

SEQ ID NO: 2542855 - RNA, 19 nt, Artificial Sequence
  Description of Artificial Sequence: Synthetic oligonucleotide
  Antisense strand to SEQ ID NO: 2542854
aauuugcagccgauggcga

SEQ ID NO: 2542856 - RNA, 19 nt, Artificial Sequence
  Description of Artificial Sequence: Synthetic oligonucleotide
  Sense strand starting at position 3121 of SEQ ID NO: 1888577
ugauuacgauaccuuggau

SEQ ID NO: 2542857 - RNA, 19 nt, Artificial Sequence
  Description of Artificial Sequence: Synthetic oligonucleotide
  Antisense strand to SEQ ID NO: 2542856
auccaagguaucguaauca

SEQ ID NO: 2542858 - RNA, 19 nt, Artificial Sequence
  Description of Artificial Sequence: Synthetic oligonucleotide
  Sense strand starting at position 1091 of SEQ ID NO: 1888577
ccaucucuccugggaauca

SEQ ID NO: 2542859 - RNA, 19 nt, Artificial Sequence
  Description of Artificial Sequence: Synthetic oligonucleotide
  Antisense strand to SEQ ID NO: 2542858
ugauucccaggagagaugg

SEQ ID NO: 2542860 - RNA, 19 nt, Artificial Sequence
  Description of Artificial Sequence: Synthetic oligonucleotide
  Sense strand starting at position 21 of SEQ ID NO: 1888577
gcgguuucucugccuacuu

SEQ ID NO: 2542861 - RNA, 19 nt, Artificial Sequence
  Description of Artificial Sequence: Synthetic oligonucleotide
  Antisense strand to SEQ ID NO: 2542860
aaguaggcagagaaaccgc

SEQ ID NO: 2542862 - RNA, 19 nt, Artificial Sequence
  Description of Artificial Sequence: Synthetic oligonucleotide
  Sense strand starting at position 1380 of SEQ ID NO: 1888577
uguguuugacacuaauuac

SEQ ID NO: 2542863 - RNA, 19 nt, Artificial Sequence
  Description of Artificial Sequence: Synthetic oligonucleotide
  Antisense strand to SEQ ID NO: 2542862
guaauuagugucaaacaca

SEQ ID NO: 2542864 - RNA, 19 nt, Artificial Sequence
  Description of Artificial Sequence: Synthetic oligonucleotide
  Sense strand starting at position 2315 of SEQ ID NO: 1888577
cacagaugugugcaaacau

SEQ ID NO: 2542865 - RNA, 19 nt, Artificial Sequence
  Description of Artificial Sequence: Synthetic oligonucleotide
  Antisense strand to SEQ ID NO: 2542864
auguuugcacacaucugug

SEQ ID NO: 2542866 - RNA, 19 nt, Artificial Sequence
  Description of Artificial Sequence: Synthetic oligonucleotide
  Sense strand starting at position 2260 of SEQ ID NO: 1888577
agggaacccuguuuaguaa

SEQ ID NO: 2542867 - RNA, 19 nt, Artificial Sequence
  Description of Artificial Sequence: Synthetic oligonucleotide
  Antisense strand to SEQ ID NO: 2542866
uuacuaaacaggguucccu

SEQ ID NO: 2542868 - RNA, 19 nt, Artificial Sequence
  Description of Artificial Sequence: Synthetic oligonucleotide
  Sense strand starting at position 2604 of SEQ ID NO: 1888577
ggugacccuugaucucaga

SEQ ID NO: 2542869 - RNA, 19 nt, Artificial Sequence
  Description of Artificial Sequence: Synthetic oligonucleotide
  Antisense strand to SEQ ID NO: 2542868
ucugagaucaagggucacc

SEQ ID NO: 2542870 - RNA, 19 nt, Artificial Sequence
  Description of Artificial Sequence: Synthetic oligonucleotide
  Sense strand starting at position 203 of SEQ ID NO: 1888577
ggaugugaugcccacaucu

SEQ ID NO: 2542871 - RNA, 19 nt, Artificial Sequence
  Description of Artificial Sequence: Synthetic oligonucleotide
  Antisense strand to SEQ ID NO: 2542870
agaugugggcaucacaucc

SEQ ID NO: 2542872 - RNA, 19 nt, Artificial Sequence
  Description of Artificial Sequence: Synthetic oligonucleotide
  Sense strand starting at position 2281 of SEQ ID NO: 1888577
cugcaugugcaacagauaa

SEQ ID NO: 2542873 - RNA, 19 nt, Artificial Sequence
  Description of Artificial Sequence: Synthetic oligonucleotide
  Antisense strand to SEQ ID NO: 2542872
uuaucuguugcacaugcag

SEQ ID NO: 2542874 - RNA, 19 nt, Artificial Sequence
  Description of Artificial Sequence: Synthetic oligonucleotide
  Sense strand starting at position 2762 of SEQ ID NO: 1888577
cacagaucucuguaacgug

SEQ ID NO: 2542875 - RNA, 19 nt, Artificial Sequence
  Description of Artificial Sequence: Synthetic oligonucleotide
  Antisense strand to SEQ ID NO: 2542874
cacguuacagagaucugug

SEQ ID NO: 2542876 - RNA, 19 nt, Artificial Sequence
  Description of Artificial Sequence: Synthetic oligonucleotide
  Sense strand starting at position 1323 of SEQ ID NO: 1888577
cuuaauuaguacuugguaa

SEQ ID NO: 2542877 - RNA, 19 nt, Artificial Sequence
  Description of Artificial Sequence: Synthetic oligonucleotide
  Antisense strand to SEQ ID NO: 2542876
uuaccaaguacuaauuaag

SEQ ID NO: 2542878 - RNA, 19 nt, Artificial Sequence
  Description of Artificial Sequence: Synthetic oligonucleotide
  Sense strand starting at position 2325 of SEQ ID NO: 1888577
ugcaaacaucuaugaugua

SEQ ID NO: 2542879 - RNA, 19 nt, Artificial Sequence
  Description of Artificial Sequence: Synthetic oligonucleotide
  Antisense strand to SEQ ID NO: 2542878
uacaucauagauguuugca

SEQ ID NO: 2542880 - RNA, 19 nt, Artificial Sequence
  Description of Artificial Sequence: Synthetic oligonucleotide
  Sense strand starting at position 205 of SEQ ID NO: 1888577
augugaugcccacaucucu

SEQ ID NO: 2542881 - RNA, 19 nt, Artificial Sequence
  Description of Artificial Sequence: Synthetic oligonucleotide
  Antisense strand to SEQ ID NO: 2542880
agagaugugggcaucacau

SEQ ID NO: 2542882 - RNA, 19 nt, Artificial Sequence
  Description of Artificial Sequence: Synthetic oligonucleotide
  Sense strand starting at position 1335 of SEQ ID NO: 1888577
uugguaauaucaccaagcu

SEQ ID NO: 2542883 - RNA, 19 nt, Artificial Sequence
  Description of Artificial Sequence: Synthetic oligonucleotide
  Antisense strand to SEQ ID NO: 2542882
agcuuggugauauuaccaa

SEQ ID NO: 2542884 - RNA, 19 nt, Artificial Sequence
  Description of Artificial Sequence: Synthetic oligonucleotide
  Sense strand starting at position 2026 of SEQ ID NO: 1888577
ggagggaaguccguguuga

SEQ ID NO: 2542885 - RNA, 19 nt, Artificial Sequence
  Description of Artificial Sequence: Synthetic oligonucleotide
  Antisense strand to SEQ ID NO: 2542884
ucaacacggacuucccucc

SEQ ID NO: 2542886 - RNA, 19 nt, Artificial Sequence
  Description of Artificial Sequence: Synthetic oligonucleotide
  Sense strand starting at position 2027 of SEQ ID NO: 1888577
gagggaaguccguguugac

SEQ ID NO: 2542887 - RNA, 19 nt, Artificial Sequence
  Description of Artificial Sequence: Synthetic oligonucleotide
  Antisense strand to SEQ ID NO: 2542886
gucaacacggacuucccuc

SEQ ID NO: 2542888 - RNA, 19 nt, Artificial Sequence
  Description of Artificial Sequence: Synthetic oligonucleotide
  Sense strand starting at position 450 of SEQ ID NO: 1888577
ugacaagacuuugagaauu

SEQ ID NO: 2542889 - RNA, 19 nt, Artificial Sequence
  Description of Artificial Sequence: Synthetic oligonucleotide
  Antisense strand to SEQ ID NO: 2542888
aauucucaaagucuuguca

SEQ ID NO: 2542890 - RNA, 19 nt, Artificial Sequence
  Description of Artificial Sequence: Synthetic oligonucleotide
  Sense strand starting at position 399 of SEQ ID NO: 1888577
accaaugagagcugugcuu

SEQ ID NO: 2542891 - RNA, 19 nt, Artificial Sequence
  Description of Artificial Sequence: Synthetic oligonucleotide
  Antisense strand to SEQ ID NO: 2542890
aagcacagcucucauuggu

SEQ ID NO: 2542892 - RNA, 19 nt, Artificial Sequence
  Description of Artificial Sequence: Synthetic oligonucleotide
  Sense strand starting at position 1373 of SEQ ID NO: 1888577
gaucuuguguguuugacac

SEQ ID NO: 2542893 - RNA, 19 nt, Artificial Sequence
  Description of Artificial Sequence: Synthetic oligonucleotide
  Antisense strand to SEQ ID NO: 2542892
gugucaaacacacaagauc

SEQ ID NO: 2542894 - RNA, 19 nt, Artificial Sequence
  Description of Artificial Sequence: Synthetic oligonucleotide
  Sense strand starting at position 1357 of SEQ ID NO: 1888577
aguuuauggcuuuguagau

SEQ ID NO: 2542895 - RNA, 19 nt, Artificial Sequence
  Description of Artificial Sequence: Synthetic oligonucleotide
  Antisense strand to SEQ ID NO: 2542894
aucuacaaagccauaaacu

SEQ ID NO: 2542896 - RNA, 19 nt, Artificial Sequence
  Description of Artificial Sequence: Synthetic oligonucleotide
  Sense strand starting at position 2303 of SEQ ID NO: 1888577
guaguucacgugcacagau

SEQ ID NO: 2542897 - RNA, 19 nt, Artificial Sequence
  Description of Artificial Sequence: Synthetic oligonucleotide
  Antisense strand to SEQ ID NO: 2542896
aucugugcacgugaacuac

SEQ ID NO: 2542898 - RNA, 19 nt, Artificial Sequence
  Description of Artificial Sequence: Synthetic oligonucleotide
  Sense strand starting at position 259 of SEQ ID NO: 1888577
gggauuagaugugaccaag

SEQ ID NO: 2542899 - RNA, 19 nt, Artificial Sequence
  Description of Artificial Sequence: Synthetic oligonucleotide
  Antisense strand to SEQ ID NO: 2542898
cuuggucacaucuaauccc

SEQ ID NO: 2542900 - RNA, 19 nt, Artificial Sequence
  Description of Artificial Sequence: Synthetic oligonucleotide
  Sense strand starting at position 1358 of SEQ ID NO: 1888577
guuuauggcuuuguagauc

SEQ ID NO: 2542901 - RNA, 19 nt, Artificial Sequence
  Description of Artificial Sequence: Synthetic oligonucleotide
  Antisense strand to SEQ ID NO: 2542900
gaucuacaaagccauaaac

SEQ ID NO: 2542902 - RNA, 19 nt, Artificial Sequence
  Description of Artificial Sequence: Synthetic oligonucleotide
  Sense strand starting at position 2777 of SEQ ID NO: 1888577
cgugcuuaugugggaggau

SEQ ID NO: 2542903 - RNA, 19 nt, Artificial Sequence
  Description of Artificial Sequence: Synthetic oligonucleotide
  Antisense strand to SEQ ID NO: 2542902
auccucccacauaagcacg

SEQ ID NO: 2542904 - RNA, 19 nt, Artificial Sequence
  Description of Artificial Sequence: Synthetic oligonucleotide
  Sense strand starting at position 3081 of SEQ ID NO: 1888577
agagacacaugcuacaaua

SEQ ID NO: 2542905 - RNA, 19 nt, Artificial Sequence
  Description of Artificial Sequence: Synthetic oligonucleotide
  Antisense strand to SEQ ID NO: 2542904
uauuguagcaugugucucu

SEQ ID NO: 2542906 - RNA, 19 nt, Artificial Sequence
  Description of Artificial Sequence: Synthetic oligonucleotide
  Sense strand starting at position 3189 of SEQ ID NO: 1888577
gggacuucucgaugcuguu

SEQ ID NO: 2542907 - RNA, 19 nt, Artificial Sequence
  Description of Artificial Sequence: Synthetic oligonucleotide
  Antisense strand to SEQ ID NO: 2542906
aacagcaucgagaaguccc

SEQ ID NO: 2542908 - RNA, 19 nt, Artificial Sequence
  Description of Artificial Sequence: Synthetic oligonucleotide
  Sense strand starting at position 1370 of SEQ ID NO: 1888577
guagaucuuguguguuuga

SEQ ID NO: 2542909 - RNA, 19 nt, Artificial Sequence
  Description of Artificial Sequence: Synthetic oligonucleotide
  Antisense strand to SEQ ID NO: 2542908
ucaaacacacaagaucuac

SEQ ID NO: 2542910 - RNA, 19 nt, Artificial Sequence
  Description of Artificial Sequence: Synthetic oligonucleotide
  Sense strand starting at position 1354 of SEQ ID NO: 1888577
gugaguuuauggcuuugua

SEQ ID NO: 2542911 - RNA, 19 nt, Artificial Sequence
  Description of Artificial Sequence: Synthetic oligonucleotide
  Antisense strand to SEQ ID NO: 2542910
uacaaagccauaaacucac

SEQ ID NO: 2542912 - RNA, 19 nt, Artificial Sequence
  Description of Artificial Sequence: Synthetic oligonucleotide
  Sense strand starting at position 1110 of SEQ ID NO: 1888577
ggugcugccuggcugagaa

SEQ ID NO: 2542913 - RNA, 19 nt, Artificial Sequence
  Description of Artificial Sequence: Synthetic oligonucleotide
  Antisense strand to SEQ ID NO: 2542912
uucucagccaggcagcacc

SEQ ID NO: 2542914 - RNA, 19 nt, Artificial Sequence
  Description of Artificial Sequence: Synthetic oligonucleotide
  Sense strand starting at position 3627 of SEQ ID NO: 1888577
ccgugcugccuauaauucu

SEQ ID NO: 2542915 - RNA, 19 nt, Artificial Sequence
  Description of Artificial Sequence: Synthetic oligonucleotide
  Antisense strand to SEQ ID NO: 2542914
agaauuauaggcagcacgg

SEQ ID NO: 2542916 - RNA, 19 nt, Artificial Sequence
  Description of Artificial Sequence: Synthetic oligonucleotide
  Sense strand starting at position 2801 of SEQ ID NO: 1888578
cgggcuauggcuucuuguu

SEQ ID NO: 2542917 - RNA, 19 nt, Artificial Sequence
  Description of Artificial Sequence: Synthetic oligonucleotide
  Antisense strand to SEQ ID NO: 2542916
aacaagaagccauagcccg

SEQ ID NO: 2542918 - RNA, 19 nt, Artificial Sequence
  Description of Artificial Sequence: Synthetic oligonucleotide
  Sense strand starting at position 2729 of SEQ ID NO: 1888579
cgagguuuccuggauggga

SEQ ID NO: 2542919 - RNA, 19 nt, Artificial Sequence
  Description of Artificial Sequence: Synthetic oligonucleotide
  Antisense strand to SEQ ID NO: 2542918
ucccauccaggaaaccucg

SEQ ID NO: 2542920 - RNA, 19 nt, Artificial Sequence
  Description of Artificial Sequence: Synthetic oligonucleotide
  Sense strand starting at position 2249 of SEQ ID NO: 1888578
ugggauaaccaggguuuca

SEQ ID NO: 2542921 - RNA, 19 nt, Artificial Sequence
  Description of Artificial Sequence: Synthetic oligonucleotide
  Antisense strand to SEQ ID NO: 2542920
ugaaacccugguuauccca

SEQ ID NO: 2542922 - RNA, 19 nt, Artificial Sequence
  Description of Artificial Sequence: Synthetic oligonucleotide
  Sense strand starting at position 3402 of SEQ ID NO: 1888579
ggcaucugauaauuaaacu

SEQ ID NO: 2542923 - RNA, 19 nt, Artificial Sequence
  Description of Artificial Sequence: Synthetic oligonucleotide
  Antisense strand to SEQ ID NO: 2542922
aguuuaauuaucagaugcc

SEQ ID NO: 2542924 - RNA, 19 nt, Artificial Sequence
  Description of Artificial Sequence: Synthetic oligonucleotide
  Sense strand starting at position 3670 of SEQ ID NO: 1888578
uggacuucuacgggaucau

SEQ ID NO: 2542925 - RNA, 19 nt, Artificial Sequence
  Description of Artificial Sequence: Synthetic oligonucleotide
  Antisense strand to SEQ ID NO: 2542924
augaucccguagaagucca

SEQ ID NO: 2542926 - RNA, 19 nt, Artificial Sequence
  Description of Artificial Sequence: Synthetic oligonucleotide
  Sense strand starting at position 3515 of SEQ ID NO: 1888579
ccaccuuuccaguggaaac

SEQ ID NO: 2542927 - RNA, 19 nt, Artificial Sequence
  Description of Artificial Sequence: Synthetic oligonucleotide
  Antisense strand to SEQ ID NO: 2542926
guuuccacuggaaaggugg

SEQ ID NO: 2542928 - RNA, 19 nt, Artificial Sequence
  Description of Artificial Sequence: Synthetic oligonucleotide
  Sense strand starting at position 3483 of SEQ ID NO: 1888579
gcaguagagcuccaauaca

SEQ ID NO: 2542929 - RNA, 19 nt, Artificial Sequence
  Description of Artificial Sequence: Synthetic oligonucleotide
  Antisense strand to SEQ ID NO: 2542928
uguauuggagcucuacugc

SEQ ID NO: 2542930 - RNA, 19 nt, Artificial Sequence
  Description of Artificial Sequence: Synthetic oligonucleotide
  Sense strand starting at position 23 of SEQ ID NO: 1888578
cacggcuuuguccaagaga

SEQ ID NO: 2542931 - RNA, 19 nt, Artificial Sequence
  Description of Artificial Sequence: Synthetic oligonucleotide
  Antisense strand to SEQ ID NO: 2542930
ucucuuggacaaagccgug

SEQ ID NO: 2542932 - RNA, 19 nt, Artificial Sequence
  Description of Artificial Sequence: Synthetic oligonucleotide
  Sense strand starting at position 596 of SEQ ID NO: 1888578
ccggauuccagcugggaaa

SEQ ID NO: 2542933 - RNA, 19 nt, Artificial Sequence
  Description of Artificial Sequence: Synthetic oligonucleotide
  Antisense strand to SEQ ID NO: 2542932
uuucccagcuggaauccgg

SEQ ID NO: 2542934 - RNA, 19 nt, Artificial Sequence
  Description of Artificial Sequence: Synthetic oligonucleotide
  Sense strand starting at position 597 of SEQ ID NO: 1888578
cggauuccagcugggaaau

SEQ ID NO: 2542935 - RNA, 19 nt, Artificial Sequence
  Description of Artificial Sequence: Synthetic oligonucleotide
  Antisense strand to SEQ ID NO: 2542934
auuucccagcuggaauccg

SEQ ID NO: 2542936 - RNA, 19 nt, Artificial Sequence
  Description of Artificial Sequence: Synthetic oligonucleotide
  Sense strand starting at position 3599 of SEQ ID NO: 1888579
agaauaacguaucuggcaa

SEQ ID NO: 2542937 - RNA, 19 nt, Artificial Sequence
  Description of Artificial Sequence: Synthetic oligonucleotide
  Antisense strand to SEQ ID NO: 2542936
uugccagauacguuauucu

SEQ ID NO: 2542938 - RNA, 19 nt, Artificial Sequence
  Description of Artificial Sequence: Synthetic oligonucleotide
  Sense strand starting at position 3209 of SEQ ID NO: 1888578
cccuccauugugcaaugau

SEQ ID NO: 2542939 - RNA, 19 nt, Artificial Sequence
  Description of Artificial Sequence: Synthetic oligonucleotide
  Antisense strand to SEQ ID NO: 2542938
aucauugcacaauggaggg

SEQ ID NO: 2542940 - RNA, 19 nt, Artificial Sequence
  Description of Artificial Sequence: Synthetic oligonucleotide
  Sense strand starting at position 3886 of SEQ ID NO: 1888578
acaacugucccuggguaua

SEQ ID NO: 2542941 - RNA, 19 nt, Artificial Sequence
  Description of Artificial Sequence: Synthetic oligonucleotide
  Antisense strand to SEQ ID NO: 2542940
uauacccagggacaguugu

SEQ ID NO: 2542942 - RNA, 19 nt, Artificial Sequence
  Description of Artificial Sequence: Synthetic oligonucleotide
  Sense strand starting at position 3885 of SEQ ID NO: 1888578
cacaacugucccuggguau

SEQ ID NO: 2542943 - RNA, 19 nt, Artificial Sequence
  Description of Artificial Sequence: Synthetic oligonucleotide
  Antisense strand to SEQ ID NO: 2542942
auacccagggacaguugug

SEQ ID NO: 2542944 - RNA, 19 nt, Artificial Sequence
  Description of Artificial Sequence: Synthetic oligonucleotide
  Sense strand starting at position 506 of SEQ ID NO: 1888578
cgccuuugcacucagggaa

SEQ ID NO: 2542945 - RNA, 19 nt, Artificial Sequence
  Description of Artificial Sequence: Synthetic oligonucleotide
  Antisense strand to SEQ ID NO: 2542944
uucccugagugcaaaggcg

SEQ ID NO: 2542946 - RNA, 19 nt, Artificial Sequence
  Description of Artificial Sequence: Synthetic oligonucleotide
  Sense strand starting at position 2987 of SEQ ID NO: 1888578
caggauauguugcuuuauu

SEQ ID NO: 2542947 - RNA, 19 nt, Artificial Sequence
  Description of Artificial Sequence: Synthetic oligonucleotide
  Antisense strand to SEQ ID NO: 2542946
aauaaagcaacauauccug

SEQ ID NO: 2542948 - RNA, 19 nt, Artificial Sequence
  Description of Artificial Sequence: Synthetic oligonucleotide
  Sense strand starting at position 3007 of SEQ ID NO: 1888579
uccuuuauuuaggauaugu

SEQ ID NO: 2542949 - RNA, 19 nt, Artificial Sequence
  Description of Artificial Sequence: Synthetic oligonucleotide
  Antisense strand to SEQ ID NO: 2542948
acauauccuaaauaaagga

SEQ ID NO: 2542950 - RNA, 19 nt, Artificial Sequence
  Description of Artificial Sequence: Synthetic oligonucleotide
  Sense strand starting at position 3840 of SEQ ID NO: 1888578
acuugauguggcugcagaa

SEQ ID NO: 2542951 - RNA, 19 nt, Artificial Sequence
  Description of Artificial Sequence: Synthetic oligonucleotide
  Antisense strand to SEQ ID NO: 2542950
uucugcagccacaucaagu

SEQ ID NO: 2542952 - RNA, 19 nt, Artificial Sequence
  Description of Artificial Sequence: Synthetic oligonucleotide
  Sense strand starting at position 2837 of SEQ ID NO: 1888579
ugacuuccuguuugcaaca

SEQ ID NO: 2542953 - RNA, 19 nt, Artificial Sequence
  Description of Artificial Sequence: Synthetic oligonucleotide
  Antisense strand to SEQ ID NO: 2542952
uguugcaaacaggaaguca

SEQ ID NO: 2542954 - RNA, 19 nt, Artificial Sequence
  Description of Artificial Sequence: Synthetic oligonucleotide
  Sense strand starting at position 3212 of SEQ ID NO: 1888578
uccauugugcaaugaugca

SEQ ID NO: 2542955 - RNA, 19 nt, Artificial Sequence
  Description of Artificial Sequence: Synthetic oligonucleotide
  Antisense strand to SEQ ID NO: 2542954
ugcaucauugcacaaugga

SEQ ID NO: 2542956 - RNA, 19 nt, Artificial Sequence
  Description of Artificial Sequence: Synthetic oligonucleotide
  Sense strand starting at position 1638 of SEQ ID NO: 1888579
ugauccagccugugguuua

SEQ ID NO: 2542957 - RNA, 19 nt, Artificial Sequence
  Description of Artificial Sequence: Synthetic oligonucleotide
  Antisense strand to SEQ ID NO: 2542956
uaaaccacaggcuggauca

SEQ ID NO: 2542958 - RNA, 19 nt, Artificial Sequence
  Description of Artificial Sequence: Synthetic oligonucleotide
  Sense strand starting at position 2989 of SEQ ID NO: 1888579
uggaaacauuauggaggau

SEQ ID NO: 2542959 - RNA, 19 nt, Artificial Sequence
  Description of Artificial Sequence: Synthetic oligonucleotide
  Antisense strand to SEQ ID NO: 2542958
auccuccauaauguuucca

SEQ ID NO: 2542960 - RNA, 19 nt, Artificial Sequence
  Description of Artificial Sequence: Synthetic oligonucleotide
  Sense strand starting at position 2806 of SEQ ID NO: 1888578
uauggcuucuuguuugcaa

SEQ ID NO: 2542961 - RNA, 19 nt, Artificial Sequence
  Description of Artificial Sequence: Synthetic oligonucleotide
  Antisense strand to SEQ ID NO: 2542960
uugcaaacaagaagccaua

SEQ ID NO: 2542962 - RNA, 19 nt, Artificial Sequence
  Description of Artificial Sequence: Synthetic oligonucleotide
  Sense strand starting at position 2808 of SEQ ID NO: 1888578
uggcuucuuguuugcaaca

SEQ ID NO: 2542963 - RNA, 19 nt, Artificial Sequence
  Description of Artificial Sequence: Synthetic oligonucleotide
  Antisense strand to SEQ ID NO: 2542962
uguugcaaacaagaagcca

SEQ ID NO: 2542964 - RNA, 19 nt, Artificial Sequence
  Description of Artificial Sequence: Synthetic oligonucleotide
  Sense strand starting at position 2929 of SEQ ID NO: 1888579
gccugagggucgucauucu

SEQ ID NO: 2542965 - RNA, 19 nt, Artificial Sequence
  Description of Artificial Sequence: Synthetic oligonucleotide
  Antisense strand to SEQ ID NO: 2542964
agaaugacgacccucaggc

SEQ ID NO: 2542966 - RNA, 19 nt, Artificial Sequence
  Description of Artificial Sequence: Synthetic oligonucleotide
  Sense strand starting at position 2977 of SEQ ID NO: 1888579
uuagaaaucugguggaaac

SEQ ID NO: 2542967 - RNA, 19 nt, Artificial Sequence
  Description of Artificial Sequence: Synthetic oligonucleotide
  Antisense strand to SEQ ID NO: 2542966
guuuccaccagauuucuaa

SEQ ID NO: 2542968 - RNA, 19 nt, Artificial Sequence
  Description of Artificial Sequence: Synthetic oligonucleotide
  Sense strand starting at position 2948 of SEQ ID NO: 1888578
uuagaaaucuggugggaac

SEQ ID NO: 2542969 - RNA, 19 nt, Artificial Sequence
  Description of Artificial Sequence: Synthetic oligonucleotide
  Antisense strand to SEQ ID NO: 2542968
guucccaccagauuucuaa

SEQ ID NO: 2542970 - RNA, 19 nt, Artificial Sequence
  Description of Artificial Sequence: Synthetic oligonucleotide
  Sense strand starting at position 3827 of SEQ ID NO: 1888578
auccaugagugguacuuga

SEQ ID NO: 2542971 - RNA, 19 nt, Artificial Sequence
  Description of Artificial Sequence: Synthetic oligonucleotide
  Antisense strand to SEQ ID NO: 2542970
ucaaguaccacucauggau

SEQ ID NO: 2542972 - RNA, 19 nt, Artificial Sequence
  Description of Artificial Sequence: Synthetic oligonucleotide
  Sense strand starting at position 2951 of SEQ ID NO: 1888578
gaaaucuggugggaacguu

SEQ ID NO: 2542973 - RNA, 19 nt, Artificial Sequence
  Description of Artificial Sequence: Synthetic oligonucleotide
  Antisense strand to SEQ ID NO: 2542972
aacguucccaccagauuuc

SEQ ID NO: 2542974 - RNA, 19 nt, Artificial Sequence
  Description of Artificial Sequence: Synthetic oligonucleotide
  Sense strand starting at position 2237 of SEQ ID NO: 1888579
cacacaggcuucugggaua

SEQ ID NO: 2542975 - RNA, 19 nt, Artificial Sequence
  Description of Artificial Sequence: Synthetic oligonucleotide
  Antisense strand to SEQ ID NO: 2542974
uaucccagaagccugugug

SEQ ID NO: 2542976 - RNA, 19 nt, Artificial Sequence
  Description of Artificial Sequence: Synthetic oligonucleotide
  Sense strand starting at position 3669 of SEQ ID NO: 1888578
cuggacuucuacgggauca

SEQ ID NO: 2542977 - RNA, 19 nt, Artificial Sequence
  Description of Artificial Sequence: Synthetic oligonucleotide
  Antisense strand to SEQ ID NO: 2542976
ugaucccguagaaguccag

SEQ ID NO: 2542978 - RNA, 19 nt, Artificial Sequence
  Description of Artificial Sequence: Synthetic oligonucleotide
  Sense strand starting at position 2237 of SEQ ID NO: 1888578
ugcaaagccuucugggaua

SEQ ID NO: 2542979 - RNA, 19 nt, Artificial Sequence
  Description of Artificial Sequence: Synthetic oligonucleotide
  Antisense strand to SEQ ID NO: 2542978
uaucccagaaggcuuugca

SEQ ID NO: 2542980 - RNA, 19 nt, Artificial Sequence
  Description of Artificial Sequence: Synthetic oligonucleotide
  Sense strand starting at position 1639 of SEQ ID NO: 1888579
gauccagccugugguuuaa

SEQ ID NO: 2542981 - RNA, 19 nt, Artificial Sequence
  Description of Artificial Sequence: Synthetic oligonucleotide
  Antisense strand to SEQ ID NO: 2542980
uuaaaccacaggcuggauc

SEQ ID NO: 2542982 - RNA, 19 nt, Artificial Sequence
  Description of Artificial Sequence: Synthetic oligonucleotide
  Sense strand starting at position 3436 of SEQ ID NO: 1888580
uggacauuaucagugauaa

SEQ ID NO: 2542983 - RNA, 19 nt, Artificial Sequence
  Description of Artificial Sequence: Synthetic oligonucleotide
  Antisense strand to SEQ ID NO: 2542982
uuaucacugauaaugucca

SEQ ID NO: 2542984 - RNA, 19 nt, Artificial Sequence
  Description of Artificial Sequence: Synthetic oligonucleotide
  Sense strand starting at position 3437 of SEQ ID NO: 1888580
ggacauuaucagugauaau

SEQ ID NO: 2542985 - RNA, 19 nt, Artificial Sequence
  Description of Artificial Sequence: Synthetic oligonucleotide
  Antisense strand to SEQ ID NO: 2542984
auuaucacugauaaugucc

SEQ ID NO: 2542986 - RNA, 19 nt, Artificial Sequence
  Description of Artificial Sequence: Synthetic oligonucleotide
  Sense strand starting at position 2573 of SEQ ID NO: 1888580
uaaugaugacggcauaacu

SEQ ID NO: 2542987 - RNA, 19 nt, Artificial Sequence
  Description of Artificial Sequence: Synthetic oligonucleotide
  Antisense strand to SEQ ID NO: 2542986
aguuaugccgucaucauua

SEQ ID NO: 2542988 - RNA, 19 nt, Artificial Sequence
  Description of Artificial Sequence: Synthetic oligonucleotide
  Sense strand starting at position 2882 of SEQ ID NO: 1888580
cugacagauuuauauagag

SEQ ID NO: 2542989 - RNA, 19 nt, Artificial Sequence
  Description of Artificial Sequence: Synthetic oligonucleotide
  Antisense strand to SEQ ID NO: 2542988
cucuauauaaaucugucag

SEQ ID NO: 2542990 - RNA, 19 nt, Artificial Sequence
  Description of Artificial Sequence: Synthetic oligonucleotide
  Sense strand starting at position 1056 of SEQ ID NO: 1888580
auaaauaaaguucgaccaa

SEQ ID NO: 2542991 - RNA, 19 nt, Artificial Sequence
  Description of Artificial Sequence: Synthetic oligonucleotide
  Antisense strand to SEQ ID NO: 2542990
uuggucgaacuuuauuuau

SEQ ID NO: 2542992 - RNA, 19 nt, Artificial Sequence
  Description of Artificial Sequence: Synthetic oligonucleotide
  Sense strand starting at position 2292 of SEQ ID NO: 1888580
uuuccuggucacgagagaa

SEQ ID NO: 2542993 - RNA, 19 nt, Artificial Sequence
  Description of Artificial Sequence: Synthetic oligonucleotide
  Antisense strand to SEQ ID NO: 2542992
uucucucgugaccaggaaa

SEQ ID NO: 2542994 - RNA, 19 nt, Artificial Sequence
  Description of Artificial Sequence: Synthetic oligonucleotide
  Sense strand starting at position 1663 of SEQ ID NO: 1888580
aggguuaagcaugaaguua

SEQ ID NO: 2542995 - RNA, 19 nt, Artificial Sequence
  Description of Artificial Sequence: Synthetic oligonucleotide
  Antisense strand to SEQ ID NO: 2542994
uaacuucaugcuuaacccu

SEQ ID NO: 2542996 - RNA, 19 nt, Artificial Sequence
  Description of Artificial Sequence: Synthetic oligonucleotide
  Sense strand starting at position 373 of SEQ ID NO: 1888580
augcaagaucugcacuaag

SEQ ID NO: 2542997 - RNA, 19 nt, Artificial Sequence
  Description of Artificial Sequence: Synthetic oligonucleotide
  Antisense strand to SEQ ID NO: 2542996
cuuagugcagaucuugcau

SEQ ID NO: 2542998 - RNA, 19 nt, Artificial Sequence
  Description of Artificial Sequence: Synthetic oligonucleotide
  Sense strand starting at position 3795 of SEQ ID NO: 1888580
aaacuuguuggccagacua

SEQ ID NO: 2542999 - RNA, 19 nt, Artificial Sequence
  Description of Artificial Sequence: Synthetic oligonucleotide
  Antisense strand to SEQ ID NO: 2542998
uagucuggccaacaaguuu

SEQ ID NO: 2543000 - RNA, 19 nt, Artificial Sequence
  Description of Artificial Sequence: Synthetic oligonucleotide
  Sense strand starting at position 1656 of SEQ ID NO: 1888580
uccuuaaaggguuaagcau

SEQ ID NO: 2543001 - RNA, 19 nt, Artificial Sequence
  Description of Artificial Sequence: Synthetic oligonucleotide
  Antisense strand to SEQ ID NO: 2543000
augcuuaacccuuuaagga

SEQ ID NO: 2543002 - RNA, 19 nt, Artificial Sequence
  Description of Artificial Sequence: Synthetic oligonucleotide
  Sense strand starting at position 747 of SEQ ID NO: 1888580
gguauaagcugaccagaga

SEQ ID NO: 2543003 - RNA, 19 nt, Artificial Sequence
  Description of Artificial Sequence: Synthetic oligonucleotide
  Antisense strand to SEQ ID NO: 2543002
ucucuggucagcuuauacc

SEQ ID NO: 2543004 - RNA, 19 nt, Artificial Sequence
  Description of Artificial Sequence: Synthetic oligonucleotide
  Sense strand starting at position 2026 of SEQ ID NO: 1888580
agauguuaugugcagauaa

SEQ ID NO: 2543005 - RNA, 19 nt, Artificial Sequence
  Description of Artificial Sequence: Synthetic oligonucleotide
  Antisense strand to SEQ ID NO: 2543004
uuaucugcacauaacaucu

SEQ ID NO: 2543006 - RNA, 19 nt, Artificial Sequence
  Description of Artificial Sequence: Synthetic oligonucleotide
  Sense strand starting at position 1322 of SEQ ID NO: 1888580
ucugauaagugacuuacau

SEQ ID NO: 2543007 - RNA, 19 nt, Artificial Sequence
  Description of Artificial Sequence: Synthetic oligonucleotide
  Antisense strand to SEQ ID NO: 2543006
auguaagucacuuaucaga

SEQ ID NO: 2543008 - RNA, 19 nt, Artificial Sequence
  Description of Artificial Sequence: Synthetic oligonucleotide
  Sense strand starting at position 758 of SEQ ID NO: 1888580
accagagacuccuuuguga

SEQ ID NO: 2543009 - RNA, 19 nt, Artificial Sequence
  Description of Artificial Sequence: Synthetic oligonucleotide
  Antisense strand to SEQ ID NO: 2543008
ucacaaaggagucucuggu

SEQ ID NO: 2543010 - RNA, 19 nt, Artificial Sequence
  Description of Artificial Sequence: Synthetic oligonucleotide
  Sense strand starting at position 760 of SEQ ID NO: 1888580
cagagacuccuuugugaca

SEQ ID NO: 2543011 - RNA, 19 nt, Artificial Sequence
  Description of Artificial Sequence: Synthetic oligonucleotide
  Antisense strand to SEQ ID NO: 2543010
ugucacaaaggagucucug

SEQ ID NO: 2543012 - RNA, 19 nt, Artificial Sequence
  Description of Artificial Sequence: Synthetic oligonucleotide
  Sense strand starting at position 2200 of SEQ ID NO: 1888580
uggaaaccucuuugcagga

SEQ ID NO: 2543013 - RNA, 19 nt, Artificial Sequence
  Description of Artificial Sequence: Synthetic oligonucleotide
  Antisense strand to SEQ ID NO: 2543012
uccugcaaagagguuucca

SEQ ID NO: 2543014 - RNA, 19 nt, Artificial Sequence
  Description of Artificial Sequence: Synthetic oligonucleotide
  Sense strand starting at position 727 of SEQ ID NO: 1888580
ucaugucuuagaggaagua

SEQ ID NO: 2543015 - RNA, 19 nt, Artificial Sequence
  Description of Artificial Sequence: Synthetic oligonucleotide
  Antisense strand to SEQ ID NO: 2543014
uacuuccucuaagacauga

SEQ ID NO: 2543016 - RNA, 19 nt, Artificial Sequence
  Description of Artificial Sequence: Synthetic oligonucleotide
  Sense strand starting at position 1853 of SEQ ID NO: 1888580
ucaccuggcgaauggauaa

SEQ ID NO: 2543017 - RNA, 19 nt, Artificial Sequence
  Description of Artificial Sequence: Synthetic oligonucleotide
  Antisense strand to SEQ ID NO: 2543016
uuauccauucgccagguga

SEQ ID NO: 2543018 - RNA, 19 nt, Artificial Sequence
  Description of Artificial Sequence: Synthetic oligonucleotide
  Sense strand starting at position 2691 of SEQ ID NO: 1888580
uuaauuugguacuagagau

SEQ ID NO: 2543019 - RNA, 19 nt, Artificial Sequence
  Description of Artificial Sequence: Synthetic oligonucleotide
  Antisense strand to SEQ ID NO: 2543018
aucucuaguaccaaauuaa

SEQ ID NO: 2543020 - RNA, 19 nt, Artificial Sequence
  Description of Artificial Sequence: Synthetic oligonucleotide
  Sense strand starting at position 1662 of SEQ ID NO: 1888580
aaggguuaagcaugaaguu

SEQ ID NO: 2543021 - RNA, 19 nt, Artificial Sequence
  Description of Artificial Sequence: Synthetic oligonucleotide
  Antisense strand to SEQ ID NO: 2543020
aacuucaugcuuaacccuu

SEQ ID NO: 2543022 - RNA, 19 nt, Artificial Sequence
  Description of Artificial Sequence: Synthetic oligonucleotide
  Sense strand starting at position 1156 of SEQ ID NO: 1888580
gcauaaaucuuugugacag

SEQ ID NO: 2543023 - RNA, 19 nt, Artificial Sequence
  Description of Artificial Sequence: Synthetic oligonucleotide
  Antisense strand to SEQ ID NO: 2543022
cugucacaaagauuuaugc

SEQ ID NO: 2543024 - RNA, 19 nt, Artificial Sequence
  Description of Artificial Sequence: Synthetic oligonucleotide
  Sense strand starting at position 1318 of SEQ ID NO: 1888580
uguaucugauaagugacuu

SEQ ID NO: 2543025 - RNA, 19 nt, Artificial Sequence
  Description of Artificial Sequence: Synthetic oligonucleotide
  Antisense strand to SEQ ID NO: 2543024
aagucacuuaucagauaca

SEQ ID NO: 2543026 - RNA, 19 nt, Artificial Sequence
  Description of Artificial Sequence: Synthetic oligonucleotide
  Sense strand starting at position 721 of SEQ ID NO: 1888580
gucugaucaugucuuagag

SEQ ID NO: 2543027 - RNA, 19 nt, Artificial Sequence
  Description of Artificial Sequence: Synthetic oligonucleotide
  Antisense strand to SEQ ID NO: 2543026
cucuaagacaugaucagac

SEQ ID NO: 2543028 - RNA, 19 nt, Artificial Sequence
  Description of Artificial Sequence: Synthetic oligonucleotide
  Sense strand starting at position 2571 of SEQ ID NO: 1888580
uguaaugaugacggcauaa

SEQ ID NO: 2543029 - RNA, 19 nt, Artificial Sequence
  Description of Artificial Sequence: Synthetic oligonucleotide
  Antisense strand to SEQ ID NO: 2543028
uuaugccgucaucauuaca

SEQ ID NO: 2543030 - RNA, 19 nt, Artificial Sequence
  Description of Artificial Sequence: Synthetic oligonucleotide
  Sense strand starting at position 1243 of SEQ ID NO: 1888580
acugcugugccucagaaga

SEQ ID NO: 2543031 - RNA, 19 nt, Artificial Sequence
  Description of Artificial Sequence: Synthetic oligonucleotide
  Antisense strand to SEQ ID NO: 2543030
ucuucugaggcacagcagu

SEQ ID NO: 2543032 - RNA, 19 nt, Artificial Sequence
  Description of Artificial Sequence: Synthetic oligonucleotide
  Sense strand starting at position 3797 of SEQ ID NO: 1888580
acuuguuggccagacuagu

SEQ ID NO: 2543033 - RNA, 19 nt, Artificial Sequence
  Description of Artificial Sequence: Synthetic oligonucleotide
  Antisense strand to SEQ ID NO: 2543032
acuagucuggccaacaagu

SEQ ID NO: 2543034 - RNA, 19 nt, Artificial Sequence
  Description of Artificial Sequence: Synthetic oligonucleotide
  Sense strand starting at position 109 of SEQ ID NO: 1888580
aucccaucucuauguuaug

SEQ ID NO: 2543035 - RNA, 19 nt, Artificial Sequence
  Description of Artificial Sequence: Synthetic oligonucleotide
  Antisense strand to SEQ ID NO: 2543034
cauaacauagagaugggau

SEQ ID NO: 2543036 - RNA, 19 nt, Artificial Sequence
  Description of Artificial Sequence: Synthetic oligonucleotide
  Sense strand starting at position 3333 of SEQ ID NO: 1888580
uuacccuacguuggaauau

SEQ ID NO: 2543037 - RNA, 19 nt, Artificial Sequence
  Description of Artificial Sequence: Synthetic oligonucleotide
  Antisense strand to SEQ ID NO: 2543036
auauuccaacguaggguaa

SEQ ID NO: 2543038 - RNA, 19 nt, Artificial Sequence
  Description of Artificial Sequence: Synthetic oligonucleotide
  Sense strand starting at position 879 of SEQ ID NO: 1888580
ucgauugggccuugacaua

SEQ ID NO: 2543039 - RNA, 19 nt, Artificial Sequence
  Description of Artificial Sequence: Synthetic oligonucleotide
  Antisense strand to SEQ ID NO: 2543038
uaugucaaggcccaaucga

SEQ ID NO: 2543040 - RNA, 19 nt, Artificial Sequence
  Description of Artificial Sequence: Synthetic oligonucleotide
  Sense strand starting at position 2171 of SEQ ID NO: 1888580
ucaugugauccugguauuc

SEQ ID NO: 2543041 - RNA, 19 nt, Artificial Sequence
  Description of Artificial Sequence: Synthetic oligonucleotide
  Antisense strand to SEQ ID NO: 2543040
gaauaccaggaucacauga

SEQ ID NO: 2543042 - RNA, 19 nt, Artificial Sequence
  Description of Artificial Sequence: Synthetic oligonucleotide
  Sense strand starting at position 128 of SEQ ID NO: 1888580
ccacaaugcuucucuguag

SEQ ID NO: 2543043 - RNA, 19 nt, Artificial Sequence
  Description of Artificial Sequence: Synthetic oligonucleotide
  Antisense strand to SEQ ID NO: 2543042
cuacagagaagcauugugg

SEQ ID NO: 2543044 - RNA, 19 nt, Artificial Sequence
  Description of Artificial Sequence: Synthetic oligonucleotide
  Sense strand starting at position 3446 of SEQ ID NO: 1888580
cagugauaaugggauaaag

SEQ ID NO: 2543045 - RNA, 19 nt, Artificial Sequence
  Description of Artificial Sequence: Synthetic oligonucleotide
  Antisense strand to SEQ ID NO: 2543044
cuuuaucccauuaucacug

SEQ ID NO: 2543046 - RNA, 19 nt, Artificial Sequence
  Description of Artificial Sequence: Synthetic oligonucleotide
  Sense strand starting at position 695 of SEQ ID NO: 1888580
aauuaagugugucuuguaa

SEQ ID NO: 2543047 - RNA, 19 nt, Artificial Sequence
  Description of Artificial Sequence: Synthetic oligonucleotide
  Antisense strand to SEQ ID NO: 2543046
uuacaagacacacuuaauu

SEQ ID NO: 2543048 - RNA, 19 nt, Artificial Sequence
  Description of Artificial Sequence: Synthetic oligonucleotide
  Sense strand starting at position 693 of SEQ ID NO: 1888580
gaaauuaagugugucuugu

SEQ ID NO: 2543049 - RNA, 19 nt, Artificial Sequence
  Description of Artificial Sequence: Synthetic oligonucleotide
  Antisense strand to SEQ ID NO: 2543048
acaagacacacuuaauuuc

SEQ ID NO: 2543050 - RNA, 19 nt, Artificial Sequence
  Description of Artificial Sequence: Synthetic oligonucleotide
  Sense strand starting at position 712 of SEQ ID NO: 1888580
aagccuggugucugaucau

SEQ ID NO: 2543051 - RNA, 19 nt, Artificial Sequence
  Description of Artificial Sequence: Synthetic oligonucleotide
  Antisense strand to SEQ ID NO: 2543050
augaucagacaccaggcuu

SEQ ID NO: 2543052 - RNA, 19 nt, Artificial Sequence
  Description of Artificial Sequence: Synthetic oligonucleotide
  Sense strand starting at position 1847 of SEQ ID NO: 1888580
gguccaucaccuggcgaau

SEQ ID NO: 2543053 - RNA, 19 nt, Artificial Sequence
  Description of Artificial Sequence: Synthetic oligonucleotide
  Antisense strand to SEQ ID NO: 2543052
auucgccaggugauggacc

SEQ ID NO: 2543054 - RNA, 19 nt, Artificial Sequence
  Description of Artificial Sequence: Synthetic oligonucleotide
  Sense strand starting at position 75 of SEQ ID NO: 1888580
acuccaagcuuguuuguau

SEQ ID NO: 2543055 - RNA, 19 nt, Artificial Sequence
  Description of Artificial Sequence: Synthetic oligonucleotide
  Antisense strand to SEQ ID NO: 2543054
auacaaacaagcuuggagu

SEQ ID NO: 2543056 - RNA, 19 nt, Artificial Sequence
  Description of Artificial Sequence: Synthetic oligonucleotide
  Sense strand starting at position 3008 of SEQ ID NO: 1888580
guggcuuccuuucuaaucu

SEQ ID NO: 2543057 - RNA, 19 nt, Artificial Sequence
  Description of Artificial Sequence: Synthetic oligonucleotide
  Antisense strand to SEQ ID NO: 2543056
agauuagaaaggaagccac

SEQ ID NO: 2543058 - RNA, 19 nt, Artificial Sequence
  Description of Artificial Sequence: Synthetic oligonucleotide
  Sense strand starting at position 725 of SEQ ID NO: 1888580
gaucaugucuuagaggaag

SEQ ID NO: 2543059 - RNA, 19 nt, Artificial Sequence
  Description of Artificial Sequence: Synthetic oligonucleotide
  Antisense strand to SEQ ID NO: 2543058
cuuccucuaagacaugauc

SEQ ID NO: 2543060 - RNA, 19 nt, Artificial Sequence
  Description of Artificial Sequence: Synthetic oligonucleotide
  Sense strand starting at position 3434 of SEQ ID NO: 1888580
gauggacauuaucagugau

SEQ ID NO: 2543061 - RNA, 19 nt, Artificial Sequence
  Description of Artificial Sequence: Synthetic oligonucleotide
  Antisense strand to SEQ ID NO: 2543060
aucacugauaauguccauc

SEQ ID NO: 2543062 - RNA, 19 nt, Artificial Sequence
  Description of Artificial Sequence: Synthetic oligonucleotide
  Sense strand starting at position 3019 of SEQ ID NO: 1888581
gccuuauaacaaggacaga

SEQ ID NO: 2543063 - RNA, 19 nt, Artificial Sequence
  Description of Artificial Sequence: Synthetic oligonucleotide
  Antisense strand to SEQ ID NO: 2543062
ucuguccuuguuauaaggc

SEQ ID NO: 2543064 - RNA, 19 nt, Artificial Sequence
  Description of Artificial Sequence: Synthetic oligonucleotide
  Sense strand starting at position 2138 of SEQ ID NO: 1888581
ggcuuuaagagguacuaac

SEQ ID NO: 2543065 - RNA, 19 nt, Artificial Sequence
  Description of Artificial Sequence: Synthetic oligonucleotide
  Antisense strand to SEQ ID NO: 2543064
guuaguaccucuuaaagcc

SEQ ID NO: 2543066 - RNA, 19 nt, Artificial Sequence
  Description of Artificial Sequence: Synthetic oligonucleotide
  Sense strand starting at position 796 of SEQ ID NO: 1888581
gcagcagccacgucauuau

SEQ ID NO: 2543067 - RNA, 19 nt, Artificial Sequence
  Description of Artificial Sequence: Synthetic oligonucleotide
  Antisense strand to SEQ ID NO: 2543066
auaaugacguggcugcugc

SEQ ID NO: 2543068 - RNA, 19 nt, Artificial Sequence
  Description of Artificial Sequence: Synthetic oligonucleotide
  Sense strand starting at position 2124 of SEQ ID NO: 1888581
agauuuaucuucccggcuu

SEQ ID NO: 2543069 - RNA, 19 nt, Artificial Sequence
  Description of Artificial Sequence: Synthetic oligonucleotide
  Antisense strand to SEQ ID NO: 2543068
aagccgggaagauaaaucu

SEQ ID NO: 2543070 - RNA, 19 nt, Artificial Sequence
  Description of Artificial Sequence: Synthetic oligonucleotide
  Sense strand starting at position 2736 of SEQ ID NO: 1888581
ggagaucucuacccaguga

SEQ ID NO: 2543071 - RNA, 19 nt, Artificial Sequence
  Description of Artificial Sequence: Synthetic oligonucleotide
  Antisense strand to SEQ ID NO: 2543070
ucacuggguagagaucucc

SEQ ID NO: 2543072 - RNA, 19 nt, Artificial Sequence
  Description of Artificial Sequence: Synthetic oligonucleotide
  Sense strand starting at position 2000 of SEQ ID NO: 1888581
uggauuuaauagcagagaa

SEQ ID NO: 2543073 - RNA, 19 nt, Artificial Sequence
  Description of Artificial Sequence: Synthetic oligonucleotide
  Antisense strand to SEQ ID NO: 2543072
uucucugcuauuaaaucca

SEQ ID NO: 2543074 - RNA, 19 nt, Artificial Sequence
  Description of Artificial Sequence: Synthetic oligonucleotide
  Sense strand starting at position 3178 of SEQ ID NO: 1888581
ccuggagucaggcaacauu

SEQ ID NO: 2543075 - RNA, 19 nt, Artificial Sequence
  Description of Artificial Sequence: Synthetic oligonucleotide
  Antisense strand to SEQ ID NO: 2543074
aauguugccugacuccagg

SEQ ID NO: 2543076 - RNA, 19 nt, Artificial Sequence
  Description of Artificial Sequence: Synthetic oligonucleotide
  Sense strand starting at position 2126 of SEQ ID NO: 1888581
auuuaucuucccggcuuua

SEQ ID NO: 2543077 - RNA, 19 nt, Artificial Sequence
  Description of Artificial Sequence: Synthetic oligonucleotide
  Antisense strand to SEQ ID NO: 2543076
uaaagccgggaagauaaau

SEQ ID NO: 2543078 - RNA, 19 nt, Artificial Sequence
  Description of Artificial Sequence: Synthetic oligonucleotide
  Sense strand starting at position 1573 of SEQ ID NO: 1888581
ggcacuguccuagaaaggu

SEQ ID NO: 2543079 - RNA, 19 nt, Artificial Sequence
  Description of Artificial Sequence: Synthetic oligonucleotide
  Antisense strand to SEQ ID NO: 2543078
accuuucuaggacagugcc

SEQ ID NO: 2543080 - RNA, 19 nt, Artificial Sequence
  Description of Artificial Sequence: Synthetic oligonucleotide
  Sense strand starting at position 434 of SEQ ID NO: 1888581
guaccagauggucagugua

SEQ ID NO: 2543081 - RNA, 19 nt, Artificial Sequence
  Description of Artificial Sequence: Synthetic oligonucleotide
  Antisense strand to SEQ ID NO: 2543080
uacacugaccaucugguac

SEQ ID NO: 2543082 - RNA, 19 nt, Artificial Sequence
  Description of Artificial Sequence: Synthetic oligonucleotide
  Sense strand starting at position 2202 of SEQ ID NO: 1888581
ggcucaggaucugcugaaa

SEQ ID NO: 2543083 - RNA, 19 nt, Artificial Sequence
  Description of Artificial Sequence: Synthetic oligonucleotide
  Antisense strand to SEQ ID NO: 2543082
uuucagcagauccugagcc

SEQ ID NO: 2543084 - RNA, 19 nt, Artificial Sequence
  Description of Artificial Sequence: Synthetic oligonucleotide
  Sense strand starting at position 1203 of SEQ ID NO: 1888581
ggcgguguucugaguaggu

SEQ ID NO: 2543085 - RNA, 19 nt, Artificial Sequence
  Description of Artificial Sequence: Synthetic oligonucleotide
  Antisense strand to SEQ ID NO: 2543084
accuacucagaacaccgcc

SEQ ID NO: 2543086 - RNA, 19 nt, Artificial Sequence
  Description of Artificial Sequence: Synthetic oligonucleotide
  Sense strand starting at position 2991 of SEQ ID NO: 1888581
uggugagagugagcucaau

SEQ ID NO: 2543087 - RNA, 19 nt, Artificial Sequence
  Description of Artificial Sequence: Synthetic oligonucleotide
  Antisense strand to SEQ ID NO: 2543086
auugagcucacucucacca

SEQ ID NO: 2543088 - RNA, 19 nt, Artificial Sequence
  Description of Artificial Sequence: Synthetic oligonucleotide
  Sense strand starting at position 867 of SEQ ID NO: 1888581
gauaauugaucagagggag

SEQ ID NO: 2543089 - RNA, 19 nt, Artificial Sequence
  Description of Artificial Sequence: Synthetic oligonucleotide
  Antisense strand to SEQ ID NO: 2543088
cucccucugaucaauuauc

SEQ ID NO: 2543090 - RNA, 19 nt, Artificial Sequence
  Description of Artificial Sequence: Synthetic oligonucleotide
  Sense strand starting at position 1131 of SEQ ID NO: 1888581
cagcucucauggguuuaga

SEQ ID NO: 2543091 - RNA, 19 nt, Artificial Sequence
  Description of Artificial Sequence: Synthetic oligonucleotide
  Antisense strand to SEQ ID NO: 2543090
ucuaaacccaugagagcug

SEQ ID NO: 2543092 - RNA, 19 nt, Artificial Sequence
  Description of Artificial Sequence: Synthetic oligonucleotide
  Sense strand starting at position 805 of SEQ ID NO: 1888581
acgucauuaugguuggaau

SEQ ID NO: 2543093 - RNA, 19 nt, Artificial Sequence
  Description of Artificial Sequence: Synthetic oligonucleotide
  Antisense strand to SEQ ID NO: 2543092
auuccaaccauaaugacgu

SEQ ID NO: 2543094 - RNA, 19 nt, Artificial Sequence
  Description of Artificial Sequence: Synthetic oligonucleotide
  Sense strand starting at position 912 of SEQ ID NO: 1888581
uugaguuaauuaucagccu

SEQ ID NO: 2543095 - RNA, 19 nt, Artificial Sequence
  Description of Artificial Sequence: Synthetic oligonucleotide
  Antisense strand to SEQ ID NO: 2543094
aggcugauaauuaacucaa

SEQ ID NO: 2543096 - RNA, 19 nt, Artificial Sequence
  Description of Artificial Sequence: Synthetic oligonucleotide
  Sense strand starting at position 1881 of SEQ ID NO: 1888581
ggaagugguccuuguaacu

SEQ ID NO: 2543097 - RNA, 19 nt, Artificial Sequence
  Description of Artificial Sequence: Synthetic oligonucleotide
  Antisense strand to SEQ ID NO: 2543096
aguuacaaggaccacuucc

SEQ ID NO: 2543098 - RNA, 19 nt, Artificial Sequence
  Description of Artificial Sequence: Synthetic oligonucleotide
  Sense strand starting at position 807 of SEQ ID NO: 1888581
gucauuaugguuggaaugu

SEQ ID NO: 2543099 - RNA, 19 nt, Artificial Sequence
  Description of Artificial Sequence: Synthetic oligonucleotide
  Antisense strand to SEQ ID NO: 2543098
acauuccaaccauaaugac

SEQ ID NO: 2543100 - RNA, 19 nt, Artificial Sequence
  Description of Artificial Sequence: Synthetic oligonucleotide
  Sense strand starting at position 806 of SEQ ID NO: 1888581
cgucauuaugguuggaaug

SEQ ID NO: 2543101 - RNA, 19 nt, Artificial Sequence
  Description of Artificial Sequence: Synthetic oligonucleotide
  Antisense strand to SEQ ID NO: 2543100
cauuccaaccauaaugacg

SEQ ID NO: 2543102 - RNA, 19 nt, Artificial Sequence
  Description of Artificial Sequence: Synthetic oligonucleotide
  Sense strand starting at position 633 of SEQ ID NO: 1888581
gguguacugucccugggaa

SEQ ID NO: 2543103 - RNA, 19 nt, Artificial Sequence
  Description of Artificial Sequence: Synthetic oligonucleotide
  Antisense strand to SEQ ID NO: 2543102
uucccagggacaguacacc

SEQ ID NO: 2543104 - RNA, 19 nt, Artificial Sequence
  Description of Artificial Sequence: Synthetic oligonucleotide
  Sense strand starting at position 987 of SEQ ID NO: 1888581
cagugaccucuccgaacuu

SEQ ID NO: 2543105 - RNA, 19 nt, Artificial Sequence
  Description of Artificial Sequence: Synthetic oligonucleotide
  Antisense strand to SEQ ID NO: 2543104
aaguucggagaggucacug

SEQ ID NO: 2543106 - RNA, 19 nt, Artificial Sequence
  Description of Artificial Sequence: Synthetic oligonucleotide
  Sense strand starting at position 955 of SEQ ID NO: 1888581
gugucaacucauuacugcu

SEQ ID NO: 2543107 - RNA, 19 nt, Artificial Sequence
  Description of Artificial Sequence: Synthetic oligonucleotide
  Antisense strand to SEQ ID NO: 2543106
agcaguaaugaguugacac

SEQ ID NO: 2543108 - RNA, 19 nt, Artificial Sequence
  Description of Artificial Sequence: Synthetic oligonucleotide
  Sense strand starting at position 904 of SEQ ID NO: 1888581
cuagcagguugaguuaauu

SEQ ID NO: 2543109 - RNA, 19 nt, Artificial Sequence
  Description of Artificial Sequence: Synthetic oligonucleotide
  Antisense strand to SEQ ID NO: 2543108
aauuaacucaaccugcuag

SEQ ID NO: 2543110 - RNA, 19 nt, Artificial Sequence
  Description of Artificial Sequence: Synthetic oligonucleotide
  Sense strand starting at position 1129 of SEQ ID NO: 1888581
cacagcucucauggguuua

SEQ ID NO: 2543111 - RNA, 19 nt, Artificial Sequence
  Description of Artificial Sequence: Synthetic oligonucleotide
  Antisense strand to SEQ ID NO: 2543110
uaaacccaugagagcugug

SEQ ID NO: 2543112 - RNA, 19 nt, Artificial Sequence
  Description of Artificial Sequence: Synthetic oligonucleotide
  Sense strand starting at position 634 of SEQ ID NO: 1888581
guguacugucccugggaag

SEQ ID NO: 2543113 - RNA, 19 nt, Artificial Sequence
  Description of Artificial Sequence: Synthetic oligonucleotide
  Antisense strand to SEQ ID NO: 2543112
cuucccagggacaguacac

SEQ ID NO: 2543114 - RNA, 19 nt, Artificial Sequence
  Description of Artificial Sequence: Synthetic oligonucleotide
  Sense strand starting at position 2136 of SEQ ID NO: 1888581
ccggcuuuaagagguacua

SEQ ID NO: 2543115 - RNA, 19 nt, Artificial Sequence
  Description of Artificial Sequence: Synthetic oligonucleotide
  Antisense strand to SEQ ID NO: 2543114
uaguaccucuuaaagccgg

SEQ ID NO: 2543116 - RNA, 19 nt, Artificial Sequence
  Description of Artificial Sequence: Synthetic oligonucleotide
  Sense strand starting at position 3188 of SEQ ID NO: 1888581
ggcaacauucucgggaugu

SEQ ID NO: 2543117 - RNA, 19 nt, Artificial Sequence
  Description of Artificial Sequence: Synthetic oligonucleotide
  Antisense strand to SEQ ID NO: 2543116
acaucccgagaauguugcc

SEQ ID NO: 2543118 - RNA, 19 nt, Artificial Sequence
  Description of Artificial Sequence: Synthetic oligonucleotide
  Sense strand starting at position 1598 of SEQ ID NO: 1888581
ggagcugucucuuccacca

SEQ ID NO: 2543119 - RNA, 19 nt, Artificial Sequence
  Description of Artificial Sequence: Synthetic oligonucleotide
  Antisense strand to SEQ ID NO: 2543118
ugguggaagagacagcucc

SEQ ID NO: 2543120 - RNA, 19 nt, Artificial Sequence
  Description of Artificial Sequence: Synthetic oligonucleotide
  Sense strand starting at position 635 of SEQ ID NO: 1888581
uguacugucccugggaagu

SEQ ID NO: 2543121 - RNA, 19 nt, Artificial Sequence
  Description of Artificial Sequence: Synthetic oligonucleotide
  Antisense strand to SEQ ID NO: 2543120
acuucccagggacaguaca

SEQ ID NO: 2543122 - RNA, 19 nt, Artificial Sequence
  Description of Artificial Sequence: Synthetic oligonucleotide
  Sense strand starting at position 915 of SEQ ID NO: 1888581
aguuaauuaucagccugca

SEQ ID NO: 2543123 - RNA, 19 nt, Artificial Sequence
  Description of Artificial Sequence: Synthetic oligonucleotide
  Antisense strand to SEQ ID NO: 2543122
ugcaggcugauaauuaacu

SEQ ID NO: 2543124 - RNA, 19 nt, Artificial Sequence
  Description of Artificial Sequence: Synthetic oligonucleotide
  Sense strand starting at position 901 of SEQ ID NO: 1888581
uuccuagcagguugaguua

SEQ ID NO: 2543125 - RNA, 19 nt, Artificial Sequence
  Description of Artificial Sequence: Synthetic oligonucleotide
  Antisense strand to SEQ ID NO: 2543124
uaacucaaccugcuaggaa

SEQ ID NO: 2543126 - RNA, 19 nt, Artificial Sequence
  Description of Artificial Sequence: Synthetic oligonucleotide
  Sense strand starting at position 57 of SEQ ID NO: 1888581
gugagcuccuguccugaga

SEQ ID NO: 2543127 - RNA, 19 nt, Artificial Sequence
  Description of Artificial Sequence: Synthetic oligonucleotide
  Antisense strand to SEQ ID NO: 2543126
ucucaggacaggagcucac

SEQ ID NO: 2543128 - RNA, 19 nt, Artificial Sequence
  Description of Artificial Sequence: Synthetic oligonucleotide
  Sense strand starting at position 437 of SEQ ID NO: 1888581
ccagauggucaguguagca

SEQ ID NO: 2543129 - RNA, 19 nt, Artificial Sequence
  Description of Artificial Sequence: Synthetic oligonucleotide
  Antisense strand to SEQ ID NO: 2543128
ugcuacacugaccaucugg

SEQ ID NO: 2543130 - RNA, 19 nt, Artificial Sequence
  Description of Artificial Sequence: Synthetic oligonucleotide
  Sense strand starting at position 1205 of SEQ ID NO: 1888581
cgguguucugaguaggucu

SEQ ID NO: 2543131 - RNA, 19 nt, Artificial Sequence
  Description of Artificial Sequence: Synthetic oligonucleotide
  Antisense strand to SEQ ID NO: 2543130
agaccuacucagaacaccg

SEQ ID NO: 2543132 - RNA, 19 nt, Artificial Sequence
  Description of Artificial Sequence: Synthetic oligonucleotide
  Sense strand starting at position 85 of SEQ ID NO: 1888581
gaauauuccugggacacug

SEQ ID NO: 2543133 - RNA, 19 nt, Artificial Sequence
  Description of Artificial Sequence: Synthetic oligonucleotide
  Antisense strand to SEQ ID NO: 2543132
cagugucccaggaauauuc

SEQ ID NO: 2543134 - RNA, 19 nt, Artificial Sequence
  Description of Artificial Sequence: Synthetic oligonucleotide
  Sense strand starting at position 274 of SEQ ID NO: 1888581
gcuacagaguuucuugcuu

SEQ ID NO: 2543135 - RNA, 19 nt, Artificial Sequence
  Description of Artificial Sequence: Synthetic oligonucleotide
  Antisense strand to SEQ ID NO: 2543134
aagcaagaaacucuguagc

SEQ ID NO: 2543136 - RNA, 19 nt, Artificial Sequence
  Description of Artificial Sequence: Synthetic oligonucleotide
  Sense strand starting at position 854 of SEQ ID NO: 1888581
ucaacauccugaggauaau

SEQ ID NO: 2543137 - RNA, 19 nt, Artificial Sequence
  Description of Artificial Sequence: Synthetic oligonucleotide
  Antisense strand to SEQ ID NO: 2543136
auuauccucaggauguuga

SEQ ID NO: 2543138 - RNA, 19 nt, Artificial Sequence
  Description of Artificial Sequence: Synthetic oligonucleotide
  Sense strand starting at position 1571 of SEQ ID NO: 1888581
auggcacuguccuagaaag

SEQ ID NO: 2543139 - RNA, 19 nt, Artificial Sequence
  Description of Artificial Sequence: Synthetic oligonucleotide
  Antisense strand to SEQ ID NO: 2543138
cuuucuaggacagugccau

SEQ ID NO: 2543140 - RNA, 19 nt, Artificial Sequence
  Description of Artificial Sequence: Synthetic oligonucleotide
  Sense strand starting at position 1982 of SEQ ID NO: 1888581
ugcguugccgcugaauuau

SEQ ID NO: 2543141 - RNA, 19 nt, Artificial Sequence
  Description of Artificial Sequence: Synthetic oligonucleotide
  Antisense strand to SEQ ID NO: 2543140
auaauucagcggcaacgca

SEQ ID NO: 2543142 - RNA, 19 nt, Artificial Sequence
  Description of Artificial Sequence: Synthetic oligonucleotide
  Sense strand starting at position 75 of SEQ ID NO: 1888582
ggagaaguuguggauucuu

SEQ ID NO: 2543143 - RNA, 19 nt, Artificial Sequence
  Description of Artificial Sequence: Synthetic oligonucleotide
  Antisense strand to SEQ ID NO: 2543142
aagaauccacaacuucucc

SEQ ID NO: 2543144 - RNA, 19 nt, Artificial Sequence
  Description of Artificial Sequence: Synthetic oligonucleotide
  Sense strand starting at position 434 of SEQ ID NO: 1888582
ccagaaagaugggugaguu

SEQ ID NO: 2543145 - RNA, 19 nt, Artificial Sequence
  Description of Artificial Sequence: Synthetic oligonucleotide
  Antisense strand to SEQ ID NO: 2543144
aacucacccaucuuucugg

SEQ ID NO: 2543146 - RNA, 19 nt, Artificial Sequence
  Description of Artificial Sequence: Synthetic oligonucleotide
  Sense strand starting at position 433 of SEQ ID NO: 1888582
uccagaaagaugggugagu

SEQ ID NO: 2543147 - RNA, 19 nt, Artificial Sequence
  Description of Artificial Sequence: Synthetic oligonucleotide
  Antisense strand to SEQ ID NO: 2543146
acucacccaucuuucugga

SEQ ID NO: 2543148 - RNA, 19 nt, Artificial Sequence
  Description of Artificial Sequence: Synthetic oligonucleotide
  Sense strand starting at position 3399 of SEQ ID NO: 1888582
cgcuguucuccucugaguu

SEQ ID NO: 2543149 - RNA, 19 nt, Artificial Sequence
  Description of Artificial Sequence: Synthetic oligonucleotide
  Antisense strand to SEQ ID NO: 2543148
aacucagaggagaacagcg

SEQ ID NO: 2543150 - RNA, 19 nt, Artificial Sequence
  Description of Artificial Sequence: Synthetic oligonucleotide
  Sense strand starting at position 2989 of SEQ ID NO: 1888582
ccagcugucagagacugau

SEQ ID NO: 2543151 - RNA, 19 nt, Artificial Sequence
  Description of Artificial Sequence: Synthetic oligonucleotide
  Antisense strand to SEQ ID NO: 2543150
aucagucucugacagcugg

SEQ ID NO: 2543152 - RNA, 19 nt, Artificial Sequence
  Description of Artificial Sequence: Synthetic oligonucleotide
  Sense strand starting at position 341 of SEQ ID NO: 1888582
agacaucgggcaugauaga

SEQ ID NO: 2543153 - RNA, 19 nt, Artificial Sequence
  Description of Artificial Sequence: Synthetic oligonucleotide
  Antisense strand to SEQ ID NO: 2543152
ucuaucaugcccgaugucu

SEQ ID NO: 2543154 - RNA, 19 nt, Artificial Sequence
  Description of Artificial Sequence: Synthetic oligonucleotide
  Sense strand starting at position 165 of SEQ ID NO: 1888582
cucugaauuugggagacau

SEQ ID NO: 2543155 - RNA, 19 nt, Artificial Sequence
  Description of Artificial Sequence: Synthetic oligonucleotide
  Antisense strand to SEQ ID NO: 2543154
augucucccaaauucagag

SEQ ID NO: 2543156 - RNA, 19 nt, Artificial Sequence
  Description of Artificial Sequence: Synthetic oligonucleotide
  Sense strand starting at position 913 of SEQ ID NO: 1888582
ggcguaacucugcugccau

SEQ ID NO: 2543157 - RNA, 19 nt, Artificial Sequence
  Description of Artificial Sequence: Synthetic oligonucleotide
  Antisense strand to SEQ ID NO: 2543156
auggcagcagaguuacgcc

SEQ ID NO: 2543158 - RNA, 19 nt, Artificial Sequence
  Description of Artificial Sequence: Synthetic oligonucleotide
  Sense strand starting at position 3674 of SEQ ID NO: 1888582
ugcccagaaucuccugaaa

SEQ ID NO: 2543159 - RNA, 19 nt, Artificial Sequence
  Description of Artificial Sequence: Synthetic oligonucleotide
  Antisense strand to SEQ ID NO: 2543158
uuucaggagauucugggca

SEQ ID NO: 2543160 - RNA, 19 nt, Artificial Sequence
  Description of Artificial Sequence: Synthetic oligonucleotide
  Sense strand starting at position 2916 of SEQ ID NO: 1888582
auuagauugaggugcaaug

SEQ ID NO: 2543161 - RNA, 19 nt, Artificial Sequence
  Description of Artificial Sequence: Synthetic oligonucleotide
  Antisense strand to SEQ ID NO: 2543160
cauugcaccucaaucuaau

SEQ ID NO: 2543162 - RNA, 19 nt, Artificial Sequence
  Description of Artificial Sequence: Synthetic oligonucleotide
  Sense strand starting at position 979 of SEQ ID NO: 1888582
aggagcagucgauaaugua

SEQ ID NO: 2543163 - RNA, 19 nt, Artificial Sequence
  Description of Artificial Sequence: Synthetic oligonucleotide
  Antisense strand to SEQ ID NO: 2543162
uacauuaucgacugcuccu

SEQ ID NO: 2543164 - RNA, 19 nt, Artificial Sequence
  Description of Artificial Sequence: Synthetic oligonucleotide
  Sense strand starting at position 2940 of SEQ ID NO: 1888582
gcuugaauugcagagaggu

SEQ ID NO: 2543165 - RNA, 19 nt, Artificial Sequence
  Description of Artificial Sequence: Synthetic oligonucleotide
  Antisense strand to SEQ ID NO: 2543164
accucucugcaauucaagc

SEQ ID NO: 2543166 - RNA, 19 nt, Artificial Sequence
  Description of Artificial Sequence: Synthetic oligonucleotide
  Sense strand starting at position 3278 of SEQ ID NO: 1888582
guaguucuuagacauggca

SEQ ID NO: 2543167 - RNA, 19 nt, Artificial Sequence
  Description of Artificial Sequence: Synthetic oligonucleotide
  Antisense strand to SEQ ID NO: 2543166
ugccaugucuaagaacuac

SEQ ID NO: 2543168 - RNA, 19 nt, Artificial Sequence
  Description of Artificial Sequence: Synthetic oligonucleotide
  Sense strand starting at position 2676 of SEQ ID NO: 1888582
ugaccugagugucuccaaa

SEQ ID NO: 2543169 - RNA, 19 nt, Artificial Sequence
  Description of Artificial Sequence: Synthetic oligonucleotide
  Antisense strand to SEQ ID NO: 2543168
uuuggagacacucagguca

SEQ ID NO: 2543170 - RNA, 19 nt, Artificial Sequence
  Description of Artificial Sequence: Synthetic oligonucleotide
  Sense strand starting at position 3303 of SEQ ID NO: 1888582
caccucuguggcugaagaa

SEQ ID NO: 2543171 - RNA, 19 nt, Artificial Sequence
  Description of Artificial Sequence: Synthetic oligonucleotide
  Antisense strand to SEQ ID NO: 2543170
uucuucagccacagaggug

SEQ ID NO: 2543172 - RNA, 19 nt, Artificial Sequence
  Description of Artificial Sequence: Synthetic oligonucleotide
  Sense strand starting at position 2271 of SEQ ID NO: 1888582
uuacgaaucucuuccuaug

SEQ ID NO: 2543173 - RNA, 19 nt, Artificial Sequence
  Description of Artificial Sequence: Synthetic oligonucleotide
  Antisense strand to SEQ ID NO: 2543172
cauaggaagagauucguaa

SEQ ID NO: 2543174 - RNA, 19 nt, Artificial Sequence
  Description of Artificial Sequence: Synthetic oligonucleotide
  Sense strand starting at position 2248 of SEQ ID NO: 1888582
ccagaauugcacgaagugu

SEQ ID NO: 2543175 - RNA, 19 nt, Artificial Sequence
  Description of Artificial Sequence: Synthetic oligonucleotide
  Antisense strand to SEQ ID NO: 2543174
acacuucgugcaauucugg

SEQ ID NO: 2543176 - RNA, 19 nt, Artificial Sequence
  Description of Artificial Sequence: Synthetic oligonucleotide
  Sense strand starting at position 2678 of SEQ ID NO: 1888582
accugagugucuccaaauc

SEQ ID NO: 2543177 - RNA, 19 nt, Artificial Sequence
  Description of Artificial Sequence: Synthetic oligonucleotide
  Antisense strand to SEQ ID NO: 2543176
gauuuggagacacucaggu

SEQ ID NO: 2543178 - RNA, 19 nt, Artificial Sequence
  Description of Artificial Sequence: Synthetic oligonucleotide
  Sense strand starting at position 1471 of SEQ ID NO: 1888582
gcacacucucuguaagcaa

SEQ ID NO: 2543179 - RNA, 19 nt, Artificial Sequence
  Description of Artificial Sequence: Synthetic oligonucleotide
  Antisense strand to SEQ ID NO: 2543178
uugcuuacagagagugugc

SEQ ID NO: 2543180 - RNA, 19 nt, Artificial Sequence
  Description of Artificial Sequence: Synthetic oligonucleotide
  Sense strand starting at position 2911 of SEQ ID NO: 1888582
gugcaauuagauugaggug

SEQ ID NO: 2543181 - RNA, 19 nt, Artificial Sequence
  Description of Artificial Sequence: Synthetic oligonucleotide
  Antisense strand to SEQ ID NO: 2543180
caccucaaucuaauugcac

SEQ ID NO: 2543182 - RNA, 19 nt, Artificial Sequence
  Description of Artificial Sequence: Synthetic oligonucleotide
  Sense strand starting at position 988 of SEQ ID NO: 1888582
cgauaauguacacguaaag

SEQ ID NO: 2543183 - RNA, 19 nt, Artificial Sequence
  Description of Artificial Sequence: Synthetic oligonucleotide
  Antisense strand to SEQ ID NO: 2543182
cuuuacguguacauuaucg

SEQ ID NO: 2543184 - RNA, 19 nt, Artificial Sequence
  Description of Artificial Sequence: Synthetic oligonucleotide
  Sense strand starting at position 986 of SEQ ID NO: 1888582
gucgauaauguacacguaa

SEQ ID NO: 2543185 - RNA, 19 nt, Artificial Sequence
  Description of Artificial Sequence: Synthetic oligonucleotide
  Antisense strand to SEQ ID NO: 2543184
uuacguguacauuaucgac

SEQ ID NO: 2543186 - RNA, 19 nt, Artificial Sequence
  Description of Artificial Sequence: Synthetic oligonucleotide
  Sense strand starting at position 2273 of SEQ ID NO: 1888582
acgaaucucuuccuaugua

SEQ ID NO: 2543187 - RNA, 19 nt, Artificial Sequence
  Description of Artificial Sequence: Synthetic oligonucleotide
  Antisense strand to SEQ ID NO: 2543186
uacauaggaagagauucgu

SEQ ID NO: 2543188 - RNA, 19 nt, Artificial Sequence
  Description of Artificial Sequence: Synthetic oligonucleotide
  Sense strand starting at position 447 of SEQ ID NO: 1888582
ugaguuccuuucucaucau

SEQ ID NO: 2543189 - RNA, 19 nt, Artificial Sequence
  Description of Artificial Sequence: Synthetic oligonucleotide
  Antisense strand to SEQ ID NO: 2543188
augaugagaaaggaacuca

SEQ ID NO: 2543190 - RNA, 19 nt, Artificial Sequence
  Description of Artificial Sequence: Synthetic oligonucleotide
  Sense strand starting at position 542 of SEQ ID NO: 1888582
ucaagaaauuucugagcaa

SEQ ID NO: 2543191 - RNA, 19 nt, Artificial Sequence
  Description of Artificial Sequence: Synthetic oligonucleotide
  Antisense strand to SEQ ID NO: 2543190
uugcucagaaauuucuuga

SEQ ID NO: 2543192 - RNA, 19 nt, Artificial Sequence
  Description of Artificial Sequence: Synthetic oligonucleotide
  Sense strand starting at position 2058 of SEQ ID NO: 1888582
uuggauucucucugccuga

SEQ ID NO: 2543193 - RNA, 19 nt, Artificial Sequence
  Description of Artificial Sequence: Synthetic oligonucleotide
  Antisense strand to SEQ ID NO: 2543192
ucaggcagagagaauccaa

SEQ ID NO: 2543194 - RNA, 19 nt, Artificial Sequence
  Description of Artificial Sequence: Synthetic oligonucleotide
  Sense strand starting at position 446 of SEQ ID NO: 1888582
gugaguuccuuucucauca

SEQ ID NO: 2543195 - RNA, 19 nt, Artificial Sequence
  Description of Artificial Sequence: Synthetic oligonucleotide
  Antisense strand to SEQ ID NO: 2543194
ugaugagaaaggaacucac

SEQ ID NO: 2543196 - RNA, 19 nt, Artificial Sequence
  Description of Artificial Sequence: Synthetic oligonucleotide
  Sense strand starting at position 1055 of SEQ ID NO: 1888582
uuuggaaauuaccaagaca

SEQ ID NO: 2543197 - RNA, 19 nt, Artificial Sequence
  Description of Artificial Sequence: Synthetic oligonucleotide
  Antisense strand to SEQ ID NO: 2543196
ugucuugguaauuuccaaa

SEQ ID NO: 2543198 - RNA, 19 nt, Artificial Sequence
  Description of Artificial Sequence: Synthetic oligonucleotide
  Sense strand starting at position 1551 of SEQ ID NO: 1888582
aggauccauucuuaaagaa

SEQ ID NO: 2543199 - RNA, 19 nt, Artificial Sequence
  Description of Artificial Sequence: Synthetic oligonucleotide
  Antisense strand to SEQ ID NO: 2543198
uucuuuaagaauggauccu

SEQ ID NO: 2543200 - RNA, 19 nt, Artificial Sequence
  Description of Artificial Sequence: Synthetic oligonucleotide
  Sense strand starting at position 484 of SEQ ID NO: 1888582
aagaauugugcucacgcuu

SEQ ID NO: 2543201 - RNA, 19 nt, Artificial Sequence
  Description of Artificial Sequence: Synthetic oligonucleotide
  Antisense strand to SEQ ID NO: 2543200
aagcgugagcacaauucuu

SEQ ID NO: 2543202 - RNA, 19 nt, Artificial Sequence
  Description of Artificial Sequence: Synthetic oligonucleotide
  Sense strand starting at position 1234 of SEQ ID NO: 1888582
augacuuugucagcucgga

SEQ ID NO: 2543203 - RNA, 19 nt, Artificial Sequence
  Description of Artificial Sequence: Synthetic oligonucleotide
  Antisense strand to SEQ ID NO: 2543202
uccgagcugacaaagucau

SEQ ID NO: 2543204 - RNA, 19 nt, Artificial Sequence
  Description of Artificial Sequence: Synthetic oligonucleotide
  Sense strand starting at position 3220 of SEQ ID NO: 1888582
acccauggcucugcugauu

SEQ ID NO: 2543205 - RNA, 19 nt, Artificial Sequence
  Description of Artificial Sequence: Synthetic oligonucleotide
  Antisense strand to SEQ ID NO: 2543204
aaucagcagagccaugggu

SEQ ID NO: 2543206 - RNA, 19 nt, Artificial Sequence
  Description of Artificial Sequence: Synthetic oligonucleotide
  Sense strand starting at position 63 of SEQ ID NO: 1888582
accgauuugucuggagaag

SEQ ID NO: 2543207 - RNA, 19 nt, Artificial Sequence
  Description of Artificial Sequence: Synthetic oligonucleotide
  Antisense strand to SEQ ID NO: 2543206
cuucuccagacaaaucggu

SEQ ID NO: 2543208 - RNA, 19 nt, Artificial Sequence
  Description of Artificial Sequence: Synthetic oligonucleotide
  Sense strand starting at position 2259 of SEQ ID NO: 1888582
cgaagugucuccuuacgaa

SEQ ID NO: 2543209 - RNA, 19 nt, Artificial Sequence
  Description of Artificial Sequence: Synthetic oligonucleotide
  Antisense strand to SEQ ID NO: 2543208
uucguaaggagacacuucg

SEQ ID NO: 2543210 - RNA, 19 nt, Artificial Sequence
  Description of Artificial Sequence: Synthetic oligonucleotide
  Sense strand starting at position 2707 of SEQ ID NO: 1888582
ucugcucuccugugacaug

SEQ ID NO: 2543211 - RNA, 19 nt, Artificial Sequence
  Description of Artificial Sequence: Synthetic oligonucleotide
  Antisense strand to SEQ ID NO: 2543210
caugucacaggagagcaga

SEQ ID NO: 2543212 - RNA, 19 nt, Artificial Sequence
  Description of Artificial Sequence: Synthetic oligonucleotide
  Sense strand starting at position 1711 of SEQ ID NO: 1888582
gcuccaucaucgucaucaa

SEQ ID NO: 2543213 - RNA, 19 nt, Artificial Sequence
  Description of Artificial Sequence: Synthetic oligonucleotide
  Antisense strand to SEQ ID NO: 2543212
uugaugacgaugauggagc

SEQ ID NO: 2543214 - RNA, 19 nt, Artificial Sequence
  Description of Artificial Sequence: Synthetic oligonucleotide
  Sense strand starting at position 2650 of SEQ ID NO: 1888582
gcccaaaguuguccuaagu

SEQ ID NO: 2543215 - RNA, 19 nt, Artificial Sequence
  Description of Artificial Sequence: Synthetic oligonucleotide
  Antisense strand to SEQ ID NO: 2543214
acuuaggacaacuuugggc

SEQ ID NO: 2543216 - RNA, 19 nt, Artificial Sequence
  Description of Artificial Sequence: Synthetic oligonucleotide
  Sense strand starting at position 3957 of SEQ ID NO: 1888582
agggauggcugagauccaa

SEQ ID NO: 2543217 - RNA, 19 nt, Artificial Sequence
  Description of Artificial Sequence: Synthetic oligonucleotide
  Antisense strand to SEQ ID NO: 2543216
uuggaucucagccaucccu

SEQ ID NO: 2543218 - RNA, 19 nt, Artificial Sequence
  Description of Artificial Sequence: Synthetic oligonucleotide
  Sense strand starting at position 483 of SEQ ID NO: 1888582
gaagaauugugcucacgcu

SEQ ID NO: 2543219 - RNA, 19 nt, Artificial Sequence
  Description of Artificial Sequence: Synthetic oligonucleotide
  Antisense strand to SEQ ID NO: 2543218
agcgugagcacaauucuuc

SEQ ID NO: 2543220 - RNA, 19 nt, Artificial Sequence
  Description of Artificial Sequence: Synthetic oligonucleotide
  Sense strand starting at position 2900 of SEQ ID NO: 1888582
gucuguaucaggugcaauu

SEQ ID NO: 2543221 - RNA, 19 nt, Artificial Sequence
  Description of Artificial Sequence: Synthetic oligonucleotide
  Antisense strand to SEQ ID NO: 2543220
aauugcaccugauacagac

SEQ ID NO: 2543222 - RNA, 19 nt, Artificial Sequence
  Description of Artificial Sequence: Synthetic oligonucleotide
  Sense strand starting at position 3612 of SEQ ID NO: 1888583
cgaucagauugaccuaaag

SEQ ID NO: 2543223 - RNA, 19 nt, Artificial Sequence
  Description of Artificial Sequence: Synthetic oligonucleotide
  Antisense strand to SEQ ID NO: 2543222
cuuuaggucaaucugaucg

SEQ ID NO: 2543224 - RNA, 19 nt, Artificial Sequence
  Description of Artificial Sequence: Synthetic oligonucleotide
  Sense strand starting at position 485 of SEQ ID NO: 1888583
acaugaaugagugggugaa

SEQ ID NO: 2543225 - RNA, 19 nt, Artificial Sequence
  Description of Artificial Sequence: Synthetic oligonucleotide
  Antisense strand to SEQ ID NO: 2543224
uucacccacucauucaugu

SEQ ID NO: 2543226 - RNA, 19 nt, Artificial Sequence
  Description of Artificial Sequence: Synthetic oligonucleotide
  Sense strand starting at position 3897 of SEQ ID NO: 1888583
gcucaucagcguguuugaa

SEQ ID NO: 2543227 - RNA, 19 nt, Artificial Sequence
  Description of Artificial Sequence: Synthetic oligonucleotide
  Antisense strand to SEQ ID NO: 2543226
uucaaacacgcugaugagc

SEQ ID NO: 2543228 - RNA, 19 nt, Artificial Sequence
  Description of Artificial Sequence: Synthetic oligonucleotide
  Sense strand starting at position 3610 of SEQ ID NO: 1888583
agcgaucagauugaccuaa

SEQ ID NO: 2543229 - RNA, 19 nt, Artificial Sequence
  Description of Artificial Sequence: Synthetic oligonucleotide
  Antisense strand to SEQ ID NO: 2543228
uuaggucaaucugaucgcu

SEQ ID NO: 2543230 - RNA, 19 nt, Artificial Sequence
  Description of Artificial Sequence: Synthetic oligonucleotide
  Sense strand starting at position 1154 of SEQ ID NO: 1888583
gagagauacggaugaugug

SEQ ID NO: 2543231 - RNA, 19 nt, Artificial Sequence
  Description of Artificial Sequence: Synthetic oligonucleotide
  Antisense strand to SEQ ID NO: 2543230
cacaucauccguaucucuc

SEQ ID NO: 2543232 - RNA, 19 nt, Artificial Sequence
  Description of Artificial Sequence: Synthetic oligonucleotide
  Sense strand starting at position 2423 of SEQ ID NO: 1888583
agaggacucugaguuugac

SEQ ID NO: 2543233 - RNA, 19 nt, Artificial Sequence
  Description of Artificial Sequence: Synthetic oligonucleotide
  Antisense strand to SEQ ID NO: 2543232
gucaaacucagaguccucu

SEQ ID NO: 2543234 - RNA, 19 nt, Artificial Sequence
  Description of Artificial Sequence: Synthetic oligonucleotide
  Sense strand starting at position 3910 of SEQ ID NO: 1888583
uuugaauuaccuggaccau

SEQ ID NO: 2543235 - RNA, 19 nt, Artificial Sequence
  Description of Artificial Sequence: Synthetic oligonucleotide
  Antisense strand to SEQ ID NO: 2543234
augguccagguaauucaaa

SEQ ID NO: 2543236 - RNA, 19 nt, Artificial Sequence
  Description of Artificial Sequence: Synthetic oligonucleotide
  Sense strand starting at position 1621 of SEQ ID NO: 1888583
aggagcuaaguuugauaaa

SEQ ID NO: 2543237 - RNA, 19 nt, Artificial Sequence
  Description of Artificial Sequence: Synthetic oligonucleotide
  Antisense strand to SEQ ID NO: 2543236
uuuaucaaacuuagcuccu

SEQ ID NO: 2543238 - RNA, 19 nt, Artificial Sequence
  Description of Artificial Sequence: Synthetic oligonucleotide
  Sense strand starting at position 3692 of SEQ ID NO: 1888583
uugucuccugaguagaaau

SEQ ID NO: 2543239 - RNA, 19 nt, Artificial Sequence
  Description of Artificial Sequence: Synthetic oligonucleotide
  Antisense strand to SEQ ID NO: 2543238
auuucuacucaggagacaa

SEQ ID NO: 2543240 - RNA, 19 nt, Artificial Sequence
  Description of Artificial Sequence: Synthetic oligonucleotide
  Sense strand starting at position 3008 of SEQ ID NO: 1888583
guuuccaaccaguauauau

SEQ ID NO: 2543241 - RNA, 19 nt, Artificial Sequence
  Description of Artificial Sequence: Synthetic oligonucleotide
  Antisense strand to SEQ ID NO: 2543240
auauauacugguuggaaac

SEQ ID NO: 2543242 - RNA, 19 nt, Artificial Sequence
  Description of Artificial Sequence: Synthetic oligonucleotide
  Sense strand starting at position 962 of SEQ ID NO: 1888583
ugcaaaguccuugauuaau

SEQ ID NO: 2543243 - RNA, 19 nt, Artificial Sequence
  Description of Artificial Sequence: Synthetic oligonucleotide
  Antisense strand to SEQ ID NO: 2543242
auuaaucaaggacuuugca

SEQ ID NO: 2543244 - RNA, 19 nt, Artificial Sequence
  Description of Artificial Sequence: Synthetic oligonucleotide
  Sense strand starting at position 3604 of SEQ ID NO: 1888583
cuuuauagcgaucagauug

SEQ ID NO: 2543245 - RNA, 19 nt, Artificial Sequence
  Description of Artificial Sequence: Synthetic oligonucleotide
  Antisense strand to SEQ ID NO: 2543244
caaucugaucgcuauaaag

SEQ ID NO: 2543246 - RNA, 19 nt, Artificial Sequence
  Description of Artificial Sequence: Synthetic oligonucleotide
  Sense strand starting at position 2462 of SEQ ID NO: 1888583
cguggagaagguuggaaau

SEQ ID NO: 2543247 - RNA, 19 nt, Artificial Sequence
  Description of Artificial Sequence: Synthetic oligonucleotide
  Antisense strand to SEQ ID NO: 2543246
auuuccaaccuucuccacg

SEQ ID NO: 2543248 - RNA, 19 nt, Artificial Sequence
  Description of Artificial Sequence: Synthetic oligonucleotide
  Sense strand starting at position 2420 of SEQ ID NO: 1888583
uccagaggacucugaguuu

SEQ ID NO: 2543249 - RNA, 19 nt, Artificial Sequence
  Description of Artificial Sequence: Synthetic oligonucleotide
  Antisense strand to SEQ ID NO: 2543248
aaacucagaguccucugga

SEQ ID NO: 2543250 - RNA, 19 nt, Artificial Sequence
  Description of Artificial Sequence: Synthetic oligonucleotide
  Sense strand starting at position 3928 of SEQ ID NO: 1888583
ucaauaaaugcccggaaca

SEQ ID NO: 2543251 - RNA, 19 nt, Artificial Sequence
  Description of Artificial Sequence: Synthetic oligonucleotide
  Antisense strand to SEQ ID NO: 2543250
uguuccgggcauuuauuga

SEQ ID NO: 2543252 - RNA, 19 nt, Artificial Sequence
  Description of Artificial Sequence: Synthetic oligonucleotide
  Sense strand starting at position 3594 of SEQ ID NO: 1888583
aagagaaguucuuuauagc

SEQ ID NO: 2543253 - RNA, 19 nt, Artificial Sequence
  Description of Artificial Sequence: Synthetic oligonucleotide
  Antisense strand to SEQ ID NO: 2543252
gcuauaaagaacuucucuu

SEQ ID NO: 2543254 - RNA, 19 nt, Artificial Sequence
  Description of Artificial Sequence: Synthetic oligonucleotide
  Sense strand starting at position 3691 of SEQ ID NO: 1888583
auugucuccugaguagaaa

SEQ ID NO: 2543255 - RNA, 19 nt, Artificial Sequence
  Description of Artificial Sequence: Synthetic oligonucleotide
  Antisense strand to SEQ ID NO: 2543254
uuucuacucaggagacaau

SEQ ID NO: 2543256 - RNA, 19 nt, Artificial Sequence
  Description of Artificial Sequence: Synthetic oligonucleotide
  Sense strand starting at position 3464 of SEQ ID NO: 1888583
acagcaggugcuuauuaaa

SEQ ID NO: 2543257 - RNA, 19 nt, Artificial Sequence
  Description of Artificial Sequence: Synthetic oligonucleotide
  Antisense strand to SEQ ID NO: 2543256
uuuaauaagcaccugcugu

SEQ ID NO: 2543258 - RNA, 19 nt, Artificial Sequence
  Description of Artificial Sequence: Synthetic oligonucleotide
  Sense strand starting at position 505 of SEQ ID NO: 1888583
gugugagugcugccugcua

SEQ ID NO: 2543259 - RNA, 19 nt, Artificial Sequence
  Description of Artificial Sequence: Synthetic oligonucleotide
  Antisense strand to SEQ ID NO: 2543258
uagcaggcagcacucacac

SEQ ID NO: 2543260 - RNA, 19 nt, Artificial Sequence
  Description of Artificial Sequence: Synthetic oligonucleotide
  Sense strand starting at position 342 of SEQ ID NO: 1888583
gggaaauugcugcaguuac

SEQ ID NO: 2543261 - RNA, 19 nt, Artificial Sequence
  Description of Artificial Sequence: Synthetic oligonucleotide
  Antisense strand to SEQ ID NO: 2543260
guaacugcagcaauuuccc

SEQ ID NO: 2543262 - RNA, 19 nt, Artificial Sequence
  Description of Artificial Sequence: Synthetic oligonucleotide
  Sense strand starting at position 94 of SEQ ID NO: 1888583
ggguuaugcagugauuacu

SEQ ID NO: 2543263 - RNA, 19 nt, Artificial Sequence
  Description of Artificial Sequence: Synthetic oligonucleotide
  Antisense strand to SEQ ID NO: 2543262
aguaaucacugcauaaccc

SEQ ID NO: 2543264 - RNA, 19 nt, Artificial Sequence
  Description of Artificial Sequence: Synthetic oligonucleotide
  Sense strand starting at position 3609 of SEQ ID NO: 1888583
uagcgaucagauugaccua

SEQ ID NO: 2543265 - RNA, 19 nt, Artificial Sequence
  Description of Artificial Sequence: Synthetic oligonucleotide
  Antisense strand to SEQ ID NO: 2543264
uaggucaaucugaucgcua

SEQ ID NO: 2543266 - RNA, 19 nt, Artificial Sequence
  Description of Artificial Sequence: Synthetic oligonucleotide
  Sense strand starting at position 1389 of SEQ ID NO: 1888583
cuguuucaggaggguugau

SEQ ID NO: 2543267 - RNA, 19 nt, Artificial Sequence
  Description of Artificial Sequence: Synthetic oligonucleotide
  Antisense strand to SEQ ID NO: 2543266
aucaacccuccugaaacag

SEQ ID NO: 2543268 - RNA, 19 nt, Artificial Sequence
  Description of Artificial Sequence: Synthetic oligonucleotide
  Sense strand starting at position 3601 of SEQ ID NO: 1888583
guucuuuauagcgaucaga

SEQ ID NO: 2543269 - RNA, 19 nt, Artificial Sequence
  Description of Artificial Sequence: Synthetic oligonucleotide
  Antisense strand to SEQ ID NO: 2543268
ucugaucgcuauaaagaac

SEQ ID NO: 2543270 - RNA, 19 nt, Artificial Sequence
  Description of Artificial Sequence: Synthetic oligonucleotide
  Sense strand starting at position 80 of SEQ ID NO: 1888583
uaaugaauguuucuggguu

SEQ ID NO: 2543271 - RNA, 19 nt, Artificial Sequence
  Description of Artificial Sequence: Synthetic oligonucleotide
  Antisense strand to SEQ ID NO: 2543270
aacccagaaacauucauua

SEQ ID NO: 2543272 - RNA, 19 nt, Artificial Sequence
  Description of Artificial Sequence: Synthetic oligonucleotide
  Sense strand starting at position 2045 of SEQ ID NO: 1888583
aggauaccuuuguuuguga

SEQ ID NO: 2543273 - RNA, 19 nt, Artificial Sequence
  Description of Artificial Sequence: Synthetic oligonucleotide
  Antisense strand to SEQ ID NO: 2543272
ucacaaacaaagguauccu

SEQ ID NO: 2543274 - RNA, 19 nt, Artificial Sequence
  Description of Artificial Sequence: Synthetic oligonucleotide
  Sense strand starting at position 1534 of SEQ ID NO: 1888583
gccaguuggccagacucaa

SEQ ID NO: 2543275 - RNA, 19 nt, Artificial Sequence
  Description of Artificial Sequence: Synthetic oligonucleotide
  Antisense strand to SEQ ID NO: 2543274
uugagucuggccaacuggc

SEQ ID NO: 2543276 - RNA, 19 nt, Artificial Sequence
  Description of Artificial Sequence: Synthetic oligonucleotide
  Sense strand starting at position 960 of SEQ ID NO: 1888583
acugcaaaguccuugauua

SEQ ID NO: 2543277 - RNA, 19 nt, Artificial Sequence
  Description of Artificial Sequence: Synthetic oligonucleotide
  Antisense strand to SEQ ID NO: 2543276
uaaucaaggacuuugcagu

SEQ ID NO: 2543278 - RNA, 19 nt, Artificial Sequence
  Description of Artificial Sequence: Synthetic oligonucleotide
  Sense strand starting at position 2842 of SEQ ID NO: 1888583
uuucucuuaagugagugua

SEQ ID NO: 2543279 - RNA, 19 nt, Artificial Sequence
  Description of Artificial Sequence: Synthetic oligonucleotide
  Antisense strand to SEQ ID NO: 2543278
uacacucacuuaagagaaa

SEQ ID NO: 2543280 - RNA, 19 nt, Artificial Sequence
  Description of Artificial Sequence: Synthetic oligonucleotide
  Sense strand starting at position 2172 of SEQ ID NO: 1888583
cugugcaauagugacagua

SEQ ID NO: 2543281 - RNA, 19 nt, Artificial Sequence
  Description of Artificial Sequence: Synthetic oligonucleotide
  Antisense strand to SEQ ID NO: 2543280
uacugucacuauugcacag

SEQ ID NO: 2543282 - RNA, 19 nt, Artificial Sequence
  Description of Artificial Sequence: Synthetic oligonucleotide
  Sense strand starting at position 961 of SEQ ID NO: 1888583
cugcaaaguccuugauuaa

SEQ ID NO: 2543283 - RNA, 19 nt, Artificial Sequence
  Description of Artificial Sequence: Synthetic oligonucleotide
  Antisense strand to SEQ ID NO: 2543282
uuaaucaaggacuuugcag

SEQ ID NO: 2543284 - RNA, 19 nt, Artificial Sequence
  Description of Artificial Sequence: Synthetic oligonucleotide
  Sense strand starting at position 100 of SEQ ID NO: 1888583
ugcagugauuacucugaac

SEQ ID NO: 2543285 - RNA, 19 nt, Artificial Sequence
  Description of Artificial Sequence: Synthetic oligonucleotide
  Antisense strand to SEQ ID NO: 2543284
guucagaguaaucacugca

SEQ ID NO: 2543286 - RNA, 19 nt, Artificial Sequence
  Description of Artificial Sequence: Synthetic oligonucleotide
  Sense strand starting at position 144 of SEQ ID NO: 1888583
gaacuagguuggguguuau

SEQ ID NO: 2543287 - RNA, 19 nt, Artificial Sequence
  Description of Artificial Sequence: Synthetic oligonucleotide
  Antisense strand to SEQ ID NO: 2543286
auaacacccaaccuaguuc

SEQ ID NO: 2543288 - RNA, 19 nt, Artificial Sequence
  Description of Artificial Sequence: Synthetic oligonucleotide
  Sense strand starting at position 1398 of SEQ ID NO: 1888583
gaggguugauucccgaagu

SEQ ID NO: 2543289 - RNA, 19 nt, Artificial Sequence
  Description of Artificial Sequence: Synthetic oligonucleotide
  Antisense strand to SEQ ID NO: 2543288
acuucgggaaucaacccuc

SEQ ID NO: 2543290 - RNA, 19 nt, Artificial Sequence
  Description of Artificial Sequence: Synthetic oligonucleotide
  Sense strand starting at position 2473 of SEQ ID NO: 1888583
uuggaaaugucaccguuaa

SEQ ID NO: 2543291 - RNA, 19 nt, Artificial Sequence
  Description of Artificial Sequence: Synthetic oligonucleotide
  Antisense strand to SEQ ID NO: 2543290
uuaacggugacauuuccaa

SEQ ID NO: 2543292 - RNA, 19 nt, Artificial Sequence
  Description of Artificial Sequence: Synthetic oligonucleotide
  Sense strand starting at position 1744 of SEQ ID NO: 1888583
gucugaugguaucuauauu

SEQ ID NO: 2543293 - RNA, 19 nt, Artificial Sequence
  Description of Artificial Sequence: Synthetic oligonucleotide
  Antisense strand to SEQ ID NO: 2543292
aauauagauaccaucagac

SEQ ID NO: 2543294 - RNA, 19 nt, Artificial Sequence
  Description of Artificial Sequence: Synthetic oligonucleotide
  Sense strand starting at position 3541 of SEQ ID NO: 1888583
ggaauuauaucacaagaag

SEQ ID NO: 2543295 - RNA, 19 nt, Artificial Sequence
  Description of Artificial Sequence: Synthetic oligonucleotide
  Antisense strand to SEQ ID NO: 2543294
cuucuugugauauaauucc

SEQ ID NO: 2543296 - RNA, 19 nt, Artificial Sequence
  Description of Artificial Sequence: Synthetic oligonucleotide
  Sense strand starting at position 2474 of SEQ ID NO: 1888583
uggaaaugucaccguuaac

SEQ ID NO: 2543297 - RNA, 19 nt, Artificial Sequence
  Description of Artificial Sequence: Synthetic oligonucleotide
  Antisense strand to SEQ ID NO: 2543296
guuaacggugacauuucca

SEQ ID NO: 2543298 - RNA, 19 nt, Artificial Sequence
  Description of Artificial Sequence: Synthetic oligonucleotide
  Sense strand starting at position 2046 of SEQ ID NO: 1888583
ggauaccuuuguuugugau

SEQ ID NO: 2543299 - RNA, 19 nt, Artificial Sequence
  Description of Artificial Sequence: Synthetic oligonucleotide
  Antisense strand to SEQ ID NO: 2543298
aucacaaacaaagguaucc

SEQ ID NO: 2543300 - RNA, 19 nt, Artificial Sequence
  Description of Artificial Sequence: Synthetic oligonucleotide
  Sense strand starting at position 3796 of SEQ ID NO: 1888583
ugccuugauucucuuuaga

SEQ ID NO: 2543301 - RNA, 19 nt, Artificial Sequence
  Description of Artificial Sequence: Synthetic oligonucleotide
  Antisense strand to SEQ ID NO: 2543300
ucuaaagagaaucaaggca

SEQ ID NO: 2543302 - RNA, 19 nt, Artificial Sequence
  Description of Artificial Sequence: Synthetic oligonucleotide
  Sense strand starting at position 2790 of SEQ ID NO: 1888584
gauugaacaagugaagugu

SEQ ID NO: 2543303 - RNA, 19 nt, Artificial Sequence
  Description of Artificial Sequence: Synthetic oligonucleotide
  Antisense strand to SEQ ID NO: 2543302
acacuucacuuguucaauc

SEQ ID NO: 2543304 - RNA, 19 nt, Artificial Sequence
  Description of Artificial Sequence: Synthetic oligonucleotide
  Sense strand starting at position 347 of SEQ ID NO: 1888584
gacagaggguuucuauuga

SEQ ID NO: 2543305 - RNA, 19 nt, Artificial Sequence
  Description of Artificial Sequence: Synthetic oligonucleotide
  Antisense strand to SEQ ID NO: 2543304
ucaauagaaacccucuguc

SEQ ID NO: 2543306 - RNA, 19 nt, Artificial Sequence
  Description of Artificial Sequence: Synthetic oligonucleotide
  Sense strand starting at position 284 of SEQ ID NO: 1888584
ggcuguguucagcuaugug

SEQ ID NO: 2543307 - RNA, 19 nt, Artificial Sequence
  Description of Artificial Sequence: Synthetic oligonucleotide
  Antisense strand to SEQ ID NO: 2543306
cacauagcugaacacagcc

SEQ ID NO: 2543308 - RNA, 19 nt, Artificial Sequence
  Description of Artificial Sequence: Synthetic oligonucleotide
  Sense strand starting at position 2624 of SEQ ID NO: 1888584
gaaagaggugauugugacu

SEQ ID NO: 2543309 - RNA, 19 nt, Artificial Sequence
  Description of Artificial Sequence: Synthetic oligonucleotide
  Antisense strand to SEQ ID NO: 2543308
agucacaaucaccucuuuc

SEQ ID NO: 2543310 - RNA, 19 nt, Artificial Sequence
  Description of Artificial Sequence: Synthetic oligonucleotide
  Sense strand starting at position 726 of SEQ ID NO: 1888584
ggaucagcuauaggaaagu

SEQ ID NO: 2543311 - RNA, 19 nt, Artificial Sequence
  Description of Artificial Sequence: Synthetic oligonucleotide
  Antisense strand to SEQ ID NO: 2543310
acuuuccuauagcugaucc

SEQ ID NO: 2543312 - RNA, 19 nt, Artificial Sequence
  Description of Artificial Sequence: Synthetic oligonucleotide
  Sense strand starting at position 3418 of SEQ ID NO: 1888584
uccuauagauauguuugaa

SEQ ID NO: 2543313 - RNA, 19 nt, Artificial Sequence
  Description of Artificial Sequence: Synthetic oligonucleotide
  Antisense strand to SEQ ID NO: 2543312
uucaaacauaucuauagga

SEQ ID NO: 2543314 - RNA, 19 nt, Artificial Sequence
  Description of Artificial Sequence: Synthetic oligonucleotide
  Sense strand starting at position 2368 of SEQ ID NO: 1888584
cucaguagaagucauguga

SEQ ID NO: 2543315 - RNA, 19 nt, Artificial Sequence
  Description of Artificial Sequence: Synthetic oligonucleotide
  Antisense strand to SEQ ID NO: 2543314
ucacaugacuucuacugag

SEQ ID NO: 2543316 - RNA, 19 nt, Artificial Sequence
  Description of Artificial Sequence: Synthetic oligonucleotide
  Sense strand starting at position 3007 of SEQ ID NO: 1888584
ggguaucaggaggguugau

SEQ ID NO: 2543317 - RNA, 19 nt, Artificial Sequence
  Description of Artificial Sequence: Synthetic oligonucleotide
  Antisense strand to SEQ ID NO: 2543316
aucaacccuccugauaccc

SEQ ID NO: 2543318 - RNA, 19 nt, Artificial Sequence
  Description of Artificial Sequence: Synthetic oligonucleotide
  Sense strand starting at position 3312 of SEQ ID NO: 1888584
ccuaguguccuuuaugaaa

SEQ ID NO: 2543319 - RNA, 19 nt, Artificial Sequence
  Description of Artificial Sequence: Synthetic oligonucleotide
  Antisense strand to SEQ ID NO: 2543318
uuucauaaaggacacuagg

SEQ ID NO: 2543320 - RNA, 19 nt, Artificial Sequence
  Description of Artificial Sequence: Synthetic oligonucleotide
  Sense strand starting at position 1550 of SEQ ID NO: 1888584
ggagcuuagauaugagcaa

SEQ ID NO: 2543321 - RNA, 19 nt, Artificial Sequence
  Description of Artificial Sequence: Synthetic oligonucleotide
  Antisense strand to SEQ ID NO: 2543320
uugcucauaucuaagcucc

SEQ ID NO: 2543322 - RNA, 19 nt, Artificial Sequence
  Description of Artificial Sequence: Synthetic oligonucleotide
  Sense strand starting at position 1861 of SEQ ID NO: 1888584
caugaaguugcuggaagau

SEQ ID NO: 2543323 - RNA, 19 nt, Artificial Sequence
  Description of Artificial Sequence: Synthetic oligonucleotide
  Antisense strand to SEQ ID NO: 2543322
aucuuccagcaacuucaug

SEQ ID NO: 2543324 - RNA, 19 nt, Artificial Sequence
  Description of Artificial Sequence: Synthetic oligonucleotide
  Sense strand starting at position 1481 of SEQ ID NO: 1888584
cugugugucagugugcgaa

SEQ ID NO: 2543325 - RNA, 19 nt, Artificial Sequence
  Description of Artificial Sequence: Synthetic oligonucleotide
  Antisense strand to SEQ ID NO: 2543324
uucgcacacugacacacag

SEQ ID NO: 2543326 - RNA, 19 nt, Artificial Sequence
  Description of Artificial Sequence: Synthetic oligonucleotide
  Sense strand starting at position 2358 of SEQ ID NO: 1888584
acugcauucccucaguaga

SEQ ID NO: 2543327 - RNA, 19 nt, Artificial Sequence
  Description of Artificial Sequence: Synthetic oligonucleotide
  Antisense strand to SEQ ID NO: 2543326
ucuacugagggaaugcagu

SEQ ID NO: 2543328 - RNA, 19 nt, Artificial Sequence
  Description of Artificial Sequence: Synthetic oligonucleotide
  Sense strand starting at position 3026 of SEQ ID NO: 1888584
ggcugaucccagggaucug

SEQ ID NO: 2543329 - RNA, 19 nt, Artificial Sequence
  Description of Artificial Sequence: Synthetic oligonucleotide
  Antisense strand to SEQ ID NO: 2543328
cagaucccugggaucagcc

SEQ ID NO: 2543330 - RNA, 19 nt, Artificial Sequence
  Description of Artificial Sequence: Synthetic oligonucleotide
  Sense strand starting at position 2412 of SEQ ID NO: 1888584
agugucagucuagaaguau

SEQ ID NO: 2543331 - RNA, 19 nt, Artificial Sequence
  Description of Artificial Sequence: Synthetic oligonucleotide
  Antisense strand to SEQ ID NO: 2543330
auacuucuagacugacacu

SEQ ID NO: 2543332 - RNA, 19 nt, Artificial Sequence
  Description of Artificial Sequence: Synthetic oligonucleotide
  Sense strand starting at position 2794 of SEQ ID NO: 1888584
gaacaagugaaguguaagu

SEQ ID NO: 2543333 - RNA, 19 nt, Artificial Sequence
  Description of Artificial Sequence: Synthetic oligonucleotide
  Antisense strand to SEQ ID NO: 2543332
acuuacacuucacuuguuc

SEQ ID NO: 2543334 - RNA, 19 nt, Artificial Sequence
  Description of Artificial Sequence: Synthetic oligonucleotide
  Sense strand starting at position 3117 of SEQ ID NO: 1888584
uagggauaaagcugagugu

SEQ ID NO: 2543335 - RNA, 19 nt, Artificial Sequence
  Description of Artificial Sequence: Synthetic oligonucleotide
  Antisense strand to SEQ ID NO: 2543334
acacucagcuuuaucccua

SEQ ID NO: 2543336 - RNA, 19 nt, Artificial Sequence
  Description of Artificial Sequence: Synthetic oligonucleotide
  Sense strand starting at position 2361 of SEQ ID NO: 1888584
gcauucccucaguagaagu

SEQ ID NO: 2543337 - RNA, 19 nt, Artificial Sequence
  Description of Artificial Sequence: Synthetic oligonucleotide
  Antisense strand to SEQ ID NO: 2543336
acuucuacugagggaaugc

SEQ ID NO: 2543338 - RNA, 19 nt, Artificial Sequence
  Description of Artificial Sequence: Synthetic oligonucleotide
  Sense strand starting at position 388 of SEQ ID NO: 1888584
ggcucaaaucucugaaggu

SEQ ID NO: 2543339 - RNA, 19 nt, Artificial Sequence
  Description of Artificial Sequence: Synthetic oligonucleotide
  Antisense strand to SEQ ID NO: 2543338
accuucagagauuugagcc

SEQ ID NO: 2543340 - RNA, 19 nt, Artificial Sequence
  Description of Artificial Sequence: Synthetic oligonucleotide
  Sense strand starting at position 554 of SEQ ID NO: 1888584
gggaauucugcaugcacag

SEQ ID NO: 2543341 - RNA, 19 nt, Artificial Sequence
  Description of Artificial Sequence: Synthetic oligonucleotide
  Antisense strand to SEQ ID NO: 2543340
cugugcaugcagaauuccc

SEQ ID NO: 2543342 - RNA, 19 nt, Artificial Sequence
  Description of Artificial Sequence: Synthetic oligonucleotide
  Sense strand starting at position 675 of SEQ ID NO: 1888584
uucuguggucucugagaaa

SEQ ID NO: 2543343 - RNA, 19 nt, Artificial Sequence
  Description of Artificial Sequence: Synthetic oligonucleotide
  Antisense strand to SEQ ID NO: 2543342
uuucucagagaccacagaa

SEQ ID NO: 2543344 - RNA, 19 nt, Artificial Sequence
  Description of Artificial Sequence: Synthetic oligonucleotide
  Sense strand starting at position 2360 of SEQ ID NO: 1888584
ugcauucccucaguagaag

SEQ ID NO: 2543345 - RNA, 19 nt, Artificial Sequence
  Description of Artificial Sequence: Synthetic oligonucleotide
  Antisense strand to SEQ ID NO: 2543344
cuucuacugagggaaugca

SEQ ID NO: 2543346 - RNA, 19 nt, Artificial Sequence
  Description of Artificial Sequence: Synthetic oligonucleotide
  Sense strand starting at position 3290 of SEQ ID NO: 1888584
cuacucauugcuggaacuu

SEQ ID NO: 2543347 - RNA, 19 nt, Artificial Sequence
  Description of Artificial Sequence: Synthetic oligonucleotide
  Antisense strand to SEQ ID NO: 2543346
aaguuccagcaaugaguag

SEQ ID NO: 2543348 - RNA, 19 nt, Artificial Sequence
  Description of Artificial Sequence: Synthetic oligonucleotide
  Sense strand starting at position 3339 of SEQ ID NO: 1888584
uagugucuuuauguaagaa

SEQ ID NO: 2543349 - RNA, 19 nt, Artificial Sequence
  Description of Artificial Sequence: Synthetic oligonucleotide
  Antisense strand to SEQ ID NO: 2543348
uucuuacauaaagacacua

SEQ ID NO: 2543350 - RNA, 19 nt, Artificial Sequence
  Description of Artificial Sequence: Synthetic oligonucleotide
  Sense strand starting at position 2454 of SEQ ID NO: 1888584
gcccaaguugcugauacua

SEQ ID NO: 2543351 - RNA, 19 nt, Artificial Sequence
  Description of Artificial Sequence: Synthetic oligonucleotide
  Antisense strand to SEQ ID NO: 2543350
uaguaucagcaacuugggc

SEQ ID NO: 2543352 - RNA, 19 nt, Artificial Sequence
  Description of Artificial Sequence: Synthetic oligonucleotide
  Sense strand starting at position 665 of SEQ ID NO: 1888584
acaagauaguuucuguggu

SEQ ID NO: 2543353 - RNA, 19 nt, Artificial Sequence
  Description of Artificial Sequence: Synthetic oligonucleotide
  Antisense strand to SEQ ID NO: 2543352
accacagaaacuaucuugu

SEQ ID NO: 2543354 - RNA, 19 nt, Artificial Sequence
  Description of Artificial Sequence: Synthetic oligonucleotide
  Sense strand starting at position 2372 of SEQ ID NO: 1888584
guagaagucaugugagugg

SEQ ID NO: 2543355 - RNA, 19 nt, Artificial Sequence
  Description of Artificial Sequence: Synthetic oligonucleotide
  Antisense strand to SEQ ID NO: 2543354
ccacucacaugacuucuac

SEQ ID NO: 2543356 - RNA, 19 nt, Artificial Sequence
  Description of Artificial Sequence: Synthetic oligonucleotide
  Sense strand starting at position 3080 of SEQ ID NO: 1888584
ggguaacugugucccuaga

SEQ ID NO: 2543357 - RNA, 19 nt, Artificial Sequence
  Description of Artificial Sequence: Synthetic oligonucleotide
  Antisense strand to SEQ ID NO: 2543356
ucuagggacacaguuaccc

SEQ ID NO: 2543358 - RNA, 19 nt, Artificial Sequence
  Description of Artificial Sequence: Synthetic oligonucleotide
  Sense strand starting at position 919 of SEQ ID NO: 1888584
gguaccuaccugugaguga

SEQ ID NO: 2543359 - RNA, 19 nt, Artificial Sequence
  Description of Artificial Sequence: Synthetic oligonucleotide
  Antisense strand to SEQ ID NO: 2543358
ucacucacagguagguacc

SEQ ID NO: 2543360 - RNA, 19 nt, Artificial Sequence
  Description of Artificial Sequence: Synthetic oligonucleotide
  Sense strand starting at position 1376 of SEQ ID NO: 1888584
gaaagugcuuuccugugaa

SEQ ID NO: 2543361 - RNA, 19 nt, Artificial Sequence
  Description of Artificial Sequence: Synthetic oligonucleotide
  Antisense strand to SEQ ID NO: 2543360
uucacaggaaagcacuuuc

SEQ ID NO: 2543362 - RNA, 19 nt, Artificial Sequence
  Description of Artificial Sequence: Synthetic oligonucleotide
  Sense strand starting at position 2799 of SEQ ID NO: 1888584
agugaaguguaagugucaa

SEQ ID NO: 2543363 - RNA, 19 nt, Artificial Sequence
  Description of Artificial Sequence: Synthetic oligonucleotide
  Antisense strand to SEQ ID NO: 2543362
uugacacuuacacuucacu

SEQ ID NO: 2543364 - RNA, 19 nt, Artificial Sequence
  Description of Artificial Sequence: Synthetic oligonucleotide
  Sense strand starting at position 1497 of SEQ ID NO: 1888584
gaaggacugcugugcucaa

SEQ ID NO: 2543365 - RNA, 19 nt, Artificial Sequence
  Description of Artificial Sequence: Synthetic oligonucleotide
  Antisense strand to SEQ ID NO: 2543364
uugagcacagcaguccuuc

SEQ ID NO: 2543366 - RNA, 19 nt, Artificial Sequence
  Description of Artificial Sequence: Synthetic oligonucleotide
  Sense strand starting at position 2407 of SEQ ID NO: 1888584
uagugagugucagucuaga

SEQ ID NO: 2543367 - RNA, 19 nt, Artificial Sequence
  Description of Artificial Sequence: Synthetic oligonucleotide
  Antisense strand to SEQ ID NO: 2543366
ucuagacugacacucacua

SEQ ID NO: 2543368 - RNA, 19 nt, Artificial Sequence
  Description of Artificial Sequence: Synthetic oligonucleotide
  Sense strand starting at position 3387 of SEQ ID NO: 1888584
ccauauuacuugcugaguu

SEQ ID NO: 2543369 - RNA, 19 nt, Artificial Sequence
  Description of Artificial Sequence: Synthetic oligonucleotide
  Antisense strand to SEQ ID NO: 2543368
aacucagcaaguaauaugg

SEQ ID NO: 2543370 - RNA, 19 nt, Artificial Sequence
  Description of Artificial Sequence: Synthetic oligonucleotide
  Sense strand starting at position 3120 of SEQ ID NO: 1888584
ggauaaagcugaguguugu

SEQ ID NO: 2543371 - RNA, 19 nt, Artificial Sequence
  Description of Artificial Sequence: Synthetic oligonucleotide
  Antisense strand to SEQ ID NO: 2543370
acaacacucagcuuuaucc

SEQ ID NO: 2543372 - RNA, 19 nt, Artificial Sequence
  Description of Artificial Sequence: Synthetic oligonucleotide
  Sense strand starting at position 1392 of SEQ ID NO: 1888584
gaaguuuguauaugugagu

SEQ ID NO: 2543373 - RNA, 19 nt, Artificial Sequence
  Description of Artificial Sequence: Synthetic oligonucleotide
  Antisense strand to SEQ ID NO: 2543372
acucacauauacaaacuuc

SEQ ID NO: 2543374 - RNA, 19 nt, Artificial Sequence
  Description of Artificial Sequence: Synthetic oligonucleotide
  Sense strand starting at position 1498 of SEQ ID NO: 1888584
aaggacugcugugcucaau

SEQ ID NO: 2543375 - RNA, 19 nt, Artificial Sequence
  Description of Artificial Sequence: Synthetic oligonucleotide
  Antisense strand to SEQ ID NO: 2543374
auugagcacagcaguccuu

SEQ ID NO: 2543376 - RNA, 19 nt, Artificial Sequence
  Description of Artificial Sequence: Synthetic oligonucleotide
  Sense strand starting at position 1329 of SEQ ID NO: 1888584
ucagaaacauucuauggag

SEQ ID NO: 2543377 - RNA, 19 nt, Artificial Sequence
  Description of Artificial Sequence: Synthetic oligonucleotide
  Antisense strand to SEQ ID NO: 2543376
cuccauagaauguuucuga

SEQ ID NO: 2543378 - RNA, 19 nt, Artificial Sequence
  Description of Artificial Sequence: Synthetic oligonucleotide
  Sense strand starting at position 264 of SEQ ID NO: 1888584
ggagcucuuucuguuuaug

SEQ ID NO: 2543379 - RNA, 19 nt, Artificial Sequence
  Description of Artificial Sequence: Synthetic oligonucleotide
  Antisense strand to SEQ ID NO: 2543378
cauaaacagaaagagcucc

SEQ ID NO: 2543380 - RNA, 19 nt, Artificial Sequence
  Description of Artificial Sequence: Synthetic oligonucleotide
  Sense strand starting at position 1393 of SEQ ID NO: 1888584
aaguuuguauaugugaguu

SEQ ID NO: 2543381 - RNA, 19 nt, Artificial Sequence
  Description of Artificial Sequence: Synthetic oligonucleotide
  Antisense strand to SEQ ID NO: 2543380
aacucacauauacaaacuu

SEQ ID NO: 2543382 - RNA, 19 nt, Artificial Sequence
  Description of Artificial Sequence: Synthetic oligonucleotide
  Sense strand starting at position 1284 of SEQ ID NO: 1888585
gauugacuguaauugacaa

SEQ ID NO: 2543383 - RNA, 19 nt, Artificial Sequence
  Description of Artificial Sequence: Synthetic oligonucleotide
  Antisense strand to SEQ ID NO: 2543382
uugucaauuacagucaauc

SEQ ID NO: 2543384 - RNA, 19 nt, Artificial Sequence
  Description of Artificial Sequence: Synthetic oligonucleotide
  Sense strand starting at position 641 of SEQ ID NO: 1888585
gcaagagaucccuaauccc

SEQ ID NO: 2543385 - RNA, 19 nt, Artificial Sequence
  Description of Artificial Sequence: Synthetic oligonucleotide
  Antisense strand to SEQ ID NO: 2543384
gggauuagggaucucuugc

SEQ ID NO: 2543386 - RNA, 19 nt, Artificial Sequence
  Description of Artificial Sequence: Synthetic oligonucleotide
  Sense strand starting at position 1281 of SEQ ID NO: 1888585
ggugauugacuguaauuga

SEQ ID NO: 2543387 - RNA, 19 nt, Artificial Sequence
  Description of Artificial Sequence: Synthetic oligonucleotide
  Antisense strand to SEQ ID NO: 2543386
ucaauuacagucaaucacc

SEQ ID NO: 2543388 - RNA, 19 nt, Artificial Sequence
  Description of Artificial Sequence: Synthetic oligonucleotide
  Sense strand starting at position 1188 of SEQ ID NO: 1888585
auuuaucuuucuguguuga

SEQ ID NO: 2543389 - RNA, 19 nt, Artificial Sequence
  Description of Artificial Sequence: Synthetic oligonucleotide
  Antisense strand to SEQ ID NO: 2543388
ucaacacagaaagauaaau

SEQ ID NO: 2543390 - RNA, 19 nt, Artificial Sequence
  Description of Artificial Sequence: Synthetic oligonucleotide
  Sense strand starting at position 1397 of SEQ ID NO: 1888585
ugugaauggacaugacuua

SEQ ID NO: 2543391 - RNA, 19 nt, Artificial Sequence
  Description of Artificial Sequence: Synthetic oligonucleotide
  Antisense strand to SEQ ID NO: 2543390
uaagucauguccauucaca

SEQ ID NO: 2543392 - RNA, 19 nt, Artificial Sequence
  Description of Artificial Sequence: Synthetic oligonucleotide
  Sense strand starting at position 1391 of SEQ ID NO: 1888585
uugauaugugaauggacau

SEQ ID NO: 2543393 - RNA, 19 nt, Artificial Sequence
  Description of Artificial Sequence: Synthetic oligonucleotide
  Antisense strand to SEQ ID NO: 2543392
auguccauucacauaucaa

SEQ ID NO: 2543394 - RNA, 19 nt, Artificial Sequence
  Description of Artificial Sequence: Synthetic oligonucleotide
  Sense strand starting at position 890 of SEQ ID NO: 1888585
auaucauguugccuuauuu

SEQ ID NO: 2543395 - RNA, 19 nt, Artificial Sequence
  Description of Artificial Sequence: Synthetic oligonucleotide
  Antisense strand to SEQ ID NO: 2543394
aaauaaggcaacaugauau

SEQ ID NO: 2543396 - RNA, 19 nt, Artificial Sequence
  Description of Artificial Sequence: Synthetic oligonucleotide
  Sense strand starting at position 1890 of SEQ ID NO: 1888585
ugaacauaccucgaaugca

SEQ ID NO: 2543397 - RNA, 19 nt, Artificial Sequence
  Description of Artificial Sequence: Synthetic oligonucleotide
  Antisense strand to SEQ ID NO: 2543396
ugcauucgagguauguuca

SEQ ID NO: 2543398 - RNA, 19 nt, Artificial Sequence
  Description of Artificial Sequence: Synthetic oligonucleotide
  Sense strand starting at position 3172 of SEQ ID NO: 1888585
ggaauuaaguuccucauag

SEQ ID NO: 2543399 - RNA, 19 nt, Artificial Sequence
  Description of Artificial Sequence: Synthetic oligonucleotide
  Antisense strand to SEQ ID NO: 2543398
cuaugaggaacuuaauucc

SEQ ID NO: 2543400 - RNA, 19 nt, Artificial Sequence
  Description of Artificial Sequence: Synthetic oligonucleotide
  Sense strand starting at position 2150 of SEQ ID NO: 1888585
ggucauugaagauaagugu

SEQ ID NO: 2543401 - RNA, 19 nt, Artificial Sequence
  Description of Artificial Sequence: Synthetic oligonucleotide
  Antisense strand to SEQ ID NO: 2543400
acacuuaucuucaaugacc

SEQ ID NO: 2543402 - RNA, 19 nt, Artificial Sequence
  Description of Artificial Sequence: Synthetic oligonucleotide
  Sense strand starting at position 1186 of SEQ ID NO: 1888585
cuauuuaucuuucuguguu

SEQ ID NO: 2543403 - RNA, 19 nt, Artificial Sequence
  Description of Artificial Sequence: Synthetic oligonucleotide
  Antisense strand to SEQ ID NO: 2543402
aacacagaaagauaaauag

SEQ ID NO: 2543404 - RNA, 19 nt, Artificial Sequence
  Description of Artificial Sequence: Synthetic oligonucleotide
  Sense strand starting at position 1162 of SEQ ID NO: 1888585
guuaacagucucuaccaau

SEQ ID NO: 2543405 - RNA, 19 nt, Artificial Sequence
  Description of Artificial Sequence: Synthetic oligonucleotide
  Antisense strand to SEQ ID NO: 2543404
auugguagagacuguuaac

SEQ ID NO: 2543406 - RNA, 19 nt, Artificial Sequence
  Description of Artificial Sequence: Synthetic oligonucleotide
  Sense strand starting at position 3375 of SEQ ID NO: 1888585
aggccaugucaagaauggu

SEQ ID NO: 2543407 - RNA, 19 nt, Artificial Sequence
  Description of Artificial Sequence: Synthetic oligonucleotide
  Antisense strand to SEQ ID NO: 2543406
accauucuugacauggccu

SEQ ID NO: 2543408 - RNA, 19 nt, Artificial Sequence
  Description of Artificial Sequence: Synthetic oligonucleotide
  Sense strand starting at position 409 of SEQ ID NO: 1888585
gaagaaccguuauugauau

SEQ ID NO: 2543409 - RNA, 19 nt, Artificial Sequence
  Description of Artificial Sequence: Synthetic oligonucleotide
  Antisense strand to SEQ ID NO: 2543408
auaucaauaacgguucuuc

SEQ ID NO: 2543410 - RNA, 19 nt, Artificial Sequence
  Description of Artificial Sequence: Synthetic oligonucleotide
  Sense strand starting at position 385 of SEQ ID NO: 1888585
agugcccuccaugauaaau

SEQ ID NO: 2543411 - RNA, 19 nt, Artificial Sequence
  Description of Artificial Sequence: Synthetic oligonucleotide
  Antisense strand to SEQ ID NO: 2543410
auuuaucauggagggcacu

SEQ ID NO: 2543412 - RNA, 19 nt, Artificial Sequence
  Description of Artificial Sequence: Synthetic oligonucleotide
  Sense strand starting at position 3062 of SEQ ID NO: 1888585
cucucaugauuagugauga

SEQ ID NO: 2543413 - RNA, 19 nt, Artificial Sequence
  Description of Artificial Sequence: Synthetic oligonucleotide
  Antisense strand to SEQ ID NO: 2543412
ucaucacuaaucaugagag

SEQ ID NO: 2543414 - RNA, 19 nt, Artificial Sequence
  Description of Artificial Sequence: Synthetic oligonucleotide
  Sense strand starting at position 2064 of SEQ ID NO: 1888585
acagacauucccgggugaa

SEQ ID NO: 2543415 - RNA, 19 nt, Artificial Sequence
  Description of Artificial Sequence: Synthetic oligonucleotide
  Antisense strand to SEQ ID NO: 2543414
uucacccgggaaugucugu

SEQ ID NO: 2543416 - RNA, 19 nt, Artificial Sequence
  Description of Artificial Sequence: Synthetic oligonucleotide
  Sense strand starting at position 1887 of SEQ ID NO: 1888585
guaugaacauaccucgaau

SEQ ID NO: 2543417 - RNA, 19 nt, Artificial Sequence
  Description of Artificial Sequence: Synthetic oligonucleotide
  Antisense strand to SEQ ID NO: 2543416
auucgagguauguucauac

SEQ ID NO: 2543418 - RNA, 19 nt, Artificial Sequence
  Description of Artificial Sequence: Synthetic oligonucleotide
  Sense strand starting at position 655 of SEQ ID NO: 1888585
aucccaucacuaugacgau

SEQ ID NO: 2543419 - RNA, 19 nt, Artificial Sequence
  Description of Artificial Sequence: Synthetic oligonucleotide
  Antisense strand to SEQ ID NO: 2543418
aucgucauagugaugggau

SEQ ID NO: 2543420 - RNA, 19 nt, Artificial Sequence
  Description of Artificial Sequence: Synthetic oligonucleotide
  Sense strand starting at position 133 of SEQ ID NO: 1888585
auucgauguagguaaagua

SEQ ID NO: 2543421 - RNA, 19 nt, Artificial Sequence
  Description of Artificial Sequence: Synthetic oligonucleotide
  Antisense strand to SEQ ID NO: 2543420
uacuuuaccuacaucgaau

SEQ ID NO: 2543422 - RNA, 19 nt, Artificial Sequence
  Description of Artificial Sequence: Synthetic oligonucleotide
  Sense strand starting at position 2065 of SEQ ID NO: 1888585
cagacauucccgggugaag

SEQ ID NO: 2543423 - RNA, 19 nt, Artificial Sequence
  Description of Artificial Sequence: Synthetic oligonucleotide
  Antisense strand to SEQ ID NO: 2543422
cuucacccgggaaugucug

SEQ ID NO: 2543424 - RNA, 19 nt, Artificial Sequence
  Description of Artificial Sequence: Synthetic oligonucleotide
  Sense strand starting at position 3378 of SEQ ID NO: 1888585
ccaugucaagaaugguacu

SEQ ID NO: 2543425 - RNA, 19 nt, Artificial Sequence
  Description of Artificial Sequence: Synthetic oligonucleotide
  Antisense strand to SEQ ID NO: 2543424
aguaccauucuugacaugg

SEQ ID NO: 2543426 - RNA, 19 nt, Artificial Sequence
  Description of Artificial Sequence: Synthetic oligonucleotide
  Sense strand starting at position 1161 of SEQ ID NO: 1888585
aguuaacagucucuaccaa

SEQ ID NO: 2543427 - RNA, 19 nt, Artificial Sequence
  Description of Artificial Sequence: Synthetic oligonucleotide
  Antisense strand to SEQ ID NO: 2543426
uugguagagacuguuaacu

SEQ ID NO: 2543428 - RNA, 19 nt, Artificial Sequence
  Description of Artificial Sequence: Synthetic oligonucleotide
  Sense strand starting at position 397 of SEQ ID NO: 1888585
gauaaauaaugggaagaac

SEQ ID NO: 2543429 - RNA, 19 nt, Artificial Sequence
  Description of Artificial Sequence: Synthetic oligonucleotide
  Antisense strand to SEQ ID NO: 2543428
guucuucccauuauuuauc

SEQ ID NO: 2543430 - RNA, 19 nt, Artificial Sequence
  Description of Artificial Sequence: Synthetic oligonucleotide
  Sense strand starting at position 382 of SEQ ID NO: 1888585
cucagugcccuccaugaua

SEQ ID NO: 2543431 - RNA, 19 nt, Artificial Sequence
  Description of Artificial Sequence: Synthetic oligonucleotide
  Antisense strand to SEQ ID NO: 2543430
uaucauggagggcacugag

SEQ ID NO: 2543432 - RNA, 19 nt, Artificial Sequence
  Description of Artificial Sequence: Synthetic oligonucleotide
  Sense strand starting at position 423 of SEQ ID NO: 1888585
gauauuugauggcauuaca

SEQ ID NO: 2543433 - RNA, 19 nt, Artificial Sequence
  Description of Artificial Sequence: Synthetic oligonucleotide
  Antisense strand to SEQ ID NO: 2543432
uguaaugccaucaaauauc

SEQ ID NO: 2543434 - RNA, 19 nt, Artificial Sequence
  Description of Artificial Sequence: Synthetic oligonucleotide
  Sense strand starting at position 3198 of SEQ ID NO: 1888585
auauuagaccuuuguugua

SEQ ID NO: 2543435 - RNA, 19 nt, Artificial Sequence
  Description of Artificial Sequence: Synthetic oligonucleotide
  Antisense strand to SEQ ID NO: 2543434
uacaacaaaggucuaauau

SEQ ID NO: 2543436 - RNA, 19 nt, Artificial Sequence
  Description of Artificial Sequence: Synthetic oligonucleotide
  Sense strand starting at position 115 of SEQ ID NO: 1888585
uguggugauggcugaauga

SEQ ID NO: 2543437 - RNA, 19 nt, Artificial Sequence
  Description of Artificial Sequence: Synthetic oligonucleotide
  Antisense strand to SEQ ID NO: 2543436
ucauucagccaucaccaca

SEQ ID NO: 2543438 - RNA, 19 nt, Artificial Sequence
  Description of Artificial Sequence: Synthetic oligonucleotide
  Sense strand starting at position 2262 of SEQ ID NO: 1888585
agccaauagugagaauuuc

SEQ ID NO: 2543439 - RNA, 19 nt, Artificial Sequence
  Description of Artificial Sequence: Synthetic oligonucleotide
  Antisense strand to SEQ ID NO: 2543438
gaaauucucacuauuggcu

SEQ ID NO: 2543440 - RNA, 19 nt, Artificial Sequence
  Description of Artificial Sequence: Synthetic oligonucleotide
  Sense strand starting at position 2381 of SEQ ID NO: 1888585
cagguuaguuaccugggua

SEQ ID NO: 2543441 - RNA, 19 nt, Artificial Sequence
  Description of Artificial Sequence: Synthetic oligonucleotide
  Antisense strand to SEQ ID NO: 2543440
uacccagguaacuaaccug

SEQ ID NO: 2543442 - RNA, 19 nt, Artificial Sequence
  Description of Artificial Sequence: Synthetic oligonucleotide
  Sense strand starting at position 124 of SEQ ID NO: 1888585
ggcugaaugauucgaugua

SEQ ID NO: 2543443 - RNA, 19 nt, Artificial Sequence
  Description of Artificial Sequence: Synthetic oligonucleotide
  Antisense strand to SEQ ID NO: 2543442
uacaucgaaucauucagcc

SEQ ID NO: 2543444 - RNA, 19 nt, Artificial Sequence
  Description of Artificial Sequence: Synthetic oligonucleotide
  Sense strand starting at position 1190 of SEQ ID NO: 1888585
uuaucuuucuguguugaaa

SEQ ID NO: 2543445 - RNA, 19 nt, Artificial Sequence
  Description of Artificial Sequence: Synthetic oligonucleotide
  Antisense strand to SEQ ID NO: 2543444
uuucaacacagaaagauaa

SEQ ID NO: 2543446 - RNA, 19 nt, Artificial Sequence
  Description of Artificial Sequence: Synthetic oligonucleotide
  Sense strand starting at position 556 of SEQ ID NO: 1888585
gguugcaacucccuugaca

SEQ ID NO: 2543447 - RNA, 19 nt, Artificial Sequence
  Description of Artificial Sequence: Synthetic oligonucleotide
  Antisense strand to SEQ ID NO: 2543446
ugucaagggaguugcaacc

SEQ ID NO: 2543448 - RNA, 19 nt, Artificial Sequence
  Description of Artificial Sequence: Synthetic oligonucleotide
  Sense strand starting at position 2382 of SEQ ID NO: 1888585
agguuaguuaccuggguau

SEQ ID NO: 2543449 - RNA, 19 nt, Artificial Sequence
  Description of Artificial Sequence: Synthetic oligonucleotide
  Antisense strand to SEQ ID NO: 2543448
auacccagguaacuaaccu

SEQ ID NO: 2543450 - RNA, 19 nt, Artificial Sequence
  Description of Artificial Sequence: Synthetic oligonucleotide
  Sense strand starting at position 1151 of SEQ ID NO: 1888585
guauguucuuaguuaacag

SEQ ID NO: 2543451 - RNA, 19 nt, Artificial Sequence
  Description of Artificial Sequence: Synthetic oligonucleotide
  Antisense strand to SEQ ID NO: 2543450
cuguuaacuaagaacauac

SEQ ID NO: 2543452 - RNA, 19 nt, Artificial Sequence
  Description of Artificial Sequence: Synthetic oligonucleotide
  Sense strand starting at position 413 of SEQ ID NO: 1888585
aaccguuauugauauuuga

SEQ ID NO: 2543453 - RNA, 19 nt, Artificial Sequence
  Description of Artificial Sequence: Synthetic oligonucleotide
  Antisense strand to SEQ ID NO: 2543452
ucaaauaucaauaacgguu

SEQ ID NO: 2543454 - RNA, 19 nt, Artificial Sequence
  Description of Artificial Sequence: Synthetic oligonucleotide
  Sense strand starting at position 3926 of SEQ ID NO: 1888585
gguauuuaguaacauggua

SEQ ID NO: 2543455 - RNA, 19 nt, Artificial Sequence
  Description of Artificial Sequence: Synthetic oligonucleotide
  Antisense strand to SEQ ID NO: 2543454
uaccauguuacuaaauacc

SEQ ID NO: 2543456 - RNA, 19 nt, Artificial Sequence
  Description of Artificial Sequence: Synthetic oligonucleotide
  Sense strand starting at position 3923 of SEQ ID NO: 1888585
gacgguauuuaguaacaug

SEQ ID NO: 2543457 - RNA, 19 nt, Artificial Sequence
  Description of Artificial Sequence: Synthetic oligonucleotide
  Antisense strand to SEQ ID NO: 2543456
cauguuacuaaauaccguc

SEQ ID NO: 2543458 - RNA, 19 nt, Artificial Sequence
  Description of Artificial Sequence: Synthetic oligonucleotide
  Sense strand starting at position 1189 of SEQ ID NO: 1888585
uuuaucuuucuguguugaa

SEQ ID NO: 2543459 - RNA, 19 nt, Artificial Sequence
  Description of Artificial Sequence: Synthetic oligonucleotide
  Antisense strand to SEQ ID NO: 2543458
uucaacacagaaagauaaa

SEQ ID NO: 2543460 - RNA, 19 nt, Artificial Sequence
  Description of Artificial Sequence: Synthetic oligonucleotide
  Sense strand starting at position 3215 of SEQ ID NO: 1888585
uacgcauaguuugugaaua

SEQ ID NO: 2543461 - RNA, 19 nt, Artificial Sequence
  Description of Artificial Sequence: Synthetic oligonucleotide
  Antisense strand to SEQ ID NO: 2543460
uauucacaaacuaugcgua

SEQ ID NO: 2543462 - RNA, 19 nt, Artificial Sequence
  Description of Artificial Sequence: Synthetic oligonucleotide
  Sense strand starting at position 2514 of SEQ ID NO: 1888586
gcuauuuaauuguucugau

SEQ ID NO: 2543463 - RNA, 19 nt, Artificial Sequence
  Description of Artificial Sequence: Synthetic oligonucleotide
  Antisense strand to SEQ ID NO: 2543462
aucagaacaauuaaauagc

SEQ ID NO: 2543464 - RNA, 19 nt, Artificial Sequence
  Description of Artificial Sequence: Synthetic oligonucleotide
  Sense strand starting at position 3539 of SEQ ID NO: 1888586
accuuugaacucugagaac

SEQ ID NO: 2543465 - RNA, 19 nt, Artificial Sequence
  Description of Artificial Sequence: Synthetic oligonucleotide
  Antisense strand to SEQ ID NO: 2543464
guucucagaguucaaaggu

SEQ ID NO: 2543466 - RNA, 19 nt, Artificial Sequence
  Description of Artificial Sequence: Synthetic oligonucleotide
  Sense strand starting at position 3548 of SEQ ID NO: 1888586
cucugagaacuugaaugcu

SEQ ID NO: 2543467 - RNA, 19 nt, Artificial Sequence
  Description of Artificial Sequence: Synthetic oligonucleotide
  Antisense strand to SEQ ID NO: 2543466
agcauucaaguucucagag

SEQ ID NO: 2543468 - RNA, 19 nt, Artificial Sequence
  Description of Artificial Sequence: Synthetic oligonucleotide
  Sense strand starting at position 3556 of SEQ ID NO: 1888586
acuugaaugcuguaaacac

SEQ ID NO: 2543469 - RNA, 19 nt, Artificial Sequence
  Description of Artificial Sequence: Synthetic oligonucleotide
  Antisense strand to SEQ ID NO: 2543468
guguuuacagcauucaagu

SEQ ID NO: 2543470 - RNA, 19 nt, Artificial Sequence
  Description of Artificial Sequence: Synthetic oligonucleotide
  Sense strand starting at position 694 of SEQ ID NO: 1888586
gguguuccacuacaauuga

SEQ ID NO: 2543471 - RNA, 19 nt, Artificial Sequence
  Description of Artificial Sequence: Synthetic oligonucleotide
  Antisense strand to SEQ ID NO: 2543470
ucaauuguaguggaacacc

SEQ ID NO: 2543472 - RNA, 19 nt, Artificial Sequence
  Description of Artificial Sequence: Synthetic oligonucleotide
  Sense strand starting at position 3571 of SEQ ID NO: 1888586
acacaauagcacugacagu

SEQ ID NO: 2543473 - RNA, 19 nt, Artificial Sequence
  Description of Artificial Sequence: Synthetic oligonucleotide
  Antisense strand to SEQ ID NO: 2543472
acugucagugcuauugugu

SEQ ID NO: 2543474 - RNA, 19 nt, Artificial Sequence
  Description of Artificial Sequence: Synthetic oligonucleotide
  Sense strand starting at position 2114 of SEQ ID NO: 1888586
cccaguuaucgcucggcga

SEQ ID NO: 2543475 - RNA, 19 nt, Artificial Sequence
  Description of Artificial Sequence: Synthetic oligonucleotide
  Antisense strand to SEQ ID NO: 2543474
ucgccgagcgauaacuggg

SEQ ID NO: 2543476 - RNA, 19 nt, Artificial Sequence
  Description of Artificial Sequence: Synthetic oligonucleotide
  Sense strand starting at position 3551 of SEQ ID NO: 1888586
ugagaacuugaaugcugua

SEQ ID NO: 2543477 - RNA, 19 nt, Artificial Sequence
  Description of Artificial Sequence: Synthetic oligonucleotide
  Antisense strand to SEQ ID NO: 2543476
uacagcauucaaguucuca

SEQ ID NO: 2543478 - RNA, 19 nt, Artificial Sequence
  Description of Artificial Sequence: Synthetic oligonucleotide
  Sense strand starting at position 3513 of SEQ ID NO: 1888586
agccucauucuacauguua

SEQ ID NO: 2543479 - RNA, 19 nt, Artificial Sequence
  Description of Artificial Sequence: Synthetic oligonucleotide
  Antisense strand to SEQ ID NO: 2543478
uaacauguagaaugaggcu

SEQ ID NO: 2543480 - RNA, 19 nt, Artificial Sequence
  Description of Artificial Sequence: Synthetic oligonucleotide
  Sense strand starting at position 3903 of SEQ ID NO: 1888586
ugaucuauccgcuaagagu

SEQ ID NO: 2543481 - RNA, 19 nt, Artificial Sequence
  Description of Artificial Sequence: Synthetic oligonucleotide
  Antisense strand to SEQ ID NO: 2543480
acucuuagcggauagauca

SEQ ID NO: 2543482 - RNA, 19 nt, Artificial Sequence
  Description of Artificial Sequence: Synthetic oligonucleotide
  Sense strand starting at position 2793 of SEQ ID NO: 1888586
uuaaguaagccucgaggaa

SEQ ID NO: 2543483 - RNA, 19 nt, Artificial Sequence
  Description of Artificial Sequence: Synthetic oligonucleotide
  Antisense strand to SEQ ID NO: 2543482
uuccucgaggcuuacuuaa

SEQ ID NO: 2543484 - RNA, 19 nt, Artificial Sequence
  Description of Artificial Sequence: Synthetic oligonucleotide
  Sense strand starting at position 3901 of SEQ ID NO: 1888586
acugaucuauccgcuaaga

SEQ ID NO: 2543485 - RNA, 19 nt, Artificial Sequence
  Description of Artificial Sequence: Synthetic oligonucleotide
  Antisense strand to SEQ ID NO: 2543484
ucuuagcggauagaucagu

SEQ ID NO: 2543486 - RNA, 19 nt, Artificial Sequence
  Description of Artificial Sequence: Synthetic oligonucleotide
  Sense strand starting at position 351 of SEQ ID NO: 1888586
cugaacgucuucucaaauc

SEQ ID NO: 2543487 - RNA, 19 nt, Artificial Sequence
  Description of Artificial Sequence: Synthetic oligonucleotide
  Antisense strand to SEQ ID NO: 2543486
gauuugagaagacguucag

SEQ ID NO: 2543488 - RNA, 19 nt, Artificial Sequence
  Description of Artificial Sequence: Synthetic oligonucleotide
  Sense strand starting at position 349 of SEQ ID NO: 1888586
cccugaacgucuucucaaa

SEQ ID NO: 2543489 - RNA, 19 nt, Artificial Sequence
  Description of Artificial Sequence: Synthetic oligonucleotide
  Antisense strand to SEQ ID NO: 2543488
uuugagaagacguucaggg

SEQ ID NO: 2543490 - RNA, 19 nt, Artificial Sequence
  Description of Artificial Sequence: Synthetic oligonucleotide
  Sense strand starting at position 3508 of SEQ ID NO: 1888586
aguguagccucauucuaca

SEQ ID NO: 2543491 - RNA, 19 nt, Artificial Sequence
  Description of Artificial Sequence: Synthetic oligonucleotide
  Antisense strand to SEQ ID NO: 2543490
uguagaaugaggcuacacu

SEQ ID NO: 2543492 - RNA, 19 nt, Artificial Sequence
  Description of Artificial Sequence: Synthetic oligonucleotide
  Sense strand starting at position 3503 of SEQ ID NO: 1888586
cuuuaaguguagccucauu

SEQ ID NO: 2543493 - RNA, 19 nt, Artificial Sequence
  Description of Artificial Sequence: Synthetic oligonucleotide
  Antisense strand to SEQ ID NO: 2543492
aaugaggcuacacuuaaag

SEQ ID NO: 2543494 - RNA, 19 nt, Artificial Sequence
  Description of Artificial Sequence: Synthetic oligonucleotide
  Sense strand starting at position 2589 of SEQ ID NO: 1888586
uagacuagguuccaagaau

SEQ ID NO: 2543495 - RNA, 19 nt, Artificial Sequence
  Description of Artificial Sequence: Synthetic oligonucleotide
  Antisense strand to SEQ ID NO: 2543494
auucuuggaaccuagucua

SEQ ID NO: 2543496 - RNA, 19 nt, Artificial Sequence
  Description of Artificial Sequence: Synthetic oligonucleotide
  Sense strand starting at position 687 of SEQ ID NO: 1888586
gccuuuggguguuccacua

SEQ ID NO: 2543497 - RNA, 19 nt, Artificial Sequence
  Description of Artificial Sequence: Synthetic oligonucleotide
  Antisense strand to SEQ ID NO: 2543496
uaguggaacacccaaaggc

SEQ ID NO: 2543498 - RNA, 19 nt, Artificial Sequence
  Description of Artificial Sequence: Synthetic oligonucleotide
  Sense strand starting at position 3533 of SEQ ID NO: 1888586
uggauaaccuuugaacucu

SEQ ID NO: 2543499 - RNA, 19 nt, Artificial Sequence
  Description of Artificial Sequence: Synthetic oligonucleotide
  Antisense strand to SEQ ID NO: 2543498
agaguucaaagguuaucca

SEQ ID NO: 2543500 - RNA, 19 nt, Artificial Sequence
  Description of Artificial Sequence: Synthetic oligonucleotide
  Sense strand starting at position 705 of SEQ ID NO: 1888586
acaauugaguuguaaagau

SEQ ID NO: 2543501 - RNA, 19 nt, Artificial Sequence
  Description of Artificial Sequence: Synthetic oligonucleotide
  Antisense strand to SEQ ID NO: 2543500
aucuuuacaacucaauugu

SEQ ID NO: 2543502 - RNA, 19 nt, Artificial Sequence
  Description of Artificial Sequence: Synthetic oligonucleotide
  Sense strand starting at position 24 of SEQ ID NO: 1888586
uuuacuuucuccgcugcaa

SEQ ID NO: 2543503 - RNA, 19 nt, Artificial Sequence
  Description of Artificial Sequence: Synthetic oligonucleotide
  Antisense strand to SEQ ID NO: 2543502
uugcagcggagaaaguaaa

SEQ ID NO: 2543504 - RNA, 19 nt, Artificial Sequence
  Description of Artificial Sequence: Synthetic oligonucleotide
  Sense strand starting at position 2116 of SEQ ID NO: 1888586
caguuaucgcucggcgacu

SEQ ID NO: 2543505 - RNA, 19 nt, Artificial Sequence
  Description of Artificial Sequence: Synthetic oligonucleotide
  Antisense strand to SEQ ID NO: 2543504
agucgccgagcgauaacug

SEQ ID NO: 2543506 - RNA, 19 nt, Artificial Sequence
  Description of Artificial Sequence: Synthetic oligonucleotide
  Sense strand starting at position 3226 of SEQ ID NO: 1888586
ccgguagauucuuaggcca

SEQ ID NO: 2543507 - RNA, 19 nt, Artificial Sequence
  Description of Artificial Sequence: Synthetic oligonucleotide
  Antisense strand to SEQ ID NO: 2543506
uggccuaagaaucuaccgg

SEQ ID NO: 2543508 - RNA, 19 nt, Artificial Sequence
  Description of Artificial Sequence: Synthetic oligonucleotide
  Sense strand starting at position 2887 of SEQ ID NO: 1888586
gcaagucgcuaccaacaaa

SEQ ID NO: 2543509 - RNA, 19 nt, Artificial Sequence
  Description of Artificial Sequence: Synthetic oligonucleotide
  Antisense strand to SEQ ID NO: 2543508
uuuguugguagcgacuugc

SEQ ID NO: 2543510 - RNA, 19 nt, Artificial Sequence
  Description of Artificial Sequence: Synthetic oligonucleotide
  Sense strand starting at position 3159 of SEQ ID NO: 1888586
cccauauggucugguuagu

SEQ ID NO: 2543511 - RNA, 19 nt, Artificial Sequence
  Description of Artificial Sequence: Synthetic oligonucleotide
  Antisense strand to SEQ ID NO: 2543510
acuaaccagaccauauggg

SEQ ID NO: 2543512 - RNA, 19 nt, Artificial Sequence
  Description of Artificial Sequence: Synthetic oligonucleotide
  Sense strand starting at position 2383 of SEQ ID NO: 1888587
agauauuccaguggaaagu

SEQ ID NO: 2543513 - RNA, 19 nt, Artificial Sequence
  Description of Artificial Sequence: Synthetic oligonucleotide
  Antisense strand to SEQ ID NO: 2543512
acuuuccacuggaauaucu

SEQ ID NO: 2543514 - RNA, 19 nt, Artificial Sequence
  Description of Artificial Sequence: Synthetic oligonucleotide
  Sense strand starting at position 2469 of SEQ ID NO: 1888587
aaggucgaggcuuauuauu

SEQ ID NO: 2543515 - RNA, 19 nt, Artificial Sequence
  Description of Artificial Sequence: Synthetic oligonucleotide
  Antisense strand to SEQ ID NO: 2543514
aauaauaagccucgaccuu

SEQ ID NO: 2543516 - RNA, 19 nt, Artificial Sequence
  Description of Artificial Sequence: Synthetic oligonucleotide
  Sense strand starting at position 2239 of SEQ ID NO: 1888587
gagagugucacuugugaua

SEQ ID NO: 2543517 - RNA, 19 nt, Artificial Sequence
  Description of Artificial Sequence: Synthetic oligonucleotide
  Antisense strand to SEQ ID NO: 2543516
uaucacaagugacacucuc

SEQ ID NO: 2543518 - RNA, 19 nt, Artificial Sequence
  Description of Artificial Sequence: Synthetic oligonucleotide
  Sense strand starting at position 2879 of SEQ ID NO: 1888587
ggcccaguucacgggaaua

SEQ ID NO: 2543519 - RNA, 19 nt, Artificial Sequence
  Description of Artificial Sequence: Synthetic oligonucleotide
  Antisense strand to SEQ ID NO: 2543518
uauucccgugaacugggcc

SEQ ID NO: 2543520 - RNA, 19 nt, Artificial Sequence
  Description of Artificial Sequence: Synthetic oligonucleotide
  Sense strand starting at position 2237 of SEQ ID NO: 1888587
gugagagugucacuuguga

SEQ ID NO: 2543521 - RNA, 19 nt, Artificial Sequence
  Description of Artificial Sequence: Synthetic oligonucleotide
  Antisense strand to SEQ ID NO: 2543520
ucacaagugacacucucac

SEQ ID NO: 2543522 - RNA, 19 nt, Artificial Sequence
  Description of Artificial Sequence: Synthetic oligonucleotide
  Sense strand starting at position 2471 of SEQ ID NO: 1888587
ggucgaggcuuauuauucu

SEQ ID NO: 2543523 - RNA, 19 nt, Artificial Sequence
  Description of Artificial Sequence: Synthetic oligonucleotide
  Antisense strand to SEQ ID NO: 2543522
agaauaauaagccucgacc

SEQ ID NO: 2543524 - RNA, 19 nt, Artificial Sequence
  Description of Artificial Sequence: Synthetic oligonucleotide
  Sense strand starting at position 2242 of SEQ ID NO: 1888587
agugucacuugugauauuu

SEQ ID NO: 2543525 - RNA, 19 nt, Artificial Sequence
  Description of Artificial Sequence: Synthetic oligonucleotide
  Antisense strand to SEQ ID NO: 2543524
aaauaucacaagugacacu

SEQ ID NO: 2543526 - RNA, 19 nt, Artificial Sequence
  Description of Artificial Sequence: Synthetic oligonucleotide
  Sense strand starting at position 3980 of SEQ ID NO: 1888587
gccacuuccuguuagaauc

SEQ ID NO: 2543527 - RNA, 19 nt, Artificial Sequence
  Description of Artificial Sequence: Synthetic oligonucleotide
  Antisense strand to SEQ ID NO: 2543526
gauucuaacaggaaguggc

SEQ ID NO: 2543528 - RNA, 19 nt, Artificial Sequence
  Description of Artificial Sequence: Synthetic oligonucleotide
  Sense strand starting at position 3977 of SEQ ID NO: 1888587
agagccacuuccuguuaga

SEQ ID NO: 2543529 - RNA, 19 nt, Artificial Sequence
  Description of Artificial Sequence: Synthetic oligonucleotide
  Antisense strand to SEQ ID NO: 2543528
ucuaacaggaaguggcucu

SEQ ID NO: 2543530 - RNA, 19 nt, Artificial Sequence
  Description of Artificial Sequence: Synthetic oligonucleotide
  Sense strand starting at position 2241 of SEQ ID NO: 1888587
gagugucacuugugauauu

SEQ ID NO: 2543531 - RNA, 19 nt, Artificial Sequence
  Description of Artificial Sequence: Synthetic oligonucleotide
  Antisense strand to SEQ ID NO: 2543530
aauaucacaagugacacuc

SEQ ID NO: 2543532 - RNA, 19 nt, Artificial Sequence
  Description of Artificial Sequence: Synthetic oligonucleotide
  Sense strand starting at position 2038 of SEQ ID NO: 1888588
cgcguaugacgcaagaaca

SEQ ID NO: 2543533 - RNA, 19 nt, Artificial Sequence
  Description of Artificial Sequence: Synthetic oligonucleotide
  Antisense strand to SEQ ID NO: 2543532
uguucuugcgucauacgcg

SEQ ID NO: 2543534 - RNA, 19 nt, Artificial Sequence
  Description of Artificial Sequence: Synthetic oligonucleotide
  Sense strand starting at position 19 of SEQ ID NO: 1888588
aaguguuaacaugaaguca

SEQ ID NO: 2543535 - RNA, 19 nt, Artificial Sequence
  Description of Artificial Sequence: Synthetic oligonucleotide
  Antisense strand to SEQ ID NO: 2543534
ugacuucauguuaacacuu

SEQ ID NO: 2543536 - RNA, 19 nt, Artificial Sequence
  Description of Artificial Sequence: Synthetic oligonucleotide
  Sense strand starting at position 2726 of SEQ ID NO: 1888588
gacugugagaaauacguua

SEQ ID NO: 2543537 - RNA, 19 nt, Artificial Sequence
  Description of Artificial Sequence: Synthetic oligonucleotide
  Antisense strand to SEQ ID NO: 2543536
uaacguauuucucacaguc

SEQ ID NO: 2543538 - RNA, 19 nt, Artificial Sequence
  Description of Artificial Sequence: Synthetic oligonucleotide
  Sense strand starting at position 3009 of SEQ ID NO: 1888588
cccaaagggucuucugaga

SEQ ID NO: 2543539 - RNA, 19 nt, Artificial Sequence
  Description of Artificial Sequence: Synthetic oligonucleotide
  Antisense strand to SEQ ID NO: 2543538
ucucagaagacccuuuggg

SEQ ID NO: 2543540 - RNA, 19 nt, Artificial Sequence
  Description of Artificial Sequence: Synthetic oligonucleotide
  Sense strand starting at position 1040 of SEQ ID NO: 1888588
ucucaaugagcaugacuga

SEQ ID NO: 2543541 - RNA, 19 nt, Artificial Sequence
  Description of Artificial Sequence: Synthetic oligonucleotide
  Antisense strand to SEQ ID NO: 2543540
ucagucaugcucauugaga

SEQ ID NO: 2543542 - RNA, 19 nt, Artificial Sequence
  Description of Artificial Sequence: Synthetic oligonucleotide
  Sense strand starting at position 2728 of SEQ ID NO: 1888588
cugugagaaauacguuaaa

SEQ ID NO: 2543543 - RNA, 19 nt, Artificial Sequence
  Description of Artificial Sequence: Synthetic oligonucleotide
  Antisense strand to SEQ ID NO: 2543542
uuuaacguauuucucacag

SEQ ID NO: 2543544 - RNA, 19 nt, Artificial Sequence
  Description of Artificial Sequence: Synthetic oligonucleotide
  Sense strand starting at position 2566 of SEQ ID NO: 1888588
gccuaaggucugcagagau

SEQ ID NO: 2543545 - RNA, 19 nt, Artificial Sequence
  Description of Artificial Sequence: Synthetic oligonucleotide
  Antisense strand to SEQ ID NO: 2543544
aucucugcagaccuuaggc

SEQ ID NO: 2543546 - RNA, 19 nt, Artificial Sequence
  Description of Artificial Sequence: Synthetic oligonucleotide
  Sense strand starting at position 1193 of SEQ ID NO: 1888588
agcucuguguuucucauuu

SEQ ID NO: 2543547 - RNA, 19 nt, Artificial Sequence
  Description of Artificial Sequence: Synthetic oligonucleotide
  Antisense strand to SEQ ID NO: 2543546
aaaugagaaacacagagcu

SEQ ID NO: 2543548 - RNA, 19 nt, Artificial Sequence
  Description of Artificial Sequence: Synthetic oligonucleotide
  Sense strand starting at position 225 of SEQ ID NO: 1888588
uuugucagucaacgggaaa

SEQ ID NO: 2543549 - RNA, 19 nt, Artificial Sequence
  Description of Artificial Sequence: Synthetic oligonucleotide
  Antisense strand to SEQ ID NO: 2543548
uuucccguugacugacaaa

SEQ ID NO: 2543550 - RNA, 19 nt, Artificial Sequence
  Description of Artificial Sequence: Synthetic oligonucleotide
  Sense strand starting at position 1261 of SEQ ID NO: 1888588
acucauuucuggcaaggga

SEQ ID NO: 2543551 - RNA, 19 nt, Artificial Sequence
  Description of Artificial Sequence: Synthetic oligonucleotide
  Antisense strand to SEQ ID NO: 2543550
ucccuugccagaaaugagu

SEQ ID NO: 2543552 - RNA, 19 nt, Artificial Sequence
  Description of Artificial Sequence: Synthetic oligonucleotide
  Sense strand starting at position 3353 of SEQ ID NO: 1888588
gaagcuuggccguaugaag

SEQ ID NO: 2543553 - RNA, 19 nt, Artificial Sequence
  Description of Artificial Sequence: Synthetic oligonucleotide
  Antisense strand to SEQ ID NO: 2543552
cuucauacggccaagcuuc

SEQ ID NO: 2543554 - RNA, 19 nt, Artificial Sequence
  Description of Artificial Sequence: Synthetic oligonucleotide
  Sense strand starting at position 2565 of SEQ ID NO: 1888588
ggccuaaggucugcagaga

SEQ ID NO: 2543555 - RNA, 19 nt, Artificial Sequence
  Description of Artificial Sequence: Synthetic oligonucleotide
  Antisense strand to SEQ ID NO: 2543554
ucucugcagaccuuaggcc

SEQ ID NO: 2543556 - RNA, 19 nt, Artificial Sequence
  Description of Artificial Sequence: Synthetic oligonucleotide
  Sense strand starting at position 3697 of SEQ ID NO: 1888588
aagacuugcuccgugacaa

SEQ ID NO: 2543557 - RNA, 19 nt, Artificial Sequence
  Description of Artificial Sequence: Synthetic oligonucleotide
  Antisense strand to SEQ ID NO: 2543556
uugucacggagcaagucuu

SEQ ID NO: 2543558 - RNA, 19 nt, Artificial Sequence
  Description of Artificial Sequence: Synthetic oligonucleotide
  Sense strand starting at position 2067 of SEQ ID NO: 1888588
cugcgugucacccaugaaa

SEQ ID NO: 2543559 - RNA, 19 nt, Artificial Sequence
  Description of Artificial Sequence: Synthetic oligonucleotide
  Antisense strand to SEQ ID NO: 2543558
uuucaugggugacacgcag

SEQ ID NO: 2543560 - RNA, 19 nt, Artificial Sequence
  Description of Artificial Sequence: Synthetic oligonucleotide
  Sense strand starting at position 3698 of SEQ ID NO: 1888588
agacuugcuccgugacaau

SEQ ID NO: 2543561 - RNA, 19 nt, Artificial Sequence
  Description of Artificial Sequence: Synthetic oligonucleotide
  Antisense strand to SEQ ID NO: 2543560
auugucacggagcaagucu

SEQ ID NO: 2543562 - RNA, 19 nt, Artificial Sequence
  Description of Artificial Sequence: Synthetic oligonucleotide
  Sense strand starting at position 3696 of SEQ ID NO: 1888588
caagacuugcuccgugaca

SEQ ID NO: 2543563 - RNA, 19 nt, Artificial Sequence
  Description of Artificial Sequence: Synthetic oligonucleotide
  Antisense strand to SEQ ID NO: 2543562
ugucacggagcaagucuug

SEQ ID NO: 2543564 - RNA, 19 nt, Artificial Sequence
  Description of Artificial Sequence: Synthetic oligonucleotide
  Sense strand starting at position 1188 of SEQ ID NO: 1888588
agggaagcucuguguuucu

SEQ ID NO: 2543565 - RNA, 19 nt, Artificial Sequence
  Description of Artificial Sequence: Synthetic oligonucleotide
  Antisense strand to SEQ ID NO: 2543564
agaaacacagagcuucccu

SEQ ID NO: 2543566 - RNA, 19 nt, Artificial Sequence
  Description of Artificial Sequence: Synthetic oligonucleotide
  Sense strand starting at position 1971 of SEQ ID NO: 1888588
ccuuaauucucagaaagag

SEQ ID NO: 2543567 - RNA, 19 nt, Artificial Sequence
  Description of Artificial Sequence: Synthetic oligonucleotide
  Antisense strand to SEQ ID NO: 2543566
cucuuucugagaauuaagg

SEQ ID NO: 2543568 - RNA, 19 nt, Artificial Sequence
  Description of Artificial Sequence: Synthetic oligonucleotide
  Sense strand starting at position 1034 of SEQ ID NO: 1888588
gucuguucucaaugagcau

SEQ ID NO: 2543569 - RNA, 19 nt, Artificial Sequence
  Description of Artificial Sequence: Synthetic oligonucleotide
  Antisense strand to SEQ ID NO: 2543568
augcucauugagaacagac

SEQ ID NO: 2543570 - RNA, 19 nt, Artificial Sequence
  Description of Artificial Sequence: Synthetic oligonucleotide
  Sense strand starting at position 959 of SEQ ID NO: 1888588
gucuguucucaaugagcac

SEQ ID NO: 2543571 - RNA, 19 nt, Artificial Sequence
  Description of Artificial Sequence: Synthetic oligonucleotide
  Antisense strand to SEQ ID NO: 2543570
gugcucauugagaacagac

SEQ ID NO: 2543572 - RNA, 19 nt, Artificial Sequence
  Description of Artificial Sequence: Synthetic oligonucleotide
  Sense strand starting at position 955 of SEQ ID NO: 1888588
ucccgucuguucucaauga

SEQ ID NO: 2543573 - RNA, 19 nt, Artificial Sequence
  Description of Artificial Sequence: Synthetic oligonucleotide
  Antisense strand to SEQ ID NO: 2543572
ucauugagaacagacggga

SEQ ID NO: 2543574 - RNA, 19 nt, Artificial Sequence
  Description of Artificial Sequence: Synthetic oligonucleotide
  Sense strand starting at position 1191 of SEQ ID NO: 1888588
gaagcucuguguuucucau

SEQ ID NO: 2543575 - RNA, 19 nt, Artificial Sequence
  Description of Artificial Sequence: Synthetic oligonucleotide
  Antisense strand to SEQ ID NO: 2543574
augagaaacacagagcuuc

SEQ ID NO: 2543576 - RNA, 19 nt, Artificial Sequence
  Description of Artificial Sequence: Synthetic oligonucleotide
  Sense strand starting at position 1030 of SEQ ID NO: 1888588
ugcugucuguucucaauga

SEQ ID NO: 2543577 - RNA, 19 nt, Artificial Sequence
  Description of Artificial Sequence: Synthetic oligonucleotide
  Antisense strand to SEQ ID NO: 2543576
ucauugagaacagacagca

SEQ ID NO: 2543578 - RNA, 19 nt, Artificial Sequence
  Description of Artificial Sequence: Synthetic oligonucleotide
  Sense strand starting at position 3761 of SEQ ID NO: 1888588
ggacccgcuccgugacaau

SEQ ID NO: 2543579 - RNA, 19 nt, Artificial Sequence
  Description of Artificial Sequence: Synthetic oligonucleotide
  Antisense strand to SEQ ID NO: 2543578
auugucacggagcgggucc

SEQ ID NO: 2543580 - RNA, 19 nt, Artificial Sequence
  Description of Artificial Sequence: Synthetic oligonucleotide
  Sense strand starting at position 953 of SEQ ID NO: 1888588
cuucccgucuguucucaau

SEQ ID NO: 2543581 - RNA, 19 nt, Artificial Sequence
  Description of Artificial Sequence: Synthetic oligonucleotide
  Antisense strand to SEQ ID NO: 2543580
auugagaacagacgggaag

SEQ ID NO: 2543582 - RNA, 19 nt, Artificial Sequence
  Description of Artificial Sequence: Synthetic oligonucleotide
  Sense strand starting at position 1028 of SEQ ID NO: 1888588
cuugcugucuguucucaau

SEQ ID NO: 2543583 - RNA, 19 nt, Artificial Sequence
  Description of Artificial Sequence: Synthetic oligonucleotide
  Antisense strand to SEQ ID NO: 2543582
auugagaacagacagcaag

SEQ ID NO: 2543584 - RNA, 19 nt, Artificial Sequence
  Description of Artificial Sequence: Synthetic oligonucleotide
  Sense strand starting at position 2722 of SEQ ID NO: 1888588
uggugacugugagaaauac

SEQ ID NO: 2543585 - RNA, 19 nt, Artificial Sequence
  Description of Artificial Sequence: Synthetic oligonucleotide
  Antisense strand to SEQ ID NO: 2543584
guauuucucacagucacca

SEQ ID NO: 2543586 - RNA, 19 nt, Artificial Sequence
  Description of Artificial Sequence: Synthetic oligonucleotide
  Sense strand starting at position 1969 of SEQ ID NO: 1888588
guccuuaauucucagaaag

SEQ ID NO: 2543587 - RNA, 19 nt, Artificial Sequence
  Description of Artificial Sequence: Synthetic oligonucleotide
  Antisense strand to SEQ ID NO: 2543586
cuuucugagaauuaaggac

SEQ ID NO: 2543588 - RNA, 19 nt, Artificial Sequence
  Description of Artificial Sequence: Synthetic oligonucleotide
  Sense strand starting at position 2720 of SEQ ID NO: 1888588
gcuggugacugugagaaau

SEQ ID NO: 2543589 - RNA, 19 nt, Artificial Sequence
  Description of Artificial Sequence: Synthetic oligonucleotide
  Antisense strand to SEQ ID NO: 2543588
auuucucacagucaccagc

SEQ ID NO: 2543590 - RNA, 19 nt, Artificial Sequence
  Description of Artificial Sequence: Synthetic oligonucleotide
  Sense strand starting at position 2386 of SEQ ID NO: 1888588
agcuaugguucugagaucu

SEQ ID NO: 2543591 - RNA, 19 nt, Artificial Sequence
  Description of Artificial Sequence: Synthetic oligonucleotide
  Antisense strand to SEQ ID NO: 2543590
agaucucagaaccauagcu

SEQ ID NO: 2543592 - RNA, 19 nt, Artificial Sequence
  Description of Artificial Sequence: Synthetic oligonucleotide
  Sense strand starting at position 2028 of SEQ ID NO: 1888588
ucagugagugcgcguauga

SEQ ID NO: 2543593 - RNA, 19 nt, Artificial Sequence
  Description of Artificial Sequence: Synthetic oligonucleotide
  Antisense strand to SEQ ID NO: 2543592
ucauacgcgcacucacuga

SEQ ID NO: 2543594 - RNA, 19 nt, Artificial Sequence
  Description of Artificial Sequence: Synthetic oligonucleotide
  Sense strand starting at position 74 of SEQ ID NO: 1888588
gggccaucgccgugucuga

SEQ ID NO: 2543595 - RNA, 19 nt, Artificial Sequence
  Description of Artificial Sequence: Synthetic oligonucleotide
  Antisense strand to SEQ ID NO: 2543594
ucagacacggcgauggccc

SEQ ID NO: 2543596 - RNA, 19 nt, Artificial Sequence
  Description of Artificial Sequence: Synthetic oligonucleotide
  Sense strand starting at position 218 of SEQ ID NO: 1888588
uccugacuuugucagucaa

SEQ ID NO: 2543597 - RNA, 19 nt, Artificial Sequence
  Description of Artificial Sequence: Synthetic oligonucleotide
  Antisense strand to SEQ ID NO: 2543596
uugacugacaaagucagga

SEQ ID NO: 2543598 - RNA, 19 nt, Artificial Sequence
  Description of Artificial Sequence: Synthetic oligonucleotide
  Sense strand starting at position 2385 of SEQ ID NO: 1888588
cagcuaugguucugagauc

SEQ ID NO: 2543599 - RNA, 19 nt, Artificial Sequence
  Description of Artificial Sequence: Synthetic oligonucleotide
  Antisense strand to SEQ ID NO: 2543598
gaucucagaaccauagcug

SEQ ID NO: 2543600 - RNA, 19 nt, Artificial Sequence
  Description of Artificial Sequence: Synthetic oligonucleotide
  Sense strand starting at position 2713 of SEQ ID NO: 1888588
aaguaaagcuggugacugu

SEQ ID NO: 2543601 - RNA, 19 nt, Artificial Sequence
  Description of Artificial Sequence: Synthetic oligonucleotide
  Antisense strand to SEQ ID NO: 2543600
acagucaccagcuuuacuu

SEQ ID NO: 2543602 - RNA, 19 nt, Artificial Sequence
  Description of Artificial Sequence: Synthetic oligonucleotide
  Sense strand starting at position 3063 of SEQ ID NO: 1888589
cgucuaugugguaggguaa

SEQ ID NO: 2543603 - RNA, 19 nt, Artificial Sequence
  Description of Artificial Sequence: Synthetic oligonucleotide
  Antisense strand to SEQ ID NO: 2543602
uuacccuaccacauagacg

SEQ ID NO: 2543604 - RNA, 19 nt, Artificial Sequence
  Description of Artificial Sequence: Synthetic oligonucleotide
  Sense strand starting at position 2547 of SEQ ID NO: 1888589
agaagucacuuauuccuga

SEQ ID NO: 2543605 - RNA, 19 nt, Artificial Sequence
  Description of Artificial Sequence: Synthetic oligonucleotide
  Antisense strand to SEQ ID NO: 2543604
ucaggaauaagugacuucu

SEQ ID NO: 2543606 - RNA, 19 nt, Artificial Sequence
  Description of Artificial Sequence: Synthetic oligonucleotide
  Sense strand starting at position 1587 of SEQ ID NO: 1888589
uuuccuguggauugggaaa

SEQ ID NO: 2543607 - RNA, 19 nt, Artificial Sequence
  Description of Artificial Sequence: Synthetic oligonucleotide
  Antisense strand to SEQ ID NO: 2543606
uuucccaauccacaggaaa

SEQ ID NO: 2543608 - RNA, 19 nt, Artificial Sequence
  Description of Artificial Sequence: Synthetic oligonucleotide
  Sense strand starting at position 794 of SEQ ID NO: 1888589
aagucauacggcuaucaaa

SEQ ID NO: 2543609 - RNA, 19 nt, Artificial Sequence
  Description of Artificial Sequence: Synthetic oligonucleotide
  Antisense strand to SEQ ID NO: 2543608
uuugauagccguaugacuu

SEQ ID NO: 2543610 - RNA, 19 nt, Artificial Sequence
  Description of Artificial Sequence: Synthetic oligonucleotide
  Sense strand starting at position 3330 of SEQ ID NO: 1888589
uccuuaacaucugugagag

SEQ ID NO: 2543611 - RNA, 19 nt, Artificial Sequence
  Description of Artificial Sequence: Synthetic oligonucleotide
  Antisense strand to SEQ ID NO: 2543610
cucucacagauguuaagga

SEQ ID NO: 2543612 - RNA, 19 nt, Artificial Sequence
  Description of Artificial Sequence: Synthetic oligonucleotide
  Sense strand starting at position 1678 of SEQ ID NO: 1888589
ugaugcuuccaggagcaau

SEQ ID NO: 2543613 - RNA, 19 nt, Artificial Sequence
  Description of Artificial Sequence: Synthetic oligonucleotide
  Antisense strand to SEQ ID NO: 2543612
auugcuccuggaagcauca

SEQ ID NO: 2543614 - RNA, 19 nt, Artificial Sequence
  Description of Artificial Sequence: Synthetic oligonucleotide
  Sense strand starting at position 2993 of SEQ ID NO: 1888589
cggagaaguaugugaugac

SEQ ID NO: 2543615 - RNA, 19 nt, Artificial Sequence
  Description of Artificial Sequence: Synthetic oligonucleotide
  Antisense strand to SEQ ID NO: 2543614
gucaucacauacuucuccg

SEQ ID NO: 2543616 - RNA, 19 nt, Artificial Sequence
  Description of Artificial Sequence: Synthetic oligonucleotide
  Sense strand starting at position 3451 of SEQ ID NO: 1888589
agugaaggugauugucuga

SEQ ID NO: 2543617 - RNA, 19 nt, Artificial Sequence
  Description of Artificial Sequence: Synthetic oligonucleotide
  Antisense strand to SEQ ID NO: 2543616
ucagacaaucaccuucacu

SEQ ID NO: 2543618 - RNA, 19 nt, Artificial Sequence
  Description of Artificial Sequence: Synthetic oligonucleotide
  Sense strand starting at position 2166 of SEQ ID NO: 1888589
gucgguugccguagaaacu

SEQ ID NO: 2543619 - RNA, 19 nt, Artificial Sequence
  Description of Artificial Sequence: Synthetic oligonucleotide
  Antisense strand to SEQ ID NO: 2543618
aguuucuacggcaaccgac

SEQ ID NO: 2543620 - RNA, 19 nt, Artificial Sequence
  Description of Artificial Sequence: Synthetic oligonucleotide
  Sense strand starting at position 1375 of SEQ ID NO: 1888589
uuguuuguaguagaaguca

SEQ ID NO: 2543621 - RNA, 19 nt, Artificial Sequence
  Description of Artificial Sequence: Synthetic oligonucleotide
  Antisense strand to SEQ ID NO: 2543620
ugacuucuacuacaaacaa

SEQ ID NO: 2543622 - RNA, 19 nt, Artificial Sequence
  Description of Artificial Sequence: Synthetic oligonucleotide
  Sense strand starting at position 3316 of SEQ ID NO: 1888589
ggcacaagacauuguccuu

SEQ ID NO: 2543623 - RNA, 19 nt, Artificial Sequence
  Description of Artificial Sequence: Synthetic oligonucleotide
  Antisense strand to SEQ ID NO: 2543622
aaggacaaugucuugugcc

SEQ ID NO: 2543624 - RNA, 19 nt, Artificial Sequence
  Description of Artificial Sequence: Synthetic oligonucleotide
  Sense strand starting at position 1216 of SEQ ID NO: 1888589
gcagaaggcucacuagagu

SEQ ID NO: 2543625 - RNA, 19 nt, Artificial Sequence
  Description of Artificial Sequence: Synthetic oligonucleotide
  Antisense strand to SEQ ID NO: 2543624
acucuagugagccuucugc

SEQ ID NO: 2543626 - RNA, 19 nt, Artificial Sequence
  Description of Artificial Sequence: Synthetic oligonucleotide
  Sense strand starting at position 312 of SEQ ID NO: 1888589
ucccaucugucucccagau

SEQ ID NO: 2543627 - RNA, 19 nt, Artificial Sequence
  Description of Artificial Sequence: Synthetic oligonucleotide
  Antisense strand to SEQ ID NO: 2543626
aucugggagacagauggga

SEQ ID NO: 2543628 - RNA, 19 nt, Artificial Sequence
  Description of Artificial Sequence: Synthetic oligonucleotide
  Sense strand starting at position 1296 of SEQ ID NO: 1888589
gcaagacccuggcucuaau

SEQ ID NO: 2543629 - RNA, 19 nt, Artificial Sequence
  Description of Artificial Sequence: Synthetic oligonucleotide
  Antisense strand to SEQ ID NO: 2543628
auuagagccagggucuugc

SEQ ID NO: 2543630 - RNA, 19 nt, Artificial Sequence
  Description of Artificial Sequence: Synthetic oligonucleotide
  Sense strand starting at position 2821 of SEQ ID NO: 1888589
guggaagugucccuuuaac

SEQ ID NO: 2543631 - RNA, 19 nt, Artificial Sequence
  Description of Artificial Sequence: Synthetic oligonucleotide
  Antisense strand to SEQ ID NO: 2543630
guuaaagggacacuuccac

SEQ ID NO: 2543632 - RNA, 19 nt, Artificial Sequence
  Description of Artificial Sequence: Synthetic oligonucleotide
  Sense strand starting at position 3739 of SEQ ID NO: 1888589
ggguuuccgugacucagau

SEQ ID NO: 2543633 - RNA, 19 nt, Artificial Sequence
  Description of Artificial Sequence: Synthetic oligonucleotide
  Antisense strand to SEQ ID NO: 2543632
aucugagucacggaaaccc

SEQ ID NO: 2543634 - RNA, 19 nt, Artificial Sequence
  Description of Artificial Sequence: Synthetic oligonucleotide
  Sense strand starting at position 3242 of SEQ ID NO: 1888589
aagaacaagcuguguguuu

SEQ ID NO: 2543635 - RNA, 19 nt, Artificial Sequence
  Description of Artificial Sequence: Synthetic oligonucleotide
  Antisense strand to SEQ ID NO: 2543634
aaacacacagcuuguucuu

SEQ ID NO: 2543636 - RNA, 19 nt, Artificial Sequence
  Description of Artificial Sequence: Synthetic oligonucleotide
  Sense strand starting at position 3438 of SEQ ID NO: 1888589
gugggugcuggcuagugaa

SEQ ID NO: 2543637 - RNA, 19 nt, Artificial Sequence
  Description of Artificial Sequence: Synthetic oligonucleotide
  Antisense strand to SEQ ID NO: 2543636
uucacuagccagcacccac

SEQ ID NO: 2543638 - RNA, 19 nt, Artificial Sequence
  Description of Artificial Sequence: Synthetic oligonucleotide
  Sense strand starting at position 1367 of SEQ ID NO: 1888589
acccaauguuguuuguagu

SEQ ID NO: 2543639 - RNA, 19 nt, Artificial Sequence
  Description of Artificial Sequence: Synthetic oligonucleotide
  Antisense strand to SEQ ID NO: 2543638
acuacaaacaacauugggu

SEQ ID NO: 2543640 - RNA, 19 nt, Artificial Sequence
  Description of Artificial Sequence: Synthetic oligonucleotide
  Sense strand starting at position 1368 of SEQ ID NO: 1888589
cccaauguuguuuguagua

SEQ ID NO: 2543641 - RNA, 19 nt, Artificial Sequence
  Description of Artificial Sequence: Synthetic oligonucleotide
  Antisense strand to SEQ ID NO: 2543640
uacuacaaacaacauuggg

SEQ ID NO: 2543642 - RNA, 19 nt, Artificial Sequence
  Description of Artificial Sequence: Synthetic oligonucleotide
  Sense strand starting at position 2805 of SEQ ID NO: 1888589
gcuggauccugcuuuagug

SEQ ID NO: 2543643 - RNA, 19 nt, Artificial Sequence
  Description of Artificial Sequence: Synthetic oligonucleotide
  Antisense strand to SEQ ID NO: 2543642
cacuaaagcaggauccagc

SEQ ID NO: 2543644 - RNA, 19 nt, Artificial Sequence
  Description of Artificial Sequence: Synthetic oligonucleotide
  Sense strand starting at position 2502 of SEQ ID NO: 1888589
aucuuugucugcuuguuga

SEQ ID NO: 2543645 - RNA, 19 nt, Artificial Sequence
  Description of Artificial Sequence: Synthetic oligonucleotide
  Antisense strand to SEQ ID NO: 2543644
ucaacaagcagacaaagau

SEQ ID NO: 2543646 - RNA, 19 nt, Artificial Sequence
  Description of Artificial Sequence: Synthetic oligonucleotide
  Sense strand starting at position 3244 of SEQ ID NO: 1888589
gaacaagcuguguguuugu

SEQ ID NO: 2543647 - RNA, 19 nt, Artificial Sequence
  Description of Artificial Sequence: Synthetic oligonucleotide
  Antisense strand to SEQ ID NO: 2543646
acaaacacacagcuuguuc

SEQ ID NO: 2543648 - RNA, 19 nt, Artificial Sequence
  Description of Artificial Sequence: Synthetic oligonucleotide
  Sense strand starting at position 2434 of SEQ ID NO: 1888589
gcucucaguucucuugcau

SEQ ID NO: 2543649 - RNA, 19 nt, Artificial Sequence
  Description of Artificial Sequence: Synthetic oligonucleotide
  Antisense strand to SEQ ID NO: 2543648
augcaagagaacugagagc

SEQ ID NO: 2543650 - RNA, 19 nt, Artificial Sequence
  Description of Artificial Sequence: Synthetic oligonucleotide
  Sense strand starting at position 3053 of SEQ ID NO: 1888589
uugggaucgucgucuaugu

SEQ ID NO: 2543651 - RNA, 19 nt, Artificial Sequence
  Description of Artificial Sequence: Synthetic oligonucleotide
  Antisense strand to SEQ ID NO: 2543650
acauagacgacgaucccaa

SEQ ID NO: 2543652 - RNA, 19 nt, Artificial Sequence
  Description of Artificial Sequence: Synthetic oligonucleotide
  Sense strand starting at position 2996 of SEQ ID NO: 1888589
agaaguaugugaugaccag

SEQ ID NO: 2543653 - RNA, 19 nt, Artificial Sequence
  Description of Artificial Sequence: Synthetic oligonucleotide
  Antisense strand to SEQ ID NO: 2543652
cuggucaucacauacuucu

SEQ ID NO: 2543654 - RNA, 19 nt, Artificial Sequence
  Description of Artificial Sequence: Synthetic oligonucleotide
  Sense strand starting at position 3968 of SEQ ID NO: 1888589
acaggacuuucagggaugu

SEQ ID NO: 2543655 - RNA, 19 nt, Artificial Sequence
  Description of Artificial Sequence: Synthetic oligonucleotide
  Antisense strand to SEQ ID NO: 2543654
acaucccugaaaguccugu

SEQ ID NO: 2543656 - RNA, 19 nt, Artificial Sequence
  Description of Artificial Sequence: Synthetic oligonucleotide
  Sense strand starting at position 1547 of SEQ ID NO: 1888589
ccgagauaguucuaaauuc

SEQ ID NO: 2543657 - RNA, 19 nt, Artificial Sequence
  Description of Artificial Sequence: Synthetic oligonucleotide
  Antisense strand to SEQ ID NO: 2543656
gaauuuagaacuaucucgg

SEQ ID NO: 2543658 - RNA, 19 nt, Artificial Sequence
  Description of Artificial Sequence: Synthetic oligonucleotide
  Sense strand starting at position 3057 of SEQ ID NO: 1888589
gaucgucgucuauguggua

SEQ ID NO: 2543659 - RNA, 19 nt, Artificial Sequence
  Description of Artificial Sequence: Synthetic oligonucleotide
  Antisense strand to SEQ ID NO: 2543658
uaccacauagacgacgauc

SEQ ID NO: 2543660 - RNA, 19 nt, Artificial Sequence
  Description of Artificial Sequence: Synthetic oligonucleotide
  Sense strand starting at position 3456 of SEQ ID NO: 1888589
aggugauugucugagggca

SEQ ID NO: 2543661 - RNA, 19 nt, Artificial Sequence
  Description of Artificial Sequence: Synthetic oligonucleotide
  Antisense strand to SEQ ID NO: 2543660
ugcccucagacaaucaccu

SEQ ID NO: 2543662 - RNA, 19 nt, Artificial Sequence
  Description of Artificial Sequence: Synthetic oligonucleotide
  Sense strand starting at position 314 of SEQ ID NO: 1888589
ccaucugucucccagaugu

SEQ ID NO: 2543663 - RNA, 19 nt, Artificial Sequence
  Description of Artificial Sequence: Synthetic oligonucleotide
  Antisense strand to SEQ ID NO: 2543662
acaucugggagacagaugg

SEQ ID NO: 2543664 - RNA, 19 nt, Artificial Sequence
  Description of Artificial Sequence: Synthetic oligonucleotide
  Sense strand starting at position 1370 of SEQ ID NO: 1888589
caauguuguuuguaguaga

SEQ ID NO: 2543665 - RNA, 19 nt, Artificial Sequence
  Description of Artificial Sequence: Synthetic oligonucleotide
  Antisense strand to SEQ ID NO: 2543664
ucuacuacaaacaacauug

SEQ ID NO: 2543666 - RNA, 19 nt, Artificial Sequence
  Description of Artificial Sequence: Synthetic oligonucleotide
  Sense strand starting at position 2802 of SEQ ID NO: 1888589
gaggcuggauccugcuuua

SEQ ID NO: 2543667 - RNA, 19 nt, Artificial Sequence
  Description of Artificial Sequence: Synthetic oligonucleotide
  Antisense strand to SEQ ID NO: 2543666
uaaagcaggauccagccuc

SEQ ID NO: 2543668 - RNA, 19 nt, Artificial Sequence
  Description of Artificial Sequence: Synthetic oligonucleotide
  Sense strand starting at position 2160 of SEQ ID NO: 1888589
gguguugucgguugccgua

SEQ ID NO: 2543669 - RNA, 19 nt, Artificial Sequence
  Description of Artificial Sequence: Synthetic oligonucleotide
  Antisense strand to SEQ ID NO: 2543668
uacggcaaccgacaacacc

SEQ ID NO: 2543670 - RNA, 19 nt, Artificial Sequence
  Description of Artificial Sequence: Synthetic oligonucleotide
  Sense strand starting at position 2551 of SEQ ID NO: 1888589
gucacuuauuccugaagcu

SEQ ID NO: 2543671 - RNA, 19 nt, Artificial Sequence
  Description of Artificial Sequence: Synthetic oligonucleotide
  Antisense strand to SEQ ID NO: 2543670
agcuucaggaauaagugac

SEQ ID NO: 2543672 - RNA, 19 nt, Artificial Sequence
  Description of Artificial Sequence: Synthetic oligonucleotide
  Sense strand starting at position 3458 of SEQ ID NO: 1888589
gugauugucugagggcacu

SEQ ID NO: 2543673 - RNA, 19 nt, Artificial Sequence
  Description of Artificial Sequence: Synthetic oligonucleotide
  Antisense strand to SEQ ID NO: 2543672
agugcccucagacaaucac

SEQ ID NO: 2543674 - RNA, 19 nt, Artificial Sequence
  Description of Artificial Sequence: Synthetic oligonucleotide
  Sense strand starting at position 1373 of SEQ ID NO: 1888589
uguuguuuguaguagaagu

SEQ ID NO: 2543675 - RNA, 19 nt, Artificial Sequence
  Description of Artificial Sequence: Synthetic oligonucleotide
  Antisense strand to SEQ ID NO: 2543674
acuucuacuacaaacaaca

SEQ ID NO: 2543676 - RNA, 19 nt, Artificial Sequence
  Description of Artificial Sequence: Synthetic oligonucleotide
  Sense strand starting at position 1430 of SEQ ID NO: 1888589
gguagcuaauccugccaga

SEQ ID NO: 2543677 - RNA, 19 nt, Artificial Sequence
  Description of Artificial Sequence: Synthetic oligonucleotide
  Antisense strand to SEQ ID NO: 2543676
ucuggcaggauuagcuacc

SEQ ID NO: 2543678 - RNA, 19 nt, Artificial Sequence
  Description of Artificial Sequence: Synthetic oligonucleotide
  Sense strand starting at position 3062 of SEQ ID NO: 1888589
ucgucuaugugguagggua

SEQ ID NO: 2543679 - RNA, 19 nt, Artificial Sequence
  Description of Artificial Sequence: Synthetic oligonucleotide
  Antisense strand to SEQ ID NO: 2543678
uacccuaccacauagacga

SEQ ID NO: 2543680 - RNA, 19 nt, Artificial Sequence
  Description of Artificial Sequence: Synthetic oligonucleotide
  Sense strand starting at position 1458 of SEQ ID NO: 1888589
cugccugucugaugccaaa

SEQ ID NO: 2543681 - RNA, 19 nt, Artificial Sequence
  Description of Artificial Sequence: Synthetic oligonucleotide
  Antisense strand to SEQ ID NO: 2543680
uuuggcaucagacaggcag

SEQ ID NO: 2543682 - RNA, 19 nt, Artificial Sequence
  Description of Artificial Sequence: Synthetic oligonucleotide
  Sense strand starting at position 48 of SEQ ID NO: 1888590
gggaaaguuggucagaggu

SEQ ID NO: 2543683 - RNA, 19 nt, Artificial Sequence
  Description of Artificial Sequence: Synthetic oligonucleotide
  Antisense strand to SEQ ID NO: 2543682
accucugaccaacuuuccc

SEQ ID NO: 2543684 - RNA, 19 nt, Artificial Sequence
  Description of Artificial Sequence: Synthetic oligonucleotide
  Sense strand starting at position 2317 of SEQ ID NO: 1888590
ggguaaaccaugggaagua

SEQ ID NO: 2543685 - RNA, 19 nt, Artificial Sequence
  Description of Artificial Sequence: Synthetic oligonucleotide
  Antisense strand to SEQ ID NO: 2543684
uacuucccaugguuuaccc

SEQ ID NO: 2543686 - RNA, 19 nt, Artificial Sequence
  Description of Artificial Sequence: Synthetic oligonucleotide
  Sense strand starting at position 807 of SEQ ID NO: 1888590
gcaugauggcuagaaugac

SEQ ID NO: 2543687 - RNA, 19 nt, Artificial Sequence
  Description of Artificial Sequence: Synthetic oligonucleotide
  Antisense strand to SEQ ID NO: 2543686
gucauucuagccaucaugc

SEQ ID NO: 2543688 - RNA, 19 nt, Artificial Sequence
  Description of Artificial Sequence: Synthetic oligonucleotide
  Sense strand starting at position 805 of SEQ ID NO: 1888590
uggcaugauggcuagaaug

SEQ ID NO: 2543689 - RNA, 19 nt, Artificial Sequence
  Description of Artificial Sequence: Synthetic oligonucleotide
  Antisense strand to SEQ ID NO: 2543688
cauucuagccaucaugcca

SEQ ID NO: 2543690 - RNA, 19 nt, Artificial Sequence
  Description of Artificial Sequence: Synthetic oligonucleotide
  Sense strand starting at position 3024 of SEQ ID NO: 1888590
uuuauauaucggcaaccaa

SEQ ID NO: 2543691 - RNA, 19 nt, Artificial Sequence
  Description of Artificial Sequence: Synthetic oligonucleotide
  Antisense strand to SEQ ID NO: 2543690
uugguugccgauauauaaa

SEQ ID NO: 2543692 - RNA, 19 nt, Artificial Sequence
  Description of Artificial Sequence: Synthetic oligonucleotide
  Sense strand starting at position 804 of SEQ ID NO: 1888590
cuggcaugauggcuagaau

SEQ ID NO: 2543693 - RNA, 19 nt, Artificial Sequence
  Description of Artificial Sequence: Synthetic oligonucleotide
  Antisense strand to SEQ ID NO: 2543692
auucuagccaucaugccag

SEQ ID NO: 2543694 - RNA, 19 nt, Artificial Sequence
  Description of Artificial Sequence: Synthetic oligonucleotide
  Sense strand starting at position 58 of SEQ ID NO: 1888590
gucagagguguuuauugca

SEQ ID NO: 2543695 - RNA, 19 nt, Artificial Sequence
  Description of Artificial Sequence: Synthetic oligonucleotide
  Antisense strand to SEQ ID NO: 2543694
ugcaauaaacaccucugac

SEQ ID NO: 2543696 - RNA, 19 nt, Artificial Sequence
  Description of Artificial Sequence: Synthetic oligonucleotide
  Sense strand starting at position 2854 of SEQ ID NO: 1888590
agcauugcucccuggaaca

SEQ ID NO: 2543697 - RNA, 19 nt, Artificial Sequence
  Description of Artificial Sequence: Synthetic oligonucleotide
  Antisense strand to SEQ ID NO: 2543696
uguuccagggagcaaugcu

SEQ ID NO: 2543698 - RNA, 19 nt, Artificial Sequence
  Description of Artificial Sequence: Synthetic oligonucleotide
  Sense strand starting at position 2853 of SEQ ID NO: 1888590
gagcauugcucccuggaac

SEQ ID NO: 2543699 - RNA, 19 nt, Artificial Sequence
  Description of Artificial Sequence: Synthetic oligonucleotide
  Antisense strand to SEQ ID NO: 2543698
guuccagggagcaaugcuc

SEQ ID NO: 2543700 - RNA, 19 nt, Artificial Sequence
  Description of Artificial Sequence: Synthetic oligonucleotide
  Sense strand starting at position 3322 of SEQ ID NO: 1888590
ugcagaguuaauggagcuu

SEQ ID NO: 2543701 - RNA, 19 nt, Artificial Sequence
  Description of Artificial Sequence: Synthetic oligonucleotide
  Antisense strand to SEQ ID NO: 2543700
aagcuccauuaacucugca

SEQ ID NO: 2543702 - RNA, 19 nt, Artificial Sequence
  Description of Artificial Sequence: Synthetic oligonucleotide
  Sense strand starting at position 74 of SEQ ID NO: 1888590
gcaucauuauuuggaacaa

SEQ ID NO: 2543703 - RNA, 19 nt, Artificial Sequence
  Description of Artificial Sequence: Synthetic oligonucleotide
  Antisense strand to SEQ ID NO: 2543702
uuguuccaaauaaugaugc

SEQ ID NO: 2543704 - RNA, 19 nt, Artificial Sequence
  Description of Artificial Sequence: Synthetic oligonucleotide
  Sense strand starting at position 794 of SEQ ID NO: 1888590
cagaucugugcuggcauga

SEQ ID NO: 2543705 - RNA, 19 nt, Artificial Sequence
  Description of Artificial Sequence: Synthetic oligonucleotide
  Antisense strand to SEQ ID NO: 2543704
ucaugccagcacagaucug

SEQ ID NO: 2543706 - RNA, 19 nt, Artificial Sequence
  Description of Artificial Sequence: Synthetic oligonucleotide
  Sense strand starting at position 2702 of SEQ ID NO: 1888590
ggugcaggguccuugaagu

SEQ ID NO: 2543707 - RNA, 19 nt, Artificial Sequence
  Description of Artificial Sequence: Synthetic oligonucleotide
  Antisense strand to SEQ ID NO: 2543706
acuucaaggacccugcacc

SEQ ID NO: 2543708 - RNA, 19 nt, Artificial Sequence
  Description of Artificial Sequence: Synthetic oligonucleotide
  Sense strand starting at position 54 of SEQ ID NO: 1888590
guuggucagagguguuuau

SEQ ID NO: 2543709 - RNA, 19 nt, Artificial Sequence
  Description of Artificial Sequence: Synthetic oligonucleotide
  Antisense strand to SEQ ID NO: 2543708
auaaacaccucugaccaac

SEQ ID NO: 2543710 - RNA, 19 nt, Artificial Sequence
  Description of Artificial Sequence: Synthetic oligonucleotide
  Sense strand starting at position 21 of SEQ ID NO: 1888590
ggugccuccgaauguucaa

SEQ ID NO: 2543711 - RNA, 19 nt, Artificial Sequence
  Description of Artificial Sequence: Synthetic oligonucleotide
  Antisense strand to SEQ ID NO: 2543710
uugaacauucggaggcacc

SEQ ID NO: 2543712 - RNA, 19 nt, Artificial Sequence
  Description of Artificial Sequence: Synthetic oligonucleotide
  Sense strand starting at position 2318 of SEQ ID NO: 1888590
gguaaaccaugggaaguau

SEQ ID NO: 2543713 - RNA, 19 nt, Artificial Sequence
  Description of Artificial Sequence: Synthetic oligonucleotide
  Antisense strand to SEQ ID NO: 2543712
auacuucccaugguuuacc

SEQ ID NO: 2543714 - RNA, 19 nt, Artificial Sequence
  Description of Artificial Sequence: Synthetic oligonucleotide
  Sense strand starting at position 1589 of SEQ ID NO: 1888590
aacggcgucugcuuggaaa

SEQ ID NO: 2543715 - RNA, 19 nt, Artificial Sequence
  Description of Artificial Sequence: Synthetic oligonucleotide
  Antisense strand to SEQ ID NO: 2543714
uuuccaagcagacgccguu

SEQ ID NO: 2543716 - RNA, 19 nt, Artificial Sequence
  Description of Artificial Sequence: Synthetic oligonucleotide
  Sense strand starting at position 258 of SEQ ID NO: 1888590
ugcccucagcccugcuaaa

SEQ ID NO: 2543717 - RNA, 19 nt, Artificial Sequence
  Description of Artificial Sequence: Synthetic oligonucleotide
  Antisense strand to SEQ ID NO: 2543716
uuuagcagggcugagggca

SEQ ID NO: 2543718 - RNA, 19 nt, Artificial Sequence
  Description of Artificial Sequence: Synthetic oligonucleotide
  Sense strand starting at position 829 of SEQ ID NO: 1888590
ccuacagcuucugauggaa

SEQ ID NO: 2543719 - RNA, 19 nt, Artificial Sequence
  Description of Artificial Sequence: Synthetic oligonucleotide
  Antisense strand to SEQ ID NO: 2543718
uuccaucagaagcuguagg

SEQ ID NO: 2543720 - RNA, 19 nt, Artificial Sequence
  Description of Artificial Sequence: Synthetic oligonucleotide
  Sense strand starting at position 1591 of SEQ ID NO: 1888590
cggcgucugcuuggaaagu

SEQ ID NO: 2543721 - RNA, 19 nt, Artificial Sequence
  Description of Artificial Sequence: Synthetic oligonucleotide
  Antisense strand to SEQ ID NO: 2543720
acuuuccaagcagacgccg

SEQ ID NO: 2543722 - RNA, 19 nt, Artificial Sequence
  Description of Artificial Sequence: Synthetic oligonucleotide
  Sense strand starting at position 50 of SEQ ID NO: 1888590
gaaaguuggucagaggugu

SEQ ID NO: 2543723 - RNA, 19 nt, Artificial Sequence
  Description of Artificial Sequence: Synthetic oligonucleotide
  Antisense strand to SEQ ID NO: 2543722
acaccucugaccaacuuuc

SEQ ID NO: 2543724 - RNA, 19 nt, Artificial Sequence
  Description of Artificial Sequence: Synthetic oligonucleotide
  Sense strand starting at position 3782 of SEQ ID NO: 1888590
agugaucacugaggaguuu

SEQ ID NO: 2543725 - RNA, 19 nt, Artificial Sequence
  Description of Artificial Sequence: Synthetic oligonucleotide
  Antisense strand to SEQ ID NO: 2543724
aaacuccucagugaucacu

SEQ ID NO: 2543726 - RNA, 19 nt, Artificial Sequence
  Description of Artificial Sequence: Synthetic oligonucleotide
  Sense strand starting at position 1420 of SEQ ID NO: 1888590
cagugaaucucaggugggu

SEQ ID NO: 2543727 - RNA, 19 nt, Artificial Sequence
  Description of Artificial Sequence: Synthetic oligonucleotide
  Antisense strand to SEQ ID NO: 2543726
acccaccugagauucacug

SEQ ID NO: 2543728 - RNA, 19 nt, Artificial Sequence
  Description of Artificial Sequence: Synthetic oligonucleotide
  Sense strand starting at position 63 of SEQ ID NO: 1888590
agguguuuauugcaucauu

SEQ ID NO: 2543729 - RNA, 19 nt, Artificial Sequence
  Description of Artificial Sequence: Synthetic oligonucleotide
  Antisense strand to SEQ ID NO: 2543728
aaugaugcaauaaacaccu

SEQ ID NO: 2543730 - RNA, 19 nt, Artificial Sequence
  Description of Artificial Sequence: Synthetic oligonucleotide
  Sense strand starting at position 336 of SEQ ID NO: 1888590
acuucugucucuugggauc

SEQ ID NO: 2543731 - RNA, 19 nt, Artificial Sequence
  Description of Artificial Sequence: Synthetic oligonucleotide
  Antisense strand to SEQ ID NO: 2543730
gaucccaagagacagaagu

SEQ ID NO: 2543732 - RNA, 19 nt, Artificial Sequence
  Description of Artificial Sequence: Synthetic oligonucleotide
  Sense strand starting at position 61 of SEQ ID NO: 1888590
agagguguuuauugcauca

SEQ ID NO: 2543733 - RNA, 19 nt, Artificial Sequence
  Description of Artificial Sequence: Synthetic oligonucleotide
  Antisense strand to SEQ ID NO: 2543732
ugaugcaauaaacaccucu

SEQ ID NO: 2543734 - RNA, 19 nt, Artificial Sequence
  Description of Artificial Sequence: Synthetic oligonucleotide
  Sense strand starting at position 1432 of SEQ ID NO: 1888590
ggugggugcucagacguuu

SEQ ID NO: 2543735 - RNA, 19 nt, Artificial Sequence
  Description of Artificial Sequence: Synthetic oligonucleotide
  Antisense strand to SEQ ID NO: 2543734
aaacgucugagcacccacc

SEQ ID NO: 2543736 - RNA, 19 nt, Artificial Sequence
  Description of Artificial Sequence: Synthetic oligonucleotide
  Sense strand starting at position 18 of SEQ ID NO: 1888590
ccuggugccuccgaauguu

SEQ ID NO: 2543737 - RNA, 19 nt, Artificial Sequence
  Description of Artificial Sequence: Synthetic oligonucleotide
  Antisense strand to SEQ ID NO: 2543736
aacauucggaggcaccagg

SEQ ID NO: 2543738 - RNA, 19 nt, Artificial Sequence
  Description of Artificial Sequence: Synthetic oligonucleotide
  Sense strand starting at position 1592 of SEQ ID NO: 1888590
ggcgucugcuuggaaaguu

SEQ ID NO: 2543739 - RNA, 19 nt, Artificial Sequence
  Description of Artificial Sequence: Synthetic oligonucleotide
  Antisense strand to SEQ ID NO: 2543738
aacuuuccaagcagacgcc

SEQ ID NO: 2543740 - RNA, 19 nt, Artificial Sequence
  Description of Artificial Sequence: Synthetic oligonucleotide
  Sense strand starting at position 3608 of SEQ ID NO: 1888591
gguuaagacgcauagagag

SEQ ID NO: 2543741 - RNA, 19 nt, Artificial Sequence
  Description of Artificial Sequence: Synthetic oligonucleotide
  Antisense strand to SEQ ID NO: 2543740
cucucuaugcgucuuaacc

SEQ ID NO: 2543742 - RNA, 19 nt, Artificial Sequence
  Description of Artificial Sequence: Synthetic oligonucleotide
  Sense strand starting at position 146 of SEQ ID NO: 1888591
ggccauaucguugugcaca

SEQ ID NO: 2543743 - RNA, 19 nt, Artificial Sequence
  Description of Artificial Sequence: Synthetic oligonucleotide
  Antisense strand to SEQ ID NO: 2543742
ugugcacaacgauauggcc

SEQ ID NO: 2543744 - RNA, 19 nt, Artificial Sequence
  Description of Artificial Sequence: Synthetic oligonucleotide
  Sense strand starting at position 2200 of SEQ ID NO: 1888591
guggguccucaacagauau

SEQ ID NO: 2543745 - RNA, 19 nt, Artificial Sequence
  Description of Artificial Sequence: Synthetic oligonucleotide
  Antisense strand to SEQ ID NO: 2543744
auaucuguugaggacccac

SEQ ID NO: 2543746 - RNA, 19 nt, Artificial Sequence
  Description of Artificial Sequence: Synthetic oligonucleotide
  Sense strand starting at position 655 of SEQ ID NO: 1888591
uuuaauaucccugagucug

SEQ ID NO: 2543747 - RNA, 19 nt, Artificial Sequence
  Description of Artificial Sequence: Synthetic oligonucleotide
  Antisense strand to SEQ ID NO: 2543746
cagacucagggauauuaaa

SEQ ID NO: 2543748 - RNA, 19 nt, Artificial Sequence
  Description of Artificial Sequence: Synthetic oligonucleotide
  Sense strand starting at position 2853 of SEQ ID NO: 1888591
uggauagcugcucagagau

SEQ ID NO: 2543749 - RNA, 19 nt, Artificial Sequence
  Description of Artificial Sequence: Synthetic oligonucleotide
  Antisense strand to SEQ ID NO: 2543748
aucucugagcagcuaucca

SEQ ID NO: 2543750 - RNA, 19 nt, Artificial Sequence
  Description of Artificial Sequence: Synthetic oligonucleotide
  Sense strand starting at position 595 of SEQ ID NO: 1888591
uaggguaagcagugaauga

SEQ ID NO: 2543751 - RNA, 19 nt, Artificial Sequence
  Description of Artificial Sequence: Synthetic oligonucleotide
  Antisense strand to SEQ ID NO: 2543750
ucauucacugcuuacccua

SEQ ID NO: 2543752 - RNA, 19 nt, Artificial Sequence
  Description of Artificial Sequence: Synthetic oligonucleotide
  Sense strand starting at position 2790 of SEQ ID NO: 1888591
ugaacaaagccuugaaugu

SEQ ID NO: 2543753 - RNA, 19 nt, Artificial Sequence
  Description of Artificial Sequence: Synthetic oligonucleotide
  Antisense strand to SEQ ID NO: 2543752
acauucaaggcuuuguuca

SEQ ID NO: 2543754 - RNA, 19 nt, Artificial Sequence
  Description of Artificial Sequence: Synthetic oligonucleotide
  Sense strand starting at position 2852 of SEQ ID NO: 1888591
auggauagcugcucagaga

SEQ ID NO: 2543755 - RNA, 19 nt, Artificial Sequence
  Description of Artificial Sequence: Synthetic oligonucleotide
  Antisense strand to SEQ ID NO: 2543754
ucucugagcagcuauccau

SEQ ID NO: 2543756 - RNA, 19 nt, Artificial Sequence
  Description of Artificial Sequence: Synthetic oligonucleotide
  Sense strand starting at position 599 of SEQ ID NO: 1888591
guaagcagugaaugaauau

SEQ ID NO: 2543757 - RNA, 19 nt, Artificial Sequence
  Description of Artificial Sequence: Synthetic oligonucleotide
  Antisense strand to SEQ ID NO: 2543756
auauucauucacugcuuac

SEQ ID NO: 2543758 - RNA, 19 nt, Artificial Sequence
  Description of Artificial Sequence: Synthetic oligonucleotide
  Sense strand starting at position 711 of SEQ ID NO: 1888591
agguggugugaaggugaaa

SEQ ID NO: 2543759 - RNA, 19 nt, Artificial Sequence
  Description of Artificial Sequence: Synthetic oligonucleotide
  Antisense strand to SEQ ID NO: 2543758
uuucaccuucacaccaccu

SEQ ID NO: 2543760 - RNA, 19 nt, Artificial Sequence
  Description of Artificial Sequence: Synthetic oligonucleotide
  Sense strand starting at position 2860 of SEQ ID NO: 1888591
cugcucagagauugaguga

SEQ ID NO: 2543761 - RNA, 19 nt, Artificial Sequence
  Description of Artificial Sequence: Synthetic oligonucleotide
  Antisense strand to SEQ ID NO: 2543760
ucacucaaucucugagcag

SEQ ID NO: 2543762 - RNA, 19 nt, Artificial Sequence
  Description of Artificial Sequence: Synthetic oligonucleotide
  Sense strand starting at position 2869 of SEQ ID NO: 1888591
gauugagugacaggugguu

SEQ ID NO: 2543763 - RNA, 19 nt, Artificial Sequence
  Description of Artificial Sequence: Synthetic oligonucleotide
  Antisense strand to SEQ ID NO: 2543762
aaccaccugucacucaauc

SEQ ID NO: 2543764 - RNA, 19 nt, Artificial Sequence
  Description of Artificial Sequence: Synthetic oligonucleotide
  Sense strand starting at position 39 of SEQ ID NO: 1888591
ggaggagcuuuccugguua

SEQ ID NO: 2543765 - RNA, 19 nt, Artificial Sequence
  Description of Artificial Sequence: Synthetic oligonucleotide
  Antisense strand to SEQ ID NO: 2543764
uaaccaggaaagcuccucc

SEQ ID NO: 2543766 - RNA, 19 nt, Artificial Sequence
  Description of Artificial Sequence: Synthetic oligonucleotide
  Sense strand starting at position 438 of SEQ ID NO: 1888591
gcuggauuauaggcauuau

SEQ ID NO: 2543767 - RNA, 19 nt, Artificial Sequence
  Description of Artificial Sequence: Synthetic oligonucleotide
  Antisense strand to SEQ ID NO: 2543766
auaaugccuauaauccagc

SEQ ID NO: 2543768 - RNA, 19 nt, Artificial Sequence
  Description of Artificial Sequence: Synthetic oligonucleotide
  Sense strand starting at position 2141 of SEQ ID NO: 1888591
gacucaugcguuuacuuaa

SEQ ID NO: 2543769 - RNA, 19 nt, Artificial Sequence
  Description of Artificial Sequence: Synthetic oligonucleotide
  Antisense strand to SEQ ID NO: 2543768
uuaaguaaacgcaugaguc

SEQ ID NO: 2543770 - RNA, 19 nt, Artificial Sequence
  Description of Artificial Sequence: Synthetic oligonucleotide
  Sense strand starting at position 3757 of SEQ ID NO: 1888591
gguauuaccugacugagcu

SEQ ID NO: 2543771 - RNA, 19 nt, Artificial Sequence
  Description of Artificial Sequence: Synthetic oligonucleotide
  Antisense strand to SEQ ID NO: 2543770
agcucagucagguaauacc

SEQ ID NO: 2543772 - RNA, 19 nt, Artificial Sequence
  Description of Artificial Sequence: Synthetic oligonucleotide
  Sense strand starting at position 3754 of SEQ ID NO: 1888591
gcugguauuaccugacuga

SEQ ID NO: 2543773 - RNA, 19 nt, Artificial Sequence
  Description of Artificial Sequence: Synthetic oligonucleotide
  Antisense strand to SEQ ID NO: 2543772
ucagucagguaauaccagc

SEQ ID NO: 2543774 - RNA, 19 nt, Artificial Sequence
  Description of Artificial Sequence: Synthetic oligonucleotide
  Sense strand starting at position 3818 of SEQ ID NO: 1888591
cgagccaauccuuaugcau

SEQ ID NO: 2543775 - RNA, 19 nt, Artificial Sequence
  Description of Artificial Sequence: Synthetic oligonucleotide
  Antisense strand to SEQ ID NO: 2543774
augcauaaggauuggcucg

SEQ ID NO: 2543776 - RNA, 19 nt, Artificial Sequence
  Description of Artificial Sequence: Synthetic oligonucleotide
  Sense strand starting at position 1542 of SEQ ID NO: 1888591
ugauguaguuucucgacag

SEQ ID NO: 2543777 - RNA, 19 nt, Artificial Sequence
  Description of Artificial Sequence: Synthetic oligonucleotide
  Antisense strand to SEQ ID NO: 2543776
cugucgagaaacuacauca

SEQ ID NO: 2543778 - RNA, 19 nt, Artificial Sequence
  Description of Artificial Sequence: Synthetic oligonucleotide
  Sense strand starting at position 2137 of SEQ ID NO: 1888591
gagggacucaugcguuuac

SEQ ID NO: 2543779 - RNA, 19 nt, Artificial Sequence
  Description of Artificial Sequence: Synthetic oligonucleotide
  Antisense strand to SEQ ID NO: 2543778
guaaacgcaugagucccuc

SEQ ID NO: 2543780 - RNA, 19 nt, Artificial Sequence
  Description of Artificial Sequence: Synthetic oligonucleotide
  Sense strand starting at position 2144 of SEQ ID NO: 1888591
ucaugcguuuacuuaaaca

SEQ ID NO: 2543781 - RNA, 19 nt, Artificial Sequence
  Description of Artificial Sequence: Synthetic oligonucleotide
  Antisense strand to SEQ ID NO: 2543780
uguuuaaguaaacgcauga

SEQ ID NO: 2543782 - RNA, 19 nt, Artificial Sequence
  Description of Artificial Sequence: Synthetic oligonucleotide
  Sense strand starting at position 41 of SEQ ID NO: 1888591
aggagcuuuccugguuagu

SEQ ID NO: 2543783 - RNA, 19 nt, Artificial Sequence
  Description of Artificial Sequence: Synthetic oligonucleotide
  Antisense strand to SEQ ID NO: 2543782
acuaaccaggaaagcuccu

SEQ ID NO: 2543784 - RNA, 19 nt, Artificial Sequence
  Description of Artificial Sequence: Synthetic oligonucleotide
  Sense strand starting at position 43 of SEQ ID NO: 1888591
gagcuuuccugguuaguua

SEQ ID NO: 2543785 - RNA, 19 nt, Artificial Sequence
  Description of Artificial Sequence: Synthetic oligonucleotide
  Antisense strand to SEQ ID NO: 2543784
uaacuaaccaggaaagcuc

SEQ ID NO: 2543786 - RNA, 19 nt, Artificial Sequence
  Description of Artificial Sequence: Synthetic oligonucleotide
  Sense strand starting at position 151 of SEQ ID NO: 1888591
uaucguugugcacaaguua

SEQ ID NO: 2543787 - RNA, 19 nt, Artificial Sequence
  Description of Artificial Sequence: Synthetic oligonucleotide
  Antisense strand to SEQ ID NO: 2543786
uaacuugugcacaacgaua

SEQ ID NO: 2543788 - RNA, 19 nt, Artificial Sequence
  Description of Artificial Sequence: Synthetic oligonucleotide
  Sense strand starting at position 606 of SEQ ID NO: 1888591
gugaaugaauauuaugaug

SEQ ID NO: 2543789 - RNA, 19 nt, Artificial Sequence
  Description of Artificial Sequence: Synthetic oligonucleotide
  Antisense strand to SEQ ID NO: 2543788
caucauaauauucauucac

SEQ ID NO: 2543790 - RNA, 19 nt, Artificial Sequence
  Description of Artificial Sequence: Synthetic oligonucleotide
  Sense strand starting at position 903 of SEQ ID NO: 1888591
gggugaaccugggaggauu

SEQ ID NO: 2543791 - RNA, 19 nt, Artificial Sequence
  Description of Artificial Sequence: Synthetic oligonucleotide
  Antisense strand to SEQ ID NO: 2543790
aauccucccagguucaccc

SEQ ID NO: 2543792 - RNA, 19 nt, Artificial Sequence
  Description of Artificial Sequence: Synthetic oligonucleotide
  Sense strand starting at position 541 of SEQ ID NO: 1888591
augagagaauuaugugaau

SEQ ID NO: 2543793 - RNA, 19 nt, Artificial Sequence
  Description of Artificial Sequence: Synthetic oligonucleotide
  Antisense strand to SEQ ID NO: 2543792
auucacauaauucucucau

SEQ ID NO: 2543794 - RNA, 19 nt, Artificial Sequence
  Description of Artificial Sequence: Synthetic oligonucleotide
  Sense strand starting at position 3106 of SEQ ID NO: 1888591
guggugggcgcuuauaguu

SEQ ID NO: 2543795 - RNA, 19 nt, Artificial Sequence
  Description of Artificial Sequence: Synthetic oligonucleotide
  Antisense strand to SEQ ID NO: 2543794
aacuauaagcgcccaccac

SEQ ID NO: 2543796 - RNA, 19 nt, Artificial Sequence
  Description of Artificial Sequence: Synthetic oligonucleotide
  Sense strand starting at position 2775 of SEQ ID NO: 1888591
agaucuuuaugcuauugaa

SEQ ID NO: 2543797 - RNA, 19 nt, Artificial Sequence
  Description of Artificial Sequence: Synthetic oligonucleotide
  Antisense strand to SEQ ID NO: 2543796
uucaauagcauaaagaucu

SEQ ID NO: 2543798 - RNA, 19 nt, Artificial Sequence
  Description of Artificial Sequence: Synthetic oligonucleotide
  Sense strand starting at position 3930 of SEQ ID NO: 1888591
ggaggugccuuugagaaac

SEQ ID NO: 2543799 - RNA, 19 nt, Artificial Sequence
  Description of Artificial Sequence: Synthetic oligonucleotide
  Antisense strand to SEQ ID NO: 2543798
guuucucaaaggcaccucc

SEQ ID NO: 2543800 - RNA, 19 nt, Artificial Sequence
  Description of Artificial Sequence: Synthetic oligonucleotide
  Sense strand starting at position 611 of SEQ ID NO: 1888591
ugaauauuaugaugacgau

SEQ ID NO: 2543801 - RNA, 19 nt, Artificial Sequence
  Description of Artificial Sequence: Synthetic oligonucleotide
  Antisense strand to SEQ ID NO: 2543800
aucgucaucauaauauuca

SEQ ID NO: 2543802 - RNA, 19 nt, Artificial Sequence
  Description of Artificial Sequence: Synthetic oligonucleotide
  Sense strand starting at position 697 of SEQ ID NO: 1888591
guauuaaccucacaaggug

SEQ ID NO: 2543803 - RNA, 19 nt, Artificial Sequence
  Description of Artificial Sequence: Synthetic oligonucleotide
  Antisense strand to SEQ ID NO: 2543802
caccuugugagguuaauac

SEQ ID NO: 2543804 - RNA, 19 nt, Artificial Sequence
  Description of Artificial Sequence: Synthetic oligonucleotide
  Sense strand starting at position 2881 of SEQ ID NO: 1888591
ggugguuagugacagaaug

SEQ ID NO: 2543805 - RNA, 19 nt, Artificial Sequence
  Description of Artificial Sequence: Synthetic oligonucleotide
  Antisense strand to SEQ ID NO: 2543804
cauucugucacuaaccacc

SEQ ID NO: 2543806 - RNA, 19 nt, Artificial Sequence
  Description of Artificial Sequence: Synthetic oligonucleotide
  Sense strand starting at position 2855 of SEQ ID NO: 1888591
gauagcugcucagagauug

SEQ ID NO: 2543807 - RNA, 19 nt, Artificial Sequence
  Description of Artificial Sequence: Synthetic oligonucleotide
  Antisense strand to SEQ ID NO: 2543806
caaucucugagcagcuauc

SEQ ID NO: 2543808 - RNA, 19 nt, Artificial Sequence
  Description of Artificial Sequence: Synthetic oligonucleotide
  Sense strand starting at position 2878 of SEQ ID NO: 1888591
acaggugguuagugacaga

SEQ ID NO: 2543809 - RNA, 19 nt, Artificial Sequence
  Description of Artificial Sequence: Synthetic oligonucleotide
  Antisense strand to SEQ ID NO: 2543808
ucugucacuaaccaccugu

SEQ ID NO: 2543810 - RNA, 19 nt, Artificial Sequence
  Description of Artificial Sequence: Synthetic oligonucleotide
  Sense strand starting at position 3722 of SEQ ID NO: 1888591
agcagaaucucuggaagcu

SEQ ID NO: 2543811 - RNA, 19 nt, Artificial Sequence
  Description of Artificial Sequence: Synthetic oligonucleotide
  Antisense strand to SEQ ID NO: 2543810
agcuuccagagauucugcu

SEQ ID NO: 2543812 - RNA, 19 nt, Artificial Sequence
  Description of Artificial Sequence: Synthetic oligonucleotide
  Sense strand starting at position 740 of SEQ ID NO: 1888591
gaucucaagugcuagcuua

SEQ ID NO: 2543813 - RNA, 19 nt, Artificial Sequence
  Description of Artificial Sequence: Synthetic oligonucleotide
  Antisense strand to SEQ ID NO: 2543812
uaagcuagcacuugagauc

SEQ ID NO: 2543814 - RNA, 19 nt, Artificial Sequence
  Description of Artificial Sequence: Synthetic oligonucleotide
  Sense strand starting at position 2688 of SEQ ID NO: 1888591
guugccaguucccaacuau

SEQ ID NO: 2543815 - RNA, 19 nt, Artificial Sequence
  Description of Artificial Sequence: Synthetic oligonucleotide
  Antisense strand to SEQ ID NO: 2543814
auaguugggaacuggcaac

SEQ ID NO: 2543816 - RNA, 19 nt, Artificial Sequence
  Description of Artificial Sequence: Synthetic oligonucleotide
  Sense strand starting at position 147 of SEQ ID NO: 1888591
gccauaucguugugcacaa

SEQ ID NO: 2543817 - RNA, 19 nt, Artificial Sequence
  Description of Artificial Sequence: Synthetic oligonucleotide
  Antisense strand to SEQ ID NO: 2543816
uugugcacaacgauauggc

SEQ ID NO: 2543818 - RNA, 19 nt, Artificial Sequence
  Description of Artificial Sequence: Synthetic oligonucleotide
  Sense strand starting at position 3154 of SEQ ID NO: 1888592
uguccuccucaugagaaua

SEQ ID NO: 2543819 - RNA, 19 nt, Artificial Sequence
  Description of Artificial Sequence: Synthetic oligonucleotide
  Antisense strand to SEQ ID NO: 2543818
uauucucaugaggaggaca

SEQ ID NO: 2543820 - RNA, 19 nt, Artificial Sequence
  Description of Artificial Sequence: Synthetic oligonucleotide
  Sense strand starting at position 1358 of SEQ ID NO: 1888592
ugauuaggcagguauugag

SEQ ID NO: 2543821 - RNA, 19 nt, Artificial Sequence
  Description of Artificial Sequence: Synthetic oligonucleotide
  Antisense strand to SEQ ID NO: 2543820
cucaauaccugccuaauca

SEQ ID NO: 2543822 - RNA, 19 nt, Artificial Sequence
  Description of Artificial Sequence: Synthetic oligonucleotide
  Sense strand starting at position 2443 of SEQ ID NO: 1888592
caguuuauagcugaagaca

SEQ ID NO: 2543823 - RNA, 19 nt, Artificial Sequence
  Description of Artificial Sequence: Synthetic oligonucleotide
  Antisense strand to SEQ ID NO: 2543822
ugucuucagcuauaaacug

SEQ ID NO: 2543824 - RNA, 19 nt, Artificial Sequence
  Description of Artificial Sequence: Synthetic oligonucleotide
  Sense strand starting at position 1415 of SEQ ID NO: 1888592
uagaaaggccucugagaac

SEQ ID NO: 2543825 - RNA, 19 nt, Artificial Sequence
  Description of Artificial Sequence: Synthetic oligonucleotide
  Antisense strand to SEQ ID NO: 2543824
guucucagaggccuuucua

SEQ ID NO: 2543826 - RNA, 19 nt, Artificial Sequence
  Description of Artificial Sequence: Synthetic oligonucleotide
  Sense strand starting at position 3814 of SEQ ID NO: 1888592
gcuguaugacucuaggaaa

SEQ ID NO: 2543827 - RNA, 19 nt, Artificial Sequence
  Description of Artificial Sequence: Synthetic oligonucleotide
  Antisense strand to SEQ ID NO: 2543826
uuuccuagagucauacagc

SEQ ID NO: 2543828 - RNA, 19 nt, Artificial Sequence
  Description of Artificial Sequence: Synthetic oligonucleotide
  Sense strand starting at position 3866 of SEQ ID NO: 1888592
auaugacuuggugacgauu

SEQ ID NO: 2543829 - RNA, 19 nt, Artificial Sequence
  Description of Artificial Sequence: Synthetic oligonucleotide
  Antisense strand to SEQ ID NO: 2543828
aaucgucaccaagucauau

SEQ ID NO: 2543830 - RNA, 19 nt, Artificial Sequence
  Description of Artificial Sequence: Synthetic oligonucleotide
  Sense strand starting at position 3869 of SEQ ID NO: 1888592
ugacuuggugacgauuaca

SEQ ID NO: 2543831 - RNA, 19 nt, Artificial Sequence
  Description of Artificial Sequence: Synthetic oligonucleotide
  Antisense strand to SEQ ID NO: 2543830
uguaaucgucaccaaguca

SEQ ID NO: 2543832 - RNA, 19 nt, Artificial Sequence
  Description of Artificial Sequence: Synthetic oligonucleotide
  Sense strand starting at position 3864 of SEQ ID NO: 1888592
aaauaugacuuggugacga

SEQ ID NO: 2543833 - RNA, 19 nt, Artificial Sequence
  Description of Artificial Sequence: Synthetic oligonucleotide
  Antisense strand to SEQ ID NO: 2543832
ucgucaccaagucauauuu

SEQ ID NO: 2543834 - RNA, 19 nt, Artificial Sequence
  Description of Artificial Sequence: Synthetic oligonucleotide
  Sense strand starting at position 3414 of SEQ ID NO: 1888592
auauucucagaauggugau

SEQ ID NO: 2543835 - RNA, 19 nt, Artificial Sequence
  Description of Artificial Sequence: Synthetic oligonucleotide
  Antisense strand to SEQ ID NO: 2543834
aucaccauucugagaauau

SEQ ID NO: 2543836 - RNA, 19 nt, Artificial Sequence
  Description of Artificial Sequence: Synthetic oligonucleotide
  Sense strand starting at position 1349 of SEQ ID NO: 1888592
gaggaucccugauuaggca

SEQ ID NO: 2543837 - RNA, 19 nt, Artificial Sequence
  Description of Artificial Sequence: Synthetic oligonucleotide
  Antisense strand to SEQ ID NO: 2543836
ugccuaaucagggauccuc

SEQ ID NO: 2543838 - RNA, 19 nt, Artificial Sequence
  Description of Artificial Sequence: Synthetic oligonucleotide
  Sense strand starting at position 459 of SEQ ID NO: 1888592
ccaggaggucucgacuauc

SEQ ID NO: 2543839 - RNA, 19 nt, Artificial Sequence
  Description of Artificial Sequence: Synthetic oligonucleotide
  Antisense strand to SEQ ID NO: 2543838
gauagucgagaccuccugg

SEQ ID NO: 2543840 - RNA, 19 nt, Artificial Sequence
  Description of Artificial Sequence: Synthetic oligonucleotide
  Sense strand starting at position 3151 of SEQ ID NO: 1888592
uucuguccuccucaugaga

SEQ ID NO: 2543841 - RNA, 19 nt, Artificial Sequence
  Description of Artificial Sequence: Synthetic oligonucleotide
  Antisense strand to SEQ ID NO: 2543840
ucucaugaggaggacagaa

SEQ ID NO: 2543842 - RNA, 19 nt, Artificial Sequence
  Description of Artificial Sequence: Synthetic oligonucleotide
  Sense strand starting at position 467 of SEQ ID NO: 1888592
ucucgacuaucuccaaaga

SEQ ID NO: 2543843 - RNA, 19 nt, Artificial Sequence
  Description of Artificial Sequence: Synthetic oligonucleotide
  Antisense strand to SEQ ID NO: 2543842
ucuuuggagauagucgaga

SEQ ID NO: 2543844 - RNA, 19 nt, Artificial Sequence
  Description of Artificial Sequence: Synthetic oligonucleotide
  Sense strand starting at position 164 of SEQ ID NO: 1888592
cgcggugauggagauaaga

SEQ ID NO: 2543845 - RNA, 19 nt, Artificial Sequence
  Description of Artificial Sequence: Synthetic oligonucleotide
  Antisense strand to SEQ ID NO: 2543844
ucuuaucuccaucaccgcg

SEQ ID NO: 2543846 - RNA, 19 nt, Artificial Sequence
  Description of Artificial Sequence: Synthetic oligonucleotide
  Sense strand starting at position 3017 of SEQ ID NO: 1888592
cccugaccacguuauuaac

SEQ ID NO: 2543847 - RNA, 19 nt, Artificial Sequence
  Description of Artificial Sequence: Synthetic oligonucleotide
  Antisense strand to SEQ ID NO: 2543846
guuaauaacguggucaggg

SEQ ID NO: 2543848 - RNA, 19 nt, Artificial Sequence
  Description of Artificial Sequence: Synthetic oligonucleotide
  Sense strand starting at position 1563 of SEQ ID NO: 1888592
caaugaagacaucguguag

SEQ ID NO: 2543849 - RNA, 19 nt, Artificial Sequence
  Description of Artificial Sequence: Synthetic oligonucleotide
  Antisense strand to SEQ ID NO: 2543848
cuacacgaugucuucauug

SEQ ID NO: 2543850 - RNA, 19 nt, Artificial Sequence
  Description of Artificial Sequence: Synthetic oligonucleotide
  Sense strand starting at position 3019 of SEQ ID NO: 1888592
cugaccacguuauuaacau

SEQ ID NO: 2543851 - RNA, 19 nt, Artificial Sequence
  Description of Artificial Sequence: Synthetic oligonucleotide
  Antisense strand to SEQ ID NO: 2543850
auguuaauaacguggucag

SEQ ID NO: 2543852 - RNA, 19 nt, Artificial Sequence
  Description of Artificial Sequence: Synthetic oligonucleotide
  Sense strand starting at position 465 of SEQ ID NO: 1888592
ggucucgacuaucuccaaa

SEQ ID NO: 2543853 - RNA, 19 nt, Artificial Sequence
  Description of Artificial Sequence: Synthetic oligonucleotide
  Antisense strand to SEQ ID NO: 2543852
uuuggagauagucgagacc

SEQ ID NO: 2543854 - RNA, 19 nt, Artificial Sequence
  Description of Artificial Sequence: Synthetic oligonucleotide
  Sense strand starting at position 2241 of SEQ ID NO: 1888592
acagguuuccuccgggaug

SEQ ID NO: 2543855 - RNA, 19 nt, Artificial Sequence
  Description of Artificial Sequence: Synthetic oligonucleotide
  Antisense strand to SEQ ID NO: 2543854
caucccggaggaaaccugu

SEQ ID NO: 2543856 - RNA, 19 nt, Artificial Sequence
  Description of Artificial Sequence: Synthetic oligonucleotide
  Sense strand starting at position 2973 of SEQ ID NO: 1888592
cccuucuggucuuuacaca

SEQ ID NO: 2543857 - RNA, 19 nt, Artificial Sequence
  Description of Artificial Sequence: Synthetic oligonucleotide
  Antisense strand to SEQ ID NO: 2543856
uguguaaagaccagaaggg

SEQ ID NO: 2543858 - RNA, 19 nt, Artificial Sequence
  Description of Artificial Sequence: Synthetic oligonucleotide
  Sense strand starting at position 2296 of SEQ ID NO: 1888592
ccacuaggcugaguucuau

SEQ ID NO: 2543859 - RNA, 19 nt, Artificial Sequence
  Description of Artificial Sequence: Synthetic oligonucleotide
  Antisense strand to SEQ ID NO: 2543858
auagaacucagccuagugg

SEQ ID NO: 2543860 - RNA, 19 nt, Artificial Sequence
  Description of Artificial Sequence: Synthetic oligonucleotide
  Sense strand starting at position 2348 of SEQ ID NO: 1888592
ggaagccuuccgugauaac

SEQ ID NO: 2543861 - RNA, 19 nt, Artificial Sequence
  Description of Artificial Sequence: Synthetic oligonucleotide
  Antisense strand to SEQ ID NO: 2543860
guuaucacggaaggcuucc

SEQ ID NO: 2543862 - RNA, 19 nt, Artificial Sequence
  Description of Artificial Sequence: Synthetic oligonucleotide
  Sense strand starting at position 3123 of SEQ ID NO: 1888592
uuccaacauucuguauguu

SEQ ID NO: 2543863 - RNA, 19 nt, Artificial Sequence
  Description of Artificial Sequence: Synthetic oligonucleotide
  Antisense strand to SEQ ID NO: 2543862
aacauacagaauguuggaa

SEQ ID NO: 2543864 - RNA, 19 nt, Artificial Sequence
  Description of Artificial Sequence: Synthetic oligonucleotide
  Sense strand starting at position 3133 of SEQ ID NO: 1888592
cuguauguuuaacuaaguu

SEQ ID NO: 2543865 - RNA, 19 nt, Artificial Sequence
  Description of Artificial Sequence: Synthetic oligonucleotide
  Antisense strand to SEQ ID NO: 2543864
aacuuaguuaaacauacag

SEQ ID NO: 2543866 - RNA, 19 nt, Artificial Sequence
  Description of Artificial Sequence: Synthetic oligonucleotide
  Sense strand starting at position 1567 of SEQ ID NO: 1888592
gaagacaucguguagcugu

SEQ ID NO: 2543867 - RNA, 19 nt, Artificial Sequence
  Description of Artificial Sequence: Synthetic oligonucleotide
  Antisense strand to SEQ ID NO: 2543866
acagcuacacgaugucuuc

SEQ ID NO: 2543868 - RNA, 19 nt, Artificial Sequence
  Description of Artificial Sequence: Synthetic oligonucleotide
  Sense strand starting at position 2252 of SEQ ID NO: 1888592
ccgggaugcucucccauau

SEQ ID NO: 2543869 - RNA, 19 nt, Artificial Sequence
  Description of Artificial Sequence: Synthetic oligonucleotide
  Antisense strand to SEQ ID NO: 2543868
auaugggagagcaucccgg

SEQ ID NO: 2543870 - RNA, 19 nt, Artificial Sequence
  Description of Artificial Sequence: Synthetic oligonucleotide
  Sense strand starting at position 2529 of SEQ ID NO: 1888592
ggucucuguuccucaucua

SEQ ID NO: 2543871 - RNA, 19 nt, Artificial Sequence
  Description of Artificial Sequence: Synthetic oligonucleotide
  Antisense strand to SEQ ID NO: 2543870
uagaugaggaacagagacc

SEQ ID NO: 2543872 - RNA, 19 nt, Artificial Sequence
  Description of Artificial Sequence: Synthetic oligonucleotide
  Sense strand starting at position 2532 of SEQ ID NO: 1888592
cucuguuccucaucuaguu

SEQ ID NO: 2543873 - RNA, 19 nt, Artificial Sequence
  Description of Artificial Sequence: Synthetic oligonucleotide
  Antisense strand to SEQ ID NO: 2543872
aacuagaugaggaacagag

SEQ ID NO: 2543874 - RNA, 19 nt, Artificial Sequence
  Description of Artificial Sequence: Synthetic oligonucleotide
  Sense strand starting at position 268 of SEQ ID NO: 1888592
gcugcuuccgcaggaagaa

SEQ ID NO: 2543875 - RNA, 19 nt, Artificial Sequence
  Description of Artificial Sequence: Synthetic oligonucleotide
  Antisense strand to SEQ ID NO: 2543874
uucuuccugcggaagcagc

SEQ ID NO: 2543876 - RNA, 19 nt, Artificial Sequence
  Description of Artificial Sequence: Synthetic oligonucleotide
  Sense strand starting at position 3409 of SEQ ID NO: 1888592
aggccauauucucagaaug

SEQ ID NO: 2543877 - RNA, 19 nt, Artificial Sequence
  Description of Artificial Sequence: Synthetic oligonucleotide
  Antisense strand to SEQ ID NO: 2543876
cauucugagaauauggccu

SEQ ID NO: 2543878 - RNA, 19 nt, Artificial Sequence
  Description of Artificial Sequence: Synthetic oligonucleotide
  Sense strand starting at position 3817 of SEQ ID NO: 1888592
guaugacucuaggaaaguu

SEQ ID NO: 2543879 - RNA, 19 nt, Artificial Sequence
  Description of Artificial Sequence: Synthetic oligonucleotide
  Antisense strand to SEQ ID NO: 2543878
aacuuuccuagagucauac

SEQ ID NO: 2543880 - RNA, 19 nt, Artificial Sequence
  Description of Artificial Sequence: Synthetic oligonucleotide
  Sense strand starting at position 2387 of SEQ ID NO: 1888592
cacaguuguucgcucaguu

SEQ ID NO: 2543881 - RNA, 19 nt, Artificial Sequence
  Description of Artificial Sequence: Synthetic oligonucleotide
  Antisense strand to SEQ ID NO: 2543880
aacugagcgaacaacugug

SEQ ID NO: 2543882 - RNA, 19 nt, Artificial Sequence
  Description of Artificial Sequence: Synthetic oligonucleotide
  Sense strand starting at position 3417 of SEQ ID NO: 1888592
uucucagaauggugaugau

SEQ ID NO: 2543883 - RNA, 19 nt, Artificial Sequence
  Description of Artificial Sequence: Synthetic oligonucleotide
  Antisense strand to SEQ ID NO: 2543882
aucaucaccauucugagaa

SEQ ID NO: 2543884 - RNA, 19 nt, Artificial Sequence
  Description of Artificial Sequence: Synthetic oligonucleotide
  Sense strand starting at position 3020 of SEQ ID NO: 1888592
ugaccacguuauuaacauu

SEQ ID NO: 2543885 - RNA, 19 nt, Artificial Sequence
  Description of Artificial Sequence: Synthetic oligonucleotide
  Antisense strand to SEQ ID NO: 2543884
aauguuaauaacgugguca

SEQ ID NO: 2543886 - RNA, 19 nt, Artificial Sequence
  Description of Artificial Sequence: Synthetic oligonucleotide
  Sense strand starting at position 3411 of SEQ ID NO: 1888592
gccauauucucagaauggu

SEQ ID NO: 2543887 - RNA, 19 nt, Artificial Sequence
  Description of Artificial Sequence: Synthetic oligonucleotide
  Antisense strand to SEQ ID NO: 2543886
accauucugagaauauggc

SEQ ID NO: 2543888 - RNA, 19 nt, Artificial Sequence
  Description of Artificial Sequence: Synthetic oligonucleotide
  Sense strand starting at position 3153 of SEQ ID NO: 1888592
cuguccuccucaugagaau

SEQ ID NO: 2543889 - RNA, 19 nt, Artificial Sequence
  Description of Artificial Sequence: Synthetic oligonucleotide
  Antisense strand to SEQ ID NO: 2543888
auucucaugaggaggacag

SEQ ID NO: 2543890 - RNA, 19 nt, Artificial Sequence
  Description of Artificial Sequence: Synthetic oligonucleotide
  Sense strand starting at position 2305 of SEQ ID NO: 1888592
ugaguucuaucuggacuuc

SEQ ID NO: 2543891 - RNA, 19 nt, Artificial Sequence
  Description of Artificial Sequence: Synthetic oligonucleotide
  Antisense strand to SEQ ID NO: 2543890
gaaguccagauagaacuca

SEQ ID NO: 2543892 - RNA, 19 nt, Artificial Sequence
  Description of Artificial Sequence: Synthetic oligonucleotide
  Sense strand starting at position 3023 of SEQ ID NO: 1888592
ccacguuauuaacauugca

SEQ ID NO: 2543893 - RNA, 19 nt, Artificial Sequence
  Description of Artificial Sequence: Synthetic oligonucleotide
  Antisense strand to SEQ ID NO: 2543892
ugcaauguuaauaacgugg

SEQ ID NO: 2543894 - RNA, 19 nt, Artificial Sequence
  Description of Artificial Sequence: Synthetic oligonucleotide
  Sense strand starting at position 2806 of SEQ ID NO: 1888592
ugagcuggcucccaaguua

SEQ ID NO: 2543895 - RNA, 19 nt, Artificial Sequence
  Description of Artificial Sequence: Synthetic oligonucleotide
  Antisense strand to SEQ ID NO: 2543894
uaacuugggagccagcuca

SEQ ID NO: 2543896 - RNA, 19 nt, Artificial Sequence
  Description of Artificial Sequence: Synthetic oligonucleotide
  Sense strand starting at position 691 of SEQ ID NO: 1888592
agacaugccucuugucaca

SEQ ID NO: 2543897 - RNA, 19 nt, Artificial Sequence
  Description of Artificial Sequence: Synthetic oligonucleotide
  Antisense strand to SEQ ID NO: 2543896
ugugacaagaggcaugucu

SEQ ID NO: 2543898 - RNA, 19 nt, Artificial Sequence
  Description of Artificial Sequence: Synthetic oligonucleotide
  Sense strand starting at position 3064 of SEQ ID NO: 1888593
ugagacagaaacgguuaua

SEQ ID NO: 2543899 - RNA, 19 nt, Artificial Sequence
  Description of Artificial Sequence: Synthetic oligonucleotide
  Antisense strand to SEQ ID NO: 2543898
uauaaccguuucugucuca

SEQ ID NO: 2543900 - RNA, 19 nt, Artificial Sequence
  Description of Artificial Sequence: Synthetic oligonucleotide
  Sense strand starting at position 3212 of SEQ ID NO: 1888593
cagggauugcugcaaagau

SEQ ID NO: 2543901 - RNA, 19 nt, Artificial Sequence
  Description of Artificial Sequence: Synthetic oligonucleotide
  Antisense strand to SEQ ID NO: 2543900
aucuuugcagcaaucccug

SEQ ID NO: 2543902 - RNA, 19 nt, Artificial Sequence
  Description of Artificial Sequence: Synthetic oligonucleotide
  Sense strand starting at position 1167 of SEQ ID NO: 1888593
agcugauguccugaaugga

SEQ ID NO: 2543903 - RNA, 19 nt, Artificial Sequence
  Description of Artificial Sequence: Synthetic oligonucleotide
  Antisense strand to SEQ ID NO: 2543902
uccauucaggacaucagcu

SEQ ID NO: 2543904 - RNA, 19 nt, Artificial Sequence
  Description of Artificial Sequence: Synthetic oligonucleotide
  Sense strand starting at position 2053 of SEQ ID NO: 1888593
augguugucagucaaagga

SEQ ID NO: 2543905 - RNA, 19 nt, Artificial Sequence
  Description of Artificial Sequence: Synthetic oligonucleotide
  Antisense strand to SEQ ID NO: 2543904
uccuuugacugacaaccau

SEQ ID NO: 2543906 - RNA, 19 nt, Artificial Sequence
  Description of Artificial Sequence: Synthetic oligonucleotide
  Sense strand starting at position 2952 of SEQ ID NO: 1888593
ccagacuuccaguaacagu

SEQ ID NO: 2543907 - RNA, 19 nt, Artificial Sequence
  Description of Artificial Sequence: Synthetic oligonucleotide
  Antisense strand to SEQ ID NO: 2543906
acuguuacuggaagucugg

SEQ ID NO: 2543908 - RNA, 19 nt, Artificial Sequence
  Description of Artificial Sequence: Synthetic oligonucleotide
  Sense strand starting at position 2521 of SEQ ID NO: 1888593
ccuggugaguuacugagaa

SEQ ID NO: 2543909 - RNA, 19 nt, Artificial Sequence
  Description of Artificial Sequence: Synthetic oligonucleotide
  Antisense strand to SEQ ID NO: 2543908
uucucaguaacucaccagg

SEQ ID NO: 2543910 - RNA, 19 nt, Artificial Sequence
  Description of Artificial Sequence: Synthetic oligonucleotide
  Sense strand starting at position 2411 of SEQ ID NO: 1888593
gggugaagccuuggaccaa

SEQ ID NO: 2543911 - RNA, 19 nt, Artificial Sequence
  Description of Artificial Sequence: Synthetic oligonucleotide
  Antisense strand to SEQ ID NO: 2543910
uugguccaaggcuucaccc

SEQ ID NO: 2543912 - RNA, 19 nt, Artificial Sequence
  Description of Artificial Sequence: Synthetic oligonucleotide
  Sense strand starting at position 1873 of SEQ ID NO: 1888593
cguuuccgucuguuucauu

SEQ ID NO: 2543913 - RNA, 19 nt, Artificial Sequence
  Description of Artificial Sequence: Synthetic oligonucleotide
  Antisense strand to SEQ ID NO: 2543912
aaugaaacagacggaaacg

SEQ ID NO: 2543914 - RNA, 19 nt, Artificial Sequence
  Description of Artificial Sequence: Synthetic oligonucleotide
  Sense strand starting at position 3338 of SEQ ID NO: 1888593
uuucguacaguugaacuaa

SEQ ID NO: 2543915 - RNA, 19 nt, Artificial Sequence
  Description of Artificial Sequence: Synthetic oligonucleotide
  Antisense strand to SEQ ID NO: 2543914
uuaguucaacuguacgaaa

SEQ ID NO: 2543916 - RNA, 19 nt, Artificial Sequence
  Description of Artificial Sequence: Synthetic oligonucleotide
  Sense strand starting at position 1164 of SEQ ID NO: 1888593
aggagcugauguccugaau

SEQ ID NO: 2543917 - RNA, 19 nt, Artificial Sequence
  Description of Artificial Sequence: Synthetic oligonucleotide
  Antisense strand to SEQ ID NO: 2543916
auucaggacaucagcuccu

SEQ ID NO: 2543918 - RNA, 19 nt, Artificial Sequence
  Description of Artificial Sequence: Synthetic oligonucleotide
  Sense strand starting at position 393 of SEQ ID NO: 1888593
gggagcaucuucuugauug

SEQ ID NO: 2543919 - RNA, 19 nt, Artificial Sequence
  Description of Artificial Sequence: Synthetic oligonucleotide
  Antisense strand to SEQ ID NO: 2543918
caaucaagaagaugcuccc

SEQ ID NO: 2543920 - RNA, 19 nt, Artificial Sequence
  Description of Artificial Sequence: Synthetic oligonucleotide
  Sense strand starting at position 2920 of SEQ ID NO: 1888593
aagucauggcacugggauu

SEQ ID NO: 2543921 - RNA, 19 nt, Artificial Sequence
  Description of Artificial Sequence: Synthetic oligonucleotide
  Antisense strand to SEQ ID NO: 2543920
aaucccagugccaugacuu

SEQ ID NO: 2543922 - RNA, 19 nt, Artificial Sequence
  Description of Artificial Sequence: Synthetic oligonucleotide
  Sense strand starting at position 3418 of SEQ ID NO: 1888593
cuacuuccugcccagaagu

SEQ ID NO: 2543923 - RNA, 19 nt, Artificial Sequence
  Description of Artificial Sequence: Synthetic oligonucleotide
  Antisense strand to SEQ ID NO: 2543922
acuucugggcaggaaguag

SEQ ID NO: 2543924 - RNA, 19 nt, Artificial Sequence
  Description of Artificial Sequence: Synthetic oligonucleotide
  Sense strand starting at position 52 of SEQ ID NO: 1888593
cugaaaugugcauaugcac

SEQ ID NO: 2543925 - RNA, 19 nt, Artificial Sequence
  Description of Artificial Sequence: Synthetic oligonucleotide
  Antisense strand to SEQ ID NO: 2543924
gugcauaugcacauuucag

SEQ ID NO: 2543926 - RNA, 19 nt, Artificial Sequence
  Description of Artificial Sequence: Synthetic oligonucleotide
  Sense strand starting at position 703 of SEQ ID NO: 1888593
guuaaccaaugcucuauga

SEQ ID NO: 2543927 - RNA, 19 nt, Artificial Sequence
  Description of Artificial Sequence: Synthetic oligonucleotide
  Antisense strand to SEQ ID NO: 2543926
ucauagagcauugguuaac

SEQ ID NO: 2543928 - RNA, 19 nt, Artificial Sequence
  Description of Artificial Sequence: Synthetic oligonucleotide
  Sense strand starting at position 3820 of SEQ ID NO: 1888593
gcgacagcugucaguguga

SEQ ID NO: 2543929 - RNA, 19 nt, Artificial Sequence
  Description of Artificial Sequence: Synthetic oligonucleotide
  Antisense strand to SEQ ID NO: 2543928
ucacacugacagcugucgc

SEQ ID NO: 2543930 - RNA, 19 nt, Artificial Sequence
  Description of Artificial Sequence: Synthetic oligonucleotide
  Sense strand starting at position 1275 of SEQ ID NO: 1888593
gugggaaaguccucaggca

SEQ ID NO: 2543931 - RNA, 19 nt, Artificial Sequence
  Description of Artificial Sequence: Synthetic oligonucleotide
  Antisense strand to SEQ ID NO: 2543930
ugccugaggacuuucccac

SEQ ID NO: 2543932 - RNA, 19 nt, Artificial Sequence
  Description of Artificial Sequence: Synthetic oligonucleotide
  Sense strand starting at position 2003 of SEQ ID NO: 1888593
ggaugauacgucgacugca

SEQ ID NO: 2543933 - RNA, 19 nt, Artificial Sequence
  Description of Artificial Sequence: Synthetic oligonucleotide
  Antisense strand to SEQ ID NO: 2543932
ugcagucgacguaucaucc

SEQ ID NO: 2543934 - RNA, 19 nt, Artificial Sequence
  Description of Artificial Sequence: Synthetic oligonucleotide
  Sense strand starting at position 365 of SEQ ID NO: 1888593
ggagcucagugucugaaau

SEQ ID NO: 2543935 - RNA, 19 nt, Artificial Sequence
  Description of Artificial Sequence: Synthetic oligonucleotide
  Antisense strand to SEQ ID NO: 2543934
auuucagacacugagcucc

SEQ ID NO: 2543936 - RNA, 19 nt, Artificial Sequence
  Description of Artificial Sequence: Synthetic oligonucleotide
  Sense strand starting at position 1753 of SEQ ID NO: 1888593
gcagaauuccucgaugcug

SEQ ID NO: 2543937 - RNA, 19 nt, Artificial Sequence
  Description of Artificial Sequence: Synthetic oligonucleotide
  Antisense strand to SEQ ID NO: 2543936
cagcaucgaggaauucugc

SEQ ID NO: 2543938 - RNA, 19 nt, Artificial Sequence
  Description of Artificial Sequence: Synthetic oligonucleotide
  Sense strand starting at position 333 of SEQ ID NO: 1888593
guagaagcuuuccuuccaa

SEQ ID NO: 2543939 - RNA, 19 nt, Artificial Sequence
  Description of Artificial Sequence: Synthetic oligonucleotide
  Antisense strand to SEQ ID NO: 2543938
uuggaaggaaagcuucuac

SEQ ID NO: 2543940 - RNA, 19 nt, Artificial Sequence
  Description of Artificial Sequence: Synthetic oligonucleotide
  Sense strand starting at position 1721 of SEQ ID NO: 1888593
gcagacuucuuccuucuga

SEQ ID NO: 2543941 - RNA, 19 nt, Artificial Sequence
  Description of Artificial Sequence: Synthetic oligonucleotide
  Antisense strand to SEQ ID NO: 2543940
ucagaaggaagaagucugc

SEQ ID NO: 2543942 - RNA, 19 nt, Artificial Sequence
  Description of Artificial Sequence: Synthetic oligonucleotide
  Sense strand starting at position 3120 of SEQ ID NO: 1888593
ggcagagugacuugccaag

SEQ ID NO: 2543943 - RNA, 19 nt, Artificial Sequence
  Description of Artificial Sequence: Synthetic oligonucleotide
  Antisense strand to SEQ ID NO: 2543942
cuuggcaagucacucugcc

SEQ ID NO: 2543944 - RNA, 19 nt, Artificial Sequence
  Description of Artificial Sequence: Synthetic oligonucleotide
  Sense strand starting at position 552 of SEQ ID NO: 1888593
augggaugugucuguacau

SEQ ID NO: 2543945 - RNA, 19 nt, Artificial Sequence
  Description of Artificial Sequence: Synthetic oligonucleotide
  Antisense strand to SEQ ID NO: 2543944
auguacagacacaucccau

SEQ ID NO: 2543946 - RNA, 19 nt, Artificial Sequence
  Description of Artificial Sequence: Synthetic oligonucleotide
  Sense strand starting at position 2022 of SEQ ID NO: 1888593
gagugaccacuuuguguag

SEQ ID NO: 2543947 - RNA, 19 nt, Artificial Sequence
  Description of Artificial Sequence: Synthetic oligonucleotide
  Antisense strand to SEQ ID NO: 2543946
cuacacaaaguggucacuc

SEQ ID NO: 2543948 - RNA, 19 nt, Artificial Sequence
  Description of Artificial Sequence: Synthetic oligonucleotide
  Sense strand starting at position 95 of SEQ ID NO: 1888593
cccucugcucccugauaag

SEQ ID NO: 2543949 - RNA, 19 nt, Artificial Sequence
  Description of Artificial Sequence: Synthetic oligonucleotide
  Antisense strand to SEQ ID NO: 2543948
cuuaucagggagcagaggg

SEQ ID NO: 2543950 - RNA, 19 nt, Artificial Sequence
  Description of Artificial Sequence: Synthetic oligonucleotide
  Sense strand starting at position 2610 of SEQ ID NO: 1888593
uaacaaaggugucuuuguu

SEQ ID NO: 2543951 - RNA, 19 nt, Artificial Sequence
  Description of Artificial Sequence: Synthetic oligonucleotide
  Antisense strand to SEQ ID NO: 2543950
aacaaagacaccuuuguua

SEQ ID NO: 2543952 - RNA, 19 nt, Artificial Sequence
  Description of Artificial Sequence: Synthetic oligonucleotide
  Sense strand starting at position 3676 of SEQ ID NO: 1888593
acaugagccgucugaacca

SEQ ID NO: 2543953 - RNA, 19 nt, Artificial Sequence
  Description of Artificial Sequence: Synthetic oligonucleotide
  Antisense strand to SEQ ID NO: 2543952
ugguucagacggcucaugu

SEQ ID NO: 2543954 - RNA, 19 nt, Artificial Sequence
  Description of Artificial Sequence: Synthetic oligonucleotide
  Sense strand starting at position 1632 of SEQ ID NO: 1888593
ucaccugcuccauggugaa

SEQ ID NO: 2543955 - RNA, 19 nt, Artificial Sequence
  Description of Artificial Sequence: Synthetic oligonucleotide
  Antisense strand to SEQ ID NO: 2543954
uucaccauggagcagguga

SEQ ID NO: 2543956 - RNA, 19 nt, Artificial Sequence
  Description of Artificial Sequence: Synthetic oligonucleotide
  Sense strand starting at position 1023 of SEQ ID NO: 1888593
gugugagacuugucccaac

SEQ ID NO: 2543957 - RNA, 19 nt, Artificial Sequence
  Description of Artificial Sequence: Synthetic oligonucleotide
  Antisense strand to SEQ ID NO: 2543956
guugggacaagucucacac

SEQ ID NO: 2543958 - RNA, 19 nt, Artificial Sequence
  Description of Artificial Sequence: Synthetic oligonucleotide
  Sense strand starting at position 1536 of SEQ ID NO: 1888593
cugccugccuaaucuaaga

SEQ ID NO: 2543959 - RNA, 19 nt, Artificial Sequence
  Description of Artificial Sequence: Synthetic oligonucleotide
  Antisense strand to SEQ ID NO: 2543958
ucuuagauuaggcaggcag

SEQ ID NO: 2543960 - RNA, 19 nt, Artificial Sequence
  Description of Artificial Sequence: Synthetic oligonucleotide
  Sense strand starting at position 366 of SEQ ID NO: 1888593
gagcucagugucugaaauu

SEQ ID NO: 2543961 - RNA, 19 nt, Artificial Sequence
  Description of Artificial Sequence: Synthetic oligonucleotide
  Antisense strand to SEQ ID NO: 2543960
aauuucagacacugagcuc

SEQ ID NO: 2543962 - RNA, 19 nt, Artificial Sequence
  Description of Artificial Sequence: Synthetic oligonucleotide
  Sense strand starting at position 3524 of SEQ ID NO: 1888593
gcuuuacugcuggacaugu

SEQ ID NO: 2543963 - RNA, 19 nt, Artificial Sequence
  Description of Artificial Sequence: Synthetic oligonucleotide
  Antisense strand to SEQ ID NO: 2543962
acauguccagcaguaaagc

SEQ ID NO: 2543964 - RNA, 19 nt, Artificial Sequence
  Description of Artificial Sequence: Synthetic oligonucleotide
  Sense strand starting at position 3006 of SEQ ID NO: 1888593
aggcauggucccuagcuuu

SEQ ID NO: 2543965 - RNA, 19 nt, Artificial Sequence
  Description of Artificial Sequence: Synthetic oligonucleotide
  Antisense strand to SEQ ID NO: 2543964
aaagcuagggaccaugccu

SEQ ID NO: 2543966 - RNA, 19 nt, Artificial Sequence
  Description of Artificial Sequence: Synthetic oligonucleotide
  Sense strand starting at position 332 of SEQ ID NO: 1888593
uguagaagcuuuccuucca

SEQ ID NO: 2543967 - RNA, 19 nt, Artificial Sequence
  Description of Artificial Sequence: Synthetic oligonucleotide
  Antisense strand to SEQ ID NO: 2543966
uggaaggaaagcuucuaca

SEQ ID NO: 2543968 - RNA, 19 nt, Artificial Sequence
  Description of Artificial Sequence: Synthetic oligonucleotide
  Sense strand starting at position 553 of SEQ ID NO: 1888593
ugggaugugucuguacauc

SEQ ID NO: 2543969 - RNA, 19 nt, Artificial Sequence
  Description of Artificial Sequence: Synthetic oligonucleotide
  Antisense strand to SEQ ID NO: 2543968
gauguacagacacauccca

SEQ ID NO: 2543970 - RNA, 19 nt, Artificial Sequence
  Description of Artificial Sequence: Synthetic oligonucleotide
  Sense strand starting at position 700 of SEQ ID NO: 1888593
guaguuaaccaaugcucua

SEQ ID NO: 2543971 - RNA, 19 nt, Artificial Sequence
  Description of Artificial Sequence: Synthetic oligonucleotide
  Antisense strand to SEQ ID NO: 2543970
uagagcauugguuaacuac

SEQ ID NO: 2543972 - RNA, 19 nt, Artificial Sequence
  Description of Artificial Sequence: Synthetic oligonucleotide
  Sense strand starting at position 2055 of SEQ ID NO: 1888593
gguugucagucaaaggagu

SEQ ID NO: 2543973 - RNA, 19 nt, Artificial Sequence
  Description of Artificial Sequence: Synthetic oligonucleotide
  Antisense strand to SEQ ID NO: 2543972
acuccuuugacugacaacc

SEQ ID NO: 2543974 - RNA, 19 nt, Artificial Sequence
  Description of Artificial Sequence: Synthetic oligonucleotide
  Sense strand starting at position 1021 of SEQ ID NO: 1888593
uggugugagacuuguccca

SEQ ID NO: 2543975 - RNA, 19 nt, Artificial Sequence
  Description of Artificial Sequence: Synthetic oligonucleotide
  Antisense strand to SEQ ID NO: 2543974
ugggacaagucucacacca

SEQ ID NO: 2543976 - RNA, 19 nt, Artificial Sequence
  Description of Artificial Sequence: Synthetic oligonucleotide
  Sense strand starting at position 1484 of SEQ ID NO: 1888593
ccagacucucguggguauu

SEQ ID NO: 2543977 - RNA, 19 nt, Artificial Sequence
  Description of Artificial Sequence: Synthetic oligonucleotide
  Antisense strand to SEQ ID NO: 2543976
aauacccacgagagucugg

SEQ ID NO: 2543978 - RNA, 19 nt, Artificial Sequence
  Description of Artificial Sequence: Synthetic oligonucleotide
  Sense strand starting at position 1157 of SEQ ID NO: 1888594
uguugugauaacgcuugca

SEQ ID NO: 2543979 - RNA, 19 nt, Artificial Sequence
  Description of Artificial Sequence: Synthetic oligonucleotide
  Antisense strand to SEQ ID NO: 2543978
ugcaagcguuaucacaaca

SEQ ID NO: 2543980 - RNA, 19 nt, Artificial Sequence
  Description of Artificial Sequence: Synthetic oligonucleotide
  Sense strand starting at position 411 of SEQ ID NO: 1888594
cagacaucugcuuacugga

SEQ ID NO: 2543981 - RNA, 19 nt, Artificial Sequence
  Description of Artificial Sequence: Synthetic oligonucleotide
  Antisense strand to SEQ ID NO: 2543980
uccaguaagcagaugucug

SEQ ID NO: 2543982 - RNA, 19 nt, Artificial Sequence
  Description of Artificial Sequence: Synthetic oligonucleotide
  Sense strand starting at position 1032 of SEQ ID NO: 1888594
uuuagaguccuacauaucu

SEQ ID NO: 2543983 - RNA, 19 nt, Artificial Sequence
  Description of Artificial Sequence: Synthetic oligonucleotide
  Antisense strand to SEQ ID NO: 2543982
agauauguaggacucuaaa

SEQ ID NO: 2543984 - RNA, 19 nt, Artificial Sequence
  Description of Artificial Sequence: Synthetic oligonucleotide
  Sense strand starting at position 253 of SEQ ID NO: 1888594
ggaugauucugccuagaaa

SEQ ID NO: 2543985 - RNA, 19 nt, Artificial Sequence
  Description of Artificial Sequence: Synthetic oligonucleotide
  Antisense strand to SEQ ID NO: 2543984
uuucuaggcagaaucaucc

SEQ ID NO: 2543986 - RNA, 19 nt, Artificial Sequence
  Description of Artificial Sequence: Synthetic oligonucleotide
  Sense strand starting at position 1538 of SEQ ID NO: 1888594
ucauaaucaugauugcaag

SEQ ID NO: 2543987 - RNA, 19 nt, Artificial Sequence
  Description of Artificial Sequence: Synthetic oligonucleotide
  Antisense strand to SEQ ID NO: 2543986
cuugcaaucaugauuauga

SEQ ID NO: 2543988 - RNA, 19 nt, Artificial Sequence
  Description of Artificial Sequence: Synthetic oligonucleotide
  Sense strand starting at position 3763 of SEQ ID NO: 1888594
accacugugcuagaacauu

SEQ ID NO: 2543989 - RNA, 19 nt, Artificial Sequence
  Description of Artificial Sequence: Synthetic oligonucleotide
  Antisense strand to SEQ ID NO: 2543988
aauguucuagcacaguggu

SEQ ID NO: 2543990 - RNA, 19 nt, Artificial Sequence
  Description of Artificial Sequence: Synthetic oligonucleotide
  Sense strand starting at position 129 of SEQ ID NO: 1888594
cauggaagguguuuacaua

SEQ ID NO: 2543991 - RNA, 19 nt, Artificial Sequence
  Description of Artificial Sequence: Synthetic oligonucleotide
  Antisense strand to SEQ ID NO: 2543990
uauguaaacaccuuccaug

SEQ ID NO: 2543992 - RNA, 19 nt, Artificial Sequence
  Description of Artificial Sequence: Synthetic oligonucleotide
  Sense strand starting at position 256 of SEQ ID NO: 1888594
ugauucugccuagaaaguu

SEQ ID NO: 2543993 - RNA, 19 nt, Artificial Sequence
  Description of Artificial Sequence: Synthetic oligonucleotide
  Antisense strand to SEQ ID NO: 2543992
aacuuucuaggcagaauca

SEQ ID NO: 2543994 - RNA, 19 nt, Artificial Sequence
  Description of Artificial Sequence: Synthetic oligonucleotide
  Sense strand starting at position 1037 of SEQ ID NO: 1888594
aguccuacauaucuggauu

SEQ ID NO: 2543995 - RNA, 19 nt, Artificial Sequence
  Description of Artificial Sequence: Synthetic oligonucleotide
  Antisense strand to SEQ ID NO: 2543994
aauccagauauguaggacu

SEQ ID NO: 2543996 - RNA, 19 nt, Artificial Sequence
  Description of Artificial Sequence: Synthetic oligonucleotide
  Sense strand starting at position 2827 of SEQ ID NO: 1888594
auccacauugcuugagaac

SEQ ID NO: 2543997 - RNA, 19 nt, Artificial Sequence
  Description of Artificial Sequence: Synthetic oligonucleotide
  Antisense strand to SEQ ID NO: 2543996
guucucaagcaauguggau

SEQ ID NO: 2543998 - RNA, 19 nt, Artificial Sequence
  Description of Artificial Sequence: Synthetic oligonucleotide
  Sense strand starting at position 3881 of SEQ ID NO: 1888594
guuacuuguccauaaagua

SEQ ID NO: 2543999 - RNA, 19 nt, Artificial Sequence
  Description of Artificial Sequence: Synthetic oligonucleotide
  Antisense strand to SEQ ID NO: 2543998
uacuuuauggacaaguaac

SEQ ID NO: 2544000 - RNA, 19 nt, Artificial Sequence
  Description of Artificial Sequence: Synthetic oligonucleotide
  Sense strand starting at position 251 of SEQ ID NO: 1888594
cuggaugauucugccuaga

SEQ ID NO: 2544001 - RNA, 19 nt, Artificial Sequence
  Description of Artificial Sequence: Synthetic oligonucleotide
  Antisense strand to SEQ ID NO: 2544000
ucuaggcagaaucauccag

SEQ ID NO: 2544002 - RNA, 19 nt, Artificial Sequence
  Description of Artificial Sequence: Synthetic oligonucleotide
  Sense strand starting at position 1498 of SEQ ID NO: 1888594
gugucuugugucgucggaa

SEQ ID NO: 2544003 - RNA, 19 nt, Artificial Sequence
  Description of Artificial Sequence: Synthetic oligonucleotide
  Antisense strand to SEQ ID NO: 2544002
uuccgacgacacaagacac

SEQ ID NO: 2544004 - RNA, 19 nt, Artificial Sequence
  Description of Artificial Sequence: Synthetic oligonucleotide
  Sense strand starting at position 1638 of SEQ ID NO: 1888594
uugagaauuacaggcugua

SEQ ID NO: 2544005 - RNA, 19 nt, Artificial Sequence
  Description of Artificial Sequence: Synthetic oligonucleotide
  Antisense strand to SEQ ID NO: 2544004
uacagccuguaauucucaa

SEQ ID NO: 2544006 - RNA, 19 nt, Artificial Sequence
  Description of Artificial Sequence: Synthetic oligonucleotide
  Sense strand starting at position 1088 of SEQ ID NO: 1888594
cgauaacccucucugaauc

SEQ ID NO: 2544007 - RNA, 19 nt, Artificial Sequence
  Description of Artificial Sequence: Synthetic oligonucleotide
  Antisense strand to SEQ ID NO: 2544006
gauucagagaggguuaucg

SEQ ID NO: 2544008 - RNA, 19 nt, Artificial Sequence
  Description of Artificial Sequence: Synthetic oligonucleotide
  Sense strand starting at position 3878 of SEQ ID NO: 1888594
ucaguuacuuguccauaaa

SEQ ID NO: 2544009 - RNA, 19 nt, Artificial Sequence
  Description of Artificial Sequence: Synthetic oligonucleotide
  Antisense strand to SEQ ID NO: 2544008
uuuauggacaaguaacuga

SEQ ID NO: 2544010 - RNA, 19 nt, Artificial Sequence
  Description of Artificial Sequence: Synthetic oligonucleotide
  Sense strand starting at position 3774 of SEQ ID NO: 1888594
agaacauuccagcgaccuu

SEQ ID NO: 2544011 - RNA, 19 nt, Artificial Sequence
  Description of Artificial Sequence: Synthetic oligonucleotide
  Antisense strand to SEQ ID NO: 2544010
aaggucgcuggaauguucu

SEQ ID NO: 2544012 - RNA, 19 nt, Artificial Sequence
  Description of Artificial Sequence: Synthetic oligonucleotide
  Sense strand starting at position 3799 of SEQ ID NO: 1888594
cagacuauuccggguuuac

SEQ ID NO: 2544013 - RNA, 19 nt, Artificial Sequence
  Description of Artificial Sequence: Synthetic oligonucleotide
  Antisense strand to SEQ ID NO: 2544012
guaaacccggaauagucug

SEQ ID NO: 2544014 - RNA, 19 nt, Artificial Sequence
  Description of Artificial Sequence: Synthetic oligonucleotide
  Sense strand starting at position 3877 of SEQ ID NO: 1888594
cucaguuacuuguccauaa

SEQ ID NO: 2544015 - RNA, 19 nt, Artificial Sequence
  Description of Artificial Sequence: Synthetic oligonucleotide
  Antisense strand to SEQ ID NO: 2544014
uuauggacaaguaacugag

SEQ ID NO: 2544016 - RNA, 19 nt, Artificial Sequence
  Description of Artificial Sequence: Synthetic oligonucleotide
  Sense strand starting at position 2825 of SEQ ID NO: 1888594
gcauccacauugcuugaga

SEQ ID NO: 2544017 - RNA, 19 nt, Artificial Sequence
  Description of Artificial Sequence: Synthetic oligonucleotide
  Antisense strand to SEQ ID NO: 2544016
ucucaagcaauguggaugc

SEQ ID NO: 2544018 - RNA, 19 nt, Artificial Sequence
  Description of Artificial Sequence: Synthetic oligonucleotide
  Sense strand starting at position 3393 of SEQ ID NO: 1888594
gcggugagucgagaucaua

SEQ ID NO: 2544019 - RNA, 19 nt, Artificial Sequence
  Description of Artificial Sequence: Synthetic oligonucleotide
  Antisense strand to SEQ ID NO: 2544018
uaugaucucgacucaccgc

SEQ ID NO: 2544020 - RNA, 19 nt, Artificial Sequence
  Description of Artificial Sequence: Synthetic oligonucleotide
  Sense strand starting at position 216 of SEQ ID NO: 1888594
cuggcaaaguguccggaaa

SEQ ID NO: 2544021 - RNA, 19 nt, Artificial Sequence
  Description of Artificial Sequence: Synthetic oligonucleotide
  Antisense strand to SEQ ID NO: 2544020
uuuccggacacuuugccag

SEQ ID NO: 2544022 - RNA, 19 nt, Artificial Sequence
  Description of Artificial Sequence: Synthetic oligonucleotide
  Sense strand starting at position 2798 of SEQ ID NO: 1888594
uccugaaguagugguucua

SEQ ID NO: 2544023 - RNA, 19 nt, Artificial Sequence
  Description of Artificial Sequence: Synthetic oligonucleotide
  Antisense strand to SEQ ID NO: 2544022
uagaaccacuacuucagga

SEQ ID NO: 2544024 - RNA, 19 nt, Artificial Sequence
  Description of Artificial Sequence: Synthetic oligonucleotide
  Sense strand starting at position 473 of SEQ ID NO: 1888594
cugucugucaaguggaauu

SEQ ID NO: 2544025 - RNA, 19 nt, Artificial Sequence
  Description of Artificial Sequence: Synthetic oligonucleotide
  Antisense strand to SEQ ID NO: 2544024
aauuccacuugacagacag

SEQ ID NO: 2544026 - RNA, 19 nt, Artificial Sequence
  Description of Artificial Sequence: Synthetic oligonucleotide
  Sense strand starting at position 217 of SEQ ID NO: 1888594
uggcaaaguguccggaaau

SEQ ID NO: 2544027 - RNA, 19 nt, Artificial Sequence
  Description of Artificial Sequence: Synthetic oligonucleotide
  Antisense strand to SEQ ID NO: 2544026
auuuccggacacuuugcca

SEQ ID NO: 2544028 - RNA, 19 nt, Artificial Sequence
  Description of Artificial Sequence: Synthetic oligonucleotide
  Sense strand starting at position 1216 of SEQ ID NO: 1888594
aacugaugucacuguuguu

SEQ ID NO: 2544029 - RNA, 19 nt, Artificial Sequence
  Description of Artificial Sequence: Synthetic oligonucleotide
  Antisense strand to SEQ ID NO: 2544028
aacaacagugacaucaguu

SEQ ID NO: 2544030 - RNA, 19 nt, Artificial Sequence
  Description of Artificial Sequence: Synthetic oligonucleotide
  Sense strand starting at position 1627 of SEQ ID NO: 1888594
cuuggcuguguuugagaau

SEQ ID NO: 2544031 - RNA, 19 nt, Artificial Sequence
  Description of Artificial Sequence: Synthetic oligonucleotide
  Antisense strand to SEQ ID NO: 2544030
auucucaaacacagccaag

SEQ ID NO: 2544032 - RNA, 19 nt, Artificial Sequence
  Description of Artificial Sequence: Synthetic oligonucleotide
  Sense strand starting at position 39 of SEQ ID NO: 1888594
ggaguaggguuaaggcuua

SEQ ID NO: 2544033 - RNA, 19 nt, Artificial Sequence
  Description of Artificial Sequence: Synthetic oligonucleotide
  Antisense strand to SEQ ID NO: 2544032
uaagccuuaacccuacucc

SEQ ID NO: 2544034 - RNA, 19 nt, Artificial Sequence
  Description of Artificial Sequence: Synthetic oligonucleotide
  Sense strand starting at position 465 of SEQ ID NO: 1888594
agguuucccugucugucaa

SEQ ID NO: 2544035 - RNA, 19 nt, Artificial Sequence
  Description of Artificial Sequence: Synthetic oligonucleotide
  Antisense strand to SEQ ID NO: 2544034
uugacagacagggaaaccu

SEQ ID NO: 2544036 - RNA, 19 nt, Artificial Sequence
  Description of Artificial Sequence: Synthetic oligonucleotide
  Sense strand starting at position 1160 of SEQ ID NO: 1888594
ugugauaacgcuugcaaag

SEQ ID NO: 2544037 - RNA, 19 nt, Artificial Sequence
  Description of Artificial Sequence: Synthetic oligonucleotide
  Antisense strand to SEQ ID NO: 2544036
cuuugcaagcguuaucaca

SEQ ID NO: 2544038 - RNA, 19 nt, Artificial Sequence
  Description of Artificial Sequence: Synthetic oligonucleotide
  Sense strand starting at position 2833 of SEQ ID NO: 1888594
auugcuugagaacguguua

SEQ ID NO: 2544039 - RNA, 19 nt, Artificial Sequence
  Description of Artificial Sequence: Synthetic oligonucleotide
  Antisense strand to SEQ ID NO: 2544038
uaacacguucucaagcaau

SEQ ID NO: 2544040 - RNA, 19 nt, Artificial Sequence
  Description of Artificial Sequence: Synthetic oligonucleotide
  Sense strand starting at position 174 of SEQ ID NO: 1888594
aacuuagagugggaucaau

SEQ ID NO: 2544041 - RNA, 19 nt, Artificial Sequence
  Description of Artificial Sequence: Synthetic oligonucleotide
  Antisense strand to SEQ ID NO: 2544040
auugaucccacucuaaguu

SEQ ID NO: 2544042 - RNA, 19 nt, Artificial Sequence
  Description of Artificial Sequence: Synthetic oligonucleotide
  Sense strand starting at position 564 of SEQ ID NO: 1888594
gggaaugcgcuuugcaaag

SEQ ID NO: 2544043 - RNA, 19 nt, Artificial Sequence
  Description of Artificial Sequence: Synthetic oligonucleotide
  Antisense strand to SEQ ID NO: 2544042
cuuugcaaagcgcauuccc

SEQ ID NO: 2544044 - RNA, 19 nt, Artificial Sequence
  Description of Artificial Sequence: Synthetic oligonucleotide
  Sense strand starting at position 1490 of SEQ ID NO: 1888594
cccaaauugugucuugugu

SEQ ID NO: 2544045 - RNA, 19 nt, Artificial Sequence
  Description of Artificial Sequence: Synthetic oligonucleotide
  Antisense strand to SEQ ID NO: 2544044
acacaagacacaauuuggg

SEQ ID NO: 2544046 - RNA, 19 nt, Artificial Sequence
  Description of Artificial Sequence: Synthetic oligonucleotide
  Sense strand starting at position 1623 of SEQ ID NO: 1888594
gagucuuggcuguguuuga

SEQ ID NO: 2544047 - RNA, 19 nt, Artificial Sequence
  Description of Artificial Sequence: Synthetic oligonucleotide
  Antisense strand to SEQ ID NO: 2544046
ucaaacacagccaagacuc

SEQ ID NO: 2544048 - RNA, 19 nt, Artificial Sequence
  Description of Artificial Sequence: Synthetic oligonucleotide
  Sense strand starting at position 1501 of SEQ ID NO: 1888594
ucuugugucgucggaagga

SEQ ID NO: 2544049 - RNA, 19 nt, Artificial Sequence
  Description of Artificial Sequence: Synthetic oligonucleotide
  Antisense strand to SEQ ID NO: 2544048
uccuuccgacgacacaaga

SEQ ID NO: 2544050 - RNA, 19 nt, Artificial Sequence
  Description of Artificial Sequence: Synthetic oligonucleotide
  Sense strand starting at position 2804 of SEQ ID NO: 1888594
aguagugguucuagaguug

SEQ ID NO: 2544051 - RNA, 19 nt, Artificial Sequence
  Description of Artificial Sequence: Synthetic oligonucleotide
  Antisense strand to SEQ ID NO: 2544050
caacucuagaaccacuacu

SEQ ID NO: 2544052 - RNA, 19 nt, Artificial Sequence
  Description of Artificial Sequence: Synthetic oligonucleotide
  Sense strand starting at position 1621 of SEQ ID NO: 1888594
cagagucuuggcuguguuu

SEQ ID NO: 2544053 - RNA, 19 nt, Artificial Sequence
  Description of Artificial Sequence: Synthetic oligonucleotide
  Antisense strand to SEQ ID NO: 2544052
aaacacagccaagacucug

SEQ ID NO: 2544054 - RNA, 19 nt, Artificial Sequence
  Description of Artificial Sequence: Synthetic oligonucleotide
  Sense strand starting at position 1293 of SEQ ID NO: 1888594
ccggacaucugggaaguga

SEQ ID NO: 2544055 - RNA, 19 nt, Artificial Sequence
  Description of Artificial Sequence: Synthetic oligonucleotide
  Antisense strand to SEQ ID NO: 2544054
ucacuucccagauguccgg

SEQ ID NO: 2544056 - RNA, 19 nt, Artificial Sequence
  Description of Artificial Sequence: Synthetic oligonucleotide
  Sense strand starting at position 2430 of SEQ ID NO: 1888594
guguaugccucuuuaugca

SEQ ID NO: 2544057 - RNA, 19 nt, Artificial Sequence
  Description of Artificial Sequence: Synthetic oligonucleotide
  Antisense strand to SEQ ID NO: 2544056
ugcauaaagaggcauacac

SEQ ID NO: 2544058 - RNA, 19 nt, Artificial Sequence
  Description of Artificial Sequence: Synthetic oligonucleotide
  Sense strand starting at position 2770 of SEQ ID NO: 1888596
ugaugacuauuagugaaua

SEQ ID NO: 2544059 - RNA, 19 nt, Artificial Sequence
  Description of Artificial Sequence: Synthetic oligonucleotide
  Antisense strand to SEQ ID NO: 2544058
uauucacuaauagucauca

SEQ ID NO: 2544060 - RNA, 19 nt, Artificial Sequence
  Description of Artificial Sequence: Synthetic oligonucleotide
  Sense strand starting at position 1822 of SEQ ID NO: 1888596
agaaacagagauugucagu

SEQ ID NO: 2544061 - RNA, 19 nt, Artificial Sequence
  Description of Artificial Sequence: Synthetic oligonucleotide
  Antisense strand to SEQ ID NO: 2544060
acugacaaucucuguuucu

SEQ ID NO: 2544062 - RNA, 19 nt, Artificial Sequence
  Description of Artificial Sequence: Synthetic oligonucleotide
  Sense strand starting at position 2925 of SEQ ID NO: 1888596
ggacauuucucagaauaag

SEQ ID NO: 2544063 - RNA, 19 nt, Artificial Sequence
  Description of Artificial Sequence: Synthetic oligonucleotide
  Antisense strand to SEQ ID NO: 2544062
cuuauucugagaaaugucc

SEQ ID NO: 2544064 - RNA, 19 nt, Artificial Sequence
  Description of Artificial Sequence: Synthetic oligonucleotide
  Sense strand starting at position 381 of SEQ ID NO: 1888596
augucaucugcugagaaag

SEQ ID NO: 2544065 - RNA, 19 nt, Artificial Sequence
  Description of Artificial Sequence: Synthetic oligonucleotide
  Antisense strand to SEQ ID NO: 2544064
cuuucucagcagaugacau

SEQ ID NO: 2544066 - RNA, 19 nt, Artificial Sequence
  Description of Artificial Sequence: Synthetic oligonucleotide
  Sense strand starting at position 3005 of SEQ ID NO: 1888596
ggaguugugggagagcaau

SEQ ID NO: 2544067 - RNA, 19 nt, Artificial Sequence
  Description of Artificial Sequence: Synthetic oligonucleotide
  Antisense strand to SEQ ID NO: 2544066
auugcucucccacaacucc

SEQ ID NO: 2544068 - RNA, 19 nt, Artificial Sequence
  Description of Artificial Sequence: Synthetic oligonucleotide
  Sense strand starting at position 1400 of SEQ ID NO: 1888596
ccucuaaugcaguagauaa

SEQ ID NO: 2544069 - RNA, 19 nt, Artificial Sequence
  Description of Artificial Sequence: Synthetic oligonucleotide
  Antisense strand to SEQ ID NO: 2544068
uuaucuacugcauuagagg

SEQ ID NO: 2544070 - RNA, 19 nt, Artificial Sequence
  Description of Artificial Sequence: Synthetic oligonucleotide
  Sense strand starting at position 1189 of SEQ ID NO: 1888596
uuagguaucuacuuagaag

SEQ ID NO: 2544071 - RNA, 19 nt, Artificial Sequence
  Description of Artificial Sequence: Synthetic oligonucleotide
  Antisense strand to SEQ ID NO: 2544070
cuucuaaguagauaccuaa

SEQ ID NO: 2544072 - RNA, 19 nt, Artificial Sequence
  Description of Artificial Sequence: Synthetic oligonucleotide
  Sense strand starting at position 3810 of SEQ ID NO: 1888596
gcucguaacaguucugucu

SEQ ID NO: 2544073 - RNA, 19 nt, Artificial Sequence
  Description of Artificial Sequence: Synthetic oligonucleotide
  Antisense strand to SEQ ID NO: 2544072
agacagaacuguuacgagc

SEQ ID NO: 2544074 - RNA, 19 nt, Artificial Sequence
  Description of Artificial Sequence: Synthetic oligonucleotide
  Sense strand starting at position 2923 of SEQ ID NO: 1888596
auggacauuucucagaaua

SEQ ID NO: 2544075 - RNA, 19 nt, Artificial Sequence
  Description of Artificial Sequence: Synthetic oligonucleotide
  Antisense strand to SEQ ID NO: 2544074
uauucugagaaauguccau

SEQ ID NO: 2544076 - RNA, 19 nt, Artificial Sequence
  Description of Artificial Sequence: Synthetic oligonucleotide
  Sense strand starting at position 3789 of SEQ ID NO: 1888596
cuguacuggaggcaauauu

SEQ ID NO: 2544077 - RNA, 19 nt, Artificial Sequence
  Description of Artificial Sequence: Synthetic oligonucleotide
  Antisense strand to SEQ ID NO: 2544076
aauauugccuccaguacag

SEQ ID NO: 2544078 - RNA, 19 nt, Artificial Sequence
  Description of Artificial Sequence: Synthetic oligonucleotide
  Sense strand starting at position 2765 of SEQ ID NO: 1888596
gaugcugaugacuauuagu

SEQ ID NO: 2544079 - RNA, 19 nt, Artificial Sequence
  Description of Artificial Sequence: Synthetic oligonucleotide
  Antisense strand to SEQ ID NO: 2544078
acuaauagucaucagcauc

SEQ ID NO: 2544080 - RNA, 19 nt, Artificial Sequence
  Description of Artificial Sequence: Synthetic oligonucleotide
  Sense strand starting at position 1186 of SEQ ID NO: 1888596
ugguuagguaucuacuuag

SEQ ID NO: 2544081 - RNA, 19 nt, Artificial Sequence
  Description of Artificial Sequence: Synthetic oligonucleotide
  Antisense strand to SEQ ID NO: 2544080
cuaaguagauaccuaacca

SEQ ID NO: 2544082 - RNA, 19 nt, Artificial Sequence
  Description of Artificial Sequence: Synthetic oligonucleotide
  Sense strand starting at position 1578 of SEQ ID NO: 1888596
uugggagauuuccaggauu

SEQ ID NO: 2544083 - RNA, 19 nt, Artificial Sequence
  Description of Artificial Sequence: Synthetic oligonucleotide
  Antisense strand to SEQ ID NO: 2544082
aauccuggaaaucucccaa

SEQ ID NO: 2544084 - RNA, 19 nt, Artificial Sequence
  Description of Artificial Sequence: Synthetic oligonucleotide
  Sense strand starting at position 2895 of SEQ ID NO: 1888596
aauacaugcgaugaguauu

SEQ ID NO: 2544085 - RNA, 19 nt, Artificial Sequence
  Description of Artificial Sequence: Synthetic oligonucleotide
  Antisense strand to SEQ ID NO: 2544084
aauacucaucgcauguauu

SEQ ID NO: 2544086 - RNA, 19 nt, Artificial Sequence
  Description of Artificial Sequence: Synthetic oligonucleotide
  Sense strand starting at position 2689 of SEQ ID NO: 1888596
gaagguuccuccuuuggaa

SEQ ID NO: 2544087 - RNA, 19 nt, Artificial Sequence
  Description of Artificial Sequence: Synthetic oligonucleotide
  Antisense strand to SEQ ID NO: 2544086
uuccaaaggaggaaccuuc

SEQ ID NO: 2544088 - RNA, 19 nt, Artificial Sequence
  Description of Artificial Sequence: Synthetic oligonucleotide
  Sense strand starting at position 2898 of SEQ ID NO: 1888596
acaugcgaugaguauugau

SEQ ID NO: 2544089 - RNA, 19 nt, Artificial Sequence
  Description of Artificial Sequence: Synthetic oligonucleotide
  Antisense strand to SEQ ID NO: 2544088
aucaauacucaucgcaugu

SEQ ID NO: 2544090 - RNA, 19 nt, Artificial Sequence
  Description of Artificial Sequence: Synthetic oligonucleotide
  Sense strand starting at position 2633 of SEQ ID NO: 1888596
ugagaugaguccuuaguga

SEQ ID NO: 2544091 - RNA, 19 nt, Artificial Sequence
  Description of Artificial Sequence: Synthetic oligonucleotide
  Antisense strand to SEQ ID NO: 2544090
ucacuaaggacucaucuca

SEQ ID NO: 2544092 - RNA, 19 nt, Artificial Sequence
  Description of Artificial Sequence: Synthetic oligonucleotide
  Sense strand starting at position 2117 of SEQ ID NO: 1888596
ggguaauccuuucucaaau

SEQ ID NO: 2544093 - RNA, 19 nt, Artificial Sequence
  Description of Artificial Sequence: Synthetic oligonucleotide
  Antisense strand to SEQ ID NO: 2544092
auuugagaaaggauuaccc

SEQ ID NO: 2544094 - RNA, 19 nt, Artificial Sequence
  Description of Artificial Sequence: Synthetic oligonucleotide
  Sense strand starting at position 2992 of SEQ ID NO: 1888596
agaagauguggugggaguu

SEQ ID NO: 2544095 - RNA, 19 nt, Artificial Sequence
  Description of Artificial Sequence: Synthetic oligonucleotide
  Antisense strand to SEQ ID NO: 2544094
aacucccaccacaucuucu

SEQ ID NO: 2544096 - RNA, 19 nt, Artificial Sequence
  Description of Artificial Sequence: Synthetic oligonucleotide
  Sense strand starting at position 2472 of SEQ ID NO: 1888596
aggcaauaaugucuuauga

SEQ ID NO: 2544097 - RNA, 19 nt, Artificial Sequence
  Description of Artificial Sequence: Synthetic oligonucleotide
  Antisense strand to SEQ ID NO: 2544096
ucauaagacauuauugccu

SEQ ID NO: 2544098 - RNA, 19 nt, Artificial Sequence
  Description of Artificial Sequence: Synthetic oligonucleotide
  Sense strand starting at position 3561 of SEQ ID NO: 1888596
cuuuguuucccauaaggua

SEQ ID NO: 2544099 - RNA, 19 nt, Artificial Sequence
  Description of Artificial Sequence: Synthetic oligonucleotide
  Antisense strand to SEQ ID NO: 2544098
uaccuuaugggaaacaaag

SEQ ID NO: 2544100 - RNA, 19 nt, Artificial Sequence
  Description of Artificial Sequence: Synthetic oligonucleotide
  Sense strand starting at position 1802 of SEQ ID NO: 1888596
auguuugaagcccauguaa

SEQ ID NO: 2544101 - RNA, 19 nt, Artificial Sequence
  Description of Artificial Sequence: Synthetic oligonucleotide
  Antisense strand to SEQ ID NO: 2544100
uuacaugggcuucaaacau

SEQ ID NO: 2544102 - RNA, 19 nt, Artificial Sequence
  Description of Artificial Sequence: Synthetic oligonucleotide
  Sense strand starting at position 3226 of SEQ ID NO: 1888596
cccugaacguuauuggaga

SEQ ID NO: 2544103 - RNA, 19 nt, Artificial Sequence
  Description of Artificial Sequence: Synthetic oligonucleotide
  Antisense strand to SEQ ID NO: 2544102
ucuccaauaacguucaggg

SEQ ID NO: 2544104 - RNA, 19 nt, Artificial Sequence
  Description of Artificial Sequence: Synthetic oligonucleotide
  Sense strand starting at position 1702 of SEQ ID NO: 1888596
cugaguaauuuacaggacu

SEQ ID NO: 2544105 - RNA, 19 nt, Artificial Sequence
  Description of Artificial Sequence: Synthetic oligonucleotide
  Antisense strand to SEQ ID NO: 2544104
aguccuguaaauuacucag

SEQ ID NO: 2544106 - RNA, 19 nt, Artificial Sequence
  Description of Artificial Sequence: Synthetic oligonucleotide
  Sense strand starting at position 3159 of SEQ ID NO: 1888596
aguuuccuguaccuagaaa

SEQ ID NO: 2544107 - RNA, 19 nt, Artificial Sequence
  Description of Artificial Sequence: Synthetic oligonucleotide
  Antisense strand to SEQ ID NO: 2544106
uuucuagguacaggaaacu

SEQ ID NO: 2544108 - RNA, 19 nt, Artificial Sequence
  Description of Artificial Sequence: Synthetic oligonucleotide
  Sense strand starting at position 1692 of SEQ ID NO: 1888596
cugggccuuccugaguaau

SEQ ID NO: 2544109 - RNA, 19 nt, Artificial Sequence
  Description of Artificial Sequence: Synthetic oligonucleotide
  Antisense strand to SEQ ID NO: 2544108
auuacucaggaaggcccag

SEQ ID NO: 2544110 - RNA, 19 nt, Artificial Sequence
  Description of Artificial Sequence: Synthetic oligonucleotide
  Sense strand starting at position 274 of SEQ ID NO: 1888596
cagggucagccuuggaaau

SEQ ID NO: 2544111 - RNA, 19 nt, Artificial Sequence
  Description of Artificial Sequence: Synthetic oligonucleotide
  Antisense strand to SEQ ID NO: 2544110
auuuccaaggcugacccug

SEQ ID NO: 2544112 - RNA, 19 nt, Artificial Sequence
  Description of Artificial Sequence: Synthetic oligonucleotide
  Sense strand starting at position 3821 of SEQ ID NO: 1888596
uucugucugguugaugauu

SEQ ID NO: 2544113 - RNA, 19 nt, Artificial Sequence
  Description of Artificial Sequence: Synthetic oligonucleotide
  Antisense strand to SEQ ID NO: 2544112
aaucaucaaccagacagaa

SEQ ID NO: 2544114 - RNA, 19 nt, Artificial Sequence
  Description of Artificial Sequence: Synthetic oligonucleotide
  Sense strand starting at position 2736 of SEQ ID NO: 1888596
gaaggagcaucucuuguau

SEQ ID NO: 2544115 - RNA, 19 nt, Artificial Sequence
  Description of Artificial Sequence: Synthetic oligonucleotide
  Antisense strand to SEQ ID NO: 2544114
auacaagagaugcuccuuc

SEQ ID NO: 2544116 - RNA, 19 nt, Artificial Sequence
  Description of Artificial Sequence: Synthetic oligonucleotide
  Sense strand starting at position 3123 of SEQ ID NO: 1888596
gugagacccuggucuauau

SEQ ID NO: 2544117 - RNA, 19 nt, Artificial Sequence
  Description of Artificial Sequence: Synthetic oligonucleotide
  Antisense strand to SEQ ID NO: 2544116
auauagaccagggucucac

SEQ ID NO: 2544118 - RNA, 19 nt, Artificial Sequence
  Description of Artificial Sequence: Synthetic oligonucleotide
  Sense strand starting at position 2894 of SEQ ID NO: 1888596
gaauacaugcgaugaguau

SEQ ID NO: 2544119 - RNA, 19 nt, Artificial Sequence
  Description of Artificial Sequence: Synthetic oligonucleotide
  Antisense strand to SEQ ID NO: 2544118
auacucaucgcauguauuc

SEQ ID NO: 2544120 - RNA, 19 nt, Artificial Sequence
  Description of Artificial Sequence: Synthetic oligonucleotide
  Sense strand starting at position 1531 of SEQ ID NO: 1888596
ucucuaugugcaggagaca

SEQ ID NO: 2544121 - RNA, 19 nt, Artificial Sequence
  Description of Artificial Sequence: Synthetic oligonucleotide
  Antisense strand to SEQ ID NO: 2544120
ugucuccugcacauagaga

SEQ ID NO: 2544122 - RNA, 19 nt, Artificial Sequence
  Description of Artificial Sequence: Synthetic oligonucleotide
  Sense strand starting at position 3787 of SEQ ID NO: 1888596
cucuguacuggaggcaaua

SEQ ID NO: 2544123 - RNA, 19 nt, Artificial Sequence
  Description of Artificial Sequence: Synthetic oligonucleotide
  Antisense strand to SEQ ID NO: 2544122
uauugccuccaguacagag

SEQ ID NO: 2544124 - RNA, 19 nt, Artificial Sequence
  Description of Artificial Sequence: Synthetic oligonucleotide
  Sense strand starting at position 1177 of SEQ ID NO: 1888596
gaggaagugugguuaggua

SEQ ID NO: 2544125 - RNA, 19 nt, Artificial Sequence
  Description of Artificial Sequence: Synthetic oligonucleotide
  Antisense strand to SEQ ID NO: 2544124
uaccuaaccacacuuccuc

SEQ ID NO: 2544126 - RNA, 19 nt, Artificial Sequence
  Description of Artificial Sequence: Synthetic oligonucleotide
  Sense strand starting at position 3121 of SEQ ID NO: 1888596
uggugagacccuggucuau

SEQ ID NO: 2544127 - RNA, 19 nt, Artificial Sequence
  Description of Artificial Sequence: Synthetic oligonucleotide
  Antisense strand to SEQ ID NO: 2544126
auagaccagggucucacca

SEQ ID NO: 2544128 - RNA, 19 nt, Artificial Sequence
  Description of Artificial Sequence: Synthetic oligonucleotide
  Sense strand starting at position 2 of SEQ ID NO: 1888596
ggucauggguccuuggacu

SEQ ID NO: 2544129 - RNA, 19 nt, Artificial Sequence
  Description of Artificial Sequence: Synthetic oligonucleotide
  Antisense strand to SEQ ID NO: 2544128
aguccaaggacccaugacc

SEQ ID NO: 2544130 - RNA, 19 nt, Artificial Sequence
  Description of Artificial Sequence: Synthetic oligonucleotide
  Sense strand starting at position 851 of SEQ ID NO: 1888596
gcccgauuccagcaagauc

SEQ ID NO: 2544131 - RNA, 19 nt, Artificial Sequence
  Description of Artificial Sequence: Synthetic oligonucleotide
  Antisense strand to SEQ ID NO: 2544130
gaucuugcuggaaucgggc

SEQ ID NO: 2544132 - RNA, 19 nt, Artificial Sequence
  Description of Artificial Sequence: Synthetic oligonucleotide
  Sense strand starting at position 1570 of SEQ ID NO: 1888596
cuuggagcuugggagauuu

SEQ ID NO: 2544133 - RNA, 19 nt, Artificial Sequence
  Description of Artificial Sequence: Synthetic oligonucleotide
  Antisense strand to SEQ ID NO: 2544132
aaaucucccaagcuccaag

SEQ ID NO: 2544134 - RNA, 19 nt, Artificial Sequence
  Description of Artificial Sequence: Synthetic oligonucleotide
  Sense strand starting at position 307 of SEQ ID NO: 1888596
cgccacaaacucugaggua

SEQ ID NO: 2544135 - RNA, 19 nt, Artificial Sequence
  Description of Artificial Sequence: Synthetic oligonucleotide
  Antisense strand to SEQ ID NO: 2544134
uaccucagaguuuguggcg

SEQ ID NO: 2544136 - RNA, 19 nt, Artificial Sequence
  Description of Artificial Sequence: Synthetic oligonucleotide
  Sense strand starting at position 1111 of SEQ ID NO: 1888596
gggcacuauuguuccugau

SEQ ID NO: 2544137 - RNA, 19 nt, Artificial Sequence
  Description of Artificial Sequence: Synthetic oligonucleotide
  Antisense strand to SEQ ID NO: 2544136
aucaggaacaauagugccc

SEQ ID NO: 2544138 - RNA, 19 nt, Artificial Sequence
  Description of Artificial Sequence: Synthetic oligonucleotide
  Sense strand starting at position 1176 of SEQ ID NO: 1888597
ggccuagagacuggaagau

SEQ ID NO: 2544139 - RNA, 19 nt, Artificial Sequence
  Description of Artificial Sequence: Synthetic oligonucleotide
  Antisense strand to SEQ ID NO: 2544138
aucuuccagucucuaggcc

SEQ ID NO: 2544140 - RNA, 19 nt, Artificial Sequence
  Description of Artificial Sequence: Synthetic oligonucleotide
  Sense strand starting at position 2684 of SEQ ID NO: 1888597
gcugucuuuggcuugcaaa

SEQ ID NO: 2544141 - RNA, 19 nt, Artificial Sequence
  Description of Artificial Sequence: Synthetic oligonucleotide
  Antisense strand to SEQ ID NO: 2544140
uuugcaagccaaagacagc

SEQ ID NO: 2544142 - RNA, 19 nt, Artificial Sequence
  Description of Artificial Sequence: Synthetic oligonucleotide
  Sense strand starting at position 783 of SEQ ID NO: 1888597
augaaugacuggucuggau

SEQ ID NO: 2544143 - RNA, 19 nt, Artificial Sequence
  Description of Artificial Sequence: Synthetic oligonucleotide
  Antisense strand to SEQ ID NO: 2544142
auccagaccagucauucau

SEQ ID NO: 2544144 - RNA, 19 nt, Artificial Sequence
  Description of Artificial Sequence: Synthetic oligonucleotide
  Sense strand starting at position 785 of SEQ ID NO: 1888597
gaaugacuggucuggauca

SEQ ID NO: 2544145 - RNA, 19 nt, Artificial Sequence
  Description of Artificial Sequence: Synthetic oligonucleotide
  Antisense strand to SEQ ID NO: 2544144
ugauccagaccagucauuc

SEQ ID NO: 2544146 - RNA, 19 nt, Artificial Sequence
  Description of Artificial Sequence: Synthetic oligonucleotide
  Sense strand starting at position 560 of SEQ ID NO: 1888597
gccuuagaaaggugggaaa

SEQ ID NO: 2544147 - RNA, 19 nt, Artificial Sequence
  Description of Artificial Sequence: Synthetic oligonucleotide
  Antisense strand to SEQ ID NO: 2544146
uuucccaccuuucuaaggc

SEQ ID NO: 2544148 - RNA, 19 nt, Artificial Sequence
  Description of Artificial Sequence: Synthetic oligonucleotide
  Sense strand starting at position 3056 of SEQ ID NO: 1888597
agguuaugagagcagcaga

SEQ ID NO: 2544149 - RNA, 19 nt, Artificial Sequence
  Description of Artificial Sequence: Synthetic oligonucleotide
  Antisense strand to SEQ ID NO: 2544148
ucugcugcucucauaaccu

SEQ ID NO: 2544150 - RNA, 19 nt, Artificial Sequence
  Description of Artificial Sequence: Synthetic oligonucleotide
  Sense strand starting at position 3772 of SEQ ID NO: 1888597
gcggcagugccuccuacaa

SEQ ID NO: 2544151 - RNA, 19 nt, Artificial Sequence
  Description of Artificial Sequence: Synthetic oligonucleotide
  Antisense strand to SEQ ID NO: 2544150
uuguaggaggcacugccgc

SEQ ID NO: 2544152 - RNA, 19 nt, Artificial Sequence
  Description of Artificial Sequence: Synthetic oligonucleotide
  Sense strand starting at position 1029 of SEQ ID NO: 1888597
agccaaagucaccagagua

SEQ ID NO: 2544153 - RNA, 19 nt, Artificial Sequence
  Description of Artificial Sequence: Synthetic oligonucleotide
  Antisense strand to SEQ ID NO: 2544152
uacucuggugacuuuggcu

SEQ ID NO: 2544154 - RNA, 19 nt, Artificial Sequence
  Description of Artificial Sequence: Synthetic oligonucleotide
  Sense strand starting at position 1852 of SEQ ID NO: 1888597
gauccacagccugggaaau

SEQ ID NO: 2544155 - RNA, 19 nt, Artificial Sequence
  Description of Artificial Sequence: Synthetic oligonucleotide
  Antisense strand to SEQ ID NO: 2544154
auuucccaggcuguggauc

SEQ ID NO: 2544156 - RNA, 19 nt, Artificial Sequence
  Description of Artificial Sequence: Synthetic oligonucleotide
  Sense strand starting at position 2777 of SEQ ID NO: 1888597
cccggagauaugcaugauu

SEQ ID NO: 2544157 - RNA, 19 nt, Artificial Sequence
  Description of Artificial Sequence: Synthetic oligonucleotide
  Antisense strand to SEQ ID NO: 2544156
aaucaugcauaucuccggg

SEQ ID NO: 2544158 - RNA, 19 nt, Artificial Sequence
  Description of Artificial Sequence: Synthetic oligonucleotide
  Sense strand starting at position 2854 of SEQ ID NO: 1888597
ugcgguaaugcaucguuua

SEQ ID NO: 2544159 - RNA, 19 nt, Artificial Sequence
  Description of Artificial Sequence: Synthetic oligonucleotide
  Antisense strand to SEQ ID NO: 2544158
uaaacgaugcauuaccgca

SEQ ID NO: 2544160 - RNA, 19 nt, Artificial Sequence
  Description of Artificial Sequence: Synthetic oligonucleotide
  Sense strand starting at position 3362 of SEQ ID NO: 1888597
gugcuaucccaagagaccu

SEQ ID NO: 2544161 - RNA, 19 nt, Artificial Sequence
  Description of Artificial Sequence: Synthetic oligonucleotide
  Antisense strand to SEQ ID NO: 2544160
aggucucuugggauagcac

SEQ ID NO: 2544162 - RNA, 19 nt, Artificial Sequence
  Description of Artificial Sequence: Synthetic oligonucleotide
  Sense strand starting at position 1586 of SEQ ID NO: 1888597
caggaaauacugugcuaag

SEQ ID NO: 2544163 - RNA, 19 nt, Artificial Sequence
  Description of Artificial Sequence: Synthetic oligonucleotide
  Antisense strand to SEQ ID NO: 2544162
cuuagcacaguauuuccug

SEQ ID NO: 2544164 - RNA, 19 nt, Artificial Sequence
  Description of Artificial Sequence: Synthetic oligonucleotide
  Sense strand starting at position 741 of SEQ ID NO: 1888597
cuaagugcugcugaaugaa

SEQ ID NO: 2544165 - RNA, 19 nt, Artificial Sequence
  Description of Artificial Sequence: Synthetic oligonucleotide
  Antisense strand to SEQ ID NO: 2544164
uucauucagcagcacuuag

SEQ ID NO: 2544166 - RNA, 19 nt, Artificial Sequence
  Description of Artificial Sequence: Synthetic oligonucleotide
  Sense strand starting at position 1587 of SEQ ID NO: 1888597
aggaaauacugugcuaagu

SEQ ID NO: 2544167 - RNA, 19 nt, Artificial Sequence
  Description of Artificial Sequence: Synthetic oligonucleotide
  Antisense strand to SEQ ID NO: 2544166
acuuagcacaguauuuccu

SEQ ID NO: 2544168 - RNA, 19 nt, Artificial Sequence
  Description of Artificial Sequence: Synthetic oligonucleotide
  Sense strand starting at position 744 of SEQ ID NO: 1888597
agugcugcugaaugaacaa

SEQ ID NO: 2544169 - RNA, 19 nt, Artificial Sequence
  Description of Artificial Sequence: Synthetic oligonucleotide
  Antisense strand to SEQ ID NO: 2544168
uuguucauucagcagcacu

SEQ ID NO: 2544170 - RNA, 19 nt, Artificial Sequence
  Description of Artificial Sequence: Synthetic oligonucleotide
  Sense strand starting at position 2535 of SEQ ID NO: 1888597
gucagagucccagggcaua

SEQ ID NO: 2544171 - RNA, 19 nt, Artificial Sequence
  Description of Artificial Sequence: Synthetic oligonucleotide
  Antisense strand to SEQ ID NO: 2544170
uaugcccugggacucugac

SEQ ID NO: 2544172 - RNA, 19 nt, Artificial Sequence
  Description of Artificial Sequence: Synthetic oligonucleotide
  Sense strand starting at position 2579 of SEQ ID NO: 1888597
gcccuuuaucucggaaaca

SEQ ID NO: 2544173 - RNA, 19 nt, Artificial Sequence
  Description of Artificial Sequence: Synthetic oligonucleotide
  Antisense strand to SEQ ID NO: 2544172
uguuuccgagauaaagggc

SEQ ID NO: 2544174 - RNA, 19 nt, Artificial Sequence
  Description of Artificial Sequence: Synthetic oligonucleotide
  Sense strand starting at position 1927 of SEQ ID NO: 1888597
gaguucgccaggugaagaa

SEQ ID NO: 2544175 - RNA, 19 nt, Artificial Sequence
  Description of Artificial Sequence: Synthetic oligonucleotide
  Antisense strand to SEQ ID NO: 2544174
uucuucaccuggcgaacuc

SEQ ID NO: 2544176 - RNA, 19 nt, Artificial Sequence
  Description of Artificial Sequence: Synthetic oligonucleotide
  Sense strand starting at position 2498 of SEQ ID NO: 1888597
ggccacaucuucguaagga

SEQ ID NO: 2544177 - RNA, 19 nt, Artificial Sequence
  Description of Artificial Sequence: Synthetic oligonucleotide
  Antisense strand to SEQ ID NO: 2544176
uccuuacgaagauguggcc

SEQ ID NO: 2544178 - RNA, 19 nt, Artificial Sequence
  Description of Artificial Sequence: Synthetic oligonucleotide
  Sense strand starting at position 1925 of SEQ ID NO: 1888597
aggaguucgccaggugaag

SEQ ID NO: 2544179 - RNA, 19 nt, Artificial Sequence
  Description of Artificial Sequence: Synthetic oligonucleotide
  Antisense strand to SEQ ID NO: 2544178
cuucaccuggcgaacuccu

SEQ ID NO: 2544180 - RNA, 19 nt, Artificial Sequence
  Description of Artificial Sequence: Synthetic oligonucleotide
  Sense strand starting at position 1923 of SEQ ID NO: 1888597
guaggaguucgccagguga

SEQ ID NO: 2544181 - RNA, 19 nt, Artificial Sequence
  Description of Artificial Sequence: Synthetic oligonucleotide
  Antisense strand to SEQ ID NO: 2544180
ucaccuggcgaacuccuac

SEQ ID NO: 2544182 - RNA, 19 nt, Artificial Sequence
  Description of Artificial Sequence: Synthetic oligonucleotide
  Sense strand starting at position 103 of SEQ ID NO: 1888597
gagacugcugaguggcauu

SEQ ID NO: 2544183 - RNA, 19 nt, Artificial Sequence
  Description of Artificial Sequence: Synthetic oligonucleotide
  Antisense strand to SEQ ID NO: 2544182
aaugccacucagcagucuc

SEQ ID NO: 2544184 - RNA, 19 nt, Artificial Sequence
  Description of Artificial Sequence: Synthetic oligonucleotide
  Sense strand starting at position 372 of SEQ ID NO: 1888597
gcgacugugucaccaaaga

SEQ ID NO: 2544185 - RNA, 19 nt, Artificial Sequence
  Description of Artificial Sequence: Synthetic oligonucleotide
  Antisense strand to SEQ ID NO: 2544184
ucuuuggugacacagucgc

SEQ ID NO: 2544186 - RNA, 19 nt, Artificial Sequence
  Description of Artificial Sequence: Synthetic oligonucleotide
  Sense strand starting at position 129 of SEQ ID NO: 1888597
ugcuaaucugauuguguca

SEQ ID NO: 2544187 - RNA, 19 nt, Artificial Sequence
  Description of Artificial Sequence: Synthetic oligonucleotide
  Antisense strand to SEQ ID NO: 2544186
ugacacaaucagauuagca

SEQ ID NO: 2544188 - RNA, 19 nt, Artificial Sequence
  Description of Artificial Sequence: Synthetic oligonucleotide
  Sense strand starting at position 1387 of SEQ ID NO: 1888597
ccuccagcuccgugagaca

SEQ ID NO: 2544189 - RNA, 19 nt, Artificial Sequence
  Description of Artificial Sequence: Synthetic oligonucleotide
  Antisense strand to SEQ ID NO: 2544188
ugucucacggagcuggagg

SEQ ID NO: 2544190 - RNA, 19 nt, Artificial Sequence
  Description of Artificial Sequence: Synthetic oligonucleotide
  Sense strand starting at position 3273 of SEQ ID NO: 1888597
aaaggcuucugggaacaaa

SEQ ID NO: 2544191 - RNA, 19 nt, Artificial Sequence
  Description of Artificial Sequence: Synthetic oligonucleotide
  Antisense strand to SEQ ID NO: 2544190
uuuguucccagaagccuuu

SEQ ID NO: 2544192 - RNA, 19 nt, Artificial Sequence
  Description of Artificial Sequence: Synthetic oligonucleotide
  Sense strand starting at position 3095 of SEQ ID NO: 1888597
ggcgucucuccuggacaau

SEQ ID NO: 2544193 - RNA, 19 nt, Artificial Sequence
  Description of Artificial Sequence: Synthetic oligonucleotide
  Antisense strand to SEQ ID NO: 2544192
auuguccaggagagacgcc

SEQ ID NO: 2544194 - RNA, 19 nt, Artificial Sequence
  Description of Artificial Sequence: Synthetic oligonucleotide
  Sense strand starting at position 2857 of SEQ ID NO: 1888597
gguaaugcaucguuuacau

SEQ ID NO: 2544195 - RNA, 19 nt, Artificial Sequence
  Description of Artificial Sequence: Synthetic oligonucleotide
  Antisense strand to SEQ ID NO: 2544194
auguaaacgaugcauuacc

SEQ ID NO: 2544196 - RNA, 19 nt, Artificial Sequence
  Description of Artificial Sequence: Synthetic oligonucleotide
  Sense strand starting at position 2421 of SEQ ID NO: 1888597
ggucuagugaccuguaguc

SEQ ID NO: 2544197 - RNA, 19 nt, Artificial Sequence
  Description of Artificial Sequence: Synthetic oligonucleotide
  Antisense strand to SEQ ID NO: 2544196
gacuacaggucacuagacc

SEQ ID NO: 2544198 - RNA, 19 nt, Artificial Sequence
  Description of Artificial Sequence: Synthetic oligonucleotide
  Sense strand starting at position 860 of SEQ ID NO: 1888597
cgucguccucccggaagaa

SEQ ID NO: 2544199 - RNA, 19 nt, Artificial Sequence
  Description of Artificial Sequence: Synthetic oligonucleotide
  Antisense strand to SEQ ID NO: 2544198
uucuuccgggaggacgacg

SEQ ID NO: 2544200 - RNA, 19 nt, Artificial Sequence
  Description of Artificial Sequence: Synthetic oligonucleotide
  Sense strand starting at position 532 of SEQ ID NO: 1888597
ccgcuuucuuccuuaagca

SEQ ID NO: 2544201 - RNA, 19 nt, Artificial Sequence
  Description of Artificial Sequence: Synthetic oligonucleotide
  Antisense strand to SEQ ID NO: 2544200
ugcuuaaggaagaaagcgg

SEQ ID NO: 2544202 - RNA, 19 nt, Artificial Sequence
  Description of Artificial Sequence: Synthetic oligonucleotide
  Sense strand starting at position 2580 of SEQ ID NO: 1888597
cccuuuaucucggaaacaa

SEQ ID NO: 2544203 - RNA, 19 nt, Artificial Sequence
  Description of Artificial Sequence: Synthetic oligonucleotide
  Antisense strand to SEQ ID NO: 2544202
uuguuuccgagauaaaggg

SEQ ID NO: 2544204 - RNA, 19 nt, Artificial Sequence
  Description of Artificial Sequence: Synthetic oligonucleotide
  Sense strand starting at position 786 of SEQ ID NO: 1888597
aaugacuggucuggaucaa

SEQ ID NO: 2544205 - RNA, 19 nt, Artificial Sequence
  Description of Artificial Sequence: Synthetic oligonucleotide
  Antisense strand to SEQ ID NO: 2544204
uugauccagaccagucauu

SEQ ID NO: 2544206 - RNA, 19 nt, Artificial Sequence
  Description of Artificial Sequence: Synthetic oligonucleotide
  Sense strand starting at position 2844 of SEQ ID NO: 1888597
caggcaugccugcgguaau

SEQ ID NO: 2544207 - RNA, 19 nt, Artificial Sequence
  Description of Artificial Sequence: Synthetic oligonucleotide
  Antisense strand to SEQ ID NO: 2544206
auuaccgcaggcaugccug

SEQ ID NO: 2544208 - RNA, 19 nt, Artificial Sequence
  Description of Artificial Sequence: Synthetic oligonucleotide
  Sense strand starting at position 2683 of SEQ ID NO: 1888597
ugcugucuuuggcuugcaa

SEQ ID NO: 2544209 - RNA, 19 nt, Artificial Sequence
  Description of Artificial Sequence: Synthetic oligonucleotide
  Antisense strand to SEQ ID NO: 2544208
uugcaagccaaagacagca

SEQ ID NO: 2544210 - RNA, 19 nt, Artificial Sequence
  Description of Artificial Sequence: Synthetic oligonucleotide
  Sense strand starting at position 1589 of SEQ ID NO: 1888597
gaaauacugugcuaaguag

SEQ ID NO: 2544211 - RNA, 19 nt, Artificial Sequence
  Description of Artificial Sequence: Synthetic oligonucleotide
  Antisense strand to SEQ ID NO: 2544210
cuacuuagcacaguauuuc

SEQ ID NO: 2544212 - RNA, 19 nt, Artificial Sequence
  Description of Artificial Sequence: Synthetic oligonucleotide
  Sense strand starting at position 190 of SEQ ID NO: 1888597
gggaacaacuccuguauuc

SEQ ID NO: 2544213 - RNA, 19 nt, Artificial Sequence
  Description of Artificial Sequence: Synthetic oligonucleotide
  Antisense strand to SEQ ID NO: 2544212
gaauacaggaguuguuccc

SEQ ID NO: 2544214 - RNA, 19 nt, Artificial Sequence
  Description of Artificial Sequence: Synthetic oligonucleotide
  Sense strand starting at position 2855 of SEQ ID NO: 1888597
gcgguaaugcaucguuuac

SEQ ID NO: 2544215 - RNA, 19 nt, Artificial Sequence
  Description of Artificial Sequence: Synthetic oligonucleotide
  Antisense strand to SEQ ID NO: 2544214
guaaacgaugcauuaccgc

SEQ ID NO: 2544216 - RNA, 19 nt, Artificial Sequence
  Description of Artificial Sequence: Synthetic oligonucleotide
  Sense strand starting at position 3198 of SEQ ID NO: 1888597
ggcagucccucuggaagaa

SEQ ID NO: 2544217 - RNA, 19 nt, Artificial Sequence
  Description of Artificial Sequence: Synthetic oligonucleotide
  Antisense strand to SEQ ID NO: 2544216
uucuuccagagggacugcc

SEQ ID NO: 2544218 - RNA, 19 nt, Artificial Sequence
  Description of Artificial Sequence: Synthetic oligonucleotide
  Sense strand starting at position 690 of SEQ ID NO: 1888598
augagaaagugacugcaaa

SEQ ID NO: 2544219 - RNA, 19 nt, Artificial Sequence
  Description of Artificial Sequence: Synthetic oligonucleotide
  Antisense strand to SEQ ID NO: 2544218
uuugcagucacuuucucau

SEQ ID NO: 2544220 - RNA, 19 nt, Artificial Sequence
  Description of Artificial Sequence: Synthetic oligonucleotide
  Sense strand starting at position 988 of SEQ ID NO: 1888598
uuucgaagaguggaaagua

SEQ ID NO: 2544221 - RNA, 19 nt, Artificial Sequence
  Description of Artificial Sequence: Synthetic oligonucleotide
  Antisense strand to SEQ ID NO: 2544220
uacuuuccacucuucgaaa

SEQ ID NO: 2544222 - RNA, 19 nt, Artificial Sequence
  Description of Artificial Sequence: Synthetic oligonucleotide
  Sense strand starting at position 1131 of SEQ ID NO: 1888598
auugcaugagagcaacaau

SEQ ID NO: 2544223 - RNA, 19 nt, Artificial Sequence
  Description of Artificial Sequence: Synthetic oligonucleotide
  Antisense strand to SEQ ID NO: 2544222
auuguugcucucaugcaau

SEQ ID NO: 2544224 - RNA, 19 nt, Artificial Sequence
  Description of Artificial Sequence: Synthetic oligonucleotide
  Sense strand starting at position 1126 of SEQ ID NO: 1888598
auuaaauugcaugagagca

SEQ ID NO: 2544225 - RNA, 19 nt, Artificial Sequence
  Description of Artificial Sequence: Synthetic oligonucleotide
  Antisense strand to SEQ ID NO: 2544224
ugcucucaugcaauuuaau

SEQ ID NO: 2544226 - RNA, 19 nt, Artificial Sequence
  Description of Artificial Sequence: Synthetic oligonucleotide
  Sense strand starting at position 360 of SEQ ID NO: 1888598
guccuuacccaucaggaua

SEQ ID NO: 2544227 - RNA, 19 nt, Artificial Sequence
  Description of Artificial Sequence: Synthetic oligonucleotide
  Antisense strand to SEQ ID NO: 2544226
uauccugauggguaaggac

SEQ ID NO: 2544228 - RNA, 19 nt, Artificial Sequence
  Description of Artificial Sequence: Synthetic oligonucleotide
  Sense strand starting at position 423 of SEQ ID NO: 1888598
agaagucucccugaacuuc

SEQ ID NO: 2544229 - RNA, 19 nt, Artificial Sequence
  Description of Artificial Sequence: Synthetic oligonucleotide
  Antisense strand to SEQ ID NO: 2544228
gaaguucagggagacuucu

SEQ ID NO: 2544230 - RNA, 19 nt, Artificial Sequence
  Description of Artificial Sequence: Synthetic oligonucleotide
  Sense strand starting at position 3071 of SEQ ID NO: 1888598
auaguuacgagggaagguu

SEQ ID NO: 2544231 - RNA, 19 nt, Artificial Sequence
  Description of Artificial Sequence: Synthetic oligonucleotide
  Antisense strand to SEQ ID NO: 2544230
aaccuucccucguaacuau

SEQ ID NO: 2544232 - RNA, 19 nt, Artificial Sequence
  Description of Artificial Sequence: Synthetic oligonucleotide
  Sense strand starting at position 452 of SEQ ID NO: 1888598
ggagcuaguccacaacuga

SEQ ID NO: 2544233 - RNA, 19 nt, Artificial Sequence
  Description of Artificial Sequence: Synthetic oligonucleotide
  Antisense strand to SEQ ID NO: 2544232
ucaguuguggacuagcucc

SEQ ID NO: 2544234 - RNA, 19 nt, Artificial Sequence
  Description of Artificial Sequence: Synthetic oligonucleotide
  Sense strand starting at position 636 of SEQ ID NO: 1888598
ccuugauuuccagguacgu

SEQ ID NO: 2544235 - RNA, 19 nt, Artificial Sequence
  Description of Artificial Sequence: Synthetic oligonucleotide
  Antisense strand to SEQ ID NO: 2544234
acguaccuggaaaucaagg

SEQ ID NO: 2544236 - RNA, 19 nt, Artificial Sequence
  Description of Artificial Sequence: Synthetic oligonucleotide
  Sense strand starting at position 175 of SEQ ID NO: 1888598
cucgaaguucucuacaaac

SEQ ID NO: 2544237 - RNA, 19 nt, Artificial Sequence
  Description of Artificial Sequence: Synthetic oligonucleotide
  Antisense strand to SEQ ID NO: 2544236
guuuguagagaacuucgag

SEQ ID NO: 2544238 - RNA, 19 nt, Artificial Sequence
  Description of Artificial Sequence: Synthetic oligonucleotide
  Sense strand starting at position 177 of SEQ ID NO: 1888598
cgaaguucucuacaaacuc

SEQ ID NO: 2544239 - RNA, 19 nt, Artificial Sequence
  Description of Artificial Sequence: Synthetic oligonucleotide
  Antisense strand to SEQ ID NO: 2544238
gaguuuguagagaacuucg

SEQ ID NO: 2544240 - RNA, 19 nt, Artificial Sequence
  Description of Artificial Sequence: Synthetic oligonucleotide
  Sense strand starting at position 3070 of SEQ ID NO: 1888598
gauaguuacgagggaaggu

SEQ ID NO: 2544241 - RNA, 19 nt, Artificial Sequence
  Description of Artificial Sequence: Synthetic oligonucleotide
  Antisense strand to SEQ ID NO: 2544240
accuucccucguaacuauc

SEQ ID NO: 2544242 - RNA, 19 nt, Artificial Sequence
  Description of Artificial Sequence: Synthetic oligonucleotide
  Sense strand starting at position 1202 of SEQ ID NO: 1888598
accgauaugacauaguguu

SEQ ID NO: 2544243 - RNA, 19 nt, Artificial Sequence
  Description of Artificial Sequence: Synthetic oligonucleotide
  Antisense strand to SEQ ID NO: 2544242
aacacuaugucauaucggu

SEQ ID NO: 2544244 - RNA, 19 nt, Artificial Sequence
  Description of Artificial Sequence: Synthetic oligonucleotide
  Sense strand starting at position 255 of SEQ ID NO: 1888598
ccugcucucagggaguuaa

SEQ ID NO: 2544245 - RNA, 19 nt, Artificial Sequence
  Description of Artificial Sequence: Synthetic oligonucleotide
  Antisense strand to SEQ ID NO: 2544244
uuaacucccugagagcagg

SEQ ID NO: 2544246 - RNA, 19 nt, Artificial Sequence
  Description of Artificial Sequence: Synthetic oligonucleotide
  Sense strand starting at position 469 of SEQ ID NO: 1888598
gaaugaacuggucguaaag

SEQ ID NO: 2544247 - RNA, 19 nt, Artificial Sequence
  Description of Artificial Sequence: Synthetic oligonucleotide
  Antisense strand to SEQ ID NO: 2544246
cuuuacgaccaguucauuc

SEQ ID NO: 2544248 - RNA, 19 nt, Artificial Sequence
  Description of Artificial Sequence: Synthetic oligonucleotide
  Sense strand starting at position 507 of SEQ ID NO: 1888598
aucuccaaguauguuuaaa

SEQ ID NO: 2544249 - RNA, 19 nt, Artificial Sequence
  Description of Artificial Sequence: Synthetic oligonucleotide
  Antisense strand to SEQ ID NO: 2544248
uuuaaacauacuuggagau

SEQ ID NO: 2544250 - RNA, 19 nt, Artificial Sequence
  Description of Artificial Sequence: Synthetic oligonucleotide
  Sense strand starting at position 162 of SEQ ID NO: 1888598
uuagaaacaugcucucgaa

SEQ ID NO: 2544251 - RNA, 19 nt, Artificial Sequence
  Description of Artificial Sequence: Synthetic oligonucleotide
  Antisense strand to SEQ ID NO: 2544250
uucgagagcauguuucuaa

SEQ ID NO: 2544252 - RNA, 19 nt, Artificial Sequence
  Description of Artificial Sequence: Synthetic oligonucleotide
  Sense strand starting at position 274 of SEQ ID NO: 1888598
agagaugcuccguaguaaa

SEQ ID NO: 2544253 - RNA, 19 nt, Artificial Sequence
  Description of Artificial Sequence: Synthetic oligonucleotide
  Antisense strand to SEQ ID NO: 2544252
uuuacuacggagcaucucu

SEQ ID NO: 2544254 - RNA, 19 nt, Artificial Sequence
  Description of Artificial Sequence: Synthetic oligonucleotide
  Sense strand starting at position 3447 of SEQ ID NO: 1888598
gcauuauuacucugaccag

SEQ ID NO: 2544255 - RNA, 19 nt, Artificial Sequence
  Description of Artificial Sequence: Synthetic oligonucleotide
  Antisense strand to SEQ ID NO: 2544254
cuggucagaguaauaaugc

SEQ ID NO: 2544256 - RNA, 19 nt, Artificial Sequence
  Description of Artificial Sequence: Synthetic oligonucleotide
  Sense strand starting at position 3609 of SEQ ID NO: 1888598
ugaagacauuucuaggguu

SEQ ID NO: 2544257 - RNA, 19 nt, Artificial Sequence
  Description of Artificial Sequence: Synthetic oligonucleotide
  Antisense strand to SEQ ID NO: 2544256
aacccuagaaaugucuuca

SEQ ID NO: 2544258 - RNA, 19 nt, Artificial Sequence
  Description of Artificial Sequence: Synthetic oligonucleotide
  Sense strand starting at position 3647 of SEQ ID NO: 1888598
guccgcucccaauagaaca

SEQ ID NO: 2544259 - RNA, 19 nt, Artificial Sequence
  Description of Artificial Sequence: Synthetic oligonucleotide
  Antisense strand to SEQ ID NO: 2544258
uguucuauugggagcggac

SEQ ID NO: 2544260 - RNA, 19 nt, Artificial Sequence
  Description of Artificial Sequence: Synthetic oligonucleotide
  Sense strand starting at position 174 of SEQ ID NO: 1888598
ucucgaaguucucuacaaa

SEQ ID NO: 2544261 - RNA, 19 nt, Artificial Sequence
  Description of Artificial Sequence: Synthetic oligonucleotide
  Antisense strand to SEQ ID NO: 2544260
uuuguagagaacuucgaga

SEQ ID NO: 2544262 - RNA, 19 nt, Artificial Sequence
  Description of Artificial Sequence: Synthetic oligonucleotide
  Sense strand starting at position 466 of SEQ ID NO: 1888598
acugaaugaacuggucgua

SEQ ID NO: 2544263 - RNA, 19 nt, Artificial Sequence
  Description of Artificial Sequence: Synthetic oligonucleotide
  Antisense strand to SEQ ID NO: 2544262
uacgaccaguucauucagu

SEQ ID NO: 2544264 - RNA, 19 nt, Artificial Sequence
  Description of Artificial Sequence: Synthetic oligonucleotide
  Sense strand starting at position 1101 of SEQ ID NO: 1888598
acacaaaugcauuggcauu

SEQ ID NO: 2544265 - RNA, 19 nt, Artificial Sequence
  Description of Artificial Sequence: Synthetic oligonucleotide
  Antisense strand to SEQ ID NO: 2544264
aaugccaaugcauuugugu

SEQ ID NO: 2544266 - RNA, 19 nt, Artificial Sequence
  Description of Artificial Sequence: Synthetic oligonucleotide
  Sense strand starting at position 299 of SEQ ID NO: 1888598
caucuuguggacugucaga

SEQ ID NO: 2544267 - RNA, 19 nt, Artificial Sequence
  Description of Artificial Sequence: Synthetic oligonucleotide
  Antisense strand to SEQ ID NO: 2544266
ucugacaguccacaagaug

SEQ ID NO: 2544268 - RNA, 19 nt, Artificial Sequence
  Description of Artificial Sequence: Synthetic oligonucleotide
  Sense strand starting at position 2941 of SEQ ID NO: 1888598
cgguuagcgcuuccgcaaa

SEQ ID NO: 2544269 - RNA, 19 nt, Artificial Sequence
  Description of Artificial Sequence: Synthetic oligonucleotide
  Antisense strand to SEQ ID NO: 2544268
uuugcggaagcgcuaaccg

SEQ ID NO: 2544270 - RNA, 19 nt, Artificial Sequence
  Description of Artificial Sequence: Synthetic oligonucleotide
  Sense strand starting at position 273 of SEQ ID NO: 1888598
aagagaugcuccguaguaa

SEQ ID NO: 2544271 - RNA, 19 nt, Artificial Sequence
  Description of Artificial Sequence: Synthetic oligonucleotide
  Antisense strand to SEQ ID NO: 2544270
uuacuacggagcaucucuu

SEQ ID NO: 2544272 - RNA, 19 nt, Artificial Sequence
  Description of Artificial Sequence: Synthetic oligonucleotide
  Sense strand starting at position 3097 of SEQ ID NO: 1888598
uuggucucugcguaaggga

SEQ ID NO: 2544273 - RNA, 19 nt, Artificial Sequence
  Description of Artificial Sequence: Synthetic oligonucleotide
  Antisense strand to SEQ ID NO: 2544272
ucccuuacgcagagaccaa

SEQ ID NO: 2544274 - RNA, 19 nt, Artificial Sequence
  Description of Artificial Sequence: Synthetic oligonucleotide
  Sense strand starting at position 597 of SEQ ID NO: 1888598
acguuuguaguucaugauu

SEQ ID NO: 2544275 - RNA, 19 nt, Artificial Sequence
  Description of Artificial Sequence: Synthetic oligonucleotide
  Antisense strand to SEQ ID NO: 2544274
aaucaugaacuacaaacgu

SEQ ID NO: 2544276 - RNA, 19 nt, Artificial Sequence
  Description of Artificial Sequence: Synthetic oligonucleotide
  Sense strand starting at position 3483 of SEQ ID NO: 1888598
guggaaagauguuucggca

SEQ ID NO: 2544277 - RNA, 19 nt, Artificial Sequence
  Description of Artificial Sequence: Synthetic oligonucleotide
  Antisense strand to SEQ ID NO: 2544276
ugccgaaacaucuuuccac

SEQ ID NO: 2544278 - RNA, 19 nt, Artificial Sequence
  Description of Artificial Sequence: Synthetic oligonucleotide
  Sense strand starting at position 1217 of SEQ ID NO: 1888598
uguugcaaucaauguauua

SEQ ID NO: 2544279 - RNA, 19 nt, Artificial Sequence
  Description of Artificial Sequence: Synthetic oligonucleotide
  Antisense strand to SEQ ID NO: 2544278
uaauacauugauugcaaca

SEQ ID NO: 2544280 - RNA, 19 nt, Artificial Sequence
  Description of Artificial Sequence: Synthetic oligonucleotide
  Sense strand starting at position 3688 of SEQ ID NO: 1888598
gccauugccuuaucuaaug

SEQ ID NO: 2544281 - RNA, 19 nt, Artificial Sequence
  Description of Artificial Sequence: Synthetic oligonucleotide
  Antisense strand to SEQ ID NO: 2544280
cauuagauaaggcaauggc

SEQ ID NO: 2544282 - RNA, 19 nt, Artificial Sequence
  Description of Artificial Sequence: Synthetic oligonucleotide
  Sense strand starting at position 1032 of SEQ ID NO: 1888598
gagaaaggauucgaaauuc

SEQ ID NO: 2544283 - RNA, 19 nt, Artificial Sequence
  Description of Artificial Sequence: Synthetic oligonucleotide
  Antisense strand to SEQ ID NO: 2544282
gaauuucgaauccuuucuc

SEQ ID NO: 2544284 - RNA, 19 nt, Artificial Sequence
  Description of Artificial Sequence: Synthetic oligonucleotide
  Sense strand starting at position 2974 of SEQ ID NO: 1888598
cccuguggcucccuuuaaa

SEQ ID NO: 2544285 - RNA, 19 nt, Artificial Sequence
  Description of Artificial Sequence: Synthetic oligonucleotide
  Antisense strand to SEQ ID NO: 2544284
uuuaaagggagccacaggg

SEQ ID NO: 2544286 - RNA, 19 nt, Artificial Sequence
  Description of Artificial Sequence: Synthetic oligonucleotide
  Sense strand starting at position 3765 of SEQ ID NO: 1888598
auguaauggugagaggaaa

SEQ ID NO: 2544287 - RNA, 19 nt, Artificial Sequence
  Description of Artificial Sequence: Synthetic oligonucleotide
  Antisense strand to SEQ ID NO: 2544286
uuuccucucaccauuacau

SEQ ID NO: 2544288 - RNA, 19 nt, Artificial Sequence
  Description of Artificial Sequence: Synthetic oligonucleotide
  Sense strand starting at position 3871 of SEQ ID NO: 1888598
guguuuggccauggguaaa

SEQ ID NO: 2544289 - RNA, 19 nt, Artificial Sequence
  Description of Artificial Sequence: Synthetic oligonucleotide
  Antisense strand to SEQ ID NO: 2544288
uuuacccauggccaaacac

SEQ ID NO: 2544290 - RNA, 19 nt, Artificial Sequence
  Description of Artificial Sequence: Synthetic oligonucleotide
  Sense strand starting at position 2940 of SEQ ID NO: 1888598
gcgguuagcgcuuccgcaa

SEQ ID NO: 2544291 - RNA, 19 nt, Artificial Sequence
  Description of Artificial Sequence: Synthetic oligonucleotide
  Antisense strand to SEQ ID NO: 2544290
uugcggaagcgcuaaccgc

SEQ ID NO: 2544292 - RNA, 19 nt, Artificial Sequence
  Description of Artificial Sequence: Synthetic oligonucleotide
  Sense strand starting at position 254 of SEQ ID NO: 1888598
gccugcucucagggaguua

SEQ ID NO: 2544293 - RNA, 19 nt, Artificial Sequence
  Description of Artificial Sequence: Synthetic oligonucleotide
  Antisense strand to SEQ ID NO: 2544292
uaacucccugagagcaggc

SEQ ID NO: 2544294 - RNA, 19 nt, Artificial Sequence
  Description of Artificial Sequence: Synthetic oligonucleotide
  Sense strand starting at position 595 of SEQ ID NO: 1888598
ucacguuuguaguucauga

SEQ ID NO: 2544295 - RNA, 19 nt, Artificial Sequence
  Description of Artificial Sequence: Synthetic oligonucleotide
  Antisense strand to SEQ ID NO: 2544294
ucaugaacuacaaacguga

SEQ ID NO: 2544296 - RNA, 19 nt, Artificial Sequence
  Description of Artificial Sequence: Synthetic oligonucleotide
  Sense strand starting at position 3870 of SEQ ID NO: 1888598
uguguuuggccauggguaa

SEQ ID NO: 2544297 - RNA, 19 nt, Artificial Sequence
  Description of Artificial Sequence: Synthetic oligonucleotide
  Antisense strand to SEQ ID NO: 2544296
uuacccauggccaaacaca

SEQ ID NO: 2544298 - RNA, 19 nt, Artificial Sequence
  Description of Artificial Sequence: Synthetic oligonucleotide
  Sense strand starting at position 3089 of SEQ ID NO: 1888599
cuauguguucacgcauugu

SEQ ID NO: 2544299 - RNA, 19 nt, Artificial Sequence
  Description of Artificial Sequence: Synthetic oligonucleotide
  Antisense strand to SEQ ID NO: 2544298
acaaugcgugaacacauag

SEQ ID NO: 2544300 - RNA, 19 nt, Artificial Sequence
  Description of Artificial Sequence: Synthetic oligonucleotide
  Sense strand starting at position 3476 of SEQ ID NO: 1888599
ugaaauacucugcagguca

SEQ ID NO: 2544301 - RNA, 19 nt, Artificial Sequence
  Description of Artificial Sequence: Synthetic oligonucleotide
  Antisense strand to SEQ ID NO: 2544300
ugaccugcagaguauuuca

SEQ ID NO: 2544302 - RNA, 19 nt, Artificial Sequence
  Description of Artificial Sequence: Synthetic oligonucleotide
  Sense strand starting at position 3710 of SEQ ID NO: 1888599
ggaagugcugaaugacaca

SEQ ID NO: 2544303 - RNA, 19 nt, Artificial Sequence
  Description of Artificial Sequence: Synthetic oligonucleotide
  Antisense strand to SEQ ID NO: 2544302
ugugucauucagcacuucc

SEQ ID NO: 2544304 - RNA, 19 nt, Artificial Sequence
  Description of Artificial Sequence: Synthetic oligonucleotide
  Sense strand starting at position 2913 of SEQ ID NO: 1888599
ggauguucccauuggaauu

SEQ ID NO: 2544305 - RNA, 19 nt, Artificial Sequence
  Description of Artificial Sequence: Synthetic oligonucleotide
  Antisense strand to SEQ ID NO: 2544304
aauuccaaugggaacaucc

SEQ ID NO: 2544306 - RNA, 19 nt, Artificial Sequence
  Description of Artificial Sequence: Synthetic oligonucleotide
  Sense strand starting at position 1632 of SEQ ID NO: 1888599
caccuaggccucgaggauu

SEQ ID NO: 2544307 - RNA, 19 nt, Artificial Sequence
  Description of Artificial Sequence: Synthetic oligonucleotide
  Antisense strand to SEQ ID NO: 2544306
aauccucgaggccuaggug

SEQ ID NO: 2544308 - RNA, 19 nt, Artificial Sequence
  Description of Artificial Sequence: Synthetic oligonucleotide
  Sense strand starting at position 1900 of SEQ ID NO: 1888599
cugccuaauuaucuggaga

SEQ ID NO: 2544309 - RNA, 19 nt, Artificial Sequence
  Description of Artificial Sequence: Synthetic oligonucleotide
  Antisense strand to SEQ ID NO: 2544308
ucuccagauaauuaggcag

SEQ ID NO: 2544310 - RNA, 19 nt, Artificial Sequence
  Description of Artificial Sequence: Synthetic oligonucleotide
  Sense strand starting at position 912 of SEQ ID NO: 1888599
agaacugguguggguauaa

SEQ ID NO: 2544311 - RNA, 19 nt, Artificial Sequence
  Description of Artificial Sequence: Synthetic oligonucleotide
  Antisense strand to SEQ ID NO: 2544310
uuauacccacaccaguucu

SEQ ID NO: 2544312 - RNA, 19 nt, Artificial Sequence
  Description of Artificial Sequence: Synthetic oligonucleotide
  Sense strand starting at position 3176 of SEQ ID NO: 1888599
ggaauuauuuaguaucaca

SEQ ID NO: 2544313 - RNA, 19 nt, Artificial Sequence
  Description of Artificial Sequence: Synthetic oligonucleotide
  Antisense strand to SEQ ID NO: 2544312
ugugauacuaaauaauucc

SEQ ID NO: 2544314 - RNA, 19 nt, Artificial Sequence
  Description of Artificial Sequence: Synthetic oligonucleotide
  Sense strand starting at position 2520 of SEQ ID NO: 1888599
ggaagauguguaggcacau

SEQ ID NO: 2544315 - RNA, 19 nt, Artificial Sequence
  Description of Artificial Sequence: Synthetic oligonucleotide
  Antisense strand to SEQ ID NO: 2544314
augugccuacacaucuucc

SEQ ID NO: 2544316 - RNA, 19 nt, Artificial Sequence
  Description of Artificial Sequence: Synthetic oligonucleotide
  Sense strand starting at position 3474 of SEQ ID NO: 1888599
acugaaauacucugcaggu

SEQ ID NO: 2544317 - RNA, 19 nt, Artificial Sequence
  Description of Artificial Sequence: Synthetic oligonucleotide
  Antisense strand to SEQ ID NO: 2544316
accugcagaguauuucagu

SEQ ID NO: 2544318 - RNA, 19 nt, Artificial Sequence
  Description of Artificial Sequence: Synthetic oligonucleotide
  Sense strand starting at position 910 of SEQ ID NO: 1888599
uaagaacugguguggguau

SEQ ID NO: 2544319 - RNA, 19 nt, Artificial Sequence
  Description of Artificial Sequence: Synthetic oligonucleotide
  Antisense strand to SEQ ID NO: 2544318
auacccacaccaguucuua

SEQ ID NO: 2544320 - RNA, 19 nt, Artificial Sequence
  Description of Artificial Sequence: Synthetic oligonucleotide
  Sense strand starting at position 3770 of SEQ ID NO: 1888599
agacaaauccagugcaggu

SEQ ID NO: 2544321 - RNA, 19 nt, Artificial Sequence
  Description of Artificial Sequence: Synthetic oligonucleotide
  Antisense strand to SEQ ID NO: 2544320
accugcacuggauuugucu

SEQ ID NO: 2544322 - RNA, 19 nt, Artificial Sequence
  Description of Artificial Sequence: Synthetic oligonucleotide
  Sense strand starting at position 3940 of SEQ ID NO: 1888599
gguggcuuaugacccauua

SEQ ID NO: 2544323 - RNA, 19 nt, Artificial Sequence
  Description of Artificial Sequence: Synthetic oligonucleotide
  Antisense strand to SEQ ID NO: 2544322
uaaugggucauaagccacc

SEQ ID NO: 2544324 - RNA, 19 nt, Artificial Sequence
  Description of Artificial Sequence: Synthetic oligonucleotide
  Sense strand starting at position 360 of SEQ ID NO: 1888599
ccagaauucccaugguguu

SEQ ID NO: 2544325 - RNA, 19 nt, Artificial Sequence
  Description of Artificial Sequence: Synthetic oligonucleotide
  Antisense strand to SEQ ID NO: 2544324
aacaccaugggaauucugg

SEQ ID NO: 2544326 - RNA, 19 nt, Artificial Sequence
  Description of Artificial Sequence: Synthetic oligonucleotide
  Sense strand starting at position 361 of SEQ ID NO: 1888599
cagaauucccaugguguuu

SEQ ID NO: 2544327 - RNA, 19 nt, Artificial Sequence
  Description of Artificial Sequence: Synthetic oligonucleotide
  Antisense strand to SEQ ID NO: 2544326
aaacaccaugggaauucug

SEQ ID NO: 2544328 - RNA, 19 nt, Artificial Sequence
  Description of Artificial Sequence: Synthetic oligonucleotide
  Sense strand starting at position 1114 of SEQ ID NO: 1888599
ggucuugcugggcaguaaa

SEQ ID NO: 2544329 - RNA, 19 nt, Artificial Sequence
  Description of Artificial Sequence: Synthetic oligonucleotide
  Antisense strand to SEQ ID NO: 2544328
uuuacugcccagcaagacc

SEQ ID NO: 2544330 - RNA, 19 nt, Artificial Sequence
  Description of Artificial Sequence: Synthetic oligonucleotide
  Sense strand starting at position 3053 of SEQ ID NO: 1888599
uucuguaaaggaugugcua

SEQ ID NO: 2544331 - RNA, 19 nt, Artificial Sequence
  Description of Artificial Sequence: Synthetic oligonucleotide
  Antisense strand to SEQ ID NO: 2544330
uagcacauccuuuacagaa

SEQ ID NO: 2544332 - RNA, 19 nt, Artificial Sequence
  Description of Artificial Sequence: Synthetic oligonucleotide
  Sense strand starting at position 3055 of SEQ ID NO: 1888599
cuguaaaggaugugcuauu

SEQ ID NO: 2544333 - RNA, 19 nt, Artificial Sequence
  Description of Artificial Sequence: Synthetic oligonucleotide
  Antisense strand to SEQ ID NO: 2544332
aauagcacauccuuuacag

SEQ ID NO: 2544334 - RNA, 19 nt, Artificial Sequence
  Description of Artificial Sequence: Synthetic oligonucleotide
  Sense strand starting at position 1113 of SEQ ID NO: 1888599
aggucuugcugggcaguaa

SEQ ID NO: 2544335 - RNA, 19 nt, Artificial Sequence
  Description of Artificial Sequence: Synthetic oligonucleotide
  Antisense strand to SEQ ID NO: 2544334
uuacugcccagcaagaccu

SEQ ID NO: 2544336 - RNA, 19 nt, Artificial Sequence
  Description of Artificial Sequence: Synthetic oligonucleotide
  Sense strand starting at position 3113 of SEQ ID NO: 1888599
gcugcuuucccgcaacaac

SEQ ID NO: 2544337 - RNA, 19 nt, Artificial Sequence
  Description of Artificial Sequence: Synthetic oligonucleotide
  Antisense strand to SEQ ID NO: 2544336
guuguugcgggaaagcagc

SEQ ID NO: 2544338 - RNA, 19 nt, Artificial Sequence
  Description of Artificial Sequence: Synthetic oligonucleotide
  Sense strand starting at position 460 of SEQ ID NO: 1888599
uccugagucuccuagggaa

SEQ ID NO: 2544339 - RNA, 19 nt, Artificial Sequence
  Description of Artificial Sequence: Synthetic oligonucleotide
  Antisense strand to SEQ ID NO: 2544338
uucccuaggagacucagga

SEQ ID NO: 2544340 - RNA, 19 nt, Artificial Sequence
  Description of Artificial Sequence: Synthetic oligonucleotide
  Sense strand starting at position 2910 of SEQ ID NO: 1888599
cugggauguucccauugga

SEQ ID NO: 2544341 - RNA, 19 nt, Artificial Sequence
  Description of Artificial Sequence: Synthetic oligonucleotide
  Antisense strand to SEQ ID NO: 2544340
uccaaugggaacaucccag

SEQ ID NO: 2544342 - RNA, 19 nt, Artificial Sequence
  Description of Artificial Sequence: Synthetic oligonucleotide
  Sense strand starting at position 3527 of SEQ ID NO: 1888599
ucaggagucucacagucaa

SEQ ID NO: 2544343 - RNA, 19 nt, Artificial Sequence
  Description of Artificial Sequence: Synthetic oligonucleotide
  Antisense strand to SEQ ID NO: 2544342
uugacugugagacuccuga

SEQ ID NO: 2544344 - RNA, 19 nt, Artificial Sequence
  Description of Artificial Sequence: Synthetic oligonucleotide
  Sense strand starting at position 3093 of SEQ ID NO: 1888599
guguucacgcauuguccau

SEQ ID NO: 2544345 - RNA, 19 nt, Artificial Sequence
  Description of Artificial Sequence: Synthetic oligonucleotide
  Antisense strand to SEQ ID NO: 2544344
auggacaaugcgugaacac

SEQ ID NO: 2544346 - RNA, 19 nt, Artificial Sequence
  Description of Artificial Sequence: Synthetic oligonucleotide
  Sense strand starting at position 1902 of SEQ ID NO: 1888599
gccuaauuaucuggagaau

SEQ ID NO: 2544347 - RNA, 19 nt, Artificial Sequence
  Description of Artificial Sequence: Synthetic oligonucleotide
  Antisense strand to SEQ ID NO: 2544346
auucuccagauaauuaggc

SEQ ID NO: 2544348 - RNA, 19 nt, Artificial Sequence
  Description of Artificial Sequence: Synthetic oligonucleotide
  Sense strand starting at position 911 of SEQ ID NO: 1888599
aagaacugguguggguaua

SEQ ID NO: 2544349 - RNA, 19 nt, Artificial Sequence
  Description of Artificial Sequence: Synthetic oligonucleotide
  Antisense strand to SEQ ID NO: 2544348
uauacccacaccaguucuu

SEQ ID NO: 2544350 - RNA, 19 nt, Artificial Sequence
  Description of Artificial Sequence: Synthetic oligonucleotide
  Sense strand starting at position 1584 of SEQ ID NO: 1888599
gccaaagggucuuggcaga

SEQ ID NO: 2544351 - RNA, 19 nt, Artificial Sequence
  Description of Artificial Sequence: Synthetic oligonucleotide
  Antisense strand to SEQ ID NO: 2544350
ucugccaagacccuuuggc

SEQ ID NO: 2544352 - RNA, 19 nt, Artificial Sequence
  Description of Artificial Sequence: Synthetic oligonucleotide
  Sense strand starting at position 3216 of SEQ ID NO: 1888599
cgaccugguuugugagcaa

SEQ ID NO: 2544353 - RNA, 19 nt, Artificial Sequence
  Description of Artificial Sequence: Synthetic oligonucleotide
  Antisense strand to SEQ ID NO: 2544352
uugcucacaaaccaggucg

SEQ ID NO: 2544354 - RNA, 19 nt, Artificial Sequence
  Description of Artificial Sequence: Synthetic oligonucleotide
  Sense strand starting at position 952 of SEQ ID NO: 1888600
aggagagcucaacagcauu

SEQ ID NO: 2544355 - RNA, 19 nt, Artificial Sequence
  Description of Artificial Sequence: Synthetic oligonucleotide
  Antisense strand to SEQ ID NO: 2544354
aaugcuguugagcucuccu

SEQ ID NO: 2544356 - RNA, 19 nt, Artificial Sequence
  Description of Artificial Sequence: Synthetic oligonucleotide
  Sense strand starting at position 3887 of SEQ ID NO: 1888600
cagagacuaguuuagguuu

SEQ ID NO: 2544357 - RNA, 19 nt, Artificial Sequence
  Description of Artificial Sequence: Synthetic oligonucleotide
  Antisense strand to SEQ ID NO: 2544356
aaaccuaaacuagucucug

SEQ ID NO: 2544358 - RNA, 19 nt, Artificial Sequence
  Description of Artificial Sequence: Synthetic oligonucleotide
  Sense strand starting at position 2717 of SEQ ID NO: 1888600
gcacccuuucuggaacaca

SEQ ID NO: 2544359 - RNA, 19 nt, Artificial Sequence
  Description of Artificial Sequence: Synthetic oligonucleotide
  Antisense strand to SEQ ID NO: 2544358
uguguuccagaaagggugc

SEQ ID NO: 2544360 - RNA, 19 nt, Artificial Sequence
  Description of Artificial Sequence: Synthetic oligonucleotide
  Sense strand starting at position 3893 of SEQ ID NO: 1888600
cuaguuuagguuuaaucaa

SEQ ID NO: 2544361 - RNA, 19 nt, Artificial Sequence
  Description of Artificial Sequence: Synthetic oligonucleotide
  Antisense strand to SEQ ID NO: 2544360
uugauuaaaccuaaacuag

SEQ ID NO: 2544362 - RNA, 19 nt, Artificial Sequence
  Description of Artificial Sequence: Synthetic oligonucleotide
  Sense strand starting at position 960 of SEQ ID NO: 1888600
ucaacagcauuccugagaa

SEQ ID NO: 2544363 - RNA, 19 nt, Artificial Sequence
  Description of Artificial Sequence: Synthetic oligonucleotide
  Antisense strand to SEQ ID NO: 2544362
uucucaggaaugcuguuga

SEQ ID NO: 2544364 - RNA, 19 nt, Artificial Sequence
  Description of Artificial Sequence: Synthetic oligonucleotide
  Sense strand starting at position 3787 of SEQ ID NO: 1888600
cucccaagauucccggaaa

SEQ ID NO: 2544365 - RNA, 19 nt, Artificial Sequence
  Description of Artificial Sequence: Synthetic oligonucleotide
  Antisense strand to SEQ ID NO: 2544364
uuuccgggaaucuugggag

SEQ ID NO: 2544366 - RNA, 19 nt, Artificial Sequence
  Description of Artificial Sequence: Synthetic oligonucleotide
  Sense strand starting at position 3544 of SEQ ID NO: 1888600
gaggguuaaggaugcaacu

SEQ ID NO: 2544367 - RNA, 19 nt, Artificial Sequence
  Description of Artificial Sequence: Synthetic oligonucleotide
  Antisense strand to SEQ ID NO: 2544366
aguugcauccuuaacccuc

SEQ ID NO: 2544368 - RNA, 19 nt, Artificial Sequence
  Description of Artificial Sequence: Synthetic oligonucleotide
  Sense strand starting at position 3890 of SEQ ID NO: 1888600
agacuaguuuagguuuaau

SEQ ID NO: 2544369 - RNA, 19 nt, Artificial Sequence
  Description of Artificial Sequence: Synthetic oligonucleotide
  Antisense strand to SEQ ID NO: 2544368
auuaaaccuaaacuagucu

SEQ ID NO: 2544370 - RNA, 19 nt, Artificial Sequence
  Description of Artificial Sequence: Synthetic oligonucleotide
  Sense strand starting at position 584 of SEQ ID NO: 1888600
uguuucccuccucagauau

SEQ ID NO: 2544371 - RNA, 19 nt, Artificial Sequence
  Description of Artificial Sequence: Synthetic oligonucleotide
  Antisense strand to SEQ ID NO: 2544370
auaucugaggagggaaaca

SEQ ID NO: 2544372 - RNA, 19 nt, Artificial Sequence
  Description of Artificial Sequence: Synthetic oligonucleotide
  Sense strand starting at position 124 of SEQ ID NO: 1888600
gcaccacaucgaugacaga

SEQ ID NO: 2544373 - RNA, 19 nt, Artificial Sequence
  Description of Artificial Sequence: Synthetic oligonucleotide
  Antisense strand to SEQ ID NO: 2544372
ucugucaucgauguggugc

SEQ ID NO: 2544374 - RNA, 19 nt, Artificial Sequence
  Description of Artificial Sequence: Synthetic oligonucleotide
  Sense strand starting at position 1026 of SEQ ID NO: 1888600
ggugcaugaucaucugaaa

SEQ ID NO: 2544375 - RNA, 19 nt, Artificial Sequence
  Description of Artificial Sequence: Synthetic oligonucleotide
  Antisense strand to SEQ ID NO: 2544374
uuucagaugaucaugcacc

SEQ ID NO: 2544376 - RNA, 19 nt, Artificial Sequence
  Description of Artificial Sequence: Synthetic oligonucleotide
  Sense strand starting at position 3159 of SEQ ID NO: 1888600
guagguuccuacuugagag

SEQ ID NO: 2544377 - RNA, 19 nt, Artificial Sequence
  Description of Artificial Sequence: Synthetic oligonucleotide
  Antisense strand to SEQ ID NO: 2544376
cucucaaguaggaaccuac

SEQ ID NO: 2544378 - RNA, 19 nt, Artificial Sequence
  Description of Artificial Sequence: Synthetic oligonucleotide
  Sense strand starting at position 3460 of SEQ ID NO: 1888600
agccaugacugguccagau

SEQ ID NO: 2544379 - RNA, 19 nt, Artificial Sequence
  Description of Artificial Sequence: Synthetic oligonucleotide
  Antisense strand to SEQ ID NO: 2544378
aucuggaccagucauggcu

SEQ ID NO: 2544380 - RNA, 19 nt, Artificial Sequence
  Description of Artificial Sequence: Synthetic oligonucleotide
  Sense strand starting at position 3733 of SEQ ID NO: 1888600
cgugcauaccaguaaagau

SEQ ID NO: 2544381 - RNA, 19 nt, Artificial Sequence
  Description of Artificial Sequence: Synthetic oligonucleotide
  Antisense strand to SEQ ID NO: 2544380
aucuuuacugguaugcacg

SEQ ID NO: 2544382 - RNA, 19 nt, Artificial Sequence
  Description of Artificial Sequence: Synthetic oligonucleotide
  Sense strand starting at position 3933 of SEQ ID NO: 1888600
ggccaucuacuccgaggaa

SEQ ID NO: 2544383 - RNA, 19 nt, Artificial Sequence
  Description of Artificial Sequence: Synthetic oligonucleotide
  Antisense strand to SEQ ID NO: 2544382
uuccucggaguagauggcc

SEQ ID NO: 2544384 - RNA, 19 nt, Artificial Sequence
  Description of Artificial Sequence: Synthetic oligonucleotide
  Sense strand starting at position 1319 of SEQ ID NO: 1888600
ccaaaucucucuuuggguu

SEQ ID NO: 2544385 - RNA, 19 nt, Artificial Sequence
  Description of Artificial Sequence: Synthetic oligonucleotide
  Antisense strand to SEQ ID NO: 2544384
aacccaaagagagauuugg

SEQ ID NO: 2544386 - RNA, 19 nt, Artificial Sequence
  Description of Artificial Sequence: Synthetic oligonucleotide
  Sense strand starting at position 2976 of SEQ ID NO: 1888600
uucuguucccgauggagga

SEQ ID NO: 2544387 - RNA, 19 nt, Artificial Sequence
  Description of Artificial Sequence: Synthetic oligonucleotide
  Antisense strand to SEQ ID NO: 2544386
uccuccaucgggaacagaa

SEQ ID NO: 2544388 - RNA, 19 nt, Artificial Sequence
  Description of Artificial Sequence: Synthetic oligonucleotide
  Sense strand starting at position 604 of SEQ ID NO: 1888600
ucuguccuguccucaaaca

SEQ ID NO: 2544389 - RNA, 19 nt, Artificial Sequence
  Description of Artificial Sequence: Synthetic oligonucleotide
  Antisense strand to SEQ ID NO: 2544388
uguuugaggacaggacaga

SEQ ID NO: 2544390 - RNA, 19 nt, Artificial Sequence
  Description of Artificial Sequence: Synthetic oligonucleotide
  Sense strand starting at position 583 of SEQ ID NO: 1888600
guguuucccuccucagaua

SEQ ID NO: 2544391 - RNA, 19 nt, Artificial Sequence
  Description of Artificial Sequence: Synthetic oligonucleotide
  Antisense strand to SEQ ID NO: 2544390
uaucugaggagggaaacac

SEQ ID NO: 2544392 - RNA, 19 nt, Artificial Sequence
  Description of Artificial Sequence: Synthetic oligonucleotide
  Sense strand starting at position 884 of SEQ ID NO: 1888600
uugucaaagucauccugca

SEQ ID NO: 2544393 - RNA, 19 nt, Artificial Sequence
  Description of Artificial Sequence: Synthetic oligonucleotide
  Antisense strand to SEQ ID NO: 2544392
ugcaggaugacuuugacaa

SEQ ID NO: 2544394 - RNA, 19 nt, Artificial Sequence
  Description of Artificial Sequence: Synthetic oligonucleotide
  Sense strand starting at position 1140 of SEQ ID NO: 1888600
gcgcuagaucagggaugca

SEQ ID NO: 2544395 - RNA, 19 nt, Artificial Sequence
  Description of Artificial Sequence: Synthetic oligonucleotide
  Antisense strand to SEQ ID NO: 2544394
ugcaucccugaucuagcgc

SEQ ID NO: 2544396 - RNA, 19 nt, Artificial Sequence
  Description of Artificial Sequence: Synthetic oligonucleotide
  Sense strand starting at position 321 of SEQ ID NO: 1888600
gguggcuuccugugacacu

SEQ ID NO: 2544397 - RNA, 19 nt, Artificial Sequence
  Description of Artificial Sequence: Synthetic oligonucleotide
  Antisense strand to SEQ ID NO: 2544396
agugucacaggaagccacc

SEQ ID NO: 2544398 - RNA, 19 nt, Artificial Sequence
  Description of Artificial Sequence: Synthetic oligonucleotide
  Sense strand starting at position 3281 of SEQ ID NO: 1888600
caagaacagugucacagaa

SEQ ID NO: 2544399 - RNA, 19 nt, Artificial Sequence
  Description of Artificial Sequence: Synthetic oligonucleotide
  Antisense strand to SEQ ID NO: 2544398
uucugugacacuguucuug

SEQ ID NO: 2544400 - RNA, 19 nt, Artificial Sequence
  Description of Artificial Sequence: Synthetic oligonucleotide
  Sense strand starting at position 594 of SEQ ID NO: 1888600
cucagauauuucuguccug

SEQ ID NO: 2544401 - RNA, 19 nt, Artificial Sequence
  Description of Artificial Sequence: Synthetic oligonucleotide
  Antisense strand to SEQ ID NO: 2544400
caggacagaaauaucugag

SEQ ID NO: 2544402 - RNA, 19 nt, Artificial Sequence
  Description of Artificial Sequence: Synthetic oligonucleotide
  Sense strand starting at position 3156 of SEQ ID NO: 1888600
caaguagguuccuacuuga

SEQ ID NO: 2544403 - RNA, 19 nt, Artificial Sequence
  Description of Artificial Sequence: Synthetic oligonucleotide
  Antisense strand to SEQ ID NO: 2544402
ucaaguaggaaccuacuug

SEQ ID NO: 2544404 - RNA, 19 nt, Artificial Sequence
  Description of Artificial Sequence: Synthetic oligonucleotide
  Sense strand starting at position 3889 of SEQ ID NO: 1888600
gagacuaguuuagguuuaa

SEQ ID NO: 2544405 - RNA, 19 nt, Artificial Sequence
  Description of Artificial Sequence: Synthetic oligonucleotide
  Antisense strand to SEQ ID NO: 2544404
uuaaaccuaaacuagucuc

SEQ ID NO: 2544406 - RNA, 19 nt, Artificial Sequence
  Description of Artificial Sequence: Synthetic oligonucleotide
  Sense strand starting at position 515 of SEQ ID NO: 1888600
cucugugguuuccauagca

SEQ ID NO: 2544407 - RNA, 19 nt, Artificial Sequence
  Description of Artificial Sequence: Synthetic oligonucleotide
  Antisense strand to SEQ ID NO: 2544406
ugcuauggaaaccacagag

SEQ ID NO: 2544408 - RNA, 19 nt, Artificial Sequence
  Description of Artificial Sequence: Synthetic oligonucleotide
  Sense strand starting at position 322 of SEQ ID NO: 1888600
guggcuuccugugacacuu

SEQ ID NO: 2544409 - RNA, 19 nt, Artificial Sequence
  Description of Artificial Sequence: Synthetic oligonucleotide
  Antisense strand to SEQ ID NO: 2544408
aagugucacaggaagccac

SEQ ID NO: 2544410 - RNA, 19 nt, Artificial Sequence
  Description of Artificial Sequence: Synthetic oligonucleotide
  Sense strand starting at position 3730 of SEQ ID NO: 1888600
augcgugcauaccaguaaa

SEQ ID NO: 2544411 - RNA, 19 nt, Artificial Sequence
  Description of Artificial Sequence: Synthetic oligonucleotide
  Antisense strand to SEQ ID NO: 2544410
uuuacugguaugcacgcau

SEQ ID NO: 2544412 - RNA, 19 nt, Artificial Sequence
  Description of Artificial Sequence: Synthetic oligonucleotide
  Sense strand starting at position 2973 of SEQ ID NO: 1888600
uaguucuguucccgaugga

SEQ ID NO: 2544413 - RNA, 19 nt, Artificial Sequence
  Description of Artificial Sequence: Synthetic oligonucleotide
  Antisense strand to SEQ ID NO: 2544412
uccaucgggaacagaacua

SEQ ID NO: 2544414 - RNA, 19 nt, Artificial Sequence
  Description of Artificial Sequence: Synthetic oligonucleotide
  Sense strand starting at position 547 of SEQ ID NO: 1888600
gcaucugggucaugcauca

SEQ ID NO: 2544415 - RNA, 19 nt, Artificial Sequence
  Description of Artificial Sequence: Synthetic oligonucleotide
  Antisense strand to SEQ ID NO: 2544414
ugaugcaugacccagaugc

SEQ ID NO: 2544416 - RNA, 19 nt, Artificial Sequence
  Description of Artificial Sequence: Synthetic oligonucleotide
  Sense strand starting at position 2129 of SEQ ID NO: 1888601
ucaaguuuccauggagaag

SEQ ID NO: 2544417 - RNA, 19 nt, Artificial Sequence
  Description of Artificial Sequence: Synthetic oligonucleotide
  Antisense strand to SEQ ID NO: 2544416
cuucuccauggaaacuuga

SEQ ID NO: 2544418 - RNA, 19 nt, Artificial Sequence
  Description of Artificial Sequence: Synthetic oligonucleotide
  Sense strand starting at position 1740 of SEQ ID NO: 1888601
agaguuuagggaugauucu

SEQ ID NO: 2544419 - RNA, 19 nt, Artificial Sequence
  Description of Artificial Sequence: Synthetic oligonucleotide
  Antisense strand to SEQ ID NO: 2544418
agaaucaucccuaaacucu

SEQ ID NO: 2544420 - RNA, 19 nt, Artificial Sequence
  Description of Artificial Sequence: Synthetic oligonucleotide
  Sense strand starting at position 684 of SEQ ID NO: 1888601
caagcuguucuggaggaau

SEQ ID NO: 2544421 - RNA, 19 nt, Artificial Sequence
  Description of Artificial Sequence: Synthetic oligonucleotide
  Antisense strand to SEQ ID NO: 2544420
auuccuccagaacagcuug

SEQ ID NO: 2544422 - RNA, 19 nt, Artificial Sequence
  Description of Artificial Sequence: Synthetic oligonucleotide
  Sense strand starting at position 1590 of SEQ ID NO: 1888601
aaagacugggcguguauuu

SEQ ID NO: 2544423 - RNA, 19 nt, Artificial Sequence
  Description of Artificial Sequence: Synthetic oligonucleotide
  Antisense strand to SEQ ID NO: 2544422
aaauacacgcccagucuuu

SEQ ID NO: 2544424 - RNA, 19 nt, Artificial Sequence
  Description of Artificial Sequence: Synthetic oligonucleotide
  Sense strand starting at position 3713 of SEQ ID NO: 1888601
uuuggaucugugggagaua

SEQ ID NO: 2544425 - RNA, 19 nt, Artificial Sequence
  Description of Artificial Sequence: Synthetic oligonucleotide
  Antisense strand to SEQ ID NO: 2544424
uaucucccacagauccaaa

SEQ ID NO: 2544426 - RNA, 19 nt, Artificial Sequence
  Description of Artificial Sequence: Synthetic oligonucleotide
  Sense strand starting at position 1163 of SEQ ID NO: 1888601
gguagagguggucauccaa

SEQ ID NO: 2544427 - RNA, 19 nt, Artificial Sequence
  Description of Artificial Sequence: Synthetic oligonucleotide
  Antisense strand to SEQ ID NO: 2544426
uuggaugaccaccucuacc

SEQ ID NO: 2544428 - RNA, 19 nt, Artificial Sequence
  Description of Artificial Sequence: Synthetic oligonucleotide
  Sense strand starting at position 687 of SEQ ID NO: 1888601
gcuguucuggaggaauauu

SEQ ID NO: 2544429 - RNA, 19 nt, Artificial Sequence
  Description of Artificial Sequence: Synthetic oligonucleotide
  Antisense strand to SEQ ID NO: 2544428
aauauuccuccagaacagc

SEQ ID NO: 2544430 - RNA, 19 nt, Artificial Sequence
  Description of Artificial Sequence: Synthetic oligonucleotide
  Sense strand starting at position 3873 of SEQ ID NO: 1888601
aggagcugugcuuagacaa

SEQ ID NO: 2544431 - RNA, 19 nt, Artificial Sequence
  Description of Artificial Sequence: Synthetic oligonucleotide
  Antisense strand to SEQ ID NO: 2544430
uugucuaagcacagcuccu

SEQ ID NO: 2544432 - RNA, 19 nt, Artificial Sequence
  Description of Artificial Sequence: Synthetic oligonucleotide
  Sense strand starting at position 1567 of SEQ ID NO: 1888601
ggccuagaaugaucuucca

SEQ ID NO: 2544433 - RNA, 19 nt, Artificial Sequence
  Description of Artificial Sequence: Synthetic oligonucleotide
  Antisense strand to SEQ ID NO: 2544432
uggaagaucauucuaggcc

SEQ ID NO: 2544434 - RNA, 19 nt, Artificial Sequence
  Description of Artificial Sequence: Synthetic oligonucleotide
  Sense strand starting at position 2208 of SEQ ID NO: 1888601
gugggaggugaggguuaua

SEQ ID NO: 2544435 - RNA, 19 nt, Artificial Sequence
  Description of Artificial Sequence: Synthetic oligonucleotide
  Antisense strand to SEQ ID NO: 2544434
uauaacccucaccucccac

SEQ ID NO: 2544436 - RNA, 19 nt, Artificial Sequence
  Description of Artificial Sequence: Synthetic oligonucleotide
  Sense strand starting at position 1746 of SEQ ID NO: 1888601
uagggaugauucuccagcu

SEQ ID NO: 2544437 - RNA, 19 nt, Artificial Sequence
  Description of Artificial Sequence: Synthetic oligonucleotide
  Antisense strand to SEQ ID NO: 2544436
agcuggagaaucaucccua

SEQ ID NO: 2544438 - RNA, 19 nt, Artificial Sequence
  Description of Artificial Sequence: Synthetic oligonucleotide
  Sense strand starting at position 3643 of SEQ ID NO: 1888601
gagugaggcuuuccugaaa

SEQ ID NO: 2544439 - RNA, 19 nt, Artificial Sequence
  Description of Artificial Sequence: Synthetic oligonucleotide
  Antisense strand to SEQ ID NO: 2544438
uuucaggaaagccucacuc

SEQ ID NO: 2544440 - RNA, 19 nt, Artificial Sequence
  Description of Artificial Sequence: Synthetic oligonucleotide
  Sense strand starting at position 1237 of SEQ ID NO: 1888601
ggacgguuggaauguuaga

SEQ ID NO: 2544441 - RNA, 19 nt, Artificial Sequence
  Description of Artificial Sequence: Synthetic oligonucleotide
  Antisense strand to SEQ ID NO: 2544440
ucuaacauuccaaccgucc

SEQ ID NO: 2544442 - RNA, 19 nt, Artificial Sequence
  Description of Artificial Sequence: Synthetic oligonucleotide
  Sense strand starting at position 686 of SEQ ID NO: 1888601
agcuguucuggaggaauau

SEQ ID NO: 2544443 - RNA, 19 nt, Artificial Sequence
  Description of Artificial Sequence: Synthetic oligonucleotide
  Antisense strand to SEQ ID NO: 2544442
auauuccuccagaacagcu

SEQ ID NO: 2544444 - RNA, 19 nt, Artificial Sequence
  Description of Artificial Sequence: Synthetic oligonucleotide
  Sense strand starting at position 3551 of SEQ ID NO: 1888601
gccuccuggaugggauauu

SEQ ID NO: 2544445 - RNA, 19 nt, Artificial Sequence
  Description of Artificial Sequence: Synthetic oligonucleotide
  Antisense strand to SEQ ID NO: 2544444
aauaucccauccaggaggc

SEQ ID NO: 2544446 - RNA, 19 nt, Artificial Sequence
  Description of Artificial Sequence: Synthetic oligonucleotide
  Sense strand starting at position 2963 of SEQ ID NO: 1888601
agcugacucacgcagacau

SEQ ID NO: 2544447 - RNA, 19 nt, Artificial Sequence
  Description of Artificial Sequence: Synthetic oligonucleotide
  Antisense strand to SEQ ID NO: 2544446
augucugcgugagucagcu

SEQ ID NO: 2544448 - RNA, 19 nt, Artificial Sequence
  Description of Artificial Sequence: Synthetic oligonucleotide
  Sense strand starting at position 3775 of SEQ ID NO: 1888601
ccacuuugcggagaagcau

SEQ ID NO: 2544449 - RNA, 19 nt, Artificial Sequence
  Description of Artificial Sequence: Synthetic oligonucleotide
  Antisense strand to SEQ ID NO: 2544448
augcuucuccgcaaagugg

SEQ ID NO: 2544450 - RNA, 19 nt, Artificial Sequence
  Description of Artificial Sequence: Synthetic oligonucleotide
  Sense strand starting at position 3813 of SEQ ID NO: 1888601
cgcugaugacuaggaagua

SEQ ID NO: 2544451 - RNA, 19 nt, Artificial Sequence
  Description of Artificial Sequence: Synthetic oligonucleotide
  Antisense strand to SEQ ID NO: 2544450
uacuuccuagucaucagcg

SEQ ID NO: 2544452 - RNA, 19 nt, Artificial Sequence
  Description of Artificial Sequence: Synthetic oligonucleotide
  Sense strand starting at position 2857 of SEQ ID NO: 1888601
agaguucccugcuccaaag

SEQ ID NO: 2544453 - RNA, 19 nt, Artificial Sequence
  Description of Artificial Sequence: Synthetic oligonucleotide
  Antisense strand to SEQ ID NO: 2544452
cuuuggagcagggaacucu

SEQ ID NO: 2544454 - RNA, 19 nt, Artificial Sequence
  Description of Artificial Sequence: Synthetic oligonucleotide
  Sense strand starting at position 1813 of SEQ ID NO: 1888601
ugugccuaaucaguggaaa

SEQ ID NO: 2544455 - RNA, 19 nt, Artificial Sequence
  Description of Artificial Sequence: Synthetic oligonucleotide
  Antisense strand to SEQ ID NO: 2544454
uuuccacugauuaggcaca

SEQ ID NO: 2544456 - RNA, 19 nt, Artificial Sequence
  Description of Artificial Sequence: Synthetic oligonucleotide
  Sense strand starting at position 1282 of SEQ ID NO: 1888601
ggcacaccucucuguaaga

SEQ ID NO: 2544457 - RNA, 19 nt, Artificial Sequence
  Description of Artificial Sequence: Synthetic oligonucleotide
  Antisense strand to SEQ ID NO: 2544456
ucuuacagagaggugugcc

SEQ ID NO: 2544458 - RNA, 19 nt, Artificial Sequence
  Description of Artificial Sequence: Synthetic oligonucleotide
  Sense strand starting at position 1814 of SEQ ID NO: 1888601
gugccuaaucaguggaaac

SEQ ID NO: 2544459 - RNA, 19 nt, Artificial Sequence
  Description of Artificial Sequence: Synthetic oligonucleotide
  Antisense strand to SEQ ID NO: 2544458
guuuccacugauuaggcac

SEQ ID NO: 2544460 - RNA, 19 nt, Artificial Sequence
  Description of Artificial Sequence: Synthetic oligonucleotide
  Sense strand starting at position 1148 of SEQ ID NO: 1888601
gugucaggucuugauggua

SEQ ID NO: 2544461 - RNA, 19 nt, Artificial Sequence
  Description of Artificial Sequence: Synthetic oligonucleotide
  Antisense strand to SEQ ID NO: 2544460
uaccaucaagaccugacac

SEQ ID NO: 2544462 - RNA, 19 nt, Artificial Sequence
  Description of Artificial Sequence: Synthetic oligonucleotide
  Sense strand starting at position 1406 of SEQ ID NO: 1888601
gucaacuggucaguccaua

SEQ ID NO: 2544463 - RNA, 19 nt, Artificial Sequence
  Description of Artificial Sequence: Synthetic oligonucleotide
  Antisense strand to SEQ ID NO: 2544462
uauggacugaccaguugac

SEQ ID NO: 2544464 - RNA, 19 nt, Artificial Sequence
  Description of Artificial Sequence: Synthetic oligonucleotide
  Sense strand starting at position 2854 of SEQ ID NO: 1888601
ucuagaguucccugcucca

SEQ ID NO: 2544465 - RNA, 19 nt, Artificial Sequence
  Description of Artificial Sequence: Synthetic oligonucleotide
  Antisense strand to SEQ ID NO: 2544464
uggagcagggaacucuaga

SEQ ID NO: 2544466 - RNA, 19 nt, Artificial Sequence
  Description of Artificial Sequence: Synthetic oligonucleotide
  Sense strand starting at position 3549 of SEQ ID NO: 1888601
gcgccuccuggaugggaua

SEQ ID NO: 2544467 - RNA, 19 nt, Artificial Sequence
  Description of Artificial Sequence: Synthetic oligonucleotide
  Antisense strand to SEQ ID NO: 2544466
uaucccauccaggaggcgc

SEQ ID NO: 2544468 - RNA, 19 nt, Artificial Sequence
  Description of Artificial Sequence: Synthetic oligonucleotide
  Sense strand starting at position 3762 of SEQ ID NO: 1888601
ucgugauugugauccacuu

SEQ ID NO: 2544469 - RNA, 19 nt, Artificial Sequence
  Description of Artificial Sequence: Synthetic oligonucleotide
  Antisense strand to SEQ ID NO: 2544468
aaguggaucacaaucacga

SEQ ID NO: 2544470 - RNA, 19 nt, Artificial Sequence
  Description of Artificial Sequence: Synthetic oligonucleotide
  Sense strand starting at position 3832 of SEQ ID NO: 1888601
uauugaucaccgggcuguu

SEQ ID NO: 2544471 - RNA, 19 nt, Artificial Sequence
  Description of Artificial Sequence: Synthetic oligonucleotide
  Antisense strand to SEQ ID NO: 2544470
aacagcccggugaucaaua

SEQ ID NO: 2544472 - RNA, 19 nt, Artificial Sequence
  Description of Artificial Sequence: Synthetic oligonucleotide
  Sense strand starting at position 3914 of SEQ ID NO: 1888601
gcuuuauuaucgguccaau

SEQ ID NO: 2544473 - RNA, 19 nt, Artificial Sequence
  Description of Artificial Sequence: Synthetic oligonucleotide
  Antisense strand to SEQ ID NO: 2544472
auuggaccgauaauaaagc

SEQ ID NO: 2544474 - RNA, 19 nt, Artificial Sequence
  Description of Artificial Sequence: Synthetic oligonucleotide
  Sense strand starting at position 3109 of SEQ ID NO: 1888601
ucuuuaacccgcugacagu

SEQ ID NO: 2544475 - RNA, 19 nt, Artificial Sequence
  Description of Artificial Sequence: Synthetic oligonucleotide
  Antisense strand to SEQ ID NO: 2544474
acugucagcggguuaaaga

SEQ ID NO: 2544476 - RNA, 19 nt, Artificial Sequence
  Description of Artificial Sequence: Synthetic oligonucleotide
  Sense strand starting at position 316 of SEQ ID NO: 1888601
gacaguugucucugccuca

SEQ ID NO: 2544477 - RNA, 19 nt, Artificial Sequence
  Description of Artificial Sequence: Synthetic oligonucleotide
  Antisense strand to SEQ ID NO: 2544476
ugaggcagagacaacuguc

SEQ ID NO: 2544478 - RNA, 19 nt, Artificial Sequence
  Description of Artificial Sequence: Synthetic oligonucleotide
  Sense strand starting at position 3752 of SEQ ID NO: 1888601
uuugguuucuucgugauug

SEQ ID NO: 2544479 - RNA, 19 nt, Artificial Sequence
  Description of Artificial Sequence: Synthetic oligonucleotide
  Antisense strand to SEQ ID NO: 2544478
caaucacgaagaaaccaaa

SEQ ID NO: 2544480 - RNA, 19 nt, Artificial Sequence
  Description of Artificial Sequence: Synthetic oligonucleotide
  Sense strand starting at position 3368 of SEQ ID NO: 1888601
cuccaaucucugcgaguuu

SEQ ID NO: 2544481 - RNA, 19 nt, Artificial Sequence
  Description of Artificial Sequence: Synthetic oligonucleotide
  Antisense strand to SEQ ID NO: 2544480
aaacucgcagagauuggag

SEQ ID NO: 2544482 - RNA, 19 nt, Artificial Sequence
  Description of Artificial Sequence: Synthetic oligonucleotide
  Sense strand starting at position 3714 of SEQ ID NO: 1888601
uuggaucugugggagauau

SEQ ID NO: 2544483 - RNA, 19 nt, Artificial Sequence
  Description of Artificial Sequence: Synthetic oligonucleotide
  Antisense strand to SEQ ID NO: 2544482
auaucucccacagauccaa

SEQ ID NO: 2544484 - RNA, 19 nt, Artificial Sequence
  Description of Artificial Sequence: Synthetic oligonucleotide
  Sense strand starting at position 3756 of SEQ ID NO: 1888601
guuucuucgugauugugau

SEQ ID NO: 2544485 - RNA, 19 nt, Artificial Sequence
  Description of Artificial Sequence: Synthetic oligonucleotide
  Antisense strand to SEQ ID NO: 2544484
aucacaaucacgaagaaac

SEQ ID NO: 2544486 - RNA, 19 nt, Artificial Sequence
  Description of Artificial Sequence: Synthetic oligonucleotide
  Sense strand starting at position 1737 of SEQ ID NO: 1888601
uggagaguuuagggaugau

SEQ ID NO: 2544487 - RNA, 19 nt, Artificial Sequence
  Description of Artificial Sequence: Synthetic oligonucleotide
  Antisense strand to SEQ ID NO: 2544486
aucaucccuaaacucucca

SEQ ID NO: 2544488 - RNA, 19 nt, Artificial Sequence
  Description of Artificial Sequence: Synthetic oligonucleotide
  Sense strand starting at position 3814 of SEQ ID NO: 1888601
gcugaugacuaggaaguau

SEQ ID NO: 2544489 - RNA, 19 nt, Artificial Sequence
  Description of Artificial Sequence: Synthetic oligonucleotide
  Antisense strand to SEQ ID NO: 2544488
auacuuccuagucaucagc

SEQ ID NO: 2544490 - RNA, 19 nt, Artificial Sequence
  Description of Artificial Sequence: Synthetic oligonucleotide
  Sense strand starting at position 3367 of SEQ ID NO: 1888601
gcuccaaucucugcgaguu

SEQ ID NO: 2544491 - RNA, 19 nt, Artificial Sequence
  Description of Artificial Sequence: Synthetic oligonucleotide
  Antisense strand to SEQ ID NO: 2544490
aacucgcagagauuggagc

SEQ ID NO: 2544492 - RNA, 19 nt, Artificial Sequence
  Description of Artificial Sequence: Synthetic oligonucleotide
  Sense strand starting at position 3927 of SEQ ID NO: 1888601
uccaauggcugagagcaaa

SEQ ID NO: 2544493 - RNA, 19 nt, Artificial Sequence
  Description of Artificial Sequence: Synthetic oligonucleotide
  Antisense strand to SEQ ID NO: 2544492
uuugcucucagccauugga

SEQ ID NO: 2544494 - RNA, 19 nt, Artificial Sequence
  Description of Artificial Sequence: Synthetic oligonucleotide
  Sense strand starting at position 2118 of SEQ ID NO: 1888601
ugucuagaaucucaaguuu

SEQ ID NO: 2544495 - RNA, 19 nt, Artificial Sequence
  Description of Artificial Sequence: Synthetic oligonucleotide
  Antisense strand to SEQ ID NO: 2544494
aaacuugagauucuagaca

SEQ ID NO: 2544496 - RNA, 19 nt, Artificial Sequence
  Description of Artificial Sequence: Synthetic oligonucleotide
  Sense strand starting at position 3813 of SEQ ID NO: 1888602
aggugcagucgugugauca

SEQ ID NO: 2544497 - RNA, 19 nt, Artificial Sequence
  Description of Artificial Sequence: Synthetic oligonucleotide
  Antisense strand to SEQ ID NO: 2544496
ugaucacacgacugcaccu

SEQ ID NO: 2544498 - RNA, 19 nt, Artificial Sequence
  Description of Artificial Sequence: Synthetic oligonucleotide
  Sense strand starting at position 186 of SEQ ID NO: 1888602
acucaagaugcuggaugaa

SEQ ID NO: 2544499 - RNA, 19 nt, Artificial Sequence
  Description of Artificial Sequence: Synthetic oligonucleotide
  Antisense strand to SEQ ID NO: 2544498
uucauccagcaucuugagu

SEQ ID NO: 2544500 - RNA, 19 nt, Artificial Sequence
  Description of Artificial Sequence: Synthetic oligonucleotide
  Sense strand starting at position 3485 of SEQ ID NO: 1888602
gugguccuacuagaaacau

SEQ ID NO: 2544501 - RNA, 19 nt, Artificial Sequence
  Description of Artificial Sequence: Synthetic oligonucleotide
  Antisense strand to SEQ ID NO: 2544500
auguuucuaguaggaccac

SEQ ID NO: 2544502 - RNA, 19 nt, Artificial Sequence
  Description of Artificial Sequence: Synthetic oligonucleotide
  Sense strand starting at position 730 of SEQ ID NO: 1888602
gcaguacauagucagaaag

SEQ ID NO: 2544503 - RNA, 19 nt, Artificial Sequence
  Description of Artificial Sequence: Synthetic oligonucleotide
  Antisense strand to SEQ ID NO: 2544502
cuuucugacuauguacugc

SEQ ID NO: 2544504 - RNA, 19 nt, Artificial Sequence
  Description of Artificial Sequence: Synthetic oligonucleotide
  Sense strand starting at position 248 of SEQ ID NO: 1888602
gcagcauuuggccaacagu

SEQ ID NO: 2544505 - RNA, 19 nt, Artificial Sequence
  Description of Artificial Sequence: Synthetic oligonucleotide
  Antisense strand to SEQ ID NO: 2544504
acuguuggccaaaugcugc

SEQ ID NO: 2544506 - RNA, 19 nt, Artificial Sequence
  Description of Artificial Sequence: Synthetic oligonucleotide
  Sense strand starting at position 1307 of SEQ ID NO: 1888602
gcugaugaugcagaaccau

SEQ ID NO: 2544507 - RNA, 19 nt, Artificial Sequence
  Description of Artificial Sequence: Synthetic oligonucleotide
  Antisense strand to SEQ ID NO: 2544506
augguucugcaucaucagc

SEQ ID NO: 2544508 - RNA, 19 nt, Artificial Sequence
  Description of Artificial Sequence: Synthetic oligonucleotide
  Sense strand starting at position 654 of SEQ ID NO: 1888602
ugaaguucucucuggagaa

SEQ ID NO: 2544509 - RNA, 19 nt, Artificial Sequence
  Description of Artificial Sequence: Synthetic oligonucleotide
  Antisense strand to SEQ ID NO: 2544508
uucuccagagagaacuuca

SEQ ID NO: 2544510 - RNA, 19 nt, Artificial Sequence
  Description of Artificial Sequence: Synthetic oligonucleotide
  Sense strand starting at position 426 of SEQ ID NO: 1888602
agaagacucuccucuaagu

SEQ ID NO: 2544511 - RNA, 19 nt, Artificial Sequence
  Description of Artificial Sequence: Synthetic oligonucleotide
  Antisense strand to SEQ ID NO: 2544510
acuuagaggagagucuucu

SEQ ID NO: 2544512 - RNA, 19 nt, Artificial Sequence
  Description of Artificial Sequence: Synthetic oligonucleotide
  Sense strand starting at position 886 of SEQ ID NO: 1888602
agagcaaacuggguuuaca

SEQ ID NO: 2544513 - RNA, 19 nt, Artificial Sequence
  Description of Artificial Sequence: Synthetic oligonucleotide
  Antisense strand to SEQ ID NO: 2544512
uguaaacccaguuugcucu

SEQ ID NO: 2544514 - RNA, 19 nt, Artificial Sequence
  Description of Artificial Sequence: Synthetic oligonucleotide
  Sense strand starting at position 856 of SEQ ID NO: 1888602
gaaacaucugcagggcaaa

SEQ ID NO: 2544515 - RNA, 19 nt, Artificial Sequence
  Description of Artificial Sequence: Synthetic oligonucleotide
  Antisense strand to SEQ ID NO: 2544514
uuugcccugcagauguuuc

SEQ ID NO: 2544516 - RNA, 19 nt, Artificial Sequence
  Description of Artificial Sequence: Synthetic oligonucleotide
  Sense strand starting at position 729 of SEQ ID NO: 1888602
agcaguacauagucagaaa

SEQ ID NO: 2544517 - RNA, 19 nt, Artificial Sequence
  Description of Artificial Sequence: Synthetic oligonucleotide
  Antisense strand to SEQ ID NO: 2544516
uuucugacuauguacugcu

SEQ ID NO: 2544518 - RNA, 19 nt, Artificial Sequence
  Description of Artificial Sequence: Synthetic oligonucleotide
  Sense strand starting at position 3092 of SEQ ID NO: 1888602
ucaagagucccaggucaca

SEQ ID NO: 2544519 - RNA, 19 nt, Artificial Sequence
  Description of Artificial Sequence: Synthetic oligonucleotide
  Antisense strand to SEQ ID NO: 2544518
ugugaccugggacucuuga

SEQ ID NO: 2544520 - RNA, 19 nt, Artificial Sequence
  Description of Artificial Sequence: Synthetic oligonucleotide
  Sense strand starting at position 1456 of SEQ ID NO: 1888602
gucuuuccugcacaugaga

SEQ ID NO: 2544521 - RNA, 19 nt, Artificial Sequence
  Description of Artificial Sequence: Synthetic oligonucleotide
  Antisense strand to SEQ ID NO: 2544520
ucucaugugcaggaaagac

SEQ ID NO: 2544522 - RNA, 19 nt, Artificial Sequence
  Description of Artificial Sequence: Synthetic oligonucleotide
  Sense strand starting at position 1433 of SEQ ID NO: 1888602
gucccuuuacucuggagga

SEQ ID NO: 2544523 - RNA, 19 nt, Artificial Sequence
  Description of Artificial Sequence: Synthetic oligonucleotide
  Antisense strand to SEQ ID NO: 2544522
uccuccagaguaaagggac

SEQ ID NO: 2544524 - RNA, 19 nt, Artificial Sequence
  Description of Artificial Sequence: Synthetic oligonucleotide
  Sense strand starting at position 1454 of SEQ ID NO: 1888602
uggucuuuccugcacauga

SEQ ID NO: 2544525 - RNA, 19 nt, Artificial Sequence
  Description of Artificial Sequence: Synthetic oligonucleotide
  Antisense strand to SEQ ID NO: 2544524
ucaugugcaggaaagacca

SEQ ID NO: 2544526 - RNA, 19 nt, Artificial Sequence
  Description of Artificial Sequence: Synthetic oligonucleotide
  Sense strand starting at position 2438 of SEQ ID NO: 1888602
guuggugucccagggagaa

SEQ ID NO: 2544527 - RNA, 19 nt, Artificial Sequence
  Description of Artificial Sequence: Synthetic oligonucleotide
  Antisense strand to SEQ ID NO: 2544526
uucucccugggacaccaac

SEQ ID NO: 2544528 - RNA, 19 nt, Artificial Sequence
  Description of Artificial Sequence: Synthetic oligonucleotide
  Sense strand starting at position 1683 of SEQ ID NO: 1888602
aguucuggccacugauaca

SEQ ID NO: 2544529 - RNA, 19 nt, Artificial Sequence
  Description of Artificial Sequence: Synthetic oligonucleotide
  Antisense strand to SEQ ID NO: 2544528
uguaucaguggccagaacu

SEQ ID NO: 2544530 - RNA, 19 nt, Artificial Sequence
  Description of Artificial Sequence: Synthetic oligonucleotide
  Sense strand starting at position 3412 of SEQ ID NO: 1888602
gcaagaggucccugggcaa

SEQ ID NO: 2544531 - RNA, 19 nt, Artificial Sequence
  Description of Artificial Sequence: Synthetic oligonucleotide
  Antisense strand to SEQ ID NO: 2544530
uugcccagggaccucuugc

SEQ ID NO: 2544532 - RNA, 19 nt, Artificial Sequence
  Description of Artificial Sequence: Synthetic oligonucleotide
  Sense strand starting at position 1481 of SEQ ID NO: 1888602
ggcugcagucacuggagaa

SEQ ID NO: 2544533 - RNA, 19 nt, Artificial Sequence
  Description of Artificial Sequence: Synthetic oligonucleotide
  Antisense strand to SEQ ID NO: 2544532
uucuccagugacugcagcc

SEQ ID NO: 2544534 - RNA, 19 nt, Artificial Sequence
  Description of Artificial Sequence: Synthetic oligonucleotide
  Sense strand starting at position 1482 of SEQ ID NO: 1888602
gcugcagucacuggagaag

SEQ ID NO: 2544535 - RNA, 19 nt, Artificial Sequence
  Description of Artificial Sequence: Synthetic oligonucleotide
  Antisense strand to SEQ ID NO: 2544534
cuucuccagugacugcagc

SEQ ID NO: 2544536 - RNA, 19 nt, Artificial Sequence
  Description of Artificial Sequence: Synthetic oligonucleotide
  Sense strand starting at position 2241 of SEQ ID NO: 1888602
uggauauaguccuuguccu

SEQ ID NO: 2544537 - RNA, 19 nt, Artificial Sequence
  Description of Artificial Sequence: Synthetic oligonucleotide
  Antisense strand to SEQ ID NO: 2544536
aggacaaggacuauaucca

SEQ ID NO: 2544538 - RNA, 19 nt, Artificial Sequence
  Description of Artificial Sequence: Synthetic oligonucleotide
  Sense strand starting at position 651 of SEQ ID NO: 1888602
gccugaaguucucucugga

SEQ ID NO: 2544539 - RNA, 19 nt, Artificial Sequence
  Description of Artificial Sequence: Synthetic oligonucleotide
  Antisense strand to SEQ ID NO: 2544538
uccagagagaacuucaggc

SEQ ID NO: 2544540 - RNA, 19 nt, Artificial Sequence
  Description of Artificial Sequence: Synthetic oligonucleotide
  Sense strand starting at position 2242 of SEQ ID NO: 1888602
ggauauaguccuuguccuu

SEQ ID NO: 2544541 - RNA, 19 nt, Artificial Sequence
  Description of Artificial Sequence: Synthetic oligonucleotide
  Antisense strand to SEQ ID NO: 2544540
aaggacaaggacuauaucc

SEQ ID NO: 2544542 - RNA, 19 nt, Artificial Sequence
  Description of Artificial Sequence: Synthetic oligonucleotide
  Sense strand starting at position 3755 of SEQ ID NO: 1888602
aaagaagcguuguucucau

SEQ ID NO: 2544543 - RNA, 19 nt, Artificial Sequence
  Description of Artificial Sequence: Synthetic oligonucleotide
  Antisense strand to SEQ ID NO: 2544542
augagaacaacgcuucuuu

SEQ ID NO: 2544544 - RNA, 19 nt, Artificial Sequence
  Description of Artificial Sequence: Synthetic oligonucleotide
  Sense strand starting at position 2401 of SEQ ID NO: 1888602
ccucaagguugcccgaauu

SEQ ID NO: 2544545 - RNA, 19 nt, Artificial Sequence
  Description of Artificial Sequence: Synthetic oligonucleotide
  Antisense strand to SEQ ID NO: 2544544
aauucgggcaaccuugagg

SEQ ID NO: 2544546 - RNA, 19 nt, Artificial Sequence
  Description of Artificial Sequence: Synthetic oligonucleotide
  Sense strand starting at position 732 of SEQ ID NO: 1888602
aguacauagucagaaagaa

SEQ ID NO: 2544547 - RNA, 19 nt, Artificial Sequence
  Description of Artificial Sequence: Synthetic oligonucleotide
  Antisense strand to SEQ ID NO: 2544546
uucuuucugacuauguacu

SEQ ID NO: 2544548 - RNA, 19 nt, Artificial Sequence
  Description of Artificial Sequence: Synthetic oligonucleotide
  Sense strand starting at position 2142 of SEQ ID NO: 1888602
gcagguucccuagguccua

SEQ ID NO: 2544549 - RNA, 19 nt, Artificial Sequence
  Description of Artificial Sequence: Synthetic oligonucleotide
  Antisense strand to SEQ ID NO: 2544548
uaggaccuagggaaccugc

SEQ ID NO: 2544550 - RNA, 19 nt, Artificial Sequence
  Description of Artificial Sequence: Synthetic oligonucleotide
  Sense strand starting at position 3772 of SEQ ID NO: 1888602
auggcuauuugaggaagca

SEQ ID NO: 2544551 - RNA, 19 nt, Artificial Sequence
  Description of Artificial Sequence: Synthetic oligonucleotide
  Antisense strand to SEQ ID NO: 2544550
ugcuuccucaaauagccau

SEQ ID NO: 2544552 - RNA, 19 nt, Artificial Sequence
  Description of Artificial Sequence: Synthetic oligonucleotide
  Sense strand starting at position 3465 of SEQ ID NO: 1888602
gguggucacuguguucaca

SEQ ID NO: 2544553 - RNA, 19 nt, Artificial Sequence
  Description of Artificial Sequence: Synthetic oligonucleotide
  Antisense strand to SEQ ID NO: 2544552
ugugaacacagugaccacc

SEQ ID NO: 2544554 - RNA, 19 nt, Artificial Sequence
  Description of Artificial Sequence: Synthetic oligonucleotide
  Sense strand starting at position 2117 of SEQ ID NO: 1888602
cugugugcucccuaagcca

SEQ ID NO: 2544555 - RNA, 19 nt, Artificial Sequence
  Description of Artificial Sequence: Synthetic oligonucleotide
  Antisense strand to SEQ ID NO: 2544554
uggcuuagggagcacacag

SEQ ID NO: 2544556 - RNA, 19 nt, Artificial Sequence
  Description of Artificial Sequence: Synthetic oligonucleotide
  Sense strand starting at position 319 of SEQ ID NO: 1888602
gagagcguuugcccacuga

SEQ ID NO: 2544557 - RNA, 19 nt, Artificial Sequence
  Description of Artificial Sequence: Synthetic oligonucleotide
  Antisense strand to SEQ ID NO: 2544556
ucagugggcaaacgcucuc

SEQ ID NO: 2544558 - RNA, 19 nt, Artificial Sequence
  Description of Artificial Sequence: Synthetic oligonucleotide
  Sense strand starting at position 2451 of SEQ ID NO: 1888602
ggagaaucgugccuggcuu

SEQ ID NO: 2544559 - RNA, 19 nt, Artificial Sequence
  Description of Artificial Sequence: Synthetic oligonucleotide
  Antisense strand to SEQ ID NO: 2544558
aagccaggcacgauucucc

SEQ ID NO: 2544560 - RNA, 19 nt, Artificial Sequence
  Description of Artificial Sequence: Synthetic oligonucleotide
  Sense strand starting at position 535 of SEQ ID NO: 1888602
aagggaaguuucugagaag

SEQ ID NO: 2544561 - RNA, 19 nt, Artificial Sequence
  Description of Artificial Sequence: Synthetic oligonucleotide
  Antisense strand to SEQ ID NO: 2544560
cuucucagaaacuucccuu

SEQ ID NO: 2544562 - RNA, 19 nt, Artificial Sequence
  Description of Artificial Sequence: Synthetic oligonucleotide
  Sense strand starting at position 2452 of SEQ ID NO: 1888602
gagaaucgugccuggcuuu

SEQ ID NO: 2544563 - RNA, 19 nt, Artificial Sequence
  Description of Artificial Sequence: Synthetic oligonucleotide
  Antisense strand to SEQ ID NO: 2544562
aaagccaggcacgauucuc

SEQ ID NO: 2544564 - RNA, 19 nt, Artificial Sequence
  Description of Artificial Sequence: Synthetic oligonucleotide
  Sense strand starting at position 1890 of SEQ ID NO: 1888602
gggcuguggccucgacgaa

SEQ ID NO: 2544565 - RNA, 19 nt, Artificial Sequence
  Description of Artificial Sequence: Synthetic oligonucleotide
  Antisense strand to SEQ ID NO: 2544564
uucgucgaggccacagccc

SEQ ID NO: 2544566 - RNA, 19 nt, Artificial Sequence
  Description of Artificial Sequence: Synthetic oligonucleotide
  Sense strand starting at position 538 of SEQ ID NO: 1888602
ggaaguuucugagaagcug

SEQ ID NO: 2544567 - RNA, 19 nt, Artificial Sequence
  Description of Artificial Sequence: Synthetic oligonucleotide
  Antisense strand to SEQ ID NO: 2544566
cagcuucucagaaacuucc

SEQ ID NO: 2544568 - RNA, 19 nt, Artificial Sequence
  Description of Artificial Sequence: Synthetic oligonucleotide
  Sense strand starting at position 3762 of SEQ ID NO: 1888602
cguuguucucauggcuauu

SEQ ID NO: 2544569 - RNA, 19 nt, Artificial Sequence
  Description of Artificial Sequence: Synthetic oligonucleotide
  Antisense strand to SEQ ID NO: 2544568
aauagccaugagaacaacg

SEQ ID NO: 2544570 - RNA, 19 nt, Artificial Sequence
  Description of Artificial Sequence: Synthetic oligonucleotide
  Sense strand starting at position 655 of SEQ ID NO: 1888602
gaaguucucucuggagaaa

SEQ ID NO: 2544571 - RNA, 19 nt, Artificial Sequence
  Description of Artificial Sequence: Synthetic oligonucleotide
  Antisense strand to SEQ ID NO: 2544570
uuucuccagagagaacuuc

SEQ ID NO: 2544572 - RNA, 19 nt, Artificial Sequence
  Description of Artificial Sequence: Synthetic oligonucleotide
  Sense strand starting at position 3814 of SEQ ID NO: 1888602
ggugcagucgugugaucau

SEQ ID NO: 2544573 - RNA, 19 nt, Artificial Sequence
  Description of Artificial Sequence: Synthetic oligonucleotide
  Antisense strand to SEQ ID NO: 2544572
augaucacacgacugcacc

SEQ ID NO: 2544574 - RNA, 19 nt, Artificial Sequence
  Description of Artificial Sequence: Synthetic oligonucleotide
  Sense strand starting at position 3081 of SEQ ID NO: 1888602
gugaucucaucucaagagu

SEQ ID NO: 2544575 - RNA, 19 nt, Artificial Sequence
  Description of Artificial Sequence: Synthetic oligonucleotide
  Antisense strand to SEQ ID NO: 2544574
acucuugagaugagaucac

SEQ ID NO: 2544576 - RNA, 19 nt, Artificial Sequence
  Description of Artificial Sequence: Synthetic oligonucleotide
  Sense strand starting at position 1806 of SEQ ID NO: 1888603
ucaaguuuccauggagaag

SEQ ID NO: 2544577 - RNA, 19 nt, Artificial Sequence
  Description of Artificial Sequence: Synthetic oligonucleotide
  Antisense strand to SEQ ID NO: 2544576
cuucuccauggaaacuuga

SEQ ID NO: 2544578 - RNA, 19 nt, Artificial Sequence
  Description of Artificial Sequence: Synthetic oligonucleotide
  Sense strand starting at position 1417 of SEQ ID NO: 1888603
agaguuuagggaugauucu

SEQ ID NO: 2544579 - RNA, 19 nt, Artificial Sequence
  Description of Artificial Sequence: Synthetic oligonucleotide
  Antisense strand to SEQ ID NO: 2544578
agaaucaucccuaaacucu

SEQ ID NO: 2544580 - RNA, 19 nt, Artificial Sequence
  Description of Artificial Sequence: Synthetic oligonucleotide
  Sense strand starting at position 361 of SEQ ID NO: 1888603
caagcuguucuggaggaau

SEQ ID NO: 2544581 - RNA, 19 nt, Artificial Sequence
  Description of Artificial Sequence: Synthetic oligonucleotide
  Antisense strand to SEQ ID NO: 2544580
auuccuccagaacagcuug

SEQ ID NO: 2544582 - RNA, 19 nt, Artificial Sequence
  Description of Artificial Sequence: Synthetic oligonucleotide
  Sense strand starting at position 1267 of SEQ ID NO: 1888603
aaagacugggcguguauuu

SEQ ID NO: 2544583 - RNA, 19 nt, Artificial Sequence
  Description of Artificial Sequence: Synthetic oligonucleotide
  Antisense strand to SEQ ID NO: 2544582
aaauacacgcccagucuuu

SEQ ID NO: 2544584 - RNA, 19 nt, Artificial Sequence
  Description of Artificial Sequence: Synthetic oligonucleotide
  Sense strand starting at position 3390 of SEQ ID NO: 1888603
uuuggaucugugggagaua

SEQ ID NO: 2544585 - RNA, 19 nt, Artificial Sequence
  Description of Artificial Sequence: Synthetic oligonucleotide
  Antisense strand to SEQ ID NO: 2544584
uaucucccacagauccaaa

SEQ ID NO: 2544586 - RNA, 19 nt, Artificial Sequence
  Description of Artificial Sequence: Synthetic oligonucleotide
  Sense strand starting at position 840 of SEQ ID NO: 1888603
gguagagguggucauccaa

SEQ ID NO: 2544587 - RNA, 19 nt, Artificial Sequence
  Description of Artificial Sequence: Synthetic oligonucleotide
  Antisense strand to SEQ ID NO: 2544586
uuggaugaccaccucuacc

SEQ ID NO: 2544588 - RNA, 19 nt, Artificial Sequence
  Description of Artificial Sequence: Synthetic oligonucleotide
  Sense strand starting at position 364 of SEQ ID NO: 1888603
gcuguucuggaggaauauu

SEQ ID NO: 2544589 - RNA, 19 nt, Artificial Sequence
  Description of Artificial Sequence: Synthetic oligonucleotide
  Antisense strand to SEQ ID NO: 2544588
aauauuccuccagaacagc

SEQ ID NO: 2544590 - RNA, 19 nt, Artificial Sequence
  Description of Artificial Sequence: Synthetic oligonucleotide
  Sense strand starting at position 3550 of SEQ ID NO: 1888603
aggagcugugcuuagacaa

SEQ ID NO: 2544591 - RNA, 19 nt, Artificial Sequence
  Description of Artificial Sequence: Synthetic oligonucleotide
  Antisense strand to SEQ ID NO: 2544590
uugucuaagcacagcuccu

SEQ ID NO: 2544592 - RNA, 19 nt, Artificial Sequence
  Description of Artificial Sequence: Synthetic oligonucleotide
  Sense strand starting at position 1244 of SEQ ID NO: 1888603
ggccuagaaugaucuucca

SEQ ID NO: 2544593 - RNA, 19 nt, Artificial Sequence
  Description of Artificial Sequence: Synthetic oligonucleotide
  Antisense strand to SEQ ID NO: 2544592
uggaagaucauucuaggcc

SEQ ID NO: 2544594 - RNA, 19 nt, Artificial Sequence
  Description of Artificial Sequence: Synthetic oligonucleotide
  Sense strand starting at position 3738 of SEQ ID NO: 1888603
ugagaugcuguguaaauug

SEQ ID NO: 2544595 - RNA, 19 nt, Artificial Sequence
  Description of Artificial Sequence: Synthetic oligonucleotide
  Antisense strand to SEQ ID NO: 2544594
caauuuacacagcaucuca

SEQ ID NO: 2544596 - RNA, 19 nt, Artificial Sequence
  Description of Artificial Sequence: Synthetic oligonucleotide
  Sense strand starting at position 1885 of SEQ ID NO: 1888603
gugggaggugaggguuaua

SEQ ID NO: 2544597 - RNA, 19 nt, Artificial Sequence
  Description of Artificial Sequence: Synthetic oligonucleotide
  Antisense strand to SEQ ID NO: 2544596
uauaacccucaccucccac

SEQ ID NO: 2544598 - RNA, 19 nt, Artificial Sequence
  Description of Artificial Sequence: Synthetic oligonucleotide
  Sense strand starting at position 3840 of SEQ ID NO: 1888603
gcauucugccuggaacaau

SEQ ID NO: 2544599 - RNA, 19 nt, Artificial Sequence
  Description of Artificial Sequence: Synthetic oligonucleotide
  Antisense strand to SEQ ID NO: 2544598
auuguuccaggcagaaugc

SEQ ID NO: 2544600 - RNA, 19 nt, Artificial Sequence
  Description of Artificial Sequence: Synthetic oligonucleotide
  Sense strand starting at position 1423 of SEQ ID NO: 1888603
uagggaugauucuccagcu

SEQ ID NO: 2544601 - RNA, 19 nt, Artificial Sequence
  Description of Artificial Sequence: Synthetic oligonucleotide
  Antisense strand to SEQ ID NO: 2544600
agcuggagaaucaucccua

SEQ ID NO: 2544602 - RNA, 19 nt, Artificial Sequence
  Description of Artificial Sequence: Synthetic oligonucleotide
  Sense strand starting at position 3320 of SEQ ID NO: 1888603
gagugaggcuuuccugaaa

SEQ ID NO: 2544603 - RNA, 19 nt, Artificial Sequence
  Description of Artificial Sequence: Synthetic oligonucleotide
  Antisense strand to SEQ ID NO: 2544602
uuucaggaaagccucacuc

SEQ ID NO: 2544604 - RNA, 19 nt, Artificial Sequence
  Description of Artificial Sequence: Synthetic oligonucleotide
  Sense strand starting at position 914 of SEQ ID NO: 1888603
ggacgguuggaauguuaga

SEQ ID NO: 2544605 - RNA, 19 nt, Artificial Sequence
  Description of Artificial Sequence: Synthetic oligonucleotide
  Antisense strand to SEQ ID NO: 2544604
ucuaacauuccaaccgucc

SEQ ID NO: 2544606 - RNA, 19 nt, Artificial Sequence
  Description of Artificial Sequence: Synthetic oligonucleotide
  Sense strand starting at position 363 of SEQ ID NO: 1888603
agcuguucuggaggaauau

SEQ ID NO: 2544607 - RNA, 19 nt, Artificial Sequence
  Description of Artificial Sequence: Synthetic oligonucleotide
  Antisense strand to SEQ ID NO: 2544606
auauuccuccagaacagcu

SEQ ID NO: 2544608 - RNA, 19 nt, Artificial Sequence
  Description of Artificial Sequence: Synthetic oligonucleotide
  Sense strand starting at position 3228 of SEQ ID NO: 1888603
gccuccuggaugggauauu

SEQ ID NO: 2544609 - RNA, 19 nt, Artificial Sequence
  Description of Artificial Sequence: Synthetic oligonucleotide
  Antisense strand to SEQ ID NO: 2544608
aauaucccauccaggaggc

SEQ ID NO: 2544610 - RNA, 19 nt, Artificial Sequence
  Description of Artificial Sequence: Synthetic oligonucleotide
  Sense strand starting at position 2640 of SEQ ID NO: 1888603
agcugacucacgcagacau

SEQ ID NO: 2544611 - RNA, 19 nt, Artificial Sequence
  Description of Artificial Sequence: Synthetic oligonucleotide
  Antisense strand to SEQ ID NO: 2544610
augucugcgugagucagcu

SEQ ID NO: 2544612 - RNA, 19 nt, Artificial Sequence
  Description of Artificial Sequence: Synthetic oligonucleotide
  Sense strand starting at position 3452 of SEQ ID NO: 1888603
ccacuuugcggagaagcau

SEQ ID NO: 2544613 - RNA, 19 nt, Artificial Sequence
  Description of Artificial Sequence: Synthetic oligonucleotide
  Antisense strand to SEQ ID NO: 2544612
augcuucuccgcaaagugg

SEQ ID NO: 2544614 - RNA, 19 nt, Artificial Sequence
  Description of Artificial Sequence: Synthetic oligonucleotide
  Sense strand starting at position 3490 of SEQ ID NO: 1888603
cgcugaugacuaggaagua

SEQ ID NO: 2544615 - RNA, 19 nt, Artificial Sequence
  Description of Artificial Sequence: Synthetic oligonucleotide
  Antisense strand to SEQ ID NO: 2544614
uacuuccuagucaucagcg

SEQ ID NO: 2544616 - RNA, 19 nt, Artificial Sequence
  Description of Artificial Sequence: Synthetic oligonucleotide
  Sense strand starting at position 2534 of SEQ ID NO: 1888603
agaguucccugcuccaaag

SEQ ID NO: 2544617 - RNA, 19 nt, Artificial Sequence
  Description of Artificial Sequence: Synthetic oligonucleotide
  Antisense strand to SEQ ID NO: 2544616
cuuuggagcagggaacucu

SEQ ID NO: 2544618 - RNA, 19 nt, Artificial Sequence
  Description of Artificial Sequence: Synthetic oligonucleotide
  Sense strand starting at position 1490 of SEQ ID NO: 1888603
ugugccuaaucaguggaaa

SEQ ID NO: 2544619 - RNA, 19 nt, Artificial Sequence
  Description of Artificial Sequence: Synthetic oligonucleotide
  Antisense strand to SEQ ID NO: 2544618
uuuccacugauuaggcaca

SEQ ID NO: 2544620 - RNA, 19 nt, Artificial Sequence
  Description of Artificial Sequence: Synthetic oligonucleotide
  Sense strand starting at position 3737 of SEQ ID NO: 1888603
augagaugcuguguaaauu

SEQ ID NO: 2544621 - RNA, 19 nt, Artificial Sequence
  Description of Artificial Sequence: Synthetic oligonucleotide
  Antisense strand to SEQ ID NO: 2544620
aauuuacacagcaucucau

SEQ ID NO: 2544622 - RNA, 19 nt, Artificial Sequence
  Description of Artificial Sequence: Synthetic oligonucleotide
  Sense strand starting at position 959 of SEQ ID NO: 1888603
ggcacaccucucuguaaga

SEQ ID NO: 2544623 - RNA, 19 nt, Artificial Sequence
  Description of Artificial Sequence: Synthetic oligonucleotide
  Antisense strand to SEQ ID NO: 2544622
ucuuacagagaggugugcc

SEQ ID NO: 2544624 - RNA, 19 nt, Artificial Sequence
  Description of Artificial Sequence: Synthetic oligonucleotide
  Sense strand starting at position 3918 of SEQ ID NO: 1888603
ggguuccucuuggucaaca

SEQ ID NO: 2544625 - RNA, 19 nt, Artificial Sequence
  Description of Artificial Sequence: Synthetic oligonucleotide
  Antisense strand to SEQ ID NO: 2544624
uguugaccaagaggaaccc

SEQ ID NO: 2544626 - RNA, 19 nt, Artificial Sequence
  Description of Artificial Sequence: Synthetic oligonucleotide
  Sense strand starting at position 1491 of SEQ ID NO: 1888603
gugccuaaucaguggaaac

SEQ ID NO: 2544627 - RNA, 19 nt, Artificial Sequence
  Description of Artificial Sequence: Synthetic oligonucleotide
  Antisense strand to SEQ ID NO: 2544626
guuuccacugauuaggcac

SEQ ID NO: 2544628 - RNA, 19 nt, Artificial Sequence
  Description of Artificial Sequence: Synthetic oligonucleotide
  Sense strand starting at position 825 of SEQ ID NO: 1888603
gugucaggucuugauggua

SEQ ID NO: 2544629 - RNA, 19 nt, Artificial Sequence
  Description of Artificial Sequence: Synthetic oligonucleotide
  Antisense strand to SEQ ID NO: 2544628
uaccaucaagaccugacac

SEQ ID NO: 2544630 - RNA, 19 nt, Artificial Sequence
  Description of Artificial Sequence: Synthetic oligonucleotide
  Sense strand starting at position 3839 of SEQ ID NO: 1888603
ugcauucugccuggaacaa

SEQ ID NO: 2544631 - RNA, 19 nt, Artificial Sequence
  Description of Artificial Sequence: Synthetic oligonucleotide
  Antisense strand to SEQ ID NO: 2544630
uuguuccaggcagaaugca

SEQ ID NO: 2544632 - RNA, 19 nt, Artificial Sequence
  Description of Artificial Sequence: Synthetic oligonucleotide
  Sense strand starting at position 1083 of SEQ ID NO: 1888603
gucaacuggucaguccaua

SEQ ID NO: 2544633 - RNA, 19 nt, Artificial Sequence
  Description of Artificial Sequence: Synthetic oligonucleotide
  Antisense strand to SEQ ID NO: 2544632
uauggacugaccaguugac

SEQ ID NO: 2544634 - RNA, 19 nt, Artificial Sequence
  Description of Artificial Sequence: Synthetic oligonucleotide
  Sense strand starting at position 3779 of SEQ ID NO: 1888603
guaaguguucacugaaagu

SEQ ID NO: 2544635 - RNA, 19 nt, Artificial Sequence
  Description of Artificial Sequence: Synthetic oligonucleotide
  Antisense strand to SEQ ID NO: 2544634
acuuucagugaacacuuac

SEQ ID NO: 2544636 - RNA, 19 nt, Artificial Sequence
  Description of Artificial Sequence: Synthetic oligonucleotide
  Sense strand starting at position 2531 of SEQ ID NO: 1888603
ucuagaguucccugcucca

SEQ ID NO: 2544637 - RNA, 19 nt, Artificial Sequence
  Description of Artificial Sequence: Synthetic oligonucleotide
  Antisense strand to SEQ ID NO: 2544636
uggagcagggaacucuaga

SEQ ID NO: 2544638 - RNA, 19 nt, Artificial Sequence
  Description of Artificial Sequence: Synthetic oligonucleotide
  Sense strand starting at position 3226 of SEQ ID NO: 1888603
gcgccuccuggaugggaua

SEQ ID NO: 2544639 - RNA, 19 nt, Artificial Sequence
  Description of Artificial Sequence: Synthetic oligonucleotide
  Antisense strand to SEQ ID NO: 2544638
uaucccauccaggaggcgc

SEQ ID NO: 2544640 - RNA, 19 nt, Artificial Sequence
  Description of Artificial Sequence: Synthetic oligonucleotide
  Sense strand starting at position 3439 of SEQ ID NO: 1888603
ucgugauugugauccacuu

SEQ ID NO: 2544641 - RNA, 19 nt, Artificial Sequence
  Description of Artificial Sequence: Synthetic oligonucleotide
  Antisense strand to SEQ ID NO: 2544640
aaguggaucacaaucacga

SEQ ID NO: 2544642 - RNA, 19 nt, Artificial Sequence
  Description of Artificial Sequence: Synthetic oligonucleotide
  Sense strand starting at position 3509 of SEQ ID NO: 1888603
uauugaucaccgggcuguu

SEQ ID NO: 2544643 - RNA, 19 nt, Artificial Sequence
  Description of Artificial Sequence: Synthetic oligonucleotide
  Antisense strand to SEQ ID NO: 2544642
aacagcccggugaucaaua

SEQ ID NO: 2544644 - RNA, 19 nt, Artificial Sequence
  Description of Artificial Sequence: Synthetic oligonucleotide
  Sense strand starting at position 3591 of SEQ ID NO: 1888603
gcuuuauuaucgguccaau

SEQ ID NO: 2544645 - RNA, 19 nt, Artificial Sequence
  Description of Artificial Sequence: Synthetic oligonucleotide
  Antisense strand to SEQ ID NO: 2544644
auuggaccgauaauaaagc

SEQ ID NO: 2544646 - RNA, 19 nt, Artificial Sequence
  Description of Artificial Sequence: Synthetic oligonucleotide
  Sense strand starting at position 2786 of SEQ ID NO: 1888603
ucuuuaacccgcugacagu

SEQ ID NO: 2544647 - RNA, 19 nt, Artificial Sequence
  Description of Artificial Sequence: Synthetic oligonucleotide
  Antisense strand to SEQ ID NO: 2544646
acugucagcggguuaaaga

SEQ ID NO: 2544648 - RNA, 19 nt, Artificial Sequence
  Description of Artificial Sequence: Synthetic oligonucleotide
  Sense strand starting at position 3951 of SEQ ID NO: 1888603
gcuuaccuaugugugguaa

SEQ ID NO: 2544649 - RNA, 19 nt, Artificial Sequence
  Description of Artificial Sequence: Synthetic oligonucleotide
  Antisense strand to SEQ ID NO: 2544648
uuaccacacauagguaagc

SEQ ID NO: 2544650 - RNA, 19 nt, Artificial Sequence
  Description of Artificial Sequence: Synthetic oligonucleotide
  Sense strand starting at position 3719 of SEQ ID NO: 1888603
ggcuguugccagcagcaaa

SEQ ID NO: 2544651 - RNA, 19 nt, Artificial Sequence
  Description of Artificial Sequence: Synthetic oligonucleotide
  Antisense strand to SEQ ID NO: 2544650
uuugcugcuggcaacagcc

SEQ ID NO: 2544652 - RNA, 19 nt, Artificial Sequence
  Description of Artificial Sequence: Synthetic oligonucleotide
  Sense strand starting at position 3429 of SEQ ID NO: 1888603
uuugguuucuucgugauug

SEQ ID NO: 2544653 - RNA, 19 nt, Artificial Sequence
  Description of Artificial Sequence: Synthetic oligonucleotide
  Antisense strand to SEQ ID NO: 2544652
caaucacgaagaaaccaaa

SEQ ID NO: 2544654 - RNA, 19 nt, Artificial Sequence
  Description of Artificial Sequence: Synthetic oligonucleotide
  Sense strand starting at position 3045 of SEQ ID NO: 1888603
cuccaaucucugcgaguuu

SEQ ID NO: 2544655 - RNA, 19 nt, Artificial Sequence
  Description of Artificial Sequence: Synthetic oligonucleotide
  Antisense strand to SEQ ID NO: 2544654
aaacucgcagagauuggag

SEQ ID NO: 2544656 - RNA, 19 nt, Artificial Sequence
  Description of Artificial Sequence: Synthetic oligonucleotide
  Sense strand starting at position 2801 of SEQ ID NO: 1888604
gguagagaauuugccgagu

SEQ ID NO: 2544657 - RNA, 19 nt, Artificial Sequence
  Description of Artificial Sequence: Synthetic oligonucleotide
  Antisense strand to SEQ ID NO: 2544656
acucggcaaauucucuacc

SEQ ID NO: 2544658 - RNA, 19 nt, Artificial Sequence
  Description of Artificial Sequence: Synthetic oligonucleotide
  Sense strand starting at position 1359 of SEQ ID NO: 1888604
cagacacauguuuagcaga

SEQ ID NO: 2544659 - RNA, 19 nt, Artificial Sequence
  Description of Artificial Sequence: Synthetic oligonucleotide
  Antisense strand to SEQ ID NO: 2544658
ucugcuaaacaugugucug

SEQ ID NO: 2544660 - RNA, 19 nt, Artificial Sequence
  Description of Artificial Sequence: Synthetic oligonucleotide
  Sense strand starting at position 1771 of SEQ ID NO: 1888604
gcuacagagugauuuguuu

SEQ ID NO: 2544661 - RNA, 19 nt, Artificial Sequence
  Description of Artificial Sequence: Synthetic oligonucleotide
  Antisense strand to SEQ ID NO: 2544660
aaacaaaucacucuguagc

SEQ ID NO: 2544662 - RNA, 19 nt, Artificial Sequence
  Description of Artificial Sequence: Synthetic oligonucleotide
  Sense strand starting at position 1775 of SEQ ID NO: 1888604
cagagugauuuguuugcua

SEQ ID NO: 2544663 - RNA, 19 nt, Artificial Sequence
  Description of Artificial Sequence: Synthetic oligonucleotide
  Antisense strand to SEQ ID NO: 2544662
uagcaaacaaaucacucug

SEQ ID NO: 2544664 - RNA, 19 nt, Artificial Sequence
  Description of Artificial Sequence: Synthetic oligonucleotide
  Sense strand starting at position 3616 of SEQ ID NO: 1888604
uuauuagucucauuugcca

SEQ ID NO: 2544665 - RNA, 19 nt, Artificial Sequence
  Description of Artificial Sequence: Synthetic oligonucleotide
  Antisense strand to SEQ ID NO: 2544664
uggcaaaugagacuaauaa

SEQ ID NO: 2544666 - RNA, 19 nt, Artificial Sequence
  Description of Artificial Sequence: Synthetic oligonucleotide
  Sense strand starting at position 3655 of SEQ ID NO: 1888604
gaacuuagaugauuauugu

SEQ ID NO: 2544667 - RNA, 19 nt, Artificial Sequence
  Description of Artificial Sequence: Synthetic oligonucleotide
  Antisense strand to SEQ ID NO: 2544666
acaauaaucaucuaaguuc

SEQ ID NO: 2544668 - RNA, 19 nt, Artificial Sequence
  Description of Artificial Sequence: Synthetic oligonucleotide
  Sense strand starting at position 3001 of SEQ ID NO: 1888604
gagguaggucaguaugauc

SEQ ID NO: 2544669 - RNA, 19 nt, Artificial Sequence
  Description of Artificial Sequence: Synthetic oligonucleotide
  Antisense strand to SEQ ID NO: 2544668
gaucauacugaccuaccuc

SEQ ID NO: 2544670 - RNA, 19 nt, Artificial Sequence
  Description of Artificial Sequence: Synthetic oligonucleotide
  Sense strand starting at position 1777 of SEQ ID NO: 1888604
gagugauuuguuugcuacu

SEQ ID NO: 2544671 - RNA, 19 nt, Artificial Sequence
  Description of Artificial Sequence: Synthetic oligonucleotide
  Antisense strand to SEQ ID NO: 2544670
aguagcaaacaaaucacuc

SEQ ID NO: 2544672 - RNA, 19 nt, Artificial Sequence
  Description of Artificial Sequence: Synthetic oligonucleotide
  Sense strand starting at position 1539 of SEQ ID NO: 1888604
gagaaugaggucuguauca

SEQ ID NO: 2544673 - RNA, 19 nt, Artificial Sequence
  Description of Artificial Sequence: Synthetic oligonucleotide
  Antisense strand to SEQ ID NO: 2544672
ugauacagaccucauucuc

SEQ ID NO: 2544674 - RNA, 19 nt, Artificial Sequence
  Description of Artificial Sequence: Synthetic oligonucleotide
  Sense strand starting at position 2276 of SEQ ID NO: 1888604
agugaaucggaugaagcuu

SEQ ID NO: 2544675 - RNA, 19 nt, Artificial Sequence
  Description of Artificial Sequence: Synthetic oligonucleotide
  Antisense strand to SEQ ID NO: 2544674
aagcuucauccgauucacu

SEQ ID NO: 2544676 - RNA, 19 nt, Artificial Sequence
  Description of Artificial Sequence: Synthetic oligonucleotide
  Sense strand starting at position 3168 of SEQ ID NO: 1888604
uaaguaugucgauauccaa

SEQ ID NO: 2544677 - RNA, 19 nt, Artificial Sequence
  Description of Artificial Sequence: Synthetic oligonucleotide
  Antisense strand to SEQ ID NO: 2544676
uuggauaucgacauacuua

SEQ ID NO: 2544678 - RNA, 19 nt, Artificial Sequence
  Description of Artificial Sequence: Synthetic oligonucleotide
  Sense strand starting at position 1778 of SEQ ID NO: 1888604
agugauuuguuugcuacuu

SEQ ID NO: 2544679 - RNA, 19 nt, Artificial Sequence
  Description of Artificial Sequence: Synthetic oligonucleotide
  Antisense strand to SEQ ID NO: 2544678
aaguagcaaacaaaucacu

SEQ ID NO: 2544680 - RNA, 19 nt, Artificial Sequence
  Description of Artificial Sequence: Synthetic oligonucleotide
  Sense strand starting at position 3351 of SEQ ID NO: 1888604
uaaguaaacccguagaagu

SEQ ID NO: 2544681 - RNA, 19 nt, Artificial Sequence
  Description of Artificial Sequence: Synthetic oligonucleotide
  Antisense strand to SEQ ID NO: 2544680
acuucuacggguuuacuua

SEQ ID NO: 2544682 - RNA, 19 nt, Artificial Sequence
  Description of Artificial Sequence: Synthetic oligonucleotide
  Sense strand starting at position 1779 of SEQ ID NO: 1888604
gugauuuguuugcuacuug

SEQ ID NO: 2544683 - RNA, 19 nt, Artificial Sequence
  Description of Artificial Sequence: Synthetic oligonucleotide
  Antisense strand to SEQ ID NO: 2544682
caaguagcaaacaaaucac

SEQ ID NO: 2544684 - RNA, 19 nt, Artificial Sequence
  Description of Artificial Sequence: Synthetic oligonucleotide
  Sense strand starting at position 2223 of SEQ ID NO: 1888604
ggucaagguuagguuaaga

SEQ ID NO: 2544685 - RNA, 19 nt, Artificial Sequence
  Description of Artificial Sequence: Synthetic oligonucleotide
  Antisense strand to SEQ ID NO: 2544684
ucuuaaccuaaccuugacc

SEQ ID NO: 2544686 - RNA, 19 nt, Artificial Sequence
  Description of Artificial Sequence: Synthetic oligonucleotide
  Sense strand starting at position 966 of SEQ ID NO: 1888604
cuccaucauguguauuaau

SEQ ID NO: 2544687 - RNA, 19 nt, Artificial Sequence
  Description of Artificial Sequence: Synthetic oligonucleotide
  Antisense strand to SEQ ID NO: 2544686
auuaauacacaugauggag

SEQ ID NO: 2544688 - RNA, 19 nt, Artificial Sequence
  Description of Artificial Sequence: Synthetic oligonucleotide
  Sense strand starting at position 3652 of SEQ ID NO: 1888604
cgugaacuuagaugauuau

SEQ ID NO: 2544689 - RNA, 19 nt, Artificial Sequence
  Description of Artificial Sequence: Synthetic oligonucleotide
  Antisense strand to SEQ ID NO: 2544688
auaaucaucuaaguucacg

SEQ ID NO: 2544690 - RNA, 19 nt, Artificial Sequence
  Description of Artificial Sequence: Synthetic oligonucleotide
  Sense strand starting at position 3353 of SEQ ID NO: 1888604
aguaaacccguagaaguuu

SEQ ID NO: 2544691 - RNA, 19 nt, Artificial Sequence
  Description of Artificial Sequence: Synthetic oligonucleotide
  Antisense strand to SEQ ID NO: 2544690
aaacuucuacggguuuacu

SEQ ID NO: 2544692 - RNA, 19 nt, Artificial Sequence
  Description of Artificial Sequence: Synthetic oligonucleotide
  Sense strand starting at position 3329 of SEQ ID NO: 1888604
acaguaauauuagcugauu

SEQ ID NO: 2544693 - RNA, 19 nt, Artificial Sequence
  Description of Artificial Sequence: Synthetic oligonucleotide
  Antisense strand to SEQ ID NO: 2544692
aaucagcuaauauuacugu

SEQ ID NO: 2544694 - RNA, 19 nt, Artificial Sequence
  Description of Artificial Sequence: Synthetic oligonucleotide
  Sense strand starting at position 3208 of SEQ ID NO: 1888604
uuaguaucaguccaagguu

SEQ ID NO: 2544695 - RNA, 19 nt, Artificial Sequence
  Description of Artificial Sequence: Synthetic oligonucleotide
  Antisense strand to SEQ ID NO: 2544694
aaccuuggacugauacuaa

SEQ ID NO: 2544696 - RNA, 19 nt, Artificial Sequence
  Description of Artificial Sequence: Synthetic oligonucleotide
  Sense strand starting at position 3000 of SEQ ID NO: 1888604
ugagguaggucaguaugau

SEQ ID NO: 2544697 - RNA, 19 nt, Artificial Sequence
  Description of Artificial Sequence: Synthetic oligonucleotide
  Antisense strand to SEQ ID NO: 2544696
aucauacugaccuaccuca

SEQ ID NO: 2544698 - RNA, 19 nt, Artificial Sequence
  Description of Artificial Sequence: Synthetic oligonucleotide
  Sense strand starting at position 3171 of SEQ ID NO: 1888604
guaugucgauauccaaaga

SEQ ID NO: 2544699 - RNA, 19 nt, Artificial Sequence
  Description of Artificial Sequence: Synthetic oligonucleotide
  Antisense strand to SEQ ID NO: 2544698
ucuuuggauaucgacauac

SEQ ID NO: 2544700 - RNA, 19 nt, Artificial Sequence
  Description of Artificial Sequence: Synthetic oligonucleotide
  Sense strand starting at position 2658 of SEQ ID NO: 1888604
augaccucccucugugaau

SEQ ID NO: 2544701 - RNA, 19 nt, Artificial Sequence
  Description of Artificial Sequence: Synthetic oligonucleotide
  Antisense strand to SEQ ID NO: 2544700
auucacagagggaggucau

SEQ ID NO: 2544702 - RNA, 19 nt, Artificial Sequence
  Description of Artificial Sequence: Synthetic oligonucleotide
  Sense strand starting at position 3153 of SEQ ID NO: 1888604
uucugucuuaccgaguaag

SEQ ID NO: 2544703 - RNA, 19 nt, Artificial Sequence
  Description of Artificial Sequence: Synthetic oligonucleotide
  Antisense strand to SEQ ID NO: 2544702
cuuacucgguaagacagaa

SEQ ID NO: 2544704 - RNA, 19 nt, Artificial Sequence
  Description of Artificial Sequence: Synthetic oligonucleotide
  Sense strand starting at position 2275 of SEQ ID NO: 1888604
cagugaaucggaugaagcu

SEQ ID NO: 2544705 - RNA, 19 nt, Artificial Sequence
  Description of Artificial Sequence: Synthetic oligonucleotide
  Antisense strand to SEQ ID NO: 2544704
agcuucauccgauucacug

SEQ ID NO: 2544706 - RNA, 19 nt, Artificial Sequence
  Description of Artificial Sequence: Synthetic oligonucleotide
  Sense strand starting at position 2307 of SEQ ID NO: 1888604
cccaauucugaguguuaca

SEQ ID NO: 2544707 - RNA, 19 nt, Artificial Sequence
  Description of Artificial Sequence: Synthetic oligonucleotide
  Antisense strand to SEQ ID NO: 2544706
uguaacacucagaauuggg

SEQ ID NO: 2544708 - RNA, 19 nt, Artificial Sequence
  Description of Artificial Sequence: Synthetic oligonucleotide
  Sense strand starting at position 965 of SEQ ID NO: 1888604
ucuccaucauguguauuaa

SEQ ID NO: 2544709 - RNA, 19 nt, Artificial Sequence
  Description of Artificial Sequence: Synthetic oligonucleotide
  Antisense strand to SEQ ID NO: 2544708
uuaauacacaugauggaga

SEQ ID NO: 2544710 - RNA, 19 nt, Artificial Sequence
  Description of Artificial Sequence: Synthetic oligonucleotide
  Sense strand starting at position 3156 of SEQ ID NO: 1888604
ugucuuaccgaguaaguau

SEQ ID NO: 2544711 - RNA, 19 nt, Artificial Sequence
  Description of Artificial Sequence: Synthetic oligonucleotide
  Antisense strand to SEQ ID NO: 2544710
auacuuacucgguaagaca

SEQ ID NO: 2544712 - RNA, 19 nt, Artificial Sequence
  Description of Artificial Sequence: Synthetic oligonucleotide
  Sense strand starting at position 1827 of SEQ ID NO: 1888604
gcuacugagucucuuagau

SEQ ID NO: 2544713 - RNA, 19 nt, Artificial Sequence
  Description of Artificial Sequence: Synthetic oligonucleotide
  Antisense strand to SEQ ID NO: 2544712
aucuaagagacucaguagc

SEQ ID NO: 2544714 - RNA, 19 nt, Artificial Sequence
  Description of Artificial Sequence: Synthetic oligonucleotide
  Sense strand starting at position 1950 of SEQ ID NO: 1888604
cacagaaccgucugguacu

SEQ ID NO: 2544715 - RNA, 19 nt, Artificial Sequence
  Description of Artificial Sequence: Synthetic oligonucleotide
  Antisense strand to SEQ ID NO: 2544714
aguaccagacgguucugug

SEQ ID NO: 2544716 - RNA, 19 nt, Artificial Sequence
  Description of Artificial Sequence: Synthetic oligonucleotide
  Sense strand starting at position 3337 of SEQ ID NO: 1888604
auuagcugauuugauaagu

SEQ ID NO: 2544717 - RNA, 19 nt, Artificial Sequence
  Description of Artificial Sequence: Synthetic oligonucleotide
  Antisense strand to SEQ ID NO: 2544716
acuuaucaaaucagcuaau

SEQ ID NO: 2544718 - RNA, 19 nt, Artificial Sequence
  Description of Artificial Sequence: Synthetic oligonucleotide
  Sense strand starting at position 887 of SEQ ID NO: 1888604
gcauuacaggcgugagaaa

SEQ ID NO: 2544719 - RNA, 19 nt, Artificial Sequence
  Description of Artificial Sequence: Synthetic oligonucleotide
  Antisense strand to SEQ ID NO: 2544718
uuucucacgccuguaaugc

SEQ ID NO: 2544720 - RNA, 19 nt, Artificial Sequence
  Description of Artificial Sequence: Synthetic oligonucleotide
  Sense strand starting at position 1784 of SEQ ID NO: 1888604
uuguuugcuacuugggaca

SEQ ID NO: 2544721 - RNA, 19 nt, Artificial Sequence
  Description of Artificial Sequence: Synthetic oligonucleotide
  Antisense strand to SEQ ID NO: 2544720
ugucccaaguagcaaacaa

SEQ ID NO: 2544722 - RNA, 19 nt, Artificial Sequence
  Description of Artificial Sequence: Synthetic oligonucleotide
  Sense strand starting at position 2384 of SEQ ID NO: 1888604
ggucacauuuauugaauca

SEQ ID NO: 2544723 - RNA, 19 nt, Artificial Sequence
  Description of Artificial Sequence: Synthetic oligonucleotide
  Antisense strand to SEQ ID NO: 2544722
ugauucaauaaaugugacc

SEQ ID NO: 2544724 - RNA, 19 nt, Artificial Sequence
  Description of Artificial Sequence: Synthetic oligonucleotide
  Sense strand starting at position 3151 of SEQ ID NO: 1888604
uauucugucuuaccgagua

SEQ ID NO: 2544725 - RNA, 19 nt, Artificial Sequence
  Description of Artificial Sequence: Synthetic oligonucleotide
  Antisense strand to SEQ ID NO: 2544724
uacucgguaagacagaaua

SEQ ID NO: 2544726 - RNA, 19 nt, Artificial Sequence
  Description of Artificial Sequence: Synthetic oligonucleotide
  Sense strand starting at position 2306 of SEQ ID NO: 1888604
gcccaauucugaguguuac

SEQ ID NO: 2544727 - RNA, 19 nt, Artificial Sequence
  Description of Artificial Sequence: Synthetic oligonucleotide
  Antisense strand to SEQ ID NO: 2544726
guaacacucagaauugggc

SEQ ID NO: 2544728 - RNA, 19 nt, Artificial Sequence
  Description of Artificial Sequence: Synthetic oligonucleotide
  Sense strand starting at position 2612 of SEQ ID NO: 1888604
gcaucucugccucacgauu

SEQ ID NO: 2544729 - RNA, 19 nt, Artificial Sequence
  Description of Artificial Sequence: Synthetic oligonucleotide
  Antisense strand to SEQ ID NO: 2544728
aaucgugaggcagagaugc

SEQ ID NO: 2544730 - RNA, 19 nt, Artificial Sequence
  Description of Artificial Sequence: Synthetic oligonucleotide
  Sense strand starting at position 3163 of SEQ ID NO: 1888604
ccgaguaaguaugucgaua

SEQ ID NO: 2544731 - RNA, 19 nt, Artificial Sequence
  Description of Artificial Sequence: Synthetic oligonucleotide
  Antisense strand to SEQ ID NO: 2544730
uaucgacauacuuacucgg

SEQ ID NO: 2544732 - RNA, 19 nt, Artificial Sequence
  Description of Artificial Sequence: Synthetic oligonucleotide
  Sense strand starting at position 960 of SEQ ID NO: 1888604
guuugucuccaucaugugu

SEQ ID NO: 2544733 - RNA, 19 nt, Artificial Sequence
  Description of Artificial Sequence: Synthetic oligonucleotide
  Antisense strand to SEQ ID NO: 2544732
acacaugauggagacaaac

SEQ ID NO: 2544734 - RNA, 19 nt, Artificial Sequence
  Description of Artificial Sequence: Synthetic oligonucleotide
  Sense strand starting at position 1548 of SEQ ID NO: 1888604
gucuguaucagaugucagu

SEQ ID NO: 2544735 - RNA, 19 nt, Artificial Sequence
  Description of Artificial Sequence: Synthetic oligonucleotide
  Antisense strand to SEQ ID NO: 2544734
acugacaucugauacagac

SEQ ID NO: 2544736 - RNA, 19 nt, Artificial Sequence
  Description of Artificial Sequence: Synthetic oligonucleotide
  Sense strand starting at position 1734 of SEQ ID NO: 1888605
auuacuaggccauaguaaa

SEQ ID NO: 2544737 - RNA, 19 nt, Artificial Sequence
  Description of Artificial Sequence: Synthetic oligonucleotide
  Antisense strand to SEQ ID NO: 2544736
uuuacuauggccuaguaau

SEQ ID NO: 2544738 - RNA, 19 nt, Artificial Sequence
  Description of Artificial Sequence: Synthetic oligonucleotide
  Sense strand starting at position 3821 of SEQ ID NO: 1888605
agcucauuacaguaagaau

SEQ ID NO: 2544739 - RNA, 19 nt, Artificial Sequence
  Description of Artificial Sequence: Synthetic oligonucleotide
  Antisense strand to SEQ ID NO: 2544738
auucuuacuguaaugagcu

SEQ ID NO: 2544740 - RNA, 19 nt, Artificial Sequence
  Description of Artificial Sequence: Synthetic oligonucleotide
  Sense strand starting at position 2440 of SEQ ID NO: 1888605
uuaagagauugaguacuau

SEQ ID NO: 2544741 - RNA, 19 nt, Artificial Sequence
  Description of Artificial Sequence: Synthetic oligonucleotide
  Antisense strand to SEQ ID NO: 2544740
auaguacucaaucucuuaa

SEQ ID NO: 2544742 - RNA, 19 nt, Artificial Sequence
  Description of Artificial Sequence: Synthetic oligonucleotide
  Sense strand starting at position 2733 of SEQ ID NO: 1888605
cauagauaguacucagaug

SEQ ID NO: 2544743 - RNA, 19 nt, Artificial Sequence
  Description of Artificial Sequence: Synthetic oligonucleotide
  Antisense strand to SEQ ID NO: 2544742
caucugaguacuaucuaug

SEQ ID NO: 2544744 - RNA, 19 nt, Artificial Sequence
  Description of Artificial Sequence: Synthetic oligonucleotide
  Sense strand starting at position 2359 of SEQ ID NO: 1888605
gcagaccaucuuuaugaca

SEQ ID NO: 2544745 - RNA, 19 nt, Artificial Sequence
  Description of Artificial Sequence: Synthetic oligonucleotide
  Antisense strand to SEQ ID NO: 2544744
ugucauaaagauggucugc

SEQ ID NO: 2544746 - RNA, 19 nt, Artificial Sequence
  Description of Artificial Sequence: Synthetic oligonucleotide
  Sense strand starting at position 3642 of SEQ ID NO: 1888605
aguaauugucuauagauac

SEQ ID NO: 2544747 - RNA, 19 nt, Artificial Sequence
  Description of Artificial Sequence: Synthetic oligonucleotide
  Antisense strand to SEQ ID NO: 2544746
guaucuauagacaauuacu

SEQ ID NO: 2544748 - RNA, 19 nt, Artificial Sequence
  Description of Artificial Sequence: Synthetic oligonucleotide
  Sense strand starting at position 2517 of SEQ ID NO: 1888605
ugccaaauuuaugugguau

SEQ ID NO: 2544749 - RNA, 19 nt, Artificial Sequence
  Description of Artificial Sequence: Synthetic oligonucleotide
  Antisense strand to SEQ ID NO: 2544748
auaccacauaaauuuggca

SEQ ID NO: 2544750 - RNA, 19 nt, Artificial Sequence
  Description of Artificial Sequence: Synthetic oligonucleotide
  Sense strand starting at position 2873 of SEQ ID NO: 1888605
uauaguaaggcagacuuua

SEQ ID NO: 2544751 - RNA, 19 nt, Artificial Sequence
  Description of Artificial Sequence: Synthetic oligonucleotide
  Antisense strand to SEQ ID NO: 2544750
uaaagucugccuuacuaua

SEQ ID NO: 2544752 - RNA, 19 nt, Artificial Sequence
  Description of Artificial Sequence: Synthetic oligonucleotide
  Sense strand starting at position 1832 of SEQ ID NO: 1888605
aaacaucugguguaucuga

SEQ ID NO: 2544753 - RNA, 19 nt, Artificial Sequence
  Description of Artificial Sequence: Synthetic oligonucleotide
  Antisense strand to SEQ ID NO: 2544752
ucagauacaccagauguuu

SEQ ID NO: 2544754 - RNA, 19 nt, Artificial Sequence
  Description of Artificial Sequence: Synthetic oligonucleotide
  Sense strand starting at position 3069 of SEQ ID NO: 1888605
gagauucuggcuuaaguaa

SEQ ID NO: 2544755 - RNA, 19 nt, Artificial Sequence
  Description of Artificial Sequence: Synthetic oligonucleotide
  Antisense strand to SEQ ID NO: 2544754
uuacuuaagccagaaucuc

SEQ ID NO: 2544756 - RNA, 19 nt, Artificial Sequence
  Description of Artificial Sequence: Synthetic oligonucleotide
  Sense strand starting at position 1732 of SEQ ID NO: 1888605
ggauuacuaggccauagua

SEQ ID NO: 2544757 - RNA, 19 nt, Artificial Sequence
  Description of Artificial Sequence: Synthetic oligonucleotide
  Antisense strand to SEQ ID NO: 2544756
uacuauggccuaguaaucc

SEQ ID NO: 2544758 - RNA, 19 nt, Artificial Sequence
  Description of Artificial Sequence: Synthetic oligonucleotide
  Sense strand starting at position 3025 of SEQ ID NO: 1888605
gggcgaucaguggauggaa

SEQ ID NO: 2544759 - RNA, 19 nt, Artificial Sequence
  Description of Artificial Sequence: Synthetic oligonucleotide
  Antisense strand to SEQ ID NO: 2544758
uuccauccacugaucgccc

SEQ ID NO: 2544760 - RNA, 19 nt, Artificial Sequence
  Description of Artificial Sequence: Synthetic oligonucleotide
  Sense strand starting at position 3195 of SEQ ID NO: 1888605
uuaacuguugcacagauaa

SEQ ID NO: 2544761 - RNA, 19 nt, Artificial Sequence
  Description of Artificial Sequence: Synthetic oligonucleotide
  Antisense strand to SEQ ID NO: 2544760
uuaucugugcaacaguuaa

SEQ ID NO: 2544762 - RNA, 19 nt, Artificial Sequence
  Description of Artificial Sequence: Synthetic oligonucleotide
  Sense strand starting at position 3640 of SEQ ID NO: 1888605
ccaguaauugucuauagau

SEQ ID NO: 2544763 - RNA, 19 nt, Artificial Sequence
  Description of Artificial Sequence: Synthetic oligonucleotide
  Antisense strand to SEQ ID NO: 2544762
aucuauagacaauuacugg

SEQ ID NO: 2544764 - RNA, 19 nt, Artificial Sequence
  Description of Artificial Sequence: Synthetic oligonucleotide
  Sense strand starting at position 3339 of SEQ ID NO: 1888605
aagauuagguugcuggaaa

SEQ ID NO: 2544765 - RNA, 19 nt, Artificial Sequence
  Description of Artificial Sequence: Synthetic oligonucleotide
  Antisense strand to SEQ ID NO: 2544764
uuuccagcaaccuaaucuu

SEQ ID NO: 2544766 - RNA, 19 nt, Artificial Sequence
  Description of Artificial Sequence: Synthetic oligonucleotide
  Sense strand starting at position 3092 of SEQ ID NO: 1888605
acauaauucuugcugaaga

SEQ ID NO: 2544767 - RNA, 19 nt, Artificial Sequence
  Description of Artificial Sequence: Synthetic oligonucleotide
  Antisense strand to SEQ ID NO: 2544766
ucuucagcaagaauuaugu

SEQ ID NO: 2544768 - RNA, 19 nt, Artificial Sequence
  Description of Artificial Sequence: Synthetic oligonucleotide
  Sense strand starting at position 922 of SEQ ID NO: 1888605
cuacgcuuuccggugaguu

SEQ ID NO: 2544769 - RNA, 19 nt, Artificial Sequence
  Description of Artificial Sequence: Synthetic oligonucleotide
  Antisense strand to SEQ ID NO: 2544768
aacucaccggaaagcguag

SEQ ID NO: 2544770 - RNA, 19 nt, Artificial Sequence
  Description of Artificial Sequence: Synthetic oligonucleotide
  Sense strand starting at position 1510 of SEQ ID NO: 1888605
cuaugaauacaguggagua

SEQ ID NO: 2544771 - RNA, 19 nt, Artificial Sequence
  Description of Artificial Sequence: Synthetic oligonucleotide
  Antisense strand to SEQ ID NO: 2544770
uacuccacuguauucauag

SEQ ID NO: 2544772 - RNA, 19 nt, Artificial Sequence
  Description of Artificial Sequence: Synthetic oligonucleotide
  Sense strand starting at position 2871 of SEQ ID NO: 1888605
aguauaguaaggcagacuu

SEQ ID NO: 2544773 - RNA, 19 nt, Artificial Sequence
  Description of Artificial Sequence: Synthetic oligonucleotide
  Antisense strand to SEQ ID NO: 2544772
aagucugccuuacuauacu

SEQ ID NO: 2544774 - RNA, 19 nt, Artificial Sequence
  Description of Artificial Sequence: Synthetic oligonucleotide
  Sense strand starting at position 3102 of SEQ ID NO: 1888605
ugcugaagacgugaucaga

SEQ ID NO: 2544775 - RNA, 19 nt, Artificial Sequence
  Description of Artificial Sequence: Synthetic oligonucleotide
  Antisense strand to SEQ ID NO: 2544774
ucugaucacgucuucagca

SEQ ID NO: 2544776 - RNA, 19 nt, Artificial Sequence
  Description of Artificial Sequence: Synthetic oligonucleotide
  Sense strand starting at position 3224 of SEQ ID NO: 1888605
gacuaaaguuugguuggga

SEQ ID NO: 2544777 - RNA, 19 nt, Artificial Sequence
  Description of Artificial Sequence: Synthetic oligonucleotide
  Antisense strand to SEQ ID NO: 2544776
ucccaaccaaacuuuaguc

SEQ ID NO: 2544778 - RNA, 19 nt, Artificial Sequence
  Description of Artificial Sequence: Synthetic oligonucleotide
  Sense strand starting at position 2596 of SEQ ID NO: 1888605
uuaaacguugcagauaaau

SEQ ID NO: 2544779 - RNA, 19 nt, Artificial Sequence
  Description of Artificial Sequence: Synthetic oligonucleotide
  Antisense strand to SEQ ID NO: 2544778
auuuaucugcaacguuuaa

SEQ ID NO: 2544780 - RNA, 19 nt, Artificial Sequence
  Description of Artificial Sequence: Synthetic oligonucleotide
  Sense strand starting at position 3337 of SEQ ID NO: 1888605
gaaagauuagguugcugga

SEQ ID NO: 2544781 - RNA, 19 nt, Artificial Sequence
  Description of Artificial Sequence: Synthetic oligonucleotide
  Antisense strand to SEQ ID NO: 2544780
uccagcaaccuaaucuuuc

SEQ ID NO: 2544782 - RNA, 19 nt, Artificial Sequence
  Description of Artificial Sequence: Synthetic oligonucleotide
  Sense strand starting at position 1677 of SEQ ID NO: 1888605
ggcagauguggccagaaca

SEQ ID NO: 2544783 - RNA, 19 nt, Artificial Sequence
  Description of Artificial Sequence: Synthetic oligonucleotide
  Antisense strand to SEQ ID NO: 2544782
uguucuggccacaucugcc

SEQ ID NO: 2544784 - RNA, 19 nt, Artificial Sequence
  Description of Artificial Sequence: Synthetic oligonucleotide
  Sense strand starting at position 1729 of SEQ ID NO: 1888605
acuggauuacuaggccaua

SEQ ID NO: 2544785 - RNA, 19 nt, Artificial Sequence
  Description of Artificial Sequence: Synthetic oligonucleotide
  Antisense strand to SEQ ID NO: 2544784
uauggccuaguaauccagu

SEQ ID NO: 2544786 - RNA, 19 nt, Artificial Sequence
  Description of Artificial Sequence: Synthetic oligonucleotide
  Sense strand starting at position 1853 of SEQ ID NO: 1888605
guggaauacaucuguggag

SEQ ID NO: 2544787 - RNA, 19 nt, Artificial Sequence
  Description of Artificial Sequence: Synthetic oligonucleotide
  Antisense strand to SEQ ID NO: 2544786
cuccacagauguauuccac

SEQ ID NO: 2544788 - RNA, 19 nt, Artificial Sequence
  Description of Artificial Sequence: Synthetic oligonucleotide
  Sense strand starting at position 1843 of SEQ ID NO: 1888605
guaucugauaguggaauac

SEQ ID NO: 2544789 - RNA, 19 nt, Artificial Sequence
  Description of Artificial Sequence: Synthetic oligonucleotide
  Antisense strand to SEQ ID NO: 2544788
guauuccacuaucagauac

SEQ ID NO: 2544790 - RNA, 19 nt, Artificial Sequence
  Description of Artificial Sequence: Synthetic oligonucleotide
  Sense strand starting at position 1854 of SEQ ID NO: 1888605
uggaauacaucuguggagu

SEQ ID NO: 2544791 - RNA, 19 nt, Artificial Sequence
  Description of Artificial Sequence: Synthetic oligonucleotide
  Antisense strand to SEQ ID NO: 2544790
acuccacagauguauucca

SEQ ID NO: 2544792 - RNA, 19 nt, Artificial Sequence
  Description of Artificial Sequence: Synthetic oligonucleotide
  Sense strand starting at position 2472 of SEQ ID NO: 1888605
uagggaguguucuuuaaag

SEQ ID NO: 2544793 - RNA, 19 nt, Artificial Sequence
  Description of Artificial Sequence: Synthetic oligonucleotide
  Antisense strand to SEQ ID NO: 2544792
cuuuaaagaacacucccua

SEQ ID NO: 2544794 - RNA, 19 nt, Artificial Sequence
  Description of Artificial Sequence: Synthetic oligonucleotide
  Sense strand starting at position 3639 of SEQ ID NO: 1888605
accaguaauugucuauaga

SEQ ID NO: 2544795 - RNA, 19 nt, Artificial Sequence
  Description of Artificial Sequence: Synthetic oligonucleotide
  Antisense strand to SEQ ID NO: 2544794
ucuauagacaauuacuggu

SEQ ID NO: 2544796 - RNA, 19 nt, Artificial Sequence
  Description of Artificial Sequence: Synthetic oligonucleotide
  Sense strand starting at position 3565 of SEQ ID NO: 1888605
ugguaugacagcugaagau

SEQ ID NO: 2544797 - RNA, 19 nt, Artificial Sequence
  Description of Artificial Sequence: Synthetic oligonucleotide
  Antisense strand to SEQ ID NO: 2544796
aucuucagcugucauacca

SEQ ID NO: 2544798 - RNA, 19 nt, Artificial Sequence
  Description of Artificial Sequence: Synthetic oligonucleotide
  Sense strand starting at position 3918 of SEQ ID NO: 1888605
gcauaacucuggucaaaga

SEQ ID NO: 2544799 - RNA, 19 nt, Artificial Sequence
  Description of Artificial Sequence: Synthetic oligonucleotide
  Antisense strand to SEQ ID NO: 2544798
ucuuugaccagaguuaugc

SEQ ID NO: 2544800 - RNA, 19 nt, Artificial Sequence
  Description of Artificial Sequence: Synthetic oligonucleotide
  Sense strand starting at position 1855 of SEQ ID NO: 1888605
ggaauacaucuguggaguu

SEQ ID NO: 2544801 - RNA, 19 nt, Artificial Sequence
  Description of Artificial Sequence: Synthetic oligonucleotide
  Antisense strand to SEQ ID NO: 2544800
aacuccacagauguauucc

SEQ ID NO: 2544802 - RNA, 19 nt, Artificial Sequence
  Description of Artificial Sequence: Synthetic oligonucleotide
  Sense strand starting at position 2753 of SEQ ID NO: 1888605
uugcgaaauaaacgagaca

SEQ ID NO: 2544803 - RNA, 19 nt, Artificial Sequence
  Description of Artificial Sequence: Synthetic oligonucleotide
  Antisense strand to SEQ ID NO: 2544802
ugucucguuuauuucgcaa

SEQ ID NO: 2544804 - RNA, 19 nt, Artificial Sequence
  Description of Artificial Sequence: Synthetic oligonucleotide
  Sense strand starting at position 2459 of SEQ ID NO: 1888605
aaaucuguaugcuuaggga

SEQ ID NO: 2544805 - RNA, 19 nt, Artificial Sequence
  Description of Artificial Sequence: Synthetic oligonucleotide
  Antisense strand to SEQ ID NO: 2544804
ucccuaagcauacagauuu

SEQ ID NO: 2544806 - RNA, 19 nt, Artificial Sequence
  Description of Artificial Sequence: Synthetic oligonucleotide
  Sense strand starting at position 2474 of SEQ ID NO: 1888605
gggaguguucuuuaaaguc

SEQ ID NO: 2544807 - RNA, 19 nt, Artificial Sequence
  Description of Artificial Sequence: Synthetic oligonucleotide
  Antisense strand to SEQ ID NO: 2544806
gacuuuaaagaacacuccc

SEQ ID NO: 2544808 - RNA, 19 nt, Artificial Sequence
  Description of Artificial Sequence: Synthetic oligonucleotide
  Sense strand starting at position 2956 of SEQ ID NO: 1888605
ugggcucaacucugaacau

SEQ ID NO: 2544809 - RNA, 19 nt, Artificial Sequence
  Description of Artificial Sequence: Synthetic oligonucleotide
  Antisense strand to SEQ ID NO: 2544808
auguucagaguugagccca

SEQ ID NO: 2544810 - RNA, 19 nt, Artificial Sequence
  Description of Artificial Sequence: Synthetic oligonucleotide
  Sense strand starting at position 3302 of SEQ ID NO: 1888605
agauaaaguaaccgguuua

SEQ ID NO: 2544811 - RNA, 19 nt, Artificial Sequence
  Description of Artificial Sequence: Synthetic oligonucleotide
  Antisense strand to SEQ ID NO: 2544810
uaaaccgguuacuuuaucu

SEQ ID NO: 2544812 - RNA, 19 nt, Artificial Sequence
  Description of Artificial Sequence: Synthetic oligonucleotide
  Sense strand starting at position 2749 of SEQ ID NO: 1888605
auguuugcgaaauaaacga

SEQ ID NO: 2544813 - RNA, 19 nt, Artificial Sequence
  Description of Artificial Sequence: Synthetic oligonucleotide
  Antisense strand to SEQ ID NO: 2544812
ucguuuauuucgcaaacau

SEQ ID NO: 2544814 - RNA, 19 nt, Artificial Sequence
  Description of Artificial Sequence: Synthetic oligonucleotide
  Sense strand starting at position 2065 of SEQ ID NO: 1888605
ucuuucuugcaagaguuga

SEQ ID NO: 2544815 - RNA, 19 nt, Artificial Sequence
  Description of Artificial Sequence: Synthetic oligonucleotide
  Antisense strand to SEQ ID NO: 2544814
ucaacucuugcaagaaaga

SEQ ID NO: 2544816 - RNA, 19 nt, Artificial Sequence
  Description of Artificial Sequence: Synthetic oligonucleotide
  Sense strand starting at position 99 of SEQ ID NO: 1888606
gcucuagaaguacauacaa

SEQ ID NO: 2544817 - RNA, 19 nt, Artificial Sequence
  Description of Artificial Sequence: Synthetic oligonucleotide
  Antisense strand to SEQ ID NO: 2544816
uuguauguacuucuagagc

SEQ ID NO: 2544818 - RNA, 19 nt, Artificial Sequence
  Description of Artificial Sequence: Synthetic oligonucleotide
  Sense strand starting at position 74 of SEQ ID NO: 1888606
ucauucuuacuguaaugag

SEQ ID NO: 2544819 - RNA, 19 nt, Artificial Sequence
  Description of Artificial Sequence: Synthetic oligonucleotide
  Antisense strand to SEQ ID NO: 2544818
cucauuacaguaagaauga

SEQ ID NO: 2544820 - RNA, 19 nt, Artificial Sequence
  Description of Artificial Sequence: Synthetic oligonucleotide
  Sense strand starting at position 3417 of SEQ ID NO: 1888606
ggagaagugguaggauauu

SEQ ID NO: 2544821 - RNA, 19 nt, Artificial Sequence
  Description of Artificial Sequence: Synthetic oligonucleotide
  Antisense strand to SEQ ID NO: 2544820
aauauccuaccacuucucc

SEQ ID NO: 2544822 - RNA, 19 nt, Artificial Sequence
  Description of Artificial Sequence: Synthetic oligonucleotide
  Sense strand starting at position 996 of SEQ ID NO: 1888606
uccguauacuuauuucgaa

SEQ ID NO: 2544823 - RNA, 19 nt, Artificial Sequence
  Description of Artificial Sequence: Synthetic oligonucleotide
  Antisense strand to SEQ ID NO: 2544822
uucgaaauaaguauacgga

SEQ ID NO: 2544824 - RNA, 19 nt, Artificial Sequence
  Description of Artificial Sequence: Synthetic oligonucleotide
  Sense strand starting at position 1301 of SEQ ID NO: 1888606
auuuaucugcaacguuuaa

SEQ ID NO: 2544825 - RNA, 19 nt, Artificial Sequence
  Description of Artificial Sequence: Synthetic oligonucleotide
  Antisense strand to SEQ ID NO: 2544824
uuaaacguugcagauaaau

SEQ ID NO: 2544826 - RNA, 19 nt, Artificial Sequence
  Description of Artificial Sequence: Synthetic oligonucleotide
  Sense strand starting at position 518 of SEQ ID NO: 1888606
agauguaauguaggauuau

SEQ ID NO: 2544827 - RNA, 19 nt, Artificial Sequence
  Description of Artificial Sequence: Synthetic oligonucleotide
  Antisense strand to SEQ ID NO: 2544826
auaauccuacauuacaucu

SEQ ID NO: 2544828 - RNA, 19 nt, Artificial Sequence
  Description of Artificial Sequence: Synthetic oligonucleotide
  Sense strand starting at position 3343 of SEQ ID NO: 1888606
ugaucaaggaauugugagu

SEQ ID NO: 2544829 - RNA, 19 nt, Artificial Sequence
  Description of Artificial Sequence: Synthetic oligonucleotide
  Antisense strand to SEQ ID NO: 2544828
acucacaauuccuugauca

SEQ ID NO: 2544830 - RNA, 19 nt, Artificial Sequence
  Description of Artificial Sequence: Synthetic oligonucleotide
  Sense strand starting at position 1734 of SEQ ID NO: 1888606
auguucuaagggugaaaug

SEQ ID NO: 2544831 - RNA, 19 nt, Artificial Sequence
  Description of Artificial Sequence: Synthetic oligonucleotide
  Antisense strand to SEQ ID NO: 2544830
cauuucacccuuagaacau

SEQ ID NO: 2544832 - RNA, 19 nt, Artificial Sequence
  Description of Artificial Sequence: Synthetic oligonucleotide
  Sense strand starting at position 592 of SEQ ID NO: 1888606
aucuaaaccgguuacuuua

SEQ ID NO: 2544833 - RNA, 19 nt, Artificial Sequence
  Description of Artificial Sequence: Synthetic oligonucleotide
  Antisense strand to SEQ ID NO: 2544832
uaaaguaaccgguuuagau

SEQ ID NO: 2544834 - RNA, 19 nt, Artificial Sequence
  Description of Artificial Sequence: Synthetic oligonucleotide
  Sense strand starting at position 1120 of SEQ ID NO: 1888606
ggagguaugcuccauccag

SEQ ID NO: 2544835 - RNA, 19 nt, Artificial Sequence
  Description of Artificial Sequence: Synthetic oligonucleotide
  Antisense strand to SEQ ID NO: 2544834
cuggauggagcauaccucc

SEQ ID NO: 2544836 - RNA, 19 nt, Artificial Sequence
  Description of Artificial Sequence: Synthetic oligonucleotide
  Sense strand starting at position 1849 of SEQ ID NO: 1888606
gagcguguauuuccuuaaa

SEQ ID NO: 2544837 - RNA, 19 nt, Artificial Sequence
  Description of Artificial Sequence: Synthetic oligonucleotide
  Antisense strand to SEQ ID NO: 2544836
uuuaaggaaauacacgcuc

SEQ ID NO: 2544838 - RNA, 19 nt, Artificial Sequence
  Description of Artificial Sequence: Synthetic oligonucleotide
  Sense strand starting at position 152 of SEQ ID NO: 1888606
guagaauuaguuugaacau

SEQ ID NO: 2544839 - RNA, 19 nt, Artificial Sequence
  Description of Artificial Sequence: Synthetic oligonucleotide
  Antisense strand to SEQ ID NO: 2544838
auguucaaacuaauucuac

SEQ ID NO: 2544840 - RNA, 19 nt, Artificial Sequence
  Description of Artificial Sequence: Synthetic oligonucleotide
  Sense strand starting at position 3423 of SEQ ID NO: 1888606
gugguaggauauuccuaaa

SEQ ID NO: 2544841 - RNA, 19 nt, Artificial Sequence
  Description of Artificial Sequence: Synthetic oligonucleotide
  Antisense strand to SEQ ID NO: 2544840
uuuaggaauauccuaccac

SEQ ID NO: 2544842 - RNA, 19 nt, Artificial Sequence
  Description of Artificial Sequence: Synthetic oligonucleotide
  Sense strand starting at position 149 of SEQ ID NO: 1888606
cugguagaauuaguuugaa

SEQ ID NO: 2544843 - RNA, 19 nt, Artificial Sequence
  Description of Artificial Sequence: Synthetic oligonucleotide
  Antisense strand to SEQ ID NO: 2544842
uucaaacuaauucuaccag

SEQ ID NO: 2544844 - RNA, 19 nt, Artificial Sequence
  Description of Artificial Sequence: Synthetic oligonucleotide
  Sense strand starting at position 824 of SEQ ID NO: 1888606
uagguuacuuaagccagaa

SEQ ID NO: 2544845 - RNA, 19 nt, Artificial Sequence
  Description of Artificial Sequence: Synthetic oligonucleotide
  Antisense strand to SEQ ID NO: 2544844
uucuggcuuaaguaaccua

SEQ ID NO: 2544846 - RNA, 19 nt, Artificial Sequence
  Description of Artificial Sequence: Synthetic oligonucleotide
  Sense strand starting at position 837 of SEQ ID NO: 1888606
ccagaaucucccugaugua

SEQ ID NO: 2544847 - RNA, 19 nt, Artificial Sequence
  Description of Artificial Sequence: Synthetic oligonucleotide
  Antisense strand to SEQ ID NO: 2544846
uacaucagggagauucugg

SEQ ID NO: 2544848 - RNA, 19 nt, Artificial Sequence
  Description of Artificial Sequence: Synthetic oligonucleotide
  Sense strand starting at position 2163 of SEQ ID NO: 1888606
uuuacuauggccuaguaau

SEQ ID NO: 2544849 - RNA, 19 nt, Artificial Sequence
  Description of Artificial Sequence: Synthetic oligonucleotide
  Antisense strand to SEQ ID NO: 2544848
auuacuaggccauaguaaa

SEQ ID NO: 2544850 - RNA, 19 nt, Artificial Sequence
  Description of Artificial Sequence: Synthetic oligonucleotide
  Sense strand starting at position 2037 of SEQ ID NO: 1888606
gcccuaacuccacagaugu

SEQ ID NO: 2544851 - RNA, 19 nt, Artificial Sequence
  Description of Artificial Sequence: Synthetic oligonucleotide
  Antisense strand to SEQ ID NO: 2544850
acaucuguggaguuagggc

SEQ ID NO: 2544852 - RNA, 19 nt, Artificial Sequence
  Description of Artificial Sequence: Synthetic oligonucleotide
  Sense strand starting at position 2136 of SEQ ID NO: 1888606
uucucaugguucuuagaag

SEQ ID NO: 2544853 - RNA, 19 nt, Artificial Sequence
  Description of Artificial Sequence: Synthetic oligonucleotide
  Antisense strand to SEQ ID NO: 2544852
cuucuaagaaccaugagaa

SEQ ID NO: 2544854 - RNA, 19 nt, Artificial Sequence
  Description of Artificial Sequence: Synthetic oligonucleotide
  Sense strand starting at position 177 of SEQ ID NO: 1888606
aaaggcuaccuuugagagu

SEQ ID NO: 2544855 - RNA, 19 nt, Artificial Sequence
  Description of Artificial Sequence: Synthetic oligonucleotide
  Antisense strand to SEQ ID NO: 2544854
acucucaaagguagccuuu

SEQ ID NO: 2544856 - RNA, 19 nt, Artificial Sequence
  Description of Artificial Sequence: Synthetic oligonucleotide
  Sense strand starting at position 1159 of SEQ ID NO: 1888606
gcaaacaucugaguacuau

SEQ ID NO: 2544857 - RNA, 19 nt, Artificial Sequence
  Description of Artificial Sequence: Synthetic oligonucleotide
  Antisense strand to SEQ ID NO: 2544856
auaguacucagauguuugc

SEQ ID NO: 2544858 - RNA, 19 nt, Artificial Sequence
  Description of Artificial Sequence: Synthetic oligonucleotide
  Sense strand starting at position 2240 of SEQ ID NO: 1888606
ucuagcugauccuugaaca

SEQ ID NO: 2544859 - RNA, 19 nt, Artificial Sequence
  Description of Artificial Sequence: Synthetic oligonucleotide
  Antisense strand to SEQ ID NO: 2544858
uguucaaggaucagcuaga

SEQ ID NO: 2544860 - RNA, 19 nt, Artificial Sequence
  Description of Artificial Sequence: Synthetic oligonucleotide
  Sense strand starting at position 1147 of SEQ ID NO: 1888606
cucguuuauuucgcaaaca

SEQ ID NO: 2544861 - RNA, 19 nt, Artificial Sequence
  Description of Artificial Sequence: Synthetic oligonucleotide
  Antisense strand to SEQ ID NO: 2544860
uguuugcgaaauaaacgag

SEQ ID NO: 2544862 - RNA, 19 nt, Artificial Sequence
  Description of Artificial Sequence: Synthetic oligonucleotide
  Sense strand starting at position 1851 of SEQ ID NO: 1888606
gcguguauuuccuuaaauc

SEQ ID NO: 2544863 - RNA, 19 nt, Artificial Sequence
  Description of Artificial Sequence: Synthetic oligonucleotide
  Antisense strand to SEQ ID NO: 2544862
gauuuaaggaaauacacgc

SEQ ID NO: 2544864 - RNA, 19 nt, Artificial Sequence
  Description of Artificial Sequence: Synthetic oligonucleotide
  Sense strand starting at position 702 of SEQ ID NO: 1888606
uuaucugugcaacaguuaa

SEQ ID NO: 2544865 - RNA, 19 nt, Artificial Sequence
  Description of Artificial Sequence: Synthetic oligonucleotide
  Antisense strand to SEQ ID NO: 2544864
uuaacuguugcacagauaa

SEQ ID NO: 2544866 - RNA, 19 nt, Artificial Sequence
  Description of Artificial Sequence: Synthetic oligonucleotide
  Sense strand starting at position 815 of SEQ ID NO: 1888606
gaauuauguuagguuacuu

SEQ ID NO: 2544867 - RNA, 19 nt, Artificial Sequence
  Description of Artificial Sequence: Synthetic oligonucleotide
  Antisense strand to SEQ ID NO: 2544866
aaguaaccuaacauaauuc

SEQ ID NO: 2544868 - RNA, 19 nt, Artificial Sequence
  Description of Artificial Sequence: Synthetic oligonucleotide
  Sense strand starting at position 93 of SEQ ID NO: 1888606
cucuuugcucuagaaguac

SEQ ID NO: 2544869 - RNA, 19 nt, Artificial Sequence
  Description of Artificial Sequence: Synthetic oligonucleotide
  Antisense strand to SEQ ID NO: 2544868
guacuucuagagcaaagag

SEQ ID NO: 2544870 - RNA, 19 nt, Artificial Sequence
  Description of Artificial Sequence: Synthetic oligonucleotide
  Sense strand starting at position 3404 of SEQ ID NO: 1888606
gagauuuguugauggagaa

SEQ ID NO: 2544871 - RNA, 19 nt, Artificial Sequence
  Description of Artificial Sequence: Synthetic oligonucleotide
  Antisense strand to SEQ ID NO: 2544870
uucuccaucaacaaaucuc

SEQ ID NO: 2544872 - RNA, 19 nt, Artificial Sequence
  Description of Artificial Sequence: Synthetic oligonucleotide
  Sense strand starting at position 3391 of SEQ ID NO: 1888606
acggcagugaugggagauu

SEQ ID NO: 2544873 - RNA, 19 nt, Artificial Sequence
  Description of Artificial Sequence: Synthetic oligonucleotide
  Antisense strand to SEQ ID NO: 2544872
aaucucccaucacugccgu

SEQ ID NO: 2544874 - RNA, 19 nt, Artificial Sequence
  Description of Artificial Sequence: Synthetic oligonucleotide
  Sense strand starting at position 847 of SEQ ID NO: 1888606
ccugauguauauccucuua

SEQ ID NO: 2544875 - RNA, 19 nt, Artificial Sequence
  Description of Artificial Sequence: Synthetic oligonucleotide
  Antisense strand to SEQ ID NO: 2544874
uaagaggauauacaucagg

SEQ ID NO: 2544876 - RNA, 19 nt, Artificial Sequence
  Description of Artificial Sequence: Synthetic oligonucleotide
  Sense strand starting at position 3349 of SEQ ID NO: 1888606
aggaauugugagugggucu

SEQ ID NO: 2544877 - RNA, 19 nt, Artificial Sequence
  Description of Artificial Sequence: Synthetic oligonucleotide
  Antisense strand to SEQ ID NO: 2544876
agacccacucacaauuccu

SEQ ID NO: 2544878 - RNA, 19 nt, Artificial Sequence
  Description of Artificial Sequence: Synthetic oligonucleotide
  Sense strand starting at position 161 of SEQ ID NO: 1888606
guuugaacaucuguguaaa

SEQ ID NO: 2544879 - RNA, 19 nt, Artificial Sequence
  Description of Artificial Sequence: Synthetic oligonucleotide
  Antisense strand to SEQ ID NO: 2544878
uuuacacagauguucaaac

SEQ ID NO: 2544880 - RNA, 19 nt, Artificial Sequence
  Description of Artificial Sequence: Synthetic oligonucleotide
  Sense strand starting at position 836 of SEQ ID NO: 1888606
gccagaaucucccugaugu

SEQ ID NO: 2544881 - RNA, 19 nt, Artificial Sequence
  Description of Artificial Sequence: Synthetic oligonucleotide
  Antisense strand to SEQ ID NO: 2544880
acaucagggagauucuggc

SEQ ID NO: 2544882 - RNA, 19 nt, Artificial Sequence
  Description of Artificial Sequence: Synthetic oligonucleotide
  Sense strand starting at position 1775 of SEQ ID NO: 1888606
agcacaguacuuggcauaa

SEQ ID NO: 2544883 - RNA, 19 nt, Artificial Sequence
  Description of Artificial Sequence: Synthetic oligonucleotide
  Antisense strand to SEQ ID NO: 2544882
uuaugccaaguacugugcu

SEQ ID NO: 2544884 - RNA, 19 nt, Artificial Sequence
  Description of Artificial Sequence: Synthetic oligonucleotide
  Sense strand starting at position 47 of SEQ ID NO: 1888606
cuuuguuugccucaguaaa

SEQ ID NO: 2544885 - RNA, 19 nt, Artificial Sequence
  Description of Artificial Sequence: Synthetic oligonucleotide
  Antisense strand to SEQ ID NO: 2544884
uuuacugaggcaaacaaag

SEQ ID NO: 2544886 - RNA, 19 nt, Artificial Sequence
  Description of Artificial Sequence: Synthetic oligonucleotide
  Sense strand starting at position 2453 of SEQ ID NO: 1888606
ugaguugucuccucuagac

SEQ ID NO: 2544887 - RNA, 19 nt, Artificial Sequence
  Description of Artificial Sequence: Synthetic oligonucleotide
  Antisense strand to SEQ ID NO: 2544886
gucuagaggagacaacuca

SEQ ID NO: 2544888 - RNA, 19 nt, Artificial Sequence
  Description of Artificial Sequence: Synthetic oligonucleotide
  Sense strand starting at position 91 of SEQ ID NO: 1888606
agcucuuugcucuagaagu

SEQ ID NO: 2544889 - RNA, 19 nt, Artificial Sequence
  Description of Artificial Sequence: Synthetic oligonucleotide
  Antisense strand to SEQ ID NO: 2544888
acuucuagagcaaagagcu

SEQ ID NO: 2544890 - RNA, 19 nt, Artificial Sequence
  Description of Artificial Sequence: Synthetic oligonucleotide
  Sense strand starting at position 788 of SEQ ID NO: 1888606
gaugaugucugaucacguc

SEQ ID NO: 2544891 - RNA, 19 nt, Artificial Sequence
  Description of Artificial Sequence: Synthetic oligonucleotide
  Antisense strand to SEQ ID NO: 2544890
gacgugaucagacaucauc

SEQ ID NO: 2544892 - RNA, 19 nt, Artificial Sequence
  Description of Artificial Sequence: Synthetic oligonucleotide
  Sense strand starting at position 1260 of SEQ ID NO: 1888606
auguccucauguuucuuaa

SEQ ID NO: 2544893 - RNA, 19 nt, Artificial Sequence
  Description of Artificial Sequence: Synthetic oligonucleotide
  Antisense strand to SEQ ID NO: 2544892
uuaagaaacaugaggacau

SEQ ID NO: 2544894 - RNA, 19 nt, Artificial Sequence
  Description of Artificial Sequence: Synthetic oligonucleotide
  Sense strand starting at position 988 of SEQ ID NO: 1888606
uacagugguccguauacuu

SEQ ID NO: 2544895 - RNA, 19 nt, Artificial Sequence
  Description of Artificial Sequence: Synthetic oligonucleotide
  Antisense strand to SEQ ID NO: 2544894
aaguauacggaccacugua

SEQ ID NO: 2544896 - RNA, 19 nt, Artificial Sequence
  Description of Artificial Sequence: Synthetic oligonucleotide
  Sense strand starting at position 3350 of SEQ ID NO: 1888607
gucaaaucacuugaaguca

SEQ ID NO: 2544897 - RNA, 19 nt, Artificial Sequence
  Description of Artificial Sequence: Synthetic oligonucleotide
  Antisense strand to SEQ ID NO: 2544896
ugacuucaagugauuugac

SEQ ID NO: 2544898 - RNA, 19 nt, Artificial Sequence
  Description of Artificial Sequence: Synthetic oligonucleotide
  Sense strand starting at position 3854 of SEQ ID NO: 1888607
gcuaucucccuguugugua

SEQ ID NO: 2544899 - RNA, 19 nt, Artificial Sequence
  Description of Artificial Sequence: Synthetic oligonucleotide
  Antisense strand to SEQ ID NO: 2544898
uacacaacagggagauagc

SEQ ID NO: 2544900 - RNA, 19 nt, Artificial Sequence
  Description of Artificial Sequence: Synthetic oligonucleotide
  Sense strand starting at position 186 of SEQ ID NO: 1888607
gcaaaccuuccagagaagu

SEQ ID NO: 2544901 - RNA, 19 nt, Artificial Sequence
  Description of Artificial Sequence: Synthetic oligonucleotide
  Antisense strand to SEQ ID NO: 2544900
acuucucuggaagguuugc

SEQ ID NO: 2544902 - RNA, 19 nt, Artificial Sequence
  Description of Artificial Sequence: Synthetic oligonucleotide
  Sense strand starting at position 3688 of SEQ ID NO: 1888607
acgagagccuggcuaauuu

SEQ ID NO: 2544903 - RNA, 19 nt, Artificial Sequence
  Description of Artificial Sequence: Synthetic oligonucleotide
  Antisense strand to SEQ ID NO: 2544902
aaauuagccaggcucucgu

SEQ ID NO: 2544904 - RNA, 19 nt, Artificial Sequence
  Description of Artificial Sequence: Synthetic oligonucleotide
  Sense strand starting at position 1879 of SEQ ID NO: 1888607
agauucccacauugaagua

SEQ ID NO: 2544905 - RNA, 19 nt, Artificial Sequence
  Description of Artificial Sequence: Synthetic oligonucleotide
  Antisense strand to SEQ ID NO: 2544904
uacuucaaugugggaaucu

SEQ ID NO: 2544906 - RNA, 19 nt, Artificial Sequence
  Description of Artificial Sequence: Synthetic oligonucleotide
  Sense strand starting at position 2142 of SEQ ID NO: 1888607
auggcucugagguguauuu

SEQ ID NO: 2544907 - RNA, 19 nt, Artificial Sequence
  Description of Artificial Sequence: Synthetic oligonucleotide
  Antisense strand to SEQ ID NO: 2544906
aaauacaccucagagccau

SEQ ID NO: 2544908 - RNA, 19 nt, Artificial Sequence
  Description of Artificial Sequence: Synthetic oligonucleotide
  Sense strand starting at position 3184 of SEQ ID NO: 1888607
aggugcucacuccaugaaa

SEQ ID NO: 2544909 - RNA, 19 nt, Artificial Sequence
  Description of Artificial Sequence: Synthetic oligonucleotide
  Antisense strand to SEQ ID NO: 2544908
uuucauggagugagcaccu

SEQ ID NO: 2544910 - RNA, 19 nt, Artificial Sequence
  Description of Artificial Sequence: Synthetic oligonucleotide
  Sense strand starting at position 604 of SEQ ID NO: 1888607
ucgauacagccuuauacaa

SEQ ID NO: 2544911 - RNA, 19 nt, Artificial Sequence
  Description of Artificial Sequence: Synthetic oligonucleotide
  Antisense strand to SEQ ID NO: 2544910
uuguauaaggcuguaucga

SEQ ID NO: 2544912 - RNA, 19 nt, Artificial Sequence
  Description of Artificial Sequence: Synthetic oligonucleotide
  Sense strand starting at position 1134 of SEQ ID NO: 1888607
uccuaauugccaugaggaa

SEQ ID NO: 2544913 - RNA, 19 nt, Artificial Sequence
  Description of Artificial Sequence: Synthetic oligonucleotide
  Antisense strand to SEQ ID NO: 2544912
uuccucauggcaauuagga

SEQ ID NO: 2544914 - RNA, 19 nt, Artificial Sequence
  Description of Artificial Sequence: Synthetic oligonucleotide
  Sense strand starting at position 162 of SEQ ID NO: 1888607
ugcagaucucuccaaggua

SEQ ID NO: 2544915 - RNA, 19 nt, Artificial Sequence
  Description of Artificial Sequence: Synthetic oligonucleotide
  Antisense strand to SEQ ID NO: 2544914
uaccuuggagagaucugca

SEQ ID NO: 2544916 - RNA, 19 nt, Artificial Sequence
  Description of Artificial Sequence: Synthetic oligonucleotide
  Sense strand starting at position 654 of SEQ ID NO: 1888607
gugacuccuggccauaaau

SEQ ID NO: 2544917 - RNA, 19 nt, Artificial Sequence
  Description of Artificial Sequence: Synthetic oligonucleotide
  Antisense strand to SEQ ID NO: 2544916
auuuauggccaggagucac

SEQ ID NO: 2544918 - RNA, 19 nt, Artificial Sequence
  Description of Artificial Sequence: Synthetic oligonucleotide
  Sense strand starting at position 3111 of SEQ ID NO: 1888607
aggacacaggccuguaaau

SEQ ID NO: 2544919 - RNA, 19 nt, Artificial Sequence
  Description of Artificial Sequence: Synthetic oligonucleotide
  Antisense strand to SEQ ID NO: 2544918
auuuacaggccuguguccu

SEQ ID NO: 2544920 - RNA, 19 nt, Artificial Sequence
  Description of Artificial Sequence: Synthetic oligonucleotide
  Sense strand starting at position 72 of SEQ ID NO: 1888607
ggguuagugacucacaggu

SEQ ID NO: 2544921 - RNA, 19 nt, Artificial Sequence
  Description of Artificial Sequence: Synthetic oligonucleotide
  Antisense strand to SEQ ID NO: 2544920
accugugagucacuaaccc

SEQ ID NO: 2544922 - RNA, 19 nt, Artificial Sequence
  Description of Artificial Sequence: Synthetic oligonucleotide
  Sense strand starting at position 392 of SEQ ID NO: 1888607
acggaacccuccuugauau

SEQ ID NO: 2544923 - RNA, 19 nt, Artificial Sequence
  Description of Artificial Sequence: Synthetic oligonucleotide
  Antisense strand to SEQ ID NO: 2544922
auaucaaggaggguuccgu

SEQ ID NO: 2544924 - RNA, 19 nt, Artificial Sequence
  Description of Artificial Sequence: Synthetic oligonucleotide
  Sense strand starting at position 797 of SEQ ID NO: 1888607
ccaggaugccuugagcuga

SEQ ID NO: 2544925 - RNA, 19 nt, Artificial Sequence
  Description of Artificial Sequence: Synthetic oligonucleotide
  Antisense strand to SEQ ID NO: 2544924
ucagcucaaggcauccugg

SEQ ID NO: 2544926 - RNA, 19 nt, Artificial Sequence
  Description of Artificial Sequence: Synthetic oligonucleotide
  Sense strand starting at position 1802 of SEQ ID NO: 1888607
gcuucugucacugauggga

SEQ ID NO: 2544927 - RNA, 19 nt, Artificial Sequence
  Description of Artificial Sequence: Synthetic oligonucleotide
  Antisense strand to SEQ ID NO: 2544926
ucccaucagugacagaagc

SEQ ID NO: 2544928 - RNA, 19 nt, Artificial Sequence
  Description of Artificial Sequence: Synthetic oligonucleotide
  Sense strand starting at position 165 of SEQ ID NO: 1888607
agaucucuccaagguaucu

SEQ ID NO: 2544929 - RNA, 19 nt, Artificial Sequence
  Description of Artificial Sequence: Synthetic oligonucleotide
  Antisense strand to SEQ ID NO: 2544928
agauaccuuggagagaucu

SEQ ID NO: 2544930 - RNA, 19 nt, Artificial Sequence
  Description of Artificial Sequence: Synthetic oligonucleotide
  Sense strand starting at position 403 of SEQ ID NO: 1888607
cuugauauggcccauccuu

SEQ ID NO: 2544931 - RNA, 19 nt, Artificial Sequence
  Description of Artificial Sequence: Synthetic oligonucleotide
  Antisense strand to SEQ ID NO: 2544930
aaggaugggccauaucaag

SEQ ID NO: 2544932 - RNA, 19 nt, Artificial Sequence
  Description of Artificial Sequence: Synthetic oligonucleotide
  Sense strand starting at position 61 of SEQ ID NO: 1888607
acaguauggaaggguuagu

SEQ ID NO: 2544933 - RNA, 19 nt, Artificial Sequence
  Description of Artificial Sequence: Synthetic oligonucleotide
  Antisense strand to SEQ ID NO: 2544932
acuaacccuuccauacugu

SEQ ID NO: 2544934 - RNA, 19 nt, Artificial Sequence
  Description of Artificial Sequence: Synthetic oligonucleotide
  Sense strand starting at position 934 of SEQ ID NO: 1888607
ugggaucagcuggguuaga

SEQ ID NO: 2544935 - RNA, 19 nt, Artificial Sequence
  Description of Artificial Sequence: Synthetic oligonucleotide
  Antisense strand to SEQ ID NO: 2544934
ucuaacccagcugauccca

SEQ ID NO: 2544936 - RNA, 19 nt, Artificial Sequence
  Description of Artificial Sequence: Synthetic oligonucleotide
  Sense strand starting at position 3659 of SEQ ID NO: 1888607
cguguugaaguccacaaga

SEQ ID NO: 2544937 - RNA, 19 nt, Artificial Sequence
  Description of Artificial Sequence: Synthetic oligonucleotide
  Antisense strand to SEQ ID NO: 2544936
ucuuguggacuucaacacg

SEQ ID NO: 2544938 - RNA, 19 nt, Artificial Sequence
  Description of Artificial Sequence: Synthetic oligonucleotide
  Sense strand starting at position 653 of SEQ ID NO: 1888607
agugacuccuggccauaaa

SEQ ID NO: 2544939 - RNA, 19 nt, Artificial Sequence
  Description of Artificial Sequence: Synthetic oligonucleotide
  Antisense strand to SEQ ID NO: 2544938
uuuauggccaggagucacu

SEQ ID NO: 2544940 - RNA, 19 nt, Artificial Sequence
  Description of Artificial Sequence: Synthetic oligonucleotide
  Sense strand starting at position 2067 of SEQ ID NO: 1888607
augaaaugccaccguggaa

SEQ ID NO: 2544941 - RNA, 19 nt, Artificial Sequence
  Description of Artificial Sequence: Synthetic oligonucleotide
  Antisense strand to SEQ ID NO: 2544940
uuccacgguggcauuucau

SEQ ID NO: 2544942 - RNA, 19 nt, Artificial Sequence
  Description of Artificial Sequence: Synthetic oligonucleotide
  Sense strand starting at position 3005 of SEQ ID NO: 1888607
cuuccugugggcuacuaua

SEQ ID NO: 2544943 - RNA, 19 nt, Artificial Sequence
  Description of Artificial Sequence: Synthetic oligonucleotide
  Antisense strand to SEQ ID NO: 2544942
uauaguagcccacaggaag

SEQ ID NO: 2544944 - RNA, 19 nt, Artificial Sequence
  Description of Artificial Sequence: Synthetic oligonucleotide
  Sense strand starting at position 2895 of SEQ ID NO: 1888607
ggagcaaaguacuuagucu

SEQ ID NO: 2544945 - RNA, 19 nt, Artificial Sequence
  Description of Artificial Sequence: Synthetic oligonucleotide
  Antisense strand to SEQ ID NO: 2544944
agacuaaguacuuugcucc

SEQ ID NO: 2544946 - RNA, 19 nt, Artificial Sequence
  Description of Artificial Sequence: Synthetic oligonucleotide
  Sense strand starting at position 3861 of SEQ ID NO: 1888607
cccuguuguguauacauau

SEQ ID NO: 2544947 - RNA, 19 nt, Artificial Sequence
  Description of Artificial Sequence: Synthetic oligonucleotide
  Antisense strand to SEQ ID NO: 2544946
auauguauacacaacaggg

SEQ ID NO: 2544948 - RNA, 19 nt, Artificial Sequence
  Description of Artificial Sequence: Synthetic oligonucleotide
  Sense strand starting at position 1561 of SEQ ID NO: 1888607
auugguaacggcugauaau

SEQ ID NO: 2544949 - RNA, 19 nt, Artificial Sequence
  Description of Artificial Sequence: Synthetic oligonucleotide
  Antisense strand to SEQ ID NO: 2544948
auuaucagccguuaccaau

SEQ ID NO: 2544950 - RNA, 19 nt, Artificial Sequence
  Description of Artificial Sequence: Synthetic oligonucleotide
  Sense strand starting at position 1038 of SEQ ID NO: 1888607
uccucaugccagugaccaa

SEQ ID NO: 2544951 - RNA, 19 nt, Artificial Sequence
  Description of Artificial Sequence: Synthetic oligonucleotide
  Antisense strand to SEQ ID NO: 2544950
uuggucacuggcaugagga

SEQ ID NO: 2544952 - RNA, 19 nt, Artificial Sequence
  Description of Artificial Sequence: Synthetic oligonucleotide
  Sense strand starting at position 1824 of SEQ ID NO: 1888607
guaccuuccugcucaggga

SEQ ID NO: 2544953 - RNA, 19 nt, Artificial Sequence
  Description of Artificial Sequence: Synthetic oligonucleotide
  Antisense strand to SEQ ID NO: 2544952
ucccugagcaggaagguac

SEQ ID NO: 2544954 - RNA, 19 nt, Artificial Sequence
  Description of Artificial Sequence: Synthetic oligonucleotide
  Sense strand starting at position 3859 of SEQ ID NO: 1888607
cucccuguuguguauacau

SEQ ID NO: 2544955 - RNA, 19 nt, Artificial Sequence
  Description of Artificial Sequence: Synthetic oligonucleotide
  Antisense strand to SEQ ID NO: 2544954
auguauacacaacagggag

SEQ ID NO: 2544956 - RNA, 19 nt, Artificial Sequence
  Description of Artificial Sequence: Synthetic oligonucleotide
  Sense strand starting at position 2099 of SEQ ID NO: 1888607
aagaacaggucagaugaau

SEQ ID NO: 2544957 - RNA, 19 nt, Artificial Sequence
  Description of Artificial Sequence: Synthetic oligonucleotide
  Antisense strand to SEQ ID NO: 2544956
auucaucugaccuguucuu

SEQ ID NO: 2544958 - RNA, 19 nt, Artificial Sequence
  Description of Artificial Sequence: Synthetic oligonucleotide
  Sense strand starting at position 231 of SEQ ID NO: 1888607
cucugugagccuuacaguu

SEQ ID NO: 2544959 - RNA, 19 nt, Artificial Sequence
  Description of Artificial Sequence: Synthetic oligonucleotide
  Antisense strand to SEQ ID NO: 2544958
aacuguaaggcucacagag

SEQ ID NO: 2544960 - RNA, 19 nt, Artificial Sequence
  Description of Artificial Sequence: Synthetic oligonucleotide
  Sense strand starting at position 2052 of SEQ ID NO: 1888607
cacuucugggcuuguauga

SEQ ID NO: 2544961 - RNA, 19 nt, Artificial Sequence
  Description of Artificial Sequence: Synthetic oligonucleotide
  Antisense strand to SEQ ID NO: 2544960
ucauacaagcccagaagug

SEQ ID NO: 2544962 - RNA, 19 nt, Artificial Sequence
  Description of Artificial Sequence: Synthetic oligonucleotide
  Sense strand starting at position 3134 of SEQ ID NO: 1888607
agccacuguuuguuaacaa

SEQ ID NO: 2544963 - RNA, 19 nt, Artificial Sequence
  Description of Artificial Sequence: Synthetic oligonucleotide
  Antisense strand to SEQ ID NO: 2544962
uuguuaacaaacaguggcu

SEQ ID NO: 2544964 - RNA, 19 nt, Artificial Sequence
  Description of Artificial Sequence: Synthetic oligonucleotide
  Sense strand starting at position 2242 of SEQ ID NO: 1888607
ugugaagucucauccagca

SEQ ID NO: 2544965 - RNA, 19 nt, Artificial Sequence
  Description of Artificial Sequence: Synthetic oligonucleotide
  Antisense strand to SEQ ID NO: 2544964
ugcuggaugagacuucaca

SEQ ID NO: 2544966 - RNA, 19 nt, Artificial Sequence
  Description of Artificial Sequence: Synthetic oligonucleotide
  Sense strand starting at position 3340 of SEQ ID NO: 1888607
ggccgaggucgucaaauca

SEQ ID NO: 2544967 - RNA, 19 nt, Artificial Sequence
  Description of Artificial Sequence: Synthetic oligonucleotide
  Antisense strand to SEQ ID NO: 2544966
ugauuugacgaccucggcc

SEQ ID NO: 2544968 - RNA, 19 nt, Artificial Sequence
  Description of Artificial Sequence: Synthetic oligonucleotide
  Sense strand starting at position 243 of SEQ ID NO: 1888607
uacaguuugcugcaaagca

SEQ ID NO: 2544969 - RNA, 19 nt, Artificial Sequence
  Description of Artificial Sequence: Synthetic oligonucleotide
  Antisense strand to SEQ ID NO: 2544968
ugcuuugcagcaaacugua

SEQ ID NO: 2544970 - RNA, 19 nt, Artificial Sequence
  Description of Artificial Sequence: Synthetic oligonucleotide
  Sense strand starting at position 3686 of SEQ ID NO: 1888607
ccacgagagccuggcuaau

SEQ ID NO: 2544971 - RNA, 19 nt, Artificial Sequence
  Description of Artificial Sequence: Synthetic oligonucleotide
  Antisense strand to SEQ ID NO: 2544970
auuagccaggcucucgugg

SEQ ID NO: 2544972 - RNA, 19 nt, Artificial Sequence
  Description of Artificial Sequence: Synthetic oligonucleotide
  Sense strand starting at position 17 of SEQ ID NO: 1888607
cugguuuccugagugguca

SEQ ID NO: 2544973 - RNA, 19 nt, Artificial Sequence
  Description of Artificial Sequence: Synthetic oligonucleotide
  Antisense strand to SEQ ID NO: 2544972
ugaccacucaggaaaccag

SEQ ID NO: 2544974 - RNA, 19 nt, Artificial Sequence
  Description of Artificial Sequence: Synthetic oligonucleotide
  Sense strand starting at position 3218 of SEQ ID NO: 1888607
ccucguaauugaccaguuu

SEQ ID NO: 2544975 - RNA, 19 nt, Artificial Sequence
  Description of Artificial Sequence: Synthetic oligonucleotide
  Antisense strand to SEQ ID NO: 2544974
aaacuggucaauuacgagg

SEQ ID NO: 2544976 - RNA, 19 nt, Artificial Sequence
  Description of Artificial Sequence: Synthetic oligonucleotide
  Sense strand starting at position 2777 of SEQ ID NO: 1888608
gguugaccugucuaaagga

SEQ ID NO: 2544977 - RNA, 19 nt, Artificial Sequence
  Description of Artificial Sequence: Synthetic oligonucleotide
  Antisense strand to SEQ ID NO: 2544976
uccuuuagacaggucaacc

SEQ ID NO: 2544978 - RNA, 19 nt, Artificial Sequence
  Description of Artificial Sequence: Synthetic oligonucleotide
  Sense strand starting at position 3414 of SEQ ID NO: 1888608
ugaggaaugguccauugua

SEQ ID NO: 2544979 - RNA, 19 nt, Artificial Sequence
  Description of Artificial Sequence: Synthetic oligonucleotide
  Antisense strand to SEQ ID NO: 2544978
uacaauggaccauuccuca

SEQ ID NO: 2544980 - RNA, 19 nt, Artificial Sequence
  Description of Artificial Sequence: Synthetic oligonucleotide
  Sense strand starting at position 1786 of SEQ ID NO: 1888608
gucucuuaaguagauggga

SEQ ID NO: 2544981 - RNA, 19 nt, Artificial Sequence
  Description of Artificial Sequence: Synthetic oligonucleotide
  Antisense strand to SEQ ID NO: 2544980
ucccaucuacuuaagagac

SEQ ID NO: 2544982 - RNA, 19 nt, Artificial Sequence
  Description of Artificial Sequence: Synthetic oligonucleotide
  Sense strand starting at position 1941 of SEQ ID NO: 1888608
ugggauuaugggcauguaa

SEQ ID NO: 2544983 - RNA, 19 nt, Artificial Sequence
  Description of Artificial Sequence: Synthetic oligonucleotide
  Antisense strand to SEQ ID NO: 2544982
uuacaugcccauaauccca

SEQ ID NO: 2544984 - RNA, 19 nt, Artificial Sequence
  Description of Artificial Sequence: Synthetic oligonucleotide
  Sense strand starting at position 2548 of SEQ ID NO: 1888608
aguugucacccugaacaag

SEQ ID NO: 2544985 - RNA, 19 nt, Artificial Sequence
  Description of Artificial Sequence: Synthetic oligonucleotide
  Antisense strand to SEQ ID NO: 2544984
cuuguucagggugacaacu

SEQ ID NO: 2544986 - RNA, 19 nt, Artificial Sequence
  Description of Artificial Sequence: Synthetic oligonucleotide
  Sense strand starting at position 2822 of SEQ ID NO: 1888608
gacccuugcguugucagua

SEQ ID NO: 2544987 - RNA, 19 nt, Artificial Sequence
  Description of Artificial Sequence: Synthetic oligonucleotide
  Antisense strand to SEQ ID NO: 2544986
uacugacaacgcaaggguc

SEQ ID NO: 2544988 - RNA, 19 nt, Artificial Sequence
  Description of Artificial Sequence: Synthetic oligonucleotide
  Sense strand starting at position 3845 of SEQ ID NO: 1888608
gguugaagcacagacucau

SEQ ID NO: 2544989 - RNA, 19 nt, Artificial Sequence
  Description of Artificial Sequence: Synthetic oligonucleotide
  Antisense strand to SEQ ID NO: 2544988
augagucugugcuucaacc

SEQ ID NO: 2544990 - RNA, 19 nt, Artificial Sequence
  Description of Artificial Sequence: Synthetic oligonucleotide
  Sense strand starting at position 29 of SEQ ID NO: 1888608
ggagaauacguguacauau

SEQ ID NO: 2544991 - RNA, 19 nt, Artificial Sequence
  Description of Artificial Sequence: Synthetic oligonucleotide
  Antisense strand to SEQ ID NO: 2544990
auauguacacguauucucc

SEQ ID NO: 2544992 - RNA, 19 nt, Artificial Sequence
  Description of Artificial Sequence: Synthetic oligonucleotide
  Sense strand starting at position 31 of SEQ ID NO: 1888608
agaauacguguacauauau

SEQ ID NO: 2544993 - RNA, 19 nt, Artificial Sequence
  Description of Artificial Sequence: Synthetic oligonucleotide
  Antisense strand to SEQ ID NO: 2544992
auauauguacacguauucu

SEQ ID NO: 2544994 - RNA, 19 nt, Artificial Sequence
  Description of Artificial Sequence: Synthetic oligonucleotide
  Sense strand starting at position 2184 of SEQ ID NO: 1888608
aggauagaugaaugugguu

SEQ ID NO: 2544995 - RNA, 19 nt, Artificial Sequence
  Description of Artificial Sequence: Synthetic oligonucleotide
  Antisense strand to SEQ ID NO: 2544994
aaccacauucaucuauccu

SEQ ID NO: 2544996 - RNA, 19 nt, Artificial Sequence
  Description of Artificial Sequence: Synthetic oligonucleotide
  Sense strand starting at position 1473 of SEQ ID NO: 1888608
ggauaucggcaugagguaa

SEQ ID NO: 2544997 - RNA, 19 nt, Artificial Sequence
  Description of Artificial Sequence: Synthetic oligonucleotide
  Antisense strand to SEQ ID NO: 2544996
uuaccucaugccgauaucc

SEQ ID NO: 2544998 - RNA, 19 nt, Artificial Sequence
  Description of Artificial Sequence: Synthetic oligonucleotide
  Sense strand starting at position 2189 of SEQ ID NO: 1888608
agaugaaugugguuggaug

SEQ ID NO: 2544999 - RNA, 19 nt, Artificial Sequence
  Description of Artificial Sequence: Synthetic oligonucleotide
  Antisense strand to SEQ ID NO: 2544998
cauccaaccacauucaucu

SEQ ID NO: 2545000 - RNA, 19 nt, Artificial Sequence
  Description of Artificial Sequence: Synthetic oligonucleotide
  Sense strand starting at position 2895 of SEQ ID NO: 1888608
agguccucucccuaucaga

SEQ ID NO: 2545001 - RNA, 19 nt, Artificial Sequence
  Description of Artificial Sequence: Synthetic oligonucleotide
  Antisense strand to SEQ ID NO: 2545000
ucugauagggagaggaccu

SEQ ID NO: 2545002 - RNA, 19 nt, Artificial Sequence
  Description of Artificial Sequence: Synthetic oligonucleotide
  Sense strand starting at position 3019 of SEQ ID NO: 1888608
ugaugucuagcauauauga

SEQ ID NO: 2545003 - RNA, 19 nt, Artificial Sequence
  Description of Artificial Sequence: Synthetic oligonucleotide
  Antisense strand to SEQ ID NO: 2545002
ucauauaugcuagacauca

SEQ ID NO: 2545004 - RNA, 19 nt, Artificial Sequence
  Description of Artificial Sequence: Synthetic oligonucleotide
  Sense strand starting at position 3825 of SEQ ID NO: 1888608
ucauguuugccagagaaca

SEQ ID NO: 2545005 - RNA, 19 nt, Artificial Sequence
  Description of Artificial Sequence: Synthetic oligonucleotide
  Antisense strand to SEQ ID NO: 2545004
uguucucuggcaaacauga

SEQ ID NO: 2545006 - RNA, 19 nt, Artificial Sequence
  Description of Artificial Sequence: Synthetic oligonucleotide
  Sense strand starting at position 3001 of SEQ ID NO: 1888608
cgugucaggccuuuagcau

SEQ ID NO: 2545007 - RNA, 19 nt, Artificial Sequence
  Description of Artificial Sequence: Synthetic oligonucleotide
  Antisense strand to SEQ ID NO: 2545006
augcuaaaggccugacacg

SEQ ID NO: 2545008 - RNA, 19 nt, Artificial Sequence
  Description of Artificial Sequence: Synthetic oligonucleotide
  Sense strand starting at position 2375 of SEQ ID NO: 1888608
auaugauuggccuggauaa

SEQ ID NO: 2545009 - RNA, 19 nt, Artificial Sequence
  Description of Artificial Sequence: Synthetic oligonucleotide
  Antisense strand to SEQ ID NO: 2545008
uuauccaggccaaucauau

SEQ ID NO: 2545010 - RNA, 19 nt, Artificial Sequence
  Description of Artificial Sequence: Synthetic oligonucleotide
  Sense strand starting at position 3044 of SEQ ID NO: 1888608
caacaagugguacacgauu

SEQ ID NO: 2545011 - RNA, 19 nt, Artificial Sequence
  Description of Artificial Sequence: Synthetic oligonucleotide
  Antisense strand to SEQ ID NO: 2545010
aaucguguaccacuuguug

SEQ ID NO: 2545012 - RNA, 19 nt, Artificial Sequence
  Description of Artificial Sequence: Synthetic oligonucleotide
  Sense strand starting at position 3051 of SEQ ID NO: 1888608
ugguacacgauugauuauu

SEQ ID NO: 2545013 - RNA, 19 nt, Artificial Sequence
  Description of Artificial Sequence: Synthetic oligonucleotide
  Antisense strand to SEQ ID NO: 2545012
aauaaucaaucguguacca

SEQ ID NO: 2545014 - RNA, 19 nt, Artificial Sequence
  Description of Artificial Sequence: Synthetic oligonucleotide
  Sense strand starting at position 1598 of SEQ ID NO: 1888608
gguugauuccacuggaaac

SEQ ID NO: 2545015 - RNA, 19 nt, Artificial Sequence
  Description of Artificial Sequence: Synthetic oligonucleotide
  Antisense strand to SEQ ID NO: 2545014
guuuccaguggaaucaacc

SEQ ID NO: 2545016 - RNA, 19 nt, Artificial Sequence
  Description of Artificial Sequence: Synthetic oligonucleotide
  Sense strand starting at position 2800 of SEQ ID NO: 1888608
ucccuaaauuaguugauga

SEQ ID NO: 2545017 - RNA, 19 nt, Artificial Sequence
  Description of Artificial Sequence: Synthetic oligonucleotide
  Antisense strand to SEQ ID NO: 2545016
ucaucaacuaauuuaggga

SEQ ID NO: 2545018 - RNA, 19 nt, Artificial Sequence
  Description of Artificial Sequence: Synthetic oligonucleotide
  Sense strand starting at position 657 of SEQ ID NO: 1888608
ccauuacugggugaguuua

SEQ ID NO: 2545019 - RNA, 19 nt, Artificial Sequence
  Description of Artificial Sequence: Synthetic oligonucleotide
  Antisense strand to SEQ ID NO: 2545018
uaaacucacccaguaaugg

SEQ ID NO: 2545020 - RNA, 19 nt, Artificial Sequence
  Description of Artificial Sequence: Synthetic oligonucleotide
  Sense strand starting at position 3929 of SEQ ID NO: 1888608
cuaauuuccuucuuguguu

SEQ ID NO: 2545021 - RNA, 19 nt, Artificial Sequence
  Description of Artificial Sequence: Synthetic oligonucleotide
  Antisense strand to SEQ ID NO: 2545020
aacacaagaaggaaauuag

SEQ ID NO: 2545022 - RNA, 19 nt, Artificial Sequence
  Description of Artificial Sequence: Synthetic oligonucleotide
  Sense strand starting at position 2567 of SEQ ID NO: 1888608
ggaucuucccuccauguca

SEQ ID NO: 2545023 - RNA, 19 nt, Artificial Sequence
  Description of Artificial Sequence: Synthetic oligonucleotide
  Antisense strand to SEQ ID NO: 2545022
ugacauggagggaagaucc

SEQ ID NO: 2545024 - RNA, 19 nt, Artificial Sequence
  Description of Artificial Sequence: Synthetic oligonucleotide
  Sense strand starting at position 2023 of SEQ ID NO: 1888608
gcauuugcuuguuuaugga

SEQ ID NO: 2545025 - RNA, 19 nt, Artificial Sequence
  Description of Artificial Sequence: Synthetic oligonucleotide
  Antisense strand to SEQ ID NO: 2545024
uccauaaacaagcaaaugc

SEQ ID NO: 2545026 - RNA, 19 nt, Artificial Sequence
  Description of Artificial Sequence: Synthetic oligonucleotide
  Sense strand starting at position 2376 of SEQ ID NO: 1888608
uaugauuggccuggauaac

SEQ ID NO: 2545027 - RNA, 19 nt, Artificial Sequence
  Description of Artificial Sequence: Synthetic oligonucleotide
  Antisense strand to SEQ ID NO: 2545026
guuauccaggccaaucaua

SEQ ID NO: 2545028 - RNA, 19 nt, Artificial Sequence
  Description of Artificial Sequence: Synthetic oligonucleotide
  Sense strand starting at position 1461 of SEQ ID NO: 1888608
cgaucagauacgggauauc

SEQ ID NO: 2545029 - RNA, 19 nt, Artificial Sequence
  Description of Artificial Sequence: Synthetic oligonucleotide
  Antisense strand to SEQ ID NO: 2545028
gauaucccguaucugaucg

SEQ ID NO: 2545030 - RNA, 19 nt, Artificial Sequence
  Description of Artificial Sequence: Synthetic oligonucleotide
  Sense strand starting at position 2647 of SEQ ID NO: 1888608
guaacaggugguugaaaca

SEQ ID NO: 2545031 - RNA, 19 nt, Artificial Sequence
  Description of Artificial Sequence: Synthetic oligonucleotide
  Antisense strand to SEQ ID NO: 2545030
uguuucaaccaccuguuac

SEQ ID NO: 2545032 - RNA, 19 nt, Artificial Sequence
  Description of Artificial Sequence: Synthetic oligonucleotide
  Sense strand starting at position 988 of SEQ ID NO: 1888608
ugugaaauagcucaugcaa

SEQ ID NO: 2545033 - RNA, 19 nt, Artificial Sequence
  Description of Artificial Sequence: Synthetic oligonucleotide
  Antisense strand to SEQ ID NO: 2545032
uugcaugagcuauuucaca

SEQ ID NO: 2545034 - RNA, 19 nt, Artificial Sequence
  Description of Artificial Sequence: Synthetic oligonucleotide
  Sense strand starting at position 3856 of SEQ ID NO: 1888608
agacucauugcaggacuuu

SEQ ID NO: 2545035 - RNA, 19 nt, Artificial Sequence
  Description of Artificial Sequence: Synthetic oligonucleotide
  Antisense strand to SEQ ID NO: 2545034
aaaguccugcaaugagucu

SEQ ID NO: 2545036 - RNA, 19 nt, Artificial Sequence
  Description of Artificial Sequence: Synthetic oligonucleotide
  Sense strand starting at position 659 of SEQ ID NO: 1888608
auuacugggugaguuuaua

SEQ ID NO: 2545037 - RNA, 19 nt, Artificial Sequence
  Description of Artificial Sequence: Synthetic oligonucleotide
  Antisense strand to SEQ ID NO: 2545036
uauaaacucacccaguaau

SEQ ID NO: 2545038 - RNA, 19 nt, Artificial Sequence
  Description of Artificial Sequence: Synthetic oligonucleotide
  Sense strand starting at position 2038 of SEQ ID NO: 1888608
uggacuucugucuaucuuu

SEQ ID NO: 2545039 - RNA, 19 nt, Artificial Sequence
  Description of Artificial Sequence: Synthetic oligonucleotide
  Antisense strand to SEQ ID NO: 2545038
aaagauagacagaagucca

SEQ ID NO: 2545040 - RNA, 19 nt, Artificial Sequence
  Description of Artificial Sequence: Synthetic oligonucleotide
  Sense strand starting at position 2848 of SEQ ID NO: 1888608
gcaugaugucaugagcaac

SEQ ID NO: 2545041 - RNA, 19 nt, Artificial Sequence
  Description of Artificial Sequence: Synthetic oligonucleotide
  Antisense strand to SEQ ID NO: 2545040
guugcucaugacaucaugc

SEQ ID NO: 2545042 - RNA, 19 nt, Artificial Sequence
  Description of Artificial Sequence: Synthetic oligonucleotide
  Sense strand starting at position 3046 of SEQ ID NO: 1888608
acaagugguacacgauuga

SEQ ID NO: 2545043 - RNA, 19 nt, Artificial Sequence
  Description of Artificial Sequence: Synthetic oligonucleotide
  Antisense strand to SEQ ID NO: 2545042
ucaaucguguaccacuugu

SEQ ID NO: 2545044 - RNA, 19 nt, Artificial Sequence
  Description of Artificial Sequence: Synthetic oligonucleotide
  Sense strand starting at position 2608 of SEQ ID NO: 1888608
gcuaauugagaccaguguu

SEQ ID NO: 2545045 - RNA, 19 nt, Artificial Sequence
  Description of Artificial Sequence: Synthetic oligonucleotide
  Antisense strand to SEQ ID NO: 2545044
aacacuggucucaauuagc

SEQ ID NO: 2545046 - RNA, 19 nt, Artificial Sequence
  Description of Artificial Sequence: Synthetic oligonucleotide
  Sense strand starting at position 2579 of SEQ ID NO: 1888608
caugucauggugcaauuga

SEQ ID NO: 2545047 - RNA, 19 nt, Artificial Sequence
  Description of Artificial Sequence: Synthetic oligonucleotide
  Antisense strand to SEQ ID NO: 2545046
ucaauugcaccaugacaug

SEQ ID NO: 2545048 - RNA, 19 nt, Artificial Sequence
  Description of Artificial Sequence: Synthetic oligonucleotide
  Sense strand starting at position 139 of SEQ ID NO: 1888608
uguacauagacguauguga

SEQ ID NO: 2545049 - RNA, 19 nt, Artificial Sequence
  Description of Artificial Sequence: Synthetic oligonucleotide
  Antisense strand to SEQ ID NO: 2545048
ucacauacgucuauguaca

SEQ ID NO: 2545050 - RNA, 19 nt, Artificial Sequence
  Description of Artificial Sequence: Synthetic oligonucleotide
  Sense strand starting at position 1940 of SEQ ID NO: 1888608
uugggauuaugggcaugua

SEQ ID NO: 2545051 - RNA, 19 nt, Artificial Sequence
  Description of Artificial Sequence: Synthetic oligonucleotide
  Antisense strand to SEQ ID NO: 2545050
uacaugcccauaaucccaa

SEQ ID NO: 2545052 - RNA, 19 nt, Artificial Sequence
  Description of Artificial Sequence: Synthetic oligonucleotide
  Sense strand starting at position 437 of SEQ ID NO: 1888608
cucaguccuccucagcaga

SEQ ID NO: 2545053 - RNA, 19 nt, Artificial Sequence
  Description of Artificial Sequence: Synthetic oligonucleotide
  Antisense strand to SEQ ID NO: 2545052
ucugcugaggaggacugag

SEQ ID NO: 2545054 - RNA, 19 nt, Artificial Sequence
  Description of Artificial Sequence: Synthetic oligonucleotide
  Sense strand starting at position 3014 of SEQ ID NO: 1888608
uagcaugaugucuagcaua

SEQ ID NO: 2545055 - RNA, 19 nt, Artificial Sequence
  Description of Artificial Sequence: Synthetic oligonucleotide
  Antisense strand to SEQ ID NO: 2545054
uaugcuagacaucaugcua

SEQ ID NO: 2545056 - RNA, 19 nt, Artificial Sequence
  Description of Artificial Sequence: Synthetic oligonucleotide
  Sense strand starting at position 2926 of SEQ ID NO: 1888609
cuauaaaguggccacaaua

SEQ ID NO: 2545057 - RNA, 19 nt, Artificial Sequence
  Description of Artificial Sequence: Synthetic oligonucleotide
  Antisense strand to SEQ ID NO: 2545056
uauuguggccacuuuauag

SEQ ID NO: 2545058 - RNA, 19 nt, Artificial Sequence
  Description of Artificial Sequence: Synthetic oligonucleotide
  Sense strand starting at position 897 of SEQ ID NO: 1888609
ggcuguugugugcuucaag

SEQ ID NO: 2545059 - RNA, 19 nt, Artificial Sequence
  Description of Artificial Sequence: Synthetic oligonucleotide
  Antisense strand to SEQ ID NO: 2545058
cuugaagcacacaacagcc

SEQ ID NO: 2545060 - RNA, 19 nt, Artificial Sequence
  Description of Artificial Sequence: Synthetic oligonucleotide
  Sense strand starting at position 2990 of SEQ ID NO: 1888609
guauuaaacucucuggaga

SEQ ID NO: 2545061 - RNA, 19 nt, Artificial Sequence
  Description of Artificial Sequence: Synthetic oligonucleotide
  Antisense strand to SEQ ID NO: 2545060
ucuccagagaguuuaauac

SEQ ID NO: 2545062 - RNA, 19 nt, Artificial Sequence
  Description of Artificial Sequence: Synthetic oligonucleotide
  Sense strand starting at position 3330 of SEQ ID NO: 1888609
augaaauuagggugucaca

SEQ ID NO: 2545063 - RNA, 19 nt, Artificial Sequence
  Description of Artificial Sequence: Synthetic oligonucleotide
  Antisense strand to SEQ ID NO: 2545062
ugugacacccuaauuucau

SEQ ID NO: 2545064 - RNA, 19 nt, Artificial Sequence
  Description of Artificial Sequence: Synthetic oligonucleotide
  Sense strand starting at position 2946 of SEQ ID NO: 1888609
gguguuguacccguucuuu

SEQ ID NO: 2545065 - RNA, 19 nt, Artificial Sequence
  Description of Artificial Sequence: Synthetic oligonucleotide
  Antisense strand to SEQ ID NO: 2545064
aaagaacggguacaacacc

SEQ ID NO: 2545066 - RNA, 19 nt, Artificial Sequence
  Description of Artificial Sequence: Synthetic oligonucleotide
  Sense strand starting at position 1714 of SEQ ID NO: 1888609
ucugaaucuccaggacucu

SEQ ID NO: 2545067 - RNA, 19 nt, Artificial Sequence
  Description of Artificial Sequence: Synthetic oligonucleotide
  Antisense strand to SEQ ID NO: 2545066
agaguccuggagauucaga

SEQ ID NO: 2545068 - RNA, 19 nt, Artificial Sequence
  Description of Artificial Sequence: Synthetic oligonucleotide
  Sense strand starting at position 1211 of SEQ ID NO: 1888609
ugaaauguggcucaccauc

SEQ ID NO: 2545069 - RNA, 19 nt, Artificial Sequence
  Description of Artificial Sequence: Synthetic oligonucleotide
  Antisense strand to SEQ ID NO: 2545068
gauggugagccacauuuca

SEQ ID NO: 2545070 - RNA, 19 nt, Artificial Sequence
  Description of Artificial Sequence: Synthetic oligonucleotide
  Sense strand starting at position 609 of SEQ ID NO: 1888609
uguuguaucauaugagaag

SEQ ID NO: 2545071 - RNA, 19 nt, Artificial Sequence
  Description of Artificial Sequence: Synthetic oligonucleotide
  Antisense strand to SEQ ID NO: 2545070
cuucucauaugauacaaca

SEQ ID NO: 2545072 - RNA, 19 nt, Artificial Sequence
  Description of Artificial Sequence: Synthetic oligonucleotide
  Sense strand starting at position 3018 of SEQ ID NO: 1888609
agcuucuuucuguagagga

SEQ ID NO: 2545073 - RNA, 19 nt, Artificial Sequence
  Description of Artificial Sequence: Synthetic oligonucleotide
  Antisense strand to SEQ ID NO: 2545072
uccucuacagaaagaagcu

SEQ ID NO: 2545074 - RNA, 19 nt, Artificial Sequence
  Description of Artificial Sequence: Synthetic oligonucleotide
  Sense strand starting at position 338 of SEQ ID NO: 1888609
uggcuaggaggcugagaua

SEQ ID NO: 2545075 - RNA, 19 nt, Artificial Sequence
  Description of Artificial Sequence: Synthetic oligonucleotide
  Antisense strand to SEQ ID NO: 2545074
uaucucagccuccuagcca

SEQ ID NO: 2545076 - RNA, 19 nt, Artificial Sequence
  Description of Artificial Sequence: Synthetic oligonucleotide
  Sense strand starting at position 2952 of SEQ ID NO: 1888609
guacccguucuuuaaggga

SEQ ID NO: 2545077 - RNA, 19 nt, Artificial Sequence
  Description of Artificial Sequence: Synthetic oligonucleotide
  Antisense strand to SEQ ID NO: 2545076
ucccuuaaagaacggguac

SEQ ID NO: 2545078 - RNA, 19 nt, Artificial Sequence
  Description of Artificial Sequence: Synthetic oligonucleotide
  Sense strand starting at position 3004 of SEQ ID NO: 1888609
ggagauacuuaguuagcuu

SEQ ID NO: 2545079 - RNA, 19 nt, Artificial Sequence
  Description of Artificial Sequence: Synthetic oligonucleotide
  Antisense strand to SEQ ID NO: 2545078
aagcuaacuaaguaucucc

SEQ ID NO: 2545080 - RNA, 19 nt, Artificial Sequence
  Description of Artificial Sequence: Synthetic oligonucleotide
  Sense strand starting at position 3003 of SEQ ID NO: 1888609
uggagauacuuaguuagcu

SEQ ID NO: 2545081 - RNA, 19 nt, Artificial Sequence
  Description of Artificial Sequence: Synthetic oligonucleotide
  Antisense strand to SEQ ID NO: 2545080
agcuaacuaaguaucucca

SEQ ID NO: 2545082 - RNA, 19 nt, Artificial Sequence
  Description of Artificial Sequence: Synthetic oligonucleotide
  Sense strand starting at position 3298 of SEQ ID NO: 1888609
uagucagagugcuuacaaa

SEQ ID NO: 2545083 - RNA, 19 nt, Artificial Sequence
  Description of Artificial Sequence: Synthetic oligonucleotide
  Antisense strand to SEQ ID NO: 2545082
uuuguaagcacucugacua

SEQ ID NO: 2545084 - RNA, 19 nt, Artificial Sequence
  Description of Artificial Sequence: Synthetic oligonucleotide
  Sense strand starting at position 1209 of SEQ ID NO: 1888609
ggugaaauguggcucacca

SEQ ID NO: 2545085 - RNA, 19 nt, Artificial Sequence
  Description of Artificial Sequence: Synthetic oligonucleotide
  Antisense strand to SEQ ID NO: 2545084
uggugagccacauuucacc

SEQ ID NO: 2545086 - RNA, 19 nt, Artificial Sequence
  Description of Artificial Sequence: Synthetic oligonucleotide
  Sense strand starting at position 232 of SEQ ID NO: 1888609
gcagcuuguauagggaaua

SEQ ID NO: 2545087 - RNA, 19 nt, Artificial Sequence
  Description of Artificial Sequence: Synthetic oligonucleotide
  Antisense strand to SEQ ID NO: 2545086
uauucccuauacaagcugc

SEQ ID NO: 2545088 - RNA, 19 nt, Artificial Sequence
  Description of Artificial Sequence: Synthetic oligonucleotide
  Sense strand starting at position 1178 of SEQ ID NO: 1888609
ggaagagacuaauggaaag

SEQ ID NO: 2545089 - RNA, 19 nt, Artificial Sequence
  Description of Artificial Sequence: Synthetic oligonucleotide
  Antisense strand to SEQ ID NO: 2545088
cuuuccauuagucucuucc

SEQ ID NO: 2545090 - RNA, 19 nt, Artificial Sequence
  Description of Artificial Sequence: Synthetic oligonucleotide
  Sense strand starting at position 525 of SEQ ID NO: 1888609
gcuacaugacccuggcaua

SEQ ID NO: 2545091 - RNA, 19 nt, Artificial Sequence
  Description of Artificial Sequence: Synthetic oligonucleotide
  Antisense strand to SEQ ID NO: 2545090
uaugccagggucauguagc

SEQ ID NO: 2545092 - RNA, 19 nt, Artificial Sequence
  Description of Artificial Sequence: Synthetic oligonucleotide
  Sense strand starting at position 2291 of SEQ ID NO: 1888609
gccaauaagccguaacuuu

SEQ ID NO: 2545093 - RNA, 19 nt, Artificial Sequence
  Description of Artificial Sequence: Synthetic oligonucleotide
  Antisense strand to SEQ ID NO: 2545092
aaaguuacggcuuauuggc

SEQ ID NO: 2545094 - RNA, 19 nt, Artificial Sequence
  Description of Artificial Sequence: Synthetic oligonucleotide
  Sense strand starting at position 1149 of SEQ ID NO: 1888609
cuguuugguucucucauga

SEQ ID NO: 2545095 - RNA, 19 nt, Artificial Sequence
  Description of Artificial Sequence: Synthetic oligonucleotide
  Antisense strand to SEQ ID NO: 2545094
ucaugagagaaccaaacag

SEQ ID NO: 2545096 - RNA, 19 nt, Artificial Sequence
  Description of Artificial Sequence: Synthetic oligonucleotide
  Sense strand starting at position 2936 of SEQ ID NO: 1888609
gccacaauaagguguugua

SEQ ID NO: 2545097 - RNA, 19 nt, Artificial Sequence
  Description of Artificial Sequence: Synthetic oligonucleotide
  Antisense strand to SEQ ID NO: 2545096
uacaacaccuuauuguggc

SEQ ID NO: 2545098 - RNA, 19 nt, Artificial Sequence
  Description of Artificial Sequence: Synthetic oligonucleotide
  Sense strand starting at position 867 of SEQ ID NO: 1888609
aggccuugauccuugccua

SEQ ID NO: 2545099 - RNA, 19 nt, Artificial Sequence
  Description of Artificial Sequence: Synthetic oligonucleotide
  Antisense strand to SEQ ID NO: 2545098
uaggcaaggaucaaggccu

SEQ ID NO: 2545100 - RNA, 19 nt, Artificial Sequence
  Description of Artificial Sequence: Synthetic oligonucleotide
  Sense strand starting at position 3015 of SEQ ID NO: 1888609
guuagcuucuuucuguaga

SEQ ID NO: 2545101 - RNA, 19 nt, Artificial Sequence
  Description of Artificial Sequence: Synthetic oligonucleotide
  Antisense strand to SEQ ID NO: 2545100
ucuacagaaagaagcuaac

SEQ ID NO: 2545102 - RNA, 19 nt, Artificial Sequence
  Description of Artificial Sequence: Synthetic oligonucleotide
  Sense strand starting at position 2382 of SEQ ID NO: 1888609
gugggaguguucucguaaa

SEQ ID NO: 2545103 - RNA, 19 nt, Artificial Sequence
  Description of Artificial Sequence: Synthetic oligonucleotide
  Antisense strand to SEQ ID NO: 2545102
uuuacgagaacacucccac

SEQ ID NO: 2545104 - RNA, 19 nt, Artificial Sequence
  Description of Artificial Sequence: Synthetic oligonucleotide
  Sense strand starting at position 3289 of SEQ ID NO: 1888609
gugcuuaccuagucagagu

SEQ ID NO: 2545105 - RNA, 19 nt, Artificial Sequence
  Description of Artificial Sequence: Synthetic oligonucleotide
  Antisense strand to SEQ ID NO: 2545104
acucugacuagguaagcac

SEQ ID NO: 2545106 - RNA, 19 nt, Artificial Sequence
  Description of Artificial Sequence: Synthetic oligonucleotide
  Sense strand starting at position 2333 of SEQ ID NO: 1888609
guuucucugucuuucggau

SEQ ID NO: 2545107 - RNA, 19 nt, Artificial Sequence
  Description of Artificial Sequence: Synthetic oligonucleotide
  Antisense strand to SEQ ID NO: 2545106
auccgaaagacagagaaac

SEQ ID NO: 2545108 - RNA, 19 nt, Artificial Sequence
  Description of Artificial Sequence: Synthetic oligonucleotide
  Sense strand starting at position 444 of SEQ ID NO: 1888609
acaggugucucagaagaca

SEQ ID NO: 2545109 - RNA, 19 nt, Artificial Sequence
  Description of Artificial Sequence: Synthetic oligonucleotide
  Antisense strand to SEQ ID NO: 2545108
ugucuucugagacaccugu

SEQ ID NO: 2545110 - RNA, 19 nt, Artificial Sequence
  Description of Artificial Sequence: Synthetic oligonucleotide
  Sense strand starting at position 2992 of SEQ ID NO: 1888609
auuaaacucucuggagaua

SEQ ID NO: 2545111 - RNA, 19 nt, Artificial Sequence
  Description of Artificial Sequence: Synthetic oligonucleotide
  Antisense strand to SEQ ID NO: 2545110
uaucuccagagaguuuaau

SEQ ID NO: 2545112 - RNA, 19 nt, Artificial Sequence
  Description of Artificial Sequence: Synthetic oligonucleotide
  Sense strand starting at position 610 of SEQ ID NO: 1888609
guuguaucauaugagaagg

SEQ ID NO: 2545113 - RNA, 19 nt, Artificial Sequence
  Description of Artificial Sequence: Synthetic oligonucleotide
  Antisense strand to SEQ ID NO: 2545112
ccuucucauaugauacaac

SEQ ID NO: 2545114 - RNA, 19 nt, Artificial Sequence
  Description of Artificial Sequence: Synthetic oligonucleotide
  Sense strand starting at position 3151 of SEQ ID NO: 1888609
gggugucuuggcuguccau

SEQ ID NO: 2545115 - RNA, 19 nt, Artificial Sequence
  Description of Artificial Sequence: Synthetic oligonucleotide
  Antisense strand to SEQ ID NO: 2545114
auggacagccaagacaccc

SEQ ID NO: 2545116 - RNA, 19 nt, Artificial Sequence
  Description of Artificial Sequence: Synthetic oligonucleotide
  Sense strand starting at position 2652 of SEQ ID NO: 1888609
augugucaccugcgugaca

SEQ ID NO: 2545117 - RNA, 19 nt, Artificial Sequence
  Description of Artificial Sequence: Synthetic oligonucleotide
  Antisense strand to SEQ ID NO: 2545116
ugucacgcaggugacacau

SEQ ID NO: 2545118 - RNA, 19 nt, Artificial Sequence
  Description of Artificial Sequence: Synthetic oligonucleotide
  Sense strand starting at position 2650 of SEQ ID NO: 1888609
cuaugugucaccugcguga

SEQ ID NO: 2545119 - RNA, 19 nt, Artificial Sequence
  Description of Artificial Sequence: Synthetic oligonucleotide
  Antisense strand to SEQ ID NO: 2545118
ucacgcaggugacacauag

SEQ ID NO: 2545120 - RNA, 19 nt, Artificial Sequence
  Description of Artificial Sequence: Synthetic oligonucleotide
  Sense strand starting at position 3328 of SEQ ID NO: 1888609
caaugaaauuaggguguca

SEQ ID NO: 2545121 - RNA, 19 nt, Artificial Sequence
  Description of Artificial Sequence: Synthetic oligonucleotide
  Antisense strand to SEQ ID NO: 2545120
ugacacccuaauuucauug

SEQ ID NO: 2545122 - RNA, 19 nt, Artificial Sequence
  Description of Artificial Sequence: Synthetic oligonucleotide
  Sense strand starting at position 3827 of SEQ ID NO: 1888609
ccacaaagcuucugaagau

SEQ ID NO: 2545123 - RNA, 19 nt, Artificial Sequence
  Description of Artificial Sequence: Synthetic oligonucleotide
  Antisense strand to SEQ ID NO: 2545122
aucuucagaagcuuugugg

SEQ ID NO: 2545124 - RNA, 19 nt, Artificial Sequence
  Description of Artificial Sequence: Synthetic oligonucleotide
  Sense strand starting at position 1153 of SEQ ID NO: 1888609
uugguucucucaugaagac

SEQ ID NO: 2545125 - RNA, 19 nt, Artificial Sequence
  Description of Artificial Sequence: Synthetic oligonucleotide
  Antisense strand to SEQ ID NO: 2545124
gucuucaugagagaaccaa

SEQ ID NO: 2545126 - RNA, 19 nt, Artificial Sequence
  Description of Artificial Sequence: Synthetic oligonucleotide
  Sense strand starting at position 607 of SEQ ID NO: 1888609
gcuguuguaucauaugaga

SEQ ID NO: 2545127 - RNA, 19 nt, Artificial Sequence
  Description of Artificial Sequence: Synthetic oligonucleotide
  Antisense strand to SEQ ID NO: 2545126
ucucauaugauacaacagc

SEQ ID NO: 2545128 - RNA, 19 nt, Artificial Sequence
  Description of Artificial Sequence: Synthetic oligonucleotide
  Sense strand starting at position 99 of SEQ ID NO: 1888609
cccagagucuggugaacuc

SEQ ID NO: 2545129 - RNA, 19 nt, Artificial Sequence
  Description of Artificial Sequence: Synthetic oligonucleotide
  Antisense strand to SEQ ID NO: 2545128
gaguucaccagacucuggg

SEQ ID NO: 2545130 - RNA, 19 nt, Artificial Sequence
  Description of Artificial Sequence: Synthetic oligonucleotide
  Sense strand starting at position 1002 of SEQ ID NO: 1888609
aggccuaugucuggauucu

SEQ ID NO: 2545131 - RNA, 19 nt, Artificial Sequence
  Description of Artificial Sequence: Synthetic oligonucleotide
  Antisense strand to SEQ ID NO: 2545130
agaauccagacauaggccu

SEQ ID NO: 2545132 - RNA, 19 nt, Artificial Sequence
  Description of Artificial Sequence: Synthetic oligonucleotide
  Sense strand starting at position 3941 of SEQ ID NO: 1888609
ggacaacugucguguugug

SEQ ID NO: 2545133 - RNA, 19 nt, Artificial Sequence
  Description of Artificial Sequence: Synthetic oligonucleotide
  Antisense strand to SEQ ID NO: 2545132
cacaacacgacaguugucc

SEQ ID NO: 2545134 - RNA, 19 nt, Artificial Sequence
  Description of Artificial Sequence: Synthetic oligonucleotide
  Sense strand starting at position 640 of SEQ ID NO: 1888610
aggagagcucaacagcauu

SEQ ID NO: 2545135 - RNA, 19 nt, Artificial Sequence
  Description of Artificial Sequence: Synthetic oligonucleotide
  Antisense strand to SEQ ID NO: 2545134
aaugcuguugagcucuccu

SEQ ID NO: 2545136 - RNA, 19 nt, Artificial Sequence
  Description of Artificial Sequence: Synthetic oligonucleotide
  Sense strand starting at position 3575 of SEQ ID NO: 1888610
cagagacuaguuuagguuu

SEQ ID NO: 2545137 - RNA, 19 nt, Artificial Sequence
  Description of Artificial Sequence: Synthetic oligonucleotide
  Antisense strand to SEQ ID NO: 2545136
aaaccuaaacuagucucug

SEQ ID NO: 2545138 - RNA, 19 nt, Artificial Sequence
  Description of Artificial Sequence: Synthetic oligonucleotide
  Sense strand starting at position 2405 of SEQ ID NO: 1888610
gcacccuuucuggaacaca

SEQ ID NO: 2545139 - RNA, 19 nt, Artificial Sequence
  Description of Artificial Sequence: Synthetic oligonucleotide
  Antisense strand to SEQ ID NO: 2545138
uguguuccagaaagggugc

SEQ ID NO: 2545140 - RNA, 19 nt, Artificial Sequence
  Description of Artificial Sequence: Synthetic oligonucleotide
  Sense strand starting at position 3581 of SEQ ID NO: 1888610
cuaguuuagguuuaaucaa

SEQ ID NO: 2545141 - RNA, 19 nt, Artificial Sequence
  Description of Artificial Sequence: Synthetic oligonucleotide
  Antisense strand to SEQ ID NO: 2545140
uugauuaaaccuaaacuag

SEQ ID NO: 2545142 - RNA, 19 nt, Artificial Sequence
  Description of Artificial Sequence: Synthetic oligonucleotide
  Sense strand starting at position 648 of SEQ ID NO: 1888610
ucaacagcauuccugagaa

SEQ ID NO: 2545143 - RNA, 19 nt, Artificial Sequence
  Description of Artificial Sequence: Synthetic oligonucleotide
  Antisense strand to SEQ ID NO: 2545142
uucucaggaaugcuguuga

SEQ ID NO: 2545144 - RNA, 19 nt, Artificial Sequence
  Description of Artificial Sequence: Synthetic oligonucleotide
  Sense strand starting at position 3475 of SEQ ID NO: 1888610
cucccaagauucccggaaa

SEQ ID NO: 2545145 - RNA, 19 nt, Artificial Sequence
  Description of Artificial Sequence: Synthetic oligonucleotide
  Antisense strand to SEQ ID NO: 2545144
uuuccgggaaucuugggag

SEQ ID NO: 2545146 - RNA, 19 nt, Artificial Sequence
  Description of Artificial Sequence: Synthetic oligonucleotide
  Sense strand starting at position 3784 of SEQ ID NO: 1888610
agauguguccaucaaaggu

SEQ ID NO: 2545147 - RNA, 19 nt, Artificial Sequence
  Description of Artificial Sequence: Synthetic oligonucleotide
  Antisense strand to SEQ ID NO: 2545146
accuuugauggacacaucu

SEQ ID NO: 2545148 - RNA, 19 nt, Artificial Sequence
  Description of Artificial Sequence: Synthetic oligonucleotide
  Sense strand starting at position 3232 of SEQ ID NO: 1888610
gaggguuaaggaugcaacu

SEQ ID NO: 2545149 - RNA, 19 nt, Artificial Sequence
  Description of Artificial Sequence: Synthetic oligonucleotide
  Antisense strand to SEQ ID NO: 2545148
aguugcauccuuaacccuc

SEQ ID NO: 2545150 - RNA, 19 nt, Artificial Sequence
  Description of Artificial Sequence: Synthetic oligonucleotide
  Sense strand starting at position 3578 of SEQ ID NO: 1888610
agacuaguuuagguuuaau

SEQ ID NO: 2545151 - RNA, 19 nt, Artificial Sequence
  Description of Artificial Sequence: Synthetic oligonucleotide
  Antisense strand to SEQ ID NO: 2545150
auuaaaccuaaacuagucu

SEQ ID NO: 2545152 - RNA, 19 nt, Artificial Sequence
  Description of Artificial Sequence: Synthetic oligonucleotide
  Sense strand starting at position 272 of SEQ ID NO: 1888610
uguuucccuccucagauau

SEQ ID NO: 2545153 - RNA, 19 nt, Artificial Sequence
  Description of Artificial Sequence: Synthetic oligonucleotide
  Antisense strand to SEQ ID NO: 2545152
auaucugaggagggaaaca

SEQ ID NO: 2545154 - RNA, 19 nt, Artificial Sequence
  Description of Artificial Sequence: Synthetic oligonucleotide
  Sense strand starting at position 714 of SEQ ID NO: 1888610
ggugcaugaucaucugaaa

SEQ ID NO: 2545155 - RNA, 19 nt, Artificial Sequence
  Description of Artificial Sequence: Synthetic oligonucleotide
  Antisense strand to SEQ ID NO: 2545154
uuucagaugaucaugcacc

SEQ ID NO: 2545156 - RNA, 19 nt, Artificial Sequence
  Description of Artificial Sequence: Synthetic oligonucleotide
  Sense strand starting at position 2847 of SEQ ID NO: 1888610
guagguuccuacuugagag

SEQ ID NO: 2545157 - RNA, 19 nt, Artificial Sequence
  Description of Artificial Sequence: Synthetic oligonucleotide
  Antisense strand to SEQ ID NO: 2545156
cucucaaguaggaaccuac

SEQ ID NO: 2545158 - RNA, 19 nt, Artificial Sequence
  Description of Artificial Sequence: Synthetic oligonucleotide
  Sense strand starting at position 3148 of SEQ ID NO: 1888610
agccaugacugguccagau

SEQ ID NO: 2545159 - RNA, 19 nt, Artificial Sequence
  Description of Artificial Sequence: Synthetic oligonucleotide
  Antisense strand to SEQ ID NO: 2545158
aucuggaccagucauggcu

SEQ ID NO: 2545160 - RNA, 19 nt, Artificial Sequence
  Description of Artificial Sequence: Synthetic oligonucleotide
  Sense strand starting at position 3421 of SEQ ID NO: 1888610
cgugcauaccaguaaagau

SEQ ID NO: 2545161 - RNA, 19 nt, Artificial Sequence
  Description of Artificial Sequence: Synthetic oligonucleotide
  Antisense strand to SEQ ID NO: 2545160
aucuuuacugguaugcacg

SEQ ID NO: 2545162 - RNA, 19 nt, Artificial Sequence
  Description of Artificial Sequence: Synthetic oligonucleotide
  Sense strand starting at position 3621 of SEQ ID NO: 1888610
ggccaucuacuccgaggaa

SEQ ID NO: 2545163 - RNA, 19 nt, Artificial Sequence
  Description of Artificial Sequence: Synthetic oligonucleotide
  Antisense strand to SEQ ID NO: 2545162
uuccucggaguagauggcc

SEQ ID NO: 2545164 - RNA, 19 nt, Artificial Sequence
  Description of Artificial Sequence: Synthetic oligonucleotide
  Sense strand starting at position 1007 of SEQ ID NO: 1888610
ccaaaucucucuuuggguu

SEQ ID NO: 2545165 - RNA, 19 nt, Artificial Sequence
  Description of Artificial Sequence: Synthetic oligonucleotide
  Antisense strand to SEQ ID NO: 2545164
aacccaaagagagauuugg

SEQ ID NO: 2545166 - RNA, 19 nt, Artificial Sequence
  Description of Artificial Sequence: Synthetic oligonucleotide
  Sense strand starting at position 2664 of SEQ ID NO: 1888610
uucuguucccgauggagga

SEQ ID NO: 2545167 - RNA, 19 nt, Artificial Sequence
  Description of Artificial Sequence: Synthetic oligonucleotide
  Antisense strand to SEQ ID NO: 2545166
uccuccaucgggaacagaa

SEQ ID NO: 2545168 - RNA, 19 nt, Artificial Sequence
  Description of Artificial Sequence: Synthetic oligonucleotide
  Sense strand starting at position 3768 of SEQ ID NO: 1888610
caccguauguucccaaaga

SEQ ID NO: 2545169 - RNA, 19 nt, Artificial Sequence
  Description of Artificial Sequence: Synthetic oligonucleotide
  Antisense strand to SEQ ID NO: 2545168
ucuuugggaacauacggug

SEQ ID NO: 2545170 - RNA, 19 nt, Artificial Sequence
  Description of Artificial Sequence: Synthetic oligonucleotide
  Sense strand starting at position 292 of SEQ ID NO: 1888610
ucuguccuguccucaaaca

SEQ ID NO: 2545171 - RNA, 19 nt, Artificial Sequence
  Description of Artificial Sequence: Synthetic oligonucleotide
  Antisense strand to SEQ ID NO: 2545170
uguuugaggacaggacaga

SEQ ID NO: 2545172 - RNA, 19 nt, Artificial Sequence
  Description of Artificial Sequence: Synthetic oligonucleotide
  Sense strand starting at position 271 of SEQ ID NO: 1888610
guguuucccuccucagaua

SEQ ID NO: 2545173 - RNA, 19 nt, Artificial Sequence
  Description of Artificial Sequence: Synthetic oligonucleotide
  Antisense strand to SEQ ID NO: 2545172
uaucugaggagggaaacac

SEQ ID NO: 2545174 - RNA, 19 nt, Artificial Sequence
  Description of Artificial Sequence: Synthetic oligonucleotide
  Sense strand starting at position 3975 of SEQ ID NO: 1888610
cgcccagugccacagauua

SEQ ID NO: 2545175 - RNA, 19 nt, Artificial Sequence
  Description of Artificial Sequence: Synthetic oligonucleotide
  Antisense strand to SEQ ID NO: 2545174
uaaucuguggcacugggcg

SEQ ID NO: 2545176 - RNA, 19 nt, Artificial Sequence
  Description of Artificial Sequence: Synthetic oligonucleotide
  Sense strand starting at position 572 of SEQ ID NO: 1888610
uugucaaagucauccugca

SEQ ID NO: 2545177 - RNA, 19 nt, Artificial Sequence
  Description of Artificial Sequence: Synthetic oligonucleotide
  Antisense strand to SEQ ID NO: 2545176
ugcaggaugacuuugacaa

SEQ ID NO: 2545178 - RNA, 19 nt, Artificial Sequence
  Description of Artificial Sequence: Synthetic oligonucleotide
  Sense strand starting at position 828 of SEQ ID NO: 1888610
gcgcuagaucagggaugca

SEQ ID NO: 2545179 - RNA, 19 nt, Artificial Sequence
  Description of Artificial Sequence: Synthetic oligonucleotide
  Antisense strand to SEQ ID NO: 2545178
ugcaucccugaucuagcgc

SEQ ID NO: 2545180 - RNA, 19 nt, Artificial Sequence
  Description of Artificial Sequence: Synthetic oligonucleotide
  Sense strand starting at position 9 of SEQ ID NO: 1888610
gguggcuuccugugacacu

SEQ ID NO: 2545181 - RNA, 19 nt, Artificial Sequence
  Description of Artificial Sequence: Synthetic oligonucleotide
  Antisense strand to SEQ ID NO: 2545180
agugucacaggaagccacc

SEQ ID NO: 2545182 - RNA, 19 nt, Artificial Sequence
  Description of Artificial Sequence: Synthetic oligonucleotide
  Sense strand starting at position 2969 of SEQ ID NO: 1888610
caagaacagugucacagaa

SEQ ID NO: 2545183 - RNA, 19 nt, Artificial Sequence
  Description of Artificial Sequence: Synthetic oligonucleotide
  Antisense strand to SEQ ID NO: 2545182
uucugugacacuguucuug

SEQ ID NO: 2545184 - RNA, 19 nt, Artificial Sequence
  Description of Artificial Sequence: Synthetic oligonucleotide
  Sense strand starting at position 282 of SEQ ID NO: 1888610
cucagauauuucuguccug

SEQ ID NO: 2545185 - RNA, 19 nt, Artificial Sequence
  Description of Artificial Sequence: Synthetic oligonucleotide
  Antisense strand to SEQ ID NO: 2545184
caggacagaaauaucugag

SEQ ID NO: 2545186 - RNA, 19 nt, Artificial Sequence
  Description of Artificial Sequence: Synthetic oligonucleotide
  Sense strand starting at position 3745 of SEQ ID NO: 1888610
uucugaaucuaaugggaau

SEQ ID NO: 2545187 - RNA, 19 nt, Artificial Sequence
  Description of Artificial Sequence: Synthetic oligonucleotide
  Antisense strand to SEQ ID NO: 2545186
auucccauuagauucagaa

SEQ ID NO: 2545188 - RNA, 19 nt, Artificial Sequence
  Description of Artificial Sequence: Synthetic oligonucleotide
  Sense strand starting at position 2844 of SEQ ID NO: 1888610
caaguagguuccuacuuga

SEQ ID NO: 2545189 - RNA, 19 nt, Artificial Sequence
  Description of Artificial Sequence: Synthetic oligonucleotide
  Antisense strand to SEQ ID NO: 2545188
ucaaguaggaaccuacuug

SEQ ID NO: 2545190 - RNA, 19 nt, Artificial Sequence
  Description of Artificial Sequence: Synthetic oligonucleotide
  Sense strand starting at position 3842 of SEQ ID NO: 1888610
acuauaaagugcugaagac

SEQ ID NO: 2545191 - RNA, 19 nt, Artificial Sequence
  Description of Artificial Sequence: Synthetic oligonucleotide
  Antisense strand to SEQ ID NO: 2545190
gucuucagcacuuuauagu

SEQ ID NO: 2545192 - RNA, 19 nt, Artificial Sequence
  Description of Artificial Sequence: Synthetic oligonucleotide
  Sense strand starting at position 3577 of SEQ ID NO: 1888610
gagacuaguuuagguuuaa

SEQ ID NO: 2545193 - RNA, 19 nt, Artificial Sequence
  Description of Artificial Sequence: Synthetic oligonucleotide
  Antisense strand to SEQ ID NO: 2545192
uuaaaccuaaacuagucuc

SEQ ID NO: 2545194 - RNA, 19 nt, Artificial Sequence
  Description of Artificial Sequence: Synthetic oligonucleotide
  Sense strand starting at position 3793 of SEQ ID NO: 1888610
caucaaaggugcugaggau

SEQ ID NO: 2545195 - RNA, 19 nt, Artificial Sequence
  Description of Artificial Sequence: Synthetic oligonucleotide
  Antisense strand to SEQ ID NO: 2545194
auccucagcaccuuugaug

SEQ ID NO: 2545196 - RNA, 19 nt, Artificial Sequence
  Description of Artificial Sequence: Synthetic oligonucleotide
  Sense strand starting at position 3769 of SEQ ID NO: 1888610
accguauguucccaaagau

SEQ ID NO: 2545197 - RNA, 19 nt, Artificial Sequence
  Description of Artificial Sequence: Synthetic oligonucleotide
  Antisense strand to SEQ ID NO: 2545196
aucuuugggaacauacggu

SEQ ID NO: 2545198 - RNA, 19 nt, Artificial Sequence
  Description of Artificial Sequence: Synthetic oligonucleotide
  Sense strand starting at position 203 of SEQ ID NO: 1888610
cucugugguuuccauagca

SEQ ID NO: 2545199 - RNA, 19 nt, Artificial Sequence
  Description of Artificial Sequence: Synthetic oligonucleotide
  Antisense strand to SEQ ID NO: 2545198
ugcuauggaaaccacagag

SEQ ID NO: 2545200 - RNA, 19 nt, Artificial Sequence
  Description of Artificial Sequence: Synthetic oligonucleotide
  Sense strand starting at position 10 of SEQ ID NO: 1888610
guggcuuccugugacacuu

SEQ ID NO: 2545201 - RNA, 19 nt, Artificial Sequence
  Description of Artificial Sequence: Synthetic oligonucleotide
  Antisense strand to SEQ ID NO: 2545200
aagugucacaggaagccac

SEQ ID NO: 2545202 - RNA, 19 nt, Artificial Sequence
  Description of Artificial Sequence: Synthetic oligonucleotide
  Sense strand starting at position 3418 of SEQ ID NO: 1888610
augcgugcauaccaguaaa

SEQ ID NO: 2545203 - RNA, 19 nt, Artificial Sequence
  Description of Artificial Sequence: Synthetic oligonucleotide
  Antisense strand to SEQ ID NO: 2545202
uuuacugguaugcacgcau

SEQ ID NO: 2545204 - RNA, 19 nt, Artificial Sequence
  Description of Artificial Sequence: Synthetic oligonucleotide
  Sense strand starting at position 3916 of SEQ ID NO: 1888610
aggucagucuccuggcaac

SEQ ID NO: 2545205 - RNA, 19 nt, Artificial Sequence
  Description of Artificial Sequence: Synthetic oligonucleotide
  Antisense strand to SEQ ID NO: 2545204
guugccaggagacugaccu

SEQ ID NO: 2545206 - RNA, 19 nt, Artificial Sequence
  Description of Artificial Sequence: Synthetic oligonucleotide
  Sense strand starting at position 2661 of SEQ ID NO: 1888610
uaguucuguucccgaugga

SEQ ID NO: 2545207 - RNA, 19 nt, Artificial Sequence
  Description of Artificial Sequence: Synthetic oligonucleotide
  Antisense strand to SEQ ID NO: 2545206
uccaucgggaacagaacua

SEQ ID NO: 2545208 - RNA, 19 nt, Artificial Sequence
  Description of Artificial Sequence: Synthetic oligonucleotide
  Sense strand starting at position 235 of SEQ ID NO: 1888610
gcaucugggucaugcauca

SEQ ID NO: 2545209 - RNA, 19 nt, Artificial Sequence
  Description of Artificial Sequence: Synthetic oligonucleotide
  Antisense strand to SEQ ID NO: 2545208
ugaugcaugacccagaugc

SEQ ID NO: 2545210 - RNA, 19 nt, Artificial Sequence
  Description of Artificial Sequence: Synthetic oligonucleotide
  Sense strand starting at position 625 of SEQ ID NO: 1888611
ucacucuggccagaugaua

SEQ ID NO: 2545211 - RNA, 19 nt, Artificial Sequence
  Description of Artificial Sequence: Synthetic oligonucleotide
  Antisense strand to SEQ ID NO: 2545210
uaucaucuggccagaguga

SEQ ID NO: 2545212 - RNA, 19 nt, Artificial Sequence
  Description of Artificial Sequence: Synthetic oligonucleotide
  Sense strand starting at position 2939 of SEQ ID NO: 1888611
uaaucauguggguacuuaa

SEQ ID NO: 2545213 - RNA, 19 nt, Artificial Sequence
  Description of Artificial Sequence: Synthetic oligonucleotide
  Antisense strand to SEQ ID NO: 2545212
uuaaguacccacaugauua

SEQ ID NO: 2545214 - RNA, 19 nt, Artificial Sequence
  Description of Artificial Sequence: Synthetic oligonucleotide
  Sense strand starting at position 3609 of SEQ ID NO: 1888611
ccaggagaucaagguuacu

SEQ ID NO: 2545215 - RNA, 19 nt, Artificial Sequence
  Description of Artificial Sequence: Synthetic oligonucleotide
  Antisense strand to SEQ ID NO: 2545214
aguaaccuugaucuccugg

SEQ ID NO: 2545216 - RNA, 19 nt, Artificial Sequence
  Description of Artificial Sequence: Synthetic oligonucleotide
  Sense strand starting at position 2779 of SEQ ID NO: 1888611
ggccuagacccaggagaua

SEQ ID NO: 2545217 - RNA, 19 nt, Artificial Sequence
  Description of Artificial Sequence: Synthetic oligonucleotide
  Antisense strand to SEQ ID NO: 2545216
uaucuccugggucuaggcc

SEQ ID NO: 2545218 - RNA, 19 nt, Artificial Sequence
  Description of Artificial Sequence: Synthetic oligonucleotide
  Sense strand starting at position 3493 of SEQ ID NO: 1888611
acguguggucugccuugau

SEQ ID NO: 2545219 - RNA, 19 nt, Artificial Sequence
  Description of Artificial Sequence: Synthetic oligonucleotide
  Antisense strand to SEQ ID NO: 2545218
aucaaggcagaccacacgu

SEQ ID NO: 2545220 - RNA, 19 nt, Artificial Sequence
  Description of Artificial Sequence: Synthetic oligonucleotide
  Sense strand starting at position 2287 of SEQ ID NO: 1888611
gacacuaggccauagucua

SEQ ID NO: 2545221 - RNA, 19 nt, Artificial Sequence
  Description of Artificial Sequence: Synthetic oligonucleotide
  Antisense strand to SEQ ID NO: 2545220
uagacuauggccuaguguc

SEQ ID NO: 2545222 - RNA, 19 nt, Artificial Sequence
  Description of Artificial Sequence: Synthetic oligonucleotide
  Sense strand starting at position 2670 of SEQ ID NO: 1888611
gccggugauccgucagggu

SEQ ID NO: 2545223 - RNA, 19 nt, Artificial Sequence
  Description of Artificial Sequence: Synthetic oligonucleotide
  Antisense strand to SEQ ID NO: 2545222
acccugacggaucaccggc

SEQ ID NO: 2545224 - RNA, 19 nt, Artificial Sequence
  Description of Artificial Sequence: Synthetic oligonucleotide
  Sense strand starting at position 269 of SEQ ID NO: 1888611
accgguucuagaugagaga

SEQ ID NO: 2545225 - RNA, 19 nt, Artificial Sequence
  Description of Artificial Sequence: Synthetic oligonucleotide
  Antisense strand to SEQ ID NO: 2545224
ucucucaucuagaaccggu

SEQ ID NO: 2545226 - RNA, 19 nt, Artificial Sequence
  Description of Artificial Sequence: Synthetic oligonucleotide
  Sense strand starting at position 623 of SEQ ID NO: 1888611
ggucacucuggccagauga

SEQ ID NO: 2545227 - RNA, 19 nt, Artificial Sequence
  Description of Artificial Sequence: Synthetic oligonucleotide
  Antisense strand to SEQ ID NO: 2545226
ucaucuggccagagugacc

SEQ ID NO: 2545228 - RNA, 19 nt, Artificial Sequence
  Description of Artificial Sequence: Synthetic oligonucleotide
  Sense strand starting at position 549 of SEQ ID NO: 1888611
ccaugaccuccugagcauu

SEQ ID NO: 2545229 - RNA, 19 nt, Artificial Sequence
  Description of Artificial Sequence: Synthetic oligonucleotide
  Antisense strand to SEQ ID NO: 2545228
aaugcucaggaggucaugg

SEQ ID NO: 2545230 - RNA, 19 nt, Artificial Sequence
  Description of Artificial Sequence: Synthetic oligonucleotide
  Sense strand starting at position 1002 of SEQ ID NO: 1888611
guugaagcccaggaauguu

SEQ ID NO: 2545231 - RNA, 19 nt, Artificial Sequence
  Description of Artificial Sequence: Synthetic oligonucleotide
  Antisense strand to SEQ ID NO: 2545230
aacauuccugggcuucaac

SEQ ID NO: 2545232 - RNA, 19 nt, Artificial Sequence
  Description of Artificial Sequence: Synthetic oligonucleotide
  Sense strand starting at position 2294 of SEQ ID NO: 1888611
ggccauagucuacagaggu

SEQ ID NO: 2545233 - RNA, 19 nt, Artificial Sequence
  Description of Artificial Sequence: Synthetic oligonucleotide
  Antisense strand to SEQ ID NO: 2545232
accucuguagacuauggcc

SEQ ID NO: 2545234 - RNA, 19 nt, Artificial Sequence
  Description of Artificial Sequence: Synthetic oligonucleotide
  Sense strand starting at position 2938 of SEQ ID NO: 1888611
auaaucauguggguacuua

SEQ ID NO: 2545235 - RNA, 19 nt, Artificial Sequence
  Description of Artificial Sequence: Synthetic oligonucleotide
  Antisense strand to SEQ ID NO: 2545234
uaaguacccacaugauuau

SEQ ID NO: 2545236 - RNA, 19 nt, Artificial Sequence
  Description of Artificial Sequence: Synthetic oligonucleotide
  Sense strand starting at position 2672 of SEQ ID NO: 1888611
cggugauccgucaggguuc

SEQ ID NO: 2545237 - RNA, 19 nt, Artificial Sequence
  Description of Artificial Sequence: Synthetic oligonucleotide
  Antisense strand to SEQ ID NO: 2545236
gaacccugacggaucaccg

SEQ ID NO: 2545238 - RNA, 19 nt, Artificial Sequence
  Description of Artificial Sequence: Synthetic oligonucleotide
  Sense strand starting at position 602 of SEQ ID NO: 1888611
gcgauaauuuagccaggcu

SEQ ID NO: 2545239 - RNA, 19 nt, Artificial Sequence
  Description of Artificial Sequence: Synthetic oligonucleotide
  Antisense strand to SEQ ID NO: 2545238
agccuggcuaaauuaucgc

SEQ ID NO: 2545240 - RNA, 19 nt, Artificial Sequence
  Description of Artificial Sequence: Synthetic oligonucleotide
  Sense strand starting at position 23 of SEQ ID NO: 1888611
caccuacuccgugaucuga

SEQ ID NO: 2545241 - RNA, 19 nt, Artificial Sequence
  Description of Artificial Sequence: Synthetic oligonucleotide
  Antisense strand to SEQ ID NO: 2545240
ucagaucacggaguaggug

SEQ ID NO: 2545242 - RNA, 19 nt, Artificial Sequence
  Description of Artificial Sequence: Synthetic oligonucleotide
  Sense strand starting at position 2649 of SEQ ID NO: 1888611
cuuccuggccuguaagaca

SEQ ID NO: 2545243 - RNA, 19 nt, Artificial Sequence
  Description of Artificial Sequence: Synthetic oligonucleotide
  Antisense strand to SEQ ID NO: 2545242
ugucuuacaggccaggaag

SEQ ID NO: 2545244 - RNA, 19 nt, Artificial Sequence
  Description of Artificial Sequence: Synthetic oligonucleotide
  Sense strand starting at position 680 of SEQ ID NO: 1888611
aggaaugggugcucauuca

SEQ ID NO: 2545245 - RNA, 19 nt, Artificial Sequence
  Description of Artificial Sequence: Synthetic oligonucleotide
  Antisense strand to SEQ ID NO: 2545244
ugaaugagcacccauuccu

SEQ ID NO: 2545246 - RNA, 19 nt, Artificial Sequence
  Description of Artificial Sequence: Synthetic oligonucleotide
  Sense strand starting at position 214 of SEQ ID NO: 1888611
ccauuaggguuugucacaa

SEQ ID NO: 2545247 - RNA, 19 nt, Artificial Sequence
  Description of Artificial Sequence: Synthetic oligonucleotide
  Antisense strand to SEQ ID NO: 2545246
uugugacaaacccuaaugg

SEQ ID NO: 2545248 - RNA, 19 nt, Artificial Sequence
  Description of Artificial Sequence: Synthetic oligonucleotide
  Sense strand starting at position 3742 of SEQ ID NO: 1888611
ucaucugugagcuggaaac

SEQ ID NO: 2545249 - RNA, 19 nt, Artificial Sequence
  Description of Artificial Sequence: Synthetic oligonucleotide
  Antisense strand to SEQ ID NO: 2545248
guuuccagcucacagauga

SEQ ID NO: 2545250 - RNA, 19 nt, Artificial Sequence
  Description of Artificial Sequence: Synthetic oligonucleotide
  Sense strand starting at position 2924 of SEQ ID NO: 1888611
accagccacgcuuaauaau

SEQ ID NO: 2545251 - RNA, 19 nt, Artificial Sequence
  Description of Artificial Sequence: Synthetic oligonucleotide
  Antisense strand to SEQ ID NO: 2545250
auuauuaagcguggcuggu

SEQ ID NO: 2545252 - RNA, 19 nt, Artificial Sequence
  Description of Artificial Sequence: Synthetic oligonucleotide
  Sense strand starting at position 1001 of SEQ ID NO: 1888611
gguugaagcccaggaaugu

SEQ ID NO: 2545253 - RNA, 19 nt, Artificial Sequence
  Description of Artificial Sequence: Synthetic oligonucleotide
  Antisense strand to SEQ ID NO: 2545252
acauuccugggcuucaacc

SEQ ID NO: 2545254 - RNA, 19 nt, Artificial Sequence
  Description of Artificial Sequence: Synthetic oligonucleotide
  Sense strand starting at position 213 of SEQ ID NO: 1888611
uccauuaggguuugucaca

SEQ ID NO: 2545255 - RNA, 19 nt, Artificial Sequence
  Description of Artificial Sequence: Synthetic oligonucleotide
  Antisense strand to SEQ ID NO: 2545254
ugugacaaacccuaaugga

SEQ ID NO: 2545256 - RNA, 19 nt, Artificial Sequence
  Description of Artificial Sequence: Synthetic oligonucleotide
  Sense strand starting at position 949 of SEQ ID NO: 1888611
gcaugaacaucucugcaau

SEQ ID NO: 2545257 - RNA, 19 nt, Artificial Sequence
  Description of Artificial Sequence: Synthetic oligonucleotide
  Antisense strand to SEQ ID NO: 2545256
auugcagagauguucaugc

SEQ ID NO: 2545258 - RNA, 19 nt, Artificial Sequence
  Description of Artificial Sequence: Synthetic oligonucleotide
  Sense strand starting at position 1664 of SEQ ID NO: 1888611
ggauguucaugagcuacga

SEQ ID NO: 2545259 - RNA, 19 nt, Artificial Sequence
  Description of Artificial Sequence: Synthetic oligonucleotide
  Antisense strand to SEQ ID NO: 2545258
ucguagcucaugaacaucc

SEQ ID NO: 2545260 - RNA, 19 nt, Artificial Sequence
  Description of Artificial Sequence: Synthetic oligonucleotide
  Sense strand starting at position 3327 of SEQ ID NO: 1888611
cggccucuugacugagaug

SEQ ID NO: 2545261 - RNA, 19 nt, Artificial Sequence
  Description of Artificial Sequence: Synthetic oligonucleotide
  Antisense strand to SEQ ID NO: 2545260
caucucagucaagaggccg

SEQ ID NO: 2545262 - RNA, 19 nt, Artificial Sequence
  Description of Artificial Sequence: Synthetic oligonucleotide
  Sense strand starting at position 294 of SEQ ID NO: 1888611
uccugcuuucuuuauagua

SEQ ID NO: 2545263 - RNA, 19 nt, Artificial Sequence
  Description of Artificial Sequence: Synthetic oligonucleotide
  Antisense strand to SEQ ID NO: 2545262
uacuauaaagaaagcagga

SEQ ID NO: 2545264 - RNA, 19 nt, Artificial Sequence
  Description of Artificial Sequence: Synthetic oligonucleotide
  Sense strand starting at position 201 of SEQ ID NO: 1888611
gggagcuucuguuccauua

SEQ ID NO: 2545265 - RNA, 19 nt, Artificial Sequence
  Description of Artificial Sequence: Synthetic oligonucleotide
  Antisense strand to SEQ ID NO: 2545264
uaauggaacagaagcuccc

SEQ ID NO: 2545266 - RNA, 19 nt, Artificial Sequence
  Description of Artificial Sequence: Synthetic oligonucleotide
  Sense strand starting at position 3317 of SEQ ID NO: 1888611
ggaauugacucggccucuu

SEQ ID NO: 2545267 - RNA, 19 nt, Artificial Sequence
  Description of Artificial Sequence: Synthetic oligonucleotide
  Antisense strand to SEQ ID NO: 2545266
aagaggccgagucaauucc

SEQ ID NO: 2545268 - RNA, 19 nt, Artificial Sequence
  Description of Artificial Sequence: Synthetic oligonucleotide
  Sense strand starting at position 1846 of SEQ ID NO: 1888611
ccaccucuguuuguuaaua

SEQ ID NO: 2545269 - RNA, 19 nt, Artificial Sequence
  Description of Artificial Sequence: Synthetic oligonucleotide
  Antisense strand to SEQ ID NO: 2545268
uauuaacaaacagaggugg

SEQ ID NO: 2545270 - RNA, 19 nt, Artificial Sequence
  Description of Artificial Sequence: Synthetic oligonucleotide
  Sense strand starting at position 3740 of SEQ ID NO: 1888611
guucaucugugagcuggaa

SEQ ID NO: 2545271 - RNA, 19 nt, Artificial Sequence
  Description of Artificial Sequence: Synthetic oligonucleotide
  Antisense strand to SEQ ID NO: 2545270
uuccagcucacagaugaac

SEQ ID NO: 2545272 - RNA, 19 nt, Artificial Sequence
  Description of Artificial Sequence: Synthetic oligonucleotide
  Sense strand starting at position 307 of SEQ ID NO: 1888611
auaguauuguuuccaggca

SEQ ID NO: 2545273 - RNA, 19 nt, Artificial Sequence
  Description of Artificial Sequence: Synthetic oligonucleotide
  Antisense strand to SEQ ID NO: 2545272
ugccuggaaacaauacuau

SEQ ID NO: 2545274 - RNA, 19 nt, Artificial Sequence
  Description of Artificial Sequence: Synthetic oligonucleotide
  Sense strand starting at position 823 of SEQ ID NO: 1888611
ggcuucucccauugugaac

SEQ ID NO: 2545275 - RNA, 19 nt, Artificial Sequence
  Description of Artificial Sequence: Synthetic oligonucleotide
  Antisense strand to SEQ ID NO: 2545274
guucacaaugggagaagcc

SEQ ID NO: 2545276 - RNA, 19 nt, Artificial Sequence
  Description of Artificial Sequence: Synthetic oligonucleotide
  Sense strand starting at position 3505 of SEQ ID NO: 1888611
ccuugaucaugacaaggau

SEQ ID NO: 2545277 - RNA, 19 nt, Artificial Sequence
  Description of Artificial Sequence: Synthetic oligonucleotide
  Antisense strand to SEQ ID NO: 2545276
auccuugucaugaucaagg

SEQ ID NO: 2545278 - RNA, 19 nt, Artificial Sequence
  Description of Artificial Sequence: Synthetic oligonucleotide
  Sense strand starting at position 2671 of SEQ ID NO: 1888611
ccggugauccgucaggguu

SEQ ID NO: 2545279 - RNA, 19 nt, Artificial Sequence
  Description of Artificial Sequence: Synthetic oligonucleotide
  Antisense strand to SEQ ID NO: 2545278
aacccugacggaucaccgg

SEQ ID NO: 2545280 - RNA, 19 nt, Artificial Sequence
  Description of Artificial Sequence: Synthetic oligonucleotide
  Sense strand starting at position 3733 of SEQ ID NO: 1888611
gggcucuguucaucuguga

SEQ ID NO: 2545281 - RNA, 19 nt, Artificial Sequence
  Description of Artificial Sequence: Synthetic oligonucleotide
  Antisense strand to SEQ ID NO: 2545280
ucacagaugaacagagccc

SEQ ID NO: 2545282 - RNA, 19 nt, Artificial Sequence
  Description of Artificial Sequence: Synthetic oligonucleotide
  Sense strand starting at position 272 of SEQ ID NO: 1888611
gguucuagaugagagaacu

SEQ ID NO: 2545283 - RNA, 19 nt, Artificial Sequence
  Description of Artificial Sequence: Synthetic oligonucleotide
  Antisense strand to SEQ ID NO: 2545282
aguucucucaucuagaacc

SEQ ID NO: 2545284 - RNA, 19 nt, Artificial Sequence
  Description of Artificial Sequence: Synthetic oligonucleotide
  Sense strand starting at position 1844 of SEQ ID NO: 1888611
ggccaccucuguuuguuaa

SEQ ID NO: 2545285 - RNA, 19 nt, Artificial Sequence
  Description of Artificial Sequence: Synthetic oligonucleotide
  Antisense strand to SEQ ID NO: 2545284
uuaacaaacagagguggcc

SEQ ID NO: 2545286 - RNA, 19 nt, Artificial Sequence
  Description of Artificial Sequence: Synthetic oligonucleotide
  Sense strand starting at position 199 of SEQ ID NO: 1888611
ccgggagcuucuguuccau

SEQ ID NO: 2545287 - RNA, 19 nt, Artificial Sequence
  Description of Artificial Sequence: Synthetic oligonucleotide
  Antisense strand to SEQ ID NO: 2545286
auggaacagaagcucccgg

SEQ ID NO: 2545288 - RNA, 19 nt, Artificial Sequence
  Description of Artificial Sequence: Synthetic oligonucleotide
  Sense strand starting at position 1845 of SEQ ID NO: 1888611
gccaccucuguuuguuaau

SEQ ID NO: 2545289 - RNA, 19 nt, Artificial Sequence
  Description of Artificial Sequence: Synthetic oligonucleotide
  Antisense strand to SEQ ID NO: 2545288
auuaacaaacagagguggc

SEQ ID NO: 2545290 - RNA, 19 nt, Artificial Sequence
  Description of Artificial Sequence: Synthetic oligonucleotide
  Sense strand starting at position 3500 of SEQ ID NO: 1888612
gagggaugccaugagcuaa

SEQ ID NO: 2545291 - RNA, 19 nt, Artificial Sequence
  Description of Artificial Sequence: Synthetic oligonucleotide
  Antisense strand to SEQ ID NO: 2545290
uuagcucauggcaucccuc

SEQ ID NO: 2545292 - RNA, 19 nt, Artificial Sequence
  Description of Artificial Sequence: Synthetic oligonucleotide
  Sense strand starting at position 1473 of SEQ ID NO: 1888612
gccugugcucugcccaaga

SEQ ID NO: 2545293 - RNA, 19 nt, Artificial Sequence
  Description of Artificial Sequence: Synthetic oligonucleotide
  Antisense strand to SEQ ID NO: 2545292
ucuugggcagagcacaggc

SEQ ID NO: 2545294 - RNA, 19 nt, Artificial Sequence
  Description of Artificial Sequence: Synthetic oligonucleotide
  Sense strand starting at position 3627 of SEQ ID NO: 1888612
uagaaacuggucugaccaa

SEQ ID NO: 2545295 - RNA, 19 nt, Artificial Sequence
  Description of Artificial Sequence: Synthetic oligonucleotide
  Antisense strand to SEQ ID NO: 2545294
uuggucagaccaguuucua

SEQ ID NO: 2545296 - RNA, 19 nt, Artificial Sequence
  Description of Artificial Sequence: Synthetic oligonucleotide
  Sense strand starting at position 3911 of SEQ ID NO: 1888612
gagcaaacaggaugaguua

SEQ ID NO: 2545297 - RNA, 19 nt, Artificial Sequence
  Description of Artificial Sequence: Synthetic oligonucleotide
  Antisense strand to SEQ ID NO: 2545296
uaacucauccuguuugcuc

SEQ ID NO: 2545298 - RNA, 19 nt, Artificial Sequence
  Description of Artificial Sequence: Synthetic oligonucleotide
  Sense strand starting at position 328 of SEQ ID NO: 1888612
aagagugucacugagcaga

SEQ ID NO: 2545299 - RNA, 19 nt, Artificial Sequence
  Description of Artificial Sequence: Synthetic oligonucleotide
  Antisense strand to SEQ ID NO: 2545298
ucugcucagugacacucuu

SEQ ID NO: 2545300 - RNA, 19 nt, Artificial Sequence
  Description of Artificial Sequence: Synthetic oligonucleotide
  Sense strand starting at position 1950 of SEQ ID NO: 1888612
cgugcucaggaagaagaau

SEQ ID NO: 2545301 - RNA, 19 nt, Artificial Sequence
  Description of Artificial Sequence: Synthetic oligonucleotide
  Antisense strand to SEQ ID NO: 2545300
auucuucuuccugagcacg

SEQ ID NO: 2545302 - RNA, 19 nt, Artificial Sequence
  Description of Artificial Sequence: Synthetic oligonucleotide
  Sense strand starting at position 2176 of SEQ ID NO: 1888612
agagcuggucccuaagaug

SEQ ID NO: 2545303 - RNA, 19 nt, Artificial Sequence
  Description of Artificial Sequence: Synthetic oligonucleotide
  Antisense strand to SEQ ID NO: 2545302
caucuuagggaccagcucu

SEQ ID NO: 2545304 - RNA, 19 nt, Artificial Sequence
  Description of Artificial Sequence: Synthetic oligonucleotide
  Sense strand starting at position 234 of SEQ ID NO: 1888612
guagaagacaucgauguug

SEQ ID NO: 2545305 - RNA, 19 nt, Artificial Sequence
  Description of Artificial Sequence: Synthetic oligonucleotide
  Antisense strand to SEQ ID NO: 2545304
caacaucgaugucuucuac

SEQ ID NO: 2545306 - RNA, 19 nt, Artificial Sequence
  Description of Artificial Sequence: Synthetic oligonucleotide
  Sense strand starting at position 91 of SEQ ID NO: 1888612
ccaucuggaccuugguaaa

SEQ ID NO: 2545307 - RNA, 19 nt, Artificial Sequence
  Description of Artificial Sequence: Synthetic oligonucleotide
  Antisense strand to SEQ ID NO: 2545306
uuuaccaagguccagaugg

SEQ ID NO: 2545308 - RNA, 19 nt, Artificial Sequence
  Description of Artificial Sequence: Synthetic oligonucleotide
  Sense strand starting at position 3779 of SEQ ID NO: 1888612
ggcagauaaauaugagcuu

SEQ ID NO: 2545309 - RNA, 19 nt, Artificial Sequence
  Description of Artificial Sequence: Synthetic oligonucleotide
  Antisense strand to SEQ ID NO: 2545308
aagcucauauuuaucugcc

SEQ ID NO: 2545310 - RNA, 19 nt, Artificial Sequence
  Description of Artificial Sequence: Synthetic oligonucleotide
  Sense strand starting at position 1208 of SEQ ID NO: 1888612
gauccucaugggugugaga

SEQ ID NO: 2545311 - RNA, 19 nt, Artificial Sequence
  Description of Artificial Sequence: Synthetic oligonucleotide
  Antisense strand to SEQ ID NO: 2545310
ucucacacccaugaggauc

SEQ ID NO: 2545312 - RNA, 19 nt, Artificial Sequence
  Description of Artificial Sequence: Synthetic oligonucleotide
  Sense strand starting at position 2175 of SEQ ID NO: 1888612
gagagcuggucccuaagau

SEQ ID NO: 2545313 - RNA, 19 nt, Artificial Sequence
  Description of Artificial Sequence: Synthetic oligonucleotide
  Antisense strand to SEQ ID NO: 2545312
aucuuagggaccagcucuc

SEQ ID NO: 2545314 - RNA, 19 nt, Artificial Sequence
  Description of Artificial Sequence: Synthetic oligonucleotide
  Sense strand starting at position 233 of SEQ ID NO: 1888612
aguagaagacaucgauguu

SEQ ID NO: 2545315 - RNA, 19 nt, Artificial Sequence
  Description of Artificial Sequence: Synthetic oligonucleotide
  Antisense strand to SEQ ID NO: 2545314
aacaucgaugucuucuacu

SEQ ID NO: 2545316 - RNA, 19 nt, Artificial Sequence
  Description of Artificial Sequence: Synthetic oligonucleotide
  Sense strand starting at position 1620 of SEQ ID NO: 1888612
aggugucauuaccuacuaa

SEQ ID NO: 2545317 - RNA, 19 nt, Artificial Sequence
  Description of Artificial Sequence: Synthetic oligonucleotide
  Antisense strand to SEQ ID NO: 2545316
uuaguagguaaugacaccu

SEQ ID NO: 2545318 - RNA, 19 nt, Artificial Sequence
  Description of Artificial Sequence: Synthetic oligonucleotide
  Sense strand starting at position 326 of SEQ ID NO: 1888612
ggaagagugucacugagca

SEQ ID NO: 2545319 - RNA, 19 nt, Artificial Sequence
  Description of Artificial Sequence: Synthetic oligonucleotide
  Antisense strand to SEQ ID NO: 2545318
ugcucagugacacucuucc

SEQ ID NO: 2545320 - RNA, 19 nt, Artificial Sequence
  Description of Artificial Sequence: Synthetic oligonucleotide
  Sense strand starting at position 3406 of SEQ ID NO: 1888612
ugaguccucagagggcaau

SEQ ID NO: 2545321 - RNA, 19 nt, Artificial Sequence
  Description of Artificial Sequence: Synthetic oligonucleotide
  Antisense strand to SEQ ID NO: 2545320
auugcccucugaggacuca

SEQ ID NO: 2545322 - RNA, 19 nt, Artificial Sequence
  Description of Artificial Sequence: Synthetic oligonucleotide
  Sense strand starting at position 1437 of SEQ ID NO: 1888612
gcugcugagaaucagaguu

SEQ ID NO: 2545323 - RNA, 19 nt, Artificial Sequence
  Description of Artificial Sequence: Synthetic oligonucleotide
  Antisense strand to SEQ ID NO: 2545322
aacucugauucucagcagc

SEQ ID NO: 2545324 - RNA, 19 nt, Artificial Sequence
  Description of Artificial Sequence: Synthetic oligonucleotide
  Sense strand starting at position 1210 of SEQ ID NO: 1888612
uccucaugggugugagaca

SEQ ID NO: 2545325 - RNA, 19 nt, Artificial Sequence
  Description of Artificial Sequence: Synthetic oligonucleotide
  Antisense strand to SEQ ID NO: 2545324
ugucucacacccaugagga

SEQ ID NO: 2545326 - RNA, 19 nt, Artificial Sequence
  Description of Artificial Sequence: Synthetic oligonucleotide
  Sense strand starting at position 1122 of SEQ ID NO: 1888612
cagaacuugccaggucaca

SEQ ID NO: 2545327 - RNA, 19 nt, Artificial Sequence
  Description of Artificial Sequence: Synthetic oligonucleotide
  Antisense strand to SEQ ID NO: 2545326
ugugaccuggcaaguucug

SEQ ID NO: 2545328 - RNA, 19 nt, Artificial Sequence
  Description of Artificial Sequence: Synthetic oligonucleotide
  Sense strand starting at position 3089 of SEQ ID NO: 1888612
gggugaaggugccugagau

SEQ ID NO: 2545329 - RNA, 19 nt, Artificial Sequence
  Description of Artificial Sequence: Synthetic oligonucleotide
  Antisense strand to SEQ ID NO: 2545328
aucucaggcaccuucaccc

SEQ ID NO: 2545330 - RNA, 19 nt, Artificial Sequence
  Description of Artificial Sequence: Synthetic oligonucleotide
  Sense strand starting at position 236 of SEQ ID NO: 1888612
agaagacaucgauguuguu

SEQ ID NO: 2545331 - RNA, 19 nt, Artificial Sequence
  Description of Artificial Sequence: Synthetic oligonucleotide
  Antisense strand to SEQ ID NO: 2545330
aacaacaucgaugucuucu

SEQ ID NO: 2545332 - RNA, 19 nt, Artificial Sequence
  Description of Artificial Sequence: Synthetic oligonucleotide
  Sense strand starting at position 1108 of SEQ ID NO: 1888612
uuuacucucuuggccagaa

SEQ ID NO: 2545333 - RNA, 19 nt, Artificial Sequence
  Description of Artificial Sequence: Synthetic oligonucleotide
  Antisense strand to SEQ ID NO: 2545332
uucuggccaagagaguaaa

SEQ ID NO: 2545334 - RNA, 19 nt, Artificial Sequence
  Description of Artificial Sequence: Synthetic oligonucleotide
  Sense strand starting at position 1748 of SEQ ID NO: 1888612
guaaguuugcuagaggcaa

SEQ ID NO: 2545335 - RNA, 19 nt, Artificial Sequence
  Description of Artificial Sequence: Synthetic oligonucleotide
  Antisense strand to SEQ ID NO: 2545334
uugccucuagcaaacuuac

SEQ ID NO: 2545336 - RNA, 19 nt, Artificial Sequence
  Description of Artificial Sequence: Synthetic oligonucleotide
  Sense strand starting at position 3615 of SEQ ID NO: 1888612
ggccuuuggcuguagaaac

SEQ ID NO: 2545337 - RNA, 19 nt, Artificial Sequence
  Description of Artificial Sequence: Synthetic oligonucleotide
  Antisense strand to SEQ ID NO: 2545336
guuucuacagccaaaggcc

SEQ ID NO: 2545338 - RNA, 19 nt, Artificial Sequence
  Description of Artificial Sequence: Synthetic oligonucleotide
  Sense strand starting at position 3090 of SEQ ID NO: 1888612
ggugaaggugccugagauc

SEQ ID NO: 2545339 - RNA, 19 nt, Artificial Sequence
  Description of Artificial Sequence: Synthetic oligonucleotide
  Antisense strand to SEQ ID NO: 2545338
gaucucaggcaccuucacc

SEQ ID NO: 2545340 - RNA, 19 nt, Artificial Sequence
  Description of Artificial Sequence: Synthetic oligonucleotide
  Sense strand starting at position 330 of SEQ ID NO: 1888612
gagugucacugagcagauu

SEQ ID NO: 2545341 - RNA, 19 nt, Artificial Sequence
  Description of Artificial Sequence: Synthetic oligonucleotide
  Antisense strand to SEQ ID NO: 2545340
aaucugcucagugacacuc

SEQ ID NO: 2545342 - RNA, 19 nt, Artificial Sequence
  Description of Artificial Sequence: Synthetic oligonucleotide
  Sense strand starting at position 355 of SEQ ID NO: 1888612
cagggccuucccugguaaa

SEQ ID NO: 2545343 - RNA, 19 nt, Artificial Sequence
  Description of Artificial Sequence: Synthetic oligonucleotide
  Antisense strand to SEQ ID NO: 2545342
uuuaccagggaaggcccug

SEQ ID NO: 2545344 - RNA, 19 nt, Artificial Sequence
  Description of Artificial Sequence: Synthetic oligonucleotide
  Sense strand starting at position 1931 of SEQ ID NO: 1888612
ucaguuugcucaucaugag

SEQ ID NO: 2545345 - RNA, 19 nt, Artificial Sequence
  Description of Artificial Sequence: Synthetic oligonucleotide
  Antisense strand to SEQ ID NO: 2545344
cucaugaugagcaaacuga

SEQ ID NO: 2545346 - RNA, 19 nt, Artificial Sequence
  Description of Artificial Sequence: Synthetic oligonucleotide
  Sense strand starting at position 424 of SEQ ID NO: 1888612
gagcaugacuccgcagaca

SEQ ID NO: 2545347 - RNA, 19 nt, Artificial Sequence
  Description of Artificial Sequence: Synthetic oligonucleotide
  Antisense strand to SEQ ID NO: 2545346
ugucugcggagucaugcuc

SEQ ID NO: 2545348 - RNA, 19 nt, Artificial Sequence
  Description of Artificial Sequence: Synthetic oligonucleotide
  Sense strand starting at position 1643 of SEQ ID NO: 1888612
gggugauggcagugacuuu

SEQ ID NO: 2545349 - RNA, 19 nt, Artificial Sequence
  Description of Artificial Sequence: Synthetic oligonucleotide
  Antisense strand to SEQ ID NO: 2545348
aaagucacugccaucaccc

SEQ ID NO: 2545350 - RNA, 19 nt, Artificial Sequence
  Description of Artificial Sequence: Synthetic oligonucleotide
  Sense strand starting at position 1010 of SEQ ID NO: 1888612
agcugcuucuaccuugaaa

SEQ ID NO: 2545351 - RNA, 19 nt, Artificial Sequence
  Description of Artificial Sequence: Synthetic oligonucleotide
  Antisense strand to SEQ ID NO: 2545350
uuucaagguagaagcagcu

SEQ ID NO: 2545352 - RNA, 19 nt, Artificial Sequence
  Description of Artificial Sequence: Synthetic oligonucleotide
  Sense strand starting at position 3056 of SEQ ID NO: 1888612
gcugcagguccauggagau

SEQ ID NO: 2545353 - RNA, 19 nt, Artificial Sequence
  Description of Artificial Sequence: Synthetic oligonucleotide
  Antisense strand to SEQ ID NO: 2545352
aucuccauggaccugcagc

SEQ ID NO: 2545354 - RNA, 19 nt, Artificial Sequence
  Description of Artificial Sequence: Synthetic oligonucleotide
  Sense strand starting at position 1159 of SEQ ID NO: 1888612
ucaggaaagcucugcuucu

SEQ ID NO: 2545355 - RNA, 19 nt, Artificial Sequence
  Description of Artificial Sequence: Synthetic oligonucleotide
  Antisense strand to SEQ ID NO: 2545354
agaagcagagcuuuccuga

SEQ ID NO: 2545356 - RNA, 19 nt, Artificial Sequence
  Description of Artificial Sequence: Synthetic oligonucleotide
  Sense strand starting at position 1449 of SEQ ID NO: 1888612
cagaguuugggcugucuga

SEQ ID NO: 2545357 - RNA, 19 nt, Artificial Sequence
  Description of Artificial Sequence: Synthetic oligonucleotide
  Antisense strand to SEQ ID NO: 2545356
ucagacagcccaaacucug

SEQ ID NO: 2545358 - RNA, 19 nt, Artificial Sequence
  Description of Artificial Sequence: Synthetic oligonucleotide
  Sense strand starting at position 3785 of SEQ ID NO: 1888612
uaaauaugagcuugugucu

SEQ ID NO: 2545359 - RNA, 19 nt, Artificial Sequence
  Description of Artificial Sequence: Synthetic oligonucleotide
  Antisense strand to SEQ ID NO: 2545358
agacacaagcucauauuua

SEQ ID NO: 2545360 - RNA, 19 nt, Artificial Sequence
  Description of Artificial Sequence: Synthetic oligonucleotide
  Sense strand starting at position 2937 of SEQ ID NO: 1888612
ccgaguggguucucucaca

SEQ ID NO: 2545361 - RNA, 19 nt, Artificial Sequence
  Description of Artificial Sequence: Synthetic oligonucleotide
  Antisense strand to SEQ ID NO: 2545360
ugugagagaacccacucgg

SEQ ID NO: 2545362 - RNA, 19 nt, Artificial Sequence
  Description of Artificial Sequence: Synthetic oligonucleotide
  Sense strand starting at position 3924 of SEQ ID NO: 1888612
gaguuagagcccugccaug

SEQ ID NO: 2545363 - RNA, 19 nt, Artificial Sequence
  Description of Artificial Sequence: Synthetic oligonucleotide
  Antisense strand to SEQ ID NO: 2545362
cauggcagggcucuaacuc

SEQ ID NO: 2545364 - RNA, 19 nt, Artificial Sequence
  Description of Artificial Sequence: Synthetic oligonucleotide
  Sense strand starting at position 3901 of SEQ ID NO: 1888612
aguguuugcugagcaaaca

SEQ ID NO: 2545365 - RNA, 19 nt, Artificial Sequence
  Description of Artificial Sequence: Synthetic oligonucleotide
  Antisense strand to SEQ ID NO: 2545364
uguuugcucagcaaacacu

SEQ ID NO: 2545366 - RNA, 19 nt, Artificial Sequence
  Description of Artificial Sequence: Synthetic oligonucleotide
  Sense strand starting at position 1401 of SEQ ID NO: 1888612
ggagcaggccugugucaga

SEQ ID NO: 2545367 - RNA, 19 nt, Artificial Sequence
  Description of Artificial Sequence: Synthetic oligonucleotide
  Antisense strand to SEQ ID NO: 2545366
ucugacacaggccugcucc

SEQ ID NO: 2545368 - RNA, 19 nt, Artificial Sequence
  Description of Artificial Sequence: Synthetic oligonucleotide
  Sense strand starting at position 1585 of SEQ ID NO: 1888612
acuacugcucgcuauguga

SEQ ID NO: 2545369 - RNA, 19 nt, Artificial Sequence
  Description of Artificial Sequence: Synthetic oligonucleotide
  Antisense strand to SEQ ID NO: 2545368
ucacauagcgagcaguagu

SEQ ID NO: 2545370 - RNA, 19 nt, Artificial Sequence
  Description of Artificial Sequence: Synthetic oligonucleotide
  Sense strand starting at position 2552 of SEQ ID NO: 1888613
gaacuagagucacuuggau

SEQ ID NO: 2545371 - RNA, 19 nt, Artificial Sequence
  Description of Artificial Sequence: Synthetic oligonucleotide
  Antisense strand to SEQ ID NO: 2545370
auccaagugacucuaguuc

SEQ ID NO: 2545372 - RNA, 19 nt, Artificial Sequence
  Description of Artificial Sequence: Synthetic oligonucleotide
  Sense strand starting at position 2933 of SEQ ID NO: 1888613
cgugauuuaaucugacagc

SEQ ID NO: 2545373 - RNA, 19 nt, Artificial Sequence
  Description of Artificial Sequence: Synthetic oligonucleotide
  Antisense strand to SEQ ID NO: 2545372
gcugucagauuaaaucacg

SEQ ID NO: 2545374 - RNA, 19 nt, Artificial Sequence
  Description of Artificial Sequence: Synthetic oligonucleotide
  Sense strand starting at position 2442 of SEQ ID NO: 1888613
agauaucuccuaggaguga

SEQ ID NO: 2545375 - RNA, 19 nt, Artificial Sequence
  Description of Artificial Sequence: Synthetic oligonucleotide
  Antisense strand to SEQ ID NO: 2545374
ucacuccuaggagauaucu

SEQ ID NO: 2545376 - RNA, 19 nt, Artificial Sequence
  Description of Artificial Sequence: Synthetic oligonucleotide
  Sense strand starting at position 3061 of SEQ ID NO: 1888613
gugaaaugauuugcagugu

SEQ ID NO: 2545377 - RNA, 19 nt, Artificial Sequence
  Description of Artificial Sequence: Synthetic oligonucleotide
  Antisense strand to SEQ ID NO: 2545376
acacugcaaaucauuucac

SEQ ID NO: 2545378 - RNA, 19 nt, Artificial Sequence
  Description of Artificial Sequence: Synthetic oligonucleotide
  Sense strand starting at position 1914 of SEQ ID NO: 1888613
gggaacuguucuuugagga

SEQ ID NO: 2545379 - RNA, 19 nt, Artificial Sequence
  Description of Artificial Sequence: Synthetic oligonucleotide
  Antisense strand to SEQ ID NO: 2545378
uccucaaagaacaguuccc

SEQ ID NO: 2545380 - RNA, 19 nt, Artificial Sequence
  Description of Artificial Sequence: Synthetic oligonucleotide
  Sense strand starting at position 2829 of SEQ ID NO: 1888613
ucagauggacauuguaauc

SEQ ID NO: 2545381 - RNA, 19 nt, Artificial Sequence
  Description of Artificial Sequence: Synthetic oligonucleotide
  Antisense strand to SEQ ID NO: 2545380
gauuacaauguccaucuga

SEQ ID NO: 2545382 - RNA, 19 nt, Artificial Sequence
  Description of Artificial Sequence: Synthetic oligonucleotide
  Sense strand starting at position 2180 of SEQ ID NO: 1888613
aagaauauaugaccguauu

SEQ ID NO: 2545383 - RNA, 19 nt, Artificial Sequence
  Description of Artificial Sequence: Synthetic oligonucleotide
  Antisense strand to SEQ ID NO: 2545382
aauacggucauauauucuu

SEQ ID NO: 2545384 - RNA, 19 nt, Artificial Sequence
  Description of Artificial Sequence: Synthetic oligonucleotide
  Sense strand starting at position 1529 of SEQ ID NO: 1888613
cacggagggcucuacucaa

SEQ ID NO: 2545385 - RNA, 19 nt, Artificial Sequence
  Description of Artificial Sequence: Synthetic oligonucleotide
  Antisense strand to SEQ ID NO: 2545384
uugaguagagcccuccgug

SEQ ID NO: 2545386 - RNA, 19 nt, Artificial Sequence
  Description of Artificial Sequence: Synthetic oligonucleotide
  Sense strand starting at position 829 of SEQ ID NO: 1888613
aaugaaugagcuggugaau

SEQ ID NO: 2545387 - RNA, 19 nt, Artificial Sequence
  Description of Artificial Sequence: Synthetic oligonucleotide
  Antisense strand to SEQ ID NO: 2545386
auucaccagcucauucauu

SEQ ID NO: 2545388 - RNA, 19 nt, Artificial Sequence
  Description of Artificial Sequence: Synthetic oligonucleotide
  Sense strand starting at position 3669 of SEQ ID NO: 1888613
uagggagagugauugcuaa

SEQ ID NO: 2545389 - RNA, 19 nt, Artificial Sequence
  Description of Artificial Sequence: Synthetic oligonucleotide
  Antisense strand to SEQ ID NO: 2545388
uuagcaaucacucucccua

SEQ ID NO: 2545390 - RNA, 19 nt, Artificial Sequence
  Description of Artificial Sequence: Synthetic oligonucleotide
  Sense strand starting at position 2458 of SEQ ID NO: 1888613
ugacgaaacuucucugaau

SEQ ID NO: 2545391 - RNA, 19 nt, Artificial Sequence
  Description of Artificial Sequence: Synthetic oligonucleotide
  Antisense strand to SEQ ID NO: 2545390
auucagagaaguuucguca

SEQ ID NO: 2545392 - RNA, 19 nt, Artificial Sequence
  Description of Artificial Sequence: Synthetic oligonucleotide
  Sense strand starting at position 1668 of SEQ ID NO: 1888613
gagccugagcuggacaauu

SEQ ID NO: 2545393 - RNA, 19 nt, Artificial Sequence
  Description of Artificial Sequence: Synthetic oligonucleotide
  Antisense strand to SEQ ID NO: 2545392
aauuguccagcucaggcuc

SEQ ID NO: 2545394 - RNA, 19 nt, Artificial Sequence
  Description of Artificial Sequence: Synthetic oligonucleotide
  Sense strand starting at position 1733 of SEQ ID NO: 1888613
cucauaauggccugaacaa

SEQ ID NO: 2545395 - RNA, 19 nt, Artificial Sequence
  Description of Artificial Sequence: Synthetic oligonucleotide
  Antisense strand to SEQ ID NO: 2545394
uuguucaggccauuaugag

SEQ ID NO: 2545396 - RNA, 19 nt, Artificial Sequence
  Description of Artificial Sequence: Synthetic oligonucleotide
  Sense strand starting at position 2386 of SEQ ID NO: 1888613
gcaucacauccagaugcaa

SEQ ID NO: 2545397 - RNA, 19 nt, Artificial Sequence
  Description of Artificial Sequence: Synthetic oligonucleotide
  Antisense strand to SEQ ID NO: 2545396
uugcaucuggaugugaugc

SEQ ID NO: 2545398 - RNA, 19 nt, Artificial Sequence
  Description of Artificial Sequence: Synthetic oligonucleotide
  Sense strand starting at position 1479 of SEQ ID NO: 1888613
cgagguucacucuaugaug

SEQ ID NO: 2545399 - RNA, 19 nt, Artificial Sequence
  Description of Artificial Sequence: Synthetic oligonucleotide
  Antisense strand to SEQ ID NO: 2545398
caucauagagugaaccucg

SEQ ID NO: 2545400 - RNA, 19 nt, Artificial Sequence
  Description of Artificial Sequence: Synthetic oligonucleotide
  Sense strand starting at position 1574 of SEQ ID NO: 1888613
agggauguaguuuagcaau

SEQ ID NO: 2545401 - RNA, 19 nt, Artificial Sequence
  Description of Artificial Sequence: Synthetic oligonucleotide
  Antisense strand to SEQ ID NO: 2545400
auugcuaaacuacaucccu

SEQ ID NO: 2545402 - RNA, 19 nt, Artificial Sequence
  Description of Artificial Sequence: Synthetic oligonucleotide
  Sense strand starting at position 1915 of SEQ ID NO: 1888613
ggaacuguucuuugaggau

SEQ ID NO: 2545403 - RNA, 19 nt, Artificial Sequence
  Description of Artificial Sequence: Synthetic oligonucleotide
  Antisense strand to SEQ ID NO: 2545402
auccucaaagaacaguucc

SEQ ID NO: 2545404 - RNA, 19 nt, Artificial Sequence
  Description of Artificial Sequence: Synthetic oligonucleotide
  Sense strand starting at position 1701 of SEQ ID NO: 1888613
ugcuucuaccaaugaggaa

SEQ ID NO: 2545405 - RNA, 19 nt, Artificial Sequence
  Description of Artificial Sequence: Synthetic oligonucleotide
  Antisense strand to SEQ ID NO: 2545404
uuccucauugguagaagca

SEQ ID NO: 2545406 - RNA, 19 nt, Artificial Sequence
  Description of Artificial Sequence: Synthetic oligonucleotide
  Sense strand starting at position 3700 of SEQ ID NO: 1888613
uucuuuccagagugaugaa

SEQ ID NO: 2545407 - RNA, 19 nt, Artificial Sequence
  Description of Artificial Sequence: Synthetic oligonucleotide
  Antisense strand to SEQ ID NO: 2545406
uucaucacucuggaaagaa

SEQ ID NO: 2545408 - RNA, 19 nt, Artificial Sequence
  Description of Artificial Sequence: Synthetic oligonucleotide
  Sense strand starting at position 761 of SEQ ID NO: 1888613
ggccaagcgcgguuuauua

SEQ ID NO: 2545409 - RNA, 19 nt, Artificial Sequence
  Description of Artificial Sequence: Synthetic oligonucleotide
  Antisense strand to SEQ ID NO: 2545408
uaauaaaccgcgcuuggcc

SEQ ID NO: 2545410 - RNA, 19 nt, Artificial Sequence
  Description of Artificial Sequence: Synthetic oligonucleotide
  Sense strand starting at position 760 of SEQ ID NO: 1888613
aggccaagcgcgguuuauu

SEQ ID NO: 2545411 - RNA, 19 nt, Artificial Sequence
  Description of Artificial Sequence: Synthetic oligonucleotide
  Antisense strand to SEQ ID NO: 2545410
aauaaaccgcgcuuggccu

SEQ ID NO: 2545412 - RNA, 19 nt, Artificial Sequence
  Description of Artificial Sequence: Synthetic oligonucleotide
  Sense strand starting at position 1947 of SEQ ID NO: 1888613
agaggaagguucucagcca

SEQ ID NO: 2545413 - RNA, 19 nt, Artificial Sequence
  Description of Artificial Sequence: Synthetic oligonucleotide
  Antisense strand to SEQ ID NO: 2545412
uggcugagaaccuuccucu

SEQ ID NO: 2545414 - RNA, 19 nt, Artificial Sequence
  Description of Artificial Sequence: Synthetic oligonucleotide
  Sense strand starting at position 1597 of SEQ ID NO: 1888613
gccugcucugaagagacau

SEQ ID NO: 2545415 - RNA, 19 nt, Artificial Sequence
  Description of Artificial Sequence: Synthetic oligonucleotide
  Antisense strand to SEQ ID NO: 2545414
augucucuucagagcaggc

SEQ ID NO: 2545416 - RNA, 19 nt, Artificial Sequence
  Description of Artificial Sequence: Synthetic oligonucleotide
  Sense strand starting at position 1370 of SEQ ID NO: 1888613
gucauaagaccuugaguag

SEQ ID NO: 2545417 - RNA, 19 nt, Artificial Sequence
  Description of Artificial Sequence: Synthetic oligonucleotide
  Antisense strand to SEQ ID NO: 2545416
cuacucaaggucuuaugac

SEQ ID NO: 2545418 - RNA, 19 nt, Artificial Sequence
  Description of Artificial Sequence: Synthetic oligonucleotide
  Sense strand starting at position 1488 of SEQ ID NO: 1888613
cucuaugaugcuuagguga

SEQ ID NO: 2545419 - RNA, 19 nt, Artificial Sequence
  Description of Artificial Sequence: Synthetic oligonucleotide
  Antisense strand to SEQ ID NO: 2545418
ucaccuaagcaucauagag

SEQ ID NO: 2545420 - RNA, 19 nt, Artificial Sequence
  Description of Artificial Sequence: Synthetic oligonucleotide
  Sense strand starting at position 3000 of SEQ ID NO: 1888613
ccaacauuaucugugauug

SEQ ID NO: 2545421 - RNA, 19 nt, Artificial Sequence
  Description of Artificial Sequence: Synthetic oligonucleotide
  Antisense strand to SEQ ID NO: 2545420
caaucacagauaauguugg

SEQ ID NO: 2545422 - RNA, 19 nt, Artificial Sequence
  Description of Artificial Sequence: Synthetic oligonucleotide
  Sense strand starting at position 2834 of SEQ ID NO: 1888613
uggacauuguaaucuucca

SEQ ID NO: 2545423 - RNA, 19 nt, Artificial Sequence
  Description of Artificial Sequence: Synthetic oligonucleotide
  Antisense strand to SEQ ID NO: 2545422
uggaagauuacaaugucca

SEQ ID NO: 2545424 - RNA, 19 nt, Artificial Sequence
  Description of Artificial Sequence: Synthetic oligonucleotide
  Sense strand starting at position 2258 of SEQ ID NO: 1888613
guggauuuccgguggcuga

SEQ ID NO: 2545425 - RNA, 19 nt, Artificial Sequence
  Description of Artificial Sequence: Synthetic oligonucleotide
  Antisense strand to SEQ ID NO: 2545424
ucagccaccggaaauccac

SEQ ID NO: 2545426 - RNA, 19 nt, Artificial Sequence
  Description of Artificial Sequence: Synthetic oligonucleotide
  Sense strand starting at position 1848 of SEQ ID NO: 1888613
gguuuccuaggugaaucuu

SEQ ID NO: 2545427 - RNA, 19 nt, Artificial Sequence
  Description of Artificial Sequence: Synthetic oligonucleotide
  Antisense strand to SEQ ID NO: 2545426
aagauucaccuaggaaacc

SEQ ID NO: 2545428 - RNA, 19 nt, Artificial Sequence
  Description of Artificial Sequence: Synthetic oligonucleotide
  Sense strand starting at position 2074 of SEQ ID NO: 1888613
agaaccauacaguguuauu

SEQ ID NO: 2545429 - RNA, 19 nt, Artificial Sequence
  Description of Artificial Sequence: Synthetic oligonucleotide
  Antisense strand to SEQ ID NO: 2545428
aauaacacuguaugguucu

SEQ ID NO: 2545430 - RNA, 19 nt, Artificial Sequence
  Description of Artificial Sequence: Synthetic oligonucleotide
  Sense strand starting at position 1002 of SEQ ID NO: 1888613
ucauguagucuaugacaaa

SEQ ID NO: 2545431 - RNA, 19 nt, Artificial Sequence
  Description of Artificial Sequence: Synthetic oligonucleotide
  Antisense strand to SEQ ID NO: 2545430
uuugucauagacuacauga

SEQ ID NO: 2545432 - RNA, 19 nt, Artificial Sequence
  Description of Artificial Sequence: Synthetic oligonucleotide
  Sense strand starting at position 3118 of SEQ ID NO: 1888613
ggagacccgucaucaacau

SEQ ID NO: 2545433 - RNA, 19 nt, Artificial Sequence
  Description of Artificial Sequence: Synthetic oligonucleotide
  Antisense strand to SEQ ID NO: 2545432
auguugaugacgggucucc

SEQ ID NO: 2545434 - RNA, 19 nt, Artificial Sequence
  Description of Artificial Sequence: Synthetic oligonucleotide
  Sense strand starting at position 2431 of SEQ ID NO: 1888613
ucucuucuuguagauaucu

SEQ ID NO: 2545435 - RNA, 19 nt, Artificial Sequence
  Description of Artificial Sequence: Synthetic oligonucleotide
  Antisense strand to SEQ ID NO: 2545434
agauaucuacaagaagaga

SEQ ID NO: 2545436 - RNA, 19 nt, Artificial Sequence
  Description of Artificial Sequence: Synthetic oligonucleotide
  Sense strand starting at position 1000 of SEQ ID NO: 1888613
ugucauguagucuaugaca

SEQ ID NO: 2545437 - RNA, 19 nt, Artificial Sequence
  Description of Artificial Sequence: Synthetic oligonucleotide
  Antisense strand to SEQ ID NO: 2545436
ugucauagacuacaugaca

SEQ ID NO: 2545438 - RNA, 19 nt, Artificial Sequence
  Description of Artificial Sequence: Synthetic oligonucleotide
  Sense strand starting at position 1754 of SEQ ID NO: 1888613
aggaaaguguguccauuag

SEQ ID NO: 2545439 - RNA, 19 nt, Artificial Sequence
  Description of Artificial Sequence: Synthetic oligonucleotide
  Antisense strand to SEQ ID NO: 2545438
cuaauggacacacuuuccu

SEQ ID NO: 2545440 - RNA, 19 nt, Artificial Sequence
  Description of Artificial Sequence: Synthetic oligonucleotide
  Sense strand starting at position 2645 of SEQ ID NO: 1888613
aagucaggauccguuggaa

SEQ ID NO: 2545441 - RNA, 19 nt, Artificial Sequence
  Description of Artificial Sequence: Synthetic oligonucleotide
  Antisense strand to SEQ ID NO: 2545440
uuccaacggauccugacuu

SEQ ID NO: 2545442 - RNA, 19 nt, Artificial Sequence
  Description of Artificial Sequence: Synthetic oligonucleotide
  Sense strand starting at position 3697 of SEQ ID NO: 1888613
ggcuucuuuccagagugau

SEQ ID NO: 2545443 - RNA, 19 nt, Artificial Sequence
  Description of Artificial Sequence: Synthetic oligonucleotide
  Antisense strand to SEQ ID NO: 2545442
aucacucuggaaagaagcc

SEQ ID NO: 2545444 - RNA, 19 nt, Artificial Sequence
  Description of Artificial Sequence: Synthetic oligonucleotide
  Sense strand starting at position 2467 of SEQ ID NO: 1888613
uucucugaaucccuagagu

SEQ ID NO: 2545445 - RNA, 19 nt, Artificial Sequence
  Description of Artificial Sequence: Synthetic oligonucleotide
  Antisense strand to SEQ ID NO: 2545444
acucuagggauucagagaa

SEQ ID NO: 2545446 - RNA, 19 nt, Artificial Sequence
  Description of Artificial Sequence: Synthetic oligonucleotide
  Sense strand starting at position 3452 of SEQ ID NO: 1888613
gcaucuuaucagcaguaaa

SEQ ID NO: 2545447 - RNA, 19 nt, Artificial Sequence
  Description of Artificial Sequence: Synthetic oligonucleotide
  Antisense strand to SEQ ID NO: 2545446
uuuacugcugauaagaugc

SEQ ID NO: 2545448 - RNA, 19 nt, Artificial Sequence
  Description of Artificial Sequence: Synthetic oligonucleotide
  Sense strand starting at position 1457 of SEQ ID NO: 1888613
ggcugcucugcagaaggaa

SEQ ID NO: 2545449 - RNA, 19 nt, Artificial Sequence
  Description of Artificial Sequence: Synthetic oligonucleotide
  Antisense strand to SEQ ID NO: 2545448
uuccuucugcagagcagcc

SEQ ID NO: 2545450 - RNA, 19 nt, Artificial Sequence
  Description of Artificial Sequence: Synthetic oligonucleotide
  Sense strand starting at position 792 of SEQ ID NO: 1888614
uuaauaugauggucaagac

SEQ ID NO: 2545451 - RNA, 19 nt, Artificial Sequence
  Description of Artificial Sequence: Synthetic oligonucleotide
  Antisense strand to SEQ ID NO: 2545450
gucuugaccaucauauuaa

SEQ ID NO: 2545452 - RNA, 19 nt, Artificial Sequence
  Description of Artificial Sequence: Synthetic oligonucleotide
  Sense strand starting at position 2434 of SEQ ID NO: 1888614
ccagguggacccugagaga

SEQ ID NO: 2545453 - RNA, 19 nt, Artificial Sequence
  Description of Artificial Sequence: Synthetic oligonucleotide
  Antisense strand to SEQ ID NO: 2545452
ucucucaggguccaccugg

SEQ ID NO: 2545454 - RNA, 19 nt, Artificial Sequence
  Description of Artificial Sequence: Synthetic oligonucleotide
  Sense strand starting at position 790 of SEQ ID NO: 1888614
uauuaauaugauggucaag

SEQ ID NO: 2545455 - RNA, 19 nt, Artificial Sequence
  Description of Artificial Sequence: Synthetic oligonucleotide
  Antisense strand to SEQ ID NO: 2545454
cuugaccaucauauuaaua

SEQ ID NO: 2545456 - RNA, 19 nt, Artificial Sequence
  Description of Artificial Sequence: Synthetic oligonucleotide
  Sense strand starting at position 2731 of SEQ ID NO: 1888614
ugccauuugcaucaguuua

SEQ ID NO: 2545457 - RNA, 19 nt, Artificial Sequence
  Description of Artificial Sequence: Synthetic oligonucleotide
  Antisense strand to SEQ ID NO: 2545456
uaaacugaugcaaauggca

SEQ ID NO: 2545458 - RNA, 19 nt, Artificial Sequence
  Description of Artificial Sequence: Synthetic oligonucleotide
  Sense strand starting at position 1081 of SEQ ID NO: 1888614
cuguuaaaugcauaugaga

SEQ ID NO: 2545459 - RNA, 19 nt, Artificial Sequence
  Description of Artificial Sequence: Synthetic oligonucleotide
  Antisense strand to SEQ ID NO: 2545458
ucucauaugcauuuaacag

SEQ ID NO: 2545460 - RNA, 19 nt, Artificial Sequence
  Description of Artificial Sequence: Synthetic oligonucleotide
  Sense strand starting at position 1145 of SEQ ID NO: 1888614
ggaggagaaccuugcauac

SEQ ID NO: 2545461 - RNA, 19 nt, Artificial Sequence
  Description of Artificial Sequence: Synthetic oligonucleotide
  Antisense strand to SEQ ID NO: 2545460
guaugcaagguucuccucc

SEQ ID NO: 2545462 - RNA, 19 nt, Artificial Sequence
  Description of Artificial Sequence: Synthetic oligonucleotide
  Sense strand starting at position 2129 of SEQ ID NO: 1888614
aguggaaagagauggucuu

SEQ ID NO: 2545463 - RNA, 19 nt, Artificial Sequence
  Description of Artificial Sequence: Synthetic oligonucleotide
  Antisense strand to SEQ ID NO: 2545462
aagaccaucucuuuccacu

SEQ ID NO: 2545464 - RNA, 19 nt, Artificial Sequence
  Description of Artificial Sequence: Synthetic oligonucleotide
  Sense strand starting at position 2400 of SEQ ID NO: 1888614
gcuaaaugugcugugucuu

SEQ ID NO: 2545465 - RNA, 19 nt, Artificial Sequence
  Description of Artificial Sequence: Synthetic oligonucleotide
  Antisense strand to SEQ ID NO: 2545464
aagacacagcacauuuagc

SEQ ID NO: 2545466 - RNA, 19 nt, Artificial Sequence
  Description of Artificial Sequence: Synthetic oligonucleotide
  Sense strand starting at position 3932 of SEQ ID NO: 1888614
gugucugugcuucugcaga

SEQ ID NO: 2545467 - RNA, 19 nt, Artificial Sequence
  Description of Artificial Sequence: Synthetic oligonucleotide
  Antisense strand to SEQ ID NO: 2545466
ucugcagaagcacagacac

SEQ ID NO: 2545468 - RNA, 19 nt, Artificial Sequence
  Description of Artificial Sequence: Synthetic oligonucleotide
  Sense strand starting at position 819 of SEQ ID NO: 1888614
guauguauagaaugauuac

SEQ ID NO: 2545469 - RNA, 19 nt, Artificial Sequence
  Description of Artificial Sequence: Synthetic oligonucleotide
  Antisense strand to SEQ ID NO: 2545468
guaaucauucuauacauac

SEQ ID NO: 2545470 - RNA, 19 nt, Artificial Sequence
  Description of Artificial Sequence: Synthetic oligonucleotide
  Sense strand starting at position 630 of SEQ ID NO: 1888614
acaacugugcugggaaaca

SEQ ID NO: 2545471 - RNA, 19 nt, Artificial Sequence
  Description of Artificial Sequence: Synthetic oligonucleotide
  Antisense strand to SEQ ID NO: 2545470
uguuucccagcacaguugu

SEQ ID NO: 2545472 - RNA, 19 nt, Artificial Sequence
  Description of Artificial Sequence: Synthetic oligonucleotide
  Sense strand starting at position 3578 of SEQ ID NO: 1888614
caaggagucggagguuaca

SEQ ID NO: 2545473 - RNA, 19 nt, Artificial Sequence
  Description of Artificial Sequence: Synthetic oligonucleotide
  Antisense strand to SEQ ID NO: 2545472
uguaaccuccgacuccuug

SEQ ID NO: 2545474 - RNA, 19 nt, Artificial Sequence
  Description of Artificial Sequence: Synthetic oligonucleotide
  Sense strand starting at position 2390 of SEQ ID NO: 1888614
cauguuuauggcuaaaugu

SEQ ID NO: 2545475 - RNA, 19 nt, Artificial Sequence
  Description of Artificial Sequence: Synthetic oligonucleotide
  Antisense strand to SEQ ID NO: 2545474
acauuuagccauaaacaug

SEQ ID NO: 2545476 - RNA, 19 nt, Artificial Sequence
  Description of Artificial Sequence: Synthetic oligonucleotide
  Sense strand starting at position 2389 of SEQ ID NO: 1888614
ccauguuuauggcuaaaug

SEQ ID NO: 2545477 - RNA, 19 nt, Artificial Sequence
  Description of Artificial Sequence: Synthetic oligonucleotide
  Antisense strand to SEQ ID NO: 2545476
cauuuagccauaaacaugg

SEQ ID NO: 2545478 - RNA, 19 nt, Artificial Sequence
  Description of Artificial Sequence: Synthetic oligonucleotide
  Sense strand starting at position 3127 of SEQ ID NO: 1888614
cuugaagugagccgaaauu

SEQ ID NO: 2545479 - RNA, 19 nt, Artificial Sequence
  Description of Artificial Sequence: Synthetic oligonucleotide
  Antisense strand to SEQ ID NO: 2545478
aauuucggcucacuucaag

SEQ ID NO: 2545480 - RNA, 19 nt, Artificial Sequence
  Description of Artificial Sequence: Synthetic oligonucleotide
  Sense strand starting at position 3949 of SEQ ID NO: 1888614
gaguuagccuggucccaga

SEQ ID NO: 2545481 - RNA, 19 nt, Artificial Sequence
  Description of Artificial Sequence: Synthetic oligonucleotide
  Antisense strand to SEQ ID NO: 2545480
ucugggaccaggcuaacuc

SEQ ID NO: 2545482 - RNA, 19 nt, Artificial Sequence
  Description of Artificial Sequence: Synthetic oligonucleotide
  Sense strand starting at position 3947 of SEQ ID NO: 1888614
cagaguuagccugguccca

SEQ ID NO: 2545483 - RNA, 19 nt, Artificial Sequence
  Description of Artificial Sequence: Synthetic oligonucleotide
  Antisense strand to SEQ ID NO: 2545482
ugggaccaggcuaacucug

SEQ ID NO: 2545484 - RNA, 19 nt, Artificial Sequence
  Description of Artificial Sequence: Synthetic oligonucleotide
  Sense strand starting at position 2380 of SEQ ID NO: 1888614
ccagcccuuccauguuuau

SEQ ID NO: 2545485 - RNA, 19 nt, Artificial Sequence
  Description of Artificial Sequence: Synthetic oligonucleotide
  Antisense strand to SEQ ID NO: 2545484
auaaacauggaagggcugg

SEQ ID NO: 2545486 - RNA, 19 nt, Artificial Sequence
  Description of Artificial Sequence: Synthetic oligonucleotide
  Sense strand starting at position 2766 of SEQ ID NO: 1888614
gagggcagguauuaaagaa

SEQ ID NO: 2545487 - RNA, 19 nt, Artificial Sequence
  Description of Artificial Sequence: Synthetic oligonucleotide
  Antisense strand to SEQ ID NO: 2545486
uucuuuaauaccugcccuc

SEQ ID NO: 2545488 - RNA, 19 nt, Artificial Sequence
  Description of Artificial Sequence: Synthetic oligonucleotide
  Sense strand starting at position 1147 of SEQ ID NO: 1888614
aggagaaccuugcauacaa

SEQ ID NO: 2545489 - RNA, 19 nt, Artificial Sequence
  Description of Artificial Sequence: Synthetic oligonucleotide
  Antisense strand to SEQ ID NO: 2545488
uuguaugcaagguucuccu

SEQ ID NO: 2545490 - RNA, 19 nt, Artificial Sequence
  Description of Artificial Sequence: Synthetic oligonucleotide
  Sense strand starting at position 3977 of SEQ ID NO: 1888614
ugugcaugcuggagugaag

SEQ ID NO: 2545491 - RNA, 19 nt, Artificial Sequence
  Description of Artificial Sequence: Synthetic oligonucleotide
  Antisense strand to SEQ ID NO: 2545490
cuucacuccagcaugcaca

SEQ ID NO: 2545492 - RNA, 19 nt, Artificial Sequence
  Description of Artificial Sequence: Synthetic oligonucleotide
  Sense strand starting at position 2800 of SEQ ID NO: 1888614
ggcgccuccugccuauaau

SEQ ID NO: 2545493 - RNA, 19 nt, Artificial Sequence
  Description of Artificial Sequence: Synthetic oligonucleotide
  Antisense strand to SEQ ID NO: 2545492
auuauaggcaggaggcgcc

SEQ ID NO: 2545494 - RNA, 19 nt, Artificial Sequence
  Description of Artificial Sequence: Synthetic oligonucleotide
  Sense strand starting at position 3861 of SEQ ID NO: 1888614
caaagauggugaggucuga

SEQ ID NO: 2545495 - RNA, 19 nt, Artificial Sequence
  Description of Artificial Sequence: Synthetic oligonucleotide
  Antisense strand to SEQ ID NO: 2545494
ucagaccucaccaucuuug

SEQ ID NO: 2545496 - RNA, 19 nt, Artificial Sequence
  Description of Artificial Sequence: Synthetic oligonucleotide
  Sense strand starting at position 3934 of SEQ ID NO: 1888614
gucugugcuucugcagagu

SEQ ID NO: 2545497 - RNA, 19 nt, Artificial Sequence
  Description of Artificial Sequence: Synthetic oligonucleotide
  Antisense strand to SEQ ID NO: 2545496
acucugcagaagcacagac

SEQ ID NO: 2545498 - RNA, 19 nt, Artificial Sequence
  Description of Artificial Sequence: Synthetic oligonucleotide
  Sense strand starting at position 1097 of SEQ ID NO: 1888614
agaauuaucuaagguuccu

SEQ ID NO: 2545499 - RNA, 19 nt, Artificial Sequence
  Description of Artificial Sequence: Synthetic oligonucleotide
  Antisense strand to SEQ ID NO: 2545498
aggaaccuuagauaauucu

SEQ ID NO: 2545500 - RNA, 19 nt, Artificial Sequence
  Description of Artificial Sequence: Synthetic oligonucleotide
  Sense strand starting at position 628 of SEQ ID NO: 1888614
caacaacugugcugggaaa

SEQ ID NO: 2545501 - RNA, 19 nt, Artificial Sequence
  Description of Artificial Sequence: Synthetic oligonucleotide
  Antisense strand to SEQ ID NO: 2545500
uuucccagcacaguuguug

SEQ ID NO: 2545502 - RNA, 19 nt, Artificial Sequence
  Description of Artificial Sequence: Synthetic oligonucleotide
  Sense strand starting at position 1992 of SEQ ID NO: 1888614
agugcucccuuccaaagau

SEQ ID NO: 2545503 - RNA, 19 nt, Artificial Sequence
  Description of Artificial Sequence: Synthetic oligonucleotide
  Antisense strand to SEQ ID NO: 2545502
aucuuuggaagggagcacu

SEQ ID NO: 2545504 - RNA, 19 nt, Artificial Sequence
  Description of Artificial Sequence: Synthetic oligonucleotide
  Sense strand starting at position 2588 of SEQ ID NO: 1888614
gggccaaucucaggguuga

SEQ ID NO: 2545505 - RNA, 19 nt, Artificial Sequence
  Description of Artificial Sequence: Synthetic oligonucleotide
  Antisense strand to SEQ ID NO: 2545504
ucaacccugagauuggccc

SEQ ID NO: 2545506 - RNA, 19 nt, Artificial Sequence
  Description of Artificial Sequence: Synthetic oligonucleotide
  Sense strand starting at position 2568 of SEQ ID NO: 1888614
aucuuagguucuggcagau

SEQ ID NO: 2545507 - RNA, 19 nt, Artificial Sequence
  Description of Artificial Sequence: Synthetic oligonucleotide
  Antisense strand to SEQ ID NO: 2545506
aucugccagaaccuaagau

SEQ ID NO: 2545508 - RNA, 19 nt, Artificial Sequence
  Description of Artificial Sequence: Synthetic oligonucleotide
  Sense strand starting at position 2567 of SEQ ID NO: 1888614
caucuuagguucuggcaga

SEQ ID NO: 2545509 - RNA, 19 nt, Artificial Sequence
  Description of Artificial Sequence: Synthetic oligonucleotide
  Antisense strand to SEQ ID NO: 2545508
ucugccagaaccuaagaug

SEQ ID NO: 2545510 - RNA, 19 nt, Artificial Sequence
  Description of Artificial Sequence: Synthetic oligonucleotide
  Sense strand starting at position 2387 of SEQ ID NO: 1888614
uuccauguuuauggcuaaa

SEQ ID NO: 2545511 - RNA, 19 nt, Artificial Sequence
  Description of Artificial Sequence: Synthetic oligonucleotide
  Antisense strand to SEQ ID NO: 2545510
uuuagccauaaacauggaa

SEQ ID NO: 2545512 - RNA, 19 nt, Artificial Sequence
  Description of Artificial Sequence: Synthetic oligonucleotide
  Sense strand starting at position 2386 of SEQ ID NO: 1888614
cuuccauguuuauggcuaa

SEQ ID NO: 2545513 - RNA, 19 nt, Artificial Sequence
  Description of Artificial Sequence: Synthetic oligonucleotide
  Antisense strand to SEQ ID NO: 2545512
uuagccauaaacauggaag

SEQ ID NO: 2545514 - RNA, 19 nt, Artificial Sequence
  Description of Artificial Sequence: Synthetic oligonucleotide
  Sense strand starting at position 2399 of SEQ ID NO: 1888614
ggcuaaaugugcugugucu

SEQ ID NO: 2545515 - RNA, 19 nt, Artificial Sequence
  Description of Artificial Sequence: Synthetic oligonucleotide
  Antisense strand to SEQ ID NO: 2545514
agacacagcacauuuagcc

SEQ ID NO: 2545516 - RNA, 19 nt, Artificial Sequence
  Description of Artificial Sequence: Synthetic oligonucleotide
  Sense strand starting at position 2406 of SEQ ID NO: 1888614
ugugcugugucuuggagca

SEQ ID NO: 2545517 - RNA, 19 nt, Artificial Sequence
  Description of Artificial Sequence: Synthetic oligonucleotide
  Antisense strand to SEQ ID NO: 2545516
ugcuccaagacacagcaca

SEQ ID NO: 2545518 - RNA, 19 nt, Artificial Sequence
  Description of Artificial Sequence: Synthetic oligonucleotide
  Sense strand starting at position 3912 of SEQ ID NO: 1888614
gcugaaugcuguggucugu

SEQ ID NO: 2545519 - RNA, 19 nt, Artificial Sequence
  Description of Artificial Sequence: Synthetic oligonucleotide
  Antisense strand to SEQ ID NO: 2545518
acagaccacagcauucagc

SEQ ID NO: 2545520 - RNA, 19 nt, Artificial Sequence
  Description of Artificial Sequence: Synthetic oligonucleotide
  Sense strand starting at position 2931 of SEQ ID NO: 1888615
ugaucagacuauguaagau

SEQ ID NO: 2545521 - RNA, 19 nt, Artificial Sequence
  Description of Artificial Sequence: Synthetic oligonucleotide
  Antisense strand to SEQ ID NO: 2545520
aucuuacauagucugauca

SEQ ID NO: 2545522 - RNA, 19 nt, Artificial Sequence
  Description of Artificial Sequence: Synthetic oligonucleotide
  Sense strand starting at position 3776 of SEQ ID NO: 1888615
uggucuaagcgcuucucau

SEQ ID NO: 2545523 - RNA, 19 nt, Artificial Sequence
  Description of Artificial Sequence: Synthetic oligonucleotide
  Antisense strand to SEQ ID NO: 2545522
augagaagcgcuuagacca

SEQ ID NO: 2545524 - RNA, 19 nt, Artificial Sequence
  Description of Artificial Sequence: Synthetic oligonucleotide
  Sense strand starting at position 2930 of SEQ ID NO: 1888615
cugaucagacuauguaaga

SEQ ID NO: 2545525 - RNA, 19 nt, Artificial Sequence
  Description of Artificial Sequence: Synthetic oligonucleotide
  Antisense strand to SEQ ID NO: 2545524
ucuuacauagucugaucag

SEQ ID NO: 2545526 - RNA, 19 nt, Artificial Sequence
  Description of Artificial Sequence: Synthetic oligonucleotide
  Sense strand starting at position 2722 of SEQ ID NO: 1888615
acuugaaagucccugagga

SEQ ID NO: 2545527 - RNA, 19 nt, Artificial Sequence
  Description of Artificial Sequence: Synthetic oligonucleotide
  Antisense strand to SEQ ID NO: 2545526
uccucagggacuuucaagu

SEQ ID NO: 2545528 - RNA, 19 nt, Artificial Sequence
  Description of Artificial Sequence: Synthetic oligonucleotide
  Sense strand starting at position 3682 of SEQ ID NO: 1888615
gcaugaagcagacaguaaa

SEQ ID NO: 2545529 - RNA, 19 nt, Artificial Sequence
  Description of Artificial Sequence: Synthetic oligonucleotide
  Antisense strand to SEQ ID NO: 2545528
uuuacugucugcuucaugc

SEQ ID NO: 2545530 - RNA, 19 nt, Artificial Sequence
  Description of Artificial Sequence: Synthetic oligonucleotide
  Sense strand starting at position 3597 of SEQ ID NO: 1888615
acaguaaucagauggguag

SEQ ID NO: 2545531 - RNA, 19 nt, Artificial Sequence
  Description of Artificial Sequence: Synthetic oligonucleotide
  Antisense strand to SEQ ID NO: 2545530
cuacccaucugauuacugu

SEQ ID NO: 2545532 - RNA, 19 nt, Artificial Sequence
  Description of Artificial Sequence: Synthetic oligonucleotide
  Sense strand starting at position 2578 of SEQ ID NO: 1888615
cgugccuaugcugcugaaa

SEQ ID NO: 2545533 - RNA, 19 nt, Artificial Sequence
  Description of Artificial Sequence: Synthetic oligonucleotide
  Antisense strand to SEQ ID NO: 2545532
uuucagcagcauaggcacg

SEQ ID NO: 2545534 - RNA, 19 nt, Artificial Sequence
  Description of Artificial Sequence: Synthetic oligonucleotide
  Sense strand starting at position 3886 of SEQ ID NO: 1888615
uggagaauucaguguagag

SEQ ID NO: 2545535 - RNA, 19 nt, Artificial Sequence
  Description of Artificial Sequence: Synthetic oligonucleotide
  Antisense strand to SEQ ID NO: 2545534
cucuacacugaauucucca

SEQ ID NO: 2545536 - RNA, 19 nt, Artificial Sequence
  Description of Artificial Sequence: Synthetic oligonucleotide
  Sense strand starting at position 3629 of SEQ ID NO: 1888615
aaaguauagcauuagugau

SEQ ID NO: 2545537 - RNA, 19 nt, Artificial Sequence
  Description of Artificial Sequence: Synthetic oligonucleotide
  Antisense strand to SEQ ID NO: 2545536
aucacuaaugcuauacuuu

SEQ ID NO: 2545538 - RNA, 19 nt, Artificial Sequence
  Description of Artificial Sequence: Synthetic oligonucleotide
  Sense strand starting at position 2723 of SEQ ID NO: 1888615
cuugaaagucccugaggau

SEQ ID NO: 2545539 - RNA, 19 nt, Artificial Sequence
  Description of Artificial Sequence: Synthetic oligonucleotide
  Antisense strand to SEQ ID NO: 2545538
auccucagggacuuucaag

SEQ ID NO: 2545540 - RNA, 19 nt, Artificial Sequence
  Description of Artificial Sequence: Synthetic oligonucleotide
  Sense strand starting at position 3322 of SEQ ID NO: 1888615
acagaaaggccacgugaaa

SEQ ID NO: 2545541 - RNA, 19 nt, Artificial Sequence
  Description of Artificial Sequence: Synthetic oligonucleotide
  Antisense strand to SEQ ID NO: 2545540
uuucacguggccuuucugu

SEQ ID NO: 2545542 - RNA, 19 nt, Artificial Sequence
  Description of Artificial Sequence: Synthetic oligonucleotide
  Sense strand starting at position 3534 of SEQ ID NO: 1888615
agcguuagagaacagucaa

SEQ ID NO: 2545543 - RNA, 19 nt, Artificial Sequence
  Description of Artificial Sequence: Synthetic oligonucleotide
  Antisense strand to SEQ ID NO: 2545542
uugacuguucucuaacgcu

SEQ ID NO: 2545544 - RNA, 19 nt, Artificial Sequence
  Description of Artificial Sequence: Synthetic oligonucleotide
  Sense strand starting at position 2736 of SEQ ID NO: 1888615
gaggauuuaucaggaaacu

SEQ ID NO: 2545545 - RNA, 19 nt, Artificial Sequence
  Description of Artificial Sequence: Synthetic oligonucleotide
  Antisense strand to SEQ ID NO: 2545544
aguuuccugauaaauccuc

SEQ ID NO: 2545546 - RNA, 19 nt, Artificial Sequence
  Description of Artificial Sequence: Synthetic oligonucleotide
  Sense strand starting at position 295 of SEQ ID NO: 1888615
gugcuuguugcugucucua

SEQ ID NO: 2545547 - RNA, 19 nt, Artificial Sequence
  Description of Artificial Sequence: Synthetic oligonucleotide
  Antisense strand to SEQ ID NO: 2545546
uagagacagcaacaagcac

SEQ ID NO: 2545548 - RNA, 19 nt, Artificial Sequence
  Description of Artificial Sequence: Synthetic oligonucleotide
  Sense strand starting at position 2179 of SEQ ID NO: 1888615
caggguaccugggcuuaaa

SEQ ID NO: 2545549 - RNA, 19 nt, Artificial Sequence
  Description of Artificial Sequence: Synthetic oligonucleotide
  Antisense strand to SEQ ID NO: 2545548
uuuaagcccagguacccug

SEQ ID NO: 2545550 - RNA, 19 nt, Artificial Sequence
  Description of Artificial Sequence: Synthetic oligonucleotide
  Sense strand starting at position 2668 of SEQ ID NO: 1888615
gcuuaaucuucucuggaaa

SEQ ID NO: 2545551 - RNA, 19 nt, Artificial Sequence
  Description of Artificial Sequence: Synthetic oligonucleotide
  Antisense strand to SEQ ID NO: 2545550
uuuccagagaagauuaagc

SEQ ID NO: 2545552 - RNA, 19 nt, Artificial Sequence
  Description of Artificial Sequence: Synthetic oligonucleotide
  Sense strand starting at position 3598 of SEQ ID NO: 1888615
caguaaucagauggguagu

SEQ ID NO: 2545553 - RNA, 19 nt, Artificial Sequence
  Description of Artificial Sequence: Synthetic oligonucleotide
  Antisense strand to SEQ ID NO: 2545552
acuacccaucugauuacug

SEQ ID NO: 2545554 - RNA, 19 nt, Artificial Sequence
  Description of Artificial Sequence: Synthetic oligonucleotide
  Sense strand starting at position 889 of SEQ ID NO: 1888615
gguggagggucacuccuua

SEQ ID NO: 2545555 - RNA, 19 nt, Artificial Sequence
  Description of Artificial Sequence: Synthetic oligonucleotide
  Antisense strand to SEQ ID NO: 2545554
uaaggagugacccuccacc

SEQ ID NO: 2545556 - RNA, 19 nt, Artificial Sequence
  Description of Artificial Sequence: Synthetic oligonucleotide
  Sense strand starting at position 3904 of SEQ ID NO: 1888615
gggccaauccuaggauggu

SEQ ID NO: 2545557 - RNA, 19 nt, Artificial Sequence
  Description of Artificial Sequence: Synthetic oligonucleotide
  Antisense strand to SEQ ID NO: 2545556
accauccuaggauuggccc

SEQ ID NO: 2545558 - RNA, 19 nt, Artificial Sequence
  Description of Artificial Sequence: Synthetic oligonucleotide
  Sense strand starting at position 3860 of SEQ ID NO: 1888615
caagcucacgcagaugauu

SEQ ID NO: 2545559 - RNA, 19 nt, Artificial Sequence
  Description of Artificial Sequence: Synthetic oligonucleotide
  Antisense strand to SEQ ID NO: 2545558
aaucaucugcgugagcuug

SEQ ID NO: 2545560 - RNA, 19 nt, Artificial Sequence
  Description of Artificial Sequence: Synthetic oligonucleotide
  Sense strand starting at position 2667 of SEQ ID NO: 1888615
ugcuuaaucuucucuggaa

SEQ ID NO: 2545561 - RNA, 19 nt, Artificial Sequence
  Description of Artificial Sequence: Synthetic oligonucleotide
  Antisense strand to SEQ ID NO: 2545560
uuccagagaagauuaagca

SEQ ID NO: 2545562 - RNA, 19 nt, Artificial Sequence
  Description of Artificial Sequence: Synthetic oligonucleotide
  Sense strand starting at position 2682 of SEQ ID NO: 1888615
ggaaauuaacgguggcuau

SEQ ID NO: 2545563 - RNA, 19 nt, Artificial Sequence
  Description of Artificial Sequence: Synthetic oligonucleotide
  Antisense strand to SEQ ID NO: 2545562
auagccaccguuaauuucc

SEQ ID NO: 2545564 - RNA, 19 nt, Artificial Sequence
  Description of Artificial Sequence: Synthetic oligonucleotide
  Sense strand starting at position 300 of SEQ ID NO: 1888615
uguugcugucucuaagaca

SEQ ID NO: 2545565 - RNA, 19 nt, Artificial Sequence
  Description of Artificial Sequence: Synthetic oligonucleotide
  Antisense strand to SEQ ID NO: 2545564
ugucuuagagacagcaaca

SEQ ID NO: 2545566 - RNA, 19 nt, Artificial Sequence
  Description of Artificial Sequence: Synthetic oligonucleotide
  Sense strand starting at position 2953 of SEQ ID NO: 1888615
ggcauacagugggucauua

SEQ ID NO: 2545567 - RNA, 19 nt, Artificial Sequence
  Description of Artificial Sequence: Synthetic oligonucleotide
  Antisense strand to SEQ ID NO: 2545566
uaaugacccacuguaugcc

SEQ ID NO: 2545568 - RNA, 19 nt, Artificial Sequence
  Description of Artificial Sequence: Synthetic oligonucleotide
  Sense strand starting at position 955 of SEQ ID NO: 1888615
gggugacacuugucuaagu

SEQ ID NO: 2545569 - RNA, 19 nt, Artificial Sequence
  Description of Artificial Sequence: Synthetic oligonucleotide
  Antisense strand to SEQ ID NO: 2545568
acuuagacaagugucaccc

SEQ ID NO: 2545570 - RNA, 19 nt, Artificial Sequence
  Description of Artificial Sequence: Synthetic oligonucleotide
  Sense strand starting at position 2726 of SEQ ID NO: 1888615
gaaagucccugaggauuua

SEQ ID NO: 2545571 - RNA, 19 nt, Artificial Sequence
  Description of Artificial Sequence: Synthetic oligonucleotide
  Antisense strand to SEQ ID NO: 2545570
uaaauccucagggacuuuc

SEQ ID NO: 2545572 - RNA, 19 nt, Artificial Sequence
  Description of Artificial Sequence: Synthetic oligonucleotide
  Sense strand starting at position 983 of SEQ ID NO: 1888615
agagaaggccucuguguac

SEQ ID NO: 2545573 - RNA, 19 nt, Artificial Sequence
  Description of Artificial Sequence: Synthetic oligonucleotide
  Antisense strand to SEQ ID NO: 2545572
guacacagaggccuucucu

SEQ ID NO: 2545574 - RNA, 19 nt, Artificial Sequence
  Description of Artificial Sequence: Synthetic oligonucleotide
  Sense strand starting at position 243 of SEQ ID NO: 1888615
ucagguugcugacuucuga

SEQ ID NO: 2545575 - RNA, 19 nt, Artificial Sequence
  Description of Artificial Sequence: Synthetic oligonucleotide
  Antisense strand to SEQ ID NO: 2545574
ucagaagucagcaaccuga

SEQ ID NO: 2545576 - RNA, 19 nt, Artificial Sequence
  Description of Artificial Sequence: Synthetic oligonucleotide
  Sense strand starting at position 2489 of SEQ ID NO: 1888615
gcagacuguuccucuuaca

SEQ ID NO: 2545577 - RNA, 19 nt, Artificial Sequence
  Description of Artificial Sequence: Synthetic oligonucleotide
  Antisense strand to SEQ ID NO: 2545576
uguaagaggaacagucugc

SEQ ID NO: 2545578 - RNA, 19 nt, Artificial Sequence
  Description of Artificial Sequence: Synthetic oligonucleotide
  Sense strand starting at position 2299 of SEQ ID NO: 1888615
gagguuaucccugggcucu

SEQ ID NO: 2545579 - RNA, 19 nt, Artificial Sequence
  Description of Artificial Sequence: Synthetic oligonucleotide
  Antisense strand to SEQ ID NO: 2545578
agagcccagggauaaccuc

SEQ ID NO: 2545580 - RNA, 19 nt, Artificial Sequence
  Description of Artificial Sequence: Synthetic oligonucleotide
  Sense strand starting at position 3527 of SEQ ID NO: 1888615
ugcugugagcguuagagaa

SEQ ID NO: 2545581 - RNA, 19 nt, Artificial Sequence
  Description of Artificial Sequence: Synthetic oligonucleotide
  Antisense strand to SEQ ID NO: 2545580
uucucuaacgcucacagca

SEQ ID NO: 2545582 - RNA, 19 nt, Artificial Sequence
  Description of Artificial Sequence: Synthetic oligonucleotide
  Sense strand starting at position 2581 of SEQ ID NO: 1888615
gccuaugcugcugaaagua

SEQ ID NO: 2545583 - RNA, 19 nt, Artificial Sequence
  Description of Artificial Sequence: Synthetic oligonucleotide
  Antisense strand to SEQ ID NO: 2545582
uacuuucagcagcauaggc

SEQ ID NO: 2545584 - RNA, 19 nt, Artificial Sequence
  Description of Artificial Sequence: Synthetic oligonucleotide
  Sense strand starting at position 968 of SEQ ID NO: 1888615
cuaagugcuccuuguagag

SEQ ID NO: 2545585 - RNA, 19 nt, Artificial Sequence
  Description of Artificial Sequence: Synthetic oligonucleotide
  Antisense strand to SEQ ID NO: 2545584
cucuacaaggagcacuuag

SEQ ID NO: 2545586 - RNA, 19 nt, Artificial Sequence
  Description of Artificial Sequence: Synthetic oligonucleotide
  Sense strand starting at position 1741 of SEQ ID NO: 1888615
guuccuagugccugaaaug

SEQ ID NO: 2545587 - RNA, 19 nt, Artificial Sequence
  Description of Artificial Sequence: Synthetic oligonucleotide
  Antisense strand to SEQ ID NO: 2545586
cauuucaggcacuaggaac

SEQ ID NO: 2545588 - RNA, 19 nt, Artificial Sequence
  Description of Artificial Sequence: Synthetic oligonucleotide
  Sense strand starting at position 1740 of SEQ ID NO: 1888615
uguuccuagugccugaaau

SEQ ID NO: 2545589 - RNA, 19 nt, Artificial Sequence
  Description of Artificial Sequence: Synthetic oligonucleotide
  Antisense strand to SEQ ID NO: 2545588
auuucaggcacuaggaaca

SEQ ID NO: 2545590 - RNA, 19 nt, Artificial Sequence
  Description of Artificial Sequence: Synthetic oligonucleotide
  Sense strand starting at position 2767 of SEQ ID NO: 1888615
gagggcuuacuaugcggua

SEQ ID NO: 2545591 - RNA, 19 nt, Artificial Sequence
  Description of Artificial Sequence: Synthetic oligonucleotide
  Antisense strand to SEQ ID NO: 2545590
uaccgcauaguaagcccuc

SEQ ID NO: 2545592 - RNA, 19 nt, Artificial Sequence
  Description of Artificial Sequence: Synthetic oligonucleotide
  Sense strand starting at position 2383 of SEQ ID NO: 1888615
gugggaagaucccauaauc

SEQ ID NO: 2545593 - RNA, 19 nt, Artificial Sequence
  Description of Artificial Sequence: Synthetic oligonucleotide
  Antisense strand to SEQ ID NO: 2545592
gauuaugggaucuucccac

SEQ ID NO: 2545594 - RNA, 19 nt, Artificial Sequence
  Description of Artificial Sequence: Synthetic oligonucleotide
  Sense strand starting at position 2769 of SEQ ID NO: 1888615
gggcuuacuaugcgguaca

SEQ ID NO: 2545595 - RNA, 19 nt, Artificial Sequence
  Description of Artificial Sequence: Synthetic oligonucleotide
  Antisense strand to SEQ ID NO: 2545594
uguaccgcauaguaagccc

SEQ ID NO: 2545596 - RNA, 19 nt, Artificial Sequence
  Description of Artificial Sequence: Synthetic oligonucleotide
  Sense strand starting at position 1099 of SEQ ID NO: 1888615
ccugcuacuccuuggcauu

SEQ ID NO: 2545597 - RNA, 19 nt, Artificial Sequence
  Description of Artificial Sequence: Synthetic oligonucleotide
  Antisense strand to SEQ ID NO: 2545596
aaugccaaggaguagcagg

SEQ ID NO: 2545598 - RNA, 19 nt, Artificial Sequence
  Description of Artificial Sequence: Synthetic oligonucleotide
  Sense strand starting at position 3713 of SEQ ID NO: 1888615
cuaucacagugauaacagu

SEQ ID NO: 2545599 - RNA, 19 nt, Artificial Sequence
  Description of Artificial Sequence: Synthetic oligonucleotide
  Antisense strand to SEQ ID NO: 2545598
acuguuaucacugugauag

SEQ ID NO: 2545600 - RNA, 19 nt, Artificial Sequence
  Description of Artificial Sequence: Synthetic oligonucleotide
  Sense strand starting at position 3547 of SEQ ID NO: 1888616
ugaggacucucaguugaaa

SEQ ID NO: 2545601 - RNA, 19 nt, Artificial Sequence
  Description of Artificial Sequence: Synthetic oligonucleotide
  Antisense strand to SEQ ID NO: 2545600
uuucaacugagaguccuca

SEQ ID NO: 2545602 - RNA, 19 nt, Artificial Sequence
  Description of Artificial Sequence: Synthetic oligonucleotide
  Sense strand starting at position 1520 of SEQ ID NO: 1888616
uauauucugguguaacaag

SEQ ID NO: 2545603 - RNA, 19 nt, Artificial Sequence
  Description of Artificial Sequence: Synthetic oligonucleotide
  Antisense strand to SEQ ID NO: 2545602
cuuguuacaccagaauaua

SEQ ID NO: 2545604 - RNA, 19 nt, Artificial Sequence
  Description of Artificial Sequence: Synthetic oligonucleotide
  Sense strand starting at position 1142 of SEQ ID NO: 1888616
cuguuuguucugcuagguu

SEQ ID NO: 2545605 - RNA, 19 nt, Artificial Sequence
  Description of Artificial Sequence: Synthetic oligonucleotide
  Antisense strand to SEQ ID NO: 2545604
aaccuagcagaacaaacag

SEQ ID NO: 2545606 - RNA, 19 nt, Artificial Sequence
  Description of Artificial Sequence: Synthetic oligonucleotide
  Sense strand starting at position 2604 of SEQ ID NO: 1888616
gugcguucugggccaaauc

SEQ ID NO: 2545607 - RNA, 19 nt, Artificial Sequence
  Description of Artificial Sequence: Synthetic oligonucleotide
  Antisense strand to SEQ ID NO: 2545606
gauuuggcccagaacgcac

SEQ ID NO: 2545608 - RNA, 19 nt, Artificial Sequence
  Description of Artificial Sequence: Synthetic oligonucleotide
  Sense strand starting at position 122 of SEQ ID NO: 1888616
ucuauuugugagugccaga

SEQ ID NO: 2545609 - RNA, 19 nt, Artificial Sequence
  Description of Artificial Sequence: Synthetic oligonucleotide
  Antisense strand to SEQ ID NO: 2545608
ucuggcacucacaaauaga

SEQ ID NO: 2545610 - RNA, 19 nt, Artificial Sequence
  Description of Artificial Sequence: Synthetic oligonucleotide
  Sense strand starting at position 3153 of SEQ ID NO: 1888616
auagguauuagaugaaggu

SEQ ID NO: 2545611 - RNA, 19 nt, Artificial Sequence
  Description of Artificial Sequence: Synthetic oligonucleotide
  Antisense strand to SEQ ID NO: 2545610
accuucaucuaauaccuau

SEQ ID NO: 2545612 - RNA, 19 nt, Artificial Sequence
  Description of Artificial Sequence: Synthetic oligonucleotide
  Sense strand starting at position 3145 of SEQ ID NO: 1888616
ggagguauauagguauuag

SEQ ID NO: 2545613 - RNA, 19 nt, Artificial Sequence
  Description of Artificial Sequence: Synthetic oligonucleotide
  Antisense strand to SEQ ID NO: 2545612
cuaauaccuauauaccucc

SEQ ID NO: 2545614 - RNA, 19 nt, Artificial Sequence
  Description of Artificial Sequence: Synthetic oligonucleotide
  Sense strand starting at position 221 of SEQ ID NO: 1888616
guauuacuucuugaucaca

SEQ ID NO: 2545615 - RNA, 19 nt, Artificial Sequence
  Description of Artificial Sequence: Synthetic oligonucleotide
  Antisense strand to SEQ ID NO: 2545614
ugugaucaagaaguaauac

SEQ ID NO: 2545616 - RNA, 19 nt, Artificial Sequence
  Description of Artificial Sequence: Synthetic oligonucleotide
  Sense strand starting at position 3162 of SEQ ID NO: 1888616
agaugaagguccuuuccaa

SEQ ID NO: 2545617 - RNA, 19 nt, Artificial Sequence
  Description of Artificial Sequence: Synthetic oligonucleotide
  Antisense strand to SEQ ID NO: 2545616
uuggaaaggaccuucaucu

SEQ ID NO: 2545618 - RNA, 19 nt, Artificial Sequence
  Description of Artificial Sequence: Synthetic oligonucleotide
  Sense strand starting at position 1011 of SEQ ID NO: 1888616
cuagcacuuccucaugaga

SEQ ID NO: 2545619 - RNA, 19 nt, Artificial Sequence
  Description of Artificial Sequence: Synthetic oligonucleotide
  Antisense strand to SEQ ID NO: 2545618
ucucaugaggaagugcuag

SEQ ID NO: 2545620 - RNA, 19 nt, Artificial Sequence
  Description of Artificial Sequence: Synthetic oligonucleotide
  Sense strand starting at position 1555 of SEQ ID NO: 1888616
ugguacuuuccggaaugag

SEQ ID NO: 2545621 - RNA, 19 nt, Artificial Sequence
  Description of Artificial Sequence: Synthetic oligonucleotide
  Antisense strand to SEQ ID NO: 2545620
cucauuccggaaaguacca

SEQ ID NO: 2545622 - RNA, 19 nt, Artificial Sequence
  Description of Artificial Sequence: Synthetic oligonucleotide
  Sense strand starting at position 744 of SEQ ID NO: 1888616
aucaccuaucaguauguga

SEQ ID NO: 2545623 - RNA, 19 nt, Artificial Sequence
  Description of Artificial Sequence: Synthetic oligonucleotide
  Antisense strand to SEQ ID NO: 2545622
ucacauacugauaggugau

SEQ ID NO: 2545624 - RNA, 19 nt, Artificial Sequence
  Description of Artificial Sequence: Synthetic oligonucleotide
  Sense strand starting at position 2546 of SEQ ID NO: 1888616
cagaguugggcugaaagua

SEQ ID NO: 2545625 - RNA, 19 nt, Artificial Sequence
  Description of Artificial Sequence: Synthetic oligonucleotide
  Antisense strand to SEQ ID NO: 2545624
uacuuucagcccaacucug

SEQ ID NO: 2545626 - RNA, 19 nt, Artificial Sequence
  Description of Artificial Sequence: Synthetic oligonucleotide
  Sense strand starting at position 687 of SEQ ID NO: 1888616
gaaugaagauggcugucaa

SEQ ID NO: 2545627 - RNA, 19 nt, Artificial Sequence
  Description of Artificial Sequence: Synthetic oligonucleotide
  Antisense strand to SEQ ID NO: 2545626
uugacagccaucuucauuc

SEQ ID NO: 2545628 - RNA, 19 nt, Artificial Sequence
  Description of Artificial Sequence: Synthetic oligonucleotide
  Sense strand starting at position 3483 of SEQ ID NO: 1888616
uggaaaugccucugaagau

SEQ ID NO: 2545629 - RNA, 19 nt, Artificial Sequence
  Description of Artificial Sequence: Synthetic oligonucleotide
  Antisense strand to SEQ ID NO: 2545628
aucuucagaggcauuucca

SEQ ID NO: 2545630 - RNA, 19 nt, Artificial Sequence
  Description of Artificial Sequence: Synthetic oligonucleotide
  Sense strand starting at position 1440 of SEQ ID NO: 1888616
ugacuuggccaguaagauc

SEQ ID NO: 2545631 - RNA, 19 nt, Artificial Sequence
  Description of Artificial Sequence: Synthetic oligonucleotide
  Antisense strand to SEQ ID NO: 2545630
gaucuuacuggccaaguca

SEQ ID NO: 2545632 - RNA, 19 nt, Artificial Sequence
  Description of Artificial Sequence: Synthetic oligonucleotide
  Sense strand starting at position 688 of SEQ ID NO: 1888616
aaugaagauggcugucaag

SEQ ID NO: 2545633 - RNA, 19 nt, Artificial Sequence
  Description of Artificial Sequence: Synthetic oligonucleotide
  Antisense strand to SEQ ID NO: 2545632
cuugacagccaucuucauu

SEQ ID NO: 2545634 - RNA, 19 nt, Artificial Sequence
  Description of Artificial Sequence: Synthetic oligonucleotide
  Sense strand starting at position 1158 of SEQ ID NO: 1888616
guuaaaccucuguaacauc

SEQ ID NO: 2545635 - RNA, 19 nt, Artificial Sequence
  Description of Artificial Sequence: Synthetic oligonucleotide
  Antisense strand to SEQ ID NO: 2545634
gauguuacagagguuuaac

SEQ ID NO: 2545636 - RNA, 19 nt, Artificial Sequence
  Description of Artificial Sequence: Synthetic oligonucleotide
  Sense strand starting at position 2910 of SEQ ID NO: 1888616
ugguuagcucaguaaagag

SEQ ID NO: 2545637 - RNA, 19 nt, Artificial Sequence
  Description of Artificial Sequence: Synthetic oligonucleotide
  Antisense strand to SEQ ID NO: 2545636
cucuuuacugagcuaacca

SEQ ID NO: 2545638 - RNA, 19 nt, Artificial Sequence
  Description of Artificial Sequence: Synthetic oligonucleotide
  Sense strand starting at position 208 of SEQ ID NO: 1888616
ggaaacaucccuuguauua

SEQ ID NO: 2545639 - RNA, 19 nt, Artificial Sequence
  Description of Artificial Sequence: Synthetic oligonucleotide
  Antisense strand to SEQ ID NO: 2545638
uaauacaagggauguuucc

SEQ ID NO: 2545640 - RNA, 19 nt, Artificial Sequence
  Description of Artificial Sequence: Synthetic oligonucleotide
  Sense strand starting at position 2747 of SEQ ID NO: 1888616
ucagacuucugguuuagaa

SEQ ID NO: 2545641 - RNA, 19 nt, Artificial Sequence
  Description of Artificial Sequence: Synthetic oligonucleotide
  Antisense strand to SEQ ID NO: 2545640
uucuaaaccagaagucuga

SEQ ID NO: 2545642 - RNA, 19 nt, Artificial Sequence
  Description of Artificial Sequence: Synthetic oligonucleotide
  Sense strand starting at position 3134 of SEQ ID NO: 1888616
cuccuuucgagggagguau

SEQ ID NO: 2545643 - RNA, 19 nt, Artificial Sequence
  Description of Artificial Sequence: Synthetic oligonucleotide
  Antisense strand to SEQ ID NO: 2545642
auaccucccucgaaaggag

SEQ ID NO: 2545644 - RNA, 19 nt, Artificial Sequence
  Description of Artificial Sequence: Synthetic oligonucleotide
  Sense strand starting at position 3635 of SEQ ID NO: 1888616
cagcaauauguguauagau

SEQ ID NO: 2545645 - RNA, 19 nt, Artificial Sequence
  Description of Artificial Sequence: Synthetic oligonucleotide
  Antisense strand to SEQ ID NO: 2545644
aucuauacacauauugcug

SEQ ID NO: 2545646 - RNA, 19 nt, Artificial Sequence
  Description of Artificial Sequence: Synthetic oligonucleotide
  Sense strand starting at position 651 of SEQ ID NO: 1888616
ggauaacuguagguacuua

SEQ ID NO: 2545647 - RNA, 19 nt, Artificial Sequence
  Description of Artificial Sequence: Synthetic oligonucleotide
  Antisense strand to SEQ ID NO: 2545646
uaaguaccuacaguuaucc

SEQ ID NO: 2545648 - RNA, 19 nt, Artificial Sequence
  Description of Artificial Sequence: Synthetic oligonucleotide
  Sense strand starting at position 206 of SEQ ID NO: 1888616
cuggaaacaucccuuguau

SEQ ID NO: 2545649 - RNA, 19 nt, Artificial Sequence
  Description of Artificial Sequence: Synthetic oligonucleotide
  Antisense strand to SEQ ID NO: 2545648
auacaagggauguuuccag

SEQ ID NO: 2545650 - RNA, 19 nt, Artificial Sequence
  Description of Artificial Sequence: Synthetic oligonucleotide
  Sense strand starting at position 650 of SEQ ID NO: 1888616
gggauaacuguagguacuu

SEQ ID NO: 2545651 - RNA, 19 nt, Artificial Sequence
  Description of Artificial Sequence: Synthetic oligonucleotide
  Antisense strand to SEQ ID NO: 2545650
aaguaccuacaguuauccc

SEQ ID NO: 2545652 - RNA, 19 nt, Artificial Sequence
  Description of Artificial Sequence: Synthetic oligonucleotide
  Sense strand starting at position 1156 of SEQ ID NO: 1888616
agguuaaaccucuguaaca

SEQ ID NO: 2545653 - RNA, 19 nt, Artificial Sequence
  Description of Artificial Sequence: Synthetic oligonucleotide
  Antisense strand to SEQ ID NO: 2545652
uguuacagagguuuaaccu

SEQ ID NO: 2545654 - RNA, 19 nt, Artificial Sequence
  Description of Artificial Sequence: Synthetic oligonucleotide
  Sense strand starting at position 1126 of SEQ ID NO: 1888616
cuuugaucacuuugaucug

SEQ ID NO: 2545655 - RNA, 19 nt, Artificial Sequence
  Description of Artificial Sequence: Synthetic oligonucleotide
  Antisense strand to SEQ ID NO: 2545654
cagaucaaagugaucaaag

SEQ ID NO: 2545656 - RNA, 19 nt, Artificial Sequence
  Description of Artificial Sequence: Synthetic oligonucleotide
  Sense strand starting at position 3191 of SEQ ID NO: 1888616
ugugauuccaaggaguugu

SEQ ID NO: 2545657 - RNA, 19 nt, Artificial Sequence
  Description of Artificial Sequence: Synthetic oligonucleotide
  Antisense strand to SEQ ID NO: 2545656
acaacuccuuggaaucaca

SEQ ID NO: 2545658 - RNA, 19 nt, Artificial Sequence
  Description of Artificial Sequence: Synthetic oligonucleotide
  Sense strand starting at position 3643 of SEQ ID NO: 1888616
uguguauagaugugagaga

SEQ ID NO: 2545659 - RNA, 19 nt, Artificial Sequence
  Description of Artificial Sequence: Synthetic oligonucleotide
  Antisense strand to SEQ ID NO: 2545658
ucucucacaucuauacaca

SEQ ID NO: 2545660 - RNA, 19 nt, Artificial Sequence
  Description of Artificial Sequence: Synthetic oligonucleotide
  Sense strand starting at position 2703 of SEQ ID NO: 1888616
uuuguaauucucugagaug

SEQ ID NO: 2545661 - RNA, 19 nt, Artificial Sequence
  Description of Artificial Sequence: Synthetic oligonucleotide
  Antisense strand to SEQ ID NO: 2545660
caucucagagaauuacaaa

SEQ ID NO: 2545662 - RNA, 19 nt, Artificial Sequence
  Description of Artificial Sequence: Synthetic oligonucleotide
  Sense strand starting at position 1014 of SEQ ID NO: 1888616
gcacuuccucaugagaugu

SEQ ID NO: 2545663 - RNA, 19 nt, Artificial Sequence
  Description of Artificial Sequence: Synthetic oligonucleotide
  Antisense strand to SEQ ID NO: 2545662
acaucucaugaggaagugc

SEQ ID NO: 2545664 - RNA, 19 nt, Artificial Sequence
  Description of Artificial Sequence: Synthetic oligonucleotide
  Sense strand starting at position 1157 of SEQ ID NO: 1888616
gguuaaaccucuguaacau

SEQ ID NO: 2545665 - RNA, 19 nt, Artificial Sequence
  Description of Artificial Sequence: Synthetic oligonucleotide
  Antisense strand to SEQ ID NO: 2545664
auguuacagagguuuaacc

SEQ ID NO: 2545666 - RNA, 19 nt, Artificial Sequence
  Description of Artificial Sequence: Synthetic oligonucleotide
  Sense strand starting at position 2702 of SEQ ID NO: 1888616
cuuuguaauucucugagau

SEQ ID NO: 2545667 - RNA, 19 nt, Artificial Sequence
  Description of Artificial Sequence: Synthetic oligonucleotide
  Antisense strand to SEQ ID NO: 2545666
aucucagagaauuacaaag

SEQ ID NO: 2545668 - RNA, 19 nt, Artificial Sequence
  Description of Artificial Sequence: Synthetic oligonucleotide
  Sense strand starting at position 1563 of SEQ ID NO: 1888616
uccggaaugaguuaguucu

SEQ ID NO: 2545669 - RNA, 19 nt, Artificial Sequence
  Description of Artificial Sequence: Synthetic oligonucleotide
  Antisense strand to SEQ ID NO: 2545668
agaacuaacucauuccgga

SEQ ID NO: 2545670 - RNA, 19 nt, Artificial Sequence
  Description of Artificial Sequence: Synthetic oligonucleotide
  Sense strand starting at position 194 of SEQ ID NO: 1888616
agguuugugugacuggaaa

SEQ ID NO: 2545671 - RNA, 19 nt, Artificial Sequence
  Description of Artificial Sequence: Synthetic oligonucleotide
  Antisense strand to SEQ ID NO: 2545670
uuuccagucacacaaaccu

SEQ ID NO: 2545672 - RNA, 19 nt, Artificial Sequence
  Description of Artificial Sequence: Synthetic oligonucleotide
  Sense strand starting at position 3190 of SEQ ID NO: 1888616
cugugauuccaaggaguug

SEQ ID NO: 2545673 - RNA, 19 nt, Artificial Sequence
  Description of Artificial Sequence: Synthetic oligonucleotide
  Antisense strand to SEQ ID NO: 2545672
caacuccuuggaaucacag

SEQ ID NO: 2545674 - RNA, 19 nt, Artificial Sequence
  Description of Artificial Sequence: Synthetic oligonucleotide
  Sense strand starting at position 3136 of SEQ ID NO: 1888616
ccuuucgagggagguauau

SEQ ID NO: 2545675 - RNA, 19 nt, Artificial Sequence
  Description of Artificial Sequence: Synthetic oligonucleotide
  Antisense strand to SEQ ID NO: 2545674
auauaccucccucgaaagg

SEQ ID NO: 2545676 - RNA, 19 nt, Artificial Sequence
  Description of Artificial Sequence: Synthetic oligonucleotide
  Sense strand starting at position 1531 of SEQ ID NO: 1888616
guaacaagauguuccaagu

SEQ ID NO: 2545677 - RNA, 19 nt, Artificial Sequence
  Description of Artificial Sequence: Synthetic oligonucleotide
  Antisense strand to SEQ ID NO: 2545676
acuuggaacaucuuguuac

SEQ ID NO: 2545678 - RNA, 19 nt, Artificial Sequence
  Description of Artificial Sequence: Synthetic oligonucleotide
  Sense strand starting at position 3180 of SEQ ID NO: 1888616
acuugaaagucugugauuc

SEQ ID NO: 2545679 - RNA, 19 nt, Artificial Sequence
  Description of Artificial Sequence: Synthetic oligonucleotide
  Antisense strand to SEQ ID NO: 2545678
gaaucacagacuuucaagu

SEQ ID NO: 2545680 - RNA, 19 nt, Artificial Sequence
  Description of Artificial Sequence: Synthetic oligonucleotide
  Sense strand starting at position 1559 of SEQ ID NO: 1888617
ggugcauaagauuaucaac

SEQ ID NO: 2545681 - RNA, 19 nt, Artificial Sequence
  Description of Artificial Sequence: Synthetic oligonucleotide
  Antisense strand to SEQ ID NO: 2545680
guugauaaucuuaugcacc

SEQ ID NO: 2545682 - RNA, 19 nt, Artificial Sequence
  Description of Artificial Sequence: Synthetic oligonucleotide
  Sense strand starting at position 2012 of SEQ ID NO: 1888617
uccagagacucugugaaga

SEQ ID NO: 2545683 - RNA, 19 nt, Artificial Sequence
  Description of Artificial Sequence: Synthetic oligonucleotide
  Antisense strand to SEQ ID NO: 2545682
ucuucacagagucucugga

SEQ ID NO: 2545684 - RNA, 19 nt, Artificial Sequence
  Description of Artificial Sequence: Synthetic oligonucleotide
  Sense strand starting at position 3655 of SEQ ID NO: 1888617
ggucauagagccuaccaga

SEQ ID NO: 2545685 - RNA, 19 nt, Artificial Sequence
  Description of Artificial Sequence: Synthetic oligonucleotide
  Antisense strand to SEQ ID NO: 2545684
ucugguaggcucuaugacc

SEQ ID NO: 2545686 - RNA, 19 nt, Artificial Sequence
  Description of Artificial Sequence: Synthetic oligonucleotide
  Sense strand starting at position 1377 of SEQ ID NO: 1888617
guggcugcucgguuaauac

SEQ ID NO: 2545687 - RNA, 19 nt, Artificial Sequence
  Description of Artificial Sequence: Synthetic oligonucleotide
  Antisense strand to SEQ ID NO: 2545686
guauuaaccgagcagccac

SEQ ID NO: 2545688 - RNA, 19 nt, Artificial Sequence
  Description of Artificial Sequence: Synthetic oligonucleotide
  Sense strand starting at position 3499 of SEQ ID NO: 1888617
cgggaccugccuuaacaaa

SEQ ID NO: 2545689 - RNA, 19 nt, Artificial Sequence
  Description of Artificial Sequence: Synthetic oligonucleotide
  Antisense strand to SEQ ID NO: 2545688
uuuguuaaggcaggucccg

SEQ ID NO: 2545690 - RNA, 19 nt, Artificial Sequence
  Description of Artificial Sequence: Synthetic oligonucleotide
  Sense strand starting at position 1549 of SEQ ID NO: 1888617
ggauaucaagggugcauaa

SEQ ID NO: 2545691 - RNA, 19 nt, Artificial Sequence
  Description of Artificial Sequence: Synthetic oligonucleotide
  Antisense strand to SEQ ID NO: 2545690
uuaugcacccuugauaucc

SEQ ID NO: 2545692 - RNA, 19 nt, Artificial Sequence
  Description of Artificial Sequence: Synthetic oligonucleotide
  Sense strand starting at position 366 of SEQ ID NO: 1888617
ucugaaggcuucucagaag

SEQ ID NO: 2545693 - RNA, 19 nt, Artificial Sequence
  Description of Artificial Sequence: Synthetic oligonucleotide
  Antisense strand to SEQ ID NO: 2545692
cuucugagaagccuucaga

SEQ ID NO: 2545694 - RNA, 19 nt, Artificial Sequence
  Description of Artificial Sequence: Synthetic oligonucleotide
  Sense strand starting at position 2777 of SEQ ID NO: 1888617
cuccacaagugauuguaaa

SEQ ID NO: 2545695 - RNA, 19 nt, Artificial Sequence
  Description of Artificial Sequence: Synthetic oligonucleotide
  Antisense strand to SEQ ID NO: 2545694
uuuacaaucacuuguggag

SEQ ID NO: 2545696 - RNA, 19 nt, Artificial Sequence
  Description of Artificial Sequence: Synthetic oligonucleotide
  Sense strand starting at position 2396 of SEQ ID NO: 1888617
ggcuuacaggaaugaguca

SEQ ID NO: 2545697 - RNA, 19 nt, Artificial Sequence
  Description of Artificial Sequence: Synthetic oligonucleotide
  Antisense strand to SEQ ID NO: 2545696
ugacucauuccuguaagcc

SEQ ID NO: 2545698 - RNA, 19 nt, Artificial Sequence
  Description of Artificial Sequence: Synthetic oligonucleotide
  Sense strand starting at position 3619 of SEQ ID NO: 1888617
cucucugcugcagaauaaa

SEQ ID NO: 2545699 - RNA, 19 nt, Artificial Sequence
  Description of Artificial Sequence: Synthetic oligonucleotide
  Antisense strand to SEQ ID NO: 2545698
uuuauucugcagcagagag

SEQ ID NO: 2545700 - RNA, 19 nt, Artificial Sequence
  Description of Artificial Sequence: Synthetic oligonucleotide
  Sense strand starting at position 2778 of SEQ ID NO: 1888617
uccacaagugauuguaaau

SEQ ID NO: 2545701 - RNA, 19 nt, Artificial Sequence
  Description of Artificial Sequence: Synthetic oligonucleotide
  Antisense strand to SEQ ID NO: 2545700
auuuacaaucacuugugga

SEQ ID NO: 2545702 - RNA, 19 nt, Artificial Sequence
  Description of Artificial Sequence: Synthetic oligonucleotide
  Sense strand starting at position 1284 of SEQ ID NO: 1888617
gacagaggagcuugucauc

SEQ ID NO: 2545703 - RNA, 19 nt, Artificial Sequence
  Description of Artificial Sequence: Synthetic oligonucleotide
  Antisense strand to SEQ ID NO: 2545702
gaugacaagcuccucuguc

SEQ ID NO: 2545704 - RNA, 19 nt, Artificial Sequence
  Description of Artificial Sequence: Synthetic oligonucleotide
  Sense strand starting at position 2037 of SEQ ID NO: 1888617
agggaacuuuaugcuugua

SEQ ID NO: 2545705 - RNA, 19 nt, Artificial Sequence
  Description of Artificial Sequence: Synthetic oligonucleotide
  Antisense strand to SEQ ID NO: 2545704
uacaagcauaaaguucccu

SEQ ID NO: 2545706 - RNA, 19 nt, Artificial Sequence
  Description of Artificial Sequence: Synthetic oligonucleotide
  Sense strand starting at position 3438 of SEQ ID NO: 1888617
guuugacugacagguauuc

SEQ ID NO: 2545707 - RNA, 19 nt, Artificial Sequence
  Description of Artificial Sequence: Synthetic oligonucleotide
  Antisense strand to SEQ ID NO: 2545706
gaauaccugucagucaaac

SEQ ID NO: 2545708 - RNA, 19 nt, Artificial Sequence
  Description of Artificial Sequence: Synthetic oligonucleotide
  Sense strand starting at position 354 of SEQ ID NO: 1888617
gcagucaacuucucugaag

SEQ ID NO: 2545709 - RNA, 19 nt, Artificial Sequence
  Description of Artificial Sequence: Synthetic oligonucleotide
  Antisense strand to SEQ ID NO: 2545708
cuucagagaaguugacugc

SEQ ID NO: 2545710 - RNA, 19 nt, Artificial Sequence
  Description of Artificial Sequence: Synthetic oligonucleotide
  Sense strand starting at position 1597 of SEQ ID NO: 1888617
cgaguccugagagguuaau

SEQ ID NO: 2545711 - RNA, 19 nt, Artificial Sequence
  Description of Artificial Sequence: Synthetic oligonucleotide
  Antisense strand to SEQ ID NO: 2545710
auuaaccucucaggacucg

SEQ ID NO: 2545712 - RNA, 19 nt, Artificial Sequence
  Description of Artificial Sequence: Synthetic oligonucleotide
  Sense strand starting at position 3617 of SEQ ID NO: 1888617
cccucucugcugcagaaua

SEQ ID NO: 2545713 - RNA, 19 nt, Artificial Sequence
  Description of Artificial Sequence: Synthetic oligonucleotide
  Antisense strand to SEQ ID NO: 2545712
uauucugcagcagagaggg

SEQ ID NO: 2545714 - RNA, 19 nt, Artificial Sequence
  Description of Artificial Sequence: Synthetic oligonucleotide
  Sense strand starting at position 1480 of SEQ ID NO: 1888617
uugagcagucacuaugcua

SEQ ID NO: 2545715 - RNA, 19 nt, Artificial Sequence
  Description of Artificial Sequence: Synthetic oligonucleotide
  Antisense strand to SEQ ID NO: 2545714
uagcauagugacugcucaa

SEQ ID NO: 2545716 - RNA, 19 nt, Artificial Sequence
  Description of Artificial Sequence: Synthetic oligonucleotide
  Sense strand starting at position 3036 of SEQ ID NO: 1888617
agcacucagaggugcuaaa

SEQ ID NO: 2545717 - RNA, 19 nt, Artificial Sequence
  Description of Artificial Sequence: Synthetic oligonucleotide
  Antisense strand to SEQ ID NO: 2545716
uuuagcaccucugagugcu

SEQ ID NO: 2545718 - RNA, 19 nt, Artificial Sequence
  Description of Artificial Sequence: Synthetic oligonucleotide
  Sense strand starting at position 805 of SEQ ID NO: 1888617
gagggaaagucauagggaa

SEQ ID NO: 2545719 - RNA, 19 nt, Artificial Sequence
  Description of Artificial Sequence: Synthetic oligonucleotide
  Antisense strand to SEQ ID NO: 2545718
uucccuaugacuuucccuc

SEQ ID NO: 2545720 - RNA, 19 nt, Artificial Sequence
  Description of Artificial Sequence: Synthetic oligonucleotide
  Sense strand starting at position 754 of SEQ ID NO: 1888617
ccaggcuguucaguaagga

SEQ ID NO: 2545721 - RNA, 19 nt, Artificial Sequence
  Description of Artificial Sequence: Synthetic oligonucleotide
  Antisense strand to SEQ ID NO: 2545720
uccuuacugaacagccugg

SEQ ID NO: 2545722 - RNA, 19 nt, Artificial Sequence
  Description of Artificial Sequence: Synthetic oligonucleotide
  Sense strand starting at position 3083 of SEQ ID NO: 1888617
ucagcccuguccucugaaa

SEQ ID NO: 2545723 - RNA, 19 nt, Artificial Sequence
  Description of Artificial Sequence: Synthetic oligonucleotide
  Antisense strand to SEQ ID NO: 2545722
uuucagaggacagggcuga

SEQ ID NO: 2545724 - RNA, 19 nt, Artificial Sequence
  Description of Artificial Sequence: Synthetic oligonucleotide
  Sense strand starting at position 1608 of SEQ ID NO: 1888617
agguuaauagcgugaucug

SEQ ID NO: 2545725 - RNA, 19 nt, Artificial Sequence
  Description of Artificial Sequence: Synthetic oligonucleotide
  Antisense strand to SEQ ID NO: 2545724
cagaucacgcuauuaaccu

SEQ ID NO: 2545726 - RNA, 19 nt, Artificial Sequence
  Description of Artificial Sequence: Synthetic oligonucleotide
  Sense strand starting at position 3429 of SEQ ID NO: 1888617
gggcuucacguuugacuga

SEQ ID NO: 2545727 - RNA, 19 nt, Artificial Sequence
  Description of Artificial Sequence: Synthetic oligonucleotide
  Antisense strand to SEQ ID NO: 2545726
ucagucaaacgugaagccc

SEQ ID NO: 2545728 - RNA, 19 nt, Artificial Sequence
  Description of Artificial Sequence: Synthetic oligonucleotide
  Sense strand starting at position 3085 of SEQ ID NO: 1888617
agcccuguccucugaaagu

SEQ ID NO: 2545729 - RNA, 19 nt, Artificial Sequence
  Description of Artificial Sequence: Synthetic oligonucleotide
  Antisense strand to SEQ ID NO: 2545728
acuuucagaggacagggcu

SEQ ID NO: 2545730 - RNA, 19 nt, Artificial Sequence
  Description of Artificial Sequence: Synthetic oligonucleotide
  Sense strand starting at position 2866 of SEQ ID NO: 1888617
gaagaaucccagugcgccu

SEQ ID NO: 2545731 - RNA, 19 nt, Artificial Sequence
  Description of Artificial Sequence: Synthetic oligonucleotide
  Antisense strand to SEQ ID NO: 2545730
aggcgcacugggauucuuc

SEQ ID NO: 2545732 - RNA, 19 nt, Artificial Sequence
  Description of Artificial Sequence: Synthetic oligonucleotide
  Sense strand starting at position 3416 of SEQ ID NO: 1888617
cagugucaucagugggcuu

SEQ ID NO: 2545733 - RNA, 19 nt, Artificial Sequence
  Description of Artificial Sequence: Synthetic oligonucleotide
  Antisense strand to SEQ ID NO: 2545732
aagcccacugaugacacug

SEQ ID NO: 2545734 - RNA, 19 nt, Artificial Sequence
  Description of Artificial Sequence: Synthetic oligonucleotide
  Sense strand starting at position 3418 of SEQ ID NO: 1888617
gugucaucagugggcuuca

SEQ ID NO: 2545735 - RNA, 19 nt, Artificial Sequence
  Description of Artificial Sequence: Synthetic oligonucleotide
  Antisense strand to SEQ ID NO: 2545734
ugaagcccacugaugacac

SEQ ID NO: 2545736 - RNA, 19 nt, Artificial Sequence
  Description of Artificial Sequence: Synthetic oligonucleotide
  Sense strand starting at position 3521 of SEQ ID NO: 1888617
caggcugagucccaggaaa

SEQ ID NO: 2545737 - RNA, 19 nt, Artificial Sequence
  Description of Artificial Sequence: Synthetic oligonucleotide
  Antisense strand to SEQ ID NO: 2545736
uuuccugggacucagccug

SEQ ID NO: 2545738 - RNA, 19 nt, Artificial Sequence
  Description of Artificial Sequence: Synthetic oligonucleotide
  Sense strand starting at position 1376 of SEQ ID NO: 1888617
gguggcugcucgguuaaua

SEQ ID NO: 2545739 - RNA, 19 nt, Artificial Sequence
  Description of Artificial Sequence: Synthetic oligonucleotide
  Antisense strand to SEQ ID NO: 2545738
uauuaaccgagcagccacc

SEQ ID NO: 2545740 - RNA, 19 nt, Artificial Sequence
  Description of Artificial Sequence: Synthetic oligonucleotide
  Sense strand starting at position 1075 of SEQ ID NO: 1888617
gucaucauucgcugggcga

SEQ ID NO: 2545741 - RNA, 19 nt, Artificial Sequence
  Description of Artificial Sequence: Synthetic oligonucleotide
  Antisense strand to SEQ ID NO: 2545740
ucgcccagcgaaugaugac

SEQ ID NO: 2545742 - RNA, 19 nt, Artificial Sequence
  Description of Artificial Sequence: Synthetic oligonucleotide
  Sense strand starting at position 1153 of SEQ ID NO: 1888617
agcaucuacucagaggguu

SEQ ID NO: 2545743 - RNA, 19 nt, Artificial Sequence
  Description of Artificial Sequence: Synthetic oligonucleotide
  Antisense strand to SEQ ID NO: 2545742
aacccucugaguagaugcu

SEQ ID NO: 2545744 - RNA, 19 nt, Artificial Sequence
  Description of Artificial Sequence: Synthetic oligonucleotide
  Sense strand starting at position 1349 of SEQ ID NO: 1888617
augauaaacuccugacugu

SEQ ID NO: 2545745 - RNA, 19 nt, Artificial Sequence
  Description of Artificial Sequence: Synthetic oligonucleotide
  Antisense strand to SEQ ID NO: 2545744
acagucaggaguuuaucau

SEQ ID NO: 2545746 - RNA, 19 nt, Artificial Sequence
  Description of Artificial Sequence: Synthetic oligonucleotide
  Sense strand starting at position 3478 of SEQ ID NO: 1888617
ggcccaucuucugaguaaa

SEQ ID NO: 2545747 - RNA, 19 nt, Artificial Sequence
  Description of Artificial Sequence: Synthetic oligonucleotide
  Antisense strand to SEQ ID NO: 2545746
uuuacucagaagaugggcc

SEQ ID NO: 2545748 - RNA, 19 nt, Artificial Sequence
  Description of Artificial Sequence: Synthetic oligonucleotide
  Sense strand starting at position 1640 of SEQ ID NO: 1888617
ggguacuaguggcaggauu

SEQ ID NO: 2545749 - RNA, 19 nt, Artificial Sequence
  Description of Artificial Sequence: Synthetic oligonucleotide
  Antisense strand to SEQ ID NO: 2545748
aauccugccacuaguaccc

SEQ ID NO: 2545750 - RNA, 19 nt, Artificial Sequence
  Description of Artificial Sequence: Synthetic oligonucleotide
  Sense strand starting at position 3436 of SEQ ID NO: 1888617
acguuugacugacagguau

SEQ ID NO: 2545751 - RNA, 19 nt, Artificial Sequence
  Description of Artificial Sequence: Synthetic oligonucleotide
  Antisense strand to SEQ ID NO: 2545750
auaccugucagucaaacgu

SEQ ID NO: 2545752 - RNA, 19 nt, Artificial Sequence
  Description of Artificial Sequence: Synthetic oligonucleotide
  Sense strand starting at position 166 of SEQ ID NO: 1888617
aucggucucucccaucaaa

SEQ ID NO: 2545753 - RNA, 19 nt, Artificial Sequence
  Description of Artificial Sequence: Synthetic oligonucleotide
  Antisense strand to SEQ ID NO: 2545752
uuugaugggagagaccgau

SEQ ID NO: 2545754 - RNA, 19 nt, Artificial Sequence
  Description of Artificial Sequence: Synthetic oligonucleotide
  Sense strand starting at position 1315 of SEQ ID NO: 1888617
gccaccuggucugacauua

SEQ ID NO: 2545755 - RNA, 19 nt, Artificial Sequence
  Description of Artificial Sequence: Synthetic oligonucleotide
  Antisense strand to SEQ ID NO: 2545754
uaaugucagaccagguggc

SEQ ID NO: 2545756 - RNA, 19 nt, Artificial Sequence
  Description of Artificial Sequence: Synthetic oligonucleotide
  Sense strand starting at position 3318 of SEQ ID NO: 1888617
ggcggagccuuccauaaag

SEQ ID NO: 2545757 - RNA, 19 nt, Artificial Sequence
  Description of Artificial Sequence: Synthetic oligonucleotide
  Antisense strand to SEQ ID NO: 2545756
cuuuauggaaggcuccgcc

SEQ ID NO: 2545758 - RNA, 19 nt, Artificial Sequence
  Description of Artificial Sequence: Synthetic oligonucleotide
  Sense strand starting at position 845 of SEQ ID NO: 1888617
caagguguguccuggaaga

SEQ ID NO: 2545759 - RNA, 19 nt, Artificial Sequence
  Description of Artificial Sequence: Synthetic oligonucleotide
  Antisense strand to SEQ ID NO: 2545758
ucuuccaggacacaccuug

SEQ ID NO: 2545760 - RNA, 19 nt, Artificial Sequence
  Description of Artificial Sequence: Synthetic oligonucleotide
  Sense strand starting at position 2145 of SEQ ID NO: 1888618
ccuccaaugccucagaaag

SEQ ID NO: 2545761 - RNA, 19 nt, Artificial Sequence
  Description of Artificial Sequence: Synthetic oligonucleotide
  Antisense strand to SEQ ID NO: 2545760
cuuucugaggcauuggagg

SEQ ID NO: 2545762 - RNA, 19 nt, Artificial Sequence
  Description of Artificial Sequence: Synthetic oligonucleotide
  Sense strand starting at position 2189 of SEQ ID NO: 1888618
uauagaagugacgagguua

SEQ ID NO: 2545763 - RNA, 19 nt, Artificial Sequence
  Description of Artificial Sequence: Synthetic oligonucleotide
  Antisense strand to SEQ ID NO: 2545762
uaaccucgucacuucuaua

SEQ ID NO: 2545764 - RNA, 19 nt, Artificial Sequence
  Description of Artificial Sequence: Synthetic oligonucleotide
  Sense strand starting at position 1449 of SEQ ID NO: 1888618
cguggucucguguuggaaa

SEQ ID NO: 2545765 - RNA, 19 nt, Artificial Sequence
  Description of Artificial Sequence: Synthetic oligonucleotide
  Antisense strand to SEQ ID NO: 2545764
uuuccaacacgagaccacg

SEQ ID NO: 2545766 - RNA, 19 nt, Artificial Sequence
  Description of Artificial Sequence: Synthetic oligonucleotide
  Sense strand starting at position 3923 of SEQ ID NO: 1888618
ugccucuugcgucuaacau

SEQ ID NO: 2545767 - RNA, 19 nt, Artificial Sequence
  Description of Artificial Sequence: Synthetic oligonucleotide
  Antisense strand to SEQ ID NO: 2545766
auguuagacgcaagaggca

SEQ ID NO: 2545768 - RNA, 19 nt, Artificial Sequence
  Description of Artificial Sequence: Synthetic oligonucleotide
  Sense strand starting at position 3223 of SEQ ID NO: 1888618
gcggaaauggauggauuaa

SEQ ID NO: 2545769 - RNA, 19 nt, Artificial Sequence
  Description of Artificial Sequence: Synthetic oligonucleotide
  Antisense strand to SEQ ID NO: 2545768
uuaauccauccauuuccgc

SEQ ID NO: 2545770 - RNA, 19 nt, Artificial Sequence
  Description of Artificial Sequence: Synthetic oligonucleotide
  Sense strand starting at position 3968 of SEQ ID NO: 1888618
gcuuguuugggucugugua

SEQ ID NO: 2545771 - RNA, 19 nt, Artificial Sequence
  Description of Artificial Sequence: Synthetic oligonucleotide
  Antisense strand to SEQ ID NO: 2545770
uacacagacccaaacaagc

SEQ ID NO: 2545772 - RNA, 19 nt, Artificial Sequence
  Description of Artificial Sequence: Synthetic oligonucleotide
  Sense strand starting at position 1661 of SEQ ID NO: 1888618
auauuaaagccacgacaaa

SEQ ID NO: 2545773 - RNA, 19 nt, Artificial Sequence
  Description of Artificial Sequence: Synthetic oligonucleotide
  Antisense strand to SEQ ID NO: 2545772
uuugucguggcuuuaauau

SEQ ID NO: 2545774 - RNA, 19 nt, Artificial Sequence
  Description of Artificial Sequence: Synthetic oligonucleotide
  Sense strand starting at position 608 of SEQ ID NO: 1888618
agagcaaacccaugagcaa

SEQ ID NO: 2545775 - RNA, 19 nt, Artificial Sequence
  Description of Artificial Sequence: Synthetic oligonucleotide
  Antisense strand to SEQ ID NO: 2545774
uugcucauggguuugcucu

SEQ ID NO: 2545776 - RNA, 19 nt, Artificial Sequence
  Description of Artificial Sequence: Synthetic oligonucleotide
  Sense strand starting at position 3922 of SEQ ID NO: 1888618
gugccucuugcgucuaaca

SEQ ID NO: 2545777 - RNA, 19 nt, Artificial Sequence
  Description of Artificial Sequence: Synthetic oligonucleotide
  Antisense strand to SEQ ID NO: 2545776
uguuagacgcaagaggcac

SEQ ID NO: 2545778 - RNA, 19 nt, Artificial Sequence
  Description of Artificial Sequence: Synthetic oligonucleotide
  Sense strand starting at position 2867 of SEQ ID NO: 1888618
ugucauaggguuuaaguga

SEQ ID NO: 2545779 - RNA, 19 nt, Artificial Sequence
  Description of Artificial Sequence: Synthetic oligonucleotide
  Antisense strand to SEQ ID NO: 2545778
ucacuuaaacccuaugaca

SEQ ID NO: 2545780 - RNA, 19 nt, Artificial Sequence
  Description of Artificial Sequence: Synthetic oligonucleotide
  Sense strand starting at position 61 of SEQ ID NO: 1888618
ugaagcuuccagcagacau

SEQ ID NO: 2545781 - RNA, 19 nt, Artificial Sequence
  Description of Artificial Sequence: Synthetic oligonucleotide
  Antisense strand to SEQ ID NO: 2545780
augucugcuggaagcuuca

SEQ ID NO: 2545782 - RNA, 19 nt, Artificial Sequence
  Description of Artificial Sequence: Synthetic oligonucleotide
  Sense strand starting at position 1912 of SEQ ID NO: 1888618
gaagccacccagugaauua

SEQ ID NO: 2545783 - RNA, 19 nt, Artificial Sequence
  Description of Artificial Sequence: Synthetic oligonucleotide
  Antisense strand to SEQ ID NO: 2545782
uaauucacuggguggcuuc

SEQ ID NO: 2545784 - RNA, 19 nt, Artificial Sequence
  Description of Artificial Sequence: Synthetic oligonucleotide
  Sense strand starting at position 1301 of SEQ ID NO: 1888618
aggucagacugguucccaa

SEQ ID NO: 2545785 - RNA, 19 nt, Artificial Sequence
  Description of Artificial Sequence: Synthetic oligonucleotide
  Antisense strand to SEQ ID NO: 2545784
uugggaaccagucugaccu

SEQ ID NO: 2545786 - RNA, 19 nt, Artificial Sequence
  Description of Artificial Sequence: Synthetic oligonucleotide
  Sense strand starting at position 2876 of SEQ ID NO: 1888618
guuuaagugaaaugagcaa

SEQ ID NO: 2545787 - RNA, 19 nt, Artificial Sequence
  Description of Artificial Sequence: Synthetic oligonucleotide
  Antisense strand to SEQ ID NO: 2545786
uugcucauuucacuuaaac

SEQ ID NO: 2545788 - RNA, 19 nt, Artificial Sequence
  Description of Artificial Sequence: Synthetic oligonucleotide
  Sense strand starting at position 1448 of SEQ ID NO: 1888618
gcguggucucguguuggaa

SEQ ID NO: 2545789 - RNA, 19 nt, Artificial Sequence
  Description of Artificial Sequence: Synthetic oligonucleotide
  Antisense strand to SEQ ID NO: 2545788
uuccaacacgagaccacgc

SEQ ID NO: 2545790 - RNA, 19 nt, Artificial Sequence
  Description of Artificial Sequence: Synthetic oligonucleotide
  Sense strand starting at position 3222 of SEQ ID NO: 1888618
cgcggaaauggauggauua

SEQ ID NO: 2545791 - RNA, 19 nt, Artificial Sequence
  Description of Artificial Sequence: Synthetic oligonucleotide
  Antisense strand to SEQ ID NO: 2545790
uaauccauccauuuccgcg

SEQ ID NO: 2545792 - RNA, 19 nt, Artificial Sequence
  Description of Artificial Sequence: Synthetic oligonucleotide
  Sense strand starting at position 2862 of SEQ ID NO: 1888618
aagggugucauaggguuua

SEQ ID NO: 2545793 - RNA, 19 nt, Artificial Sequence
  Description of Artificial Sequence: Synthetic oligonucleotide
  Antisense strand to SEQ ID NO: 2545792
uaaacccuaugacacccuu

SEQ ID NO: 2545794 - RNA, 19 nt, Artificial Sequence
  Description of Artificial Sequence: Synthetic oligonucleotide
  Sense strand starting at position 3055 of SEQ ID NO: 1888618
gcgggaucagugggaacua

SEQ ID NO: 2545795 - RNA, 19 nt, Artificial Sequence
  Description of Artificial Sequence: Synthetic oligonucleotide
  Antisense strand to SEQ ID NO: 2545794
uaguucccacugaucccgc

SEQ ID NO: 2545796 - RNA, 19 nt, Artificial Sequence
  Description of Artificial Sequence: Synthetic oligonucleotide
  Sense strand starting at position 2516 of SEQ ID NO: 1888618
gucuaacucucaguaaacu

SEQ ID NO: 2545797 - RNA, 19 nt, Artificial Sequence
  Description of Artificial Sequence: Synthetic oligonucleotide
  Antisense strand to SEQ ID NO: 2545796
aguuuacugagaguuagac

SEQ ID NO: 2545798 - RNA, 19 nt, Artificial Sequence
  Description of Artificial Sequence: Synthetic oligonucleotide
  Sense strand starting at position 3111 of SEQ ID NO: 1888618
aaguaaguugcucagaguu

SEQ ID NO: 2545799 - RNA, 19 nt, Artificial Sequence
  Description of Artificial Sequence: Synthetic oligonucleotide
  Antisense strand to SEQ ID NO: 2545798
aacucugagcaacuuacuu

SEQ ID NO: 2545800 - RNA, 19 nt, Artificial Sequence
  Description of Artificial Sequence: Synthetic oligonucleotide
  Sense strand starting at position 3785 of SEQ ID NO: 1888618
ucaggucuuugcuuaaaca

SEQ ID NO: 2545801 - RNA, 19 nt, Artificial Sequence
  Description of Artificial Sequence: Synthetic oligonucleotide
  Antisense strand to SEQ ID NO: 2545800
uguuuaagcaaagaccuga

SEQ ID NO: 2545802 - RNA, 19 nt, Artificial Sequence
  Description of Artificial Sequence: Synthetic oligonucleotide
  Sense strand starting at position 1420 of SEQ ID NO: 1888618
gguguaagccagugggaga

SEQ ID NO: 2545803 - RNA, 19 nt, Artificial Sequence
  Description of Artificial Sequence: Synthetic oligonucleotide
  Antisense strand to SEQ ID NO: 2545802
ucucccacuggcuuacacc

SEQ ID NO: 2545804 - RNA, 19 nt, Artificial Sequence
  Description of Artificial Sequence: Synthetic oligonucleotide
  Sense strand starting at position 878 of SEQ ID NO: 1888618
auaaccgaucucugucauu

SEQ ID NO: 2545805 - RNA, 19 nt, Artificial Sequence
  Description of Artificial Sequence: Synthetic oligonucleotide
  Antisense strand to SEQ ID NO: 2545804
aaugacagagaucgguuau

SEQ ID NO: 2545806 - RNA, 19 nt, Artificial Sequence
  Description of Artificial Sequence: Synthetic oligonucleotide
  Sense strand starting at position 3939 of SEQ ID NO: 1888618
cauaguuuacacgguaacu

SEQ ID NO: 2545807 - RNA, 19 nt, Artificial Sequence
  Description of Artificial Sequence: Synthetic oligonucleotide
  Antisense strand to SEQ ID NO: 2545806
aguuaccguguaaacuaug

SEQ ID NO: 2545808 - RNA, 19 nt, Artificial Sequence
  Description of Artificial Sequence: Synthetic oligonucleotide
  Sense strand starting at position 966 of SEQ ID NO: 1888618
acaguuuagucucugugaa

SEQ ID NO: 2545809 - RNA, 19 nt, Artificial Sequence
  Description of Artificial Sequence: Synthetic oligonucleotide
  Antisense strand to SEQ ID NO: 2545808
uucacagagacuaaacugu

SEQ ID NO: 2545810 - RNA, 19 nt, Artificial Sequence
  Description of Artificial Sequence: Synthetic oligonucleotide
  Sense strand starting at position 901 of SEQ ID NO: 1888618
ggccauaaauuccuuguuu

SEQ ID NO: 2545811 - RNA, 19 nt, Artificial Sequence
  Description of Artificial Sequence: Synthetic oligonucleotide
  Antisense strand to SEQ ID NO: 2545810
aaacaaggaauuuauggcc

SEQ ID NO: 2545812 - RNA, 19 nt, Artificial Sequence
  Description of Artificial Sequence: Synthetic oligonucleotide
  Sense strand starting at position 968 of SEQ ID NO: 1888618
aguuuagucucugugaacu

SEQ ID NO: 2545813 - RNA, 19 nt, Artificial Sequence
  Description of Artificial Sequence: Synthetic oligonucleotide
  Antisense strand to SEQ ID NO: 2545812
aguucacagagacuaaacu

SEQ ID NO: 2545814 - RNA, 19 nt, Artificial Sequence
  Description of Artificial Sequence: Synthetic oligonucleotide
  Sense strand starting at position 3110 of SEQ ID NO: 1888618
caaguaaguugcucagagu

SEQ ID NO: 2545815 - RNA, 19 nt, Artificial Sequence
  Description of Artificial Sequence: Synthetic oligonucleotide
  Antisense strand to SEQ ID NO: 2545814
acucugagcaacuuacuug

SEQ ID NO: 2545816 - RNA, 19 nt, Artificial Sequence
  Description of Artificial Sequence: Synthetic oligonucleotide
  Sense strand starting at position 3478 of SEQ ID NO: 1888618
cugcaucuucugggucaca

SEQ ID NO: 2545817 - RNA, 19 nt, Artificial Sequence
  Description of Artificial Sequence: Synthetic oligonucleotide
  Antisense strand to SEQ ID NO: 2545816
ugugacccagaagaugcag

SEQ ID NO: 2545818 - RNA, 19 nt, Artificial Sequence
  Description of Artificial Sequence: Synthetic oligonucleotide
  Sense strand starting at position 967 of SEQ ID NO: 1888618
caguuuagucucugugaac

SEQ ID NO: 2545819 - RNA, 19 nt, Artificial Sequence
  Description of Artificial Sequence: Synthetic oligonucleotide
  Antisense strand to SEQ ID NO: 2545818
guucacagagacuaaacug

SEQ ID NO: 2545820 - RNA, 19 nt, Artificial Sequence
  Description of Artificial Sequence: Synthetic oligonucleotide
  Sense strand starting at position 2415 of SEQ ID NO: 1888618
gaaccaaugucuguugugu

SEQ ID NO: 2545821 - RNA, 19 nt, Artificial Sequence
  Description of Artificial Sequence: Synthetic oligonucleotide
  Antisense strand to SEQ ID NO: 2545820
acacaacagacauugguuc

SEQ ID NO: 2545822 - RNA, 19 nt, Artificial Sequence
  Description of Artificial Sequence: Synthetic oligonucleotide
  Sense strand starting at position 3980 of SEQ ID NO: 1888618
cuguguaaugagugcuaca

SEQ ID NO: 2545823 - RNA, 19 nt, Artificial Sequence
  Description of Artificial Sequence: Synthetic oligonucleotide
  Antisense strand to SEQ ID NO: 2545822
uguagcacucauuacacag

SEQ ID NO: 2545824 - RNA, 19 nt, Artificial Sequence
  Description of Artificial Sequence: Synthetic oligonucleotide
  Sense strand starting at position 3924 of SEQ ID NO: 1888618
gccucuugcgucuaacaua

SEQ ID NO: 2545825 - RNA, 19 nt, Artificial Sequence
  Description of Artificial Sequence: Synthetic oligonucleotide
  Antisense strand to SEQ ID NO: 2545824
uauguuagacgcaagaggc

SEQ ID NO: 2545826 - RNA, 19 nt, Artificial Sequence
  Description of Artificial Sequence: Synthetic oligonucleotide
  Sense strand starting at position 3974 of SEQ ID NO: 1888618
uugggucuguguaaugagu

SEQ ID NO: 2545827 - RNA, 19 nt, Artificial Sequence
  Description of Artificial Sequence: Synthetic oligonucleotide
  Antisense strand to SEQ ID NO: 2545826
acucauuacacagacccaa

SEQ ID NO: 2545828 - RNA, 19 nt, Artificial Sequence
  Description of Artificial Sequence: Synthetic oligonucleotide
  Sense strand starting at position 3090 of SEQ ID NO: 1888618
gcugacguuugguuaaauu

SEQ ID NO: 2545829 - RNA, 19 nt, Artificial Sequence
  Description of Artificial Sequence: Synthetic oligonucleotide
  Antisense strand to SEQ ID NO: 2545828
aauuuaaccaaacgucagc

SEQ ID NO: 2545830 - RNA, 19 nt, Artificial Sequence
  Description of Artificial Sequence: Synthetic oligonucleotide
  Sense strand starting at position 3089 of SEQ ID NO: 1888618
ugcugacguuugguuaaau

SEQ ID NO: 2545831 - RNA, 19 nt, Artificial Sequence
  Description of Artificial Sequence: Synthetic oligonucleotide
  Antisense strand to SEQ ID NO: 2545830
auuuaaccaaacgucagca

SEQ ID NO: 2545832 - RNA, 19 nt, Artificial Sequence
  Description of Artificial Sequence: Synthetic oligonucleotide
  Sense strand starting at position 3237 of SEQ ID NO: 1888618
auuaaucucccguguguag

SEQ ID NO: 2545833 - RNA, 19 nt, Artificial Sequence
  Description of Artificial Sequence: Synthetic oligonucleotide
  Antisense strand to SEQ ID NO: 2545832
cuacacacgggagauuaau

SEQ ID NO: 2545834 - RNA, 19 nt, Artificial Sequence
  Description of Artificial Sequence: Synthetic oligonucleotide
  Sense strand starting at position 28 of SEQ ID NO: 1888618
gugacugcuaugugccuaa

SEQ ID NO: 2545835 - RNA, 19 nt, Artificial Sequence
  Description of Artificial Sequence: Synthetic oligonucleotide
  Antisense strand to SEQ ID NO: 2545834
uuaggcacauagcagucac

SEQ ID NO: 2545836 - RNA, 19 nt, Artificial Sequence
  Description of Artificial Sequence: Synthetic oligonucleotide
  Sense strand starting at position 1601 of SEQ ID NO: 1888618
ggugcaggcuugcuaugau

SEQ ID NO: 2545837 - RNA, 19 nt, Artificial Sequence
  Description of Artificial Sequence: Synthetic oligonucleotide
  Antisense strand to SEQ ID NO: 2545836
aucauagcaagccugcacc

SEQ ID NO: 2545838 - RNA, 19 nt, Artificial Sequence
  Description of Artificial Sequence: Synthetic oligonucleotide
  Sense strand starting at position 3087 of SEQ ID NO: 1888618
ucugcugacguuugguuaa

SEQ ID NO: 2545839 - RNA, 19 nt, Artificial Sequence
  Description of Artificial Sequence: Synthetic oligonucleotide
  Antisense strand to SEQ ID NO: 2545838
uuaaccaaacgucagcaga

SEQ ID NO: 2545840 - RNA, 19 nt, Artificial Sequence
  Description of Artificial Sequence: Synthetic oligonucleotide
  Sense strand starting at position 3830 of SEQ ID NO: 1888619
uggcaugucccagaugaga

SEQ ID NO: 2545841 - RNA, 19 nt, Artificial Sequence
  Description of Artificial Sequence: Synthetic oligonucleotide
  Antisense strand to SEQ ID NO: 2545840
ucucaucugggacaugcca

SEQ ID NO: 2545842 - RNA, 19 nt, Artificial Sequence
  Description of Artificial Sequence: Synthetic oligonucleotide
  Sense strand starting at position 3912 of SEQ ID NO: 1888619
cuugaaaccuguuugaaau

SEQ ID NO: 2545843 - RNA, 19 nt, Artificial Sequence
  Description of Artificial Sequence: Synthetic oligonucleotide
  Antisense strand to SEQ ID NO: 2545842
auuucaaacagguuucaag

SEQ ID NO: 2545844 - RNA, 19 nt, Artificial Sequence
  Description of Artificial Sequence: Synthetic oligonucleotide
  Sense strand starting at position 3832 of SEQ ID NO: 1888619
gcaugucccagaugagaaa

SEQ ID NO: 2545845 - RNA, 19 nt, Artificial Sequence
  Description of Artificial Sequence: Synthetic oligonucleotide
  Antisense strand to SEQ ID NO: 2545844
uuucucaucugggacaugc

SEQ ID NO: 2545846 - RNA, 19 nt, Artificial Sequence
  Description of Artificial Sequence: Synthetic oligonucleotide
  Sense strand starting at position 1045 of SEQ ID NO: 1888619
ggagacacaugcuuucuuu

SEQ ID NO: 2545847 - RNA, 19 nt, Artificial Sequence
  Description of Artificial Sequence: Synthetic oligonucleotide
  Antisense strand to SEQ ID NO: 2545846
aaagaaagcaugugucucc

SEQ ID NO: 2545848 - RNA, 19 nt, Artificial Sequence
  Description of Artificial Sequence: Synthetic oligonucleotide
  Sense strand starting at position 581 of SEQ ID NO: 1888619
cccauuguuccuggaacau

SEQ ID NO: 2545849 - RNA, 19 nt, Artificial Sequence
  Description of Artificial Sequence: Synthetic oligonucleotide
  Antisense strand to SEQ ID NO: 2545848
auguuccaggaacaauggg

SEQ ID NO: 2545850 - RNA, 19 nt, Artificial Sequence
  Description of Artificial Sequence: Synthetic oligonucleotide
  Sense strand starting at position 3925 of SEQ ID NO: 1888619
ugaaauccuccugguguga

SEQ ID NO: 2545851 - RNA, 19 nt, Artificial Sequence
  Description of Artificial Sequence: Synthetic oligonucleotide
  Antisense strand to SEQ ID NO: 2545850
ucacaccaggaggauuuca

SEQ ID NO: 2545852 - RNA, 19 nt, Artificial Sequence
  Description of Artificial Sequence: Synthetic oligonucleotide
  Sense strand starting at position 859 of SEQ ID NO: 1888619
cagugugucacugauguga

SEQ ID NO: 2545853 - RNA, 19 nt, Artificial Sequence
  Description of Artificial Sequence: Synthetic oligonucleotide
  Antisense strand to SEQ ID NO: 2545852
ucacaucagugacacacug

SEQ ID NO: 2545854 - RNA, 19 nt, Artificial Sequence
  Description of Artificial Sequence: Synthetic oligonucleotide
  Sense strand starting at position 885 of SEQ ID NO: 1888619
uaagcaucagucugugaag

SEQ ID NO: 2545855 - RNA, 19 nt, Artificial Sequence
  Description of Artificial Sequence: Synthetic oligonucleotide
  Antisense strand to SEQ ID NO: 2545854
cuucacagacugaugcuua

SEQ ID NO: 2545856 - RNA, 19 nt, Artificial Sequence
  Description of Artificial Sequence: Synthetic oligonucleotide
  Sense strand starting at position 593 of SEQ ID NO: 1888619
ggaacauucucugcccuuu

SEQ ID NO: 2545857 - RNA, 19 nt, Artificial Sequence
  Description of Artificial Sequence: Synthetic oligonucleotide
  Antisense strand to SEQ ID NO: 2545856
aaagggcagagaauguucc

SEQ ID NO: 2545858 - RNA, 19 nt, Artificial Sequence
  Description of Artificial Sequence: Synthetic oligonucleotide
  Sense strand starting at position 872 of SEQ ID NO: 1888619
augugaggcuccuuaagca

SEQ ID NO: 2545859 - RNA, 19 nt, Artificial Sequence
  Description of Artificial Sequence: Synthetic oligonucleotide
  Antisense strand to SEQ ID NO: 2545858
ugcuuaaggagccucacau

SEQ ID NO: 2545860 - RNA, 19 nt, Artificial Sequence
  Description of Artificial Sequence: Synthetic oligonucleotide
  Sense strand starting at position 1788 of SEQ ID NO: 1888619
gcaguuuacccagagcugu

SEQ ID NO: 2545861 - RNA, 19 nt, Artificial Sequence
  Description of Artificial Sequence: Synthetic oligonucleotide
  Antisense strand to SEQ ID NO: 2545860
acagcucuggguaaacugc

SEQ ID NO: 2545862 - RNA, 19 nt, Artificial Sequence
  Description of Artificial Sequence: Synthetic oligonucleotide
  Sense strand starting at position 2545 of SEQ ID NO: 1888619
gcacuaguucccugaguca

SEQ ID NO: 2545863 - RNA, 19 nt, Artificial Sequence
  Description of Artificial Sequence: Synthetic oligonucleotide
  Antisense strand to SEQ ID NO: 2545862
ugacucagggaacuagugc

SEQ ID NO: 2545864 - RNA, 19 nt, Artificial Sequence
  Description of Artificial Sequence: Synthetic oligonucleotide
  Sense strand starting at position 631 of SEQ ID NO: 1888619
agugcugguuccuuccaau

SEQ ID NO: 2545865 - RNA, 19 nt, Artificial Sequence
  Description of Artificial Sequence: Synthetic oligonucleotide
  Antisense strand to SEQ ID NO: 2545864
auuggaaggaaccagcacu

SEQ ID NO: 2545866 - RNA, 19 nt, Artificial Sequence
  Description of Artificial Sequence: Synthetic oligonucleotide
  Sense strand starting at position 1056 of SEQ ID NO: 1888619
cuuucuuugcacgagcagu

SEQ ID NO: 2545867 - RNA, 19 nt, Artificial Sequence
  Description of Artificial Sequence: Synthetic oligonucleotide
  Antisense strand to SEQ ID NO: 2545866
acugcucgugcaaagaaag

SEQ ID NO: 2545868 - RNA, 19 nt, Artificial Sequence
  Description of Artificial Sequence: Synthetic oligonucleotide
  Sense strand starting at position 857 of SEQ ID NO: 1888619
ggcagugugucacugaugu

SEQ ID NO: 2545869 - RNA, 19 nt, Artificial Sequence
  Description of Artificial Sequence: Synthetic oligonucleotide
  Antisense strand to SEQ ID NO: 2545868
acaucagugacacacugcc

SEQ ID NO: 2545870 - RNA, 19 nt, Artificial Sequence
  Description of Artificial Sequence: Synthetic oligonucleotide
  Sense strand starting at position 580 of SEQ ID NO: 1888619
ucccauuguuccuggaaca

SEQ ID NO: 2545871 - RNA, 19 nt, Artificial Sequence
  Description of Artificial Sequence: Synthetic oligonucleotide
  Antisense strand to SEQ ID NO: 2545870
uguuccaggaacaauggga

SEQ ID NO: 2545872 - RNA, 19 nt, Artificial Sequence
  Description of Artificial Sequence: Synthetic oligonucleotide
  Sense strand starting at position 2476 of SEQ ID NO: 1888619
cccaguguguccuaacaca

SEQ ID NO: 2545873 - RNA, 19 nt, Artificial Sequence
  Description of Artificial Sequence: Synthetic oligonucleotide
  Antisense strand to SEQ ID NO: 2545872
uguguuaggacacacuggg

SEQ ID NO: 2545874 - RNA, 19 nt, Artificial Sequence
  Description of Artificial Sequence: Synthetic oligonucleotide
  Sense strand starting at position 3924 of SEQ ID NO: 1888619
uugaaauccuccuggugug

SEQ ID NO: 2545875 - RNA, 19 nt, Artificial Sequence
  Description of Artificial Sequence: Synthetic oligonucleotide
  Antisense strand to SEQ ID NO: 2545874
cacaccaggaggauuucaa

SEQ ID NO: 2545876 - RNA, 19 nt, Artificial Sequence
  Description of Artificial Sequence: Synthetic oligonucleotide
  Sense strand starting at position 3828 of SEQ ID NO: 1888619
cguggcaugucccagauga

SEQ ID NO: 2545877 - RNA, 19 nt, Artificial Sequence
  Description of Artificial Sequence: Synthetic oligonucleotide
  Antisense strand to SEQ ID NO: 2545876
ucaucugggacaugccacg

SEQ ID NO: 2545878 - RNA, 19 nt, Artificial Sequence
  Description of Artificial Sequence: Synthetic oligonucleotide
  Sense strand starting at position 731 of SEQ ID NO: 1888619
guguccaguuucugggaga

SEQ ID NO: 2545879 - RNA, 19 nt, Artificial Sequence
  Description of Artificial Sequence: Synthetic oligonucleotide
  Antisense strand to SEQ ID NO: 2545878
ucucccagaaacuggacac

SEQ ID NO: 2545880 - RNA, 19 nt, Artificial Sequence
  Description of Artificial Sequence: Synthetic oligonucleotide
  Sense strand starting at position 2980 of SEQ ID NO: 1888620
aucagacugcucuagaauc

SEQ ID NO: 2545881 - RNA, 19 nt, Artificial Sequence
  Description of Artificial Sequence: Synthetic oligonucleotide
  Antisense strand to SEQ ID NO: 2545880
gauucuagagcagucugau

SEQ ID NO: 2545882 - RNA, 19 nt, Artificial Sequence
  Description of Artificial Sequence: Synthetic oligonucleotide
  Sense strand starting at position 1906 of SEQ ID NO: 1888620
auugcuguaaucguuguua

SEQ ID NO: 2545883 - RNA, 19 nt, Artificial Sequence
  Description of Artificial Sequence: Synthetic oligonucleotide
  Antisense strand to SEQ ID NO: 2545882
uaacaacgauuacagcaau

SEQ ID NO: 2545884 - RNA, 19 nt, Artificial Sequence
  Description of Artificial Sequence: Synthetic oligonucleotide
  Sense strand starting at position 2439 of SEQ ID NO: 1888620
guggaauuagcacaaaucu

SEQ ID NO: 2545885 - RNA, 19 nt, Artificial Sequence
  Description of Artificial Sequence: Synthetic oligonucleotide
  Antisense strand to SEQ ID NO: 2545884
agauuugugcuaauuccac

SEQ ID NO: 2545886 - RNA, 19 nt, Artificial Sequence
  Description of Artificial Sequence: Synthetic oligonucleotide
  Sense strand starting at position 3917 of SEQ ID NO: 1888620
cugucagagcaugaaacau

SEQ ID NO: 2545887 - RNA, 19 nt, Artificial Sequence
  Description of Artificial Sequence: Synthetic oligonucleotide
  Antisense strand to SEQ ID NO: 2545886
auguuucaugcucugacag

SEQ ID NO: 2545888 - RNA, 19 nt, Artificial Sequence
  Description of Artificial Sequence: Synthetic oligonucleotide
  Sense strand starting at position 2326 of SEQ ID NO: 1888620
ugggaaagauggcuuuaca

SEQ ID NO: 2545889 - RNA, 19 nt, Artificial Sequence
  Description of Artificial Sequence: Synthetic oligonucleotide
  Antisense strand to SEQ ID NO: 2545888
uguaaagccaucuuuccca

SEQ ID NO: 2545890 - RNA, 19 nt, Artificial Sequence
  Description of Artificial Sequence: Synthetic oligonucleotide
  Sense strand starting at position 2681 of SEQ ID NO: 1888620
cuguguuuagcuguaugua

SEQ ID NO: 2545891 - RNA, 19 nt, Artificial Sequence
  Description of Artificial Sequence: Synthetic oligonucleotide
  Antisense strand to SEQ ID NO: 2545890
uacauacagcuaaacacag

SEQ ID NO: 2545892 - RNA, 19 nt, Artificial Sequence
  Description of Artificial Sequence: Synthetic oligonucleotide
  Sense strand starting at position 997 of SEQ ID NO: 1888620
ccauaaagguuggugagaa

SEQ ID NO: 2545893 - RNA, 19 nt, Artificial Sequence
  Description of Artificial Sequence: Synthetic oligonucleotide
  Antisense strand to SEQ ID NO: 2545892
uucucaccaaccuuuaugg

SEQ ID NO: 2545894 - RNA, 19 nt, Artificial Sequence
  Description of Artificial Sequence: Synthetic oligonucleotide
  Sense strand starting at position 1861 of SEQ ID NO: 1888620
cagaacugugccuaggaca

SEQ ID NO: 2545895 - RNA, 19 nt, Artificial Sequence
  Description of Artificial Sequence: Synthetic oligonucleotide
  Antisense strand to SEQ ID NO: 2545894
uguccuaggcacaguucug

SEQ ID NO: 2545896 - RNA, 19 nt, Artificial Sequence
  Description of Artificial Sequence: Synthetic oligonucleotide
  Sense strand starting at position 1909 of SEQ ID NO: 1888620
gcuguaaucguuguuauuc

SEQ ID NO: 2545897 - RNA, 19 nt, Artificial Sequence
  Description of Artificial Sequence: Synthetic oligonucleotide
  Antisense strand to SEQ ID NO: 2545896
gaauaacaacgauuacagc

SEQ ID NO: 2545898 - RNA, 19 nt, Artificial Sequence
  Description of Artificial Sequence: Synthetic oligonucleotide
  Sense strand starting at position 1676 of SEQ ID NO: 1888620
guucgugcugcaguaacaa

SEQ ID NO: 2545899 - RNA, 19 nt, Artificial Sequence
  Description of Artificial Sequence: Synthetic oligonucleotide
  Antisense strand to SEQ ID NO: 2545898
uuguuacugcagcacgaac

SEQ ID NO: 2545900 - RNA, 19 nt, Artificial Sequence
  Description of Artificial Sequence: Synthetic oligonucleotide
  Sense strand starting at position 3635 of SEQ ID NO: 1888620
cagaauaaacgguaagcuu

SEQ ID NO: 2545901 - RNA, 19 nt, Artificial Sequence
  Description of Artificial Sequence: Synthetic oligonucleotide
  Antisense strand to SEQ ID NO: 2545900
aagcuuaccguuuauucug

SEQ ID NO: 2545902 - RNA, 19 nt, Artificial Sequence
  Description of Artificial Sequence: Synthetic oligonucleotide
  Sense strand starting at position 3710 of SEQ ID NO: 1888620
uguuauaaacgagauguca

SEQ ID NO: 2545903 - RNA, 19 nt, Artificial Sequence
  Description of Artificial Sequence: Synthetic oligonucleotide
  Antisense strand to SEQ ID NO: 2545902
ugacaucucguuuauaaca

SEQ ID NO: 2545904 - RNA, 19 nt, Artificial Sequence
  Description of Artificial Sequence: Synthetic oligonucleotide
  Sense strand starting at position 3746 of SEQ ID NO: 1888620
agagcuugcccugaagaca

SEQ ID NO: 2545905 - RNA, 19 nt, Artificial Sequence
  Description of Artificial Sequence: Synthetic oligonucleotide
  Antisense strand to SEQ ID NO: 2545904
ugucuucagggcaagcucu

SEQ ID NO: 2545906 - RNA, 19 nt, Artificial Sequence
  Description of Artificial Sequence: Synthetic oligonucleotide
  Sense strand starting at position 942 of SEQ ID NO: 1888620
ucgagauuauaccuaugau

SEQ ID NO: 2545907 - RNA, 19 nt, Artificial Sequence
  Description of Artificial Sequence: Synthetic oligonucleotide
  Antisense strand to SEQ ID NO: 2545906
aucauagguauaaucucga

SEQ ID NO: 2545908 - RNA, 19 nt, Artificial Sequence
  Description of Artificial Sequence: Synthetic oligonucleotide
  Sense strand starting at position 2978 of SEQ ID NO: 1888620
ugaucagacugcucuagaa

SEQ ID NO: 2545909 - RNA, 19 nt, Artificial Sequence
  Description of Artificial Sequence: Synthetic oligonucleotide
  Antisense strand to SEQ ID NO: 2545908
uucuagagcagucugauca

SEQ ID NO: 2545910 - RNA, 19 nt, Artificial Sequence
  Description of Artificial Sequence: Synthetic oligonucleotide
  Sense strand starting at position 996 of SEQ ID NO: 1888620
uccauaaagguuggugaga

SEQ ID NO: 2545911 - RNA, 19 nt, Artificial Sequence
  Description of Artificial Sequence: Synthetic oligonucleotide
  Antisense strand to SEQ ID NO: 2545910
ucucaccaaccuuuaugga

SEQ ID NO: 2545912 - RNA, 19 nt, Artificial Sequence
  Description of Artificial Sequence: Synthetic oligonucleotide
  Sense strand starting at position 3497 of SEQ ID NO: 1888620
ugguacuucuaaguaagaa

SEQ ID NO: 2545913 - RNA, 19 nt, Artificial Sequence
  Description of Artificial Sequence: Synthetic oligonucleotide
  Antisense strand to SEQ ID NO: 2545912
uucuuacuuagaaguacca

SEQ ID NO: 2545914 - RNA, 19 nt, Artificial Sequence
  Description of Artificial Sequence: Synthetic oligonucleotide
  Sense strand starting at position 1652 of SEQ ID NO: 1888620
gcucuuaucagugaggaug

SEQ ID NO: 2545915 - RNA, 19 nt, Artificial Sequence
  Description of Artificial Sequence: Synthetic oligonucleotide
  Antisense strand to SEQ ID NO: 2545914
cauccucacugauaagagc

SEQ ID NO: 2545916 - RNA, 19 nt, Artificial Sequence
  Description of Artificial Sequence: Synthetic oligonucleotide
  Sense strand starting at position 988 of SEQ ID NO: 1888620
ccuagucuuccauaaaggu

SEQ ID NO: 2545917 - RNA, 19 nt, Artificial Sequence
  Description of Artificial Sequence: Synthetic oligonucleotide
  Antisense strand to SEQ ID NO: 2545916
accuuuauggaagacuagg

SEQ ID NO: 2545918 - RNA, 19 nt, Artificial Sequence
  Description of Artificial Sequence: Synthetic oligonucleotide
  Sense strand starting at position 2038 of SEQ ID NO: 1888620
aucugucucccacaguaga

SEQ ID NO: 2545919 - RNA, 19 nt, Artificial Sequence
  Description of Artificial Sequence: Synthetic oligonucleotide
  Antisense strand to SEQ ID NO: 2545918
ucuacugugggagacagau

SEQ ID NO: 2545920 - RNA, 19 nt, Artificial Sequence
  Description of Artificial Sequence: Synthetic oligonucleotide
  Sense strand starting at position 1039 of SEQ ID NO: 1888620
uuacauaagugcuuagaaa

SEQ ID NO: 2545921 - RNA, 19 nt, Artificial Sequence
  Description of Artificial Sequence: Synthetic oligonucleotide
  Antisense strand to SEQ ID NO: 2545920
uuucuaagcacuuauguaa

SEQ ID NO: 2545922 - RNA, 19 nt, Artificial Sequence
  Description of Artificial Sequence: Synthetic oligonucleotide
  Sense strand starting at position 1673 of SEQ ID NO: 1888620
cugguucgugcugcaguaa

SEQ ID NO: 2545923 - RNA, 19 nt, Artificial Sequence
  Description of Artificial Sequence: Synthetic oligonucleotide
  Antisense strand to SEQ ID NO: 2545922
uuacugcagcacgaaccag

SEQ ID NO: 2545924 - RNA, 19 nt, Artificial Sequence
  Description of Artificial Sequence: Synthetic oligonucleotide
  Sense strand starting at position 2306 of SEQ ID NO: 1888620
uagggaaugucaucuguag

SEQ ID NO: 2545925 - RNA, 19 nt, Artificial Sequence
  Description of Artificial Sequence: Synthetic oligonucleotide
  Antisense strand to SEQ ID NO: 2545924
cuacagaugacauucccua

SEQ ID NO: 2545926 - RNA, 19 nt, Artificial Sequence
  Description of Artificial Sequence: Synthetic oligonucleotide
  Sense strand starting at position 2509 of SEQ ID NO: 1888620
cuuucuuagggccaucauu

SEQ ID NO: 2545927 - RNA, 19 nt, Artificial Sequence
  Description of Artificial Sequence: Synthetic oligonucleotide
  Antisense strand to SEQ ID NO: 2545926
aaugauggcccuaagaaag

SEQ ID NO: 2545928 - RNA, 19 nt, Artificial Sequence
  Description of Artificial Sequence: Synthetic oligonucleotide
  Sense strand starting at position 1918 of SEQ ID NO: 1888620
guuguuauucuugacacca

SEQ ID NO: 2545929 - RNA, 19 nt, Artificial Sequence
  Description of Artificial Sequence: Synthetic oligonucleotide
  Antisense strand to SEQ ID NO: 2545928
uggugucaagaauaacaac

SEQ ID NO: 2545930 - RNA, 19 nt, Artificial Sequence
  Description of Artificial Sequence: Synthetic oligonucleotide
  Sense strand starting at position 3728 of SEQ ID NO: 1888620
acaugaagcuaugcaucaa

SEQ ID NO: 2545931 - RNA, 19 nt, Artificial Sequence
  Description of Artificial Sequence: Synthetic oligonucleotide
  Antisense strand to SEQ ID NO: 2545930
uugaugcauagcuucaugu

SEQ ID NO: 2545932 - RNA, 19 nt, Artificial Sequence
  Description of Artificial Sequence: Synthetic oligonucleotide
  Sense strand starting at position 3838 of SEQ ID NO: 1888620
gcacaugugcgugugcaaa

SEQ ID NO: 2545933 - RNA, 19 nt, Artificial Sequence
  Description of Artificial Sequence: Synthetic oligonucleotide
  Antisense strand to SEQ ID NO: 2545932
uuugcacacgcacaugugc

SEQ ID NO: 2545934 - RNA, 19 nt, Artificial Sequence
  Description of Artificial Sequence: Synthetic oligonucleotide
  Sense strand starting at position 766 of SEQ ID NO: 1888620
uuugauauucccugaggug

SEQ ID NO: 2545935 - RNA, 19 nt, Artificial Sequence
  Description of Artificial Sequence: Synthetic oligonucleotide
  Antisense strand to SEQ ID NO: 2545934
caccucagggaauaucaaa

SEQ ID NO: 2545936 - RNA, 19 nt, Artificial Sequence
  Description of Artificial Sequence: Synthetic oligonucleotide
  Sense strand starting at position 1650 of SEQ ID NO: 1888620
gggcucuuaucagugagga

SEQ ID NO: 2545937 - RNA, 19 nt, Artificial Sequence
  Description of Artificial Sequence: Synthetic oligonucleotide
  Antisense strand to SEQ ID NO: 2545936
uccucacugauaagagccc

SEQ ID NO: 2545938 - RNA, 19 nt, Artificial Sequence
  Description of Artificial Sequence: Synthetic oligonucleotide
  Sense strand starting at position 2051 of SEQ ID NO: 1888620
aguagaucaugagcuacuu

SEQ ID NO: 2545939 - RNA, 19 nt, Artificial Sequence
  Description of Artificial Sequence: Synthetic oligonucleotide
  Antisense strand to SEQ ID NO: 2545938
aaguagcucaugaucuacu

SEQ ID NO: 2545940 - RNA, 19 nt, Artificial Sequence
  Description of Artificial Sequence: Synthetic oligonucleotide
  Sense strand starting at position 2184 of SEQ ID NO: 1888620
aaucacugguacgugaaua

SEQ ID NO: 2545941 - RNA, 19 nt, Artificial Sequence
  Description of Artificial Sequence: Synthetic oligonucleotide
  Antisense strand to SEQ ID NO: 2545940
uauucacguaccagugauu

SEQ ID NO: 2545942 - RNA, 19 nt, Artificial Sequence
  Description of Artificial Sequence: Synthetic oligonucleotide
  Sense strand starting at position 2085 of SEQ ID NO: 1888620
cucugacuccacuguugaa

SEQ ID NO: 2545943 - RNA, 19 nt, Artificial Sequence
  Description of Artificial Sequence: Synthetic oligonucleotide
  Antisense strand to SEQ ID NO: 2545942
uucaacaguggagucagag

SEQ ID NO: 2545944 - RNA, 19 nt, Artificial Sequence
  Description of Artificial Sequence: Synthetic oligonucleotide
  Sense strand starting at position 2314 of SEQ ID NO: 1888620
gucaucuguaggugggaaa

SEQ ID NO: 2545945 - RNA, 19 nt, Artificial Sequence
  Description of Artificial Sequence: Synthetic oligonucleotide
  Antisense strand to SEQ ID NO: 2545944
uuucccaccuacagaugac

SEQ ID NO: 2545946 - RNA, 19 nt, Artificial Sequence
  Description of Artificial Sequence: Synthetic oligonucleotide
  Sense strand starting at position 2185 of SEQ ID NO: 1888620
aucacugguacgugaauaa

SEQ ID NO: 2545947 - RNA, 19 nt, Artificial Sequence
  Description of Artificial Sequence: Synthetic oligonucleotide
  Antisense strand to SEQ ID NO: 2545946
uuauucacguaccagugau

SEQ ID NO: 2545948 - RNA, 19 nt, Artificial Sequence
  Description of Artificial Sequence: Synthetic oligonucleotide
  Sense strand starting at position 1999 of SEQ ID NO: 1888620
cagaaauaaugggauauga

SEQ ID NO: 2545949 - RNA, 19 nt, Artificial Sequence
  Description of Artificial Sequence: Synthetic oligonucleotide
  Antisense strand to SEQ ID NO: 2545948
ucauaucccauuauuucug

SEQ ID NO: 2545950 - RNA, 19 nt, Artificial Sequence
  Description of Artificial Sequence: Synthetic oligonucleotide
  Sense strand starting at position 3708 of SEQ ID NO: 1888620
gcuguuauaaacgagaugu

SEQ ID NO: 2545951 - RNA, 19 nt, Artificial Sequence
  Description of Artificial Sequence: Synthetic oligonucleotide
  Antisense strand to SEQ ID NO: 2545950
acaucucguuuauaacagc

SEQ ID NO: 2545952 - RNA, 19 nt, Artificial Sequence
  Description of Artificial Sequence: Synthetic oligonucleotide
  Sense strand starting at position 3707 of SEQ ID NO: 1888620
ggcuguuauaaacgagaug

SEQ ID NO: 2545953 - RNA, 19 nt, Artificial Sequence
  Description of Artificial Sequence: Synthetic oligonucleotide
  Antisense strand to SEQ ID NO: 2545952
caucucguuuauaacagcc

SEQ ID NO: 2545954 - RNA, 19 nt, Artificial Sequence
  Description of Artificial Sequence: Synthetic oligonucleotide
  Sense strand starting at position 3958 of SEQ ID NO: 1888620
gguuguggauuagcagaau

SEQ ID NO: 2545955 - RNA, 19 nt, Artificial Sequence
  Description of Artificial Sequence: Synthetic oligonucleotide
  Antisense strand to SEQ ID NO: 2545954
auucugcuaauccacaacc

SEQ ID NO: 2545956 - RNA, 19 nt, Artificial Sequence
  Description of Artificial Sequence: Synthetic oligonucleotide
  Sense strand starting at position 1651 of SEQ ID NO: 1888620
ggcucuuaucagugaggau

SEQ ID NO: 2545957 - RNA, 19 nt, Artificial Sequence
  Description of Artificial Sequence: Synthetic oligonucleotide
  Antisense strand to SEQ ID NO: 2545956
auccucacugauaagagcc

SEQ ID NO: 2545958 - RNA, 19 nt, Artificial Sequence
  Description of Artificial Sequence: Synthetic oligonucleotide
  Sense strand starting at position 2975 of SEQ ID NO: 1888620
cccugaucagacugcucua

SEQ ID NO: 2545959 - RNA, 19 nt, Artificial Sequence
  Description of Artificial Sequence: Synthetic oligonucleotide
  Antisense strand to SEQ ID NO: 2545958
uagagcagucugaucaggg

SEQ ID NO: 2545960 - RNA, 19 nt, Artificial Sequence
  Description of Artificial Sequence: Synthetic oligonucleotide
  Sense strand starting at position 548 of SEQ ID NO: 1888621
guguuuagaggacagaagu

SEQ ID NO: 2545961 - RNA, 19 nt, Artificial Sequence
  Description of Artificial Sequence: Synthetic oligonucleotide
  Antisense strand to SEQ ID NO: 2545960
acuucuguccucuaaacac

SEQ ID NO: 2545962 - RNA, 19 nt, Artificial Sequence
  Description of Artificial Sequence: Synthetic oligonucleotide
  Sense strand starting at position 534 of SEQ ID NO: 1888621
gagggauggaaaugguguu

SEQ ID NO: 2545963 - RNA, 19 nt, Artificial Sequence
  Description of Artificial Sequence: Synthetic oligonucleotide
  Antisense strand to SEQ ID NO: 2545962
aacaccauuuccaucccuc

SEQ ID NO: 2545964 - RNA, 19 nt, Artificial Sequence
  Description of Artificial Sequence: Synthetic oligonucleotide
  Sense strand starting at position 1164 of SEQ ID NO: 1888621
ugaggccucccaggagaau

SEQ ID NO: 2545965 - RNA, 19 nt, Artificial Sequence
  Description of Artificial Sequence: Synthetic oligonucleotide
  Antisense strand to SEQ ID NO: 2545964
auucuccugggaggccuca

SEQ ID NO: 2545966 - RNA, 19 nt, Artificial Sequence
  Description of Artificial Sequence: Synthetic oligonucleotide
  Sense strand starting at position 575 of SEQ ID NO: 1888621
guggcugcugacuaauuau

SEQ ID NO: 2545967 - RNA, 19 nt, Artificial Sequence
  Description of Artificial Sequence: Synthetic oligonucleotide
  Antisense strand to SEQ ID NO: 2545966
auaauuagucagcagccac

SEQ ID NO: 2545968 - RNA, 19 nt, Artificial Sequence
  Description of Artificial Sequence: Synthetic oligonucleotide
  Sense strand starting at position 729 of SEQ ID NO: 1888621
gauggucccugcuuuagga

SEQ ID NO: 2545969 - RNA, 19 nt, Artificial Sequence
  Description of Artificial Sequence: Synthetic oligonucleotide
  Antisense strand to SEQ ID NO: 2545968
uccuaaagcagggaccauc

SEQ ID NO: 2545970 - RNA, 19 nt, Artificial Sequence
  Description of Artificial Sequence: Synthetic oligonucleotide
  Sense strand starting at position 978 of SEQ ID NO: 1888621
aagauuguggccuggguca

SEQ ID NO: 2545971 - RNA, 19 nt, Artificial Sequence
  Description of Artificial Sequence: Synthetic oligonucleotide
  Antisense strand to SEQ ID NO: 2545970
ugacccaggccacaaucuu

SEQ ID NO: 2545972 - RNA, 19 nt, Artificial Sequence
  Description of Artificial Sequence: Synthetic oligonucleotide
  Sense strand starting at position 726 of SEQ ID NO: 1888621
ucagauggucccugcuuua

SEQ ID NO: 2545973 - RNA, 19 nt, Artificial Sequence
  Description of Artificial Sequence: Synthetic oligonucleotide
  Antisense strand to SEQ ID NO: 2545972
uaaagcagggaccaucuga

SEQ ID NO: 2545974 - RNA, 19 nt, Artificial Sequence
  Description of Artificial Sequence: Synthetic oligonucleotide
  Sense strand starting at position 574 of SEQ ID NO: 1888621
uguggcugcugacuaauua

SEQ ID NO: 2545975 - RNA, 19 nt, Artificial Sequence
  Description of Artificial Sequence: Synthetic oligonucleotide
  Antisense strand to SEQ ID NO: 2545974
uaauuagucagcagccaca

SEQ ID NO: 2545976 - RNA, 19 nt, Artificial Sequence
  Description of Artificial Sequence: Synthetic oligonucleotide
  Sense strand starting at position 1230 of SEQ ID NO: 1888621
uggaaacuguccugaggga

SEQ ID NO: 2545977 - RNA, 19 nt, Artificial Sequence
  Description of Artificial Sequence: Synthetic oligonucleotide
  Antisense strand to SEQ ID NO: 2545976
ucccucaggacaguuucca

SEQ ID NO: 2545978 - RNA, 19 nt, Artificial Sequence
  Description of Artificial Sequence: Synthetic oligonucleotide
  Sense strand starting at position 162 of SEQ ID NO: 1888621
gcugcuccacugugauguu

SEQ ID NO: 2545979 - RNA, 19 nt, Artificial Sequence
  Description of Artificial Sequence: Synthetic oligonucleotide
  Antisense strand to SEQ ID NO: 2545978
aacaucacaguggagcagc

SEQ ID NO: 2545980 - RNA, 19 nt, Artificial Sequence
  Description of Artificial Sequence: Synthetic oligonucleotide
  Sense strand starting at position 1523 of SEQ ID NO: 1888621
agacaagucucaugaccug

SEQ ID NO: 2545981 - RNA, 19 nt, Artificial Sequence
  Description of Artificial Sequence: Synthetic oligonucleotide
  Antisense strand to SEQ ID NO: 2545980
caggucaugagacuugucu

SEQ ID NO: 2545982 - RNA, 19 nt, Artificial Sequence
  Description of Artificial Sequence: Synthetic oligonucleotide
  Sense strand starting at position 843 of SEQ ID NO: 1888621
agguguuugccgugcagga

SEQ ID NO: 2545983 - RNA, 19 nt, Artificial Sequence
  Description of Artificial Sequence: Synthetic oligonucleotide
  Antisense strand to SEQ ID NO: 2545982
uccugcacggcaaacaccu

SEQ ID NO: 2545984 - RNA, 19 nt, Artificial Sequence
  Description of Artificial Sequence: Synthetic oligonucleotide
  Sense strand starting at position 1200 of SEQ ID NO: 1888621
ggcagucugucagaggaau

SEQ ID NO: 2545985 - RNA, 19 nt, Artificial Sequence
  Description of Artificial Sequence: Synthetic oligonucleotide
  Antisense strand to SEQ ID NO: 2545984
auuccucugacagacugcc

SEQ ID NO: 2545986 - RNA, 19 nt, Artificial Sequence
  Description of Artificial Sequence: Synthetic oligonucleotide
  Sense strand starting at position 471 of SEQ ID NO: 1888621
gagaucugcuccggagaca

SEQ ID NO: 2545987 - RNA, 19 nt, Artificial Sequence
  Description of Artificial Sequence: Synthetic oligonucleotide
  Antisense strand to SEQ ID NO: 2545986
ugucuccggagcagaucuc

SEQ ID NO: 2545988 - RNA, 19 nt, Artificial Sequence
  Description of Artificial Sequence: Synthetic oligonucleotide
  Sense strand starting at position 394 of SEQ ID NO: 1888621
gcaggagaguccuggugga

SEQ ID NO: 2545989 - RNA, 19 nt, Artificial Sequence
  Description of Artificial Sequence: Synthetic oligonucleotide
  Antisense strand to SEQ ID NO: 2545988
uccaccaggacucuccugc

SEQ ID NO: 2545990 - RNA, 19 nt, Artificial Sequence
  Description of Artificial Sequence: Synthetic oligonucleotide
  Sense strand starting at position 571 of SEQ ID NO: 1888621
agauguggcugcugacuaa

SEQ ID NO: 2545991 - RNA, 19 nt, Artificial Sequence
  Description of Artificial Sequence: Synthetic oligonucleotide
  Antisense strand to SEQ ID NO: 2545990
uuagucagcagccacaucu

SEQ ID NO: 2545992 - RNA, 19 nt, Artificial Sequence
  Description of Artificial Sequence: Synthetic oligonucleotide
  Sense strand starting at position 1203 of SEQ ID NO: 1888622
uaauauccauuggugagaa

SEQ ID NO: 2545993 - RNA, 19 nt, Artificial Sequence
  Description of Artificial Sequence: Synthetic oligonucleotide
  Antisense strand to SEQ ID NO: 2545992
uucucaccaauggauauua

SEQ ID NO: 2545994 - RNA, 19 nt, Artificial Sequence
  Description of Artificial Sequence: Synthetic oligonucleotide
  Sense strand starting at position 3416 of SEQ ID NO: 1888622
ggaugauacaggugaucug

SEQ ID NO: 2545995 - RNA, 19 nt, Artificial Sequence
  Description of Artificial Sequence: Synthetic oligonucleotide
  Antisense strand to SEQ ID NO: 2545994
cagaucaccuguaucaucc

SEQ ID NO: 2545996 - RNA, 19 nt, Artificial Sequence
  Description of Artificial Sequence: Synthetic oligonucleotide
  Sense strand starting at position 3538 of SEQ ID NO: 1888622
cagcuugccaucgugugaa

SEQ ID NO: 2545997 - RNA, 19 nt, Artificial Sequence
  Description of Artificial Sequence: Synthetic oligonucleotide
  Antisense strand to SEQ ID NO: 2545996
uucacacgauggcaagcug

SEQ ID NO: 2545998 - RNA, 19 nt, Artificial Sequence
  Description of Artificial Sequence: Synthetic oligonucleotide
  Sense strand starting at position 672 of SEQ ID NO: 1888622
aaagaugaaguuggcaaua

SEQ ID NO: 2545999 - RNA, 19 nt, Artificial Sequence
  Description of Artificial Sequence: Synthetic oligonucleotide
  Antisense strand to SEQ ID NO: 2545998
uauugccaacuucaucuuu

SEQ ID NO: 2546000 - RNA, 19 nt, Artificial Sequence
  Description of Artificial Sequence: Synthetic oligonucleotide
  Sense strand starting at position 2479 of SEQ ID NO: 1888622
agaauuacugauuggaguu

SEQ ID NO: 2546001 - RNA, 19 nt, Artificial Sequence
  Description of Artificial Sequence: Synthetic oligonucleotide
  Antisense strand to SEQ ID NO: 2546000
aacuccaaucaguaauucu

SEQ ID NO: 2546002 - RNA, 19 nt, Artificial Sequence
  Description of Artificial Sequence: Synthetic oligonucleotide
  Sense strand starting at position 759 of SEQ ID NO: 1888622
agguguaguacugaacaca

SEQ ID NO: 2546003 - RNA, 19 nt, Artificial Sequence
  Description of Artificial Sequence: Synthetic oligonucleotide
  Antisense strand to SEQ ID NO: 2546002
uguguucaguacuacaccu

SEQ ID NO: 2546004 - RNA, 19 nt, Artificial Sequence
  Description of Artificial Sequence: Synthetic oligonucleotide
  Sense strand starting at position 1944 of SEQ ID NO: 1888622
acuggugacaguuaucuga

SEQ ID NO: 2546005 - RNA, 19 nt, Artificial Sequence
  Description of Artificial Sequence: Synthetic oligonucleotide
  Antisense strand to SEQ ID NO: 2546004
ucagauaacugucaccagu

SEQ ID NO: 2546006 - RNA, 19 nt, Artificial Sequence
  Description of Artificial Sequence: Synthetic oligonucleotide
  Sense strand starting at position 2415 of SEQ ID NO: 1888622
ggucuaguaauuugcauug

SEQ ID NO: 2546007 - RNA, 19 nt, Artificial Sequence
  Description of Artificial Sequence: Synthetic oligonucleotide
  Antisense strand to SEQ ID NO: 2546006
caaugcaaauuacuagacc

SEQ ID NO: 2546008 - RNA, 19 nt, Artificial Sequence
  Description of Artificial Sequence: Synthetic oligonucleotide
  Sense strand starting at position 880 of SEQ ID NO: 1888622
uguagucaccaauauuaac

SEQ ID NO: 2546009 - RNA, 19 nt, Artificial Sequence
  Description of Artificial Sequence: Synthetic oligonucleotide
  Antisense strand to SEQ ID NO: 2546008
guuaauauuggugacuaca

SEQ ID NO: 2546010 - RNA, 19 nt, Artificial Sequence
  Description of Artificial Sequence: Synthetic oligonucleotide
  Sense strand starting at position 2625 of SEQ ID NO: 1888622
auacuuccugaguacagua

SEQ ID NO: 2546011 - RNA, 19 nt, Artificial Sequence
  Description of Artificial Sequence: Synthetic oligonucleotide
  Antisense strand to SEQ ID NO: 2546010
uacuguacucaggaaguau

SEQ ID NO: 2546012 - RNA, 19 nt, Artificial Sequence
  Description of Artificial Sequence: Synthetic oligonucleotide
  Sense strand starting at position 2474 of SEQ ID NO: 1888622
guuugagaauuacugauug

SEQ ID NO: 2546013 - RNA, 19 nt, Artificial Sequence
  Description of Artificial Sequence: Synthetic oligonucleotide
  Antisense strand to SEQ ID NO: 2546012
caaucaguaauucucaaac

SEQ ID NO: 2546014 - RNA, 19 nt, Artificial Sequence
  Description of Artificial Sequence: Synthetic oligonucleotide
  Sense strand starting at position 1182 of SEQ ID NO: 1888622
gcaacaugauaguuagaac

SEQ ID NO: 2546015 - RNA, 19 nt, Artificial Sequence
  Description of Artificial Sequence: Synthetic oligonucleotide
  Antisense strand to SEQ ID NO: 2546014
guucuaacuaucauguugc

SEQ ID NO: 2546016 - RNA, 19 nt, Artificial Sequence
  Description of Artificial Sequence: Synthetic oligonucleotide
  Sense strand starting at position 3181 of SEQ ID NO: 1888622
cagugacagggcgauauua

SEQ ID NO: 2546017 - RNA, 19 nt, Artificial Sequence
  Description of Artificial Sequence: Synthetic oligonucleotide
  Antisense strand to SEQ ID NO: 2546016
uaauaucgcccugucacug

SEQ ID NO: 2546018 - RNA, 19 nt, Artificial Sequence
  Description of Artificial Sequence: Synthetic oligonucleotide
  Sense strand starting at position 1933 of SEQ ID NO: 1888622
ggaguuaacugacugguga

SEQ ID NO: 2546019 - RNA, 19 nt, Artificial Sequence
  Description of Artificial Sequence: Synthetic oligonucleotide
  Antisense strand to SEQ ID NO: 2546018
ucaccagucaguuaacucc

SEQ ID NO: 2546020 - RNA, 19 nt, Artificial Sequence
  Description of Artificial Sequence: Synthetic oligonucleotide
  Sense strand starting at position 2904 of SEQ ID NO: 1888622
guaagcauuugcucuuaug

SEQ ID NO: 2546021 - RNA, 19 nt, Artificial Sequence
  Description of Artificial Sequence: Synthetic oligonucleotide
  Antisense strand to SEQ ID NO: 2546020
cauaagagcaaaugcuuac

SEQ ID NO: 2546022 - RNA, 19 nt, Artificial Sequence
  Description of Artificial Sequence: Synthetic oligonucleotide
  Sense strand starting at position 1830 of SEQ ID NO: 1888622
uaguuauuagugggaggau

SEQ ID NO: 2546023 - RNA, 19 nt, Artificial Sequence
  Description of Artificial Sequence: Synthetic oligonucleotide
  Antisense strand to SEQ ID NO: 2546022
auccucccacuaauaacua

SEQ ID NO: 2546024 - RNA, 19 nt, Artificial Sequence
  Description of Artificial Sequence: Synthetic oligonucleotide
  Sense strand starting at position 1829 of SEQ ID NO: 1888622
uuaguuauuagugggagga

SEQ ID NO: 2546025 - RNA, 19 nt, Artificial Sequence
  Description of Artificial Sequence: Synthetic oligonucleotide
  Antisense strand to SEQ ID NO: 2546024
uccucccacuaauaacuaa

SEQ ID NO: 2546026 - RNA, 19 nt, Artificial Sequence
  Description of Artificial Sequence: Synthetic oligonucleotide
  Sense strand starting at position 1226 of SEQ ID NO: 1888622
acagaauaaucagcagcua

SEQ ID NO: 2546027 - RNA, 19 nt, Artificial Sequence
  Description of Artificial Sequence: Synthetic oligonucleotide
  Antisense strand to SEQ ID NO: 2546026
uagcugcugauuauucugu

SEQ ID NO: 2546028 - RNA, 19 nt, Artificial Sequence
  Description of Artificial Sequence: Synthetic oligonucleotide
  Sense strand starting at position 1201 of SEQ ID NO: 1888622
uuuaauauccauuggugag

SEQ ID NO: 2546029 - RNA, 19 nt, Artificial Sequence
  Description of Artificial Sequence: Synthetic oligonucleotide
  Antisense strand to SEQ ID NO: 2546028
cucaccaauggauauuaaa

SEQ ID NO: 2546030 - RNA, 19 nt, Artificial Sequence
  Description of Artificial Sequence: Synthetic oligonucleotide
  Sense strand starting at position 1670 of SEQ ID NO: 1888622
aagcuuauccaugagguuu

SEQ ID NO: 2546031 - RNA, 19 nt, Artificial Sequence
  Description of Artificial Sequence: Synthetic oligonucleotide
  Antisense strand to SEQ ID NO: 2546030
aaaccucauggauaagcuu

SEQ ID NO: 2546032 - RNA, 19 nt, Artificial Sequence
  Description of Artificial Sequence: Synthetic oligonucleotide
  Sense strand starting at position 1921 of SEQ ID NO: 1888622
augggugugaaaggaguua

SEQ ID NO: 2546033 - RNA, 19 nt, Artificial Sequence
  Description of Artificial Sequence: Synthetic oligonucleotide
  Antisense strand to SEQ ID NO: 2546032
uaacuccuuucacacccau

SEQ ID NO: 2546034 - RNA, 19 nt, Artificial Sequence
  Description of Artificial Sequence: Synthetic oligonucleotide
  Sense strand starting at position 1822 of SEQ ID NO: 1888622
cuagaaguuaguuauuagu

SEQ ID NO: 2546035 - RNA, 19 nt, Artificial Sequence
  Description of Artificial Sequence: Synthetic oligonucleotide
  Antisense strand to SEQ ID NO: 2546034
acuaauaacuaacuucuag

SEQ ID NO: 2546036 - RNA, 19 nt, Artificial Sequence
  Description of Artificial Sequence: Synthetic oligonucleotide
  Sense strand starting at position 3062 of SEQ ID NO: 1888622
aguugugucagacaccaca

SEQ ID NO: 2546037 - RNA, 19 nt, Artificial Sequence
  Description of Artificial Sequence: Synthetic oligonucleotide
  Antisense strand to SEQ ID NO: 2546036
uguggugucugacacaacu

SEQ ID NO: 2546038 - RNA, 19 nt, Artificial Sequence
  Description of Artificial Sequence: Synthetic oligonucleotide
  Sense strand starting at position 810 of SEQ ID NO: 1888622
augacaucuaguggguuaa

SEQ ID NO: 2546039 - RNA, 19 nt, Artificial Sequence
  Description of Artificial Sequence: Synthetic oligonucleotide
  Antisense strand to SEQ ID NO: 2546038
uuaacccacuagaugucau

SEQ ID NO: 2546040 - RNA, 19 nt, Artificial Sequence
  Description of Artificial Sequence: Synthetic oligonucleotide
  Sense strand starting at position 1935 of SEQ ID NO: 1888622
aguuaacugacuggugaca

SEQ ID NO: 2546041 - RNA, 19 nt, Artificial Sequence
  Description of Artificial Sequence: Synthetic oligonucleotide
  Antisense strand to SEQ ID NO: 2546040
ugucaccagucaguuaacu

SEQ ID NO: 2546042 - RNA, 19 nt, Artificial Sequence
  Description of Artificial Sequence: Synthetic oligonucleotide
  Sense strand starting at position 3419 of SEQ ID NO: 1888622
ugauacaggugaucuguga

SEQ ID NO: 2546043 - RNA, 19 nt, Artificial Sequence
  Description of Artificial Sequence: Synthetic oligonucleotide
  Antisense strand to SEQ ID NO: 2546042
ucacagaucaccuguauca

SEQ ID NO: 2546044 - RNA, 19 nt, Artificial Sequence
  Description of Artificial Sequence: Synthetic oligonucleotide
  Sense strand starting at position 2160 of SEQ ID NO: 1888622
cuaguacuucuugggauag

SEQ ID NO: 2546045 - RNA, 19 nt, Artificial Sequence
  Description of Artificial Sequence: Synthetic oligonucleotide
  Antisense strand to SEQ ID NO: 2546044
cuaucccaagaaguacuag

SEQ ID NO: 2546046 - RNA, 19 nt, Artificial Sequence
  Description of Artificial Sequence: Synthetic oligonucleotide
  Sense strand starting at position 3764 of SEQ ID NO: 1888622
ggcacaaguuaacuuauga

SEQ ID NO: 2546047 - RNA, 19 nt, Artificial Sequence
  Description of Artificial Sequence: Synthetic oligonucleotide
  Antisense strand to SEQ ID NO: 2546046
ucauaaguuaacuugugcc

SEQ ID NO: 2546048 - RNA, 19 nt, Artificial Sequence
  Description of Artificial Sequence: Synthetic oligonucleotide
  Sense strand starting at position 3647 of SEQ ID NO: 1888622
cuucuugggaguuauugua

SEQ ID NO: 2546049 - RNA, 19 nt, Artificial Sequence
  Description of Artificial Sequence: Synthetic oligonucleotide
  Antisense strand to SEQ ID NO: 2546048
uacaauaacucccaagaag

SEQ ID NO: 2546050 - RNA, 19 nt, Artificial Sequence
  Description of Artificial Sequence: Synthetic oligonucleotide
  Sense strand starting at position 877 of SEQ ID NO: 1888622
cucuguagucaccaauauu

SEQ ID NO: 2546051 - RNA, 19 nt, Artificial Sequence
  Description of Artificial Sequence: Synthetic oligonucleotide
  Antisense strand to SEQ ID NO: 2546050
aauauuggugacuacagag

SEQ ID NO: 2546052 - RNA, 19 nt, Artificial Sequence
  Description of Artificial Sequence: Synthetic oligonucleotide
  Sense strand starting at position 3223 of SEQ ID NO: 1888622
gggaguaauugauucugug

SEQ ID NO: 2546053 - RNA, 19 nt, Artificial Sequence
  Description of Artificial Sequence: Synthetic oligonucleotide
  Antisense strand to SEQ ID NO: 2546052
cacagaaucaauuacuccc

SEQ ID NO: 2546054 - RNA, 19 nt, Artificial Sequence
  Description of Artificial Sequence: Synthetic oligonucleotide
  Sense strand starting at position 1821 of SEQ ID NO: 1888622
ccuagaaguuaguuauuag

SEQ ID NO: 2546055 - RNA, 19 nt, Artificial Sequence
  Description of Artificial Sequence: Synthetic oligonucleotide
  Antisense strand to SEQ ID NO: 2546054
cuaauaacuaacuucuagg

SEQ ID NO: 2546056 - RNA, 19 nt, Artificial Sequence
  Description of Artificial Sequence: Synthetic oligonucleotide
  Sense strand starting at position 2622 of SEQ ID NO: 1888622
gccauacuuccugaguaca

SEQ ID NO: 2546057 - RNA, 19 nt, Artificial Sequence
  Description of Artificial Sequence: Synthetic oligonucleotide
  Antisense strand to SEQ ID NO: 2546056
uguacucaggaaguauggc

SEQ ID NO: 2546058 - RNA, 19 nt, Artificial Sequence
  Description of Artificial Sequence: Synthetic oligonucleotide
  Sense strand starting at position 2081 of SEQ ID NO: 1888622
acagauagccugcaucgaa

SEQ ID NO: 2546059 - RNA, 19 nt, Artificial Sequence
  Description of Artificial Sequence: Synthetic oligonucleotide
  Antisense strand to SEQ ID NO: 2546058
uucgaugcaggcuaucugu

SEQ ID NO: 2546060 - RNA, 19 nt, Artificial Sequence
  Description of Artificial Sequence: Synthetic oligonucleotide
  Sense strand starting at position 3041 of SEQ ID NO: 1888622
uuaguaucgauugaggguu

SEQ ID NO: 2546061 - RNA, 19 nt, Artificial Sequence
  Description of Artificial Sequence: Synthetic oligonucleotide
  Antisense strand to SEQ ID NO: 2546060
aacccucaaucgauacuaa

SEQ ID NO: 2546062 - RNA, 19 nt, Artificial Sequence
  Description of Artificial Sequence: Synthetic oligonucleotide
  Sense strand starting at position 3756 of SEQ ID NO: 1888622
uuagucuaggcacaaguua

SEQ ID NO: 2546063 - RNA, 19 nt, Artificial Sequence
  Description of Artificial Sequence: Synthetic oligonucleotide
  Antisense strand to SEQ ID NO: 2546062
uaacuugugccuagacuaa

SEQ ID NO: 2546064 - RNA, 19 nt, Artificial Sequence
  Description of Artificial Sequence: Synthetic oligonucleotide
  Sense strand starting at position 1951 of SEQ ID NO: 1888622
acaguuaucugacugguga

SEQ ID NO: 2546065 - RNA, 19 nt, Artificial Sequence
  Description of Artificial Sequence: Synthetic oligonucleotide
  Antisense strand to SEQ ID NO: 2546064
ucaccagucagauaacugu

SEQ ID NO: 2546066 - RNA, 19 nt, Artificial Sequence
  Description of Artificial Sequence: Synthetic oligonucleotide
  Sense strand starting at position 60 of SEQ ID NO: 1888622
acaaauacucuacgagcua

SEQ ID NO: 2546067 - RNA, 19 nt, Artificial Sequence
  Description of Artificial Sequence: Synthetic oligonucleotide
  Antisense strand to SEQ ID NO: 2546066
uagcucguagaguauuugu

SEQ ID NO: 2546068 - RNA, 19 nt, Artificial Sequence
  Description of Artificial Sequence: Synthetic oligonucleotide
  Sense strand starting at position 1953 of SEQ ID NO: 1888622
aguuaucugacuggugaca

SEQ ID NO: 2546069 - RNA, 19 nt, Artificial Sequence
  Description of Artificial Sequence: Synthetic oligonucleotide
  Antisense strand to SEQ ID NO: 2546068
ugucaccagucagauaacu

SEQ ID NO: 2546070 - RNA, 19 nt, Artificial Sequence
  Description of Artificial Sequence: Synthetic oligonucleotide
  Sense strand starting at position 2930 of SEQ ID NO: 1888622
ccagaacucccugguccua

SEQ ID NO: 2546071 - RNA, 19 nt, Artificial Sequence
  Description of Artificial Sequence: Synthetic oligonucleotide
  Antisense strand to SEQ ID NO: 2546070
uaggaccagggaguucugg

SEQ ID NO: 2546072 - RNA, 19 nt, Artificial Sequence
  Description of Artificial Sequence: Synthetic oligonucleotide
  Sense strand starting at position 3532 of SEQ ID NO: 1888623
gaucaucugcaacaaguga

SEQ ID NO: 2546073 - RNA, 19 nt, Artificial Sequence
  Description of Artificial Sequence: Synthetic oligonucleotide
  Antisense strand to SEQ ID NO: 2546072
ucacuuguugcagaugauc

SEQ ID NO: 2546074 - RNA, 19 nt, Artificial Sequence
  Description of Artificial Sequence: Synthetic oligonucleotide
  Sense strand starting at position 449 of SEQ ID NO: 1888623
cagcgugugcaaucuuaug

SEQ ID NO: 2546075 - RNA, 19 nt, Artificial Sequence
  Description of Artificial Sequence: Synthetic oligonucleotide
  Antisense strand to SEQ ID NO: 2546074
cauaagauugcacacgcug

SEQ ID NO: 2546076 - RNA, 19 nt, Artificial Sequence
  Description of Artificial Sequence: Synthetic oligonucleotide
  Sense strand starting at position 3307 of SEQ ID NO: 1888623
guuaaagcuauaggaaaga

SEQ ID NO: 2546077 - RNA, 19 nt, Artificial Sequence
  Description of Artificial Sequence: Synthetic oligonucleotide
  Antisense strand to SEQ ID NO: 2546076
ucuuuccuauagcuuuaac

SEQ ID NO: 2546078 - RNA, 19 nt, Artificial Sequence
  Description of Artificial Sequence: Synthetic oligonucleotide
  Sense strand starting at position 3232 of SEQ ID NO: 1888623
ccagaucagauugguauag

SEQ ID NO: 2546079 - RNA, 19 nt, Artificial Sequence
  Description of Artificial Sequence: Synthetic oligonucleotide
  Antisense strand to SEQ ID NO: 2546078
cuauaccaaucugaucugg

SEQ ID NO: 2546080 - RNA, 19 nt, Artificial Sequence
  Description of Artificial Sequence: Synthetic oligonucleotide
  Sense strand starting at position 3340 of SEQ ID NO: 1888623
gagcaaaguccuggaagaa

SEQ ID NO: 2546081 - RNA, 19 nt, Artificial Sequence
  Description of Artificial Sequence: Synthetic oligonucleotide
  Antisense strand to SEQ ID NO: 2546080
uucuuccaggacuuugcuc

SEQ ID NO: 2546082 - RNA, 19 nt, Artificial Sequence
  Description of Artificial Sequence: Synthetic oligonucleotide
  Sense strand starting at position 3457 of SEQ ID NO: 1888623
guacaacuguaauuggaaa

SEQ ID NO: 2546083 - RNA, 19 nt, Artificial Sequence
  Description of Artificial Sequence: Synthetic oligonucleotide
  Antisense strand to SEQ ID NO: 2546082
uuuccaauuacaguuguac

SEQ ID NO: 2546084 - RNA, 19 nt, Artificial Sequence
  Description of Artificial Sequence: Synthetic oligonucleotide
  Sense strand starting at position 382 of SEQ ID NO: 1888623
ugaaguugggcuuacagau

SEQ ID NO: 2546085 - RNA, 19 nt, Artificial Sequence
  Description of Artificial Sequence: Synthetic oligonucleotide
  Antisense strand to SEQ ID NO: 2546084
aucuguaagcccaacuuca

SEQ ID NO: 2546086 - RNA, 19 nt, Artificial Sequence
  Description of Artificial Sequence: Synthetic oligonucleotide
  Sense strand starting at position 3295 of SEQ ID NO: 1888623
agcagauacuagguuaaag

SEQ ID NO: 2546087 - RNA, 19 nt, Artificial Sequence
  Description of Artificial Sequence: Synthetic oligonucleotide
  Antisense strand to SEQ ID NO: 2546086
cuuuaaccuaguaucugcu

SEQ ID NO: 2546088 - RNA, 19 nt, Artificial Sequence
  Description of Artificial Sequence: Synthetic oligonucleotide
  Sense strand starting at position 2675 of SEQ ID NO: 1888623
cugguuauccaugaccuua

SEQ ID NO: 2546089 - RNA, 19 nt, Artificial Sequence
  Description of Artificial Sequence: Synthetic oligonucleotide
  Antisense strand to SEQ ID NO: 2546088
uaaggucauggauaaccag

SEQ ID NO: 2546090 - RNA, 19 nt, Artificial Sequence
  Description of Artificial Sequence: Synthetic oligonucleotide
  Sense strand starting at position 3231 of SEQ ID NO: 1888623
uccagaucagauugguaua

SEQ ID NO: 2546091 - RNA, 19 nt, Artificial Sequence
  Description of Artificial Sequence: Synthetic oligonucleotide
  Antisense strand to SEQ ID NO: 2546090
uauaccaaucugaucugga

SEQ ID NO: 2546092 - RNA, 19 nt, Artificial Sequence
  Description of Artificial Sequence: Synthetic oligonucleotide
  Sense strand starting at position 3622 of SEQ ID NO: 1888623
agugcuguauuugcaagaa

SEQ ID NO: 2546093 - RNA, 19 nt, Artificial Sequence
  Description of Artificial Sequence: Synthetic oligonucleotide
  Antisense strand to SEQ ID NO: 2546092
uucuugcaaauacagcacu

SEQ ID NO: 2546094 - RNA, 19 nt, Artificial Sequence
  Description of Artificial Sequence: Synthetic oligonucleotide
  Sense strand starting at position 420 of SEQ ID NO: 1888623
ggguaaaucuggucaagac

SEQ ID NO: 2546095 - RNA, 19 nt, Artificial Sequence
  Description of Artificial Sequence: Synthetic oligonucleotide
  Antisense strand to SEQ ID NO: 2546094
gucuugaccagauuuaccc

SEQ ID NO: 2546096 - RNA, 19 nt, Artificial Sequence
  Description of Artificial Sequence: Synthetic oligonucleotide
  Sense strand starting at position 2677 of SEQ ID NO: 1888623
gguuauccaugaccuuaaa

SEQ ID NO: 2546097 - RNA, 19 nt, Artificial Sequence
  Description of Artificial Sequence: Synthetic oligonucleotide
  Antisense strand to SEQ ID NO: 2546096
uuuaaggucauggauaacc

SEQ ID NO: 2546098 - RNA, 19 nt, Artificial Sequence
  Description of Artificial Sequence: Synthetic oligonucleotide
  Sense strand starting at position 1878 of SEQ ID NO: 1888623
aguagaaaccacuguuaau

SEQ ID NO: 2546099 - RNA, 19 nt, Artificial Sequence
  Description of Artificial Sequence: Synthetic oligonucleotide
  Antisense strand to SEQ ID NO: 2546098
auuaacagugguuucuacu

SEQ ID NO: 2546100 - RNA, 19 nt, Artificial Sequence
  Description of Artificial Sequence: Synthetic oligonucleotide
  Sense strand starting at position 2589 of SEQ ID NO: 1888623
uugagaacuccauguaacu

SEQ ID NO: 2546101 - RNA, 19 nt, Artificial Sequence
  Description of Artificial Sequence: Synthetic oligonucleotide
  Antisense strand to SEQ ID NO: 2546100
aguuacauggaguucucaa

SEQ ID NO: 2546102 - RNA, 19 nt, Artificial Sequence
  Description of Artificial Sequence: Synthetic oligonucleotide
  Sense strand starting at position 2718 of SEQ ID NO: 1888623
cuguuaggaagucagaguu

SEQ ID NO: 2546103 - RNA, 19 nt, Artificial Sequence
  Description of Artificial Sequence: Synthetic oligonucleotide
  Antisense strand to SEQ ID NO: 2546102
aacucugacuuccuaacag

SEQ ID NO: 2546104 - RNA, 19 nt, Artificial Sequence
  Description of Artificial Sequence: Synthetic oligonucleotide
  Sense strand starting at position 3233 of SEQ ID NO: 1888623
cagaucagauugguauagu

SEQ ID NO: 2546105 - RNA, 19 nt, Artificial Sequence
  Description of Artificial Sequence: Synthetic oligonucleotide
  Antisense strand to SEQ ID NO: 2546104
acuauaccaaucugaucug

SEQ ID NO: 2546106 - RNA, 19 nt, Artificial Sequence
  Description of Artificial Sequence: Synthetic oligonucleotide
  Sense strand starting at position 3264 of SEQ ID NO: 1888623
cagaccugaccauguuuga

SEQ ID NO: 2546107 - RNA, 19 nt, Artificial Sequence
  Description of Artificial Sequence: Synthetic oligonucleotide
  Antisense strand to SEQ ID NO: 2546106
ucaaacauggucaggucug

SEQ ID NO: 2546108 - RNA, 19 nt, Artificial Sequence
  Description of Artificial Sequence: Synthetic oligonucleotide
  Sense strand starting at position 3396 of SEQ ID NO: 1888623
gguagcagacacugaauau

SEQ ID NO: 2546109 - RNA, 19 nt, Artificial Sequence
  Description of Artificial Sequence: Synthetic oligonucleotide
  Antisense strand to SEQ ID NO: 2546108
auauucagugucugcuacc

SEQ ID NO: 2546110 - RNA, 19 nt, Artificial Sequence
  Description of Artificial Sequence: Synthetic oligonucleotide
  Sense strand starting at position 3528 of SEQ ID NO: 1888623
guaagaucaucugcaacaa

SEQ ID NO: 2546111 - RNA, 19 nt, Artificial Sequence
  Description of Artificial Sequence: Synthetic oligonucleotide
  Antisense strand to SEQ ID NO: 2546110
uuguugcagaugaucuuac

SEQ ID NO: 2546112 - RNA, 19 nt, Artificial Sequence
  Description of Artificial Sequence: Synthetic oligonucleotide
  Sense strand starting at position 3157 of SEQ ID NO: 1888623
ggcccagaauauucuuuaa

SEQ ID NO: 2546113 - RNA, 19 nt, Artificial Sequence
  Description of Artificial Sequence: Synthetic oligonucleotide
  Antisense strand to SEQ ID NO: 2546112
uuaaagaauauucugggcc

SEQ ID NO: 2546114 - RNA, 19 nt, Artificial Sequence
  Description of Artificial Sequence: Synthetic oligonucleotide
  Sense strand starting at position 960 of SEQ ID NO: 1888623
ugugguuugagcuaauaaa

SEQ ID NO: 2546115 - RNA, 19 nt, Artificial Sequence
  Description of Artificial Sequence: Synthetic oligonucleotide
  Antisense strand to SEQ ID NO: 2546114
uuuauuagcucaaaccaca

SEQ ID NO: 2546116 - RNA, 19 nt, Artificial Sequence
  Description of Artificial Sequence: Synthetic oligonucleotide
  Sense strand starting at position 2387 of SEQ ID NO: 1888623
ccaggauacuugucuauau

SEQ ID NO: 2546117 - RNA, 19 nt, Artificial Sequence
  Description of Artificial Sequence: Synthetic oligonucleotide
  Antisense strand to SEQ ID NO: 2546116
auauagacaaguauccugg

SEQ ID NO: 2546118 - RNA, 19 nt, Artificial Sequence
  Description of Artificial Sequence: Synthetic oligonucleotide
  Sense strand starting at position 2724 of SEQ ID NO: 1888623
ggaagucagaguugaccuu

SEQ ID NO: 2546119 - RNA, 19 nt, Artificial Sequence
  Description of Artificial Sequence: Synthetic oligonucleotide
  Antisense strand to SEQ ID NO: 2546118
aaggucaacucugacuucc

SEQ ID NO: 2546120 - RNA, 19 nt, Artificial Sequence
  Description of Artificial Sequence: Synthetic oligonucleotide
  Sense strand starting at position 3871 of SEQ ID NO: 1888623
caauacuauguaugacgau

SEQ ID NO: 2546121 - RNA, 19 nt, Artificial Sequence
  Description of Artificial Sequence: Synthetic oligonucleotide
  Antisense strand to SEQ ID NO: 2546120
aucgucauacauaguauug

SEQ ID NO: 2546122 - RNA, 19 nt, Artificial Sequence
  Description of Artificial Sequence: Synthetic oligonucleotide
  Sense strand starting at position 379 of SEQ ID NO: 1888623
auaugaaguugggcuuaca

SEQ ID NO: 2546123 - RNA, 19 nt, Artificial Sequence
  Description of Artificial Sequence: Synthetic oligonucleotide
  Antisense strand to SEQ ID NO: 2546122
uguaagcccaacuucauau

SEQ ID NO: 2546124 - RNA, 19 nt, Artificial Sequence
  Description of Artificial Sequence: Synthetic oligonucleotide
  Sense strand starting at position 1249 of SEQ ID NO: 1888623
gguauuugucaagguugcu

SEQ ID NO: 2546125 - RNA, 19 nt, Artificial Sequence
  Description of Artificial Sequence: Synthetic oligonucleotide
  Antisense strand to SEQ ID NO: 2546124
agcaaccuugacaaauacc

SEQ ID NO: 2546126 - RNA, 19 nt, Artificial Sequence
  Description of Artificial Sequence: Synthetic oligonucleotide
  Sense strand starting at position 564 of SEQ ID NO: 1888623
accaaaugugacugacugu

SEQ ID NO: 2546127 - RNA, 19 nt, Artificial Sequence
  Description of Artificial Sequence: Synthetic oligonucleotide
  Antisense strand to SEQ ID NO: 2546126
acagucagucacauuuggu

SEQ ID NO: 2546128 - RNA, 19 nt, Artificial Sequence
  Description of Artificial Sequence: Synthetic oligonucleotide
  Sense strand starting at position 1912 of SEQ ID NO: 1888623
ggaguaaugucuucucaag

SEQ ID NO: 2546129 - RNA, 19 nt, Artificial Sequence
  Description of Artificial Sequence: Synthetic oligonucleotide
  Antisense strand to SEQ ID NO: 2546128
cuugagaagacauuacucc

SEQ ID NO: 2546130 - RNA, 19 nt, Artificial Sequence
  Description of Artificial Sequence: Synthetic oligonucleotide
  Sense strand starting at position 330 of SEQ ID NO: 1888623
uccuguaaauaucuaaagu

SEQ ID NO: 2546131 - RNA, 19 nt, Artificial Sequence
  Description of Artificial Sequence: Synthetic oligonucleotide
  Antisense strand to SEQ ID NO: 2546130
acuuuagauauuuacagga

SEQ ID NO: 2546132 - RNA, 19 nt, Artificial Sequence
  Description of Artificial Sequence: Synthetic oligonucleotide
  Sense strand starting at position 598 of SEQ ID NO: 1888623
ucauccuagcagggugaaa

SEQ ID NO: 2546133 - RNA, 19 nt, Artificial Sequence
  Description of Artificial Sequence: Synthetic oligonucleotide
  Antisense strand to SEQ ID NO: 2546132
uuucacccugcuaggauga

SEQ ID NO: 2546134 - RNA, 19 nt, Artificial Sequence
  Description of Artificial Sequence: Synthetic oligonucleotide
  Sense strand starting at position 3799 of SEQ ID NO: 1888623
aguuaagcuuuacuacaga

SEQ ID NO: 2546135 - RNA, 19 nt, Artificial Sequence
  Description of Artificial Sequence: Synthetic oligonucleotide
  Antisense strand to SEQ ID NO: 2546134
ucuguaguaaagcuuaacu

SEQ ID NO: 2546136 - RNA, 19 nt, Artificial Sequence
  Description of Artificial Sequence: Synthetic oligonucleotide
  Sense strand starting at position 2752 of SEQ ID NO: 1888623
aguuccaguggucaaagua

SEQ ID NO: 2546137 - RNA, 19 nt, Artificial Sequence
  Description of Artificial Sequence: Synthetic oligonucleotide
  Antisense strand to SEQ ID NO: 2546136
uacuuugaccacuggaacu

SEQ ID NO: 2546138 - RNA, 19 nt, Artificial Sequence
  Description of Artificial Sequence: Synthetic oligonucleotide
  Sense strand starting at position 1852 of SEQ ID NO: 1888623
ccuuuauagcuauaguauc

SEQ ID NO: 2546139 - RNA, 19 nt, Artificial Sequence
  Description of Artificial Sequence: Synthetic oligonucleotide
  Antisense strand to SEQ ID NO: 2546138
gauacuauagcuauaaagg

SEQ ID NO: 2546140 - RNA, 19 nt, Artificial Sequence
  Description of Artificial Sequence: Synthetic oligonucleotide
  Sense strand starting at position 1781 of SEQ ID NO: 1888623
aaauuaugguuggcaccua

SEQ ID NO: 2546141 - RNA, 19 nt, Artificial Sequence
  Description of Artificial Sequence: Synthetic oligonucleotide
  Antisense strand to SEQ ID NO: 2546140
uaggugccaaccauaauuu

SEQ ID NO: 2546142 - RNA, 19 nt, Artificial Sequence
  Description of Artificial Sequence: Synthetic oligonucleotide
  Sense strand starting at position 1131 of SEQ ID NO: 1888623
gaugacacucucgaguguu

SEQ ID NO: 2546143 - RNA, 19 nt, Artificial Sequence
  Description of Artificial Sequence: Synthetic oligonucleotide
  Antisense strand to SEQ ID NO: 2546142
aacacucgagagugucauc

SEQ ID NO: 2546144 - RNA, 19 nt, Artificial Sequence
  Description of Artificial Sequence: Synthetic oligonucleotide
  Sense strand starting at position 571 of SEQ ID NO: 1888623
gugacugacuguuucuaaa

SEQ ID NO: 2546145 - RNA, 19 nt, Artificial Sequence
  Description of Artificial Sequence: Synthetic oligonucleotide
  Antisense strand to SEQ ID NO: 2546144
uuuagaaacagucagucac

SEQ ID NO: 2546146 - RNA, 19 nt, Artificial Sequence
  Description of Artificial Sequence: Synthetic oligonucleotide
  Sense strand starting at position 244 of SEQ ID NO: 1888623
uggauuucuuaagaaugca

SEQ ID NO: 2546147 - RNA, 19 nt, Artificial Sequence
  Description of Artificial Sequence: Synthetic oligonucleotide
  Antisense strand to SEQ ID NO: 2546146
ugcauucuuaagaaaucca

SEQ ID NO: 2546148 - RNA, 19 nt, Artificial Sequence
  Description of Artificial Sequence: Synthetic oligonucleotide
  Sense strand starting at position 2311 of SEQ ID NO: 1888623
ccugauaucuguguccaaa

SEQ ID NO: 2546149 - RNA, 19 nt, Artificial Sequence
  Description of Artificial Sequence: Synthetic oligonucleotide
  Antisense strand to SEQ ID NO: 2546148
uuuggacacagauaucagg

SEQ ID NO: 2546150 - RNA, 19 nt, Artificial Sequence
  Description of Artificial Sequence: Synthetic oligonucleotide
  Sense strand starting at position 2705 of SEQ ID NO: 1888623
auaguagauuaagcuguua

SEQ ID NO: 2546151 - RNA, 19 nt, Artificial Sequence
  Description of Artificial Sequence: Synthetic oligonucleotide
  Antisense strand to SEQ ID NO: 2546150
uaacagcuuaaucuacuau

SEQ ID NO: 2546152 - RNA, 19 nt, Artificial Sequence
  Description of Artificial Sequence: Synthetic oligonucleotide
  Sense strand starting at position 1791 of SEQ ID NO: 1888624
ucagaagauuagccaauca

SEQ ID NO: 2546153 - RNA, 19 nt, Artificial Sequence
  Description of Artificial Sequence: Synthetic oligonucleotide
  Antisense strand to SEQ ID NO: 2546152
ugauuggcuaaucuucuga

SEQ ID NO: 2546154 - RNA, 19 nt, Artificial Sequence
  Description of Artificial Sequence: Synthetic oligonucleotide
  Sense strand starting at position 2379 of SEQ ID NO: 1888624
augagaaucugcccuagga

SEQ ID NO: 2546155 - RNA, 19 nt, Artificial Sequence
  Description of Artificial Sequence: Synthetic oligonucleotide
  Antisense strand to SEQ ID NO: 2546154
uccuagggcagauucucau

SEQ ID NO: 2546156 - RNA, 19 nt, Artificial Sequence
  Description of Artificial Sequence: Synthetic oligonucleotide
  Sense strand starting at position 203 of SEQ ID NO: 1888624
ggucauacaagcugaagaa

SEQ ID NO: 2546157 - RNA, 19 nt, Artificial Sequence
  Description of Artificial Sequence: Synthetic oligonucleotide
  Antisense strand to SEQ ID NO: 2546156
uucuucagcuuguaugacc

SEQ ID NO: 2546158 - RNA, 19 nt, Artificial Sequence
  Description of Artificial Sequence: Synthetic oligonucleotide
  Sense strand starting at position 1867 of SEQ ID NO: 1888624
aagacucagugcuuagaga

SEQ ID NO: 2546159 - RNA, 19 nt, Artificial Sequence
  Description of Artificial Sequence: Synthetic oligonucleotide
  Antisense strand to SEQ ID NO: 2546158
ucucuaagcacugagucuu

SEQ ID NO: 2546160 - RNA, 19 nt, Artificial Sequence
  Description of Artificial Sequence: Synthetic oligonucleotide
  Sense strand starting at position 2368 of SEQ ID NO: 1888624
aagccaggccaaugagaau

SEQ ID NO: 2546161 - RNA, 19 nt, Artificial Sequence
  Description of Artificial Sequence: Synthetic oligonucleotide
  Antisense strand to SEQ ID NO: 2546160
auucucauuggccuggcuu

SEQ ID NO: 2546162 - RNA, 19 nt, Artificial Sequence
  Description of Artificial Sequence: Synthetic oligonucleotide
  Sense strand starting at position 1302 of SEQ ID NO: 1888624
agggucaccugaguuaaau

SEQ ID NO: 2546163 - RNA, 19 nt, Artificial Sequence
  Description of Artificial Sequence: Synthetic oligonucleotide
  Antisense strand to SEQ ID NO: 2546162
auuuaacucaggugacccu

SEQ ID NO: 2546164 - RNA, 19 nt, Artificial Sequence
  Description of Artificial Sequence: Synthetic oligonucleotide
  Sense strand starting at position 1061 of SEQ ID NO: 1888624
agucuagacucagcaauag

SEQ ID NO: 2546165 - RNA, 19 nt, Artificial Sequence
  Description of Artificial Sequence: Synthetic oligonucleotide
  Antisense strand to SEQ ID NO: 2546164
cuauugcugagucuagacu

SEQ ID NO: 2546166 - RNA, 19 nt, Artificial Sequence
  Description of Artificial Sequence: Synthetic oligonucleotide
  Sense strand starting at position 194 of SEQ ID NO: 1888624
uugcucuuaggucauacaa

SEQ ID NO: 2546167 - RNA, 19 nt, Artificial Sequence
  Description of Artificial Sequence: Synthetic oligonucleotide
  Antisense strand to SEQ ID NO: 2546166
uuguaugaccuaagagcaa

SEQ ID NO: 2546168 - RNA, 19 nt, Artificial Sequence
  Description of Artificial Sequence: Synthetic oligonucleotide
  Sense strand starting at position 422 of SEQ ID NO: 1888624
ccacaaguuugccuaagga

SEQ ID NO: 2546169 - RNA, 19 nt, Artificial Sequence
  Description of Artificial Sequence: Synthetic oligonucleotide
  Antisense strand to SEQ ID NO: 2546168
uccuuaggcaaacuugugg

SEQ ID NO: 2546170 - RNA, 19 nt, Artificial Sequence
  Description of Artificial Sequence: Synthetic oligonucleotide
  Sense strand starting at position 1312 of SEQ ID NO: 1888624
gaguuaaaugcucagccau

SEQ ID NO: 2546171 - RNA, 19 nt, Artificial Sequence
  Description of Artificial Sequence: Synthetic oligonucleotide
  Antisense strand to SEQ ID NO: 2546170
auggcugagcauuuaacuc

SEQ ID NO: 2546172 - RNA, 19 nt, Artificial Sequence
  Description of Artificial Sequence: Synthetic oligonucleotide
  Sense strand starting at position 502 of SEQ ID NO: 1888624
ggauccugccugugaauag

SEQ ID NO: 2546173 - RNA, 19 nt, Artificial Sequence
  Description of Artificial Sequence: Synthetic oligonucleotide
  Antisense strand to SEQ ID NO: 2546172
cuauucacaggcaggaucc

SEQ ID NO: 2546174 - RNA, 19 nt, Artificial Sequence
  Description of Artificial Sequence: Synthetic oligonucleotide
  Sense strand starting at position 159 of SEQ ID NO: 1888624
cguguaauccuggauggug

SEQ ID NO: 2546175 - RNA, 19 nt, Artificial Sequence
  Description of Artificial Sequence: Synthetic oligonucleotide
  Antisense strand to SEQ ID NO: 2546174
caccauccaggauuacacg

SEQ ID NO: 2546176 - RNA, 19 nt, Artificial Sequence
  Description of Artificial Sequence: Synthetic oligonucleotide
  Sense strand starting at position 2383 of SEQ ID NO: 1888624
gaaucugcccuaggauguu

SEQ ID NO: 2546177 - RNA, 19 nt, Artificial Sequence
  Description of Artificial Sequence: Synthetic oligonucleotide
  Antisense strand to SEQ ID NO: 2546176
aacauccuagggcagauuc

SEQ ID NO: 2546178 - RNA, 19 nt, Artificial Sequence
  Description of Artificial Sequence: Synthetic oligonucleotide
  Sense strand starting at position 2651 of SEQ ID NO: 1888624
ccgagacauugucuuacuc

SEQ ID NO: 2546179 - RNA, 19 nt, Artificial Sequence
  Description of Artificial Sequence: Synthetic oligonucleotide
  Antisense strand to SEQ ID NO: 2546178
gaguaagacaaugucucgg

SEQ ID NO: 2546180 - RNA, 19 nt, Artificial Sequence
  Description of Artificial Sequence: Synthetic oligonucleotide
  Sense strand starting at position 500 of SEQ ID NO: 1888624
ugggauccugccugugaau

SEQ ID NO: 2546181 - RNA, 19 nt, Artificial Sequence
  Description of Artificial Sequence: Synthetic oligonucleotide
  Antisense strand to SEQ ID NO: 2546180
auucacaggcaggauccca

SEQ ID NO: 2546182 - RNA, 19 nt, Artificial Sequence
  Description of Artificial Sequence: Synthetic oligonucleotide
  Sense strand starting at position 378 of SEQ ID NO: 1888624
gugcuaagauuggcaucaa

SEQ ID NO: 2546183 - RNA, 19 nt, Artificial Sequence
  Description of Artificial Sequence: Synthetic oligonucleotide
  Antisense strand to SEQ ID NO: 2546182
uugaugccaaucuuagcac

SEQ ID NO: 2546184 - RNA, 19 nt, Artificial Sequence
  Description of Artificial Sequence: Synthetic oligonucleotide
  Sense strand starting at position 2949 of SEQ ID NO: 1888624
cucaaaguaucgcuacaca

SEQ ID NO: 2546185 - RNA, 19 nt, Artificial Sequence
  Description of Artificial Sequence: Synthetic oligonucleotide
  Antisense strand to SEQ ID NO: 2546184
uguguagcgauacuuugag

SEQ ID NO: 2546186 - RNA, 19 nt, Artificial Sequence
  Description of Artificial Sequence: Synthetic oligonucleotide
  Sense strand starting at position 1311 of SEQ ID NO: 1888624
ugaguuaaaugcucagcca

SEQ ID NO: 2546187 - RNA, 19 nt, Artificial Sequence
  Description of Artificial Sequence: Synthetic oligonucleotide
  Antisense strand to SEQ ID NO: 2546186
uggcugagcauuuaacuca

SEQ ID NO: 2546188 - RNA, 19 nt, Artificial Sequence
  Description of Artificial Sequence: Synthetic oligonucleotide
  Sense strand starting at position 499 of SEQ ID NO: 1888624
gugggauccugccugugaa

SEQ ID NO: 2546189 - RNA, 19 nt, Artificial Sequence
  Description of Artificial Sequence: Synthetic oligonucleotide
  Antisense strand to SEQ ID NO: 2546188
uucacaggcaggaucccac

SEQ ID NO: 2546190 - RNA, 19 nt, Artificial Sequence
  Description of Artificial Sequence: Synthetic oligonucleotide
  Sense strand starting at position 1174 of SEQ ID NO: 1888624
gaaggauguagcgguauuc

SEQ ID NO: 2546191 - RNA, 19 nt, Artificial Sequence
  Description of Artificial Sequence: Synthetic oligonucleotide
  Antisense strand to SEQ ID NO: 2546190
gaauaccgcuacauccuuc

SEQ ID NO: 2546192 - RNA, 19 nt, Artificial Sequence
  Description of Artificial Sequence: Synthetic oligonucleotide
  Sense strand starting at position 2330 of SEQ ID NO: 1888624
gaccaauagcuguguccca

SEQ ID NO: 2546193 - RNA, 19 nt, Artificial Sequence
  Description of Artificial Sequence: Synthetic oligonucleotide
  Antisense strand to SEQ ID NO: 2546192
ugggacacagcuauugguc

SEQ ID NO: 2546194 - RNA, 19 nt, Artificial Sequence
  Description of Artificial Sequence: Synthetic oligonucleotide
  Sense strand starting at position 1827 of SEQ ID NO: 1888624
aauuacugcgauugguuua

SEQ ID NO: 2546195 - RNA, 19 nt, Artificial Sequence
  Description of Artificial Sequence: Synthetic oligonucleotide
  Antisense strand to SEQ ID NO: 2546194
uaaaccaaucgcaguaauu

SEQ ID NO: 2546196 - RNA, 19 nt, Artificial Sequence
  Description of Artificial Sequence: Synthetic oligonucleotide
  Sense strand starting at position 1314 of SEQ ID NO: 1888624
guuaaaugcucagccauac

SEQ ID NO: 2546197 - RNA, 19 nt, Artificial Sequence
  Description of Artificial Sequence: Synthetic oligonucleotide
  Antisense strand to SEQ ID NO: 2546196
guauggcugagcauuuaac

SEQ ID NO: 2546198 - RNA, 19 nt, Artificial Sequence
  Description of Artificial Sequence: Synthetic oligonucleotide
  Sense strand starting at position 151 of SEQ ID NO: 1888624
uagguucucguguaauccu

SEQ ID NO: 2546199 - RNA, 19 nt, Artificial Sequence
  Description of Artificial Sequence: Synthetic oligonucleotide
  Antisense strand to SEQ ID NO: 2546198
aggauuacacgagaaccua

SEQ ID NO: 2546200 - RNA, 19 nt, Artificial Sequence
  Description of Artificial Sequence: Synthetic oligonucleotide
  Sense strand starting at position 235 of SEQ ID NO: 1888624
guguuagcaucuguaacau

SEQ ID NO: 2546201 - RNA, 19 nt, Artificial Sequence
  Description of Artificial Sequence: Synthetic oligonucleotide
  Antisense strand to SEQ ID NO: 2546200
auguuacagaugcuaacac

SEQ ID NO: 2546202 - RNA, 19 nt, Artificial Sequence
  Description of Artificial Sequence: Synthetic oligonucleotide
  Sense strand starting at position 158 of SEQ ID NO: 1888624
ucguguaauccuggauggu

SEQ ID NO: 2546203 - RNA, 19 nt, Artificial Sequence
  Description of Artificial Sequence: Synthetic oligonucleotide
  Antisense strand to SEQ ID NO: 2546202
accauccaggauuacacga

SEQ ID NO: 2546204 - RNA, 19 nt, Artificial Sequence
  Description of Artificial Sequence: Synthetic oligonucleotide
  Sense strand starting at position 234 of SEQ ID NO: 1888624
uguguuagcaucuguaaca

SEQ ID NO: 2546205 - RNA, 19 nt, Artificial Sequence
  Description of Artificial Sequence: Synthetic oligonucleotide
  Antisense strand to SEQ ID NO: 2546204
uguuacagaugcuaacaca

SEQ ID NO: 2546206 - RNA, 19 nt, Artificial Sequence
  Description of Artificial Sequence: Synthetic oligonucleotide
  Sense strand starting at position 2903 of SEQ ID NO: 1888624
guauuacaagcgugaguca

SEQ ID NO: 2546207 - RNA, 19 nt, Artificial Sequence
  Description of Artificial Sequence: Synthetic oligonucleotide
  Antisense strand to SEQ ID NO: 2546206
ugacucacgcuuguaauac

SEQ ID NO: 2546208 - RNA, 19 nt, Artificial Sequence
  Description of Artificial Sequence: Synthetic oligonucleotide
  Sense strand starting at position 2991 of SEQ ID NO: 1888624
ugggucauuucaugcagag

SEQ ID NO: 2546209 - RNA, 19 nt, Artificial Sequence
  Description of Artificial Sequence: Synthetic oligonucleotide
  Antisense strand to SEQ ID NO: 2546208
cucugcaugaaaugaccca

SEQ ID NO: 2546210 - RNA, 19 nt, Artificial Sequence
  Description of Artificial Sequence: Synthetic oligonucleotide
  Sense strand starting at position 963 of SEQ ID NO: 1888624
gcauaugccugugcuccua

SEQ ID NO: 2546211 - RNA, 19 nt, Artificial Sequence
  Description of Artificial Sequence: Synthetic oligonucleotide
  Antisense strand to SEQ ID NO: 2546210
uaggagcacaggcauaugc

SEQ ID NO: 2546212 - RNA, 19 nt, Artificial Sequence
  Description of Artificial Sequence: Synthetic oligonucleotide
  Sense strand starting at position 379 of SEQ ID NO: 1888624
ugcuaagauuggcaucaau

SEQ ID NO: 2546213 - RNA, 19 nt, Artificial Sequence
  Description of Artificial Sequence: Synthetic oligonucleotide
  Antisense strand to SEQ ID NO: 2546212
auugaugccaaucuuagca

SEQ ID NO: 2546214 - RNA, 19 nt, Artificial Sequence
  Description of Artificial Sequence: Synthetic oligonucleotide
  Sense strand starting at position 1275 of SEQ ID NO: 1888624
ccgucuuucugcucugcua

SEQ ID NO: 2546215 - RNA, 19 nt, Artificial Sequence
  Description of Artificial Sequence: Synthetic oligonucleotide
  Antisense strand to SEQ ID NO: 2546214
uagcagagcagaaagacgg

SEQ ID NO: 2546216 - RNA, 19 nt, Artificial Sequence
  Description of Artificial Sequence: Synthetic oligonucleotide
  Sense strand starting at position 1834 of SEQ ID NO: 1888624
gcgauugguuuacacucaa

SEQ ID NO: 2546217 - RNA, 19 nt, Artificial Sequence
  Description of Artificial Sequence: Synthetic oligonucleotide
  Antisense strand to SEQ ID NO: 2546216
uugaguguaaaccaaucgc

SEQ ID NO: 2546218 - RNA, 19 nt, Artificial Sequence
  Description of Artificial Sequence: Synthetic oligonucleotide
  Sense strand starting at position 1824 of SEQ ID NO: 1888624
ucaaauuacugcgauuggu

SEQ ID NO: 2546219 - RNA, 19 nt, Artificial Sequence
  Description of Artificial Sequence: Synthetic oligonucleotide
  Antisense strand to SEQ ID NO: 2546218
accaaucgcaguaauuuga

SEQ ID NO: 2546220 - RNA, 19 nt, Artificial Sequence
  Description of Artificial Sequence: Synthetic oligonucleotide
  Sense strand starting at position 2947 of SEQ ID NO: 1888624
gacucaaaguaucgcuaca

SEQ ID NO: 2546221 - RNA, 19 nt, Artificial Sequence
  Description of Artificial Sequence: Synthetic oligonucleotide
  Antisense strand to SEQ ID NO: 2546220
uguagcgauacuuugaguc

SEQ ID NO: 2546222 - RNA, 19 nt, Artificial Sequence
  Description of Artificial Sequence: Synthetic oligonucleotide
  Sense strand starting at position 227 of SEQ ID NO: 1888624
ggugaacuguguuagcauc

SEQ ID NO: 2546223 - RNA, 19 nt, Artificial Sequence
  Description of Artificial Sequence: Synthetic oligonucleotide
  Antisense strand to SEQ ID NO: 2546222
gaugcuaacacaguucacc

SEQ ID NO: 2546224 - RNA, 19 nt, Artificial Sequence
  Description of Artificial Sequence: Synthetic oligonucleotide
  Sense strand starting at position 1194 of SEQ ID NO: 1888624
uuguuauccuugcaccuuu

SEQ ID NO: 2546225 - RNA, 19 nt, Artificial Sequence
  Description of Artificial Sequence: Synthetic oligonucleotide
  Antisense strand to SEQ ID NO: 2546224
aaaggugcaaggauaacaa

SEQ ID NO: 2546226 - RNA, 19 nt, Artificial Sequence
  Description of Artificial Sequence: Synthetic oligonucleotide
  Sense strand starting at position 147 of SEQ ID NO: 1888624
ugucuagguucucguguaa

SEQ ID NO: 2546227 - RNA, 19 nt, Artificial Sequence
  Description of Artificial Sequence: Synthetic oligonucleotide
  Antisense strand to SEQ ID NO: 2546226
uuacacgagaaccuagaca

SEQ ID NO: 2546228 - RNA, 19 nt, Artificial Sequence
  Description of Artificial Sequence: Synthetic oligonucleotide
  Sense strand starting at position 1264 of SEQ ID NO: 1888624
guaaguucuugccgucuuu

SEQ ID NO: 2546229 - RNA, 19 nt, Artificial Sequence
  Description of Artificial Sequence: Synthetic oligonucleotide
  Antisense strand to SEQ ID NO: 2546228
aaagacggcaagaacuuac

SEQ ID NO: 2546230 - RNA, 19 nt, Artificial Sequence
  Description of Artificial Sequence: Synthetic oligonucleotide
  Sense strand starting at position 3283 of SEQ ID NO: 1888625
uguugucaccuggaggaaa

SEQ ID NO: 2546231 - RNA, 19 nt, Artificial Sequence
  Description of Artificial Sequence: Synthetic oligonucleotide
  Antisense strand to SEQ ID NO: 2546230
uuuccuccaggugacaaca

SEQ ID NO: 2546232 - RNA, 19 nt, Artificial Sequence
  Description of Artificial Sequence: Synthetic oligonucleotide
  Sense strand starting at position 2764 of SEQ ID NO: 1888625
guaaacuuuggcuaagaau

SEQ ID NO: 2546233 - RNA, 19 nt, Artificial Sequence
  Description of Artificial Sequence: Synthetic oligonucleotide
  Antisense strand to SEQ ID NO: 2546232
auucuuagccaaaguuuac

SEQ ID NO: 2546234 - RNA, 19 nt, Artificial Sequence
  Description of Artificial Sequence: Synthetic oligonucleotide
  Sense strand starting at position 1250 of SEQ ID NO: 1888625
ggagguguuaucuaacuac

SEQ ID NO: 2546235 - RNA, 19 nt, Artificial Sequence
  Description of Artificial Sequence: Synthetic oligonucleotide
  Antisense strand to SEQ ID NO: 2546234
guaguuagauaacaccucc

SEQ ID NO: 2546236 - RNA, 19 nt, Artificial Sequence
  Description of Artificial Sequence: Synthetic oligonucleotide
  Sense strand starting at position 392 of SEQ ID NO: 1888625
cucgaauaccaguauacau

SEQ ID NO: 2546237 - RNA, 19 nt, Artificial Sequence
  Description of Artificial Sequence: Synthetic oligonucleotide
  Antisense strand to SEQ ID NO: 2546236
auguauacugguauucgag

SEQ ID NO: 2546238 - RNA, 19 nt, Artificial Sequence
  Description of Artificial Sequence: Synthetic oligonucleotide
  Sense strand starting at position 713 of SEQ ID NO: 1888625
gaggguaggcacuauuauu

SEQ ID NO: 2546239 - RNA, 19 nt, Artificial Sequence
  Description of Artificial Sequence: Synthetic oligonucleotide
  Antisense strand to SEQ ID NO: 2546238
aauaauagugccuacccuc

SEQ ID NO: 2546240 - RNA, 19 nt, Artificial Sequence
  Description of Artificial Sequence: Synthetic oligonucleotide
  Sense strand starting at position 1189 of SEQ ID NO: 1888625
gcaggaauccuccacaccu

SEQ ID NO: 2546241 - RNA, 19 nt, Artificial Sequence
  Description of Artificial Sequence: Synthetic oligonucleotide
  Antisense strand to SEQ ID NO: 2546240
agguguggaggauuccugc

SEQ ID NO: 2546242 - RNA, 19 nt, Artificial Sequence
  Description of Artificial Sequence: Synthetic oligonucleotide
  Sense strand starting at position 2763 of SEQ ID NO: 1888625
aguaaacuuuggcuaagaa

SEQ ID NO: 2546243 - RNA, 19 nt, Artificial Sequence
  Description of Artificial Sequence: Synthetic oligonucleotide
  Antisense strand to SEQ ID NO: 2546242
uucuuagccaaaguuuacu

SEQ ID NO: 2546244 - RNA, 19 nt, Artificial Sequence
  Description of Artificial Sequence: Synthetic oligonucleotide
  Sense strand starting at position 1685 of SEQ ID NO: 1888625
uaggguagugguuaaacuu

SEQ ID NO: 2546245 - RNA, 19 nt, Artificial Sequence
  Description of Artificial Sequence: Synthetic oligonucleotide
  Antisense strand to SEQ ID NO: 2546244
aaguuuaaccacuacccua

SEQ ID NO: 2546246 - RNA, 19 nt, Artificial Sequence
  Description of Artificial Sequence: Synthetic oligonucleotide
  Sense strand starting at position 813 of SEQ ID NO: 1888625
cugaguuugaucuggaacu

SEQ ID NO: 2546247 - RNA, 19 nt, Artificial Sequence
  Description of Artificial Sequence: Synthetic oligonucleotide
  Antisense strand to SEQ ID NO: 2546246
aguuccagaucaaacucag

SEQ ID NO: 2546248 - RNA, 19 nt, Artificial Sequence
  Description of Artificial Sequence: Synthetic oligonucleotide
  Sense strand starting at position 2801 of SEQ ID NO: 1888625
gugaaauauuaucuguaac

SEQ ID NO: 2546249 - RNA, 19 nt, Artificial Sequence
  Description of Artificial Sequence: Synthetic oligonucleotide
  Antisense strand to SEQ ID NO: 2546248
guuacagauaauauuucac

SEQ ID NO: 2546250 - RNA, 19 nt, Artificial Sequence
  Description of Artificial Sequence: Synthetic oligonucleotide
  Sense strand starting at position 780 of SEQ ID NO: 1888625
ugcuuuguuggagaucaca

SEQ ID NO: 2546251 - RNA, 19 nt, Artificial Sequence
  Description of Artificial Sequence: Synthetic oligonucleotide
  Antisense strand to SEQ ID NO: 2546250
ugugaucuccaacaaagca

SEQ ID NO: 2546252 - RNA, 19 nt, Artificial Sequence
  Description of Artificial Sequence: Synthetic oligonucleotide
  Sense strand starting at position 3745 of SEQ ID NO: 1888625
ggagauggcaacuguuaua

SEQ ID NO: 2546253 - RNA, 19 nt, Artificial Sequence
  Description of Artificial Sequence: Synthetic oligonucleotide
  Antisense strand to SEQ ID NO: 2546252
uauaacaguugccaucucc

SEQ ID NO: 2546254 - RNA, 19 nt, Artificial Sequence
  Description of Artificial Sequence: Synthetic oligonucleotide
  Sense strand starting at position 2762 of SEQ ID NO: 1888625
uaguaaacuuuggcuaaga

SEQ ID NO: 2546255 - RNA, 19 nt, Artificial Sequence
  Description of Artificial Sequence: Synthetic oligonucleotide
  Antisense strand to SEQ ID NO: 2546254
ucuuagccaaaguuuacua

SEQ ID NO: 2546256 - RNA, 19 nt, Artificial Sequence
  Description of Artificial Sequence: Synthetic oligonucleotide
  Sense strand starting at position 2220 of SEQ ID NO: 1888625
caaagagugugagcucaga

SEQ ID NO: 2546257 - RNA, 19 nt, Artificial Sequence
  Description of Artificial Sequence: Synthetic oligonucleotide
  Antisense strand to SEQ ID NO: 2546256
ucugagcucacacucuuug

SEQ ID NO: 2546258 - RNA, 19 nt, Artificial Sequence
  Description of Artificial Sequence: Synthetic oligonucleotide
  Sense strand starting at position 2772 of SEQ ID NO: 1888625
uggcuaagaaugugauuac

SEQ ID NO: 2546259 - RNA, 19 nt, Artificial Sequence
  Description of Artificial Sequence: Synthetic oligonucleotide
  Antisense strand to SEQ ID NO: 2546258
guaaucacauucuuagcca

SEQ ID NO: 2546260 - RNA, 19 nt, Artificial Sequence
  Description of Artificial Sequence: Synthetic oligonucleotide
  Sense strand starting at position 927 of SEQ ID NO: 1888625
cagacagcugcucagagua

SEQ ID NO: 2546261 - RNA, 19 nt, Artificial Sequence
  Description of Artificial Sequence: Synthetic oligonucleotide
  Antisense strand to SEQ ID NO: 2546260
uacucugagcagcugucug

SEQ ID NO: 2546262 - RNA, 19 nt, Artificial Sequence
  Description of Artificial Sequence: Synthetic oligonucleotide
  Sense strand starting at position 811 of SEQ ID NO: 1888625
ggcugaguuugaucuggaa

SEQ ID NO: 2546263 - RNA, 19 nt, Artificial Sequence
  Description of Artificial Sequence: Synthetic oligonucleotide
  Antisense strand to SEQ ID NO: 2546262
uuccagaucaaacucagcc

SEQ ID NO: 2546264 - RNA, 19 nt, Artificial Sequence
  Description of Artificial Sequence: Synthetic oligonucleotide
  Sense strand starting at position 471 of SEQ ID NO: 1888625
acuuuaaaucagugcuaga

SEQ ID NO: 2546265 - RNA, 19 nt, Artificial Sequence
  Description of Artificial Sequence: Synthetic oligonucleotide
  Antisense strand to SEQ ID NO: 2546264
ucuagcacugauuuaaagu

SEQ ID NO: 2546266 - RNA, 19 nt, Artificial Sequence
  Description of Artificial Sequence: Synthetic oligonucleotide
  Sense strand starting at position 3281 of SEQ ID NO: 1888625
uauguugucaccuggagga

SEQ ID NO: 2546267 - RNA, 19 nt, Artificial Sequence
  Description of Artificial Sequence: Synthetic oligonucleotide
  Antisense strand to SEQ ID NO: 2546266
uccuccaggugacaacaua

SEQ ID NO: 2546268 - RNA, 19 nt, Artificial Sequence
  Description of Artificial Sequence: Synthetic oligonucleotide
  Sense strand starting at position 131 of SEQ ID NO: 1888625
cuugaaacuccuggucuca

SEQ ID NO: 2546269 - RNA, 19 nt, Artificial Sequence
  Description of Artificial Sequence: Synthetic oligonucleotide
  Antisense strand to SEQ ID NO: 2546268
ugagaccaggaguuucaag

SEQ ID NO: 2546270 - RNA, 19 nt, Artificial Sequence
  Description of Artificial Sequence: Synthetic oligonucleotide
  Sense strand starting at position 1643 of SEQ ID NO: 1888625
agaacagagcuuuguuacu

SEQ ID NO: 2546271 - RNA, 19 nt, Artificial Sequence
  Description of Artificial Sequence: Synthetic oligonucleotide
  Antisense strand to SEQ ID NO: 2546270
aguaacaaagcucuguucu

SEQ ID NO: 2546272 - RNA, 19 nt, Artificial Sequence
  Description of Artificial Sequence: Synthetic oligonucleotide
  Sense strand starting at position 1654 of SEQ ID NO: 1888625
uuguuacuaccugacuguu

SEQ ID NO: 2546273 - RNA, 19 nt, Artificial Sequence
  Description of Artificial Sequence: Synthetic oligonucleotide
  Antisense strand to SEQ ID NO: 2546272
aacagucagguaguaacaa

SEQ ID NO: 2546274 - RNA, 19 nt, Artificial Sequence
  Description of Artificial Sequence: Synthetic oligonucleotide
  Sense strand starting at position 2770 of SEQ ID NO: 1888625
uuuggcuaagaaugugauu

SEQ ID NO: 2546275 - RNA, 19 nt, Artificial Sequence
  Description of Artificial Sequence: Synthetic oligonucleotide
  Antisense strand to SEQ ID NO: 2546274
aaucacauucuuagccaaa

SEQ ID NO: 2546276 - RNA, 19 nt, Artificial Sequence
  Description of Artificial Sequence: Synthetic oligonucleotide
  Sense strand starting at position 801 of SEQ ID NO: 1888625
gaugauaaguggcugaguu

SEQ ID NO: 2546277 - RNA, 19 nt, Artificial Sequence
  Description of Artificial Sequence: Synthetic oligonucleotide
  Antisense strand to SEQ ID NO: 2546276
aacucagccacuuaucauc

SEQ ID NO: 2546278 - RNA, 19 nt, Artificial Sequence
  Description of Artificial Sequence: Synthetic oligonucleotide
  Sense strand starting at position 1657 of SEQ ID NO: 1888625
uuacuaccugacuguuauu

SEQ ID NO: 2546279 - RNA, 19 nt, Artificial Sequence
  Description of Artificial Sequence: Synthetic oligonucleotide
  Antisense strand to SEQ ID NO: 2546278
aauaacagucagguaguaa

SEQ ID NO: 2546280 - RNA, 19 nt, Artificial Sequence
  Description of Artificial Sequence: Synthetic oligonucleotide
  Sense strand starting at position 3806 of SEQ ID NO: 1888625
augugaccuuggcuacuaa

SEQ ID NO: 2546281 - RNA, 19 nt, Artificial Sequence
  Description of Artificial Sequence: Synthetic oligonucleotide
  Antisense strand to SEQ ID NO: 2546280
uuaguagccaaggucacau

SEQ ID NO: 2546282 - RNA, 19 nt, Artificial Sequence
  Description of Artificial Sequence: Synthetic oligonucleotide
  Sense strand starting at position 805 of SEQ ID NO: 1888625
auaaguggcugaguuugau

SEQ ID NO: 2546283 - RNA, 19 nt, Artificial Sequence
  Description of Artificial Sequence: Synthetic oligonucleotide
  Antisense strand to SEQ ID NO: 2546282
aucaaacucagccacuuau

SEQ ID NO: 2546284 - RNA, 19 nt, Artificial Sequence
  Description of Artificial Sequence: Synthetic oligonucleotide
  Sense strand starting at position 370 of SEQ ID NO: 1888625
agggacugauuacagaaua

SEQ ID NO: 2546285 - RNA, 19 nt, Artificial Sequence
  Description of Artificial Sequence: Synthetic oligonucleotide
  Antisense strand to SEQ ID NO: 2546284
uauucuguaaucagucccu

SEQ ID NO: 2546286 - RNA, 19 nt, Artificial Sequence
  Description of Artificial Sequence: Synthetic oligonucleotide
  Sense strand starting at position 802 of SEQ ID NO: 1888625
augauaaguggcugaguuu

SEQ ID NO: 2546287 - RNA, 19 nt, Artificial Sequence
  Description of Artificial Sequence: Synthetic oligonucleotide
  Antisense strand to SEQ ID NO: 2546286
aaacucagccacuuaucau

SEQ ID NO: 2546288 - RNA, 19 nt, Artificial Sequence
  Description of Artificial Sequence: Synthetic oligonucleotide
  Sense strand starting at position 1656 of SEQ ID NO: 1888625
guuacuaccugacuguuau

SEQ ID NO: 2546289 - RNA, 19 nt, Artificial Sequence
  Description of Artificial Sequence: Synthetic oligonucleotide
  Antisense strand to SEQ ID NO: 2546288
auaacagucagguaguaac

SEQ ID NO: 2546290 - RNA, 19 nt, Artificial Sequence
  Description of Artificial Sequence: Synthetic oligonucleotide
  Sense strand starting at position 1253 of SEQ ID NO: 1888625
gguguuaucuaacuacuuu

SEQ ID NO: 2546291 - RNA, 19 nt, Artificial Sequence
  Description of Artificial Sequence: Synthetic oligonucleotide
  Antisense strand to SEQ ID NO: 2546290
aaaguaguuagauaacacc

SEQ ID NO: 2546292 - RNA, 19 nt, Artificial Sequence
  Description of Artificial Sequence: Synthetic oligonucleotide
  Sense strand starting at position 775 of SEQ ID NO: 1888625
ugaagugcuuuguuggaga

SEQ ID NO: 2546293 - RNA, 19 nt, Artificial Sequence
  Description of Artificial Sequence: Synthetic oligonucleotide
  Antisense strand to SEQ ID NO: 2546292
ucuccaacaaagcacuuca

SEQ ID NO: 2546294 - RNA, 19 nt, Artificial Sequence
  Description of Artificial Sequence: Synthetic oligonucleotide
  Sense strand starting at position 512 of SEQ ID NO: 1888625
ucuaaaugcuauguaggua

SEQ ID NO: 2546295 - RNA, 19 nt, Artificial Sequence
  Description of Artificial Sequence: Synthetic oligonucleotide
  Antisense strand to SEQ ID NO: 2546294
uaccuacauagcauuuaga

SEQ ID NO: 2546296 - RNA, 19 nt, Artificial Sequence
  Description of Artificial Sequence: Synthetic oligonucleotide
  Sense strand starting at position 2117 of SEQ ID NO: 1888625
agugacuucuugucucuga

SEQ ID NO: 2546297 - RNA, 19 nt, Artificial Sequence
  Description of Artificial Sequence: Synthetic oligonucleotide
  Antisense strand to SEQ ID NO: 2546296
ucagagacaagaagucacu

SEQ ID NO: 2546298 - RNA, 19 nt, Artificial Sequence
  Description of Artificial Sequence: Synthetic oligonucleotide
  Sense strand starting at position 511 of SEQ ID NO: 1888625
aucuaaaugcuauguaggu

SEQ ID NO: 2546299 - RNA, 19 nt, Artificial Sequence
  Description of Artificial Sequence: Synthetic oligonucleotide
  Antisense strand to SEQ ID NO: 2546298
accuacauagcauuuagau

SEQ ID NO: 2546300 - RNA, 19 nt, Artificial Sequence
  Description of Artificial Sequence: Synthetic oligonucleotide
  Sense strand starting at position 257 of SEQ ID NO: 1888625
aggccagucugaguuuaau

SEQ ID NO: 2546301 - RNA, 19 nt, Artificial Sequence
  Description of Artificial Sequence: Synthetic oligonucleotide
  Antisense strand to SEQ ID NO: 2546300
auuaaacucagacuggccu

SEQ ID NO: 2546302 - RNA, 19 nt, Artificial Sequence
  Description of Artificial Sequence: Synthetic oligonucleotide
  Sense strand starting at position 451 of SEQ ID NO: 1888625
cuacacguauccucccaua

SEQ ID NO: 2546303 - RNA, 19 nt, Artificial Sequence
  Description of Artificial Sequence: Synthetic oligonucleotide
  Antisense strand to SEQ ID NO: 2546302
uaugggaggauacguguag

SEQ ID NO: 2546304 - RNA, 19 nt, Artificial Sequence
  Description of Artificial Sequence: Synthetic oligonucleotide
  Sense strand starting at position 3821 of SEQ ID NO: 1888625
cuaaguuagcagugugaag

SEQ ID NO: 2546305 - RNA, 19 nt, Artificial Sequence
  Description of Artificial Sequence: Synthetic oligonucleotide
  Antisense strand to SEQ ID NO: 2546304
cuucacacugcuaacuuag

SEQ ID NO: 2546306 - RNA, 19 nt, Artificial Sequence
  Description of Artificial Sequence: Synthetic oligonucleotide
  Sense strand starting at position 1205 of SEQ ID NO: 1888625
ccuggcugauuccuagcaa

SEQ ID NO: 2546307 - RNA, 19 nt, Artificial Sequence
  Description of Artificial Sequence: Synthetic oligonucleotide
  Antisense strand to SEQ ID NO: 2546306
uugcuaggaaucagccagg

SEQ ID NO: 2546308 - RNA, 19 nt, Artificial Sequence
  Description of Artificial Sequence: Synthetic oligonucleotide
  Sense strand starting at position 777 of SEQ ID NO: 1888625
aagugcuuuguuggagauc

SEQ ID NO: 2546309 - RNA, 19 nt, Artificial Sequence
  Description of Artificial Sequence: Synthetic oligonucleotide
  Antisense strand to SEQ ID NO: 2546308
gaucuccaacaaagcacuu

SEQ ID NO: 2546310 - RNA, 19 nt, Artificial Sequence
  Description of Artificial Sequence: Synthetic oligonucleotide
  Sense strand starting at position 1603 of SEQ ID NO: 1888626
gacuaaaucugguugaaua

SEQ ID NO: 2546311 - RNA, 19 nt, Artificial Sequence
  Description of Artificial Sequence: Synthetic oligonucleotide
  Antisense strand to SEQ ID NO: 2546310
uauucaaccagauuuaguc

SEQ ID NO: 2546312 - RNA, 19 nt, Artificial Sequence
  Description of Artificial Sequence: Synthetic oligonucleotide
  Sense strand starting at position 2067 of SEQ ID NO: 1888626
agacaaauagccugagacu

SEQ ID NO: 2546313 - RNA, 19 nt, Artificial Sequence
  Description of Artificial Sequence: Synthetic oligonucleotide
  Antisense strand to SEQ ID NO: 2546312
agucucaggcuauuugucu

SEQ ID NO: 2546314 - RNA, 19 nt, Artificial Sequence
  Description of Artificial Sequence: Synthetic oligonucleotide
  Sense strand starting at position 2516 of SEQ ID NO: 1888626
guucuugaaggugaugaua

SEQ ID NO: 2546315 - RNA, 19 nt, Artificial Sequence
  Description of Artificial Sequence: Synthetic oligonucleotide
  Antisense strand to SEQ ID NO: 2546314
uaucaucaccuucaagaac

SEQ ID NO: 2546316 - RNA, 19 nt, Artificial Sequence
  Description of Artificial Sequence: Synthetic oligonucleotide
  Sense strand starting at position 2117 of SEQ ID NO: 1888626
gagacaguggucuacuaug

SEQ ID NO: 2546317 - RNA, 19 nt, Artificial Sequence
  Description of Artificial Sequence: Synthetic oligonucleotide
  Antisense strand to SEQ ID NO: 2546316
cauaguagaccacugucuc

SEQ ID NO: 2546318 - RNA, 19 nt, Artificial Sequence
  Description of Artificial Sequence: Synthetic oligonucleotide
  Sense strand starting at position 3841 of SEQ ID NO: 1888626
guagaugucacagagugga

SEQ ID NO: 2546319 - RNA, 19 nt, Artificial Sequence
  Description of Artificial Sequence: Synthetic oligonucleotide
  Antisense strand to SEQ ID NO: 2546318
uccacucugugacaucuac

SEQ ID NO: 2546320 - RNA, 19 nt, Artificial Sequence
  Description of Artificial Sequence: Synthetic oligonucleotide
  Sense strand starting at position 3284 of SEQ ID NO: 1888626
ccagcuguccuguuuggca

SEQ ID NO: 2546321 - RNA, 19 nt, Artificial Sequence
  Description of Artificial Sequence: Synthetic oligonucleotide
  Antisense strand to SEQ ID NO: 2546320
ugccaaacaggacagcugg

SEQ ID NO: 2546322 - RNA, 19 nt, Artificial Sequence
  Description of Artificial Sequence: Synthetic oligonucleotide
  Sense strand starting at position 917 of SEQ ID NO: 1888626
cagcaugaagcuuaugaga

SEQ ID NO: 2546323 - RNA, 19 nt, Artificial Sequence
  Description of Artificial Sequence: Synthetic oligonucleotide
  Antisense strand to SEQ ID NO: 2546322
ucucauaagcuucaugcug

SEQ ID NO: 2546324 - RNA, 19 nt, Artificial Sequence
  Description of Artificial Sequence: Synthetic oligonucleotide
  Sense strand starting at position 2574 of SEQ ID NO: 1888626
gugaucaugacuuaauggu

SEQ ID NO: 2546325 - RNA, 19 nt, Artificial Sequence
  Description of Artificial Sequence: Synthetic oligonucleotide
  Antisense strand to SEQ ID NO: 2546324
accauuaagucaugaucac

SEQ ID NO: 2546326 - RNA, 19 nt, Artificial Sequence
  Description of Artificial Sequence: Synthetic oligonucleotide
  Sense strand starting at position 2572 of SEQ ID NO: 1888626
uggugaucaugacuuaaug

SEQ ID NO: 2546327 - RNA, 19 nt, Artificial Sequence
  Description of Artificial Sequence: Synthetic oligonucleotide
  Antisense strand to SEQ ID NO: 2546326
cauuaagucaugaucacca

SEQ ID NO: 2546328 - RNA, 19 nt, Artificial Sequence
  Description of Artificial Sequence: Synthetic oligonucleotide
  Sense strand starting at position 2614 of SEQ ID NO: 1888626
caaagaucuccaggcugga

SEQ ID NO: 2546329 - RNA, 19 nt, Artificial Sequence
  Description of Artificial Sequence: Synthetic oligonucleotide
  Antisense strand to SEQ ID NO: 2546328
uccagccuggagaucuuug

SEQ ID NO: 2546330 - RNA, 19 nt, Artificial Sequence
  Description of Artificial Sequence: Synthetic oligonucleotide
  Sense strand starting at position 2173 of SEQ ID NO: 1888626
cugauuguggauuaucuuu

SEQ ID NO: 2546331 - RNA, 19 nt, Artificial Sequence
  Description of Artificial Sequence: Synthetic oligonucleotide
  Antisense strand to SEQ ID NO: 2546330
aaagauaauccacaaucag

SEQ ID NO: 2546332 - RNA, 19 nt, Artificial Sequence
  Description of Artificial Sequence: Synthetic oligonucleotide
  Sense strand starting at position 1093 of SEQ ID NO: 1888626
agaugaaugcaggguccaa

SEQ ID NO: 2546333 - RNA, 19 nt, Artificial Sequence
  Description of Artificial Sequence: Synthetic oligonucleotide
  Antisense strand to SEQ ID NO: 2546332
uuggacccugcauucaucu

SEQ ID NO: 2546334 - RNA, 19 nt, Artificial Sequence
  Description of Artificial Sequence: Synthetic oligonucleotide
  Sense strand starting at position 3138 of SEQ ID NO: 1888626
gucggaaauccgagucugu

SEQ ID NO: 2546335 - RNA, 19 nt, Artificial Sequence
  Description of Artificial Sequence: Synthetic oligonucleotide
  Antisense strand to SEQ ID NO: 2546334
acagacucggauuuccgac

SEQ ID NO: 2546336 - RNA, 19 nt, Artificial Sequence
  Description of Artificial Sequence: Synthetic oligonucleotide
  Sense strand starting at position 835 of SEQ ID NO: 1888626
gucauaaauguggagucua

SEQ ID NO: 2546337 - RNA, 19 nt, Artificial Sequence
  Description of Artificial Sequence: Synthetic oligonucleotide
  Antisense strand to SEQ ID NO: 2546336
uagacuccacauuuaugac

SEQ ID NO: 2546338 - RNA, 19 nt, Artificial Sequence
  Description of Artificial Sequence: Synthetic oligonucleotide
  Sense strand starting at position 2115 of SEQ ID NO: 1888626
gggagacaguggucuacua

SEQ ID NO: 2546339 - RNA, 19 nt, Artificial Sequence
  Description of Artificial Sequence: Synthetic oligonucleotide
  Antisense strand to SEQ ID NO: 2546338
uaguagaccacugucuccc

SEQ ID NO: 2546340 - RNA, 19 nt, Artificial Sequence
  Description of Artificial Sequence: Synthetic oligonucleotide
  Sense strand starting at position 968 of SEQ ID NO: 1888626
guggguguugaauaaauuc

SEQ ID NO: 2546341 - RNA, 19 nt, Artificial Sequence
  Description of Artificial Sequence: Synthetic oligonucleotide
  Antisense strand to SEQ ID NO: 2546340
gaauuuauucaacacccac

SEQ ID NO: 2546342 - RNA, 19 nt, Artificial Sequence
  Description of Artificial Sequence: Synthetic oligonucleotide
  Sense strand starting at position 1955 of SEQ ID NO: 1888626
cugggaggcuccuuugaga

SEQ ID NO: 2546343 - RNA, 19 nt, Artificial Sequence
  Description of Artificial Sequence: Synthetic oligonucleotide
  Antisense strand to SEQ ID NO: 2546342
ucucaaaggagccucccag

SEQ ID NO: 2546344 - RNA, 19 nt, Artificial Sequence
  Description of Artificial Sequence: Synthetic oligonucleotide
  Sense strand starting at position 2624 of SEQ ID NO: 1888626
caggcuggaucuuuauaca

SEQ ID NO: 2546345 - RNA, 19 nt, Artificial Sequence
  Description of Artificial Sequence: Synthetic oligonucleotide
  Antisense strand to SEQ ID NO: 2546344
uguauaaagauccagccug

SEQ ID NO: 2546346 - RNA, 19 nt, Artificial Sequence
  Description of Artificial Sequence: Synthetic oligonucleotide
  Sense strand starting at position 2515 of SEQ ID NO: 1888626
aguucuugaaggugaugau

SEQ ID NO: 2546347 - RNA, 19 nt, Artificial Sequence
  Description of Artificial Sequence: Synthetic oligonucleotide
  Antisense strand to SEQ ID NO: 2546346
aucaucaccuucaagaacu

SEQ ID NO: 2546348 - RNA, 19 nt, Artificial Sequence
  Description of Artificial Sequence: Synthetic oligonucleotide
  Sense strand starting at position 3801 of SEQ ID NO: 1888626
agcucuccuccaggaaaug

SEQ ID NO: 2546349 - RNA, 19 nt, Artificial Sequence
  Description of Artificial Sequence: Synthetic oligonucleotide
  Antisense strand to SEQ ID NO: 2546348
cauuuccuggaggagagcu

SEQ ID NO: 2546350 - RNA, 19 nt, Artificial Sequence
  Description of Artificial Sequence: Synthetic oligonucleotide
  Sense strand starting at position 2231 of SEQ ID NO: 1888626
gagaaugccucucuuugga

SEQ ID NO: 2546351 - RNA, 19 nt, Artificial Sequence
  Description of Artificial Sequence: Synthetic oligonucleotide
  Antisense strand to SEQ ID NO: 2546350
uccaaagagaggcauucuc

SEQ ID NO: 2546352 - RNA, 19 nt, Artificial Sequence
  Description of Artificial Sequence: Synthetic oligonucleotide
  Sense strand starting at position 2580 of SEQ ID NO: 1888626
augacuuaaugguucgacu

SEQ ID NO: 2546353 - RNA, 19 nt, Artificial Sequence
  Description of Artificial Sequence: Synthetic oligonucleotide
  Antisense strand to SEQ ID NO: 2546352
agucgaaccauuaagucau

SEQ ID NO: 2546354 - RNA, 19 nt, Artificial Sequence
  Description of Artificial Sequence: Synthetic oligonucleotide
  Sense strand starting at position 2638 of SEQ ID NO: 1888626
auacacauugcuuggguaa

SEQ ID NO: 2546355 - RNA, 19 nt, Artificial Sequence
  Description of Artificial Sequence: Synthetic oligonucleotide
  Antisense strand to SEQ ID NO: 2546354
uuacccaagcaauguguau

SEQ ID NO: 2546356 - RNA, 19 nt, Artificial Sequence
  Description of Artificial Sequence: Synthetic oligonucleotide
  Sense strand starting at position 1003 of SEQ ID NO: 1888626
cuucucuuacuuugggauu

SEQ ID NO: 2546357 - RNA, 19 nt, Artificial Sequence
  Description of Artificial Sequence: Synthetic oligonucleotide
  Antisense strand to SEQ ID NO: 2546356
aaucccaaaguaagagaag

SEQ ID NO: 2546358 - RNA, 19 nt, Artificial Sequence
  Description of Artificial Sequence: Synthetic oligonucleotide
  Sense strand starting at position 3890 of SEQ ID NO: 1888626
uacuucuaccaguguggaa

SEQ ID NO: 2546359 - RNA, 19 nt, Artificial Sequence
  Description of Artificial Sequence: Synthetic oligonucleotide
  Antisense strand to SEQ ID NO: 2546358
uuccacacugguagaagua

SEQ ID NO: 2546360 - RNA, 19 nt, Artificial Sequence
  Description of Artificial Sequence: Synthetic oligonucleotide
  Sense strand starting at position 2582 of SEQ ID NO: 1888626
gacuuaaugguucgacuca

SEQ ID NO: 2546361 - RNA, 19 nt, Artificial Sequence
  Description of Artificial Sequence: Synthetic oligonucleotide
  Antisense strand to SEQ ID NO: 2546360
ugagucgaaccauuaaguc

SEQ ID NO: 2546362 - RNA, 19 nt, Artificial Sequence
  Description of Artificial Sequence: Synthetic oligonucleotide
  Sense strand starting at position 3926 of SEQ ID NO: 1888626
gagaguuucuugcccaagg

SEQ ID NO: 2546363 - RNA, 19 nt, Artificial Sequence
  Description of Artificial Sequence: Synthetic oligonucleotide
  Antisense strand to SEQ ID NO: 2546362
ccuugggcaagaaacucuc

SEQ ID NO: 2546364 - RNA, 19 nt, Artificial Sequence
  Description of Artificial Sequence: Synthetic oligonucleotide
  Sense strand starting at position 2257 of SEQ ID NO: 1888626
acagauauaugcuuacugu

SEQ ID NO: 2546365 - RNA, 19 nt, Artificial Sequence
  Description of Artificial Sequence: Synthetic oligonucleotide
  Antisense strand to SEQ ID NO: 2546364
acaguaagcauauaucugu

SEQ ID NO: 2546366 - RNA, 19 nt, Artificial Sequence
  Description of Artificial Sequence: Synthetic oligonucleotide
  Sense strand starting at position 1992 of SEQ ID NO: 1888626
ugugucagauacuccuuaa

SEQ ID NO: 2546367 - RNA, 19 nt, Artificial Sequence
  Description of Artificial Sequence: Synthetic oligonucleotide
  Antisense strand to SEQ ID NO: 2546366
uuaaggaguaucugacaca

SEQ ID NO: 2546368 - RNA, 19 nt, Artificial Sequence
  Description of Artificial Sequence: Synthetic oligonucleotide
  Sense strand starting at position 2096 of SEQ ID NO: 1888626
gauaaaguugaugguuguu

SEQ ID NO: 2546369 - RNA, 19 nt, Artificial Sequence
  Description of Artificial Sequence: Synthetic oligonucleotide
  Antisense strand to SEQ ID NO: 2546368
aacaaccaucaacuuuauc

SEQ ID NO: 2546370 - RNA, 19 nt, Artificial Sequence
  Description of Artificial Sequence: Synthetic oligonucleotide
  Sense strand starting at position 2982 of SEQ ID NO: 1888626
gguuccuuucagggacagu

SEQ ID NO: 2546371 - RNA, 19 nt, Artificial Sequence
  Description of Artificial Sequence: Synthetic oligonucleotide
  Antisense strand to SEQ ID NO: 2546370
acugucccugaaaggaacc

SEQ ID NO: 2546372 - RNA, 19 nt, Artificial Sequence
  Description of Artificial Sequence: Synthetic oligonucleotide
  Sense strand starting at position 1338 of SEQ ID NO: 1888626
gcacuaauccugggagcua

SEQ ID NO: 2546373 - RNA, 19 nt, Artificial Sequence
  Description of Artificial Sequence: Synthetic oligonucleotide
  Antisense strand to SEQ ID NO: 2546372
uagcucccaggauuagugc

SEQ ID NO: 2546374 - RNA, 19 nt, Artificial Sequence
  Description of Artificial Sequence: Synthetic oligonucleotide
  Sense strand starting at position 3928 of SEQ ID NO: 1888626
gaguuucuugcccaaggca

SEQ ID NO: 2546375 - RNA, 19 nt, Artificial Sequence
  Description of Artificial Sequence: Synthetic oligonucleotide
  Antisense strand to SEQ ID NO: 2546374
ugccuugggcaagaaacuc

SEQ ID NO: 2546376 - RNA, 19 nt, Artificial Sequence
  Description of Artificial Sequence: Synthetic oligonucleotide
  Sense strand starting at position 2190 of SEQ ID NO: 1888626
uuucaagaguguuugugga

SEQ ID NO: 2546377 - RNA, 19 nt, Artificial Sequence
  Description of Artificial Sequence: Synthetic oligonucleotide
  Antisense strand to SEQ ID NO: 2546376
uccacaaacacucuugaaa

SEQ ID NO: 2546378 - RNA, 19 nt, Artificial Sequence
  Description of Artificial Sequence: Synthetic oligonucleotide
  Sense strand starting at position 942 of SEQ ID NO: 1888626
gaaaccauguguuugcuaa

SEQ ID NO: 2546379 - RNA, 19 nt, Artificial Sequence
  Description of Artificial Sequence: Synthetic oligonucleotide
  Antisense strand to SEQ ID NO: 2546378
uuagcaaacacaugguuuc

SEQ ID NO: 2546380 - RNA, 19 nt, Artificial Sequence
  Description of Artificial Sequence: Synthetic oligonucleotide
  Sense strand starting at position 943 of SEQ ID NO: 1888626
aaaccauguguuugcuaag

SEQ ID NO: 2546381 - RNA, 19 nt, Artificial Sequence
  Description of Artificial Sequence: Synthetic oligonucleotide
  Antisense strand to SEQ ID NO: 2546380
cuuagcaaacacaugguuu

SEQ ID NO: 2546382 - RNA, 19 nt, Artificial Sequence
  Description of Artificial Sequence: Synthetic oligonucleotide
  Sense strand starting at position 1274 of SEQ ID NO: 1888626
acuauaauaugggaauaug

SEQ ID NO: 2546383 - RNA, 19 nt, Artificial Sequence
  Description of Artificial Sequence: Synthetic oligonucleotide
  Antisense strand to SEQ ID NO: 2546382
cauauucccauauuauagu

SEQ ID NO: 2546384 - RNA, 19 nt, Artificial Sequence
  Description of Artificial Sequence: Synthetic oligonucleotide
  Sense strand starting at position 2333 of SEQ ID NO: 1888626
uuugcaucaccuuguggaa

SEQ ID NO: 2546385 - RNA, 19 nt, Artificial Sequence
  Description of Artificial Sequence: Synthetic oligonucleotide
  Antisense strand to SEQ ID NO: 2546384
uuccacaaggugaugcaaa

SEQ ID NO: 2546386 - RNA, 19 nt, Artificial Sequence
  Description of Artificial Sequence: Synthetic oligonucleotide
  Sense strand starting at position 1966 of SEQ ID NO: 1888626
cuuugagaauugcuugguu

SEQ ID NO: 2546387 - RNA, 19 nt, Artificial Sequence
  Description of Artificial Sequence: Synthetic oligonucleotide
  Antisense strand to SEQ ID NO: 2546386
aaccaagcaauucucaaag

SEQ ID NO: 2546388 - RNA, 19 nt, Artificial Sequence
  Description of Artificial Sequence: Synthetic oligonucleotide
  Sense strand starting at position 2017 of SEQ ID NO: 1888626
ugauacauuuggugacaau

SEQ ID NO: 2546389 - RNA, 19 nt, Artificial Sequence
  Description of Artificial Sequence: Synthetic oligonucleotide
  Antisense strand to SEQ ID NO: 2546388
auugucaccaaauguauca

SEQ ID NO: 2546390 - RNA, 19 nt, Artificial Sequence
  Description of Artificial Sequence: Synthetic oligonucleotide
  Sense strand starting at position 824 of SEQ ID NO: 1888627
cuacuagugggucaauuaa

SEQ ID NO: 2546391 - RNA, 19 nt, Artificial Sequence
  Description of Artificial Sequence: Synthetic oligonucleotide
  Antisense strand to SEQ ID NO: 2546390
uuaauugacccacuaguag

SEQ ID NO: 2546392 - RNA, 19 nt, Artificial Sequence
  Description of Artificial Sequence: Synthetic oligonucleotide
  Sense strand starting at position 3602 of SEQ ID NO: 1888627
uguagaaauccucagaugu

SEQ ID NO: 2546393 - RNA, 19 nt, Artificial Sequence
  Description of Artificial Sequence: Synthetic oligonucleotide
  Antisense strand to SEQ ID NO: 2546392
acaucugaggauuucuaca

SEQ ID NO: 2546394 - RNA, 19 nt, Artificial Sequence
  Description of Artificial Sequence: Synthetic oligonucleotide
  Sense strand starting at position 2750 of SEQ ID NO: 1888627
agauuaggaucuuuggagu

SEQ ID NO: 2546395 - RNA, 19 nt, Artificial Sequence
  Description of Artificial Sequence: Synthetic oligonucleotide
  Antisense strand to SEQ ID NO: 2546394
acuccaaagauccuaaucu

SEQ ID NO: 2546396 - RNA, 19 nt, Artificial Sequence
  Description of Artificial Sequence: Synthetic oligonucleotide
  Sense strand starting at position 557 of SEQ ID NO: 1888627
gcauuucugucacuuauua

SEQ ID NO: 2546397 - RNA, 19 nt, Artificial Sequence
  Description of Artificial Sequence: Synthetic oligonucleotide
  Antisense strand to SEQ ID NO: 2546396
uaauaagugacagaaaugc

SEQ ID NO: 2546398 - RNA, 19 nt, Artificial Sequence
  Description of Artificial Sequence: Synthetic oligonucleotide
  Sense strand starting at position 2121 of SEQ ID NO: 1888627
uccgauuucuggguaguca

SEQ ID NO: 2546399 - RNA, 19 nt, Artificial Sequence
  Description of Artificial Sequence: Synthetic oligonucleotide
  Antisense strand to SEQ ID NO: 2546398
ugacuacccagaaaucgga

SEQ ID NO: 2546400 - RNA, 19 nt, Artificial Sequence
  Description of Artificial Sequence: Synthetic oligonucleotide
  Sense strand starting at position 42 of SEQ ID NO: 1888627
gcacaauguauggaguaag

SEQ ID NO: 2546401 - RNA, 19 nt, Artificial Sequence
  Description of Artificial Sequence: Synthetic oligonucleotide
  Antisense strand to SEQ ID NO: 2546400
cuuacuccauacauugugc

SEQ ID NO: 2546402 - RNA, 19 nt, Artificial Sequence
  Description of Artificial Sequence: Synthetic oligonucleotide
  Sense strand starting at position 438 of SEQ ID NO: 1888627
gaaagaauuguggguuuga

SEQ ID NO: 2546403 - RNA, 19 nt, Artificial Sequence
  Description of Artificial Sequence: Synthetic oligonucleotide
  Antisense strand to SEQ ID NO: 2546402
ucaaacccacaauucuuuc

SEQ ID NO: 2546404 - RNA, 19 nt, Artificial Sequence
  Description of Artificial Sequence: Synthetic oligonucleotide
  Sense strand starting at position 946 of SEQ ID NO: 1888627
agaguaugagcccaggagu

SEQ ID NO: 2546405 - RNA, 19 nt, Artificial Sequence
  Description of Artificial Sequence: Synthetic oligonucleotide
  Antisense strand to SEQ ID NO: 2546404
acuccugggcucauacucu

SEQ ID NO: 2546406 - RNA, 19 nt, Artificial Sequence
  Description of Artificial Sequence: Synthetic oligonucleotide
  Sense strand starting at position 12 of SEQ ID NO: 1888627
gcaugacuggugggaaaga

SEQ ID NO: 2546407 - RNA, 19 nt, Artificial Sequence
  Description of Artificial Sequence: Synthetic oligonucleotide
  Antisense strand to SEQ ID NO: 2546406
ucuuucccaccagucaugc

SEQ ID NO: 2546408 - RNA, 19 nt, Artificial Sequence
  Description of Artificial Sequence: Synthetic oligonucleotide
  Sense strand starting at position 1333 of SEQ ID NO: 1888627
uagauagcuccugagaugu

SEQ ID NO: 2546409 - RNA, 19 nt, Artificial Sequence
  Description of Artificial Sequence: Synthetic oligonucleotide
  Antisense strand to SEQ ID NO: 2546408
acaucucaggagcuaucua

SEQ ID NO: 2546410 - RNA, 19 nt, Artificial Sequence
  Description of Artificial Sequence: Synthetic oligonucleotide
  Sense strand starting at position 536 of SEQ ID NO: 1888627
gcuagacugagagguauaa

SEQ ID NO: 2546411 - RNA, 19 nt, Artificial Sequence
  Description of Artificial Sequence: Synthetic oligonucleotide
  Antisense strand to SEQ ID NO: 2546410
uuauaccucucagucuagc

SEQ ID NO: 2546412 - RNA, 19 nt, Artificial Sequence
  Description of Artificial Sequence: Synthetic oligonucleotide
  Sense strand starting at position 2935 of SEQ ID NO: 1888627
acuagagcacauugauauu

SEQ ID NO: 2546413 - RNA, 19 nt, Artificial Sequence
  Description of Artificial Sequence: Synthetic oligonucleotide
  Antisense strand to SEQ ID NO: 2546412
aauaucaaugugcucuagu

SEQ ID NO: 2546414 - RNA, 19 nt, Artificial Sequence
  Description of Artificial Sequence: Synthetic oligonucleotide
  Sense strand starting at position 2120 of SEQ ID NO: 1888627
cuccgauuucuggguaguc

SEQ ID NO: 2546415 - RNA, 19 nt, Artificial Sequence
  Description of Artificial Sequence: Synthetic oligonucleotide
  Antisense strand to SEQ ID NO: 2546414
gacuacccagaaaucggag

SEQ ID NO: 2546416 - RNA, 19 nt, Artificial Sequence
  Description of Artificial Sequence: Synthetic oligonucleotide
  Sense strand starting at position 588 of SEQ ID NO: 1888627
uggguaggucaauaguuau

SEQ ID NO: 2546417 - RNA, 19 nt, Artificial Sequence
  Description of Artificial Sequence: Synthetic oligonucleotide
  Antisense strand to SEQ ID NO: 2546416
auaacuauugaccuaccca

SEQ ID NO: 2546418 - RNA, 19 nt, Artificial Sequence
  Description of Artificial Sequence: Synthetic oligonucleotide
  Sense strand starting at position 1013 of SEQ ID NO: 1888627
uuacaaauuagucaggugu

SEQ ID NO: 2546419 - RNA, 19 nt, Artificial Sequence
  Description of Artificial Sequence: Synthetic oligonucleotide
  Antisense strand to SEQ ID NO: 2546418
acaccugacuaauuuguaa

SEQ ID NO: 2546420 - RNA, 19 nt, Artificial Sequence
  Description of Artificial Sequence: Synthetic oligonucleotide
  Sense strand starting at position 3546 of SEQ ID NO: 1888627
ugaacuucuguuuggauga

SEQ ID NO: 2546421 - RNA, 19 nt, Artificial Sequence
  Description of Artificial Sequence: Synthetic oligonucleotide
  Antisense strand to SEQ ID NO: 2546420
ucauccaaacagaaguuca

SEQ ID NO: 2546422 - RNA, 19 nt, Artificial Sequence
  Description of Artificial Sequence: Synthetic oligonucleotide
  Sense strand starting at position 2086 of SEQ ID NO: 1888627
caagguguucuugaaggca

SEQ ID NO: 2546423 - RNA, 19 nt, Artificial Sequence
  Description of Artificial Sequence: Synthetic oligonucleotide
  Antisense strand to SEQ ID NO: 2546422
ugccuucaagaacaccuug

SEQ ID NO: 2546424 - RNA, 19 nt, Artificial Sequence
  Description of Artificial Sequence: Synthetic oligonucleotide
  Sense strand starting at position 1665 of SEQ ID NO: 1888627
auguuaagauacuuugagu

SEQ ID NO: 2546425 - RNA, 19 nt, Artificial Sequence
  Description of Artificial Sequence: Synthetic oligonucleotide
  Antisense strand to SEQ ID NO: 2546424
acucaaaguaucuuaacau

SEQ ID NO: 2546426 - RNA, 19 nt, Artificial Sequence
  Description of Artificial Sequence: Synthetic oligonucleotide
  Sense strand starting at position 1444 of SEQ ID NO: 1888627
aaguuuagggaguguauga

SEQ ID NO: 2546427 - RNA, 19 nt, Artificial Sequence
  Description of Artificial Sequence: Synthetic oligonucleotide
  Antisense strand to SEQ ID NO: 2546426
ucauacacucccuaaacuu

SEQ ID NO: 2546428 - RNA, 19 nt, Artificial Sequence
  Description of Artificial Sequence: Synthetic oligonucleotide
  Sense strand starting at position 1902 of SEQ ID NO: 1888627
uuucucagugaauauguuu

SEQ ID NO: 2546429 - RNA, 19 nt, Artificial Sequence
  Description of Artificial Sequence: Synthetic oligonucleotide
  Antisense strand to SEQ ID NO: 2546428
aaacauauucacugagaaa

SEQ ID NO: 2546430 - RNA, 19 nt, Artificial Sequence
  Description of Artificial Sequence: Synthetic oligonucleotide
  Sense strand starting at position 1405 of SEQ ID NO: 1888627
uaucucaugugaguuggaa

SEQ ID NO: 2546431 - RNA, 19 nt, Artificial Sequence
  Description of Artificial Sequence: Synthetic oligonucleotide
  Antisense strand to SEQ ID NO: 2546430
uuccaacucacaugagaua

SEQ ID NO: 2546432 - RNA, 19 nt, Artificial Sequence
  Description of Artificial Sequence: Synthetic oligonucleotide
  Sense strand starting at position 583 of SEQ ID NO: 1888627
aucuuuggguaggucaaua

SEQ ID NO: 2546433 - RNA, 19 nt, Artificial Sequence
  Description of Artificial Sequence: Synthetic oligonucleotide
  Antisense strand to SEQ ID NO: 2546432
uauugaccuacccaaagau

SEQ ID NO: 2546434 - RNA, 19 nt, Artificial Sequence
  Description of Artificial Sequence: Synthetic oligonucleotide
  Sense strand starting at position 3659 of SEQ ID NO: 1888627
uggauuguacucuaagcuu

SEQ ID NO: 2546435 - RNA, 19 nt, Artificial Sequence
  Description of Artificial Sequence: Synthetic oligonucleotide
  Antisense strand to SEQ ID NO: 2546434
aagcuuagaguacaaucca

SEQ ID NO: 2546436 - RNA, 19 nt, Artificial Sequence
  Description of Artificial Sequence: Synthetic oligonucleotide
  Sense strand starting at position 40 of SEQ ID NO: 1888627
gagcacaauguauggagua

SEQ ID NO: 2546437 - RNA, 19 nt, Artificial Sequence
  Description of Artificial Sequence: Synthetic oligonucleotide
  Antisense strand to SEQ ID NO: 2546436
uacuccauacauugugcuc

SEQ ID NO: 2546438 - RNA, 19 nt, Artificial Sequence
  Description of Artificial Sequence: Synthetic oligonucleotide
  Sense strand starting at position 1620 of SEQ ID NO: 1888627
acgacuuuaucucuggacu

SEQ ID NO: 2546439 - RNA, 19 nt, Artificial Sequence
  Description of Artificial Sequence: Synthetic oligonucleotide
  Antisense strand to SEQ ID NO: 2546438
aguccagagauaaagucgu

SEQ ID NO: 2546440 - RNA, 19 nt, Artificial Sequence
  Description of Artificial Sequence: Synthetic oligonucleotide
  Sense strand starting at position 2304 of SEQ ID NO: 1888627
guggcuuugaccugaagga

SEQ ID NO: 2546441 - RNA, 19 nt, Artificial Sequence
  Description of Artificial Sequence: Synthetic oligonucleotide
  Antisense strand to SEQ ID NO: 2546440
uccuucaggucaaagccac

SEQ ID NO: 2546442 - RNA, 19 nt, Artificial Sequence
  Description of Artificial Sequence: Synthetic oligonucleotide
  Sense strand starting at position 821 of SEQ ID NO: 1888627
auccuacuagugggucaau

SEQ ID NO: 2546443 - RNA, 19 nt, Artificial Sequence
  Description of Artificial Sequence: Synthetic oligonucleotide
  Antisense strand to SEQ ID NO: 2546442
auugacccacuaguaggau

SEQ ID NO: 2546444 - RNA, 19 nt, Artificial Sequence
  Description of Artificial Sequence: Synthetic oligonucleotide
  Sense strand starting at position 1897 of SEQ ID NO: 1888627
agcacuuucucagugaaua

SEQ ID NO: 2546445 - RNA, 19 nt, Artificial Sequence
  Description of Artificial Sequence: Synthetic oligonucleotide
  Antisense strand to SEQ ID NO: 2546444
uauucacugagaaagugcu

SEQ ID NO: 2546446 - RNA, 19 nt, Artificial Sequence
  Description of Artificial Sequence: Synthetic oligonucleotide
  Sense strand starting at position 582 of SEQ ID NO: 1888627
uaucuuuggguaggucaau

SEQ ID NO: 2546447 - RNA, 19 nt, Artificial Sequence
  Description of Artificial Sequence: Synthetic oligonucleotide
  Antisense strand to SEQ ID NO: 2546446
auugaccuacccaaagaua

SEQ ID NO: 2546448 - RNA, 19 nt, Artificial Sequence
  Description of Artificial Sequence: Synthetic oligonucleotide
  Sense strand starting at position 622 of SEQ ID NO: 1888627
uuaguauuacuauguacca

SEQ ID NO: 2546449 - RNA, 19 nt, Artificial Sequence
  Description of Artificial Sequence: Synthetic oligonucleotide
  Antisense strand to SEQ ID NO: 2546448
ugguacauaguaauacuaa

SEQ ID NO: 2546450 - RNA, 19 nt, Artificial Sequence
  Description of Artificial Sequence: Synthetic oligonucleotide
  Sense strand starting at position 1720 of SEQ ID NO: 1888627
ugauaauccuaguuguauc

SEQ ID NO: 2546451 - RNA, 19 nt, Artificial Sequence
  Description of Artificial Sequence: Synthetic oligonucleotide
  Antisense strand to SEQ ID NO: 2546450
gauacaacuaggauuauca

SEQ ID NO: 2546452 - RNA, 19 nt, Artificial Sequence
  Description of Artificial Sequence: Synthetic oligonucleotide
  Sense strand starting at position 2089 of SEQ ID NO: 1888627
gguguucuugaaggcaaga

SEQ ID NO: 2546453 - RNA, 19 nt, Artificial Sequence
  Description of Artificial Sequence: Synthetic oligonucleotide
  Antisense strand to SEQ ID NO: 2546452
ucuugccuucaagaacacc

SEQ ID NO: 2546454 - RNA, 19 nt, Artificial Sequence
  Description of Artificial Sequence: Synthetic oligonucleotide
  Sense strand starting at position 822 of SEQ ID NO: 1888627
uccuacuagugggucaauu

SEQ ID NO: 2546455 - RNA, 19 nt, Artificial Sequence
  Description of Artificial Sequence: Synthetic oligonucleotide
  Antisense strand to SEQ ID NO: 2546454
aauugacccacuaguagga

SEQ ID NO: 2546456 - RNA, 19 nt, Artificial Sequence
  Description of Artificial Sequence: Synthetic oligonucleotide
  Sense strand starting at position 1621 of SEQ ID NO: 1888627
cgacuuuaucucuggacuc

SEQ ID NO: 2546457 - RNA, 19 nt, Artificial Sequence
  Description of Artificial Sequence: Synthetic oligonucleotide
  Antisense strand to SEQ ID NO: 2546456
gaguccagagauaaagucg

SEQ ID NO: 2546458 - RNA, 19 nt, Artificial Sequence
  Description of Artificial Sequence: Synthetic oligonucleotide
  Sense strand starting at position 1381 of SEQ ID NO: 1888627
guugcaggucuguacauaa

SEQ ID NO: 2546459 - RNA, 19 nt, Artificial Sequence
  Description of Artificial Sequence: Synthetic oligonucleotide
  Antisense strand to SEQ ID NO: 2546458
uuauguacagaccugcaac

SEQ ID NO: 2546460 - RNA, 19 nt, Artificial Sequence
  Description of Artificial Sequence: Synthetic oligonucleotide
  Sense strand starting at position 561 of SEQ ID NO: 1888627
uucugucacuuauuaggua

SEQ ID NO: 2546461 - RNA, 19 nt, Artificial Sequence
  Description of Artificial Sequence: Synthetic oligonucleotide
  Antisense strand to SEQ ID NO: 2546460
uaccuaauaagugacagaa

SEQ ID NO: 2546462 - RNA, 19 nt, Artificial Sequence
  Description of Artificial Sequence: Synthetic oligonucleotide
  Sense strand starting at position 1728 of SEQ ID NO: 1888627
cuaguuguaucuccuagau

SEQ ID NO: 2546463 - RNA, 19 nt, Artificial Sequence
  Description of Artificial Sequence: Synthetic oligonucleotide
  Antisense strand to SEQ ID NO: 2546462
aucuaggagauacaacuag

SEQ ID NO: 2546464 - RNA, 19 nt, Artificial Sequence
  Description of Artificial Sequence: Synthetic oligonucleotide
  Sense strand starting at position 53 of SEQ ID NO: 1888627
ggaguaagguggccuuauu

SEQ ID NO: 2546465 - RNA, 19 nt, Artificial Sequence
  Description of Artificial Sequence: Synthetic oligonucleotide
  Antisense strand to SEQ ID NO: 2546464
aauaaggccaccuuacucc

SEQ ID NO: 2546466 - RNA, 19 nt, Artificial Sequence
  Description of Artificial Sequence: Synthetic oligonucleotide
  Sense strand starting at position 1898 of SEQ ID NO: 1888627
gcacuuucucagugaauau

SEQ ID NO: 2546467 - RNA, 19 nt, Artificial Sequence
  Description of Artificial Sequence: Synthetic oligonucleotide
  Antisense strand to SEQ ID NO: 2546466
auauucacugagaaagugc

SEQ ID NO: 2546468 - RNA, 19 nt, Artificial Sequence
  Description of Artificial Sequence: Synthetic oligonucleotide
  Sense strand starting at position 3470 of SEQ ID NO: 1888627
uucagagugguuuguagau

SEQ ID NO: 2546469 - RNA, 19 nt, Artificial Sequence
  Description of Artificial Sequence: Synthetic oligonucleotide
  Antisense strand to SEQ ID NO: 2546468
aucuacaaaccacucugaa

SEQ ID NO: 2546470 - RNA, 19 nt, Artificial Sequence
  Description of Artificial Sequence: Synthetic oligonucleotide
  Sense strand starting at position 97 of SEQ ID NO: 1888628
auaaauccucagggacuuu

SEQ ID NO: 2546471 - RNA, 19 nt, Artificial Sequence
  Description of Artificial Sequence: Synthetic oligonucleotide
  Antisense strand to SEQ ID NO: 2546470
aaagucccugaggauuuau

SEQ ID NO: 2546472 - RNA, 19 nt, Artificial Sequence
  Description of Artificial Sequence: Synthetic oligonucleotide
  Sense strand starting at position 2514 of SEQ ID NO: 1888628
gcgccaagcaugucuuaga

SEQ ID NO: 2546473 - RNA, 19 nt, Artificial Sequence
  Description of Artificial Sequence: Synthetic oligonucleotide
  Antisense strand to SEQ ID NO: 2546472
ucuaagacaugcuuggcgc

SEQ ID NO: 2546474 - RNA, 19 nt, Artificial Sequence
  Description of Artificial Sequence: Synthetic oligonucleotide
  Sense strand starting at position 1829 of SEQ ID NO: 1888628
gucagugcugcuguacaca

SEQ ID NO: 2546475 - RNA, 19 nt, Artificial Sequence
  Description of Artificial Sequence: Synthetic oligonucleotide
  Antisense strand to SEQ ID NO: 2546474
uguguacagcagcacugac

SEQ ID NO: 2546476 - RNA, 19 nt, Artificial Sequence
  Description of Artificial Sequence: Synthetic oligonucleotide
  Sense strand starting at position 82 of SEQ ID NO: 1888628
cagggaaguuuccugauaa

SEQ ID NO: 2546477 - RNA, 19 nt, Artificial Sequence
  Description of Artificial Sequence: Synthetic oligonucleotide
  Antisense strand to SEQ ID NO: 2546476
uuaucaggaaacuucccug

SEQ ID NO: 2546478 - RNA, 19 nt, Artificial Sequence
  Description of Artificial Sequence: Synthetic oligonucleotide
  Sense strand starting at position 3593 of SEQ ID NO: 1888628
ggaauucuccaugagccua

SEQ ID NO: 2546479 - RNA, 19 nt, Artificial Sequence
  Description of Artificial Sequence: Synthetic oligonucleotide
  Antisense strand to SEQ ID NO: 2546478
uaggcucauggagaauucc

SEQ ID NO: 2546480 - RNA, 19 nt, Artificial Sequence
  Description of Artificial Sequence: Synthetic oligonucleotide
  Sense strand starting at position 3590 of SEQ ID NO: 1888628
cugggaauucuccaugagc

SEQ ID NO: 2546481 - RNA, 19 nt, Artificial Sequence
  Description of Artificial Sequence: Synthetic oligonucleotide
  Antisense strand to SEQ ID NO: 2546480
gcucauggagaauucccag

SEQ ID NO: 2546482 - RNA, 19 nt, Artificial Sequence
  Description of Artificial Sequence: Synthetic oligonucleotide
  Sense strand starting at position 2450 of SEQ ID NO: 1888628
agggaaaucauggguuucu

SEQ ID NO: 2546483 - RNA, 19 nt, Artificial Sequence
  Description of Artificial Sequence: Synthetic oligonucleotide
  Antisense strand to SEQ ID NO: 2546482
agaaacccaugauuucccu

SEQ ID NO: 2546484 - RNA, 19 nt, Artificial Sequence
  Description of Artificial Sequence: Synthetic oligonucleotide
  Sense strand starting at position 2451 of SEQ ID NO: 1888628
gggaaaucauggguuucug

SEQ ID NO: 2546485 - RNA, 19 nt, Artificial Sequence
  Description of Artificial Sequence: Synthetic oligonucleotide
  Antisense strand to SEQ ID NO: 2546484
cagaaacccaugauuuccc

SEQ ID NO: 2546486 - RNA, 19 nt, Artificial Sequence
  Description of Artificial Sequence: Synthetic oligonucleotide
  Sense strand starting at position 414 of SEQ ID NO: 1888628
ggauucuuauagcuaagga

SEQ ID NO: 2546487 - RNA, 19 nt, Artificial Sequence
  Description of Artificial Sequence: Synthetic oligonucleotide
  Antisense strand to SEQ ID NO: 2546486
uccuuagcuauaagaaucc

SEQ ID NO: 2546488 - RNA, 19 nt, Artificial Sequence
  Description of Artificial Sequence: Synthetic oligonucleotide
  Sense strand starting at position 2970 of SEQ ID NO: 1888628
ucccuuugugaccagaauu

SEQ ID NO: 2546489 - RNA, 19 nt, Artificial Sequence
  Description of Artificial Sequence: Synthetic oligonucleotide
  Antisense strand to SEQ ID NO: 2546488
aauucuggucacaaaggga

SEQ ID NO: 2546490 - RNA, 19 nt, Artificial Sequence
  Description of Artificial Sequence: Synthetic oligonucleotide
  Sense strand starting at position 3726 of SEQ ID NO: 1888628
ugcugcugucugucaugua

SEQ ID NO: 2546491 - RNA, 19 nt, Artificial Sequence
  Description of Artificial Sequence: Synthetic oligonucleotide
  Antisense strand to SEQ ID NO: 2546490
uacaugacagacagcagca

SEQ ID NO: 2546492 - RNA, 19 nt, Artificial Sequence
  Description of Artificial Sequence: Synthetic oligonucleotide
  Sense strand starting at position 2854 of SEQ ID NO: 1888628
cugguauugcaagaguuaa

SEQ ID NO: 2546493 - RNA, 19 nt, Artificial Sequence
  Description of Artificial Sequence: Synthetic oligonucleotide
  Antisense strand to SEQ ID NO: 2546492
uuaacucuugcaauaccag

SEQ ID NO: 2546494 - RNA, 19 nt, Artificial Sequence
  Description of Artificial Sequence: Synthetic oligonucleotide
  Sense strand starting at position 339 of SEQ ID NO: 1888628
agaggaacagucugcuuga

SEQ ID NO: 2546495 - RNA, 19 nt, Artificial Sequence
  Description of Artificial Sequence: Synthetic oligonucleotide
  Antisense strand to SEQ ID NO: 2546494
ucaagcagacuguuccucu

SEQ ID NO: 2546496 - RNA, 19 nt, Artificial Sequence
  Description of Artificial Sequence: Synthetic oligonucleotide
  Sense strand starting at position 3060 of SEQ ID NO: 1888628
cgagaauaacagggcucuu

SEQ ID NO: 2546497 - RNA, 19 nt, Artificial Sequence
  Description of Artificial Sequence: Synthetic oligonucleotide
  Antisense strand to SEQ ID NO: 2546496
aagagcccuguuauucucg

SEQ ID NO: 2546498 - RNA, 19 nt, Artificial Sequence
  Description of Artificial Sequence: Synthetic oligonucleotide
  Sense strand starting at position 2521 of SEQ ID NO: 1888628
gcaugucuuagagacagca

SEQ ID NO: 2546499 - RNA, 19 nt, Artificial Sequence
  Description of Artificial Sequence: Synthetic oligonucleotide
  Antisense strand to SEQ ID NO: 2546498
ugcugucucuaagacaugc

SEQ ID NO: 2546500 - RNA, 19 nt, Artificial Sequence
  Description of Artificial Sequence: Synthetic oligonucleotide
  Sense strand starting at position 340 of SEQ ID NO: 1888628
gaggaacagucugcuugau

SEQ ID NO: 2546501 - RNA, 19 nt, Artificial Sequence
  Description of Artificial Sequence: Synthetic oligonucleotide
  Antisense strand to SEQ ID NO: 2546500
aucaagcagacuguuccuc

SEQ ID NO: 2546502 - RNA, 19 nt, Artificial Sequence
  Description of Artificial Sequence: Synthetic oligonucleotide
  Sense strand starting at position 3592 of SEQ ID NO: 1888628
gggaauucuccaugagccu

SEQ ID NO: 2546503 - RNA, 19 nt, Artificial Sequence
  Description of Artificial Sequence: Synthetic oligonucleotide
  Antisense strand to SEQ ID NO: 2546502
aggcucauggagaauuccc

SEQ ID NO: 2546504 - RNA, 19 nt, Artificial Sequence
  Description of Artificial Sequence: Synthetic oligonucleotide
  Sense strand starting at position 2862 of SEQ ID NO: 1888628
gcaagaguuaaaugugaug

SEQ ID NO: 2546505 - RNA, 19 nt, Artificial Sequence
  Description of Artificial Sequence: Synthetic oligonucleotide
  Antisense strand to SEQ ID NO: 2546504
caucacauuuaacucuugc

SEQ ID NO: 2546506 - RNA, 19 nt, Artificial Sequence
  Description of Artificial Sequence: Synthetic oligonucleotide
  Sense strand starting at position 3049 of SEQ ID NO: 1888628
gcaguucagggcgagaaua

SEQ ID NO: 2546507 - RNA, 19 nt, Artificial Sequence
  Description of Artificial Sequence: Synthetic oligonucleotide
  Antisense strand to SEQ ID NO: 2546506
uauucucgcccugaacugc

SEQ ID NO: 2546508 - RNA, 19 nt, Artificial Sequence
  Description of Artificial Sequence: Synthetic oligonucleotide
  Sense strand starting at position 3815 of SEQ ID NO: 1888628
gaggaugggagccgucaau

SEQ ID NO: 2546509 - RNA, 19 nt, Artificial Sequence
  Description of Artificial Sequence: Synthetic oligonucleotide
  Antisense strand to SEQ ID NO: 2546508
auugacggcucccauccuc

SEQ ID NO: 2546510 - RNA, 19 nt, Artificial Sequence
  Description of Artificial Sequence: Synthetic oligonucleotide
  Sense strand starting at position 2018 of SEQ ID NO: 1888628
gggcuuccuccagggaagu

SEQ ID NO: 2546511 - RNA, 19 nt, Artificial Sequence
  Description of Artificial Sequence: Synthetic oligonucleotide
  Antisense strand to SEQ ID NO: 2546510
acuucccuggaggaagccc

SEQ ID NO: 2546512 - RNA, 19 nt, Artificial Sequence
  Description of Artificial Sequence: Synthetic oligonucleotide
  Sense strand starting at position 2016 of SEQ ID NO: 1888628
gcgggcuuccuccagggaa

SEQ ID NO: 2546513 - RNA, 19 nt, Artificial Sequence
  Description of Artificial Sequence: Synthetic oligonucleotide
  Antisense strand to SEQ ID NO: 2546512
uucccuggaggaagcccgc

SEQ ID NO: 2546514 - RNA, 19 nt, Artificial Sequence
  Description of Artificial Sequence: Synthetic oligonucleotide
  Sense strand starting at position 2980 of SEQ ID NO: 1888628
accagaauucuguggcuua

SEQ ID NO: 2546515 - RNA, 19 nt, Artificial Sequence
  Description of Artificial Sequence: Synthetic oligonucleotide
  Antisense strand to SEQ ID NO: 2546514
uaagccacagaauucuggu

SEQ ID NO: 2546516 - RNA, 19 nt, Artificial Sequence
  Description of Artificial Sequence: Synthetic oligonucleotide
  Sense strand starting at position 344 of SEQ ID NO: 1888628
aacagucugcuugauguuu

SEQ ID NO: 2546517 - RNA, 19 nt, Artificial Sequence
  Description of Artificial Sequence: Synthetic oligonucleotide
  Antisense strand to SEQ ID NO: 2546516
aaacaucaagcagacuguu

SEQ ID NO: 2546518 - RNA, 19 nt, Artificial Sequence
  Description of Artificial Sequence: Synthetic oligonucleotide
  Sense strand starting at position 2568 of SEQ ID NO: 1888628
ggccuucucugggucagaa

SEQ ID NO: 2546519 - RNA, 19 nt, Artificial Sequence
  Description of Artificial Sequence: Synthetic oligonucleotide
  Antisense strand to SEQ ID NO: 2546518
uucugacccagagaaggcc

SEQ ID NO: 2546520 - RNA, 19 nt, Artificial Sequence
  Description of Artificial Sequence: Synthetic oligonucleotide
  Sense strand starting at position 2567 of SEQ ID NO: 1888628
aggccuucucugggucaga

SEQ ID NO: 2546521 - RNA, 19 nt, Artificial Sequence
  Description of Artificial Sequence: Synthetic oligonucleotide
  Antisense strand to SEQ ID NO: 2546520
ucugacccagagaaggccu

SEQ ID NO: 2546522 - RNA, 19 nt, Artificial Sequence
  Description of Artificial Sequence: Synthetic oligonucleotide
  Sense strand starting at position 2983 of SEQ ID NO: 1888628
agaauucuguggcuuacuu

SEQ ID NO: 2546523 - RNA, 19 nt, Artificial Sequence
  Description of Artificial Sequence: Synthetic oligonucleotide
  Antisense strand to SEQ ID NO: 2546522
aaguaagccacagaauucu

SEQ ID NO: 2546524 - RNA, 19 nt, Artificial Sequence
  Description of Artificial Sequence: Synthetic oligonucleotide
  Sense strand starting at position 3645 of SEQ ID NO: 1888628
uuggccaauccuggucaua

SEQ ID NO: 2546525 - RNA, 19 nt, Artificial Sequence
  Description of Artificial Sequence: Synthetic oligonucleotide
  Antisense strand to SEQ ID NO: 2546524
uaugaccaggauuggccaa

SEQ ID NO: 2546526 - RNA, 19 nt, Artificial Sequence
  Description of Artificial Sequence: Synthetic oligonucleotide
  Sense strand starting at position 3742 of SEQ ID NO: 1888628
guaggucacuugucagauc

SEQ ID NO: 2546527 - RNA, 19 nt, Artificial Sequence
  Description of Artificial Sequence: Synthetic oligonucleotide
  Antisense strand to SEQ ID NO: 2546526
gaucugacaagugaccuac

SEQ ID NO: 2546528 - RNA, 19 nt, Artificial Sequence
  Description of Artificial Sequence: Synthetic oligonucleotide
  Sense strand starting at position 342 of SEQ ID NO: 1888628
ggaacagucugcuugaugu

SEQ ID NO: 2546529 - RNA, 19 nt, Artificial Sequence
  Description of Artificial Sequence: Synthetic oligonucleotide
  Antisense strand to SEQ ID NO: 2546528
acaucaagcagacuguucc

SEQ ID NO: 2546530 - RNA, 19 nt, Artificial Sequence
  Description of Artificial Sequence: Synthetic oligonucleotide
  Sense strand starting at position 3738 of SEQ ID NO: 1888628
ucauguaggucacuuguca

SEQ ID NO: 2546531 - RNA, 19 nt, Artificial Sequence
  Description of Artificial Sequence: Synthetic oligonucleotide
  Antisense strand to SEQ ID NO: 2546530
ugacaagugaccuacauga

SEQ ID NO: 2546532 - RNA, 19 nt, Artificial Sequence
  Description of Artificial Sequence: Synthetic oligonucleotide
  Sense strand starting at position 3048 of SEQ ID NO: 1888628
ggcaguucagggcgagaau

SEQ ID NO: 2546533 - RNA, 19 nt, Artificial Sequence
  Description of Artificial Sequence: Synthetic oligonucleotide
  Antisense strand to SEQ ID NO: 2546532
auucucgcccugaacugcc

SEQ ID NO: 2546534 - RNA, 19 nt, Artificial Sequence
  Description of Artificial Sequence: Synthetic oligonucleotide
  Sense strand starting at position 628 of SEQ ID NO: 1888628
ugggcagagucuguacuuu

SEQ ID NO: 2546535 - RNA, 19 nt, Artificial Sequence
  Description of Artificial Sequence: Synthetic oligonucleotide
  Antisense strand to SEQ ID NO: 2546534
aaaguacagacucugccca

SEQ ID NO: 2546536 - RNA, 19 nt, Artificial Sequence
  Description of Artificial Sequence: Synthetic oligonucleotide
  Sense strand starting at position 619 of SEQ ID NO: 1888628
ucuuuagucugggcagagu

SEQ ID NO: 2546537 - RNA, 19 nt, Artificial Sequence
  Description of Artificial Sequence: Synthetic oligonucleotide
  Antisense strand to SEQ ID NO: 2546536
acucugcccagacuaaaga

SEQ ID NO: 2546538 - RNA, 19 nt, Artificial Sequence
  Description of Artificial Sequence: Synthetic oligonucleotide
  Sense strand starting at position 3071 of SEQ ID NO: 1888628
gggcucuuucccugcaaca

SEQ ID NO: 2546539 - RNA, 19 nt, Artificial Sequence
  Description of Artificial Sequence: Synthetic oligonucleotide
  Antisense strand to SEQ ID NO: 2546538
uguugcagggaaagagccc

SEQ ID NO: 2546540 - RNA, 19 nt, Artificial Sequence
  Description of Artificial Sequence: Synthetic oligonucleotide
  Sense strand starting at position 427 of SEQ ID NO: 1888628
uaaggaaaguucuagauua

SEQ ID NO: 2546541 - RNA, 19 nt, Artificial Sequence
  Description of Artificial Sequence: Synthetic oligonucleotide
  Antisense strand to SEQ ID NO: 2546540
uaaucuagaacuuuccuua

SEQ ID NO: 2546542 - RNA, 19 nt, Artificial Sequence
  Description of Artificial Sequence: Synthetic oligonucleotide
  Sense strand starting at position 50 of SEQ ID NO: 1888628
cacuguguaccgcauagua

SEQ ID NO: 2546543 - RNA, 19 nt, Artificial Sequence
  Description of Artificial Sequence: Synthetic oligonucleotide
  Antisense strand to SEQ ID NO: 2546542
uacuaugcgguacacagug

SEQ ID NO: 2546544 - RNA, 19 nt, Artificial Sequence
  Description of Artificial Sequence: Synthetic oligonucleotide
  Sense strand starting at position 606 of SEQ ID NO: 1888628
uuagcuguaucuuucuuua

SEQ ID NO: 2546545 - RNA, 19 nt, Artificial Sequence
  Description of Artificial Sequence: Synthetic oligonucleotide
  Antisense strand to SEQ ID NO: 2546544
uaaagaaagauacagcuaa

SEQ ID NO: 2546546 - RNA, 19 nt, Artificial Sequence
  Description of Artificial Sequence: Synthetic oligonucleotide
  Sense strand starting at position 323 of SEQ ID NO: 1888628
cccguacaggcuuguaaga

SEQ ID NO: 2546547 - RNA, 19 nt, Artificial Sequence
  Description of Artificial Sequence: Synthetic oligonucleotide
  Antisense strand to SEQ ID NO: 2546546
ucuuacaagccuguacggg

SEQ ID NO: 2546548 - RNA, 19 nt, Artificial Sequence
  Description of Artificial Sequence: Synthetic oligonucleotide
  Sense strand starting at position 138 of SEQ ID NO: 1888628
uuccauagccaccguuaau

SEQ ID NO: 2546549 - RNA, 19 nt, Artificial Sequence
  Description of Artificial Sequence: Synthetic oligonucleotide
  Antisense strand to SEQ ID NO: 2546548
auuaacgguggcuauggaa

SEQ ID NO: 2546550 - RNA, 19 nt, Artificial Sequence
  Description of Artificial Sequence: Synthetic oligonucleotide
  Sense strand starting at position 1376 of SEQ ID NO: 1888629
aggaaauugcugcaaacua

SEQ ID NO: 2546551 - RNA, 19 nt, Artificial Sequence
  Description of Artificial Sequence: Synthetic oligonucleotide
  Antisense strand to SEQ ID NO: 2546550
uaguuugcagcaauuuccu

SEQ ID NO: 2546552 - RNA, 19 nt, Artificial Sequence
  Description of Artificial Sequence: Synthetic oligonucleotide
  Sense strand starting at position 2991 of SEQ ID NO: 1888629
gaaauuagcagggaguagu

SEQ ID NO: 2546553 - RNA, 19 nt, Artificial Sequence
  Description of Artificial Sequence: Synthetic oligonucleotide
  Antisense strand to SEQ ID NO: 2546552
acuacucccugcuaauuuc

SEQ ID NO: 2546554 - RNA, 19 nt, Artificial Sequence
  Description of Artificial Sequence: Synthetic oligonucleotide
  Sense strand starting at position 2876 of SEQ ID NO: 1888629
uuaagagaugggugaggua

SEQ ID NO: 2546555 - RNA, 19 nt, Artificial Sequence
  Description of Artificial Sequence: Synthetic oligonucleotide
  Antisense strand to SEQ ID NO: 2546554
uaccucacccaucucuuaa

SEQ ID NO: 2546556 - RNA, 19 nt, Artificial Sequence
  Description of Artificial Sequence: Synthetic oligonucleotide
  Sense strand starting at position 1215 of SEQ ID NO: 1888629
ggaggaagcaugggaugua

SEQ ID NO: 2546557 - RNA, 19 nt, Artificial Sequence
  Description of Artificial Sequence: Synthetic oligonucleotide
  Antisense strand to SEQ ID NO: 2546556
uacaucccaugcuuccucc

SEQ ID NO: 2546558 - RNA, 19 nt, Artificial Sequence
  Description of Artificial Sequence: Synthetic oligonucleotide
  Sense strand starting at position 2872 of SEQ ID NO: 1888629
uuccuuaagagauggguga

SEQ ID NO: 2546559 - RNA, 19 nt, Artificial Sequence
  Description of Artificial Sequence: Synthetic oligonucleotide
  Antisense strand to SEQ ID NO: 2546558
ucacccaucucuuaaggaa

SEQ ID NO: 2546560 - RNA, 19 nt, Artificial Sequence
  Description of Artificial Sequence: Synthetic oligonucleotide
  Sense strand starting at position 2077 of SEQ ID NO: 1888629
cuggcaaaugcuuaacaga

SEQ ID NO: 2546561 - RNA, 19 nt, Artificial Sequence
  Description of Artificial Sequence: Synthetic oligonucleotide
  Antisense strand to SEQ ID NO: 2546560
ucuguuaagcauuugccag

SEQ ID NO: 2546562 - RNA, 19 nt, Artificial Sequence
  Description of Artificial Sequence: Synthetic oligonucleotide
  Sense strand starting at position 2602 of SEQ ID NO: 1888629
uaauguguuguguuugcga

SEQ ID NO: 2546563 - RNA, 19 nt, Artificial Sequence
  Description of Artificial Sequence: Synthetic oligonucleotide
  Antisense strand to SEQ ID NO: 2546562
ucgcaaacacaacacauua

SEQ ID NO: 2546564 - RNA, 19 nt, Artificial Sequence
  Description of Artificial Sequence: Synthetic oligonucleotide
  Sense strand starting at position 3947 of SEQ ID NO: 1888629
ggcguuagucacaggguau

SEQ ID NO: 2546565 - RNA, 19 nt, Artificial Sequence
  Description of Artificial Sequence: Synthetic oligonucleotide
  Antisense strand to SEQ ID NO: 2546564
auacccugugacuaacgcc

SEQ ID NO: 2546566 - RNA, 19 nt, Artificial Sequence
  Description of Artificial Sequence: Synthetic oligonucleotide
  Sense strand starting at position 1645 of SEQ ID NO: 1888629
uucugaagccuauaaguau

SEQ ID NO: 2546567 - RNA, 19 nt, Artificial Sequence
  Description of Artificial Sequence: Synthetic oligonucleotide
  Antisense strand to SEQ ID NO: 2546566
auacuuauaggcuucagaa

SEQ ID NO: 2546568 - RNA, 19 nt, Artificial Sequence
  Description of Artificial Sequence: Synthetic oligonucleotide
  Sense strand starting at position 2299 of SEQ ID NO: 1888629
cugauucucccagaaugcu

SEQ ID NO: 2546569 - RNA, 19 nt, Artificial Sequence
  Description of Artificial Sequence: Synthetic oligonucleotide
  Antisense strand to SEQ ID NO: 2546568
agcauucugggagaaucag

SEQ ID NO: 2546570 - RNA, 19 nt, Artificial Sequence
  Description of Artificial Sequence: Synthetic oligonucleotide
  Sense strand starting at position 1264 of SEQ ID NO: 1888629
auuagcauucgugaaacag

SEQ ID NO: 2546571 - RNA, 19 nt, Artificial Sequence
  Description of Artificial Sequence: Synthetic oligonucleotide
  Antisense strand to SEQ ID NO: 2546570
cuguuucacgaaugcuaau

SEQ ID NO: 2546572 - RNA, 19 nt, Artificial Sequence
  Description of Artificial Sequence: Synthetic oligonucleotide
  Sense strand starting at position 1180 of SEQ ID NO: 1888629
uucugaaaguggguaauau

SEQ ID NO: 2546573 - RNA, 19 nt, Artificial Sequence
  Description of Artificial Sequence: Synthetic oligonucleotide
  Antisense strand to SEQ ID NO: 2546572
auauuacccacuuucagaa

SEQ ID NO: 2546574 - RNA, 19 nt, Artificial Sequence
  Description of Artificial Sequence: Synthetic oligonucleotide
  Sense strand starting at position 3958 of SEQ ID NO: 1888629
caggguauuccuuaaagcu

SEQ ID NO: 2546575 - RNA, 19 nt, Artificial Sequence
  Description of Artificial Sequence: Synthetic oligonucleotide
  Antisense strand to SEQ ID NO: 2546574
agcuuuaaggaauacccug

SEQ ID NO: 2546576 - RNA, 19 nt, Artificial Sequence
  Description of Artificial Sequence: Synthetic oligonucleotide
  Sense strand starting at position 2989 of SEQ ID NO: 1888629
acgaaauuagcagggagua

SEQ ID NO: 2546577 - RNA, 19 nt, Artificial Sequence
  Description of Artificial Sequence: Synthetic oligonucleotide
  Antisense strand to SEQ ID NO: 2546576
uacucccugcuaauuucgu

SEQ ID NO: 2546578 - RNA, 19 nt, Artificial Sequence
  Description of Artificial Sequence: Synthetic oligonucleotide
  Sense strand starting at position 2356 of SEQ ID NO: 1888629
uuacaucugugacuauuga

SEQ ID NO: 2546579 - RNA, 19 nt, Artificial Sequence
  Description of Artificial Sequence: Synthetic oligonucleotide
  Antisense strand to SEQ ID NO: 2546578
ucaauagucacagauguaa

SEQ ID NO: 2546580 - RNA, 19 nt, Artificial Sequence
  Description of Artificial Sequence: Synthetic oligonucleotide
  Sense strand starting at position 2609 of SEQ ID NO: 1888629
uuguguuugcgagugucca

SEQ ID NO: 2546581 - RNA, 19 nt, Artificial Sequence
  Description of Artificial Sequence: Synthetic oligonucleotide
  Antisense strand to SEQ ID NO: 2546580
uggacacucgcaaacacaa

SEQ ID NO: 2546582 - RNA, 19 nt, Artificial Sequence
  Description of Artificial Sequence: Synthetic oligonucleotide
  Sense strand starting at position 228 of SEQ ID NO: 1888629
gaguaaccaugucuuauga

SEQ ID NO: 2546583 - RNA, 19 nt, Artificial Sequence
  Description of Artificial Sequence: Synthetic oligonucleotide
  Antisense strand to SEQ ID NO: 2546582
ucauaagacaugguuacuc

SEQ ID NO: 2546584 - RNA, 19 nt, Artificial Sequence
  Description of Artificial Sequence: Synthetic oligonucleotide
  Sense strand starting at position 3847 of SEQ ID NO: 1888629
auacauucucccugaggua

SEQ ID NO: 2546585 - RNA, 19 nt, Artificial Sequence
  Description of Artificial Sequence: Synthetic oligonucleotide
  Antisense strand to SEQ ID NO: 2546584
uaccucagggagaauguau

SEQ ID NO: 2546586 - RNA, 19 nt, Artificial Sequence
  Description of Artificial Sequence: Synthetic oligonucleotide
  Sense strand starting at position 1493 of SEQ ID NO: 1888629
ggcucccuaccauggaaua

SEQ ID NO: 2546587 - RNA, 19 nt, Artificial Sequence
  Description of Artificial Sequence: Synthetic oligonucleotide
  Antisense strand to SEQ ID NO: 2546586
uauuccaugguagggagcc

SEQ ID NO: 2546588 - RNA, 19 nt, Artificial Sequence
  Description of Artificial Sequence: Synthetic oligonucleotide
  Sense strand starting at position 1306 of SEQ ID NO: 1888629
gagauaaacugggaaauaa

SEQ ID NO: 2546589 - RNA, 19 nt, Artificial Sequence
  Description of Artificial Sequence: Synthetic oligonucleotide
  Antisense strand to SEQ ID NO: 2546588
uuauuucccaguuuaucuc

SEQ ID NO: 2546590 - RNA, 19 nt, Artificial Sequence
  Description of Artificial Sequence: Synthetic oligonucleotide
  Sense strand starting at position 263 of SEQ ID NO: 1888629
aagggccugccauauagua

SEQ ID NO: 2546591 - RNA, 19 nt, Artificial Sequence
  Description of Artificial Sequence: Synthetic oligonucleotide
  Antisense strand to SEQ ID NO: 2546590
uacuauauggcaggcccuu

SEQ ID NO: 2546592 - RNA, 19 nt, Artificial Sequence
  Description of Artificial Sequence: Synthetic oligonucleotide
  Sense strand starting at position 2352 of SEQ ID NO: 1888629
acucuuacaucugugacua

SEQ ID NO: 2546593 - RNA, 19 nt, Artificial Sequence
  Description of Artificial Sequence: Synthetic oligonucleotide
  Antisense strand to SEQ ID NO: 2546592
uagucacagauguaagagu

SEQ ID NO: 2546594 - RNA, 19 nt, Artificial Sequence
  Description of Artificial Sequence: Synthetic oligonucleotide
  Sense strand starting at position 239 of SEQ ID NO: 1888629
ucuuaugagucaccauauu

SEQ ID NO: 2546595 - RNA, 19 nt, Artificial Sequence
  Description of Artificial Sequence: Synthetic oligonucleotide
  Antisense strand to SEQ ID NO: 2546594
aauauggugacucauaaga

SEQ ID NO: 2546596 - RNA, 19 nt, Artificial Sequence
  Description of Artificial Sequence: Synthetic oligonucleotide
  Sense strand starting at position 2308 of SEQ ID NO: 1888629
ccagaaugcuuuccuagau

SEQ ID NO: 2546597 - RNA, 19 nt, Artificial Sequence
  Description of Artificial Sequence: Synthetic oligonucleotide
  Antisense strand to SEQ ID NO: 2546596
aucuaggaaagcauucugg

SEQ ID NO: 2546598 - RNA, 19 nt, Artificial Sequence
  Description of Artificial Sequence: Synthetic oligonucleotide
  Sense strand starting at position 1997 of SEQ ID NO: 1888629
ugaucaucugucuauuggu

SEQ ID NO: 2546599 - RNA, 19 nt, Artificial Sequence
  Description of Artificial Sequence: Synthetic oligonucleotide
  Antisense strand to SEQ ID NO: 2546598
accaauagacagaugauca

SEQ ID NO: 2546600 - RNA, 19 nt, Artificial Sequence
  Description of Artificial Sequence: Synthetic oligonucleotide
  Sense strand starting at position 1178 of SEQ ID NO: 1888629
cuuucugaaaguggguaau

SEQ ID NO: 2546601 - RNA, 19 nt, Artificial Sequence
  Description of Artificial Sequence: Synthetic oligonucleotide
  Antisense strand to SEQ ID NO: 2546600
auuacccacuuucagaaag

SEQ ID NO: 2546602 - RNA, 19 nt, Artificial Sequence
  Description of Artificial Sequence: Synthetic oligonucleotide
  Sense strand starting at position 245 of SEQ ID NO: 1888629
gagucaccauauucucgaa

SEQ ID NO: 2546603 - RNA, 19 nt, Artificial Sequence
  Description of Artificial Sequence: Synthetic oligonucleotide
  Antisense strand to SEQ ID NO: 2546602
uucgagaauauggugacuc

SEQ ID NO: 2546604 - RNA, 19 nt, Artificial Sequence
  Description of Artificial Sequence: Synthetic oligonucleotide
  Sense strand starting at position 271 of SEQ ID NO: 1888629
gccauauaguagguauaaa

SEQ ID NO: 2546605 - RNA, 19 nt, Artificial Sequence
  Description of Artificial Sequence: Synthetic oligonucleotide
  Antisense strand to SEQ ID NO: 2546604
uuuauaccuacuauauggc

SEQ ID NO: 2546606 - RNA, 19 nt, Artificial Sequence
  Description of Artificial Sequence: Synthetic oligonucleotide
  Sense strand starting at position 1170 of SEQ ID NO: 1888629
cagcaagucuuucugaaag

SEQ ID NO: 2546607 - RNA, 19 nt, Artificial Sequence
  Description of Artificial Sequence: Synthetic oligonucleotide
  Antisense strand to SEQ ID NO: 2546606
cuuucagaaagacuugcug

SEQ ID NO: 2546608 - RNA, 19 nt, Artificial Sequence
  Description of Artificial Sequence: Synthetic oligonucleotide
  Sense strand starting at position 3954 of SEQ ID NO: 1888629
gucacaggguauuccuuaa

SEQ ID NO: 2546609 - RNA, 19 nt, Artificial Sequence
  Description of Artificial Sequence: Synthetic oligonucleotide
  Antisense strand to SEQ ID NO: 2546608
uuaaggaauacccugugac

SEQ ID NO: 2546610 - RNA, 19 nt, Artificial Sequence
  Description of Artificial Sequence: Synthetic oligonucleotide
  Sense strand starting at position 2353 of SEQ ID NO: 1888629
cucuuacaucugugacuau

SEQ ID NO: 2546611 - RNA, 19 nt, Artificial Sequence
  Description of Artificial Sequence: Synthetic oligonucleotide
  Antisense strand to SEQ ID NO: 2546610
auagucacagauguaagag

SEQ ID NO: 2546612 - RNA, 19 nt, Artificial Sequence
  Description of Artificial Sequence: Synthetic oligonucleotide
  Sense strand starting at position 1262 of SEQ ID NO: 1888629
gaauuagcauucgugaaac

SEQ ID NO: 2546613 - RNA, 19 nt, Artificial Sequence
  Description of Artificial Sequence: Synthetic oligonucleotide
  Antisense strand to SEQ ID NO: 2546612
guuucacgaaugcuaauuc

SEQ ID NO: 2546614 - RNA, 19 nt, Artificial Sequence
  Description of Artificial Sequence: Synthetic oligonucleotide
  Sense strand starting at position 2279 of SEQ ID NO: 1888629
uguaaauuccacugagcca

SEQ ID NO: 2546615 - RNA, 19 nt, Artificial Sequence
  Description of Artificial Sequence: Synthetic oligonucleotide
  Antisense strand to SEQ ID NO: 2546614
uggcucaguggaauuuaca

SEQ ID NO: 2546616 - RNA, 19 nt, Artificial Sequence
  Description of Artificial Sequence: Synthetic oligonucleotide
  Sense strand starting at position 270 of SEQ ID NO: 1888629
ugccauauaguagguauaa

SEQ ID NO: 2546617 - RNA, 19 nt, Artificial Sequence
  Description of Artificial Sequence: Synthetic oligonucleotide
  Antisense strand to SEQ ID NO: 2546616
uuauaccuacuauauggca

SEQ ID NO: 2546618 - RNA, 19 nt, Artificial Sequence
  Description of Artificial Sequence: Synthetic oligonucleotide
  Sense strand starting at position 795 of SEQ ID NO: 1888629
ugaggcuuuacugguggau

SEQ ID NO: 2546619 - RNA, 19 nt, Artificial Sequence
  Description of Artificial Sequence: Synthetic oligonucleotide
  Antisense strand to SEQ ID NO: 2546618
auccaccaguaaagccuca

SEQ ID NO: 2546620 - RNA, 19 nt, Artificial Sequence
  Description of Artificial Sequence: Synthetic oligonucleotide
  Sense strand starting at position 2837 of SEQ ID NO: 1888629
uuauaauggcggcaguuaa

SEQ ID NO: 2546621 - RNA, 19 nt, Artificial Sequence
  Description of Artificial Sequence: Synthetic oligonucleotide
  Antisense strand to SEQ ID NO: 2546620
uuaacugccgccauuauaa

SEQ ID NO: 2546622 - RNA, 19 nt, Artificial Sequence
  Description of Artificial Sequence: Synthetic oligonucleotide
  Sense strand starting at position 1168 of SEQ ID NO: 1888629
cccagcaagucuuucugaa

SEQ ID NO: 2546623 - RNA, 19 nt, Artificial Sequence
  Description of Artificial Sequence: Synthetic oligonucleotide
  Antisense strand to SEQ ID NO: 2546622
uucagaaagacuugcuggg

SEQ ID NO: 2546624 - RNA, 19 nt, Artificial Sequence
  Description of Artificial Sequence: Synthetic oligonucleotide
  Sense strand starting at position 3290 of SEQ ID NO: 1888629
ugaagucugugcuccaaag

SEQ ID NO: 2546625 - RNA, 19 nt, Artificial Sequence
  Description of Artificial Sequence: Synthetic oligonucleotide
  Antisense strand to SEQ ID NO: 2546624
cuuuggagcacagacuuca

SEQ ID NO: 2546626 - RNA, 19 nt, Artificial Sequence
  Description of Artificial Sequence: Synthetic oligonucleotide
  Sense strand starting at position 749 of SEQ ID NO: 1888629
caggcugaucucugucuaa

SEQ ID NO: 2546627 - RNA, 19 nt, Artificial Sequence
  Description of Artificial Sequence: Synthetic oligonucleotide
  Antisense strand to SEQ ID NO: 2546626
uuagacagagaucagccug

SEQ ID NO: 2546628 - RNA, 19 nt, Artificial Sequence
  Description of Artificial Sequence: Synthetic oligonucleotide
  Sense strand starting at position 761 of SEQ ID NO: 1888629
ugucuaaagucucuucuca

SEQ ID NO: 2546629 - RNA, 19 nt, Artificial Sequence
  Description of Artificial Sequence: Synthetic oligonucleotide
  Antisense strand to SEQ ID NO: 2546628
ugagaagagacuuuagaca

SEQ ID NO: 2546630 - RNA, 19 nt, Artificial Sequence
  Description of Artificial Sequence: Synthetic oligonucleotide
  Sense strand starting at position 2966 of SEQ ID NO: 1888630
uuacauuuaucgucaagug

SEQ ID NO: 2546631 - RNA, 19 nt, Artificial Sequence
  Description of Artificial Sequence: Synthetic oligonucleotide
  Antisense strand to SEQ ID NO: 2546630
cacuugacgauaaauguaa

SEQ ID NO: 2546632 - RNA, 19 nt, Artificial Sequence
  Description of Artificial Sequence: Synthetic oligonucleotide
  Sense strand starting at position 2487 of SEQ ID NO: 1888630
gguguugagguggaaggau

SEQ ID NO: 2546633 - RNA, 19 nt, Artificial Sequence
  Description of Artificial Sequence: Synthetic oligonucleotide
  Antisense strand to SEQ ID NO: 2546632
auccuuccaccucaacacc

SEQ ID NO: 2546634 - RNA, 19 nt, Artificial Sequence
  Description of Artificial Sequence: Synthetic oligonucleotide
  Sense strand starting at position 1556 of SEQ ID NO: 1888630
gccuuauugcuggugucca

SEQ ID NO: 2546635 - RNA, 19 nt, Artificial Sequence
  Description of Artificial Sequence: Synthetic oligonucleotide
  Antisense strand to SEQ ID NO: 2546634
uggacaccagcaauaaggc

SEQ ID NO: 2546636 - RNA, 19 nt, Artificial Sequence
  Description of Artificial Sequence: Synthetic oligonucleotide
  Sense strand starting at position 2933 of SEQ ID NO: 1888630
acggaauagaauugacagu

SEQ ID NO: 2546637 - RNA, 19 nt, Artificial Sequence
  Description of Artificial Sequence: Synthetic oligonucleotide
  Antisense strand to SEQ ID NO: 2546636
acugucaauucuauuccgu

SEQ ID NO: 2546638 - RNA, 19 nt, Artificial Sequence
  Description of Artificial Sequence: Synthetic oligonucleotide
  Sense strand starting at position 674 of SEQ ID NO: 1888630
cagugaguuagaugaagac

SEQ ID NO: 2546639 - RNA, 19 nt, Artificial Sequence
  Description of Artificial Sequence: Synthetic oligonucleotide
  Antisense strand to SEQ ID NO: 2546638
gucuucaucuaacucacug

SEQ ID NO: 2546640 - RNA, 19 nt, Artificial Sequence
  Description of Artificial Sequence: Synthetic oligonucleotide
  Sense strand starting at position 1751 of SEQ ID NO: 1888630
cagugaugcagugaagaca

SEQ ID NO: 2546641 - RNA, 19 nt, Artificial Sequence
  Description of Artificial Sequence: Synthetic oligonucleotide
  Antisense strand to SEQ ID NO: 2546640
ugucuucacugcaucacug

SEQ ID NO: 2546642 - RNA, 19 nt, Artificial Sequence
  Description of Artificial Sequence: Synthetic oligonucleotide
  Sense strand starting at position 3311 of SEQ ID NO: 1888630
guuacaaucgauuaaccua

SEQ ID NO: 2546643 - RNA, 19 nt, Artificial Sequence
  Description of Artificial Sequence: Synthetic oligonucleotide
  Antisense strand to SEQ ID NO: 2546642
uagguuaaucgauuguaac

SEQ ID NO: 2546644 - RNA, 19 nt, Artificial Sequence
  Description of Artificial Sequence: Synthetic oligonucleotide
  Sense strand starting at position 1184 of SEQ ID NO: 1888630
cccagaacgcuauacuaga

SEQ ID NO: 2546645 - RNA, 19 nt, Artificial Sequence
  Description of Artificial Sequence: Synthetic oligonucleotide
  Antisense strand to SEQ ID NO: 2546644
ucuaguauagcguucuggg

SEQ ID NO: 2546646 - RNA, 19 nt, Artificial Sequence
  Description of Artificial Sequence: Synthetic oligonucleotide
  Sense strand starting at position 3565 of SEQ ID NO: 1888630
aaucuuauauaguugggau

SEQ ID NO: 2546647 - RNA, 19 nt, Artificial Sequence
  Description of Artificial Sequence: Synthetic oligonucleotide
  Antisense strand to SEQ ID NO: 2546646
aucccaacuauauaagauu

SEQ ID NO: 2546648 - RNA, 19 nt, Artificial Sequence
  Description of Artificial Sequence: Synthetic oligonucleotide
  Sense strand starting at position 1811 of SEQ ID NO: 1888630
ccaggauuacccugacacu

SEQ ID NO: 2546649 - RNA, 19 nt, Artificial Sequence
  Description of Artificial Sequence: Synthetic oligonucleotide
  Antisense strand to SEQ ID NO: 2546648
agugucaggguaauccugg

SEQ ID NO: 2546650 - RNA, 19 nt, Artificial Sequence
  Description of Artificial Sequence: Synthetic oligonucleotide
  Sense strand starting at position 2998 of SEQ ID NO: 1888630
agacuuuauuagcugggaa

SEQ ID NO: 2546651 - RNA, 19 nt, Artificial Sequence
  Description of Artificial Sequence: Synthetic oligonucleotide
  Antisense strand to SEQ ID NO: 2546650
uucccagcuaauaaagucu

SEQ ID NO: 2546652 - RNA, 19 nt, Artificial Sequence
  Description of Artificial Sequence: Synthetic oligonucleotide
  Sense strand starting at position 1367 of SEQ ID NO: 1888630
ugguauugucuugaggaac

SEQ ID NO: 2546653 - RNA, 19 nt, Artificial Sequence
  Description of Artificial Sequence: Synthetic oligonucleotide
  Antisense strand to SEQ ID NO: 2546652
guuccucaagacaauacca

SEQ ID NO: 2546654 - RNA, 19 nt, Artificial Sequence
  Description of Artificial Sequence: Synthetic oligonucleotide
  Sense strand starting at position 3353 of SEQ ID NO: 1888630
aggucuauaguuuacauua

SEQ ID NO: 2546655 - RNA, 19 nt, Artificial Sequence
  Description of Artificial Sequence: Synthetic oligonucleotide
  Antisense strand to SEQ ID NO: 2546654
uaauguaaacuauagaccu

SEQ ID NO: 2546656 - RNA, 19 nt, Artificial Sequence
  Description of Artificial Sequence: Synthetic oligonucleotide
  Sense strand starting at position 670 of SEQ ID NO: 1888630
ggcacagugaguuagauga

SEQ ID NO: 2546657 - RNA, 19 nt, Artificial Sequence
  Description of Artificial Sequence: Synthetic oligonucleotide
  Antisense strand to SEQ ID NO: 2546656
ucaucuaacucacugugcc

SEQ ID NO: 2546658 - RNA, 19 nt, Artificial Sequence
  Description of Artificial Sequence: Synthetic oligonucleotide
  Sense strand starting at position 1713 of SEQ ID NO: 1888630
cucacuacugagugagaca

SEQ ID NO: 2546659 - RNA, 19 nt, Artificial Sequence
  Description of Artificial Sequence: Synthetic oligonucleotide
  Antisense strand to SEQ ID NO: 2546658
ugucucacucaguagugag

SEQ ID NO: 2546660 - RNA, 19 nt, Artificial Sequence
  Description of Artificial Sequence: Synthetic oligonucleotide
  Sense strand starting at position 2896 of SEQ ID NO: 1888630
gauugugguggugacauaa

SEQ ID NO: 2546661 - RNA, 19 nt, Artificial Sequence
  Description of Artificial Sequence: Synthetic oligonucleotide
  Antisense strand to SEQ ID NO: 2546660
uuaugucaccaccacaauc

SEQ ID NO: 2546662 - RNA, 19 nt, Artificial Sequence
  Description of Artificial Sequence: Synthetic oligonucleotide
  Sense strand starting at position 688 of SEQ ID NO: 1888630
aagacaugggucuggcaga

SEQ ID NO: 2546663 - RNA, 19 nt, Artificial Sequence
  Description of Artificial Sequence: Synthetic oligonucleotide
  Antisense strand to SEQ ID NO: 2546662
ucugccagacccaugucuu

SEQ ID NO: 2546664 - RNA, 19 nt, Artificial Sequence
  Description of Artificial Sequence: Synthetic oligonucleotide
  Sense strand starting at position 3567 of SEQ ID NO: 1888630
ucuuauauaguugggauua

SEQ ID NO: 2546665 - RNA, 19 nt, Artificial Sequence
  Description of Artificial Sequence: Synthetic oligonucleotide
  Antisense strand to SEQ ID NO: 2546664
uaaucccaacuauauaaga

SEQ ID NO: 2546666 - RNA, 19 nt, Artificial Sequence
  Description of Artificial Sequence: Synthetic oligonucleotide
  Sense strand starting at position 3000 of SEQ ID NO: 1888630
acuuuauuagcugggaaug

SEQ ID NO: 2546667 - RNA, 19 nt, Artificial Sequence
  Description of Artificial Sequence: Synthetic oligonucleotide
  Antisense strand to SEQ ID NO: 2546666
cauucccagcuaauaaagu

SEQ ID NO: 2546668 - RNA, 19 nt, Artificial Sequence
  Description of Artificial Sequence: Synthetic oligonucleotide
  Sense strand starting at position 1040 of SEQ ID NO: 1888630
gcagcuaugcaacaauaca

SEQ ID NO: 2546669 - RNA, 19 nt, Artificial Sequence
  Description of Artificial Sequence: Synthetic oligonucleotide
  Antisense strand to SEQ ID NO: 2546668
uguauuguugcauagcugc

SEQ ID NO: 2546670 - RNA, 19 nt, Artificial Sequence
  Description of Artificial Sequence: Synthetic oligonucleotide
  Sense strand starting at position 2893 of SEQ ID NO: 1888630
caagauugugguggugaca

SEQ ID NO: 2546671 - RNA, 19 nt, Artificial Sequence
  Description of Artificial Sequence: Synthetic oligonucleotide
  Antisense strand to SEQ ID NO: 2546670
ugucaccaccacaaucuug

SEQ ID NO: 2546672 - RNA, 19 nt, Artificial Sequence
  Description of Artificial Sequence: Synthetic oligonucleotide
  Sense strand starting at position 1688 of SEQ ID NO: 1888630
auuguacauuuccagagau

SEQ ID NO: 2546673 - RNA, 19 nt, Artificial Sequence
  Description of Artificial Sequence: Synthetic oligonucleotide
  Antisense strand to SEQ ID NO: 2546672
aucucuggaaauguacaau

SEQ ID NO: 2546674 - RNA, 19 nt, Artificial Sequence
  Description of Artificial Sequence: Synthetic oligonucleotide
  Sense strand starting at position 3102 of SEQ ID NO: 1888630
gcuugaucauaccugugaa

SEQ ID NO: 2546675 - RNA, 19 nt, Artificial Sequence
  Description of Artificial Sequence: Synthetic oligonucleotide
  Antisense strand to SEQ ID NO: 2546674
uucacagguaugaucaagc

SEQ ID NO: 2546676 - RNA, 19 nt, Artificial Sequence
  Description of Artificial Sequence: Synthetic oligonucleotide
  Sense strand starting at position 764 of SEQ ID NO: 1888630
gagagaguucugcgaauug

SEQ ID NO: 2546677 - RNA, 19 nt, Artificial Sequence
  Description of Artificial Sequence: Synthetic oligonucleotide
  Antisense strand to SEQ ID NO: 2546676
caauucgcagaacucucuc

SEQ ID NO: 2546678 - RNA, 19 nt, Artificial Sequence
  Description of Artificial Sequence: Synthetic oligonucleotide
  Sense strand starting at position 1221 of SEQ ID NO: 1888630
ugugguuuguggaauggaa

SEQ ID NO: 2546679 - RNA, 19 nt, Artificial Sequence
  Description of Artificial Sequence: Synthetic oligonucleotide
  Antisense strand to SEQ ID NO: 2546678
uuccauuccacaaaccaca

SEQ ID NO: 2546680 - RNA, 19 nt, Artificial Sequence
  Description of Artificial Sequence: Synthetic oligonucleotide
  Sense strand starting at position 1456 of SEQ ID NO: 1888630
gucccuuguccugaaaugu

SEQ ID NO: 2546681 - RNA, 19 nt, Artificial Sequence
  Description of Artificial Sequence: Synthetic oligonucleotide
  Antisense strand to SEQ ID NO: 2546680
acauuucaggacaagggac

SEQ ID NO: 2546682 - RNA, 19 nt, Artificial Sequence
  Description of Artificial Sequence: Synthetic oligonucleotide
  Sense strand starting at position 1216 of SEQ ID NO: 1888630
uuacaugugguuuguggaa

SEQ ID NO: 2546683 - RNA, 19 nt, Artificial Sequence
  Description of Artificial Sequence: Synthetic oligonucleotide
  Antisense strand to SEQ ID NO: 2546682
uuccacaaaccacauguaa

SEQ ID NO: 2546684 - RNA, 19 nt, Artificial Sequence
  Description of Artificial Sequence: Synthetic oligonucleotide
  Sense strand starting at position 2725 of SEQ ID NO: 1888630
ugcauagauugagugcaau

SEQ ID NO: 2546685 - RNA, 19 nt, Artificial Sequence
  Description of Artificial Sequence: Synthetic oligonucleotide
  Antisense strand to SEQ ID NO: 2546684
auugcacucaaucuaugca

SEQ ID NO: 2546686 - RNA, 19 nt, Artificial Sequence
  Description of Artificial Sequence: Synthetic oligonucleotide
  Sense strand starting at position 3539 of SEQ ID NO: 1888630
uccauagucuagucuuacu

SEQ ID NO: 2546687 - RNA, 19 nt, Artificial Sequence
  Description of Artificial Sequence: Synthetic oligonucleotide
  Antisense strand to SEQ ID NO: 2546686
aguaagacuagacuaugga

SEQ ID NO: 2546688 - RNA, 19 nt, Artificial Sequence
  Description of Artificial Sequence: Synthetic oligonucleotide
  Sense strand starting at position 1453 of SEQ ID NO: 1888630
gacgucccuuguccugaaa

SEQ ID NO: 2546689 - RNA, 19 nt, Artificial Sequence
  Description of Artificial Sequence: Synthetic oligonucleotide
  Antisense strand to SEQ ID NO: 2546688
uuucaggacaagggacguc

SEQ ID NO: 2546690 - RNA, 19 nt, Artificial Sequence
  Description of Artificial Sequence: Synthetic oligonucleotide
  Sense strand starting at position 1452 of SEQ ID NO: 1888630
agacgucccuuguccugaa

SEQ ID NO: 2546691 - RNA, 19 nt, Artificial Sequence
  Description of Artificial Sequence: Synthetic oligonucleotide
  Antisense strand to SEQ ID NO: 2546690
uucaggacaagggacgucu

SEQ ID NO: 2546692 - RNA, 19 nt, Artificial Sequence
  Description of Artificial Sequence: Synthetic oligonucleotide
  Sense strand starting at position 3301 of SEQ ID NO: 1888630
gggcauauuuguuacaauc

SEQ ID NO: 2546693 - RNA, 19 nt, Artificial Sequence
  Description of Artificial Sequence: Synthetic oligonucleotide
  Antisense strand to SEQ ID NO: 2546692
gauuguaacaaauaugccc

SEQ ID NO: 2546694 - RNA, 19 nt, Artificial Sequence
  Description of Artificial Sequence: Synthetic oligonucleotide
  Sense strand starting at position 1814 of SEQ ID NO: 1888630
ggauuacccugacacuaaa

SEQ ID NO: 2546695 - RNA, 19 nt, Artificial Sequence
  Description of Artificial Sequence: Synthetic oligonucleotide
  Antisense strand to SEQ ID NO: 2546694
uuuagugucaggguaaucc

SEQ ID NO: 2546696 - RNA, 19 nt, Artificial Sequence
  Description of Artificial Sequence: Synthetic oligonucleotide
  Sense strand starting at position 1266 of SEQ ID NO: 1888630
gccuauugggcuggugaca

SEQ ID NO: 2546697 - RNA, 19 nt, Artificial Sequence
  Description of Artificial Sequence: Synthetic oligonucleotide
  Antisense strand to SEQ ID NO: 2546696
ugucaccagcccaauaggc

SEQ ID NO: 2546698 - RNA, 19 nt, Artificial Sequence
  Description of Artificial Sequence: Synthetic oligonucleotide
  Sense strand starting at position 3968 of SEQ ID NO: 1888630
caaccaggccugugcuauu

SEQ ID NO: 2546699 - RNA, 19 nt, Artificial Sequence
  Description of Artificial Sequence: Synthetic oligonucleotide
  Antisense strand to SEQ ID NO: 2546698
aauagcacaggccugguug

SEQ ID NO: 2546700 - RNA, 19 nt, Artificial Sequence
  Description of Artificial Sequence: Synthetic oligonucleotide
  Sense strand starting at position 3377 of SEQ ID NO: 1888630
cauucuuccgguuguacau

SEQ ID NO: 2546701 - RNA, 19 nt, Artificial Sequence
  Description of Artificial Sequence: Synthetic oligonucleotide
  Antisense strand to SEQ ID NO: 2546700
auguacaaccggaagaaug

SEQ ID NO: 2546702 - RNA, 19 nt, Artificial Sequence
  Description of Artificial Sequence: Synthetic oligonucleotide
  Sense strand starting at position 1680 of SEQ ID NO: 1888630
ugcaguaaauuguacauuu

SEQ ID NO: 2546703 - RNA, 19 nt, Artificial Sequence
  Description of Artificial Sequence: Synthetic oligonucleotide
  Antisense strand to SEQ ID NO: 2546702
aaauguacaauuuacugca

SEQ ID NO: 2546704 - RNA, 19 nt, Artificial Sequence
  Description of Artificial Sequence: Synthetic oligonucleotide
  Sense strand starting at position 3303 of SEQ ID NO: 1888630
gcauauuuguuacaaucga

SEQ ID NO: 2546705 - RNA, 19 nt, Artificial Sequence
  Description of Artificial Sequence: Synthetic oligonucleotide
  Antisense strand to SEQ ID NO: 2546704
ucgauuguaacaaauaugc

SEQ ID NO: 2546706 - RNA, 19 nt, Artificial Sequence
  Description of Artificial Sequence: Synthetic oligonucleotide
  Sense strand starting at position 974 of SEQ ID NO: 1888630
uuguguuuaucagcgacag

SEQ ID NO: 2546707 - RNA, 19 nt, Artificial Sequence
  Description of Artificial Sequence: Synthetic oligonucleotide
  Antisense strand to SEQ ID NO: 2546706
cugucgcugauaaacacaa

SEQ ID NO: 2546708 - RNA, 19 nt, Artificial Sequence
  Description of Artificial Sequence: Synthetic oligonucleotide
  Sense strand starting at position 1652 of SEQ ID NO: 1888630
acggauaugugagacuaag

SEQ ID NO: 2546709 - RNA, 19 nt, Artificial Sequence
  Description of Artificial Sequence: Synthetic oligonucleotide
  Antisense strand to SEQ ID NO: 2546708
cuuagucucacauauccgu

SEQ ID NO: 2546710 - RNA, 19 nt, Artificial Sequence
  Description of Artificial Sequence: Synthetic oligonucleotide
  Sense strand starting at position 547 of SEQ ID NO: 1888631
guuuaaggagccuaaacua

SEQ ID NO: 2546711 - RNA, 19 nt, Artificial Sequence
  Description of Artificial Sequence: Synthetic oligonucleotide
  Antisense strand to SEQ ID NO: 2546710
uaguuuaggcuccuuaaac

SEQ ID NO: 2546712 - RNA, 19 nt, Artificial Sequence
  Description of Artificial Sequence: Synthetic oligonucleotide
  Sense strand starting at position 2800 of SEQ ID NO: 1888631
ugauguuaucuugaaaggu

SEQ ID NO: 2546713 - RNA, 19 nt, Artificial Sequence
  Description of Artificial Sequence: Synthetic oligonucleotide
  Antisense strand to SEQ ID NO: 2546712
accuuucaagauaacauca

SEQ ID NO: 2546714 - RNA, 19 nt, Artificial Sequence
  Description of Artificial Sequence: Synthetic oligonucleotide
  Sense strand starting at position 2875 of SEQ ID NO: 1888631
cacguuuccggcuuucuua

SEQ ID NO: 2546715 - RNA, 19 nt, Artificial Sequence
  Description of Artificial Sequence: Synthetic oligonucleotide
  Antisense strand to SEQ ID NO: 2546714
uaagaaagccggaaacgug

SEQ ID NO: 2546716 - RNA, 19 nt, Artificial Sequence
  Description of Artificial Sequence: Synthetic oligonucleotide
  Sense strand starting at position 2155 of SEQ ID NO: 1888631
agacuaaagucccugauug

SEQ ID NO: 2546717 - RNA, 19 nt, Artificial Sequence
  Description of Artificial Sequence: Synthetic oligonucleotide
  Antisense strand to SEQ ID NO: 2546716
caaucagggacuuuagucu

SEQ ID NO: 2546718 - RNA, 19 nt, Artificial Sequence
  Description of Artificial Sequence: Synthetic oligonucleotide
  Sense strand starting at position 1285 of SEQ ID NO: 1888631
cacaguccugaacgagaaa

SEQ ID NO: 2546719 - RNA, 19 nt, Artificial Sequence
  Description of Artificial Sequence: Synthetic oligonucleotide
  Antisense strand to SEQ ID NO: 2546718
uuucucguucaggacugug

SEQ ID NO: 2546720 - RNA, 19 nt, Artificial Sequence
  Description of Artificial Sequence: Synthetic oligonucleotide
  Sense strand starting at position 1299 of SEQ ID NO: 1888631
agaaaucacgagcagguuu

SEQ ID NO: 2546721 - RNA, 19 nt, Artificial Sequence
  Description of Artificial Sequence: Synthetic oligonucleotide
  Antisense strand to SEQ ID NO: 2546720
aaaccugcucgugauuucu

SEQ ID NO: 2546722 - RNA, 19 nt, Artificial Sequence
  Description of Artificial Sequence: Synthetic oligonucleotide
  Sense strand starting at position 1113 of SEQ ID NO: 1888631
cagauugaucugcauagug

SEQ ID NO: 2546723 - RNA, 19 nt, Artificial Sequence
  Description of Artificial Sequence: Synthetic oligonucleotide
  Antisense strand to SEQ ID NO: 2546722
cacuaugcagaucaaucug

SEQ ID NO: 2546724 - RNA, 19 nt, Artificial Sequence
  Description of Artificial Sequence: Synthetic oligonucleotide
  Sense strand starting at position 5 of SEQ ID NO: 1888631
uaggaugucucagcaaaga

SEQ ID NO: 2546725 - RNA, 19 nt, Artificial Sequence
  Description of Artificial Sequence: Synthetic oligonucleotide
  Antisense strand to SEQ ID NO: 2546724
ucuuugcugagacauccua

SEQ ID NO: 2546726 - RNA, 19 nt, Artificial Sequence
  Description of Artificial Sequence: Synthetic oligonucleotide
  Sense strand starting at position 997 of SEQ ID NO: 1888631
ucuuaaaguggucacuuua

SEQ ID NO: 2546727 - RNA, 19 nt, Artificial Sequence
  Description of Artificial Sequence: Synthetic oligonucleotide
  Antisense strand to SEQ ID NO: 2546726
uaaagugaccacuuuaaga

SEQ ID NO: 2546728 - RNA, 19 nt, Artificial Sequence
  Description of Artificial Sequence: Synthetic oligonucleotide
  Sense strand starting at position 2797 of SEQ ID NO: 1888631
gagugauguuaucuugaaa

SEQ ID NO: 2546729 - RNA, 19 nt, Artificial Sequence
  Description of Artificial Sequence: Synthetic oligonucleotide
  Antisense strand to SEQ ID NO: 2546728
uuucaagauaacaucacuc

SEQ ID NO: 2546730 - RNA, 19 nt, Artificial Sequence
  Description of Artificial Sequence: Synthetic oligonucleotide
  Sense strand starting at position 2680 of SEQ ID NO: 1888631
gguucucagccugauaaau

SEQ ID NO: 2546731 - RNA, 19 nt, Artificial Sequence
  Description of Artificial Sequence: Synthetic oligonucleotide
  Antisense strand to SEQ ID NO: 2546730
auuuaucaggcugagaacc

SEQ ID NO: 2546732 - RNA, 19 nt, Artificial Sequence
  Description of Artificial Sequence: Synthetic oligonucleotide
  Sense strand starting at position 2196 of SEQ ID NO: 1888631
gauuucuuugcacgugauu

SEQ ID NO: 2546733 - RNA, 19 nt, Artificial Sequence
  Description of Artificial Sequence: Synthetic oligonucleotide
  Antisense strand to SEQ ID NO: 2546732
aaucacgugcaaagaaauc

SEQ ID NO: 2546734 - RNA, 19 nt, Artificial Sequence
  Description of Artificial Sequence: Synthetic oligonucleotide
  Sense strand starting at position 2205 of SEQ ID NO: 1888631
gcacgugauuugcucagga

SEQ ID NO: 2546735 - RNA, 19 nt, Artificial Sequence
  Description of Artificial Sequence: Synthetic oligonucleotide
  Antisense strand to SEQ ID NO: 2546734
uccugagcaaaucacgugc

SEQ ID NO: 2546736 - RNA, 19 nt, Artificial Sequence
  Description of Artificial Sequence: Synthetic oligonucleotide
  Sense strand starting at position 2493 of SEQ ID NO: 1888631
ccaucaaaucccuggagca

SEQ ID NO: 2546737 - RNA, 19 nt, Artificial Sequence
  Description of Artificial Sequence: Synthetic oligonucleotide
  Antisense strand to SEQ ID NO: 2546736
ugcuccagggauuugaugg

SEQ ID NO: 2546738 - RNA, 19 nt, Artificial Sequence
  Description of Artificial Sequence: Synthetic oligonucleotide
  Sense strand starting at position 94 of SEQ ID NO: 1888631
cuccuuuauccuugagaug

SEQ ID NO: 2546739 - RNA, 19 nt, Artificial Sequence
  Description of Artificial Sequence: Synthetic oligonucleotide
  Antisense strand to SEQ ID NO: 2546738
caucucaaggauaaaggag

SEQ ID NO: 2546740 - RNA, 19 nt, Artificial Sequence
  Description of Artificial Sequence: Synthetic oligonucleotide
  Sense strand starting at position 1360 of SEQ ID NO: 1888631
gagaauugucaaggccauc

SEQ ID NO: 2546741 - RNA, 19 nt, Artificial Sequence
  Description of Artificial Sequence: Synthetic oligonucleotide
  Antisense strand to SEQ ID NO: 2546740
gauggccuugacaauucuc

SEQ ID NO: 2546742 - RNA, 19 nt, Artificial Sequence
  Description of Artificial Sequence: Synthetic oligonucleotide
  Sense strand starting at position 853 of SEQ ID NO: 1888631
agaauucugcgagagcacu

SEQ ID NO: 2546743 - RNA, 19 nt, Artificial Sequence
  Description of Artificial Sequence: Synthetic oligonucleotide
  Antisense strand to SEQ ID NO: 2546742
agugcucucgcagaauucu

SEQ ID NO: 2546744 - RNA, 19 nt, Artificial Sequence
  Description of Artificial Sequence: Synthetic oligonucleotide
  Sense strand starting at position 2198 of SEQ ID NO: 1888631
uuucuuugcacgugauuug

SEQ ID NO: 2546745 - RNA, 19 nt, Artificial Sequence
  Description of Artificial Sequence: Synthetic oligonucleotide
  Antisense strand to SEQ ID NO: 2546744
caaaucacgugcaaagaaa

SEQ ID NO: 2546746 - RNA, 19 nt, Artificial Sequence
  Description of Artificial Sequence: Synthetic oligonucleotide
  Sense strand starting at position 1103 of SEQ ID NO: 1888631
ggcuucuguccagauugau

SEQ ID NO: 2546747 - RNA, 19 nt, Artificial Sequence
  Description of Artificial Sequence: Synthetic oligonucleotide
  Antisense strand to SEQ ID NO: 2546746
aucaaucuggacagaagcc

SEQ ID NO: 2546748 - RNA, 19 nt, Artificial Sequence
  Description of Artificial Sequence: Synthetic oligonucleotide
  Sense strand starting at position 3131 of SEQ ID NO: 1888631
ucccaucuagauugagcua

SEQ ID NO: 2546749 - RNA, 19 nt, Artificial Sequence
  Description of Artificial Sequence: Synthetic oligonucleotide
  Antisense strand to SEQ ID NO: 2546748
uagcucaaucuagauggga

SEQ ID NO: 2546750 - RNA, 19 nt, Artificial Sequence
  Description of Artificial Sequence: Synthetic oligonucleotide
  Sense strand starting at position 1115 of SEQ ID NO: 1888631
gauugaucugcauagugug

SEQ ID NO: 2546751 - RNA, 19 nt, Artificial Sequence
  Description of Artificial Sequence: Synthetic oligonucleotide
  Antisense strand to SEQ ID NO: 2546750
cacacuaugcagaucaauc

SEQ ID NO: 2546752 - RNA, 19 nt, Artificial Sequence
  Description of Artificial Sequence: Synthetic oligonucleotide
  Sense strand starting at position 2874 of SEQ ID NO: 1888631
gcacguuuccggcuuucuu

SEQ ID NO: 2546753 - RNA, 19 nt, Artificial Sequence
  Description of Artificial Sequence: Synthetic oligonucleotide
  Antisense strand to SEQ ID NO: 2546752
aagaaagccggaaacgugc

SEQ ID NO: 2546754 - RNA, 19 nt, Artificial Sequence
  Description of Artificial Sequence: Synthetic oligonucleotide
  Sense strand starting at position 2167 of SEQ ID NO: 1888631
cugauugucuauucugaug

SEQ ID NO: 2546755 - RNA, 19 nt, Artificial Sequence
  Description of Artificial Sequence: Synthetic oligonucleotide
  Antisense strand to SEQ ID NO: 2546754
caucagaauagacaaucag

SEQ ID NO: 2546756 - RNA, 19 nt, Artificial Sequence
  Description of Artificial Sequence: Synthetic oligonucleotide
  Sense strand starting at position 2156 of SEQ ID NO: 1888631
gacuaaagucccugauugu

SEQ ID NO: 2546757 - RNA, 19 nt, Artificial Sequence
  Description of Artificial Sequence: Synthetic oligonucleotide
  Antisense strand to SEQ ID NO: 2546756
acaaucagggacuuuaguc

SEQ ID NO: 2546758 - RNA, 19 nt, Artificial Sequence
  Description of Artificial Sequence: Synthetic oligonucleotide
  Sense strand starting at position 2192 of SEQ ID NO: 1888631
aguugauuucuuugcacgu

SEQ ID NO: 2546759 - RNA, 19 nt, Artificial Sequence
  Description of Artificial Sequence: Synthetic oligonucleotide
  Antisense strand to SEQ ID NO: 2546758
acgugcaaagaaaucaacu

SEQ ID NO: 2546760 - RNA, 19 nt, Artificial Sequence
  Description of Artificial Sequence: Synthetic oligonucleotide
  Sense strand starting at position 530 of SEQ ID NO: 1888631
uaaucuguauaaucgaagu

SEQ ID NO: 2546761 - RNA, 19 nt, Artificial Sequence
  Description of Artificial Sequence: Synthetic oligonucleotide
  Antisense strand to SEQ ID NO: 2546760
acuucgauuauacagauua

SEQ ID NO: 2546762 - RNA, 19 nt, Artificial Sequence
  Description of Artificial Sequence: Synthetic oligonucleotide
  Sense strand starting at position 850 of SEQ ID NO: 1888631
aggagaauucugcgagagc

SEQ ID NO: 2546763 - RNA, 19 nt, Artificial Sequence
  Description of Artificial Sequence: Synthetic oligonucleotide
  Antisense strand to SEQ ID NO: 2546762
gcucucgcagaauucuccu

SEQ ID NO: 2546764 - RNA, 19 nt, Artificial Sequence
  Description of Artificial Sequence: Synthetic oligonucleotide
  Sense strand starting at position 1112 of SEQ ID NO: 1888631
ccagauugaucugcauagu

SEQ ID NO: 2546765 - RNA, 19 nt, Artificial Sequence
  Description of Artificial Sequence: Synthetic oligonucleotide
  Antisense strand to SEQ ID NO: 2546764
acuaugcagaucaaucugg

SEQ ID NO: 2546766 - RNA, 19 nt, Artificial Sequence
  Description of Artificial Sequence: Synthetic oligonucleotide
  Sense strand starting at position 2789 of SEQ ID NO: 1888631
gugcaccagagugauguua

SEQ ID NO: 2546767 - RNA, 19 nt, Artificial Sequence
  Description of Artificial Sequence: Synthetic oligonucleotide
  Antisense strand to SEQ ID NO: 2546766
uaacaucacucuggugcac

SEQ ID NO: 2546768 - RNA, 19 nt, Artificial Sequence
  Description of Artificial Sequence: Synthetic oligonucleotide
  Sense strand starting at position 271 of SEQ ID NO: 1888631
cugcaaccucgugauuaac

SEQ ID NO: 2546769 - RNA, 19 nt, Artificial Sequence
  Description of Artificial Sequence: Synthetic oligonucleotide
  Antisense strand to SEQ ID NO: 2546768
guuaaucacgagguugcag

SEQ ID NO: 2546770 - RNA, 19 nt, Artificial Sequence
  Description of Artificial Sequence: Synthetic oligonucleotide
  Sense strand starting at position 2679 of SEQ ID NO: 1888631
ugguucucagccugauaaa

SEQ ID NO: 2546771 - RNA, 19 nt, Artificial Sequence
  Description of Artificial Sequence: Synthetic oligonucleotide
  Antisense strand to SEQ ID NO: 2546770
uuuaucaggcugagaacca

SEQ ID NO: 2546772 - RNA, 19 nt, Artificial Sequence
  Description of Artificial Sequence: Synthetic oligonucleotide
  Sense strand starting at position 3610 of SEQ ID NO: 1888631
cugucuagucaucauguua

SEQ ID NO: 2546773 - RNA, 19 nt, Artificial Sequence
  Description of Artificial Sequence: Synthetic oligonucleotide
  Antisense strand to SEQ ID NO: 2546772
uaacaugaugacuagacag

SEQ ID NO: 2546774 - RNA, 19 nt, Artificial Sequence
  Description of Artificial Sequence: Synthetic oligonucleotide
  Sense strand starting at position 1120 of SEQ ID NO: 1888631
aucugcauagugugacaga

SEQ ID NO: 2546775 - RNA, 19 nt, Artificial Sequence
  Description of Artificial Sequence: Synthetic oligonucleotide
  Antisense strand to SEQ ID NO: 2546774
ucugucacacuaugcagau

SEQ ID NO: 2546776 - RNA, 19 nt, Artificial Sequence
  Description of Artificial Sequence: Synthetic oligonucleotide
  Sense strand starting at position 1390 of SEQ ID NO: 1888631
ccuuauacagcgugaggaa

SEQ ID NO: 2546777 - RNA, 19 nt, Artificial Sequence
  Description of Artificial Sequence: Synthetic oligonucleotide
  Antisense strand to SEQ ID NO: 2546776
uuccucacgcuguauaagg

SEQ ID NO: 2546778 - RNA, 19 nt, Artificial Sequence
  Description of Artificial Sequence: Synthetic oligonucleotide
  Sense strand starting at position 1148 of SEQ ID NO: 1888631
cauuuagaaugaggauguu

SEQ ID NO: 2546779 - RNA, 19 nt, Artificial Sequence
  Description of Artificial Sequence: Synthetic oligonucleotide
  Antisense strand to SEQ ID NO: 2546778
aacauccucauucuaaaug

SEQ ID NO: 2546780 - RNA, 19 nt, Artificial Sequence
  Description of Artificial Sequence: Synthetic oligonucleotide
  Sense strand starting at position 715 of SEQ ID NO: 1888631
gcucgauguccaugaggaa

SEQ ID NO: 2546781 - RNA, 19 nt, Artificial Sequence
  Description of Artificial Sequence: Synthetic oligonucleotide
  Antisense strand to SEQ ID NO: 2546780
uuccucauggacaucgagc

SEQ ID NO: 2546782 - RNA, 19 nt, Artificial Sequence
  Description of Artificial Sequence: Synthetic oligonucleotide
  Sense strand starting at position 3001 of SEQ ID NO: 1888631
uccaaaugcguuuaaucuu

SEQ ID NO: 2546783 - RNA, 19 nt, Artificial Sequence
  Description of Artificial Sequence: Synthetic oligonucleotide
  Antisense strand to SEQ ID NO: 2546782
aagauuaaacgcauuugga

SEQ ID NO: 2546784 - RNA, 19 nt, Artificial Sequence
  Description of Artificial Sequence: Synthetic oligonucleotide
  Sense strand starting at position 996 of SEQ ID NO: 1888631
uucuuaaaguggucacuuu

SEQ ID NO: 2546785 - RNA, 19 nt, Artificial Sequence
  Description of Artificial Sequence: Synthetic oligonucleotide
  Antisense strand to SEQ ID NO: 2546784
aaagugaccacuuuaagaa

SEQ ID NO: 2546786 - RNA, 19 nt, Artificial Sequence
  Description of Artificial Sequence: Synthetic oligonucleotide
  Sense strand starting at position 1109 of SEQ ID NO: 1888631
uguccagauugaucugcau

SEQ ID NO: 2546787 - RNA, 19 nt, Artificial Sequence
  Description of Artificial Sequence: Synthetic oligonucleotide
  Antisense strand to SEQ ID NO: 2546786
augcagaucaaucuggaca

SEQ ID NO: 2546788 - RNA, 19 nt, Artificial Sequence
  Description of Artificial Sequence: Synthetic oligonucleotide
  Sense strand starting at position 709 of SEQ ID NO: 1888631
agaaaugcucgauguccau

SEQ ID NO: 2546789 - RNA, 19 nt, Artificial Sequence
  Description of Artificial Sequence: Synthetic oligonucleotide
  Antisense strand to SEQ ID NO: 2546788
auggacaucgagcauuucu

SEQ ID NO: 2546790 - RNA, 19 nt, Artificial Sequence
  Description of Artificial Sequence: Synthetic oligonucleotide
  Sense strand starting at position 1117 of SEQ ID NO: 1888632
ggucuaucauuugcccuaa

SEQ ID NO: 2546791 - RNA, 19 nt, Artificial Sequence
  Description of Artificial Sequence: Synthetic oligonucleotide
  Antisense strand to SEQ ID NO: 2546790
uuagggcaaaugauagacc

SEQ ID NO: 2546792 - RNA, 19 nt, Artificial Sequence
  Description of Artificial Sequence: Synthetic oligonucleotide
  Sense strand starting at position 2843 of SEQ ID NO: 1888632
auuacauuagagcaauagu

SEQ ID NO: 2546793 - RNA, 19 nt, Artificial Sequence
  Description of Artificial Sequence: Synthetic oligonucleotide
  Antisense strand to SEQ ID NO: 2546792
acuauugcucuaauguaau

SEQ ID NO: 2546794 - RNA, 19 nt, Artificial Sequence
  Description of Artificial Sequence: Synthetic oligonucleotide
  Sense strand starting at position 2846 of SEQ ID NO: 1888632
acauuagagcaauaguuua

SEQ ID NO: 2546795 - RNA, 19 nt, Artificial Sequence
  Description of Artificial Sequence: Synthetic oligonucleotide
  Antisense strand to SEQ ID NO: 2546794
uaaacuauugcucuaaugu

SEQ ID NO: 2546796 - RNA, 19 nt, Artificial Sequence
  Description of Artificial Sequence: Synthetic oligonucleotide
  Sense strand starting at position 2805 of SEQ ID NO: 1888632
guagaugacugaucuacaa

SEQ ID NO: 2546797 - RNA, 19 nt, Artificial Sequence
  Description of Artificial Sequence: Synthetic oligonucleotide
  Antisense strand to SEQ ID NO: 2546796
uuguagaucagucaucuac

SEQ ID NO: 2546798 - RNA, 19 nt, Artificial Sequence
  Description of Artificial Sequence: Synthetic oligonucleotide
  Sense strand starting at position 645 of SEQ ID NO: 1888632
aguucuugugaggacagau

SEQ ID NO: 2546799 - RNA, 19 nt, Artificial Sequence
  Description of Artificial Sequence: Synthetic oligonucleotide
  Antisense strand to SEQ ID NO: 2546798
aucuguccucacaagaacu

SEQ ID NO: 2546800 - RNA, 19 nt, Artificial Sequence
  Description of Artificial Sequence: Synthetic oligonucleotide
  Sense strand starting at position 2735 of SEQ ID NO: 1888632
acaaacugugaguaauagu

SEQ ID NO: 2546801 - RNA, 19 nt, Artificial Sequence
  Description of Artificial Sequence: Synthetic oligonucleotide
  Antisense strand to SEQ ID NO: 2546800
acuauuacucacaguuugu

SEQ ID NO: 2546802 - RNA, 19 nt, Artificial Sequence
  Description of Artificial Sequence: Synthetic oligonucleotide
  Sense strand starting at position 184 of SEQ ID NO: 1888632
gucguucccaaaugauuug

SEQ ID NO: 2546803 - RNA, 19 nt, Artificial Sequence
  Description of Artificial Sequence: Synthetic oligonucleotide
  Antisense strand to SEQ ID NO: 2546802
caaaucauuugggaacgac

SEQ ID NO: 2546804 - RNA, 19 nt, Artificial Sequence
  Description of Artificial Sequence: Synthetic oligonucleotide
  Sense strand starting at position 1109 of SEQ ID NO: 1888632
guugaaagggucuaucauu

SEQ ID NO: 2546805 - RNA, 19 nt, Artificial Sequence
  Description of Artificial Sequence: Synthetic oligonucleotide
  Antisense strand to SEQ ID NO: 2546804
aaugauagacccuuucaac

SEQ ID NO: 2546806 - RNA, 19 nt, Artificial Sequence
  Description of Artificial Sequence: Synthetic oligonucleotide
  Sense strand starting at position 2929 of SEQ ID NO: 1888632
cccugagaugcucacaauc

SEQ ID NO: 2546807 - RNA, 19 nt, Artificial Sequence
  Description of Artificial Sequence: Synthetic oligonucleotide
  Antisense strand to SEQ ID NO: 2546806
gauugugagcaucucaggg

SEQ ID NO: 2546808 - RNA, 19 nt, Artificial Sequence
  Description of Artificial Sequence: Synthetic oligonucleotide
  Sense strand starting at position 114 of SEQ ID NO: 1888632
gcaaaugauuuacacagaa

SEQ ID NO: 2546809 - RNA, 19 nt, Artificial Sequence
  Description of Artificial Sequence: Synthetic oligonucleotide
  Antisense strand to SEQ ID NO: 2546808
uucuguguaaaucauuugc

SEQ ID NO: 2546810 - RNA, 19 nt, Artificial Sequence
  Description of Artificial Sequence: Synthetic oligonucleotide
  Sense strand starting at position 329 of SEQ ID NO: 1888632
gcacuuuauggucaauaca

SEQ ID NO: 2546811 - RNA, 19 nt, Artificial Sequence
  Description of Artificial Sequence: Synthetic oligonucleotide
  Antisense strand to SEQ ID NO: 2546810
uguauugaccauaaagugc

SEQ ID NO: 2546812 - RNA, 19 nt, Artificial Sequence
  Description of Artificial Sequence: Synthetic oligonucleotide
  Sense strand starting at position 403 of SEQ ID NO: 1888632
auagccaguccuggaagaa

SEQ ID NO: 2546813 - RNA, 19 nt, Artificial Sequence
  Description of Artificial Sequence: Synthetic oligonucleotide
  Antisense strand to SEQ ID NO: 2546812
uucuuccaggacuggcuau

SEQ ID NO: 2546814 - RNA, 19 nt, Artificial Sequence
  Description of Artificial Sequence: Synthetic oligonucleotide
  Sense strand starting at position 2802 of SEQ ID NO: 1888632
gacguagaugacugaucua

SEQ ID NO: 2546815 - RNA, 19 nt, Artificial Sequence
  Description of Artificial Sequence: Synthetic oligonucleotide
  Antisense strand to SEQ ID NO: 2546814
uagaucagucaucuacguc

SEQ ID NO: 2546816 - RNA, 19 nt, Artificial Sequence
  Description of Artificial Sequence: Synthetic oligonucleotide
  Sense strand starting at position 2779 of SEQ ID NO: 1888632
gucagaguucucuagguaa

SEQ ID NO: 2546817 - RNA, 19 nt, Artificial Sequence
  Description of Artificial Sequence: Synthetic oligonucleotide
  Antisense strand to SEQ ID NO: 2546816
uuaccuagagaacucugac

SEQ ID NO: 2546818 - RNA, 19 nt, Artificial Sequence
  Description of Artificial Sequence: Synthetic oligonucleotide
  Sense strand starting at position 2712 of SEQ ID NO: 1888632
uguugaaauuuggagauac

SEQ ID NO: 2546819 - RNA, 19 nt, Artificial Sequence
  Description of Artificial Sequence: Synthetic oligonucleotide
  Antisense strand to SEQ ID NO: 2546818
guaucuccaaauuucaaca

SEQ ID NO: 2546820 - RNA, 19 nt, Artificial Sequence
  Description of Artificial Sequence: Synthetic oligonucleotide
  Sense strand starting at position 2972 of SEQ ID NO: 1888632
auaaguguuccucaagcaa

SEQ ID NO: 2546821 - RNA, 19 nt, Artificial Sequence
  Description of Artificial Sequence: Synthetic oligonucleotide
  Antisense strand to SEQ ID NO: 2546820
uugcuugaggaacacuuau

SEQ ID NO: 2546822 - RNA, 19 nt, Artificial Sequence
  Description of Artificial Sequence: Synthetic oligonucleotide
  Sense strand starting at position 2744 of SEQ ID NO: 1888632
gaguaauagugucuaaaug

SEQ ID NO: 2546823 - RNA, 19 nt, Artificial Sequence
  Description of Artificial Sequence: Synthetic oligonucleotide
  Antisense strand to SEQ ID NO: 2546822
cauuuagacacuauuacuc

SEQ ID NO: 2546824 - RNA, 19 nt, Artificial Sequence
  Description of Artificial Sequence: Synthetic oligonucleotide
  Sense strand starting at position 3862 of SEQ ID NO: 1888632
caguguuugcagucgccau

SEQ ID NO: 2546825 - RNA, 19 nt, Artificial Sequence
  Description of Artificial Sequence: Synthetic oligonucleotide
  Antisense strand to SEQ ID NO: 2546824
auggcgacugcaaacacug

SEQ ID NO: 2546826 - RNA, 19 nt, Artificial Sequence
  Description of Artificial Sequence: Synthetic oligonucleotide
  Sense strand starting at position 1134 of SEQ ID NO: 1888632
aaggucuaacugugguaaa

SEQ ID NO: 2546827 - RNA, 19 nt, Artificial Sequence
  Description of Artificial Sequence: Synthetic oligonucleotide
  Antisense strand to SEQ ID NO: 2546826
uuuaccacaguuagaccuu

SEQ ID NO: 2546828 - RNA, 19 nt, Artificial Sequence
  Description of Artificial Sequence: Synthetic oligonucleotide
  Sense strand starting at position 2421 of SEQ ID NO: 1888632
ucucuugaucucgagaugu

SEQ ID NO: 2546829 - RNA, 19 nt, Artificial Sequence
  Description of Artificial Sequence: Synthetic oligonucleotide
  Antisense strand to SEQ ID NO: 2546828
acaucucgagaucaagaga

SEQ ID NO: 2546830 - RNA, 19 nt, Artificial Sequence
  Description of Artificial Sequence: Synthetic oligonucleotide
  Sense strand starting at position 628 of SEQ ID NO: 1888632
auuucuaugucucaaagag

SEQ ID NO: 2546831 - RNA, 19 nt, Artificial Sequence
  Description of Artificial Sequence: Synthetic oligonucleotide
  Antisense strand to SEQ ID NO: 2546830
cucuuugagacauagaaau

SEQ ID NO: 2546832 - RNA, 19 nt, Artificial Sequence
  Description of Artificial Sequence: Synthetic oligonucleotide
  Sense strand starting at position 3884 of SEQ ID NO: 1888632
gagguuuaucauuguacua

SEQ ID NO: 2546833 - RNA, 19 nt, Artificial Sequence
  Description of Artificial Sequence: Synthetic oligonucleotide
  Antisense strand to SEQ ID NO: 2546832
uaguacaaugauaaaccuc

SEQ ID NO: 2546834 - RNA, 19 nt, Artificial Sequence
  Description of Artificial Sequence: Synthetic oligonucleotide
  Sense strand starting at position 2781 of SEQ ID NO: 1888632
cagaguucucuagguaacc

SEQ ID NO: 2546835 - RNA, 19 nt, Artificial Sequence
  Description of Artificial Sequence: Synthetic oligonucleotide
  Antisense strand to SEQ ID NO: 2546834
gguuaccuagagaacucug

SEQ ID NO: 2546836 - RNA, 19 nt, Artificial Sequence
  Description of Artificial Sequence: Synthetic oligonucleotide
  Sense strand starting at position 2544 of SEQ ID NO: 1888632
gcagauaccuuagcaaauc

SEQ ID NO: 2546837 - RNA, 19 nt, Artificial Sequence
  Description of Artificial Sequence: Synthetic oligonucleotide
  Antisense strand to SEQ ID NO: 2546836
gauuugcuaagguaucugc

SEQ ID NO: 2546838 - RNA, 19 nt, Artificial Sequence
  Description of Artificial Sequence: Synthetic oligonucleotide
  Sense strand starting at position 562 of SEQ ID NO: 1888632
ugcuaugugaccuggaaua

SEQ ID NO: 2546839 - RNA, 19 nt, Artificial Sequence
  Description of Artificial Sequence: Synthetic oligonucleotide
  Antisense strand to SEQ ID NO: 2546838
uauuccaggucacauagca

SEQ ID NO: 2546840 - RNA, 19 nt, Artificial Sequence
  Description of Artificial Sequence: Synthetic oligonucleotide
  Sense strand starting at position 328 of SEQ ID NO: 1888632
agcacuuuauggucaauac

SEQ ID NO: 2546841 - RNA, 19 nt, Artificial Sequence
  Description of Artificial Sequence: Synthetic oligonucleotide
  Antisense strand to SEQ ID NO: 2546840
guauugaccauaaagugcu

SEQ ID NO: 2546842 - RNA, 19 nt, Artificial Sequence
  Description of Artificial Sequence: Synthetic oligonucleotide
  Sense strand starting at position 2619 of SEQ ID NO: 1888632
uguagauauagauguugua

SEQ ID NO: 2546843 - RNA, 19 nt, Artificial Sequence
  Description of Artificial Sequence: Synthetic oligonucleotide
  Antisense strand to SEQ ID NO: 2546842
uacaacaucuauaucuaca

SEQ ID NO: 2546844 - RNA, 19 nt, Artificial Sequence
  Description of Artificial Sequence: Synthetic oligonucleotide
  Sense strand starting at position 621 of SEQ ID NO: 1888632
gggaacaauuucuaugucu

SEQ ID NO: 2546845 - RNA, 19 nt, Artificial Sequence
  Description of Artificial Sequence: Synthetic oligonucleotide
  Antisense strand to SEQ ID NO: 2546844
agacauagaaauuguuccc

SEQ ID NO: 2546846 - RNA, 19 nt, Artificial Sequence
  Description of Artificial Sequence: Synthetic oligonucleotide
  Sense strand starting at position 469 of SEQ ID NO: 1888632
ucacccaugcauuguagaa

SEQ ID NO: 2546847 - RNA, 19 nt, Artificial Sequence
  Description of Artificial Sequence: Synthetic oligonucleotide
  Antisense strand to SEQ ID NO: 2546846
uucuacaaugcauggguga

SEQ ID NO: 2546848 - RNA, 19 nt, Artificial Sequence
  Description of Artificial Sequence: Synthetic oligonucleotide
  Sense strand starting at position 525 of SEQ ID NO: 1888632
cgggcugacccggauucua

SEQ ID NO: 2546849 - RNA, 19 nt, Artificial Sequence
  Description of Artificial Sequence: Synthetic oligonucleotide
  Antisense strand to SEQ ID NO: 2546848
uagaauccgggucagcccg

SEQ ID NO: 2546850 - RNA, 19 nt, Artificial Sequence
  Description of Artificial Sequence: Synthetic oligonucleotide
  Sense strand starting at position 3883 of SEQ ID NO: 1888632
ugagguuuaucauuguacu

SEQ ID NO: 2546851 - RNA, 19 nt, Artificial Sequence
  Description of Artificial Sequence: Synthetic oligonucleotide
  Antisense strand to SEQ ID NO: 2546850
aguacaaugauaaaccuca

SEQ ID NO: 2546852 - RNA, 19 nt, Artificial Sequence
  Description of Artificial Sequence: Synthetic oligonucleotide
  Sense strand starting at position 560 of SEQ ID NO: 1888632
cuugcuaugugaccuggaa

SEQ ID NO: 2546853 - RNA, 19 nt, Artificial Sequence
  Description of Artificial Sequence: Synthetic oligonucleotide
  Antisense strand to SEQ ID NO: 2546852
uuccaggucacauagcaag

SEQ ID NO: 2546854 - RNA, 19 nt, Artificial Sequence
  Description of Artificial Sequence: Synthetic oligonucleotide
  Sense strand starting at position 1155 of SEQ ID NO: 1888632
aguccaaguccgugcauuu

SEQ ID NO: 2546855 - RNA, 19 nt, Artificial Sequence
  Description of Artificial Sequence: Synthetic oligonucleotide
  Antisense strand to SEQ ID NO: 2546854
aaaugcacggacuuggacu

SEQ ID NO: 2546856 - RNA, 19 nt, Artificial Sequence
  Description of Artificial Sequence: Synthetic oligonucleotide
  Sense strand starting at position 59 of SEQ ID NO: 1888632
ucaggucuaucaucugcaa

SEQ ID NO: 2546857 - RNA, 19 nt, Artificial Sequence
  Description of Artificial Sequence: Synthetic oligonucleotide
  Antisense strand to SEQ ID NO: 2546856
uugcagaugauagaccuga

SEQ ID NO: 2546858 - RNA, 19 nt, Artificial Sequence
  Description of Artificial Sequence: Synthetic oligonucleotide
  Sense strand starting at position 2684 of SEQ ID NO: 1888632
gcauaauguacgugggaaa

SEQ ID NO: 2546859 - RNA, 19 nt, Artificial Sequence
  Description of Artificial Sequence: Synthetic oligonucleotide
  Antisense strand to SEQ ID NO: 2546858
uuucccacguacauuaugc

SEQ ID NO: 2546860 - RNA, 19 nt, Artificial Sequence
  Description of Artificial Sequence: Synthetic oligonucleotide
  Sense strand starting at position 1272 of SEQ ID NO: 1888632
uuccgagucaugggaaguu

SEQ ID NO: 2546861 - RNA, 19 nt, Artificial Sequence
  Description of Artificial Sequence: Synthetic oligonucleotide
  Antisense strand to SEQ ID NO: 2546860
aacuucccaugacucggaa

SEQ ID NO: 2546862 - RNA, 19 nt, Artificial Sequence
  Description of Artificial Sequence: Synthetic oligonucleotide
  Sense strand starting at position 2777 of SEQ ID NO: 1888632
uagucagaguucucuaggu

SEQ ID NO: 2546863 - RNA, 19 nt, Artificial Sequence
  Description of Artificial Sequence: Synthetic oligonucleotide
  Antisense strand to SEQ ID NO: 2546862
accuagagaacucugacua

SEQ ID NO: 2546864 - RNA, 19 nt, Artificial Sequence
  Description of Artificial Sequence: Synthetic oligonucleotide
  Sense strand starting at position 259 of SEQ ID NO: 1888632
augucuuugucaucggaga

SEQ ID NO: 2546865 - RNA, 19 nt, Artificial Sequence
  Description of Artificial Sequence: Synthetic oligonucleotide
  Antisense strand to SEQ ID NO: 2546864
ucuccgaugacaaagacau

SEQ ID NO: 2546866 - RNA, 19 nt, Artificial Sequence
  Description of Artificial Sequence: Synthetic oligonucleotide
  Sense strand starting at position 2683 of SEQ ID NO: 1888632
ugcauaauguacgugggaa

SEQ ID NO: 2546867 - RNA, 19 nt, Artificial Sequence
  Description of Artificial Sequence: Synthetic oligonucleotide
  Antisense strand to SEQ ID NO: 2546866
uucccacguacauuaugca

SEQ ID NO: 2546868 - RNA, 19 nt, Artificial Sequence
  Description of Artificial Sequence: Synthetic oligonucleotide
  Sense strand starting at position 792 of SEQ ID NO: 1888632
cuguuaugccaguacuuug

SEQ ID NO: 2546869 - RNA, 19 nt, Artificial Sequence
  Description of Artificial Sequence: Synthetic oligonucleotide
  Antisense strand to SEQ ID NO: 2546868
caaaguacuggcauaacag

SEQ ID NO: 2546870 - RNA, 19 nt, Artificial Sequence
  Description of Artificial Sequence: Synthetic oligonucleotide
  Sense strand starting at position 1021 of SEQ ID NO: 1888633
uggagcaaccuguaucaaa

SEQ ID NO: 2546871 - RNA, 19 nt, Artificial Sequence
  Description of Artificial Sequence: Synthetic oligonucleotide
  Antisense strand to SEQ ID NO: 2546870
uuugauacagguugcucca

SEQ ID NO: 2546872 - RNA, 19 nt, Artificial Sequence
  Description of Artificial Sequence: Synthetic oligonucleotide
  Sense strand starting at position 3048 of SEQ ID NO: 1888633
gcgagaagccggccaucuu

SEQ ID NO: 2546873 - RNA, 19 nt, Artificial Sequence
  Description of Artificial Sequence: Synthetic oligonucleotide
  Antisense strand to SEQ ID NO: 2546872
aagauggccggcuucucgc

SEQ ID NO: 2546874 - RNA, 19 nt, Artificial Sequence
  Description of Artificial Sequence: Synthetic oligonucleotide
  Sense strand starting at position 3942 of SEQ ID NO: 1888633
cuguuagacguuucugugu

SEQ ID NO: 2546875 - RNA, 19 nt, Artificial Sequence
  Description of Artificial Sequence: Synthetic oligonucleotide
  Antisense strand to SEQ ID NO: 2546874
acacagaaacgucuaacag

SEQ ID NO: 2546876 - RNA, 19 nt, Artificial Sequence
  Description of Artificial Sequence: Synthetic oligonucleotide
  Sense strand starting at position 2376 of SEQ ID NO: 1888633
ugggcagauggcuaaacua

SEQ ID NO: 2546877 - RNA, 19 nt, Artificial Sequence
  Description of Artificial Sequence: Synthetic oligonucleotide
  Antisense strand to SEQ ID NO: 2546876
uaguuuagccaucugccca

SEQ ID NO: 2546878 - RNA, 19 nt, Artificial Sequence
  Description of Artificial Sequence: Synthetic oligonucleotide
  Sense strand starting at position 2208 of SEQ ID NO: 1888633
cgauucuagacuuggauaa

SEQ ID NO: 2546879 - RNA, 19 nt, Artificial Sequence
  Description of Artificial Sequence: Synthetic oligonucleotide
  Antisense strand to SEQ ID NO: 2546878
uuauccaagucuagaaucg

SEQ ID NO: 2546880 - RNA, 19 nt, Artificial Sequence
  Description of Artificial Sequence: Synthetic oligonucleotide
  Sense strand starting at position 3940 of SEQ ID NO: 1888633
gccuguuagacguuucugu

SEQ ID NO: 2546881 - RNA, 19 nt, Artificial Sequence
  Description of Artificial Sequence: Synthetic oligonucleotide
  Antisense strand to SEQ ID NO: 2546880
acagaaacgucuaacaggc

SEQ ID NO: 2546882 - RNA, 19 nt, Artificial Sequence
  Description of Artificial Sequence: Synthetic oligonucleotide
  Sense strand starting at position 3746 of SEQ ID NO: 1888633
gggugaucucugggaccac

SEQ ID NO: 2546883 - RNA, 19 nt, Artificial Sequence
  Description of Artificial Sequence: Synthetic oligonucleotide
  Antisense strand to SEQ ID NO: 2546882
guggucccagagaucaccc

SEQ ID NO: 2546884 - RNA, 19 nt, Artificial Sequence
  Description of Artificial Sequence: Synthetic oligonucleotide
  Sense strand starting at position 2221 of SEQ ID NO: 1888633
ggauaacagugagugcaaa

SEQ ID NO: 2546885 - RNA, 19 nt, Artificial Sequence
  Description of Artificial Sequence: Synthetic oligonucleotide
  Antisense strand to SEQ ID NO: 2546884
uuugcacucacuguuaucc

SEQ ID NO: 2546886 - RNA, 19 nt, Artificial Sequence
  Description of Artificial Sequence: Synthetic oligonucleotide
  Sense strand starting at position 3931 of SEQ ID NO: 1888633
gagacuaaggccuguuaga

SEQ ID NO: 2546887 - RNA, 19 nt, Artificial Sequence
  Description of Artificial Sequence: Synthetic oligonucleotide
  Antisense strand to SEQ ID NO: 2546886
ucuaacaggccuuagucuc

SEQ ID NO: 2546888 - RNA, 19 nt, Artificial Sequence
  Description of Artificial Sequence: Synthetic oligonucleotide
  Sense strand starting at position 3693 of SEQ ID NO: 1888633
ugauuaugagucugaggua

SEQ ID NO: 2546889 - RNA, 19 nt, Artificial Sequence
  Description of Artificial Sequence: Synthetic oligonucleotide
  Antisense strand to SEQ ID NO: 2546888
uaccucagacucauaauca

SEQ ID NO: 2546890 - RNA, 19 nt, Artificial Sequence
  Description of Artificial Sequence: Synthetic oligonucleotide
  Sense strand starting at position 1003 of SEQ ID NO: 1888633
ugagaauuguugucaaauu

SEQ ID NO: 2546891 - RNA, 19 nt, Artificial Sequence
  Description of Artificial Sequence: Synthetic oligonucleotide
  Antisense strand to SEQ ID NO: 2546890
aauuugacaacaauucuca

SEQ ID NO: 2546892 - RNA, 19 nt, Artificial Sequence
  Description of Artificial Sequence: Synthetic oligonucleotide
  Sense strand starting at position 459 of SEQ ID NO: 1888633
caguguuugcagucgccau

SEQ ID NO: 2546893 - RNA, 19 nt, Artificial Sequence
  Description of Artificial Sequence: Synthetic oligonucleotide
  Antisense strand to SEQ ID NO: 2546892
auggcgacugcaaacacug

SEQ ID NO: 2546894 - RNA, 19 nt, Artificial Sequence
  Description of Artificial Sequence: Synthetic oligonucleotide
  Sense strand starting at position 3885 of SEQ ID NO: 1888633
ccacuucgcguguucgauu

SEQ ID NO: 2546895 - RNA, 19 nt, Artificial Sequence
  Description of Artificial Sequence: Synthetic oligonucleotide
  Antisense strand to SEQ ID NO: 2546894
aaucgaacacgcgaagugg

SEQ ID NO: 2546896 - RNA, 19 nt, Artificial Sequence
  Description of Artificial Sequence: Synthetic oligonucleotide
  Sense strand starting at position 481 of SEQ ID NO: 1888633
gagguuuaucauuguacua

SEQ ID NO: 2546897 - RNA, 19 nt, Artificial Sequence
  Description of Artificial Sequence: Synthetic oligonucleotide
  Antisense strand to SEQ ID NO: 2546896
uaguacaaugauaaaccuc

SEQ ID NO: 2546898 - RNA, 19 nt, Artificial Sequence
  Description of Artificial Sequence: Synthetic oligonucleotide
  Sense strand starting at position 3530 of SEQ ID NO: 1888633
ggauauggcugucucagau

SEQ ID NO: 2546899 - RNA, 19 nt, Artificial Sequence
  Description of Artificial Sequence: Synthetic oligonucleotide
  Antisense strand to SEQ ID NO: 2546898
aucugagacagccauaucc

SEQ ID NO: 2546900 - RNA, 19 nt, Artificial Sequence
  Description of Artificial Sequence: Synthetic oligonucleotide
  Sense strand starting at position 480 of SEQ ID NO: 1888633
ugagguuuaucauuguacu

SEQ ID NO: 2546901 - RNA, 19 nt, Artificial Sequence
  Description of Artificial Sequence: Synthetic oligonucleotide
  Antisense strand to SEQ ID NO: 2546900
aguacaaugauaaaccuca

SEQ ID NO: 2546902 - RNA, 19 nt, Artificial Sequence
  Description of Artificial Sequence: Synthetic oligonucleotide
  Sense strand starting at position 1739 of SEQ ID NO: 1888633
cucgguucgagccaggaau

SEQ ID NO: 2546903 - RNA, 19 nt, Artificial Sequence
  Description of Artificial Sequence: Synthetic oligonucleotide
  Antisense strand to SEQ ID NO: 2546902
auuccuggcucgaaccgag

SEQ ID NO: 2546904 - RNA, 19 nt, Artificial Sequence
  Description of Artificial Sequence: Synthetic oligonucleotide
  Sense strand starting at position 3114 of SEQ ID NO: 1888633
ccaaauacguguccuuaua

SEQ ID NO: 2546905 - RNA, 19 nt, Artificial Sequence
  Description of Artificial Sequence: Synthetic oligonucleotide
  Antisense strand to SEQ ID NO: 2546904
uauaaggacacguauuugg

SEQ ID NO: 2546906 - RNA, 19 nt, Artificial Sequence
  Description of Artificial Sequence: Synthetic oligonucleotide
  Sense strand starting at position 3527 of SEQ ID NO: 1888633
ucuggauauggcugucuca

SEQ ID NO: 2546907 - RNA, 19 nt, Artificial Sequence
  Description of Artificial Sequence: Synthetic oligonucleotide
  Antisense strand to SEQ ID NO: 2546906
ugagacagccauauccaga

SEQ ID NO: 2546908 - RNA, 19 nt, Artificial Sequence
  Description of Artificial Sequence: Synthetic oligonucleotide
  Sense strand starting at position 3890 of SEQ ID NO: 1888633
ucgcguguucgauuggcuu

SEQ ID NO: 2546909 - RNA, 19 nt, Artificial Sequence
  Description of Artificial Sequence: Synthetic oligonucleotide
  Antisense strand to SEQ ID NO: 2546908
aagccaaucgaacacgcga

SEQ ID NO: 2546910 - RNA, 19 nt, Artificial Sequence
  Description of Artificial Sequence: Synthetic oligonucleotide
  Sense strand starting at position 477 of SEQ ID NO: 1888633
uugugagguuuaucauugu

SEQ ID NO: 2546911 - RNA, 19 nt, Artificial Sequence
  Description of Artificial Sequence: Synthetic oligonucleotide
  Antisense strand to SEQ ID NO: 2546910
acaaugauaaaccucacaa

SEQ ID NO: 2546912 - RNA, 19 nt, Artificial Sequence
  Description of Artificial Sequence: Synthetic oligonucleotide
  Sense strand starting at position 1948 of SEQ ID NO: 1888633
cugugacucuuccuugguu

SEQ ID NO: 2546913 - RNA, 19 nt, Artificial Sequence
  Description of Artificial Sequence: Synthetic oligonucleotide
  Antisense strand to SEQ ID NO: 2546912
aaccaaggaagagucacag

SEQ ID NO: 2546914 - RNA, 19 nt, Artificial Sequence
  Description of Artificial Sequence: Synthetic oligonucleotide
  Sense strand starting at position 2940 of SEQ ID NO: 1888633
ccaguaaguuuagucuugu

SEQ ID NO: 2546915 - RNA, 19 nt, Artificial Sequence
  Description of Artificial Sequence: Synthetic oligonucleotide
  Antisense strand to SEQ ID NO: 2546914
acaagacuaaacuuacugg

SEQ ID NO: 2546916 - RNA, 19 nt, Artificial Sequence
  Description of Artificial Sequence: Synthetic oligonucleotide
  Sense strand starting at position 1940 of SEQ ID NO: 1888633
ggaagagacugugacucuu

SEQ ID NO: 2546917 - RNA, 19 nt, Artificial Sequence
  Description of Artificial Sequence: Synthetic oligonucleotide
  Antisense strand to SEQ ID NO: 2546916
aagagucacagucucuucc

SEQ ID NO: 2546918 - RNA, 19 nt, Artificial Sequence
  Description of Artificial Sequence: Synthetic oligonucleotide
  Sense strand starting at position 1730 of SEQ ID NO: 1888633
caaaguuagcucgguucga

SEQ ID NO: 2546919 - RNA, 19 nt, Artificial Sequence
  Description of Artificial Sequence: Synthetic oligonucleotide
  Antisense strand to SEQ ID NO: 2546918
ucgaaccgagcuaacuuug

SEQ ID NO: 2546920 - RNA, 19 nt, Artificial Sequence
  Description of Artificial Sequence: Synthetic oligonucleotide
  Sense strand starting at position 3694 of SEQ ID NO: 1888633
gauuaugagucugagguaa

SEQ ID NO: 2546921 - RNA, 19 nt, Artificial Sequence
  Description of Artificial Sequence: Synthetic oligonucleotide
  Antisense strand to SEQ ID NO: 2546920
uuaccucagacucauaauc

SEQ ID NO: 2546922 - RNA, 19 nt, Artificial Sequence
  Description of Artificial Sequence: Synthetic oligonucleotide
  Sense strand starting at position 1004 of SEQ ID NO: 1888633
gagaauuguugucaaauug

SEQ ID NO: 2546923 - RNA, 19 nt, Artificial Sequence
  Description of Artificial Sequence: Synthetic oligonucleotide
  Antisense strand to SEQ ID NO: 2546922
caauuugacaacaauucuc

SEQ ID NO: 2546924 - RNA, 19 nt, Artificial Sequence
  Description of Artificial Sequence: Synthetic oligonucleotide
  Sense strand starting at position 3111 of SEQ ID NO: 1888633
acgccaaauacguguccuu

SEQ ID NO: 2546925 - RNA, 19 nt, Artificial Sequence
  Description of Artificial Sequence: Synthetic oligonucleotide
  Antisense strand to SEQ ID NO: 2546924
aaggacacguauuuggcgu

SEQ ID NO: 2546926 - RNA, 19 nt, Artificial Sequence
  Description of Artificial Sequence: Synthetic oligonucleotide
  Sense strand starting at position 3747 of SEQ ID NO: 1888633
ggugaucucugggaccacu

SEQ ID NO: 2546927 - RNA, 19 nt, Artificial Sequence
  Description of Artificial Sequence: Synthetic oligonucleotide
  Antisense strand to SEQ ID NO: 2546926
aguggucccagagaucacc

SEQ ID NO: 2546928 - RNA, 19 nt, Artificial Sequence
  Description of Artificial Sequence: Synthetic oligonucleotide
  Sense strand starting at position 3896 of SEQ ID NO: 1888633
guucgauuggcuuguccuu

SEQ ID NO: 2546929 - RNA, 19 nt, Artificial Sequence
  Description of Artificial Sequence: Synthetic oligonucleotide
  Antisense strand to SEQ ID NO: 2546928
aaggacaagccaaucgaac

SEQ ID NO: 2546930 - RNA, 19 nt, Artificial Sequence
  Description of Artificial Sequence: Synthetic oligonucleotide
  Sense strand starting at position 483 of SEQ ID NO: 1888633
gguuuaucauuguacuaua

SEQ ID NO: 2546931 - RNA, 19 nt, Artificial Sequence
  Description of Artificial Sequence: Synthetic oligonucleotide
  Antisense strand to SEQ ID NO: 2546930
uauaguacaaugauaaacc

SEQ ID NO: 2546932 - RNA, 19 nt, Artificial Sequence
  Description of Artificial Sequence: Synthetic oligonucleotide
  Sense strand starting at position 550 of SEQ ID NO: 1888633
uggauacagugcugagaca

SEQ ID NO: 2546933 - RNA, 19 nt, Artificial Sequence
  Description of Artificial Sequence: Synthetic oligonucleotide
  Antisense strand to SEQ ID NO: 2546932
ugucucagcacuguaucca

SEQ ID NO: 2546934 - RNA, 19 nt, Artificial Sequence
  Description of Artificial Sequence: Synthetic oligonucleotide
  Sense strand starting at position 1042 of SEQ ID NO: 1888633
ccugucauauauggacuau

SEQ ID NO: 2546935 - RNA, 19 nt, Artificial Sequence
  Description of Artificial Sequence: Synthetic oligonucleotide
  Antisense strand to SEQ ID NO: 2546934
auaguccauauaugacagg

SEQ ID NO: 2546936 - RNA, 19 nt, Artificial Sequence
  Description of Artificial Sequence: Synthetic oligonucleotide
  Sense strand starting at position 460 of SEQ ID NO: 1888633
aguguuugcagucgccauu

SEQ ID NO: 2546937 - RNA, 19 nt, Artificial Sequence
  Description of Artificial Sequence: Synthetic oligonucleotide
  Antisense strand to SEQ ID NO: 2546936
aauggcgacugcaaacacu

SEQ ID NO: 2546938 - RNA, 19 nt, Artificial Sequence
  Description of Artificial Sequence: Synthetic oligonucleotide
  Sense strand starting at position 2202 of SEQ ID NO: 1888633
ugcauucgauucuagacuu

SEQ ID NO: 2546939 - RNA, 19 nt, Artificial Sequence
  Description of Artificial Sequence: Synthetic oligonucleotide
  Antisense strand to SEQ ID NO: 2546938
aagucuagaaucgaaugca

SEQ ID NO: 2546940 - RNA, 19 nt, Artificial Sequence
  Description of Artificial Sequence: Synthetic oligonucleotide
  Sense strand starting at position 2962 of SEQ ID NO: 1888633
guccgaacguuugaauaau

SEQ ID NO: 2546941 - RNA, 19 nt, Artificial Sequence
  Description of Artificial Sequence: Synthetic oligonucleotide
  Antisense strand to SEQ ID NO: 2546940
auuauucaaacguucggac

SEQ ID NO: 2546942 - RNA, 19 nt, Artificial Sequence
  Description of Artificial Sequence: Synthetic oligonucleotide
  Sense strand starting at position 1032 of SEQ ID NO: 1888633
guaucaaauuccugucaua

SEQ ID NO: 2546943 - RNA, 19 nt, Artificial Sequence
  Description of Artificial Sequence: Synthetic oligonucleotide
  Antisense strand to SEQ ID NO: 2546942
uaugacaggaauuugauac

SEQ ID NO: 2546944 - RNA, 19 nt, Artificial Sequence
  Description of Artificial Sequence: Synthetic oligonucleotide
  Sense strand starting at position 2944 of SEQ ID NO: 1888633
uaaguuuagucuugugaag

SEQ ID NO: 2546945 - RNA, 19 nt, Artificial Sequence
  Description of Artificial Sequence: Synthetic oligonucleotide
  Antisense strand to SEQ ID NO: 2546944
cuucacaagacuaaacuua

SEQ ID NO: 2546946 - RNA, 19 nt, Artificial Sequence
  Description of Artificial Sequence: Synthetic oligonucleotide
  Sense strand starting at position 2028 of SEQ ID NO: 1888633
ugugucaccucuggugaca

SEQ ID NO: 2546947 - RNA, 19 nt, Artificial Sequence
  Description of Artificial Sequence: Synthetic oligonucleotide
  Antisense strand to SEQ ID NO: 2546946
ugucaccagaggugacaca

SEQ ID NO: 2546948 - RNA, 19 nt, Artificial Sequence
  Description of Artificial Sequence: Synthetic oligonucleotide
  Sense strand starting at position 2946 of SEQ ID NO: 1888633
aguuuagucuugugaaguc

SEQ ID NO: 2546949 - RNA, 19 nt, Artificial Sequence
  Description of Artificial Sequence: Synthetic oligonucleotide
  Antisense strand to SEQ ID NO: 2546948
gacuucacaagacuaaacu

SEQ ID NO: 2546950 - RNA, 19 nt, Artificial Sequence
  Description of Artificial Sequence: Synthetic oligonucleotide
  Sense strand starting at position 2304 of SEQ ID NO: 1888634
gucguaugccgaguaugga

SEQ ID NO: 2546951 - RNA, 19 nt, Artificial Sequence
  Description of Artificial Sequence: Synthetic oligonucleotide
  Antisense strand to SEQ ID NO: 2546950
uccauacucggcauacgac

SEQ ID NO: 2546952 - RNA, 19 nt, Artificial Sequence
  Description of Artificial Sequence: Synthetic oligonucleotide
  Sense strand starting at position 239 of SEQ ID NO: 1888634
ccaggaucaccuuggaauc

SEQ ID NO: 2546953 - RNA, 19 nt, Artificial Sequence
  Description of Artificial Sequence: Synthetic oligonucleotide
  Antisense strand to SEQ ID NO: 2546952
gauuccaaggugauccugg

SEQ ID NO: 2546954 - RNA, 19 nt, Artificial Sequence
  Description of Artificial Sequence: Synthetic oligonucleotide
  Sense strand starting at position 1628 of SEQ ID NO: 1888634
ccguguguaccucuagguu

SEQ ID NO: 2546955 - RNA, 19 nt, Artificial Sequence
  Description of Artificial Sequence: Synthetic oligonucleotide
  Antisense strand to SEQ ID NO: 2546954
aaccuagagguacacacgg

SEQ ID NO: 2546956 - RNA, 19 nt, Artificial Sequence
  Description of Artificial Sequence: Synthetic oligonucleotide
  Sense strand starting at position 3685 of SEQ ID NO: 1888634
caagucaucccugauguag

SEQ ID NO: 2546957 - RNA, 19 nt, Artificial Sequence
  Description of Artificial Sequence: Synthetic oligonucleotide
  Antisense strand to SEQ ID NO: 2546956
cuacaucagggaugacuug

SEQ ID NO: 2546958 - RNA, 19 nt, Artificial Sequence
  Description of Artificial Sequence: Synthetic oligonucleotide
  Sense strand starting at position 1652 of SEQ ID NO: 1888634
gagucaaaucagugaugac

SEQ ID NO: 2546959 - RNA, 19 nt, Artificial Sequence
  Description of Artificial Sequence: Synthetic oligonucleotide
  Antisense strand to SEQ ID NO: 2546958
gucaucacugauuugacuc

SEQ ID NO: 2546960 - RNA, 19 nt, Artificial Sequence
  Description of Artificial Sequence: Synthetic oligonucleotide
  Sense strand starting at position 2320 of SEQ ID NO: 1888634
ggaguggaccugugggaau

SEQ ID NO: 2546961 - RNA, 19 nt, Artificial Sequence
  Description of Artificial Sequence: Synthetic oligonucleotide
  Antisense strand to SEQ ID NO: 2546960
auucccacagguccacucc

SEQ ID NO: 2546962 - RNA, 19 nt, Artificial Sequence
  Description of Artificial Sequence: Synthetic oligonucleotide
  Sense strand starting at position 3680 of SEQ ID NO: 1888634
guaaacaagucaucccuga

SEQ ID NO: 2546963 - RNA, 19 nt, Artificial Sequence
  Description of Artificial Sequence: Synthetic oligonucleotide
  Antisense strand to SEQ ID NO: 2546962
ucagggaugacuuguuuac

SEQ ID NO: 2546964 - RNA, 19 nt, Artificial Sequence
  Description of Artificial Sequence: Synthetic oligonucleotide
  Sense strand starting at position 1007 of SEQ ID NO: 1888634
ggcccaguccuggaugacu

SEQ ID NO: 2546965 - RNA, 19 nt, Artificial Sequence
  Description of Artificial Sequence: Synthetic oligonucleotide
  Antisense strand to SEQ ID NO: 2546964
agucauccaggacugggcc

SEQ ID NO: 2546966 - RNA, 19 nt, Artificial Sequence
  Description of Artificial Sequence: Synthetic oligonucleotide
  Sense strand starting at position 2125 of SEQ ID NO: 1888634
ucuggaguaaguggugaaa

SEQ ID NO: 2546967 - RNA, 19 nt, Artificial Sequence
  Description of Artificial Sequence: Synthetic oligonucleotide
  Antisense strand to SEQ ID NO: 2546966
uuucaccacuuacuccaga

SEQ ID NO: 2546968 - RNA, 19 nt, Artificial Sequence
  Description of Artificial Sequence: Synthetic oligonucleotide
  Sense strand starting at position 1651 of SEQ ID NO: 1888634
cgagucaaaucagugauga

SEQ ID NO: 2546969 - RNA, 19 nt, Artificial Sequence
  Description of Artificial Sequence: Synthetic oligonucleotide
  Antisense strand to SEQ ID NO: 2546968
ucaucacugauuugacucg

SEQ ID NO: 2546970 - RNA, 19 nt, Artificial Sequence
  Description of Artificial Sequence: Synthetic oligonucleotide
  Sense strand starting at position 2795 of SEQ ID NO: 1888634
agcugacaacuaugugaug

SEQ ID NO: 2546971 - RNA, 19 nt, Artificial Sequence
  Description of Artificial Sequence: Synthetic oligonucleotide
  Antisense strand to SEQ ID NO: 2546970
caucacauaguugucagcu

SEQ ID NO: 2546972 - RNA, 19 nt, Artificial Sequence
  Description of Artificial Sequence: Synthetic oligonucleotide
  Sense strand starting at position 1640 of SEQ ID NO: 1888634
cuagguuaucccgagucaa

SEQ ID NO: 2546973 - RNA, 19 nt, Artificial Sequence
  Description of Artificial Sequence: Synthetic oligonucleotide
  Antisense strand to SEQ ID NO: 2546972
uugacucgggauaaccuag

SEQ ID NO: 2546974 - RNA, 19 nt, Artificial Sequence
  Description of Artificial Sequence: Synthetic oligonucleotide
  Sense strand starting at position 3684 of SEQ ID NO: 1888634
acaagucaucccugaugua

SEQ ID NO: 2546975 - RNA, 19 nt, Artificial Sequence
  Description of Artificial Sequence: Synthetic oligonucleotide
  Antisense strand to SEQ ID NO: 2546974
uacaucagggaugacuugu

SEQ ID NO: 2546976 - RNA, 19 nt, Artificial Sequence
  Description of Artificial Sequence: Synthetic oligonucleotide
  Sense strand starting at position 3117 of SEQ ID NO: 1888634
ccuccuuugggaugucauu

SEQ ID NO: 2546977 - RNA, 19 nt, Artificial Sequence
  Description of Artificial Sequence: Synthetic oligonucleotide
  Antisense strand to SEQ ID NO: 2546976
aaugacaucccaaaggagg

SEQ ID NO: 2546978 - RNA, 19 nt, Artificial Sequence
  Description of Artificial Sequence: Synthetic oligonucleotide
  Sense strand starting at position 1599 of SEQ ID NO: 1888634
ccucauccucccugugaca

SEQ ID NO: 2546979 - RNA, 19 nt, Artificial Sequence
  Description of Artificial Sequence: Synthetic oligonucleotide
  Antisense strand to SEQ ID NO: 2546978
ugucacagggaggaugagg

SEQ ID NO: 2546980 - RNA, 19 nt, Artificial Sequence
  Description of Artificial Sequence: Synthetic oligonucleotide
  Sense strand starting at position 337 of SEQ ID NO: 1888634
gugccaccuccuuaagcaa

SEQ ID NO: 2546981 - RNA, 19 nt, Artificial Sequence
  Description of Artificial Sequence: Synthetic oligonucleotide
  Antisense strand to SEQ ID NO: 2546980
uugcuuaaggagguggcac

SEQ ID NO: 2546982 - RNA, 19 nt, Artificial Sequence
  Description of Artificial Sequence: Synthetic oligonucleotide
  Sense strand starting at position 842 of SEQ ID NO: 1888634
gcaugauggagucagcugu

SEQ ID NO: 2546983 - RNA, 19 nt, Artificial Sequence
  Description of Artificial Sequence: Synthetic oligonucleotide
  Antisense strand to SEQ ID NO: 2546982
acagcugacuccaucaugc

SEQ ID NO: 2546984 - RNA, 19 nt, Artificial Sequence
  Description of Artificial Sequence: Synthetic oligonucleotide
  Sense strand starting at position 474 of SEQ ID NO: 1888634
uuacucaacucugaagaga

SEQ ID NO: 2546985 - RNA, 19 nt, Artificial Sequence
  Description of Artificial Sequence: Synthetic oligonucleotide
  Antisense strand to SEQ ID NO: 2546984
ucucuucagaguugaguaa

SEQ ID NO: 2546986 - RNA, 19 nt, Artificial Sequence
  Description of Artificial Sequence: Synthetic oligonucleotide
  Sense strand starting at position 2561 of SEQ ID NO: 1888634
ggaugugcacggugucaaa

SEQ ID NO: 2546987 - RNA, 19 nt, Artificial Sequence
  Description of Artificial Sequence: Synthetic oligonucleotide
  Antisense strand to SEQ ID NO: 2546986
uuugacaccgugcacaucc

SEQ ID NO: 2546988 - RNA, 19 nt, Artificial Sequence
  Description of Artificial Sequence: Synthetic oligonucleotide
  Sense strand starting at position 1926 of SEQ ID NO: 1888634
ggagucuuucugugggcga

SEQ ID NO: 2546989 - RNA, 19 nt, Artificial Sequence
  Description of Artificial Sequence: Synthetic oligonucleotide
  Antisense strand to SEQ ID NO: 2546988
ucgcccacagaaagacucc

SEQ ID NO: 2546990 - RNA, 19 nt, Artificial Sequence
  Description of Artificial Sequence: Synthetic oligonucleotide
  Sense strand starting at position 2806 of SEQ ID NO: 1888634
augugauguuaccagaaga

SEQ ID NO: 2546991 - RNA, 19 nt, Artificial Sequence
  Description of Artificial Sequence: Synthetic oligonucleotide
  Antisense strand to SEQ ID NO: 2546990
ucuucugguaacaucacau

SEQ ID NO: 2546992 - RNA, 19 nt, Artificial Sequence
  Description of Artificial Sequence: Synthetic oligonucleotide
  Sense strand starting at position 1563 of SEQ ID NO: 1888634
agagcagugcccuguggua

SEQ ID NO: 2546993 - RNA, 19 nt, Artificial Sequence
  Description of Artificial Sequence: Synthetic oligonucleotide
  Antisense strand to SEQ ID NO: 2546992
uaccacagggcacugcucu

SEQ ID NO: 2546994 - RNA, 19 nt, Artificial Sequence
  Description of Artificial Sequence: Synthetic oligonucleotide
  Sense strand starting at position 1565 of SEQ ID NO: 1888634
agcagugcccugugguaau

SEQ ID NO: 2546995 - RNA, 19 nt, Artificial Sequence
  Description of Artificial Sequence: Synthetic oligonucleotide
  Antisense strand to SEQ ID NO: 2546994
auuaccacagggcacugcu

SEQ ID NO: 2546996 - RNA, 19 nt, Artificial Sequence
  Description of Artificial Sequence: Synthetic oligonucleotide
  Sense strand starting at position 1655 of SEQ ID NO: 1888634
ucaaaucagugaugaccaa

SEQ ID NO: 2546997 - RNA, 19 nt, Artificial Sequence
  Description of Artificial Sequence: Synthetic oligonucleotide
  Antisense strand to SEQ ID NO: 2546996
uuggucaucacugauuuga

SEQ ID NO: 2546998 - RNA, 19 nt, Artificial Sequence
  Description of Artificial Sequence: Synthetic oligonucleotide
  Sense strand starting at position 2798 of SEQ ID NO: 1888634
ugacaacuaugugauguua

SEQ ID NO: 2546999 - RNA, 19 nt, Artificial Sequence
  Description of Artificial Sequence: Synthetic oligonucleotide
  Antisense strand to SEQ ID NO: 2546998
uaacaucacauaguuguca

SEQ ID NO: 2547000 - RNA, 19 nt, Artificial Sequence
  Description of Artificial Sequence: Synthetic oligonucleotide
  Sense strand starting at position 3150 of SEQ ID NO: 1888634
gugggugucuugcuggcua

SEQ ID NO: 2547001 - RNA, 19 nt, Artificial Sequence
  Description of Artificial Sequence: Synthetic oligonucleotide
  Antisense strand to SEQ ID NO: 2547000
uagccagcaagacacccac

SEQ ID NO: 2547002 - RNA, 19 nt, Artificial Sequence
  Description of Artificial Sequence: Synthetic oligonucleotide
  Sense strand starting at position 63 of SEQ ID NO: 1888634
gcgcuaaggucagccgaua

SEQ ID NO: 2547003 - RNA, 19 nt, Artificial Sequence
  Description of Artificial Sequence: Synthetic oligonucleotide
  Antisense strand to SEQ ID NO: 2547002
uaucggcugaccuuagcgc

SEQ ID NO: 2547004 - RNA, 19 nt, Artificial Sequence
  Description of Artificial Sequence: Synthetic oligonucleotide
  Sense strand starting at position 2292 of SEQ ID NO: 1888634
guacgucucugggucguau

SEQ ID NO: 2547005 - RNA, 19 nt, Artificial Sequence
  Description of Artificial Sequence: Synthetic oligonucleotide
  Antisense strand to SEQ ID NO: 2547004
auacgacccagagacguac

SEQ ID NO: 2547006 - RNA, 19 nt, Artificial Sequence
  Description of Artificial Sequence: Synthetic oligonucleotide
  Sense strand starting at position 2116 of SEQ ID NO: 1888634
ggcucagcuucuggaguaa

SEQ ID NO: 2547007 - RNA, 19 nt, Artificial Sequence
  Description of Artificial Sequence: Synthetic oligonucleotide
  Antisense strand to SEQ ID NO: 2547006
uuacuccagaagcugagcc

SEQ ID NO: 2547008 - RNA, 19 nt, Artificial Sequence
  Description of Artificial Sequence: Synthetic oligonucleotide
  Sense strand starting at position 2115 of SEQ ID NO: 1888634
gggcucagcuucuggagua

SEQ ID NO: 2547009 - RNA, 19 nt, Artificial Sequence
  Description of Artificial Sequence: Synthetic oligonucleotide
  Antisense strand to SEQ ID NO: 2547008
uacuccagaagcugagccc

SEQ ID NO: 2547010 - RNA, 19 nt, Artificial Sequence
  Description of Artificial Sequence: Synthetic oligonucleotide
  Sense strand starting at position 1927 of SEQ ID NO: 1888634
gagucuuucugugggcgaa

SEQ ID NO: 2547011 - RNA, 19 nt, Artificial Sequence
  Description of Artificial Sequence: Synthetic oligonucleotide
  Antisense strand to SEQ ID NO: 2547010
uucgcccacagaaagacuc

SEQ ID NO: 2547012 - RNA, 19 nt, Artificial Sequence
  Description of Artificial Sequence: Synthetic oligonucleotide
  Sense strand starting at position 3449 of SEQ ID NO: 1888635
uggaaagcaguguagagau

SEQ ID NO: 2547013 - RNA, 19 nt, Artificial Sequence
  Description of Artificial Sequence: Synthetic oligonucleotide
  Antisense strand to SEQ ID NO: 2547012
aucucuacacugcuuucca

SEQ ID NO: 2547014 - RNA, 19 nt, Artificial Sequence
  Description of Artificial Sequence: Synthetic oligonucleotide
  Sense strand starting at position 2888 of SEQ ID NO: 1888635
ggaguucgagaccagugaa

SEQ ID NO: 2547015 - RNA, 19 nt, Artificial Sequence
  Description of Artificial Sequence: Synthetic oligonucleotide
  Antisense strand to SEQ ID NO: 2547014
uucacuggucucgaacucc

SEQ ID NO: 2547016 - RNA, 19 nt, Artificial Sequence
  Description of Artificial Sequence: Synthetic oligonucleotide
  Sense strand starting at position 2343 of SEQ ID NO: 1888635
ucaagcuaucaauacgaca

SEQ ID NO: 2547017 - RNA, 19 nt, Artificial Sequence
  Description of Artificial Sequence: Synthetic oligonucleotide
  Antisense strand to SEQ ID NO: 2547016
ugucguauugauagcuuga

SEQ ID NO: 2547018 - RNA, 19 nt, Artificial Sequence
  Description of Artificial Sequence: Synthetic oligonucleotide
  Sense strand starting at position 2722 of SEQ ID NO: 1888635
aggagaucauguuuauuau

SEQ ID NO: 2547019 - RNA, 19 nt, Artificial Sequence
  Description of Artificial Sequence: Synthetic oligonucleotide
  Antisense strand to SEQ ID NO: 2547018
auaauaaacaugaucuccu

SEQ ID NO: 2547020 - RNA, 19 nt, Artificial Sequence
  Description of Artificial Sequence: Synthetic oligonucleotide
  Sense strand starting at position 140 of SEQ ID NO: 1888635
cauugaugugugcaagauc

SEQ ID NO: 2547021 - RNA, 19 nt, Artificial Sequence
  Description of Artificial Sequence: Synthetic oligonucleotide
  Antisense strand to SEQ ID NO: 2547020
gaucuugcacacaucaaug

SEQ ID NO: 2547022 - RNA, 19 nt, Artificial Sequence
  Description of Artificial Sequence: Synthetic oligonucleotide
  Sense strand starting at position 2782 of SEQ ID NO: 1888635
aggcaaugguuccuuacaa

SEQ ID NO: 2547023 - RNA, 19 nt, Artificial Sequence
  Description of Artificial Sequence: Synthetic oligonucleotide
  Antisense strand to SEQ ID NO: 2547022
uuguaaggaaccauugccu

SEQ ID NO: 2547024 - RNA, 19 nt, Artificial Sequence
  Description of Artificial Sequence: Synthetic oligonucleotide
  Sense strand starting at position 2783 of SEQ ID NO: 1888635
ggcaaugguuccuuacaaa

SEQ ID NO: 2547025 - RNA, 19 nt, Artificial Sequence
  Description of Artificial Sequence: Synthetic oligonucleotide
  Antisense strand to SEQ ID NO: 2547024
uuuguaaggaaccauugcc

SEQ ID NO: 2547026 - RNA, 19 nt, Artificial Sequence
  Description of Artificial Sequence: Synthetic oligonucleotide
  Sense strand starting at position 3737 of SEQ ID NO: 1888635
ggauuauuauguuuagcaa

SEQ ID NO: 2547027 - RNA, 19 nt, Artificial Sequence
  Description of Artificial Sequence: Synthetic oligonucleotide
  Antisense strand to SEQ ID NO: 2547026
uugcuaaacauaauaaucc

SEQ ID NO: 2547028 - RNA, 19 nt, Artificial Sequence
  Description of Artificial Sequence: Synthetic oligonucleotide
  Sense strand starting at position 1246 of SEQ ID NO: 1888635
aguguaacugagcagugau

SEQ ID NO: 2547029 - RNA, 19 nt, Artificial Sequence
  Description of Artificial Sequence: Synthetic oligonucleotide
  Antisense strand to SEQ ID NO: 2547028
aucacugcucaguuacacu

SEQ ID NO: 2547030 - RNA, 19 nt, Artificial Sequence
  Description of Artificial Sequence: Synthetic oligonucleotide
  Sense strand starting at position 1236 of SEQ ID NO: 1888635
aggguuugagaguguaacu

SEQ ID NO: 2547031 - RNA, 19 nt, Artificial Sequence
  Description of Artificial Sequence: Synthetic oligonucleotide
  Antisense strand to SEQ ID NO: 2547030
aguuacacucucaaacccu

SEQ ID NO: 2547032 - RNA, 19 nt, Artificial Sequence
  Description of Artificial Sequence: Synthetic oligonucleotide
  Sense strand starting at position 2891 of SEQ ID NO: 1888635
guucgagaccagugaaacu

SEQ ID NO: 2547033 - RNA, 19 nt, Artificial Sequence
  Description of Artificial Sequence: Synthetic oligonucleotide
  Antisense strand to SEQ ID NO: 2547032
aguuucacuggucucgaac

SEQ ID NO: 2547034 - RNA, 19 nt, Artificial Sequence
  Description of Artificial Sequence: Synthetic oligonucleotide
  Sense strand starting at position 138 of SEQ ID NO: 1888635
cacauugaugugugcaaga

SEQ ID NO: 2547035 - RNA, 19 nt, Artificial Sequence
  Description of Artificial Sequence: Synthetic oligonucleotide
  Antisense strand to SEQ ID NO: 2547034
ucuugcacacaucaaugug

SEQ ID NO: 2547036 - RNA, 19 nt, Artificial Sequence
  Description of Artificial Sequence: Synthetic oligonucleotide
  Sense strand starting at position 1245 of SEQ ID NO: 1888635
gaguguaacugagcaguga

SEQ ID NO: 2547037 - RNA, 19 nt, Artificial Sequence
  Description of Artificial Sequence: Synthetic oligonucleotide
  Antisense strand to SEQ ID NO: 2547036
ucacugcucaguuacacuc

SEQ ID NO: 2547038 - RNA, 19 nt, Artificial Sequence
  Description of Artificial Sequence: Synthetic oligonucleotide
  Sense strand starting at position 3962 of SEQ ID NO: 1888635
gccucagugucaucaaagg

SEQ ID NO: 2547039 - RNA, 19 nt, Artificial Sequence
  Description of Artificial Sequence: Synthetic oligonucleotide
  Antisense strand to SEQ ID NO: 2547038
ccuuugaugacacugaggc

SEQ ID NO: 2547040 - RNA, 19 nt, Artificial Sequence
  Description of Artificial Sequence: Synthetic oligonucleotide
  Sense strand starting at position 3336 of SEQ ID NO: 1888635
aucucacgcuggucagaau

SEQ ID NO: 2547041 - RNA, 19 nt, Artificial Sequence
  Description of Artificial Sequence: Synthetic oligonucleotide
  Antisense strand to SEQ ID NO: 2547040
auucugaccagcgugagau

SEQ ID NO: 2547042 - RNA, 19 nt, Artificial Sequence
  Description of Artificial Sequence: Synthetic oligonucleotide
  Sense strand starting at position 3956 of SEQ ID NO: 1888635
ccacaagccucagugucau

SEQ ID NO: 2547043 - RNA, 19 nt, Artificial Sequence
  Description of Artificial Sequence: Synthetic oligonucleotide
  Antisense strand to SEQ ID NO: 2547042
augacacugaggcuugugg

SEQ ID NO: 2547044 - RNA, 19 nt, Artificial Sequence
  Description of Artificial Sequence: Synthetic oligonucleotide
  Sense strand starting at position 3459 of SEQ ID NO: 1888635
uguagagauucucaaagaa

SEQ ID NO: 2547045 - RNA, 19 nt, Artificial Sequence
  Description of Artificial Sequence: Synthetic oligonucleotide
  Antisense strand to SEQ ID NO: 2547044
uucuuugagaaucucuaca

SEQ ID NO: 2547046 - RNA, 19 nt, Artificial Sequence
  Description of Artificial Sequence: Synthetic oligonucleotide
  Sense strand starting at position 3259 of SEQ ID NO: 1888635
gugaccaacugacaugaaa

SEQ ID NO: 2547047 - RNA, 19 nt, Artificial Sequence
  Description of Artificial Sequence: Synthetic oligonucleotide
  Antisense strand to SEQ ID NO: 2547046
uuucaugucaguuggucac

SEQ ID NO: 2547048 - RNA, 19 nt, Artificial Sequence
  Description of Artificial Sequence: Synthetic oligonucleotide
  Sense strand starting at position 136 of SEQ ID NO: 1888635
agcacauugaugugugcaa

SEQ ID NO: 2547049 - RNA, 19 nt, Artificial Sequence
  Description of Artificial Sequence: Synthetic oligonucleotide
  Antisense strand to SEQ ID NO: 2547048
uugcacacaucaaugugcu

SEQ ID NO: 2547050 - RNA, 19 nt, Artificial Sequence
  Description of Artificial Sequence: Synthetic oligonucleotide
  Sense strand starting at position 2569 of SEQ ID NO: 1888635
gggcauggcuaauagaaga

SEQ ID NO: 2547051 - RNA, 19 nt, Artificial Sequence
  Description of Artificial Sequence: Synthetic oligonucleotide
  Antisense strand to SEQ ID NO: 2547050
ucuucuauuagccaugccc

SEQ ID NO: 2547052 - RNA, 19 nt, Artificial Sequence
  Description of Artificial Sequence: Synthetic oligonucleotide
  Sense strand starting at position 3609 of SEQ ID NO: 1888635
guggaagcauccuagauga

SEQ ID NO: 2547053 - RNA, 19 nt, Artificial Sequence
  Description of Artificial Sequence: Synthetic oligonucleotide
  Antisense strand to SEQ ID NO: 2547052
ucaucuaggaugcuuccac

SEQ ID NO: 2547054 - RNA, 19 nt, Artificial Sequence
  Description of Artificial Sequence: Synthetic oligonucleotide
  Sense strand starting at position 3559 of SEQ ID NO: 1888635
gacacaugcucucgugcau

SEQ ID NO: 2547055 - RNA, 19 nt, Artificial Sequence
  Description of Artificial Sequence: Synthetic oligonucleotide
  Antisense strand to SEQ ID NO: 2547054
augcacgagagcauguguc

SEQ ID NO: 2547056 - RNA, 19 nt, Artificial Sequence
  Description of Artificial Sequence: Synthetic oligonucleotide
  Sense strand starting at position 22 of SEQ ID NO: 1888636
uggguaauacucuggagag

SEQ ID NO: 2547057 - RNA, 19 nt, Artificial Sequence
  Description of Artificial Sequence: Synthetic oligonucleotide
  Antisense strand to SEQ ID NO: 2547056
cucuccagaguauuaccca

SEQ ID NO: 2547058 - RNA, 19 nt, Artificial Sequence
  Description of Artificial Sequence: Synthetic oligonucleotide
  Sense strand starting at position 562 of SEQ ID NO: 1888636
agagauaccuuacuagggu

SEQ ID NO: 2547059 - RNA, 19 nt, Artificial Sequence
  Description of Artificial Sequence: Synthetic oligonucleotide
  Antisense strand to SEQ ID NO: 2547058
acccuaguaagguaucucu

SEQ ID NO: 2547060 - RNA, 19 nt, Artificial Sequence
  Description of Artificial Sequence: Synthetic oligonucleotide
  Sense strand starting at position 2974 of SEQ ID NO: 1888636
uguuaugacaagugaaaga

SEQ ID NO: 2547061 - RNA, 19 nt, Artificial Sequence
  Description of Artificial Sequence: Synthetic oligonucleotide
  Antisense strand to SEQ ID NO: 2547060
ucuuucacuugucauaaca

SEQ ID NO: 2547062 - RNA, 19 nt, Artificial Sequence
  Description of Artificial Sequence: Synthetic oligonucleotide
  Sense strand starting at position 3529 of SEQ ID NO: 1888636
ugagcugaaugacuccaaa

SEQ ID NO: 2547063 - RNA, 19 nt, Artificial Sequence
  Description of Artificial Sequence: Synthetic oligonucleotide
  Antisense strand to SEQ ID NO: 2547062
uuuggagucauucagcuca

SEQ ID NO: 2547064 - RNA, 19 nt, Artificial Sequence
  Description of Artificial Sequence: Synthetic oligonucleotide
  Sense strand starting at position 3071 of SEQ ID NO: 1888636
uagauuucugcauguagug

SEQ ID NO: 2547065 - RNA, 19 nt, Artificial Sequence
  Description of Artificial Sequence: Synthetic oligonucleotide
  Antisense strand to SEQ ID NO: 2547064
cacuacaugcagaaaucua

SEQ ID NO: 2547066 - RNA, 19 nt, Artificial Sequence
  Description of Artificial Sequence: Synthetic oligonucleotide
  Sense strand starting at position 3012 of SEQ ID NO: 1888636
cuuauuguacgacaauuaa

SEQ ID NO: 2547067 - RNA, 19 nt, Artificial Sequence
  Description of Artificial Sequence: Synthetic oligonucleotide
  Antisense strand to SEQ ID NO: 2547066
uuaauugucguacaauaag

SEQ ID NO: 2547068 - RNA, 19 nt, Artificial Sequence
  Description of Artificial Sequence: Synthetic oligonucleotide
  Sense strand starting at position 2139 of SEQ ID NO: 1888636
ccauaacaucacggagauc

SEQ ID NO: 2547069 - RNA, 19 nt, Artificial Sequence
  Description of Artificial Sequence: Synthetic oligonucleotide
  Antisense strand to SEQ ID NO: 2547068
gaucuccgugauguuaugg

SEQ ID NO: 2547070 - RNA, 19 nt, Artificial Sequence
  Description of Artificial Sequence: Synthetic oligonucleotide
  Sense strand starting at position 1551 of SEQ ID NO: 1888636
aacaaagggucuucugauu

SEQ ID NO: 2547071 - RNA, 19 nt, Artificial Sequence
  Description of Artificial Sequence: Synthetic oligonucleotide
  Antisense strand to SEQ ID NO: 2547070
aaucagaagacccuuuguu

SEQ ID NO: 2547072 - RNA, 19 nt, Artificial Sequence
  Description of Artificial Sequence: Synthetic oligonucleotide
  Sense strand starting at position 2496 of SEQ ID NO: 1888636
agaauuaauguguacucuu

SEQ ID NO: 2547073 - RNA, 19 nt, Artificial Sequence
  Description of Artificial Sequence: Synthetic oligonucleotide
  Antisense strand to SEQ ID NO: 2547072
aagaguacacauuaauucu

SEQ ID NO: 2547074 - RNA, 19 nt, Artificial Sequence
  Description of Artificial Sequence: Synthetic oligonucleotide
  Sense strand starting at position 1194 of SEQ ID NO: 1888636
cccagaacugugcagaauu

SEQ ID NO: 2547075 - RNA, 19 nt, Artificial Sequence
  Description of Artificial Sequence: Synthetic oligonucleotide
  Antisense strand to SEQ ID NO: 2547074
aauucugcacaguucuggg

SEQ ID NO: 2547076 - RNA, 19 nt, Artificial Sequence
  Description of Artificial Sequence: Synthetic oligonucleotide
  Sense strand starting at position 2699 of SEQ ID NO: 1888636
cucuuauaauaggcagaua

SEQ ID NO: 2547077 - RNA, 19 nt, Artificial Sequence
  Description of Artificial Sequence: Synthetic oligonucleotide
  Antisense strand to SEQ ID NO: 2547076
uaucugccuauuauaagag

SEQ ID NO: 2547078 - RNA, 19 nt, Artificial Sequence
  Description of Artificial Sequence: Synthetic oligonucleotide
  Sense strand starting at position 701 of SEQ ID NO: 1888636
cugagaaauugagcccacu

SEQ ID NO: 2547079 - RNA, 19 nt, Artificial Sequence
  Description of Artificial Sequence: Synthetic oligonucleotide
  Antisense strand to SEQ ID NO: 2547078
agugggcucaauuucucag

SEQ ID NO: 2547080 - RNA, 19 nt, Artificial Sequence
  Description of Artificial Sequence: Synthetic oligonucleotide
  Sense strand starting at position 2566 of SEQ ID NO: 1888636
ucugcuacccaauagugaa

SEQ ID NO: 2547081 - RNA, 19 nt, Artificial Sequence
  Description of Artificial Sequence: Synthetic oligonucleotide
  Antisense strand to SEQ ID NO: 2547080
uucacuauuggguagcaga

SEQ ID NO: 2547082 - RNA, 19 nt, Artificial Sequence
  Description of Artificial Sequence: Synthetic oligonucleotide
  Sense strand starting at position 2010 of SEQ ID NO: 1888636
ugccuuaaugaacagucua

SEQ ID NO: 2547083 - RNA, 19 nt, Artificial Sequence
  Description of Artificial Sequence: Synthetic oligonucleotide
  Antisense strand to SEQ ID NO: 2547082
uagacuguucauuaaggca

SEQ ID NO: 2547084 - RNA, 19 nt, Artificial Sequence
  Description of Artificial Sequence: Synthetic oligonucleotide
  Sense strand starting at position 1545 of SEQ ID NO: 1888636
guuugaaacaaagggucuu

SEQ ID NO: 2547085 - RNA, 19 nt, Artificial Sequence
  Description of Artificial Sequence: Synthetic oligonucleotide
  Antisense strand to SEQ ID NO: 2547084
aagacccuuuguuucaaac

SEQ ID NO: 2547086 - RNA, 19 nt, Artificial Sequence
  Description of Artificial Sequence: Synthetic oligonucleotide
  Sense strand starting at position 2148 of SEQ ID NO: 1888636
cacggagaucccuguaaag

SEQ ID NO: 2547087 - RNA, 19 nt, Artificial Sequence
  Description of Artificial Sequence: Synthetic oligonucleotide
  Antisense strand to SEQ ID NO: 2547086
cuuuacagggaucuccgug

SEQ ID NO: 2547088 - RNA, 19 nt, Artificial Sequence
  Description of Artificial Sequence: Synthetic oligonucleotide
  Sense strand starting at position 57 of SEQ ID NO: 1888636
acacaaauacguugaacuu

SEQ ID NO: 2547089 - RNA, 19 nt, Artificial Sequence
  Description of Artificial Sequence: Synthetic oligonucleotide
  Antisense strand to SEQ ID NO: 2547088
aaguucaacguauuugugu

SEQ ID NO: 2547090 - RNA, 19 nt, Artificial Sequence
  Description of Artificial Sequence: Synthetic oligonucleotide
  Sense strand starting at position 245 of SEQ ID NO: 1888636
agguuagauuuguaaagaa

SEQ ID NO: 2547091 - RNA, 19 nt, Artificial Sequence
  Description of Artificial Sequence: Synthetic oligonucleotide
  Antisense strand to SEQ ID NO: 2547090
uucuuuacaaaucuaaccu

SEQ ID NO: 2547092 - RNA, 19 nt, Artificial Sequence
  Description of Artificial Sequence: Synthetic oligonucleotide
  Sense strand starting at position 2150 of SEQ ID NO: 1888636
cggagaucccuguaaaguu

SEQ ID NO: 2547093 - RNA, 19 nt, Artificial Sequence
  Description of Artificial Sequence: Synthetic oligonucleotide
  Antisense strand to SEQ ID NO: 2547092
aacuuuacagggaucuccg

SEQ ID NO: 2547094 - RNA, 19 nt, Artificial Sequence
  Description of Artificial Sequence: Synthetic oligonucleotide
  Sense strand starting at position 3101 of SEQ ID NO: 1888636
cucguaguuacuuaaggga

SEQ ID NO: 2547095 - RNA, 19 nt, Artificial Sequence
  Description of Artificial Sequence: Synthetic oligonucleotide
  Antisense strand to SEQ ID NO: 2547094
ucccuuaaguaacuacgag

SEQ ID NO: 2547096 - RNA, 19 nt, Artificial Sequence
  Description of Artificial Sequence: Synthetic oligonucleotide
  Sense strand starting at position 544 of SEQ ID NO: 1888636
gguguuacagcucaggaca

SEQ ID NO: 2547097 - RNA, 19 nt, Artificial Sequence
  Description of Artificial Sequence: Synthetic oligonucleotide
  Antisense strand to SEQ ID NO: 2547096
uguccugagcuguaacacc

SEQ ID NO: 2547098 - RNA, 19 nt, Artificial Sequence
  Description of Artificial Sequence: Synthetic oligonucleotide
  Sense strand starting at position 3173 of SEQ ID NO: 1888636
acugaagcacucuauguuu

SEQ ID NO: 2547099 - RNA, 19 nt, Artificial Sequence
  Description of Artificial Sequence: Synthetic oligonucleotide
  Antisense strand to SEQ ID NO: 2547098
aaacauagagugcuucagu

SEQ ID NO: 2547100 - RNA, 19 nt, Artificial Sequence
  Description of Artificial Sequence: Synthetic oligonucleotide
  Sense strand starting at position 3080 of SEQ ID NO: 1888636
gcauguagugacuauuaua

SEQ ID NO: 2547101 - RNA, 19 nt, Artificial Sequence
  Description of Artificial Sequence: Synthetic oligonucleotide
  Antisense strand to SEQ ID NO: 2547100
uauaauagucacuacaugc

SEQ ID NO: 2547102 - RNA, 19 nt, Artificial Sequence
  Description of Artificial Sequence: Synthetic oligonucleotide
  Sense strand starting at position 1321 of SEQ ID NO: 1888636
uaugaaagaugagaaggau

SEQ ID NO: 2547103 - RNA, 19 nt, Artificial Sequence
  Description of Artificial Sequence: Synthetic oligonucleotide
  Antisense strand to SEQ ID NO: 2547102
auccuucucaucuuucaua

SEQ ID NO: 2547104 - RNA, 19 nt, Artificial Sequence
  Description of Artificial Sequence: Synthetic oligonucleotide
  Sense strand starting at position 128 of SEQ ID NO: 1888636
gcagcuucugauuaacgaa

SEQ ID NO: 2547105 - RNA, 19 nt, Artificial Sequence
  Description of Artificial Sequence: Synthetic oligonucleotide
  Antisense strand to SEQ ID NO: 2547104
uucguuaaucagaagcugc

SEQ ID NO: 2547106 - RNA, 19 nt, Artificial Sequence
  Description of Artificial Sequence: Synthetic oligonucleotide
  Sense strand starting at position 910 of SEQ ID NO: 1888636
ugaggaauauggcuugcca

SEQ ID NO: 2547107 - RNA, 19 nt, Artificial Sequence
  Description of Artificial Sequence: Synthetic oligonucleotide
  Antisense strand to SEQ ID NO: 2547106
uggcaagccauauuccuca

SEQ ID NO: 2547108 - RNA, 19 nt, Artificial Sequence
  Description of Artificial Sequence: Synthetic oligonucleotide
  Sense strand starting at position 1562 of SEQ ID NO: 1888636
uucugauucucugccaaga

SEQ ID NO: 2547109 - RNA, 19 nt, Artificial Sequence
  Description of Artificial Sequence: Synthetic oligonucleotide
  Antisense strand to SEQ ID NO: 2547108
ucuuggcagagaaucagaa

SEQ ID NO: 2547110 - RNA, 19 nt, Artificial Sequence
  Description of Artificial Sequence: Synthetic oligonucleotide
  Sense strand starting at position 3150 of SEQ ID NO: 1888636
aaacgaguauguuucuaua

SEQ ID NO: 2547111 - RNA, 19 nt, Artificial Sequence
  Description of Artificial Sequence: Synthetic oligonucleotide
  Antisense strand to SEQ ID NO: 2547110
uauagaaacauacucguuu

SEQ ID NO: 2547112 - RNA, 19 nt, Artificial Sequence
  Description of Artificial Sequence: Synthetic oligonucleotide
  Sense strand starting at position 2023 of SEQ ID NO: 1888636
agucuaauucuagguaagu

SEQ ID NO: 2547113 - RNA, 19 nt, Artificial Sequence
  Description of Artificial Sequence: Synthetic oligonucleotide
  Antisense strand to SEQ ID NO: 2547112
acuuaccuagaauuagacu

SEQ ID NO: 2547114 - RNA, 19 nt, Artificial Sequence
  Description of Artificial Sequence: Synthetic oligonucleotide
  Sense strand starting at position 912 of SEQ ID NO: 1888636
aggaauauggcuugccacu

SEQ ID NO: 2547115 - RNA, 19 nt, Artificial Sequence
  Description of Artificial Sequence: Synthetic oligonucleotide
  Antisense strand to SEQ ID NO: 2547114
aguggcaagccauauuccu

SEQ ID NO: 2547116 - RNA, 19 nt, Artificial Sequence
  Description of Artificial Sequence: Synthetic oligonucleotide
  Sense strand starting at position 2024 of SEQ ID NO: 1888636
gucuaauucuagguaagug

SEQ ID NO: 2547117 - RNA, 19 nt, Artificial Sequence
  Description of Artificial Sequence: Synthetic oligonucleotide
  Antisense strand to SEQ ID NO: 2547116
cacuuaccuagaauuagac

SEQ ID NO: 2547118 - RNA, 19 nt, Artificial Sequence
  Description of Artificial Sequence: Synthetic oligonucleotide
  Sense strand starting at position 3096 of SEQ ID NO: 1888636
auaaacucguaguuacuua

SEQ ID NO: 2547119 - RNA, 19 nt, Artificial Sequence
  Description of Artificial Sequence: Synthetic oligonucleotide
  Antisense strand to SEQ ID NO: 2547118
uaaguaacuacgaguuuau

SEQ ID NO: 2547120 - RNA, 19 nt, Artificial Sequence
  Description of Artificial Sequence: Synthetic oligonucleotide
  Sense strand starting at position 34 of SEQ ID NO: 1888636
uggagagaguaacaauaaa

SEQ ID NO: 2547121 - RNA, 19 nt, Artificial Sequence
  Description of Artificial Sequence: Synthetic oligonucleotide
  Antisense strand to SEQ ID NO: 2547120
uuuauuguuacucucucca

SEQ ID NO: 2547122 - RNA, 19 nt, Artificial Sequence
  Description of Artificial Sequence: Synthetic oligonucleotide
  Sense strand starting at position 629 of SEQ ID NO: 1888636
ccuugaggaguuugcuaca

SEQ ID NO: 2547123 - RNA, 19 nt, Artificial Sequence
  Description of Artificial Sequence: Synthetic oligonucleotide
  Antisense strand to SEQ ID NO: 2547122
uguagcaaacuccucaagg

SEQ ID NO: 2547124 - RNA, 19 nt, Artificial Sequence
  Description of Artificial Sequence: Synthetic oligonucleotide
  Sense strand starting at position 2906 of SEQ ID NO: 1888636
uucuauuacuuggcaguaa

SEQ ID NO: 2547125 - RNA, 19 nt, Artificial Sequence
  Description of Artificial Sequence: Synthetic oligonucleotide
  Antisense strand to SEQ ID NO: 2547124
uuacugccaaguaauagaa

SEQ ID NO: 2547126 - RNA, 19 nt, Artificial Sequence
  Description of Artificial Sequence: Synthetic oligonucleotide
  Sense strand starting at position 2688 of SEQ ID NO: 1888636
gucacagacugcucuuaua

SEQ ID NO: 2547127 - RNA, 19 nt, Artificial Sequence
  Description of Artificial Sequence: Synthetic oligonucleotide
  Antisense strand to SEQ ID NO: 2547126
uauaagagcagucugugac

SEQ ID NO: 2547128 - RNA, 19 nt, Artificial Sequence
  Description of Artificial Sequence: Synthetic oligonucleotide
  Sense strand starting at position 3397 of SEQ ID NO: 1888636
gagacaaguagcuguaagu

SEQ ID NO: 2547129 - RNA, 19 nt, Artificial Sequence
  Description of Artificial Sequence: Synthetic oligonucleotide
  Antisense strand to SEQ ID NO: 2547128
acuuacagcuacuugucuc

SEQ ID NO: 2547130 - RNA, 19 nt, Artificial Sequence
  Description of Artificial Sequence: Synthetic oligonucleotide
  Sense strand starting at position 1639 of SEQ ID NO: 1888636
guaaaucuaugucuuguaa

SEQ ID NO: 2547131 - RNA, 19 nt, Artificial Sequence
  Description of Artificial Sequence: Synthetic oligonucleotide
  Antisense strand to SEQ ID NO: 2547130
uuacaagacauagauuuac

SEQ ID NO: 2547132 - RNA, 19 nt, Artificial Sequence
  Description of Artificial Sequence: Synthetic oligonucleotide
  Sense strand starting at position 3152 of SEQ ID NO: 1888636
acgaguauguuucuauaua

SEQ ID NO: 2547133 - RNA, 19 nt, Artificial Sequence
  Description of Artificial Sequence: Synthetic oligonucleotide
  Antisense strand to SEQ ID NO: 2547132
uauauagaaacauacucgu

SEQ ID NO: 2547134 - RNA, 19 nt, Artificial Sequence
  Description of Artificial Sequence: Synthetic oligonucleotide
  Sense strand starting at position 2905 of SEQ ID NO: 1888636
auucuauuacuuggcagua

SEQ ID NO: 2547135 - RNA, 19 nt, Artificial Sequence
  Description of Artificial Sequence: Synthetic oligonucleotide
  Antisense strand to SEQ ID NO: 2547134
uacugccaaguaauagaau

SEQ ID NO: 2547136 - RNA, 19 nt, Artificial Sequence
  Description of Artificial Sequence: Synthetic oligonucleotide
  Sense strand starting at position 2890 of SEQ ID NO: 1888637
uggcguaucagagcuguuu

SEQ ID NO: 2547137 - RNA, 19 nt, Artificial Sequence
  Description of Artificial Sequence: Synthetic oligonucleotide
  Antisense strand to SEQ ID NO: 2547136
aaacagcucugauacgcca

SEQ ID NO: 2547138 - RNA, 19 nt, Artificial Sequence
  Description of Artificial Sequence: Synthetic oligonucleotide
  Sense strand starting at position 416 of SEQ ID NO: 1888637
ggucgaucugcagaagaag

SEQ ID NO: 2547139 - RNA, 19 nt, Artificial Sequence
  Description of Artificial Sequence: Synthetic oligonucleotide
  Antisense strand to SEQ ID NO: 2547138
cuucuucugcagaucgacc

SEQ ID NO: 2547140 - RNA, 19 nt, Artificial Sequence
  Description of Artificial Sequence: Synthetic oligonucleotide
  Sense strand starting at position 3095 of SEQ ID NO: 1888637
acuuguuugcuucuguguu

SEQ ID NO: 2547141 - RNA, 19 nt, Artificial Sequence
  Description of Artificial Sequence: Synthetic oligonucleotide
  Antisense strand to SEQ ID NO: 2547140
aacacagaagcaaacaagu

SEQ ID NO: 2547142 - RNA, 19 nt, Artificial Sequence
  Description of Artificial Sequence: Synthetic oligonucleotide
  Sense strand starting at position 3039 of SEQ ID NO: 1888637
ucuggaagucugcauuaag

SEQ ID NO: 2547143 - RNA, 19 nt, Artificial Sequence
  Description of Artificial Sequence: Synthetic oligonucleotide
  Antisense strand to SEQ ID NO: 2547142
cuuaaugcagacuuccaga

SEQ ID NO: 2547144 - RNA, 19 nt, Artificial Sequence
  Description of Artificial Sequence: Synthetic oligonucleotide
  Sense strand starting at position 1670 of SEQ ID NO: 1888637
auccuuauguaaccugaga

SEQ ID NO: 2547145 - RNA, 19 nt, Artificial Sequence
  Description of Artificial Sequence: Synthetic oligonucleotide
  Antisense strand to SEQ ID NO: 2547144
ucucagguuacauaaggau

SEQ ID NO: 2547146 - RNA, 19 nt, Artificial Sequence
  Description of Artificial Sequence: Synthetic oligonucleotide
  Sense strand starting at position 2931 of SEQ ID NO: 1888637
uuauuagugaggugaagau

SEQ ID NO: 2547147 - RNA, 19 nt, Artificial Sequence
  Description of Artificial Sequence: Synthetic oligonucleotide
  Antisense strand to SEQ ID NO: 2547146
aucuucaccucacuaauaa

SEQ ID NO: 2547148 - RNA, 19 nt, Artificial Sequence
  Description of Artificial Sequence: Synthetic oligonucleotide
  Sense strand starting at position 3042 of SEQ ID NO: 1888637
ggaagucugcauuaaguga

SEQ ID NO: 2547149 - RNA, 19 nt, Artificial Sequence
  Description of Artificial Sequence: Synthetic oligonucleotide
  Antisense strand to SEQ ID NO: 2547148
ucacuuaaugcagacuucc

SEQ ID NO: 2547150 - RNA, 19 nt, Artificial Sequence
  Description of Artificial Sequence: Synthetic oligonucleotide
  Sense strand starting at position 1666 of SEQ ID NO: 1888637
gggaauccuuauguaaccu

SEQ ID NO: 2547151 - RNA, 19 nt, Artificial Sequence
  Description of Artificial Sequence: Synthetic oligonucleotide
  Antisense strand to SEQ ID NO: 2547150
agguuacauaaggauuccc

SEQ ID NO: 2547152 - RNA, 19 nt, Artificial Sequence
  Description of Artificial Sequence: Synthetic oligonucleotide
  Sense strand starting at position 1278 of SEQ ID NO: 1888637
aggguauggcgauaaguaa

SEQ ID NO: 2547153 - RNA, 19 nt, Artificial Sequence
  Description of Artificial Sequence: Synthetic oligonucleotide
  Antisense strand to SEQ ID NO: 2547152
uuacuuaucgccauacccu

SEQ ID NO: 2547154 - RNA, 19 nt, Artificial Sequence
  Description of Artificial Sequence: Synthetic oligonucleotide
  Sense strand starting at position 2883 of SEQ ID NO: 1888637
caugauauggcguaucaga

SEQ ID NO: 2547155 - RNA, 19 nt, Artificial Sequence
  Description of Artificial Sequence: Synthetic oligonucleotide
  Antisense strand to SEQ ID NO: 2547154
ucugauacgccauaucaug

SEQ ID NO: 2547156 - RNA, 19 nt, Artificial Sequence
  Description of Artificial Sequence: Synthetic oligonucleotide
  Sense strand starting at position 1580 of SEQ ID NO: 1888637
ccucaucucaugugaggga

SEQ ID NO: 2547157 - RNA, 19 nt, Artificial Sequence
  Description of Artificial Sequence: Synthetic oligonucleotide
  Antisense strand to SEQ ID NO: 2547156
ucccucacaugagaugagg

SEQ ID NO: 2547158 - RNA, 19 nt, Artificial Sequence
  Description of Artificial Sequence: Synthetic oligonucleotide
  Sense strand starting at position 3588 of SEQ ID NO: 1888637
ccaguucugcaggauccau

SEQ ID NO: 2547159 - RNA, 19 nt, Artificial Sequence
  Description of Artificial Sequence: Synthetic oligonucleotide
  Antisense strand to SEQ ID NO: 2547158
auggauccugcagaacugg

SEQ ID NO: 2547160 - RNA, 19 nt, Artificial Sequence
  Description of Artificial Sequence: Synthetic oligonucleotide
  Sense strand starting at position 2095 of SEQ ID NO: 1888637
agacaaucaucuguguauc

SEQ ID NO: 2547161 - RNA, 19 nt, Artificial Sequence
  Description of Artificial Sequence: Synthetic oligonucleotide
  Antisense strand to SEQ ID NO: 2547160
gauacacagaugauugucu

SEQ ID NO: 2547162 - RNA, 19 nt, Artificial Sequence
  Description of Artificial Sequence: Synthetic oligonucleotide
  Sense strand starting at position 3154 of SEQ ID NO: 1888637
ggacuaucauguuuccacu

SEQ ID NO: 2547163 - RNA, 19 nt, Artificial Sequence
  Description of Artificial Sequence: Synthetic oligonucleotide
  Antisense strand to SEQ ID NO: 2547162
aguggaaacaugauagucc

SEQ ID NO: 2547164 - RNA, 19 nt, Artificial Sequence
  Description of Artificial Sequence: Synthetic oligonucleotide
  Sense strand starting at position 3032 of SEQ ID NO: 1888637
gggugauucuggaagucug

SEQ ID NO: 2547165 - RNA, 19 nt, Artificial Sequence
  Description of Artificial Sequence: Synthetic oligonucleotide
  Antisense strand to SEQ ID NO: 2547164
cagacuuccagaaucaccc

SEQ ID NO: 2547166 - RNA, 19 nt, Artificial Sequence
  Description of Artificial Sequence: Synthetic oligonucleotide
  Sense strand starting at position 533 of SEQ ID NO: 1888637
agucuugggucucccagaa

SEQ ID NO: 2547167 - RNA, 19 nt, Artificial Sequence
  Description of Artificial Sequence: Synthetic oligonucleotide
  Antisense strand to SEQ ID NO: 2547166
uucugggagacccaagacu

SEQ ID NO: 2547168 - RNA, 19 nt, Artificial Sequence
  Description of Artificial Sequence: Synthetic oligonucleotide
  Sense strand starting at position 281 of SEQ ID NO: 1888637
uguacuuggacuugacagu

SEQ ID NO: 2547169 - RNA, 19 nt, Artificial Sequence
  Description of Artificial Sequence: Synthetic oligonucleotide
  Antisense strand to SEQ ID NO: 2547168
acugucaaguccaaguaca

SEQ ID NO: 2547170 - RNA, 19 nt, Artificial Sequence
  Description of Artificial Sequence: Synthetic oligonucleotide
  Sense strand starting at position 3383 of SEQ ID NO: 1888637
ucuuguuggccgagucgau

SEQ ID NO: 2547171 - RNA, 19 nt, Artificial Sequence
  Description of Artificial Sequence: Synthetic oligonucleotide
  Antisense strand to SEQ ID NO: 2547170
aucgacucggccaacaaga

SEQ ID NO: 2547172 - RNA, 19 nt, Artificial Sequence
  Description of Artificial Sequence: Synthetic oligonucleotide
  Sense strand starting at position 2941 of SEQ ID NO: 1888637
ggugaagauuuccaaguau

SEQ ID NO: 2547173 - RNA, 19 nt, Artificial Sequence
  Description of Artificial Sequence: Synthetic oligonucleotide
  Antisense strand to SEQ ID NO: 2547172
auacuuggaaaucuucacc

SEQ ID NO: 2547174 - RNA, 19 nt, Artificial Sequence
  Description of Artificial Sequence: Synthetic oligonucleotide
  Sense strand starting at position 2058 of SEQ ID NO: 1888637
ccaacuaaccguggugaca

SEQ ID NO: 2547175 - RNA, 19 nt, Artificial Sequence
  Description of Artificial Sequence: Synthetic oligonucleotide
  Antisense strand to SEQ ID NO: 2547174
ugucaccacgguuaguugg

SEQ ID NO: 2547176 - RNA, 19 nt, Artificial Sequence
  Description of Artificial Sequence: Synthetic oligonucleotide
  Sense strand starting at position 1246 of SEQ ID NO: 1888637
acauuuaagugcuaggaau

SEQ ID NO: 2547177 - RNA, 19 nt, Artificial Sequence
  Description of Artificial Sequence: Synthetic oligonucleotide
  Antisense strand to SEQ ID NO: 2547176
auuccuagcacuuaaaugu

SEQ ID NO: 2547178 - RNA, 19 nt, Artificial Sequence
  Description of Artificial Sequence: Synthetic oligonucleotide
  Sense strand starting at position 3188 of SEQ ID NO: 1888637
gagucucugucagugagau

SEQ ID NO: 2547179 - RNA, 19 nt, Artificial Sequence
  Description of Artificial Sequence: Synthetic oligonucleotide
  Antisense strand to SEQ ID NO: 2547178
aucucacugacagagacuc

SEQ ID NO: 2547180 - RNA, 19 nt, Artificial Sequence
  Description of Artificial Sequence: Synthetic oligonucleotide
  Sense strand starting at position 1355 of SEQ ID NO: 1888637
cccuguucuggguaagcca

SEQ ID NO: 2547181 - RNA, 19 nt, Artificial Sequence
  Description of Artificial Sequence: Synthetic oligonucleotide
  Antisense strand to SEQ ID NO: 2547180
uggcuuacccagaacaggg

SEQ ID NO: 2547182 - RNA, 19 nt, Artificial Sequence
  Description of Artificial Sequence: Synthetic oligonucleotide
  Sense strand starting at position 3189 of SEQ ID NO: 1888637
agucucugucagugagaug

SEQ ID NO: 2547183 - RNA, 19 nt, Artificial Sequence
  Description of Artificial Sequence: Synthetic oligonucleotide
  Antisense strand to SEQ ID NO: 2547182
caucucacugacagagacu

SEQ ID NO: 2547184 - RNA, 19 nt, Artificial Sequence
  Description of Artificial Sequence: Synthetic oligonucleotide
  Sense strand starting at position 3142 of SEQ ID NO: 1888637
aaguuugcuguuggacuau

SEQ ID NO: 2547185 - RNA, 19 nt, Artificial Sequence
  Description of Artificial Sequence: Synthetic oligonucleotide
  Antisense strand to SEQ ID NO: 2547184
auaguccaacagcaaacuu

SEQ ID NO: 2547186 - RNA, 19 nt, Artificial Sequence
  Description of Artificial Sequence: Synthetic oligonucleotide
  Sense strand starting at position 3587 of SEQ ID NO: 1888637
gccaguucugcaggaucca

SEQ ID NO: 2547187 - RNA, 19 nt, Artificial Sequence
  Description of Artificial Sequence: Synthetic oligonucleotide
  Antisense strand to SEQ ID NO: 2547186
uggauccugcagaacuggc

SEQ ID NO: 2547188 - RNA, 19 nt, Artificial Sequence
  Description of Artificial Sequence: Synthetic oligonucleotide
  Sense strand starting at position 395 of SEQ ID NO: 1888637
gguucaggucgguguugau

SEQ ID NO: 2547189 - RNA, 19 nt, Artificial Sequence
  Description of Artificial Sequence: Synthetic oligonucleotide
  Antisense strand to SEQ ID NO: 2547188
aucaacaccgaccugaacc

SEQ ID NO: 2547190 - RNA, 19 nt, Artificial Sequence
  Description of Artificial Sequence: Synthetic oligonucleotide
  Sense strand starting at position 2377 of SEQ ID NO: 1888637
gcagauaaauccgaaauug

SEQ ID NO: 2547191 - RNA, 19 nt, Artificial Sequence
  Description of Artificial Sequence: Synthetic oligonucleotide
  Antisense strand to SEQ ID NO: 2547190
caauuucggauuuaucugc

SEQ ID NO: 2547192 - RNA, 19 nt, Artificial Sequence
  Description of Artificial Sequence: Synthetic oligonucleotide
  Sense strand starting at position 2929 of SEQ ID NO: 1888637
aauuauuagugaggugaag

SEQ ID NO: 2547193 - RNA, 19 nt, Artificial Sequence
  Description of Artificial Sequence: Synthetic oligonucleotide
  Antisense strand to SEQ ID NO: 2547192
cuucaccucacuaauaauu

SEQ ID NO: 2547194 - RNA, 19 nt, Artificial Sequence
  Description of Artificial Sequence: Synthetic oligonucleotide
  Sense strand starting at position 2137 of SEQ ID NO: 1888637
caguguucgucaccgugga

SEQ ID NO: 2547195 - RNA, 19 nt, Artificial Sequence
  Description of Artificial Sequence: Synthetic oligonucleotide
  Antisense strand to SEQ ID NO: 2547194
uccacggugacgaacacug

SEQ ID NO: 2547196 - RNA, 19 nt, Artificial Sequence
  Description of Artificial Sequence: Synthetic oligonucleotide
  Sense strand starting at position 358 of SEQ ID NO: 1888637
cgagcauucucguucuucu

SEQ ID NO: 2547197 - RNA, 19 nt, Artificial Sequence
  Description of Artificial Sequence: Synthetic oligonucleotide
  Antisense strand to SEQ ID NO: 2547196
agaagaacgagaaugcucg

SEQ ID NO: 2547198 - RNA, 19 nt, Artificial Sequence
  Description of Artificial Sequence: Synthetic oligonucleotide
  Sense strand starting at position 1665 of SEQ ID NO: 1888637
agggaauccuuauguaacc

SEQ ID NO: 2547199 - RNA, 19 nt, Artificial Sequence
  Description of Artificial Sequence: Synthetic oligonucleotide
  Antisense strand to SEQ ID NO: 2547198
gguuacauaaggauucccu

SEQ ID NO: 2547200 - RNA, 19 nt, Artificial Sequence
  Description of Artificial Sequence: Synthetic oligonucleotide
  Sense strand starting at position 1675 of SEQ ID NO: 1888637
uauguaaccugagagccau

SEQ ID NO: 2547201 - RNA, 19 nt, Artificial Sequence
  Description of Artificial Sequence: Synthetic oligonucleotide
  Antisense strand to SEQ ID NO: 2547200
auggcucucagguuacaua

SEQ ID NO: 2547202 - RNA, 19 nt, Artificial Sequence
  Description of Artificial Sequence: Synthetic oligonucleotide
  Sense strand starting at position 2869 of SEQ ID NO: 1888637
gguuauucuuguuacauga

SEQ ID NO: 2547203 - RNA, 19 nt, Artificial Sequence
  Description of Artificial Sequence: Synthetic oligonucleotide
  Antisense strand to SEQ ID NO: 2547202
ucauguaacaagaauaacc

SEQ ID NO: 2547204 - RNA, 19 nt, Artificial Sequence
  Description of Artificial Sequence: Synthetic oligonucleotide
  Sense strand starting at position 3057 of SEQ ID NO: 1888637
gugagaccuucuugaacuc

SEQ ID NO: 2547205 - RNA, 19 nt, Artificial Sequence
  Description of Artificial Sequence: Synthetic oligonucleotide
  Antisense strand to SEQ ID NO: 2547204
gaguucaagaaggucucac

SEQ ID NO: 2547206 - RNA, 19 nt, Artificial Sequence
  Description of Artificial Sequence: Synthetic oligonucleotide
  Sense strand starting at position 2926 of SEQ ID NO: 1888637
uuuaauuauuagugaggug

SEQ ID NO: 2547207 - RNA, 19 nt, Artificial Sequence
  Description of Artificial Sequence: Synthetic oligonucleotide
  Antisense strand to SEQ ID NO: 2547206
caccucacuaauaauuaaa

SEQ ID NO: 2547208 - RNA, 19 nt, Artificial Sequence
  Description of Artificial Sequence: Synthetic oligonucleotide
  Sense strand starting at position 2975 of SEQ ID NO: 1888637
ggcugcuucuuggaaccau

SEQ ID NO: 2547209 - RNA, 19 nt, Artificial Sequence
  Description of Artificial Sequence: Synthetic oligonucleotide
  Antisense strand to SEQ ID NO: 2547208
augguuccaagaagcagcc

SEQ ID NO: 2547210 - RNA, 19 nt, Artificial Sequence
  Description of Artificial Sequence: Synthetic oligonucleotide
  Sense strand starting at position 1294 of SEQ ID NO: 1888637
uaagaaguguccuggccua

SEQ ID NO: 2547211 - RNA, 19 nt, Artificial Sequence
  Description of Artificial Sequence: Synthetic oligonucleotide
  Antisense strand to SEQ ID NO: 2547210
uaggccaggacacuucuua

SEQ ID NO: 2547212 - RNA, 19 nt, Artificial Sequence
  Description of Artificial Sequence: Synthetic oligonucleotide
  Sense strand starting at position 3141 of SEQ ID NO: 1888637
caaguuugcuguuggacua

SEQ ID NO: 2547213 - RNA, 19 nt, Artificial Sequence
  Description of Artificial Sequence: Synthetic oligonucleotide
  Antisense strand to SEQ ID NO: 2547212
uaguccaacagcaaacuug

SEQ ID NO: 2547214 - RNA, 19 nt, Artificial Sequence
  Description of Artificial Sequence: Synthetic oligonucleotide
  Sense strand starting at position 2879 of SEQ ID NO: 1888637
guuacaugauauggcguau

SEQ ID NO: 2547215 - RNA, 19 nt, Artificial Sequence
  Description of Artificial Sequence: Synthetic oligonucleotide
  Antisense strand to SEQ ID NO: 2547214
auacgccauaucauguaac

SEQ ID NO: 2547216 - RNA, 19 nt, Artificial Sequence
  Description of Artificial Sequence: Synthetic oligonucleotide
  Sense strand starting at position 2266 of SEQ ID NO: 1888638
uccuaaggaucuguaggaa

SEQ ID NO: 2547217 - RNA, 19 nt, Artificial Sequence
  Description of Artificial Sequence: Synthetic oligonucleotide
  Antisense strand to SEQ ID NO: 2547216
uuccuacagauccuuagga

SEQ ID NO: 2547218 - RNA, 19 nt, Artificial Sequence
  Description of Artificial Sequence: Synthetic oligonucleotide
  Sense strand starting at position 2471 of SEQ ID NO: 1888638
gggauagggacagguguua

SEQ ID NO: 2547219 - RNA, 19 nt, Artificial Sequence
  Description of Artificial Sequence: Synthetic oligonucleotide
  Antisense strand to SEQ ID NO: 2547218
uaacaccugucccuauccc

SEQ ID NO: 2547220 - RNA, 19 nt, Artificial Sequence
  Description of Artificial Sequence: Synthetic oligonucleotide
  Sense strand starting at position 2943 of SEQ ID NO: 1888638
uuguauagaugggugaaau

SEQ ID NO: 2547221 - RNA, 19 nt, Artificial Sequence
  Description of Artificial Sequence: Synthetic oligonucleotide
  Antisense strand to SEQ ID NO: 2547220
auuucacccaucuauacaa

SEQ ID NO: 2547222 - RNA, 19 nt, Artificial Sequence
  Description of Artificial Sequence: Synthetic oligonucleotide
  Sense strand starting at position 2265 of SEQ ID NO: 1888638
uuccuaaggaucuguagga

SEQ ID NO: 2547223 - RNA, 19 nt, Artificial Sequence
  Description of Artificial Sequence: Synthetic oligonucleotide
  Antisense strand to SEQ ID NO: 2547222
uccuacagauccuuaggaa

SEQ ID NO: 2547224 - RNA, 19 nt, Artificial Sequence
  Description of Artificial Sequence: Synthetic oligonucleotide
  Sense strand starting at position 2960 of SEQ ID NO: 1888638
auuaacauuucgccauguu

SEQ ID NO: 2547225 - RNA, 19 nt, Artificial Sequence
  Description of Artificial Sequence: Synthetic oligonucleotide
  Antisense strand to SEQ ID NO: 2547224
aacauggcgaaauguuaau

SEQ ID NO: 2547226 - RNA, 19 nt, Artificial Sequence
  Description of Artificial Sequence: Synthetic oligonucleotide
  Sense strand starting at position 2457 of SEQ ID NO: 1888638
gcacacauccuguagggau

SEQ ID NO: 2547227 - RNA, 19 nt, Artificial Sequence
  Description of Artificial Sequence: Synthetic oligonucleotide
  Antisense strand to SEQ ID NO: 2547226
aucccuacaggaugugugc

SEQ ID NO: 2547228 - RNA, 19 nt, Artificial Sequence
  Description of Artificial Sequence: Synthetic oligonucleotide
  Sense strand starting at position 3031 of SEQ ID NO: 1888638
uccagauugcugggaugaa

SEQ ID NO: 2547229 - RNA, 19 nt, Artificial Sequence
  Description of Artificial Sequence: Synthetic oligonucleotide
  Antisense strand to SEQ ID NO: 2547228
uucaucccagcaaucugga

SEQ ID NO: 2547230 - RNA, 19 nt, Artificial Sequence
  Description of Artificial Sequence: Synthetic oligonucleotide
  Sense strand starting at position 2944 of SEQ ID NO: 1888638
uguauagaugggugaaauu

SEQ ID NO: 2547231 - RNA, 19 nt, Artificial Sequence
  Description of Artificial Sequence: Synthetic oligonucleotide
  Antisense strand to SEQ ID NO: 2547230
aauuucacccaucuauaca

SEQ ID NO: 2547232 - RNA, 19 nt, Artificial Sequence
  Description of Artificial Sequence: Synthetic oligonucleotide
  Sense strand starting at position 2942 of SEQ ID NO: 1888638
uuuguauagaugggugaaa

SEQ ID NO: 2547233 - RNA, 19 nt, Artificial Sequence
  Description of Artificial Sequence: Synthetic oligonucleotide
  Antisense strand to SEQ ID NO: 2547232
uuucacccaucuauacaaa

SEQ ID NO: 2547234 - RNA, 19 nt, Artificial Sequence
  Description of Artificial Sequence: Synthetic oligonucleotide
  Sense strand starting at position 2619 of SEQ ID NO: 1888638
agagaucuucccuggcaga

SEQ ID NO: 2547235 - RNA, 19 nt, Artificial Sequence
  Description of Artificial Sequence: Synthetic oligonucleotide
  Antisense strand to SEQ ID NO: 2547234
ucugccagggaagaucucu

SEQ ID NO: 2547236 - RNA, 19 nt, Artificial Sequence
  Description of Artificial Sequence: Synthetic oligonucleotide
  Sense strand starting at position 3806 of SEQ ID NO: 1888638
ugauucugauaaucagcua

SEQ ID NO: 2547237 - RNA, 19 nt, Artificial Sequence
  Description of Artificial Sequence: Synthetic oligonucleotide
  Antisense strand to SEQ ID NO: 2547236
uagcugauuaucagaauca

SEQ ID NO: 2547238 - RNA, 19 nt, Artificial Sequence
  Description of Artificial Sequence: Synthetic oligonucleotide
  Sense strand starting at position 2620 of SEQ ID NO: 1888638
gagaucuucccuggcagag

SEQ ID NO: 2547239 - RNA, 19 nt, Artificial Sequence
  Description of Artificial Sequence: Synthetic oligonucleotide
  Antisense strand to SEQ ID NO: 2547238
cucugccagggaagaucuc

SEQ ID NO: 2547240 - RNA, 19 nt, Artificial Sequence
  Description of Artificial Sequence: Synthetic oligonucleotide
  Sense strand starting at position 3814 of SEQ ID NO: 1888638
auaaucagcuagucugaga

SEQ ID NO: 2547241 - RNA, 19 nt, Artificial Sequence
  Description of Artificial Sequence: Synthetic oligonucleotide
  Antisense strand to SEQ ID NO: 2547240
ucucagacuagcugauuau

SEQ ID NO: 2547242 - RNA, 19 nt, Artificial Sequence
  Description of Artificial Sequence: Synthetic oligonucleotide
  Sense strand starting at position 3480 of SEQ ID NO: 1888638
guaacuacuuguuuggaaa

SEQ ID NO: 2547243 - RNA, 19 nt, Artificial Sequence
  Description of Artificial Sequence: Synthetic oligonucleotide
  Antisense strand to SEQ ID NO: 2547242
uuuccaaacaaguaguuac

SEQ ID NO: 2547244 - RNA, 19 nt, Artificial Sequence
  Description of Artificial Sequence: Synthetic oligonucleotide
  Sense strand starting at position 3392 of SEQ ID NO: 1888638
augucuccacccuggaaau

SEQ ID NO: 2547245 - RNA, 19 nt, Artificial Sequence
  Description of Artificial Sequence: Synthetic oligonucleotide
  Antisense strand to SEQ ID NO: 2547244
auuuccaggguggagacau

SEQ ID NO: 2547246 - RNA, 19 nt, Artificial Sequence
  Description of Artificial Sequence: Synthetic oligonucleotide
  Sense strand starting at position 2618 of SEQ ID NO: 1888638
cagagaucuucccuggcag

SEQ ID NO: 2547247 - RNA, 19 nt, Artificial Sequence
  Description of Artificial Sequence: Synthetic oligonucleotide
  Antisense strand to SEQ ID NO: 2547246
cugccagggaagaucucug

SEQ ID NO: 2547248 - RNA, 19 nt, Artificial Sequence
  Description of Artificial Sequence: Synthetic oligonucleotide
  Sense strand starting at position 2381 of SEQ ID NO: 1888638
uugagugacuuacuugagu

SEQ ID NO: 2547249 - RNA, 19 nt, Artificial Sequence
  Description of Artificial Sequence: Synthetic oligonucleotide
  Antisense strand to SEQ ID NO: 2547248
acucaaguaagucacucaa

SEQ ID NO: 2547250 - RNA, 19 nt, Artificial Sequence
  Description of Artificial Sequence: Synthetic oligonucleotide
  Sense strand starting at position 2558 of SEQ ID NO: 1888638
cuagaaacgucaucuucua

SEQ ID NO: 2547251 - RNA, 19 nt, Artificial Sequence
  Description of Artificial Sequence: Synthetic oligonucleotide
  Antisense strand to SEQ ID NO: 2547250
uagaagaugacguuucuag

SEQ ID NO: 2547252 - RNA, 19 nt, Artificial Sequence
  Description of Artificial Sequence: Synthetic oligonucleotide
  Sense strand starting at position 2061 of SEQ ID NO: 1888638
augaguguacuuuguaaga

SEQ ID NO: 2547253 - RNA, 19 nt, Artificial Sequence
  Description of Artificial Sequence: Synthetic oligonucleotide
  Antisense strand to SEQ ID NO: 2547252
ucuuacaaaguacacucau

SEQ ID NO: 2547254 - RNA, 19 nt, Artificial Sequence
  Description of Artificial Sequence: Synthetic oligonucleotide
  Sense strand starting at position 2672 of SEQ ID NO: 1888638
gcagaauguccugguggaa

SEQ ID NO: 2547255 - RNA, 19 nt, Artificial Sequence
  Description of Artificial Sequence: Synthetic oligonucleotide
  Antisense strand to SEQ ID NO: 2547254
uuccaccaggacauucugc

SEQ ID NO: 2547256 - RNA, 19 nt, Artificial Sequence
  Description of Artificial Sequence: Synthetic oligonucleotide
  Sense strand starting at position 3976 of SEQ ID NO: 1888638
agcuuuaaagaauguggca

SEQ ID NO: 2547257 - RNA, 19 nt, Artificial Sequence
  Description of Artificial Sequence: Synthetic oligonucleotide
  Antisense strand to SEQ ID NO: 2547256
ugccacauucuuuaaagcu

SEQ ID NO: 2547258 - RNA, 19 nt, Artificial Sequence
  Description of Artificial Sequence: Synthetic oligonucleotide
  Sense strand starting at position 2185 of SEQ ID NO: 1888638
agaagacguccaugucuca

SEQ ID NO: 2547259 - RNA, 19 nt, Artificial Sequence
  Description of Artificial Sequence: Synthetic oligonucleotide
  Antisense strand to SEQ ID NO: 2547258
ugagacauggacgucuucu

SEQ ID NO: 2547260 - RNA, 19 nt, Artificial Sequence
  Description of Artificial Sequence: Synthetic oligonucleotide
  Sense strand starting at position 2059 of SEQ ID NO: 1888638
ugaugaguguacuuuguaa

SEQ ID NO: 2547261 - RNA, 19 nt, Artificial Sequence
  Description of Artificial Sequence: Synthetic oligonucleotide
  Antisense strand to SEQ ID NO: 2547260
uuacaaaguacacucauca

SEQ ID NO: 2547262 - RNA, 19 nt, Artificial Sequence
  Description of Artificial Sequence: Synthetic oligonucleotide
  Sense strand starting at position 112 of SEQ ID NO: 1888638
gugugcaucccuuagacca

SEQ ID NO: 2547263 - RNA, 19 nt, Artificial Sequence
  Description of Artificial Sequence: Synthetic oligonucleotide
  Antisense strand to SEQ ID NO: 2547262
uggucuaagggaugcacac

SEQ ID NO: 2547264 - RNA, 19 nt, Artificial Sequence
  Description of Artificial Sequence: Synthetic oligonucleotide
  Sense strand starting at position 39 of SEQ ID NO: 1888638
gagagugagugggaaauca

SEQ ID NO: 2547265 - RNA, 19 nt, Artificial Sequence
  Description of Artificial Sequence: Synthetic oligonucleotide
  Antisense strand to SEQ ID NO: 2547264
ugauuucccacucacucuc

SEQ ID NO: 2547266 - RNA, 19 nt, Artificial Sequence
  Description of Artificial Sequence: Synthetic oligonucleotide
  Sense strand starting at position 3404 of SEQ ID NO: 1888638
uggaaaucgugugcugacu

SEQ ID NO: 2547267 - RNA, 19 nt, Artificial Sequence
  Description of Artificial Sequence: Synthetic oligonucleotide
  Antisense strand to SEQ ID NO: 2547266
agucagcacacgauuucca

SEQ ID NO: 2547268 - RNA, 19 nt, Artificial Sequence
  Description of Artificial Sequence: Synthetic oligonucleotide
  Sense strand starting at position 3403 of SEQ ID NO: 1888638
cuggaaaucgugugcugac

SEQ ID NO: 2547269 - RNA, 19 nt, Artificial Sequence
  Description of Artificial Sequence: Synthetic oligonucleotide
  Antisense strand to SEQ ID NO: 2547268
gucagcacacgauuuccag

SEQ ID NO: 2547270 - RNA, 19 nt, Artificial Sequence
  Description of Artificial Sequence: Synthetic oligonucleotide
  Sense strand starting at position 3032 of SEQ ID NO: 1888638
ccagauugcugggaugaaa

SEQ ID NO: 2547271 - RNA, 19 nt, Artificial Sequence
  Description of Artificial Sequence: Synthetic oligonucleotide
  Antisense strand to SEQ ID NO: 2547270
uuucaucccagcaaucugg

SEQ ID NO: 2547272 - RNA, 19 nt, Artificial Sequence
  Description of Artificial Sequence: Synthetic oligonucleotide
  Sense strand starting at position 2342 of SEQ ID NO: 1888638
acagaugccucccagagau

SEQ ID NO: 2547273 - RNA, 19 nt, Artificial Sequence
  Description of Artificial Sequence: Synthetic oligonucleotide
  Antisense strand to SEQ ID NO: 2547272
aucucugggaggcaucugu

SEQ ID NO: 2547274 - RNA, 19 nt, Artificial Sequence
  Description of Artificial Sequence: Synthetic oligonucleotide
  Sense strand starting at position 3483 of SEQ ID NO: 1888638
acuacuuguuuggaaacuu

SEQ ID NO: 2547275 - RNA, 19 nt, Artificial Sequence
  Description of Artificial Sequence: Synthetic oligonucleotide
  Antisense strand to SEQ ID NO: 2547274
aaguuuccaaacaaguagu

SEQ ID NO: 2547276 - RNA, 19 nt, Artificial Sequence
  Description of Artificial Sequence: Synthetic oligonucleotide
  Sense strand starting at position 2063 of SEQ ID NO: 1888638
gaguguacuuuguaagaaa

SEQ ID NO: 2547277 - RNA, 19 nt, Artificial Sequence
  Description of Artificial Sequence: Synthetic oligonucleotide
  Antisense strand to SEQ ID NO: 2547276
uuucuuacaaaguacacuc

SEQ ID NO: 2547278 - RNA, 19 nt, Artificial Sequence
  Description of Artificial Sequence: Synthetic oligonucleotide
  Sense strand starting at position 3257 of SEQ ID NO: 1888638
cgugcuacuuuccuguauu

SEQ ID NO: 2547279 - RNA, 19 nt, Artificial Sequence
  Description of Artificial Sequence: Synthetic oligonucleotide
  Antisense strand to SEQ ID NO: 2547278
aauacaggaaaguagcacg

SEQ ID NO: 2547280 - RNA, 19 nt, Artificial Sequence
  Description of Artificial Sequence: Synthetic oligonucleotide
  Sense strand starting at position 3256 of SEQ ID NO: 1888638
ccgugcuacuuuccuguau

SEQ ID NO: 2547281 - RNA, 19 nt, Artificial Sequence
  Description of Artificial Sequence: Synthetic oligonucleotide
  Antisense strand to SEQ ID NO: 2547280
auacaggaaaguagcacgg

SEQ ID NO: 2547282 - RNA, 19 nt, Artificial Sequence
  Description of Artificial Sequence: Synthetic oligonucleotide
  Sense strand starting at position 2029 of SEQ ID NO: 1888638
agagaagucuuaggagcag

SEQ ID NO: 2547283 - RNA, 19 nt, Artificial Sequence
  Description of Artificial Sequence: Synthetic oligonucleotide
  Antisense strand to SEQ ID NO: 2547282
cugcuccuaagacuucucu

SEQ ID NO: 2547284 - RNA, 19 nt, Artificial Sequence
  Description of Artificial Sequence: Synthetic oligonucleotide
  Sense strand starting at position 114 of SEQ ID NO: 1888638
gugcaucccuuagaccaaa

SEQ ID NO: 2547285 - RNA, 19 nt, Artificial Sequence
  Description of Artificial Sequence: Synthetic oligonucleotide
  Antisense strand to SEQ ID NO: 2547284
uuuggucuaagggaugcac

SEQ ID NO: 2547286 - RNA, 19 nt, Artificial Sequence
  Description of Artificial Sequence: Synthetic oligonucleotide
  Sense strand starting at position 3653 of SEQ ID NO: 1888638
cccugaugauuccagcuca

SEQ ID NO: 2547287 - RNA, 19 nt, Artificial Sequence
  Description of Artificial Sequence: Synthetic oligonucleotide
  Antisense strand to SEQ ID NO: 2547286
ugagcuggaaucaucaggg

SEQ ID NO: 2547288 - RNA, 19 nt, Artificial Sequence
  Description of Artificial Sequence: Synthetic oligonucleotide
  Sense strand starting at position 2066 of SEQ ID NO: 1888638
uguacuuuguaagaaagca

SEQ ID NO: 2547289 - RNA, 19 nt, Artificial Sequence
  Description of Artificial Sequence: Synthetic oligonucleotide
  Antisense strand to SEQ ID NO: 2547288
ugcuuucuuacaaaguaca

SEQ ID NO: 2547290 - RNA, 19 nt, Artificial Sequence
  Description of Artificial Sequence: Synthetic oligonucleotide
  Sense strand starting at position 1999 of SEQ ID NO: 1888638
aggaacagauugugugcaa

SEQ ID NO: 2547291 - RNA, 19 nt, Artificial Sequence
  Description of Artificial Sequence: Synthetic oligonucleotide
  Antisense strand to SEQ ID NO: 2547290
uugcacacaaucuguuccu

SEQ ID NO: 2547292 - RNA, 19 nt, Artificial Sequence
  Description of Artificial Sequence: Synthetic oligonucleotide
  Sense strand starting at position 189 of SEQ ID NO: 1888638
ucagguguuucuggaaaug

SEQ ID NO: 2547293 - RNA, 19 nt, Artificial Sequence
  Description of Artificial Sequence: Synthetic oligonucleotide
  Antisense strand to SEQ ID NO: 2547292
cauuuccagaaacaccuga

SEQ ID NO: 2547294 - RNA, 19 nt, Artificial Sequence
  Description of Artificial Sequence: Synthetic oligonucleotide
  Sense strand starting at position 2257 of SEQ ID NO: 1888638
gugagcuguuccuaaggau

SEQ ID NO: 2547295 - RNA, 19 nt, Artificial Sequence
  Description of Artificial Sequence: Synthetic oligonucleotide
  Antisense strand to SEQ ID NO: 2547294
auccuuaggaacagcucac

SEQ ID NO: 2547296 - RNA, 19 nt, Artificial Sequence
  Description of Artificial Sequence: Synthetic oligonucleotide
  Sense strand starting at position 2868 of SEQ ID NO: 1888639
gcacgaucccgcucuugau

SEQ ID NO: 2547297 - RNA, 19 nt, Artificial Sequence
  Description of Artificial Sequence: Synthetic oligonucleotide
  Antisense strand to SEQ ID NO: 2547296
aucaagagcgggaucgugc

SEQ ID NO: 2547298 - RNA, 19 nt, Artificial Sequence
  Description of Artificial Sequence: Synthetic oligonucleotide
  Sense strand starting at position 2401 of SEQ ID NO: 1888639
ugaguaagagcucggcuuu

SEQ ID NO: 2547299 - RNA, 19 nt, Artificial Sequence
  Description of Artificial Sequence: Synthetic oligonucleotide
  Antisense strand to SEQ ID NO: 2547298
aaagccgagcucuuacuca

SEQ ID NO: 2547300 - RNA, 19 nt, Artificial Sequence
  Description of Artificial Sequence: Synthetic oligonucleotide
  Sense strand starting at position 699 of SEQ ID NO: 1888639
cgggaaacuugucagguca

SEQ ID NO: 2547301 - RNA, 19 nt, Artificial Sequence
  Description of Artificial Sequence: Synthetic oligonucleotide
  Antisense strand to SEQ ID NO: 2547300
ugaccugacaaguuucccg

SEQ ID NO: 2547302 - RNA, 19 nt, Artificial Sequence
  Description of Artificial Sequence: Synthetic oligonucleotide
  Sense strand starting at position 2237 of SEQ ID NO: 1888639
cgaggucccugcugguuaa

SEQ ID NO: 2547303 - RNA, 19 nt, Artificial Sequence
  Description of Artificial Sequence: Synthetic oligonucleotide
  Antisense strand to SEQ ID NO: 2547302
uuaaccagcagggaccucg

SEQ ID NO: 2547304 - RNA, 19 nt, Artificial Sequence
  Description of Artificial Sequence: Synthetic oligonucleotide
  Sense strand starting at position 2051 of SEQ ID NO: 1888640
aggcucaaagucuagaauu

SEQ ID NO: 2547305 - RNA, 19 nt, Artificial Sequence
  Description of Artificial Sequence: Synthetic oligonucleotide
  Antisense strand to SEQ ID NO: 2547304
aauucuagacuuugagccu

SEQ ID NO: 2547306 - RNA, 19 nt, Artificial Sequence
  Description of Artificial Sequence: Synthetic oligonucleotide
  Sense strand starting at position 3230 of SEQ ID NO: 1888640
cugauuguggcagaugaua

SEQ ID NO: 2547307 - RNA, 19 nt, Artificial Sequence
  Description of Artificial Sequence: Synthetic oligonucleotide
  Antisense strand to SEQ ID NO: 2547306
uaucaucugccacaaucag

SEQ ID NO: 2547308 - RNA, 19 nt, Artificial Sequence
  Description of Artificial Sequence: Synthetic oligonucleotide
  Sense strand starting at position 1597 of SEQ ID NO: 1888640
gcgggcuguacuuucugua

SEQ ID NO: 2547309 - RNA, 19 nt, Artificial Sequence
  Description of Artificial Sequence: Synthetic oligonucleotide
  Antisense strand to SEQ ID NO: 2547308
uacagaaaguacagcccgc

SEQ ID NO: 2547310 - RNA, 19 nt, Artificial Sequence
  Description of Artificial Sequence: Synthetic oligonucleotide
  Sense strand starting at position 45 of SEQ ID NO: 1888640
gucagacgugucagucuga

SEQ ID NO: 2547311 - RNA, 19 nt, Artificial Sequence
  Description of Artificial Sequence: Synthetic oligonucleotide
  Antisense strand to SEQ ID NO: 2547310
ucagacugacacgucugac

SEQ ID NO: 2547312 - RNA, 19 nt, Artificial Sequence
  Description of Artificial Sequence: Synthetic oligonucleotide
  Sense strand starting at position 965 of SEQ ID NO: 1888640
ccgagccuccgcuuucuua

SEQ ID NO: 2547313 - RNA, 19 nt, Artificial Sequence
  Description of Artificial Sequence: Synthetic oligonucleotide
  Antisense strand to SEQ ID NO: 2547312
uaagaaagcggaggcucgg

SEQ ID NO: 2547314 - RNA, 19 nt, Artificial Sequence
  Description of Artificial Sequence: Synthetic oligonucleotide
  Sense strand starting at position 966 of SEQ ID NO: 1888640
cgagccuccgcuuucuuau

SEQ ID NO: 2547315 - RNA, 19 nt, Artificial Sequence
  Description of Artificial Sequence: Synthetic oligonucleotide
  Antisense strand to SEQ ID NO: 2547314
auaagaaagcggaggcucg

SEQ ID NO: 2547316 - RNA, 19 nt, Artificial Sequence
  Description of Artificial Sequence: Synthetic oligonucleotide
  Sense strand starting at position 3232 of SEQ ID NO: 1888640
gauuguggcagaugauaga

SEQ ID NO: 2547317 - RNA, 19 nt, Artificial Sequence
  Description of Artificial Sequence: Synthetic oligonucleotide
  Antisense strand to SEQ ID NO: 2547316
ucuaucaucugccacaauc

SEQ ID NO: 2547318 - RNA, 19 nt, Artificial Sequence
  Description of Artificial Sequence: Synthetic oligonucleotide
  Sense strand starting at position 3261 of SEQ ID NO: 1888640
aguguuaggguccagaauc

SEQ ID NO: 2547319 - RNA, 19 nt, Artificial Sequence
  Description of Artificial Sequence: Synthetic oligonucleotide
  Antisense strand to SEQ ID NO: 2547318
gauucuggacccuaacacu

SEQ ID NO: 2547320 - RNA, 19 nt, Artificial Sequence
  Description of Artificial Sequence: Synthetic oligonucleotide
  Sense strand starting at position 3436 of SEQ ID NO: 1888640
ucgucaucacugcagaaag

SEQ ID NO: 2547321 - RNA, 19 nt, Artificial Sequence
  Description of Artificial Sequence: Synthetic oligonucleotide
  Antisense strand to SEQ ID NO: 2547320
cuuucugcagugaugacga

SEQ ID NO: 2547322 - RNA, 19 nt, Artificial Sequence
  Description of Artificial Sequence: Synthetic oligonucleotide
  Sense strand starting at position 2434 of SEQ ID NO: 1888640
caaguucuccaggagcuuu

SEQ ID NO: 2547323 - RNA, 19 nt, Artificial Sequence
  Description of Artificial Sequence: Synthetic oligonucleotide
  Antisense strand to SEQ ID NO: 2547322
aaagcuccuggagaacuug

SEQ ID NO: 2547324 - RNA, 19 nt, Artificial Sequence
  Description of Artificial Sequence: Synthetic oligonucleotide
  Sense strand starting at position 3603 of SEQ ID NO: 1888640
cagggaaauccaugcugug

SEQ ID NO: 2547325 - RNA, 19 nt, Artificial Sequence
  Description of Artificial Sequence: Synthetic oligonucleotide
  Antisense strand to SEQ ID NO: 2547324
cacagcauggauuucccug

SEQ ID NO: 2547326 - RNA, 19 nt, Artificial Sequence
  Description of Artificial Sequence: Synthetic oligonucleotide
  Sense strand starting at position 2206 of SEQ ID NO: 1888640
guggauccucgucaugaca

SEQ ID NO: 2547327 - RNA, 19 nt, Artificial Sequence
  Description of Artificial Sequence: Synthetic oligonucleotide
  Antisense strand to SEQ ID NO: 2547326
ugucaugacgaggauccac

SEQ ID NO: 2547328 - RNA, 19 nt, Artificial Sequence
  Description of Artificial Sequence: Synthetic oligonucleotide
  Sense strand starting at position 1310 of SEQ ID NO: 1888640
ucauguugccaagaggguu

SEQ ID NO: 2547329 - RNA, 19 nt, Artificial Sequence
  Description of Artificial Sequence: Synthetic oligonucleotide
  Antisense strand to SEQ ID NO: 2547328
aacccucuuggcaacauga

SEQ ID NO: 2547330 - RNA, 19 nt, Artificial Sequence
  Description of Artificial Sequence: Synthetic oligonucleotide
  Sense strand starting at position 671 of SEQ ID NO: 1888640
ugcagaaacguuuaccuca

SEQ ID NO: 2547331 - RNA, 19 nt, Artificial Sequence
  Description of Artificial Sequence: Synthetic oligonucleotide
  Antisense strand to SEQ ID NO: 2547330
ugagguaaacguuucugca

SEQ ID NO: 2547332 - RNA, 19 nt, Artificial Sequence
  Description of Artificial Sequence: Synthetic oligonucleotide
  Sense strand starting at position 901 of SEQ ID NO: 1888640
aaagcaauuggccgaaaug

SEQ ID NO: 2547333 - RNA, 19 nt, Artificial Sequence
  Description of Artificial Sequence: Synthetic oligonucleotide
  Antisense strand to SEQ ID NO: 2547332
cauuucggccaauugcuuu

SEQ ID NO: 2547334 - RNA, 19 nt, Artificial Sequence
  Description of Artificial Sequence: Synthetic oligonucleotide
  Sense strand starting at position 2418 of SEQ ID NO: 1888640
aguccuuguccagagccaa

SEQ ID NO: 2547335 - RNA, 19 nt, Artificial Sequence
  Description of Artificial Sequence: Synthetic oligonucleotide
  Antisense strand to SEQ ID NO: 2547334
uuggcucuggacaaggacu

SEQ ID NO: 2547336 - RNA, 19 nt, Artificial Sequence
  Description of Artificial Sequence: Synthetic oligonucleotide
  Sense strand starting at position 902 of SEQ ID NO: 1888640
aagcaauuggccgaaaugu

SEQ ID NO: 2547337 - RNA, 19 nt, Artificial Sequence
  Description of Artificial Sequence: Synthetic oligonucleotide
  Antisense strand to SEQ ID NO: 2547336
acauuucggccaauugcuu

SEQ ID NO: 2547338 - RNA, 19 nt, Artificial Sequence
  Description of Artificial Sequence: Synthetic oligonucleotide
  Sense strand starting at position 900 of SEQ ID NO: 1888640
caaagcaauuggccgaaau

SEQ ID NO: 2547339 - RNA, 19 nt, Artificial Sequence
  Description of Artificial Sequence: Synthetic oligonucleotide
  Antisense strand to SEQ ID NO: 2547338
auuucggccaauugcuuug

SEQ ID NO: 2547340 - RNA, 19 nt, Artificial Sequence
  Description of Artificial Sequence: Synthetic oligonucleotide
  Sense strand starting at position 1482 of SEQ ID NO: 1888640
agaguuguucucgaagcag

SEQ ID NO: 2547341 - RNA, 19 nt, Artificial Sequence
  Description of Artificial Sequence: Synthetic oligonucleotide
  Antisense strand to SEQ ID NO: 2547340
cugcuucgagaacaacucu

SEQ ID NO: 2547342 - RNA, 19 nt, Artificial Sequence
  Description of Artificial Sequence: Synthetic oligonucleotide
  Sense strand starting at position 3219 of SEQ ID NO: 1888640
ggaccagggcucugauugu

SEQ ID NO: 2547343 - RNA, 19 nt, Artificial Sequence
  Description of Artificial Sequence: Synthetic oligonucleotide
  Antisense strand to SEQ ID NO: 2547342
acaaucagagcccuggucc

SEQ ID NO: 2547344 - RNA, 19 nt, Artificial Sequence
  Description of Artificial Sequence: Synthetic oligonucleotide
  Sense strand starting at position 912 of SEQ ID NO: 1888640
ccgaaauguuaagccaacu

SEQ ID NO: 2547345 - RNA, 19 nt, Artificial Sequence
  Description of Artificial Sequence: Synthetic oligonucleotide
  Antisense strand to SEQ ID NO: 2547344
aguuggcuuaacauuucgg

SEQ ID NO: 2547346 - RNA, 19 nt, Artificial Sequence
  Description of Artificial Sequence: Synthetic oligonucleotide
  Sense strand starting at position 200 of SEQ ID NO: 1888640
uucagagucuggcuuggau

SEQ ID NO: 2547347 - RNA, 19 nt, Artificial Sequence
  Description of Artificial Sequence: Synthetic oligonucleotide
  Antisense strand to SEQ ID NO: 2547346
auccaagccagacucugaa

SEQ ID NO: 2547348 - RNA, 19 nt, Artificial Sequence
  Description of Artificial Sequence: Synthetic oligonucleotide
  Sense strand starting at position 2433 of SEQ ID NO: 1888640
ccaaguucuccaggagcuu

SEQ ID NO: 2547349 - RNA, 19 nt, Artificial Sequence
  Description of Artificial Sequence: Synthetic oligonucleotide
  Antisense strand to SEQ ID NO: 2547348
aagcuccuggagaacuugg

SEQ ID NO: 2547350 - RNA, 19 nt, Artificial Sequence
  Description of Artificial Sequence: Synthetic oligonucleotide
  Sense strand starting at position 3269 of SEQ ID NO: 1888640
gguccagaaucuuccguga

SEQ ID NO: 2547351 - RNA, 19 nt, Artificial Sequence
  Description of Artificial Sequence: Synthetic oligonucleotide
  Antisense strand to SEQ ID NO: 2547350
ucacggaagauucuggacc

SEQ ID NO: 2547352 - RNA, 19 nt, Artificial Sequence
  Description of Artificial Sequence: Synthetic oligonucleotide
  Sense strand starting at position 3152 of SEQ ID NO: 1888640
uggcuacugugcuuaagga

SEQ ID NO: 2547353 - RNA, 19 nt, Artificial Sequence
  Description of Artificial Sequence: Synthetic oligonucleotide
  Antisense strand to SEQ ID NO: 2547352
uccuuaagcacaguagcca

SEQ ID NO: 2547354 - RNA, 19 nt, Artificial Sequence
  Description of Artificial Sequence: Synthetic oligonucleotide
  Sense strand starting at position 3434 of SEQ ID NO: 1888640
ccucgucaucacugcagaa

SEQ ID NO: 2547355 - RNA, 19 nt, Artificial Sequence
  Description of Artificial Sequence: Synthetic oligonucleotide
  Antisense strand to SEQ ID NO: 2547354
uucugcagugaugacgagg

SEQ ID NO: 2547356 - RNA, 19 nt, Artificial Sequence
  Description of Artificial Sequence: Synthetic oligonucleotide
  Sense strand starting at position 3189 of SEQ ID NO: 1888640
gugaaagugccucgggauu

SEQ ID NO: 2547357 - RNA, 19 nt, Artificial Sequence
  Description of Artificial Sequence: Synthetic oligonucleotide
  Antisense strand to SEQ ID NO: 2547356
aaucccgaggcacuuucac

SEQ ID NO: 2547358 - RNA, 19 nt, Artificial Sequence
  Description of Artificial Sequence: Synthetic oligonucleotide
  Sense strand starting at position 1477 of SEQ ID NO: 1888640
gcaacagaguuguucucga

SEQ ID NO: 2547359 - RNA, 19 nt, Artificial Sequence
  Description of Artificial Sequence: Synthetic oligonucleotide
  Antisense strand to SEQ ID NO: 2547358
ucgagaacaacucuguugc

SEQ ID NO: 2547360 - RNA, 19 nt, Artificial Sequence
  Description of Artificial Sequence: Synthetic oligonucleotide
  Sense strand starting at position 1668 of SEQ ID NO: 1888640
gacauuugcgcguguugua

SEQ ID NO: 2547361 - RNA, 19 nt, Artificial Sequence
  Description of Artificial Sequence: Synthetic oligonucleotide
  Antisense strand to SEQ ID NO: 2547360
uacaacacgcgcaaauguc

SEQ ID NO: 2547362 - RNA, 19 nt, Artificial Sequence
  Description of Artificial Sequence: Synthetic oligonucleotide
  Sense strand starting at position 3089 of SEQ ID NO: 1888640
ucauuacacugggaccauu

SEQ ID NO: 2547363 - RNA, 19 nt, Artificial Sequence
  Description of Artificial Sequence: Synthetic oligonucleotide
  Antisense strand to SEQ ID NO: 2547362
aauggucccaguguaauga

SEQ ID NO: 2547364 - RNA, 19 nt, Artificial Sequence
  Description of Artificial Sequence: Synthetic oligonucleotide
  Sense strand starting at position 640 of SEQ ID NO: 1888640
gaaauaaucuagcauguag

SEQ ID NO: 2547365 - RNA, 19 nt, Artificial Sequence
  Description of Artificial Sequence: Synthetic oligonucleotide
  Antisense strand to SEQ ID NO: 2547364
cuacaugcuagauuauuuc

SEQ ID NO: 2547366 - RNA, 19 nt, Artificial Sequence
  Description of Artificial Sequence: Synthetic oligonucleotide
  Sense strand starting at position 1645 of SEQ ID NO: 1888640
ccuggaggcuuauaaauac

SEQ ID NO: 2547367 - RNA, 19 nt, Artificial Sequence
  Description of Artificial Sequence: Synthetic oligonucleotide
  Antisense strand to SEQ ID NO: 2547366
guauuuauaagccuccagg

SEQ ID NO: 2547368 - RNA, 19 nt, Artificial Sequence
  Description of Artificial Sequence: Synthetic oligonucleotide
  Sense strand starting at position 3191 of SEQ ID NO: 1888640
gaaagugccucgggauuuc

SEQ ID NO: 2547369 - RNA, 19 nt, Artificial Sequence
  Description of Artificial Sequence: Synthetic oligonucleotide
  Antisense strand to SEQ ID NO: 2547368
gaaaucccgaggcacuuuc

SEQ ID NO: 2547370 - RNA, 19 nt, Artificial Sequence
  Description of Artificial Sequence: Synthetic oligonucleotide
  Sense strand starting at position 1548 of SEQ ID NO: 1888640
augcaaggcucuuaaggaa

SEQ ID NO: 2547371 - RNA, 19 nt, Artificial Sequence
  Description of Artificial Sequence: Synthetic oligonucleotide
  Antisense strand to SEQ ID NO: 2547370
uuccuuaagagccuugcau

SEQ ID NO: 2547372 - RNA, 19 nt, Artificial Sequence
  Description of Artificial Sequence: Synthetic oligonucleotide
  Sense strand starting at position 804 of SEQ ID NO: 1888640
gaugaauggugcuacacca

SEQ ID NO: 2547373 - RNA, 19 nt, Artificial Sequence
  Description of Artificial Sequence: Synthetic oligonucleotide
  Antisense strand to SEQ ID NO: 2547372
ugguguagcaccauucauc

SEQ ID NO: 2547374 - RNA, 19 nt, Artificial Sequence
  Description of Artificial Sequence: Synthetic oligonucleotide
  Sense strand starting at position 1956 of SEQ ID NO: 1888640
cacagaggcucuggagaau

SEQ ID NO: 2547375 - RNA, 19 nt, Artificial Sequence
  Description of Artificial Sequence: Synthetic oligonucleotide
  Antisense strand to SEQ ID NO: 2547374
auucuccagagccucugug

SEQ ID NO: 2547376 - RNA, 19 nt, Artificial Sequence
  Description of Artificial Sequence: Synthetic oligonucleotide
  Sense strand starting at position 3228 of SEQ ID NO: 1888640
cucugauuguggcagauga

SEQ ID NO: 2547377 - RNA, 19 nt, Artificial Sequence
  Description of Artificial Sequence: Synthetic oligonucleotide
  Antisense strand to SEQ ID NO: 2547376
ucaucugccacaaucagag

SEQ ID NO: 2547378 - RNA, 19 nt, Artificial Sequence
  Description of Artificial Sequence: Synthetic oligonucleotide
  Sense strand starting at position 2582 of SEQ ID NO: 1888640
gggagugguuccuaagggu

SEQ ID NO: 2547379 - RNA, 19 nt, Artificial Sequence
  Description of Artificial Sequence: Synthetic oligonucleotide
  Antisense strand to SEQ ID NO: 2547378
acccuuaggaaccacuccc

SEQ ID NO: 2547380 - RNA, 19 nt, Artificial Sequence
  Description of Artificial Sequence: Synthetic oligonucleotide
  Sense strand starting at position 1451 of SEQ ID NO: 1888640
gcacgucacuuccaaagga

SEQ ID NO: 2547381 - RNA, 19 nt, Artificial Sequence
  Description of Artificial Sequence: Synthetic oligonucleotide
  Antisense strand to SEQ ID NO: 2547380
uccuuuggaagugacgugc

SEQ ID NO: 2547382 - RNA, 19 nt, Artificial Sequence
  Description of Artificial Sequence: Synthetic oligonucleotide
  Sense strand starting at position 52 of SEQ ID NO: 1888640
gugucagucugaggacaaa

SEQ ID NO: 2547383 - RNA, 19 nt, Artificial Sequence
  Description of Artificial Sequence: Synthetic oligonucleotide
  Antisense strand to SEQ ID NO: 2547382
uuuguccucagacugacac

SEQ ID NO: 2547384 - RNA, 19 nt, Artificial Sequence
  Description of Artificial Sequence: Synthetic oligonucleotide
  Sense strand starting at position 1682 of SEQ ID NO: 1888641
gcacauggauucucaggga

SEQ ID NO: 2547385 - RNA, 19 nt, Artificial Sequence
  Description of Artificial Sequence: Synthetic oligonucleotide
  Antisense strand to SEQ ID NO: 2547384
ucccugagaauccaugugc

SEQ ID NO: 2547386 - RNA, 19 nt, Artificial Sequence
  Description of Artificial Sequence: Synthetic oligonucleotide
  Sense strand starting at position 2180 of SEQ ID NO: 1888641
ugagguugcgguagugaug

SEQ ID NO: 2547387 - RNA, 19 nt, Artificial Sequence
  Description of Artificial Sequence: Synthetic oligonucleotide
  Antisense strand to SEQ ID NO: 2547386
caucacuaccgcaaccuca

SEQ ID NO: 2547388 - RNA, 19 nt, Artificial Sequence
  Description of Artificial Sequence: Synthetic oligonucleotide
  Sense strand starting at position 3711 of SEQ ID NO: 1888641
guguccucacccuaaggga

SEQ ID NO: 2547389 - RNA, 19 nt, Artificial Sequence
  Description of Artificial Sequence: Synthetic oligonucleotide
  Antisense strand to SEQ ID NO: 2547388
ucccuuagggugaggacac

SEQ ID NO: 2547390 - RNA, 19 nt, Artificial Sequence
  Description of Artificial Sequence: Synthetic oligonucleotide
  Sense strand starting at position 1075 of SEQ ID NO: 1888641
gugagaagaagccauguuu

SEQ ID NO: 2547391 - RNA, 19 nt, Artificial Sequence
  Description of Artificial Sequence: Synthetic oligonucleotide
  Antisense strand to SEQ ID NO: 2547390
aaacauggcuucuucucac

SEQ ID NO: 2547392 - RNA, 19 nt, Artificial Sequence
  Description of Artificial Sequence: Synthetic oligonucleotide
  Sense strand starting at position 3550 of SEQ ID NO: 1888641
ugaugacacccaugugacu

SEQ ID NO: 2547393 - RNA, 19 nt, Artificial Sequence
  Description of Artificial Sequence: Synthetic oligonucleotide
  Antisense strand to SEQ ID NO: 2547392
agucacaugggugucauca

SEQ ID NO: 2547394 - RNA, 19 nt, Artificial Sequence
  Description of Artificial Sequence: Synthetic oligonucleotide
  Sense strand starting at position 3763 of SEQ ID NO: 1888641
uuuggcaucccggaauuaa

SEQ ID NO: 2547395 - RNA, 19 nt, Artificial Sequence
  Description of Artificial Sequence: Synthetic oligonucleotide
  Antisense strand to SEQ ID NO: 2547394
uuaauuccgggaugccaaa

SEQ ID NO: 2547396 - RNA, 19 nt, Artificial Sequence
  Description of Artificial Sequence: Synthetic oligonucleotide
  Sense strand starting at position 779 of SEQ ID NO: 1888641
ggagguuaauucccuccau

SEQ ID NO: 2547397 - RNA, 19 nt, Artificial Sequence
  Description of Artificial Sequence: Synthetic oligonucleotide
  Antisense strand to SEQ ID NO: 2547396
auggagggaauuaaccucc

SEQ ID NO: 2547398 - RNA, 19 nt, Artificial Sequence
  Description of Artificial Sequence: Synthetic oligonucleotide
  Sense strand starting at position 28 of SEQ ID NO: 1888641
cccucacucuguuuggaaa

SEQ ID NO: 2547399 - RNA, 19 nt, Artificial Sequence
  Description of Artificial Sequence: Synthetic oligonucleotide
  Antisense strand to SEQ ID NO: 2547398
uuuccaaacagagugaggg

SEQ ID NO: 2547400 - RNA, 19 nt, Artificial Sequence
  Description of Artificial Sequence: Synthetic oligonucleotide
  Sense strand starting at position 251 of SEQ ID NO: 1888641
agcugaagucauuguagga

SEQ ID NO: 2547401 - RNA, 19 nt, Artificial Sequence
  Description of Artificial Sequence: Synthetic oligonucleotide
  Antisense strand to SEQ ID NO: 2547400
uccuacaaugacuucagcu

SEQ ID NO: 2547402 - RNA, 19 nt, Artificial Sequence
  Description of Artificial Sequence: Synthetic oligonucleotide
  Sense strand starting at position 2084 of SEQ ID NO: 1888641
cuguuuccugcaggaggaa

SEQ ID NO: 2547403 - RNA, 19 nt, Artificial Sequence
  Description of Artificial Sequence: Synthetic oligonucleotide
  Antisense strand to SEQ ID NO: 2547402
uuccuccugcaggaaacag

SEQ ID NO: 2547404 - RNA, 19 nt, Artificial Sequence
  Description of Artificial Sequence: Synthetic oligonucleotide
  Sense strand starting at position 2168 of SEQ ID NO: 1888641
ggaagaacucgcugagguu

SEQ ID NO: 2547405 - RNA, 19 nt, Artificial Sequence
  Description of Artificial Sequence: Synthetic oligonucleotide
  Antisense strand to SEQ ID NO: 2547404
aaccucagcgaguucuucc

SEQ ID NO: 2547406 - RNA, 19 nt, Artificial Sequence
  Description of Artificial Sequence: Synthetic oligonucleotide
  Sense strand starting at position 2508 of SEQ ID NO: 1888641
ggcuguuucucacugggaa

SEQ ID NO: 2547407 - RNA, 19 nt, Artificial Sequence
  Description of Artificial Sequence: Synthetic oligonucleotide
  Antisense strand to SEQ ID NO: 2547406
uucccagugagaaacagcc

SEQ ID NO: 2547408 - RNA, 19 nt, Artificial Sequence
  Description of Artificial Sequence: Synthetic oligonucleotide
  Sense strand starting at position 1024 of SEQ ID NO: 1888641
ggucaaaguagaugcgaau

SEQ ID NO: 2547409 - RNA, 19 nt, Artificial Sequence
  Description of Artificial Sequence: Synthetic oligonucleotide
  Antisense strand to SEQ ID NO: 2547408
auucgcaucuacuuugacc

SEQ ID NO: 2547410 - RNA, 19 nt, Artificial Sequence
  Description of Artificial Sequence: Synthetic oligonucleotide
  Sense strand starting at position 3042 of SEQ ID NO: 1888641
aggacuuguguucaacguu

SEQ ID NO: 2547411 - RNA, 19 nt, Artificial Sequence
  Description of Artificial Sequence: Synthetic oligonucleotide
  Antisense strand to SEQ ID NO: 2547410
aacguugaacacaaguccu

SEQ ID NO: 2547412 - RNA, 19 nt, Artificial Sequence
  Description of Artificial Sequence: Synthetic oligonucleotide
  Sense strand starting at position 1138 of SEQ ID NO: 1888641
cuuugauccagcgagccau

SEQ ID NO: 2547413 - RNA, 19 nt, Artificial Sequence
  Description of Artificial Sequence: Synthetic oligonucleotide
  Antisense strand to SEQ ID NO: 2547412
auggcucgcuggaucaaag

SEQ ID NO: 2547414 - RNA, 19 nt, Artificial Sequence
  Description of Artificial Sequence: Synthetic oligonucleotide
  Sense strand starting at position 3055 of SEQ ID NO: 1888641
aacguucuacugugacuga

SEQ ID NO: 2547415 - RNA, 19 nt, Artificial Sequence
  Description of Artificial Sequence: Synthetic oligonucleotide
  Antisense strand to SEQ ID NO: 2547414
ucagucacaguagaacguu

SEQ ID NO: 2547416 - RNA, 19 nt, Artificial Sequence
  Description of Artificial Sequence: Synthetic oligonucleotide
  Sense strand starting at position 1015 of SEQ ID NO: 1888641
ugcuuacccggucaaagua

SEQ ID NO: 2547417 - RNA, 19 nt, Artificial Sequence
  Description of Artificial Sequence: Synthetic oligonucleotide
  Antisense strand to SEQ ID NO: 2547416
uacuuugaccggguaagca

SEQ ID NO: 2547418 - RNA, 19 nt, Artificial Sequence
  Description of Artificial Sequence: Synthetic oligonucleotide
  Sense strand starting at position 542 of SEQ ID NO: 1888641
cccaguggucuccaugcau

SEQ ID NO: 2547419 - RNA, 19 nt, Artificial Sequence
  Description of Artificial Sequence: Synthetic oligonucleotide
  Antisense strand to SEQ ID NO: 2547418
augcauggagaccacuggg

SEQ ID NO: 2547420 - RNA, 19 nt, Artificial Sequence
  Description of Artificial Sequence: Synthetic oligonucleotide
  Sense strand starting at position 2509 of SEQ ID NO: 1888641
gcuguuucucacugggaac

SEQ ID NO: 2547421 - RNA, 19 nt, Artificial Sequence
  Description of Artificial Sequence: Synthetic oligonucleotide
  Antisense strand to SEQ ID NO: 2547420
guucccagugagaaacagc

SEQ ID NO: 2547422 - RNA, 19 nt, Artificial Sequence
  Description of Artificial Sequence: Synthetic oligonucleotide
  Sense strand starting at position 1348 of SEQ ID NO: 1888641
gucaacuccuggccucaau

SEQ ID NO: 2547423 - RNA, 19 nt, Artificial Sequence
  Description of Artificial Sequence: Synthetic oligonucleotide
  Antisense strand to SEQ ID NO: 2547422
auugaggccaggaguugac

SEQ ID NO: 2547424 - RNA, 19 nt, Artificial Sequence
  Description of Artificial Sequence: Synthetic oligonucleotide
  Sense strand starting at position 2638 of SEQ ID NO: 1888641
ccagcagucuuacuucuua

SEQ ID NO: 2547425 - RNA, 19 nt, Artificial Sequence
  Description of Artificial Sequence: Synthetic oligonucleotide
  Antisense strand to SEQ ID NO: 2547424
uaagaaguaagacugcugg

SEQ ID NO: 2547426 - RNA, 19 nt, Artificial Sequence
  Description of Artificial Sequence: Synthetic oligonucleotide
  Sense strand starting at position 2179 of SEQ ID NO: 1888641
cugagguugcgguagugau

SEQ ID NO: 2547427 - RNA, 19 nt, Artificial Sequence
  Description of Artificial Sequence: Synthetic oligonucleotide
  Antisense strand to SEQ ID NO: 2547426
aucacuaccgcaaccucag

SEQ ID NO: 2547428 - RNA, 19 nt, Artificial Sequence
  Description of Artificial Sequence: Synthetic oligonucleotide
  Sense strand starting at position 2834 of SEQ ID NO: 1888641
gugucccucugucuuaaca

SEQ ID NO: 2547429 - RNA, 19 nt, Artificial Sequence
  Description of Artificial Sequence: Synthetic oligonucleotide
  Antisense strand to SEQ ID NO: 2547428
uguuaagacagagggacac

SEQ ID NO: 2547430 - RNA, 19 nt, Artificial Sequence
  Description of Artificial Sequence: Synthetic oligonucleotide
  Sense strand starting at position 1012 of SEQ ID NO: 1888641
uccugcuuacccggucaaa

SEQ ID NO: 2547431 - RNA, 19 nt, Artificial Sequence
  Description of Artificial Sequence: Synthetic oligonucleotide
  Antisense strand to SEQ ID NO: 2547430
uuugaccggguaagcagga

SEQ ID NO: 2547432 - RNA, 19 nt, Artificial Sequence
  Description of Artificial Sequence: Synthetic oligonucleotide
  Sense strand starting at position 3299 of SEQ ID NO: 1888641
uguagaagcugccuguaau

SEQ ID NO: 2547433 - RNA, 19 nt, Artificial Sequence
  Description of Artificial Sequence: Synthetic oligonucleotide
  Antisense strand to SEQ ID NO: 2547432
auuacaggcagcuucuaca

SEQ ID NO: 2547434 - RNA, 19 nt, Artificial Sequence
  Description of Artificial Sequence: Synthetic oligonucleotide
  Sense strand starting at position 3300 of SEQ ID NO: 1888641
guagaagcugccuguaauu

SEQ ID NO: 2547435 - RNA, 19 nt, Artificial Sequence
  Description of Artificial Sequence: Synthetic oligonucleotide
  Antisense strand to SEQ ID NO: 2547434
aauuacaggcagcuucuac

SEQ ID NO: 2547436 - RNA, 19 nt, Artificial Sequence
  Description of Artificial Sequence: Synthetic oligonucleotide
  Sense strand starting at position 3323 of SEQ ID NO: 1888641
gcugcugcuucucuaaaca

SEQ ID NO: 2547437 - RNA, 19 nt, Artificial Sequence
  Description of Artificial Sequence: Synthetic oligonucleotide
  Antisense strand to SEQ ID NO: 2547436
uguuuagagaagcagcagc

SEQ ID NO: 2547438 - RNA, 19 nt, Artificial Sequence
  Description of Artificial Sequence: Synthetic oligonucleotide
  Sense strand starting at position 2832 of SEQ ID NO: 1888641
gugugucccucugucuuaa

SEQ ID NO: 2547439 - RNA, 19 nt, Artificial Sequence
  Description of Artificial Sequence: Synthetic oligonucleotide
  Antisense strand to SEQ ID NO: 2547438
uuaagacagagggacacac

SEQ ID NO: 2547440 - RNA, 19 nt, Artificial Sequence
  Description of Artificial Sequence: Synthetic oligonucleotide
  Sense strand starting at position 1815 of SEQ ID NO: 1888641
gcagguccucugugcacau

SEQ ID NO: 2547441 - RNA, 19 nt, Artificial Sequence
  Description of Artificial Sequence: Synthetic oligonucleotide
  Antisense strand to SEQ ID NO: 2547440
augugcacagaggaccugc

SEQ ID NO: 2547442 - RNA, 19 nt, Artificial Sequence
  Description of Artificial Sequence: Synthetic oligonucleotide
  Sense strand starting at position 2156 of SEQ ID NO: 1888641
ucagcuugcgccggaagaa

SEQ ID NO: 2547443 - RNA, 19 nt, Artificial Sequence
  Description of Artificial Sequence: Synthetic oligonucleotide
  Antisense strand to SEQ ID NO: 2547442
uucuuccggcgcaagcuga

SEQ ID NO: 2547444 - RNA, 19 nt, Artificial Sequence
  Description of Artificial Sequence: Synthetic oligonucleotide
  Sense strand starting at position 1669 of SEQ ID NO: 1888641
ccgaguguggucugcacau

SEQ ID NO: 2547445 - RNA, 19 nt, Artificial Sequence
  Description of Artificial Sequence: Synthetic oligonucleotide
  Antisense strand to SEQ ID NO: 2547444
augugcagaccacacucgg

SEQ ID NO: 2547446 - RNA, 19 nt, Artificial Sequence
  Description of Artificial Sequence: Synthetic oligonucleotide
  Sense strand starting at position 2499 of SEQ ID NO: 1888641
uugugauguggcuguuucu

SEQ ID NO: 2547447 - RNA, 19 nt, Artificial Sequence
  Description of Artificial Sequence: Synthetic oligonucleotide
  Antisense strand to SEQ ID NO: 2547446
agaaacagccacaucacaa

SEQ ID NO: 2547448 - RNA, 19 nt, Artificial Sequence
  Description of Artificial Sequence: Synthetic oligonucleotide
  Sense strand starting at position 1914 of SEQ ID NO: 1888641
ugaggauccuuccauccga

SEQ ID NO: 2547449 - RNA, 19 nt, Artificial Sequence
  Description of Artificial Sequence: Synthetic oligonucleotide
  Antisense strand to SEQ ID NO: 2547448
ucggauggaaggauccuca

SEQ ID NO: 2547450 - RNA, 19 nt, Artificial Sequence
  Description of Artificial Sequence: Synthetic oligonucleotide
  Sense strand starting at position 2332 of SEQ ID NO: 1888641
ggcacugacuuguacaaag

SEQ ID NO: 2547451 - RNA, 19 nt, Artificial Sequence
  Description of Artificial Sequence: Synthetic oligonucleotide
  Antisense strand to SEQ ID NO: 2547450
cuuuguacaagucagugcc

SEQ ID NO: 2547452 - RNA, 19 nt, Artificial Sequence
  Description of Artificial Sequence: Synthetic oligonucleotide
  Sense strand starting at position 2896 of SEQ ID NO: 1888641
gcaggucugcgaugucacu

SEQ ID NO: 2547453 - RNA, 19 nt, Artificial Sequence
  Description of Artificial Sequence: Synthetic oligonucleotide
  Antisense strand to SEQ ID NO: 2547452
agugacaucgcagaccugc

SEQ ID NO: 2547454 - RNA, 19 nt, Artificial Sequence
  Description of Artificial Sequence: Synthetic oligonucleotide
  Sense strand starting at position 743 of SEQ ID NO: 1888641
gaccaugguuccuagcaga

SEQ ID NO: 2547455 - RNA, 19 nt, Artificial Sequence
  Description of Artificial Sequence: Synthetic oligonucleotide
  Antisense strand to SEQ ID NO: 2547454
ucugcuaggaaccaugguc

SEQ ID NO: 2547456 - RNA, 19 nt, Artificial Sequence
  Description of Artificial Sequence: Synthetic oligonucleotide
  Sense strand starting at position 229 of SEQ ID NO: 1888641
ucucuauuggugugcguca

SEQ ID NO: 2547457 - RNA, 19 nt, Artificial Sequence
  Description of Artificial Sequence: Synthetic oligonucleotide
  Antisense strand to SEQ ID NO: 2547456
ugacgcacaccaauagaga

SEQ ID NO: 2547458 - RNA, 19 nt, Artificial Sequence
  Description of Artificial Sequence: Synthetic oligonucleotide
  Sense strand starting at position 2643 of SEQ ID NO: 1888641
agucuuacuucuuaaagug

SEQ ID NO: 2547459 - RNA, 19 nt, Artificial Sequence
  Description of Artificial Sequence: Synthetic oligonucleotide
  Antisense strand to SEQ ID NO: 2547458
cacuuuaagaaguaagacu

SEQ ID NO: 2547460 - RNA, 19 nt, Artificial Sequence
  Description of Artificial Sequence: Synthetic oligonucleotide
  Sense strand starting at position 2407 of SEQ ID NO: 1888641
gagcccaaguagugucauu

SEQ ID NO: 2547461 - RNA, 19 nt, Artificial Sequence
  Description of Artificial Sequence: Synthetic oligonucleotide
  Antisense strand to SEQ ID NO: 2547460
aaugacacuacuugggcuc

SEQ ID NO: 2547462 - RNA, 19 nt, Artificial Sequence
  Description of Artificial Sequence: Synthetic oligonucleotide
  Sense strand starting at position 2080 of SEQ ID NO: 1888641
aguccuguuuccugcagga

SEQ ID NO: 2547463 - RNA, 19 nt, Artificial Sequence
  Description of Artificial Sequence: Synthetic oligonucleotide
  Antisense strand to SEQ ID NO: 2547462
uccugcaggaaacaggacu

SEQ ID NO: 2547464 - RNA, 19 nt, Artificial Sequence
  Description of Artificial Sequence: Synthetic oligonucleotide
  Sense strand starting at position 347 of SEQ ID NO: 1888642
ugaggccucccaggagaau

SEQ ID NO: 2547465 - RNA, 19 nt, Artificial Sequence
  Description of Artificial Sequence: Synthetic oligonucleotide
  Antisense strand to SEQ ID NO: 2547464
auucuccugggaggccuca

SEQ ID NO: 2547466 - RNA, 19 nt, Artificial Sequence
  Description of Artificial Sequence: Synthetic oligonucleotide
  Sense strand starting at position 161 of SEQ ID NO: 1888642
aagauuguggccuggguca

SEQ ID NO: 2547467 - RNA, 19 nt, Artificial Sequence
  Description of Artificial Sequence: Synthetic oligonucleotide
  Antisense strand to SEQ ID NO: 2547466
ugacccaggccacaaucuu

SEQ ID NO: 2547468 - RNA, 19 nt, Artificial Sequence
  Description of Artificial Sequence: Synthetic oligonucleotide
  Sense strand starting at position 413 of SEQ ID NO: 1888642
uggaaacuguccugaggga

SEQ ID NO: 2547469 - RNA, 19 nt, Artificial Sequence
  Description of Artificial Sequence: Synthetic oligonucleotide
  Antisense strand to SEQ ID NO: 2547468
ucccucaggacaguuucca

SEQ ID NO: 2547470 - RNA, 19 nt, Artificial Sequence
  Description of Artificial Sequence: Synthetic oligonucleotide
  Sense strand starting at position 706 of SEQ ID NO: 1888642
agacaagucucaugaccug

SEQ ID NO: 2547471 - RNA, 19 nt, Artificial Sequence
  Description of Artificial Sequence: Synthetic oligonucleotide
  Antisense strand to SEQ ID NO: 2547470
caggucaugagacuugucu

SEQ ID NO: 2547472 - RNA, 19 nt, Artificial Sequence
  Description of Artificial Sequence: Synthetic oligonucleotide
  Sense strand starting at position 26 of SEQ ID NO: 1888642
agguguuugccgugcagga

SEQ ID NO: 2547473 - RNA, 19 nt, Artificial Sequence
  Description of Artificial Sequence: Synthetic oligonucleotide
  Antisense strand to SEQ ID NO: 2547472
uccugcacggcaaacaccu

SEQ ID NO: 2547474 - RNA, 19 nt, Artificial Sequence
  Description of Artificial Sequence: Synthetic oligonucleotide
  Sense strand starting at position 383 of SEQ ID NO: 1888642
ggcagucugucagaggaau

SEQ ID NO: 2547475 - RNA, 19 nt, Artificial Sequence
  Description of Artificial Sequence: Synthetic oligonucleotide
  Antisense strand to SEQ ID NO: 2547474
auuccucugacagacugcc

SEQ ID NO: 2547476 - RNA, 19 nt, Artificial Sequence
  Description of Artificial Sequence: Synthetic oligonucleotide
  Sense strand starting at position 668 of SEQ ID NO: 1888643
guguuuagaggacagaagu

SEQ ID NO: 2547477 - RNA, 19 nt, Artificial Sequence
  Description of Artificial Sequence: Synthetic oligonucleotide
  Antisense strand to SEQ ID NO: 2547476
acuucuguccucuaaacac

SEQ ID NO: 2547478 - RNA, 19 nt, Artificial Sequence
  Description of Artificial Sequence: Synthetic oligonucleotide
  Sense strand starting at position 654 of SEQ ID NO: 1888643
gagggauggaaaugguguu

SEQ ID NO: 2547479 - RNA, 19 nt, Artificial Sequence
  Description of Artificial Sequence: Synthetic oligonucleotide
  Antisense strand to SEQ ID NO: 2547478
aacaccauuuccaucccuc

SEQ ID NO: 2547480 - RNA, 19 nt, Artificial Sequence
  Description of Artificial Sequence: Synthetic oligonucleotide
  Sense strand starting at position 1284 of SEQ ID NO: 1888643
ugaggccucccaggagaau

SEQ ID NO: 2547481 - RNA, 19 nt, Artificial Sequence
  Description of Artificial Sequence: Synthetic oligonucleotide
  Antisense strand to SEQ ID NO: 2547480
auucuccugggaggccuca

SEQ ID NO: 2547482 - RNA, 19 nt, Artificial Sequence
  Description of Artificial Sequence: Synthetic oligonucleotide
  Sense strand starting at position 695 of SEQ ID NO: 1888643
guggcugcugacuaauuau

SEQ ID NO: 2547483 - RNA, 19 nt, Artificial Sequence
  Description of Artificial Sequence: Synthetic oligonucleotide
  Antisense strand to SEQ ID NO: 2547482
auaauuagucagcagccac

SEQ ID NO: 2547484 - RNA, 19 nt, Artificial Sequence
  Description of Artificial Sequence: Synthetic oligonucleotide
  Sense strand starting at position 849 of SEQ ID NO: 1888643
gauggucccugcuuuagga

SEQ ID NO: 2547485 - RNA, 19 nt, Artificial Sequence
  Description of Artificial Sequence: Synthetic oligonucleotide
  Antisense strand to SEQ ID NO: 2547484
uccuaaagcagggaccauc

SEQ ID NO: 2547486 - RNA, 19 nt, Artificial Sequence
  Description of Artificial Sequence: Synthetic oligonucleotide
  Sense strand starting at position 1098 of SEQ ID NO: 1888643
aagauuguggccuggguca

SEQ ID NO: 2547487 - RNA, 19 nt, Artificial Sequence
  Description of Artificial Sequence: Synthetic oligonucleotide
  Antisense strand to SEQ ID NO: 2547486
ugacccaggccacaaucuu

SEQ ID NO: 2547488 - RNA, 19 nt, Artificial Sequence
  Description of Artificial Sequence: Synthetic oligonucleotide
  Sense strand starting at position 36 of SEQ ID NO: 1888643
cagguuuggugagcagagu

SEQ ID NO: 2547489 - RNA, 19 nt, Artificial Sequence
  Description of Artificial Sequence: Synthetic oligonucleotide
  Antisense strand to SEQ ID NO: 2547488
acucugcucaccaaaccug

SEQ ID NO: 2547490 - RNA, 19 nt, Artificial Sequence
  Description of Artificial Sequence: Synthetic oligonucleotide
  Sense strand starting at position 846 of SEQ ID NO: 1888643
ucagauggucccugcuuua

SEQ ID NO: 2547491 - RNA, 19 nt, Artificial Sequence
  Description of Artificial Sequence: Synthetic oligonucleotide
  Antisense strand to SEQ ID NO: 2547490
uaaagcagggaccaucuga

SEQ ID NO: 2547492 - RNA, 19 nt, Artificial Sequence
  Description of Artificial Sequence: Synthetic oligonucleotide
  Sense strand starting at position 694 of SEQ ID NO: 1888643
uguggcugcugacuaauua

SEQ ID NO: 2547493 - RNA, 19 nt, Artificial Sequence
  Description of Artificial Sequence: Synthetic oligonucleotide
  Antisense strand to SEQ ID NO: 2547492
uaauuagucagcagccaca

SEQ ID NO: 2547494 - RNA, 19 nt, Artificial Sequence
  Description of Artificial Sequence: Synthetic oligonucleotide
  Sense strand starting at position 1350 of SEQ ID NO: 1888643
uggaaacuguccugaggga

SEQ ID NO: 2547495 - RNA, 19 nt, Artificial Sequence
  Description of Artificial Sequence: Synthetic oligonucleotide
  Antisense strand to SEQ ID NO: 2547494
ucccucaggacaguuucca

SEQ ID NO: 2547496 - RNA, 19 nt, Artificial Sequence
  Description of Artificial Sequence: Synthetic oligonucleotide
  Sense strand starting at position 282 of SEQ ID NO: 1888643
gcugcuccacugugauguu

SEQ ID NO: 2547497 - RNA, 19 nt, Artificial Sequence
  Description of Artificial Sequence: Synthetic oligonucleotide
  Antisense strand to SEQ ID NO: 2547496
aacaucacaguggagcagc

SEQ ID NO: 2547498 - RNA, 19 nt, Artificial Sequence
  Description of Artificial Sequence: Synthetic oligonucleotide
  Sense strand starting at position 1643 of SEQ ID NO: 1888643
agacaagucucaugaccug

SEQ ID NO: 2547499 - RNA, 19 nt, Artificial Sequence
  Description of Artificial Sequence: Synthetic oligonucleotide
  Antisense strand to SEQ ID NO: 2547498
caggucaugagacuugucu

SEQ ID NO: 2547500 - RNA, 19 nt, Artificial Sequence
  Description of Artificial Sequence: Synthetic oligonucleotide
  Sense strand starting at position 963 of SEQ ID NO: 1888643
agguguuugccgugcagga

SEQ ID NO: 2547501 - RNA, 19 nt, Artificial Sequence
  Description of Artificial Sequence: Synthetic oligonucleotide
  Antisense strand to SEQ ID NO: 2547500
uccugcacggcaaacaccu

SEQ ID NO: 2547502 - RNA, 19 nt, Artificial Sequence
  Description of Artificial Sequence: Synthetic oligonucleotide
  Sense strand starting at position 1320 of SEQ ID NO: 1888643
ggcagucugucagaggaau

SEQ ID NO: 2547503 - RNA, 19 nt, Artificial Sequence
  Description of Artificial Sequence: Synthetic oligonucleotide
  Antisense strand to SEQ ID NO: 2547502
auuccucugacagacugcc

SEQ ID NO: 2547504 - RNA, 19 nt, Artificial Sequence
  Description of Artificial Sequence: Synthetic oligonucleotide
  Sense strand starting at position 591 of SEQ ID NO: 1888643
gagaucugcuccggagaca

SEQ ID NO: 2547505 - RNA, 19 nt, Artificial Sequence
  Description of Artificial Sequence: Synthetic oligonucleotide
  Antisense strand to SEQ ID NO: 2547504
ugucuccggagcagaucuc

SEQ ID NO: 2547506 - RNA, 19 nt, Artificial Sequence
  Description of Artificial Sequence: Synthetic oligonucleotide
  Sense strand starting at position 514 of SEQ ID NO: 1888643
gcaggagaguccuggugga

SEQ ID NO: 2547507 - RNA, 19 nt, Artificial Sequence
  Description of Artificial Sequence: Synthetic oligonucleotide
  Antisense strand to SEQ ID NO: 2547506
uccaccaggacucuccugc

SEQ ID NO: 2547508 - RNA, 19 nt, Artificial Sequence
  Description of Artificial Sequence: Synthetic oligonucleotide
  Sense strand starting at position 691 of SEQ ID NO: 1888643
agauguggcugcugacuaa

SEQ ID NO: 2547509 - RNA, 19 nt, Artificial Sequence
  Description of Artificial Sequence: Synthetic oligonucleotide
  Antisense strand to SEQ ID NO: 2547508
uuagucagcagccacaucu

SEQ ID NO: 2547510 - RNA, 19 nt, Artificial Sequence
  Description of Artificial Sequence: Synthetic oligonucleotide
  Sense strand starting at position 381 of SEQ ID NO: 1888644
ugaugaguuccauaaccuc

SEQ ID NO: 2547511 - RNA, 19 nt, Artificial Sequence
  Description of Artificial Sequence: Synthetic oligonucleotide
  Antisense strand to SEQ ID NO: 2547510
gagguuauggaacucauca

SEQ ID NO: 2547512 - RNA, 19 nt, Artificial Sequence
  Description of Artificial Sequence: Synthetic oligonucleotide
  Sense strand starting at position 494 of SEQ ID NO: 1888644
agagaugauuggucaucca

SEQ ID NO: 2547513 - RNA, 19 nt, Artificial Sequence
  Description of Artificial Sequence: Synthetic oligonucleotide
  Antisense strand to SEQ ID NO: 2547512
uggaugaccaaucaucucu

SEQ ID NO: 2547514 - RNA, 19 nt, Artificial Sequence
  Description of Artificial Sequence: Synthetic oligonucleotide
  Sense strand starting at position 2395 of SEQ ID NO: 1888644
uuugaaaugggcugagaca

SEQ ID NO: 2547515 - RNA, 19 nt, Artificial Sequence
  Description of Artificial Sequence: Synthetic oligonucleotide
  Antisense strand to SEQ ID NO: 2547514
ugucucagcccauuucaaa

SEQ ID NO: 2547516 - RNA, 19 nt, Artificial Sequence
  Description of Artificial Sequence: Synthetic oligonucleotide
  Sense strand starting at position 1282 of SEQ ID NO: 1888644
auggauguggcagggaaau

SEQ ID NO: 2547517 - RNA, 19 nt, Artificial Sequence
  Description of Artificial Sequence: Synthetic oligonucleotide
  Antisense strand to SEQ ID NO: 2547516
auuucccugccacauccau

SEQ ID NO: 2547518 - RNA, 19 nt, Artificial Sequence
  Description of Artificial Sequence: Synthetic oligonucleotide
  Sense strand starting at position 3571 of SEQ ID NO: 1888644
uagucugagccuuagaaau

SEQ ID NO: 2547519 - RNA, 19 nt, Artificial Sequence
  Description of Artificial Sequence: Synthetic oligonucleotide
  Antisense strand to SEQ ID NO: 2547518
auuucuaaggcucagacua

SEQ ID NO: 2547520 - RNA, 19 nt, Artificial Sequence
  Description of Artificial Sequence: Synthetic oligonucleotide
  Sense strand starting at position 497 of SEQ ID NO: 1888644
gaugauuggucauccauga

SEQ ID NO: 2547521 - RNA, 19 nt, Artificial Sequence
  Description of Artificial Sequence: Synthetic oligonucleotide
  Antisense strand to SEQ ID NO: 2547520
ucauggaugaccaaucauc

SEQ ID NO: 2547522 - RNA, 19 nt, Artificial Sequence
  Description of Artificial Sequence: Synthetic oligonucleotide
  Sense strand starting at position 491 of SEQ ID NO: 1888644
cucagagaugauuggucau

SEQ ID NO: 2547523 - RNA, 19 nt, Artificial Sequence
  Description of Artificial Sequence: Synthetic oligonucleotide
  Antisense strand to SEQ ID NO: 2547522
augaccaaucaucucugag

SEQ ID NO: 2547524 - RNA, 19 nt, Artificial Sequence
  Description of Artificial Sequence: Synthetic oligonucleotide
  Sense strand starting at position 966 of SEQ ID NO: 1888644
gcugggugucuggagagaa

SEQ ID NO: 2547525 - RNA, 19 nt, Artificial Sequence
  Description of Artificial Sequence: Synthetic oligonucleotide
  Antisense strand to SEQ ID NO: 2547524
uucucuccagacacccagc

SEQ ID NO: 2547526 - RNA, 19 nt, Artificial Sequence
  Description of Artificial Sequence: Synthetic oligonucleotide
  Sense strand starting at position 3712 of SEQ ID NO: 1888644
ugacuugcccuugaucaac

SEQ ID NO: 2547527 - RNA, 19 nt, Artificial Sequence
  Description of Artificial Sequence: Synthetic oligonucleotide
  Antisense strand to SEQ ID NO: 2547526
guugaucaagggcaaguca

SEQ ID NO: 2547528 - RNA, 19 nt, Artificial Sequence
  Description of Artificial Sequence: Synthetic oligonucleotide
  Sense strand starting at position 3707 of SEQ ID NO: 1888644
ugaaaugacuugcccuuga

SEQ ID NO: 2547529 - RNA, 19 nt, Artificial Sequence
  Description of Artificial Sequence: Synthetic oligonucleotide
  Antisense strand to SEQ ID NO: 2547528
ucaagggcaagucauuuca

SEQ ID NO: 2547530 - RNA, 19 nt, Artificial Sequence
  Description of Artificial Sequence: Synthetic oligonucleotide
  Sense strand starting at position 1375 of SEQ ID NO: 1888644
uuaguaugugcucaacaaa

SEQ ID NO: 2547531 - RNA, 19 nt, Artificial Sequence
  Description of Artificial Sequence: Synthetic oligonucleotide
  Antisense strand to SEQ ID NO: 2547530
uuuguugagcacauacuaa

SEQ ID NO: 2547532 - RNA, 19 nt, Artificial Sequence
  Description of Artificial Sequence: Synthetic oligonucleotide
  Sense strand starting at position 407 of SEQ ID NO: 1888644
cagugcucugcagaaugaa

SEQ ID NO: 2547533 - RNA, 19 nt, Artificial Sequence
  Description of Artificial Sequence: Synthetic oligonucleotide
  Antisense strand to SEQ ID NO: 2547532
uucauucugcagagcacug

SEQ ID NO: 2547534 - RNA, 19 nt, Artificial Sequence
  Description of Artificial Sequence: Synthetic oligonucleotide
  Sense strand starting at position 3963 of SEQ ID NO: 1888644
auauuccucuugcuaagga

SEQ ID NO: 2547535 - RNA, 19 nt, Artificial Sequence
  Description of Artificial Sequence: Synthetic oligonucleotide
  Antisense strand to SEQ ID NO: 2547534
uccuuagcaagaggaauau

SEQ ID NO: 2547536 - RNA, 19 nt, Artificial Sequence
  Description of Artificial Sequence: Synthetic oligonucleotide
  Sense strand starting at position 2385 of SEQ ID NO: 1888644
guggguaggguuugaaaug

SEQ ID NO: 2547537 - RNA, 19 nt, Artificial Sequence
  Description of Artificial Sequence: Synthetic oligonucleotide
  Antisense strand to SEQ ID NO: 2547536
cauuucaaacccuacccac

SEQ ID NO: 2547538 - RNA, 19 nt, Artificial Sequence
  Description of Artificial Sequence: Synthetic oligonucleotide
  Sense strand starting at position 3711 of SEQ ID NO: 1888644
augacuugcccuugaucaa

SEQ ID NO: 2547539 - RNA, 19 nt, Artificial Sequence
  Description of Artificial Sequence: Synthetic oligonucleotide
  Antisense strand to SEQ ID NO: 2547538
uugaucaagggcaagucau

SEQ ID NO: 2547540 - RNA, 19 nt, Artificial Sequence
  Description of Artificial Sequence: Synthetic oligonucleotide
  Sense strand starting at position 1237 of SEQ ID NO: 1888644
uccacauucuggccugaga

SEQ ID NO: 2547541 - RNA, 19 nt, Artificial Sequence
  Description of Artificial Sequence: Synthetic oligonucleotide
  Antisense strand to SEQ ID NO: 2547540
ucucaggccagaaugugga

SEQ ID NO: 2547542 - RNA, 19 nt, Artificial Sequence
  Description of Artificial Sequence: Synthetic oligonucleotide
  Sense strand starting at position 375 of SEQ ID NO: 1888644
ggcacaugaugaguuccau

SEQ ID NO: 2547543 - RNA, 19 nt, Artificial Sequence
  Description of Artificial Sequence: Synthetic oligonucleotide
  Antisense strand to SEQ ID NO: 2547542
auggaacucaucaugugcc

SEQ ID NO: 2547544 - RNA, 19 nt, Artificial Sequence
  Description of Artificial Sequence: Synthetic oligonucleotide
  Sense strand starting at position 1818 of SEQ ID NO: 1888644
gcaggcauugggcaacuua

SEQ ID NO: 2547545 - RNA, 19 nt, Artificial Sequence
  Description of Artificial Sequence: Synthetic oligonucleotide
  Antisense strand to SEQ ID NO: 2547544
uaaguugcccaaugccugc

SEQ ID NO: 2547546 - RNA, 19 nt, Artificial Sequence
  Description of Artificial Sequence: Synthetic oligonucleotide
  Sense strand starting at position 3469 of SEQ ID NO: 1888644
cacuuaucagcugguugaa

SEQ ID NO: 2547547 - RNA, 19 nt, Artificial Sequence
  Description of Artificial Sequence: Synthetic oligonucleotide
  Antisense strand to SEQ ID NO: 2547546
uucaaccagcugauaagug

SEQ ID NO: 2547548 - RNA, 19 nt, Artificial Sequence
  Description of Artificial Sequence: Synthetic oligonucleotide
  Sense strand starting at position 3705 of SEQ ID NO: 1888644
ggugaaaugacuugcccuu

SEQ ID NO: 2547549 - RNA, 19 nt, Artificial Sequence
  Description of Artificial Sequence: Synthetic oligonucleotide
  Antisense strand to SEQ ID NO: 2547548
aagggcaagucauuucacc

SEQ ID NO: 2547550 - RNA, 19 nt, Artificial Sequence
  Description of Artificial Sequence: Synthetic oligonucleotide
  Sense strand starting at position 2626 of SEQ ID NO: 1888644
gggcguuacgccgucucau

SEQ ID NO: 2547551 - RNA, 19 nt, Artificial Sequence
  Description of Artificial Sequence: Synthetic oligonucleotide
  Antisense strand to SEQ ID NO: 2547550
augagacggcguaacgccc

SEQ ID NO: 2547552 - RNA, 19 nt, Artificial Sequence
  Description of Artificial Sequence: Synthetic oligonucleotide
  Sense strand starting at position 252 of SEQ ID NO: 1888644
ggcuuagaccuugggucua

SEQ ID NO: 2547553 - RNA, 19 nt, Artificial Sequence
  Description of Artificial Sequence: Synthetic oligonucleotide
  Antisense strand to SEQ ID NO: 2547552
uagacccaaggucuaagcc

SEQ ID NO: 2547554 - RNA, 19 nt, Artificial Sequence
  Description of Artificial Sequence: Synthetic oligonucleotide
  Sense strand starting at position 2628 of SEQ ID NO: 1888644
gcguuacgccgucucauca

SEQ ID NO: 2547555 - RNA, 19 nt, Artificial Sequence
  Description of Artificial Sequence: Synthetic oligonucleotide
  Antisense strand to SEQ ID NO: 2547554
ugaugagacggcguaacgc

SEQ ID NO: 2547556 - RNA, 19 nt, Artificial Sequence
  Description of Artificial Sequence: Synthetic oligonucleotide
  Sense strand starting at position 967 of SEQ ID NO: 1888644
cugggugucuggagagaac

SEQ ID NO: 2547557 - RNA, 19 nt, Artificial Sequence
  Description of Artificial Sequence: Synthetic oligonucleotide
  Antisense strand to SEQ ID NO: 2547556
guucucuccagacacccag

SEQ ID NO: 2547558 - RNA, 19 nt, Artificial Sequence
  Description of Artificial Sequence: Synthetic oligonucleotide
  Sense strand starting at position 1378 of SEQ ID NO: 1888644
guaugugcucaacaaagcu

SEQ ID NO: 2547559 - RNA, 19 nt, Artificial Sequence
  Description of Artificial Sequence: Synthetic oligonucleotide
  Antisense strand to SEQ ID NO: 2547558
agcuuuguugagcacauac

SEQ ID NO: 2547560 - RNA, 19 nt, Artificial Sequence
  Description of Artificial Sequence: Synthetic oligonucleotide
  Sense strand starting at position 501 of SEQ ID NO: 1888644
auuggucauccaugaacgu

SEQ ID NO: 2547561 - RNA, 19 nt, Artificial Sequence
  Description of Artificial Sequence: Synthetic oligonucleotide
  Antisense strand to SEQ ID NO: 2547560
acguucauggaugaccaau

SEQ ID NO: 2547562 - RNA, 19 nt, Artificial Sequence
  Description of Artificial Sequence: Synthetic oligonucleotide
  Sense strand starting at position 1374 of SEQ ID NO: 1888644
cuuaguaugugcucaacaa

SEQ ID NO: 2547563 - RNA, 19 nt, Artificial Sequence
  Description of Artificial Sequence: Synthetic oligonucleotide
  Antisense strand to SEQ ID NO: 2547562
uuguugagcacauacuaag

SEQ ID NO: 2547564 - RNA, 19 nt, Artificial Sequence
  Description of Artificial Sequence: Synthetic oligonucleotide
  Sense strand starting at position 2339 of SEQ ID NO: 1888644
gggugagugcuggguaaug

SEQ ID NO: 2547565 - RNA, 19 nt, Artificial Sequence
  Description of Artificial Sequence: Synthetic oligonucleotide
  Antisense strand to SEQ ID NO: 2547564
cauuacccagcacucaccc

SEQ ID NO: 2547566 - RNA, 19 nt, Artificial Sequence
  Description of Artificial Sequence: Synthetic oligonucleotide
  Sense strand starting at position 405 of SEQ ID NO: 1888644
gccagugcucugcagaaug

SEQ ID NO: 2547567 - RNA, 19 nt, Artificial Sequence
  Description of Artificial Sequence: Synthetic oligonucleotide
  Antisense strand to SEQ ID NO: 2547566
cauucugcagagcacuggc

SEQ ID NO: 2547568 - RNA, 19 nt, Artificial Sequence
  Description of Artificial Sequence: Synthetic oligonucleotide
  Sense strand starting at position 2658 of SEQ ID NO: 1888644
cugcuauguucccuauuag

SEQ ID NO: 2547569 - RNA, 19 nt, Artificial Sequence
  Description of Artificial Sequence: Synthetic oligonucleotide
  Antisense strand to SEQ ID NO: 2547568
cuaauagggaacauagcag

SEQ ID NO: 2547570 - RNA, 19 nt, Artificial Sequence
  Description of Artificial Sequence: Synthetic oligonucleotide
  Sense strand starting at position 2338 of SEQ ID NO: 1888644
ugggugagugcuggguaau

SEQ ID NO: 2547571 - RNA, 19 nt, Artificial Sequence
  Description of Artificial Sequence: Synthetic oligonucleotide
  Antisense strand to SEQ ID NO: 2547570
auuacccagcacucaccca

SEQ ID NO: 2547572 - RNA, 19 nt, Artificial Sequence
  Description of Artificial Sequence: Synthetic oligonucleotide
  Sense strand starting at position 2657 of SEQ ID NO: 1888644
ccugcuauguucccuauua

SEQ ID NO: 2547573 - RNA, 19 nt, Artificial Sequence
  Description of Artificial Sequence: Synthetic oligonucleotide
  Antisense strand to SEQ ID NO: 2547572
uaauagggaacauagcagg

SEQ ID NO: 2547574 - RNA, 19 nt, Artificial Sequence
  Description of Artificial Sequence: Synthetic oligonucleotide
  Sense strand starting at position 1010 of SEQ ID NO: 1888644
ggcugaagaucugaagaua

SEQ ID NO: 2547575 - RNA, 19 nt, Artificial Sequence
  Description of Artificial Sequence: Synthetic oligonucleotide
  Antisense strand to SEQ ID NO: 2547574
uaucuucagaucuucagcc

SEQ ID NO: 2547576 - RNA, 19 nt, Artificial Sequence
  Description of Artificial Sequence: Synthetic oligonucleotide
  Sense strand starting at position 3958 of SEQ ID NO: 1888644
gggccauauuccucuugcu

SEQ ID NO: 2547577 - RNA, 19 nt, Artificial Sequence
  Description of Artificial Sequence: Synthetic oligonucleotide
  Antisense strand to SEQ ID NO: 2547576
agcaagaggaauauggccc

SEQ ID NO: 2547578 - RNA, 19 nt, Artificial Sequence
  Description of Artificial Sequence: Synthetic oligonucleotide
  Sense strand starting at position 403 of SEQ ID NO: 1888644
gagccagugcucugcagaa

SEQ ID NO: 2547579 - RNA, 19 nt, Artificial Sequence
  Description of Artificial Sequence: Synthetic oligonucleotide
  Antisense strand to SEQ ID NO: 2547578
uucugcagagcacuggcuc

SEQ ID NO: 2547580 - RNA, 19 nt, Artificial Sequence
  Description of Artificial Sequence: Synthetic oligonucleotide
  Sense strand starting at position 1655 of SEQ ID NO: 1888644
uuugcaagcugcuuccaua

SEQ ID NO: 2547581 - RNA, 19 nt, Artificial Sequence
  Description of Artificial Sequence: Synthetic oligonucleotide
  Antisense strand to SEQ ID NO: 2547580
uauggaagcagcuugcaaa

SEQ ID NO: 2547582 - RNA, 19 nt, Artificial Sequence
  Description of Artificial Sequence: Synthetic oligonucleotide
  Sense strand starting at position 3573 of SEQ ID NO: 1888644
gucugagccuuagaaauaa

SEQ ID NO: 2547583 - RNA, 19 nt, Artificial Sequence
  Description of Artificial Sequence: Synthetic oligonucleotide
  Antisense strand to SEQ ID NO: 2547582
uuauuucuaaggcucagac

SEQ ID NO: 2547584 - RNA, 19 nt, Artificial Sequence
  Description of Artificial Sequence: Synthetic oligonucleotide
  Sense strand starting at position 1148 of SEQ ID NO: 1888644
uuggccuccucauauagaa

SEQ ID NO: 2547585 - RNA, 19 nt, Artificial Sequence
  Description of Artificial Sequence: Synthetic oligonucleotide
  Antisense strand to SEQ ID NO: 2547584
uucuauaugaggaggccaa

SEQ ID NO: 2547586 - RNA, 19 nt, Artificial Sequence
  Description of Artificial Sequence: Synthetic oligonucleotide
  Sense strand starting at position 1417 of SEQ ID NO: 1888644
ggcugagucuaacauccaa

SEQ ID NO: 2547587 - RNA, 19 nt, Artificial Sequence
  Description of Artificial Sequence: Synthetic oligonucleotide
  Antisense strand to SEQ ID NO: 2547586
uuggauguuagacucagcc

SEQ ID NO: 2547588 - RNA, 19 nt, Artificial Sequence
  Description of Artificial Sequence: Synthetic oligonucleotide
  Sense strand starting at position 2664 of SEQ ID NO: 1888644
uguucccuauuaggaaaua

SEQ ID NO: 2547589 - RNA, 19 nt, Artificial Sequence
  Description of Artificial Sequence: Synthetic oligonucleotide
  Antisense strand to SEQ ID NO: 2547588
uauuuccuaauagggaaca

SEQ ID NO: 2547590 - RNA, 19 nt, Artificial Sequence
  Description of Artificial Sequence: Synthetic oligonucleotide
  Sense strand starting at position 902 of SEQ ID NO: 1888645
ggauuaugggcuuacucag

SEQ ID NO: 2547591 - RNA, 19 nt, Artificial Sequence
  Description of Artificial Sequence: Synthetic oligonucleotide
  Antisense strand to SEQ ID NO: 2547590
cugaguaagcccauaaucc

SEQ ID NO: 2547592 - RNA, 19 nt, Artificial Sequence
  Description of Artificial Sequence: Synthetic oligonucleotide
  Sense strand starting at position 3704 of SEQ ID NO: 1888645
gcggugagaguuucggcaa

SEQ ID NO: 2547593 - RNA, 19 nt, Artificial Sequence
  Description of Artificial Sequence: Synthetic oligonucleotide
  Antisense strand to SEQ ID NO: 2547592
uugccgaaacucucaccgc

SEQ ID NO: 2547594 - RNA, 19 nt, Artificial Sequence
  Description of Artificial Sequence: Synthetic oligonucleotide
  Sense strand starting at position 3949 of SEQ ID NO: 1888645
ucaauuagacauugaguag

SEQ ID NO: 2547595 - RNA, 19 nt, Artificial Sequence
  Description of Artificial Sequence: Synthetic oligonucleotide
  Antisense strand to SEQ ID NO: 2547594
cuacucaaugucuaauuga

SEQ ID NO: 2547596 - RNA, 19 nt, Artificial Sequence
  Description of Artificial Sequence: Synthetic oligonucleotide
  Sense strand starting at position 2747 of SEQ ID NO: 1888645
uccuaucaugcuuagggaa

SEQ ID NO: 2547597 - RNA, 19 nt, Artificial Sequence
  Description of Artificial Sequence: Synthetic oligonucleotide
  Antisense strand to SEQ ID NO: 2547596
uucccuaagcaugauagga

SEQ ID NO: 2547598 - RNA, 19 nt, Artificial Sequence
  Description of Artificial Sequence: Synthetic oligonucleotide
  Sense strand starting at position 35 of SEQ ID NO: 1888645
cugaauucucccuggagag

SEQ ID NO: 2547599 - RNA, 19 nt, Artificial Sequence
  Description of Artificial Sequence: Synthetic oligonucleotide
  Antisense strand to SEQ ID NO: 2547598
cucuccagggagaauucag

SEQ ID NO: 2547600 - RNA, 19 nt, Artificial Sequence
  Description of Artificial Sequence: Synthetic oligonucleotide
  Sense strand starting at position 2513 of SEQ ID NO: 1888645
aacagauguccuuaggguc

SEQ ID NO: 2547601 - RNA, 19 nt, Artificial Sequence
  Description of Artificial Sequence: Synthetic oligonucleotide
  Antisense strand to SEQ ID NO: 2547600
gacccuaaggacaucuguu

SEQ ID NO: 2547602 - RNA, 19 nt, Artificial Sequence
  Description of Artificial Sequence: Synthetic oligonucleotide
  Sense strand starting at position 3069 of SEQ ID NO: 1888645
gagguucuggcugaaacua

SEQ ID NO: 2547603 - RNA, 19 nt, Artificial Sequence
  Description of Artificial Sequence: Synthetic oligonucleotide
  Antisense strand to SEQ ID NO: 2547602
uaguuucagccagaaccuc

SEQ ID NO: 2547604 - RNA, 19 nt, Artificial Sequence
  Description of Artificial Sequence: Synthetic oligonucleotide
  Sense strand starting at position 34 of SEQ ID NO: 1888645
ccugaauucucccuggaga

SEQ ID NO: 2547605 - RNA, 19 nt, Artificial Sequence
  Description of Artificial Sequence: Synthetic oligonucleotide
  Antisense strand to SEQ ID NO: 2547604
ucuccagggagaauucagg

SEQ ID NO: 2547606 - RNA, 19 nt, Artificial Sequence
  Description of Artificial Sequence: Synthetic oligonucleotide
  Sense strand starting at position 3698 of SEQ ID NO: 1888645
aguugagcggugagaguuu

SEQ ID NO: 2547607 - RNA, 19 nt, Artificial Sequence
  Description of Artificial Sequence: Synthetic oligonucleotide
  Antisense strand to SEQ ID NO: 2547606
aaacucucaccgcucaacu

SEQ ID NO: 2547608 - RNA, 19 nt, Artificial Sequence
  Description of Artificial Sequence: Synthetic oligonucleotide
  Sense strand starting at position 3953 of SEQ ID NO: 1888645
uuagacauugaguagcuau

SEQ ID NO: 2547609 - RNA, 19 nt, Artificial Sequence
  Description of Artificial Sequence: Synthetic oligonucleotide
  Antisense strand to SEQ ID NO: 2547608
auagcuacucaaugucuaa

SEQ ID NO: 2547610 - RNA, 19 nt, Artificial Sequence
  Description of Artificial Sequence: Synthetic oligonucleotide
  Sense strand starting at position 1486 of SEQ ID NO: 1888645
ccagucucgagagauccau

SEQ ID NO: 2547611 - RNA, 19 nt, Artificial Sequence
  Description of Artificial Sequence: Synthetic oligonucleotide
  Antisense strand to SEQ ID NO: 2547610
auggaucucucgagacugg

SEQ ID NO: 2547612 - RNA, 19 nt, Artificial Sequence
  Description of Artificial Sequence: Synthetic oligonucleotide
  Sense strand starting at position 1482 of SEQ ID NO: 1888645
acucccagucucgagagau

SEQ ID NO: 2547613 - RNA, 19 nt, Artificial Sequence
  Description of Artificial Sequence: Synthetic oligonucleotide
  Antisense strand to SEQ ID NO: 2547612
aucucucgagacugggagu

SEQ ID NO: 2547614 - RNA, 19 nt, Artificial Sequence
  Description of Artificial Sequence: Synthetic oligonucleotide
  Sense strand starting at position 2418 of SEQ ID NO: 1888645
agcugcugcgcauuaauua

SEQ ID NO: 2547615 - RNA, 19 nt, Artificial Sequence
  Description of Artificial Sequence: Synthetic oligonucleotide
  Antisense strand to SEQ ID NO: 2547614
uaauuaaugcgcagcagcu

SEQ ID NO: 2547616 - RNA, 19 nt, Artificial Sequence
  Description of Artificial Sequence: Synthetic oligonucleotide
  Sense strand starting at position 2711 of SEQ ID NO: 1888645
uuuguugaaagguaaaugu

SEQ ID NO: 2547617 - RNA, 19 nt, Artificial Sequence
  Description of Artificial Sequence: Synthetic oligonucleotide
  Antisense strand to SEQ ID NO: 2547616
acauuuaccuuucaacaaa

SEQ ID NO: 2547618 - RNA, 19 nt, Artificial Sequence
  Description of Artificial Sequence: Synthetic oligonucleotide
  Sense strand starting at position 191 of SEQ ID NO: 1888645
ucauguguuggauauauug

SEQ ID NO: 2547619 - RNA, 19 nt, Artificial Sequence
  Description of Artificial Sequence: Synthetic oligonucleotide
  Antisense strand to SEQ ID NO: 2547618
caauauauccaacacauga

SEQ ID NO: 2547620 - RNA, 19 nt, Artificial Sequence
  Description of Artificial Sequence: Synthetic oligonucleotide
  Sense strand starting at position 3189 of SEQ ID NO: 1888645
ucgcauuauccaguucguu

SEQ ID NO: 2547621 - RNA, 19 nt, Artificial Sequence
  Description of Artificial Sequence: Synthetic oligonucleotide
  Antisense strand to SEQ ID NO: 2547620
aacgaacuggauaaugcga

SEQ ID NO: 2547622 - RNA, 19 nt, Artificial Sequence
  Description of Artificial Sequence: Synthetic oligonucleotide
  Sense strand starting at position 47 of SEQ ID NO: 1888645
uggagaguaucccuccuaa

SEQ ID NO: 2547623 - RNA, 19 nt, Artificial Sequence
  Description of Artificial Sequence: Synthetic oligonucleotide
  Antisense strand to SEQ ID NO: 2547622
uuaggagggauacucucca

SEQ ID NO: 2547624 - RNA, 19 nt, Artificial Sequence
  Description of Artificial Sequence: Synthetic oligonucleotide
  Sense strand starting at position 3956 of SEQ ID NO: 1888645
gacauugaguagcuaugaa

SEQ ID NO: 2547625 - RNA, 19 nt, Artificial Sequence
  Description of Artificial Sequence: Synthetic oligonucleotide
  Antisense strand to SEQ ID NO: 2547624
uucauagcuacucaauguc

SEQ ID NO: 2547626 - RNA, 19 nt, Artificial Sequence
  Description of Artificial Sequence: Synthetic oligonucleotide
  Sense strand starting at position 3854 of SEQ ID NO: 1888645
ccuggaaacuggcugaauu

SEQ ID NO: 2547627 - RNA, 19 nt, Artificial Sequence
  Description of Artificial Sequence: Synthetic oligonucleotide
  Antisense strand to SEQ ID NO: 2547626
aauucagccaguuuccagg

SEQ ID NO: 2547628 - RNA, 19 nt, Artificial Sequence
  Description of Artificial Sequence: Synthetic oligonucleotide
  Sense strand starting at position 891 of SEQ ID NO: 1888645
guccgauguagggauuaug

SEQ ID NO: 2547629 - RNA, 19 nt, Artificial Sequence
  Description of Artificial Sequence: Synthetic oligonucleotide
  Antisense strand to SEQ ID NO: 2547628
cauaaucccuacaucggac

SEQ ID NO: 2547630 - RNA, 19 nt, Artificial Sequence
  Description of Artificial Sequence: Synthetic oligonucleotide
  Sense strand starting at position 899 of SEQ ID NO: 1888645
uagggauuaugggcuuacu

SEQ ID NO: 2547631 - RNA, 19 nt, Artificial Sequence
  Description of Artificial Sequence: Synthetic oligonucleotide
  Antisense strand to SEQ ID NO: 2547630
aguaagcccauaaucccua

SEQ ID NO: 2547632 - RNA, 19 nt, Artificial Sequence
  Description of Artificial Sequence: Synthetic oligonucleotide
  Sense strand starting at position 36 of SEQ ID NO: 1888645
ugaauucucccuggagagu

SEQ ID NO: 2547633 - RNA, 19 nt, Artificial Sequence
  Description of Artificial Sequence: Synthetic oligonucleotide
  Antisense strand to SEQ ID NO: 2547632
acucuccagggagaauuca

SEQ ID NO: 2547634 - RNA, 19 nt, Artificial Sequence
  Description of Artificial Sequence: Synthetic oligonucleotide
  Sense strand starting at position 3952 of SEQ ID NO: 1888645
auuagacauugaguagcua

SEQ ID NO: 2547635 - RNA, 19 nt, Artificial Sequence
  Description of Artificial Sequence: Synthetic oligonucleotide
  Antisense strand to SEQ ID NO: 2547634
uagcuacucaaugucuaau

SEQ ID NO: 2547636 - RNA, 19 nt, Artificial Sequence
  Description of Artificial Sequence: Synthetic oligonucleotide
  Sense strand starting at position 3475 of SEQ ID NO: 1888645
cuguauuacucauugauua

SEQ ID NO: 2547637 - RNA, 19 nt, Artificial Sequence
  Description of Artificial Sequence: Synthetic oligonucleotide
  Antisense strand to SEQ ID NO: 2547636
uaaucaaugaguaauacag

SEQ ID NO: 2547638 - RNA, 19 nt, Artificial Sequence
  Description of Artificial Sequence: Synthetic oligonucleotide
  Sense strand starting at position 2128 of SEQ ID NO: 1888645
agaugcuuccagggauucu

SEQ ID NO: 2547639 - RNA, 19 nt, Artificial Sequence
  Description of Artificial Sequence: Synthetic oligonucleotide
  Antisense strand to SEQ ID NO: 2547638
agaaucccuggaagcaucu

SEQ ID NO: 2547640 - RNA, 19 nt, Artificial Sequence
  Description of Artificial Sequence: Synthetic oligonucleotide
  Sense strand starting at position 3446 of SEQ ID NO: 1888645
gucuauugugauggaauac

SEQ ID NO: 2547641 - RNA, 19 nt, Artificial Sequence
  Description of Artificial Sequence: Synthetic oligonucleotide
  Antisense strand to SEQ ID NO: 2547640
guauuccaucacaauagac

SEQ ID NO: 2547642 - RNA, 19 nt, Artificial Sequence
  Description of Artificial Sequence: Synthetic oligonucleotide
  Sense strand starting at position 2884 of SEQ ID NO: 1888645
gcuguaaggcaagagucaa

SEQ ID NO: 2547643 - RNA, 19 nt, Artificial Sequence
  Description of Artificial Sequence: Synthetic oligonucleotide
  Antisense strand to SEQ ID NO: 2547642
uugacucuugccuuacagc

SEQ ID NO: 2547644 - RNA, 19 nt, Artificial Sequence
  Description of Artificial Sequence: Synthetic oligonucleotide
  Sense strand starting at position 198 of SEQ ID NO: 1888645
uuggauauauugucuccua

SEQ ID NO: 2547645 - RNA, 19 nt, Artificial Sequence
  Description of Artificial Sequence: Synthetic oligonucleotide
  Antisense strand to SEQ ID NO: 2547644
uaggagacaauauauccaa

SEQ ID NO: 2547646 - RNA, 19 nt, Artificial Sequence
  Description of Artificial Sequence: Synthetic oligonucleotide
  Sense strand starting at position 199 of SEQ ID NO: 1888645
uggauauauugucuccuac

SEQ ID NO: 2547647 - RNA, 19 nt, Artificial Sequence
  Description of Artificial Sequence: Synthetic oligonucleotide
  Antisense strand to SEQ ID NO: 2547646
guaggagacaauauaucca

SEQ ID NO: 2547648 - RNA, 19 nt, Artificial Sequence
  Description of Artificial Sequence: Synthetic oligonucleotide
  Sense strand starting at position 2746 of SEQ ID NO: 1888645
uuccuaucaugcuuaggga

SEQ ID NO: 2547649 - RNA, 19 nt, Artificial Sequence
  Description of Artificial Sequence: Synthetic oligonucleotide
  Antisense strand to SEQ ID NO: 2547648
ucccuaagcaugauaggaa

SEQ ID NO: 2547650 - RNA, 19 nt, Artificial Sequence
  Description of Artificial Sequence: Synthetic oligonucleotide
  Sense strand starting at position 1029 of SEQ ID NO: 1888645
ggguucuggacaugucaac

SEQ ID NO: 2547651 - RNA, 19 nt, Artificial Sequence
  Description of Artificial Sequence: Synthetic oligonucleotide
  Antisense strand to SEQ ID NO: 2547650
guugacauguccagaaccc

SEQ ID NO: 2547652 - RNA, 19 nt, Artificial Sequence
  Description of Artificial Sequence: Synthetic oligonucleotide
  Sense strand starting at position 1692 of SEQ ID NO: 1888645
gagaacccguuugucagaa

SEQ ID NO: 2547653 - RNA, 19 nt, Artificial Sequence
  Description of Artificial Sequence: Synthetic oligonucleotide
  Antisense strand to SEQ ID NO: 2547652
uucugacaaacggguucuc

SEQ ID NO: 2547654 - RNA, 19 nt, Artificial Sequence
  Description of Artificial Sequence: Synthetic oligonucleotide
  Sense strand starting at position 2876 of SEQ ID NO: 1888645
uaguauaagcuguaaggca

SEQ ID NO: 2547655 - RNA, 19 nt, Artificial Sequence
  Description of Artificial Sequence: Synthetic oligonucleotide
  Antisense strand to SEQ ID NO: 2547654
ugccuuacagcuuauacua

SEQ ID NO: 2547656 - RNA, 19 nt, Artificial Sequence
  Description of Artificial Sequence: Synthetic oligonucleotide
  Sense strand starting at position 2426 of SEQ ID NO: 1888645
cgcauuaauuaagucaaag

SEQ ID NO: 2547657 - RNA, 19 nt, Artificial Sequence
  Description of Artificial Sequence: Synthetic oligonucleotide
  Antisense strand to SEQ ID NO: 2547656
cuuugacuuaauuaaugcg

SEQ ID NO: 2547658 - RNA, 19 nt, Artificial Sequence
  Description of Artificial Sequence: Synthetic oligonucleotide
  Sense strand starting at position 2988 of SEQ ID NO: 1888645
accuguugaguuugagauc

SEQ ID NO: 2547659 - RNA, 19 nt, Artificial Sequence
  Description of Artificial Sequence: Synthetic oligonucleotide
  Antisense strand to SEQ ID NO: 2547658
gaucucaaacucaacaggu

SEQ ID NO: 2547660 - RNA, 19 nt, Artificial Sequence
  Description of Artificial Sequence: Synthetic oligonucleotide
  Sense strand starting at position 3680 of SEQ ID NO: 1888645
uggaaauccgcaugugaga

SEQ ID NO: 2547661 - RNA, 19 nt, Artificial Sequence
  Description of Artificial Sequence: Synthetic oligonucleotide
  Antisense strand to SEQ ID NO: 2547660
ucucacaugcggauuucca

SEQ ID NO: 2547662 - RNA, 19 nt, Artificial Sequence
  Description of Artificial Sequence: Synthetic oligonucleotide
  Sense strand starting at position 3068 of SEQ ID NO: 1888645
ugagguucuggcugaaacu

SEQ ID NO: 2547663 - RNA, 19 nt, Artificial Sequence
  Description of Artificial Sequence: Synthetic oligonucleotide
  Antisense strand to SEQ ID NO: 2547662
aguuucagccagaaccuca

SEQ ID NO: 2547664 - RNA, 19 nt, Artificial Sequence
  Description of Artificial Sequence: Synthetic oligonucleotide
  Sense strand starting at position 151 of SEQ ID NO: 1888645
ccauaugggucuucuuuau

SEQ ID NO: 2547665 - RNA, 19 nt, Artificial Sequence
  Description of Artificial Sequence: Synthetic oligonucleotide
  Antisense strand to SEQ ID NO: 2547664
auaaagaagacccauaugg

SEQ ID NO: 2547666 - RNA, 19 nt, Artificial Sequence
  Description of Artificial Sequence: Synthetic oligonucleotide
  Sense strand starting at position 1691 of SEQ ID NO: 1888645
ggagaacccguuugucaga

SEQ ID NO: 2547667 - RNA, 19 nt, Artificial Sequence
  Description of Artificial Sequence: Synthetic oligonucleotide
  Antisense strand to SEQ ID NO: 2547666
ucugacaaacggguucucc

SEQ ID NO: 2547668 - RNA, 19 nt, Artificial Sequence
  Description of Artificial Sequence: Synthetic oligonucleotide
  Sense strand starting at position 3034 of SEQ ID NO: 1888645
uggucaguugcacaaguga

SEQ ID NO: 2547669 - RNA, 19 nt, Artificial Sequence
  Description of Artificial Sequence: Synthetic oligonucleotide
  Antisense strand to SEQ ID NO: 2547668
ucacuugugcaacugacca

SEQ ID NO: 2547670 - RNA, 19 nt, Artificial Sequence
  Description of Artificial Sequence: Synthetic oligonucleotide
  Sense strand starting at position 3443 of SEQ ID NO: 1888646
ugcuacugaccagaacuua

SEQ ID NO: 2547671 - RNA, 19 nt, Artificial Sequence
  Description of Artificial Sequence: Synthetic oligonucleotide
  Antisense strand to SEQ ID NO: 2547670
uaaguucuggucaguagca

SEQ ID NO: 2547672 - RNA, 19 nt, Artificial Sequence
  Description of Artificial Sequence: Synthetic oligonucleotide
  Sense strand starting at position 863 of SEQ ID NO: 1888646
ugguguguugugaagccua

SEQ ID NO: 2547673 - RNA, 19 nt, Artificial Sequence
  Description of Artificial Sequence: Synthetic oligonucleotide
  Antisense strand to SEQ ID NO: 2547672
uaggcuucacaacacacca

SEQ ID NO: 2547674 - RNA, 19 nt, Artificial Sequence
  Description of Artificial Sequence: Synthetic oligonucleotide
  Sense strand starting at position 3660 of SEQ ID NO: 1888646
agaauacuucuaggaguac

SEQ ID NO: 2547675 - RNA, 19 nt, Artificial Sequence
  Description of Artificial Sequence: Synthetic oligonucleotide
  Antisense strand to SEQ ID NO: 2547674
guacuccuagaaguauucu

SEQ ID NO: 2547676 - RNA, 19 nt, Artificial Sequence
  Description of Artificial Sequence: Synthetic oligonucleotide
  Sense strand starting at position 3012 of SEQ ID NO: 1888647
caggaaaguuuguugaaag

SEQ ID NO: 2547677 - RNA, 19 nt, Artificial Sequence
  Description of Artificial Sequence: Synthetic oligonucleotide
  Antisense strand to SEQ ID NO: 2547676
cuuucaacaaacuuuccug

SEQ ID NO: 2547678 - RNA, 19 nt, Artificial Sequence
  Description of Artificial Sequence: Synthetic oligonucleotide
  Sense strand starting at position 1640 of SEQ ID NO: 1888646
aaggaagaguugguuuaca

SEQ ID NO: 2547679 - RNA, 19 nt, Artificial Sequence
  Description of Artificial Sequence: Synthetic oligonucleotide
  Antisense strand to SEQ ID NO: 2547678
uguaaaccaacucuuccuu

SEQ ID NO: 2547680 - RNA, 19 nt, Artificial Sequence
  Description of Artificial Sequence: Synthetic oligonucleotide
  Sense strand starting at position 2721 of SEQ ID NO: 1888646
auagaugcccguuggauuu

SEQ ID NO: 2547681 - RNA, 19 nt, Artificial Sequence
  Description of Artificial Sequence: Synthetic oligonucleotide
  Antisense strand to SEQ ID NO: 2547680
aaauccaacgggcaucuau

SEQ ID NO: 2547682 - RNA, 19 nt, Artificial Sequence
  Description of Artificial Sequence: Synthetic oligonucleotide
  Sense strand starting at position 382 of SEQ ID NO: 1888646
ggguauacacaagguuaga

SEQ ID NO: 2547683 - RNA, 19 nt, Artificial Sequence
  Description of Artificial Sequence: Synthetic oligonucleotide
  Antisense strand to SEQ ID NO: 2547682
ucuaaccuuguguauaccc

SEQ ID NO: 2547684 - RNA, 19 nt, Artificial Sequence
  Description of Artificial Sequence: Synthetic oligonucleotide
  Sense strand starting at position 885 of SEQ ID NO: 1888646
aaguuaauguaccuagaga

SEQ ID NO: 2547685 - RNA, 19 nt, Artificial Sequence
  Description of Artificial Sequence: Synthetic oligonucleotide
  Antisense strand to SEQ ID NO: 2547684
ucucuagguacauuaacuu

SEQ ID NO: 2547686 - RNA, 19 nt, Artificial Sequence
  Description of Artificial Sequence: Synthetic oligonucleotide
  Sense strand starting at position 3823 of SEQ ID NO: 1888647
cugcaauugcuagacaaag

SEQ ID NO: 2547687 - RNA, 19 nt, Artificial Sequence
  Description of Artificial Sequence: Synthetic oligonucleotide
  Antisense strand to SEQ ID NO: 2547686
cuuugucuagcaauugcag

SEQ ID NO: 2547688 - RNA, 19 nt, Artificial Sequence
  Description of Artificial Sequence: Synthetic oligonucleotide
  Sense strand starting at position 3011 of SEQ ID NO: 1888647
ucaggaaaguuuguugaaa

SEQ ID NO: 2547689 - RNA, 19 nt, Artificial Sequence
  Description of Artificial Sequence: Synthetic oligonucleotide
  Antisense strand to SEQ ID NO: 2547688
uuucaacaaacuuuccuga

SEQ ID NO: 2547690 - RNA, 19 nt, Artificial Sequence
  Description of Artificial Sequence: Synthetic oligonucleotide
  Sense strand starting at position 3596 of SEQ ID NO: 1888647
gacauuaaugcuuagucag

SEQ ID NO: 2547691 - RNA, 19 nt, Artificial Sequence
  Description of Artificial Sequence: Synthetic oligonucleotide
  Antisense strand to SEQ ID NO: 2547690
cugacuaagcauuaauguc

SEQ ID NO: 2547692 - RNA, 19 nt, Artificial Sequence
  Description of Artificial Sequence: Synthetic oligonucleotide
  Sense strand starting at position 409 of SEQ ID NO: 1888646
gguagauaucaugguauag

SEQ ID NO: 2547693 - RNA, 19 nt, Artificial Sequence
  Description of Artificial Sequence: Synthetic oligonucleotide
  Antisense strand to SEQ ID NO: 2547692
cuauaccaugauaucuacc

SEQ ID NO: 2547694 - RNA, 19 nt, Artificial Sequence
  Description of Artificial Sequence: Synthetic oligonucleotide
  Sense strand starting at position 3744 of SEQ ID NO: 1888646
gcuugugaaggguaaauca

SEQ ID NO: 2547695 - RNA, 19 nt, Artificial Sequence
  Description of Artificial Sequence: Synthetic oligonucleotide
  Antisense strand to SEQ ID NO: 2547694
ugauuuacccuucacaagc

SEQ ID NO: 2547696 - RNA, 19 nt, Artificial Sequence
  Description of Artificial Sequence: Synthetic oligonucleotide
  Sense strand starting at position 3516 of SEQ ID NO: 1888647
ggaacucucugaccaguca

SEQ ID NO: 2547697 - RNA, 19 nt, Artificial Sequence
  Description of Artificial Sequence: Synthetic oligonucleotide
  Antisense strand to SEQ ID NO: 2547696
ugacuggucagagaguucc

SEQ ID NO: 2547698 - RNA, 19 nt, Artificial Sequence
  Description of Artificial Sequence: Synthetic oligonucleotide
  Sense strand starting at position 2852 of SEQ ID NO: 1888647
gggugauaaguaugaaacg

SEQ ID NO: 2547699 - RNA, 19 nt, Artificial Sequence
  Description of Artificial Sequence: Synthetic oligonucleotide
  Antisense strand to SEQ ID NO: 2547698
cguuucauacuuaucaccc

SEQ ID NO: 2547700 - RNA, 19 nt, Artificial Sequence
  Description of Artificial Sequence: Synthetic oligonucleotide
  Sense strand starting at position 2999 of SEQ ID NO: 1888647
acagcacuuuccucaggaa

SEQ ID NO: 2547701 - RNA, 19 nt, Artificial Sequence
  Description of Artificial Sequence: Synthetic oligonucleotide
  Antisense strand to SEQ ID NO: 2547700
uuccugaggaaagugcugu

SEQ ID NO: 2547702 - RNA, 19 nt, Artificial Sequence
  Description of Artificial Sequence: Synthetic oligonucleotide
  Sense strand starting at position 2588 of SEQ ID NO: 1888646
gaugacugucagugacaca

SEQ ID NO: 2547703 - RNA, 19 nt, Artificial Sequence
  Description of Artificial Sequence: Synthetic oligonucleotide
  Antisense strand to SEQ ID NO: 2547702
ugugucacugacagucauc

SEQ ID NO: 2547704 - RNA, 19 nt, Artificial Sequence
  Description of Artificial Sequence: Synthetic oligonucleotide
  Sense strand starting at position 355 of SEQ ID NO: 1888646
gauaguggguacuucugaa

SEQ ID NO: 2547705 - RNA, 19 nt, Artificial Sequence
  Description of Artificial Sequence: Synthetic oligonucleotide
  Antisense strand to SEQ ID NO: 2547704
uucagaaguacccacuauc

SEQ ID NO: 2547706 - RNA, 19 nt, Artificial Sequence
  Description of Artificial Sequence: Synthetic oligonucleotide
  Sense strand starting at position 3789 of SEQ ID NO: 1888646
guauccugacucugaggau

SEQ ID NO: 2547707 - RNA, 19 nt, Artificial Sequence
  Description of Artificial Sequence: Synthetic oligonucleotide
  Antisense strand to SEQ ID NO: 2547706
auccucagagucaggauac

SEQ ID NO: 2547708 - RNA, 19 nt, Artificial Sequence
  Description of Artificial Sequence: Synthetic oligonucleotide
  Sense strand starting at position 1326 of SEQ ID NO: 1888646
guaccuaccugaccuauga

SEQ ID NO: 2547709 - RNA, 19 nt, Artificial Sequence
  Description of Artificial Sequence: Synthetic oligonucleotide
  Antisense strand to SEQ ID NO: 2547708
ucauaggucagguagguac

SEQ ID NO: 2547710 - RNA, 19 nt, Artificial Sequence
  Description of Artificial Sequence: Synthetic oligonucleotide
  Sense strand starting at position 3022 of SEQ ID NO: 1888647
uguugaaagucaucagauc

SEQ ID NO: 2547711 - RNA, 19 nt, Artificial Sequence
  Description of Artificial Sequence: Synthetic oligonucleotide
  Antisense strand to SEQ ID NO: 2547710
gaucugaugacuuucaaca

SEQ ID NO: 2547712 - RNA, 19 nt, Artificial Sequence
  Description of Artificial Sequence: Synthetic oligonucleotide
  Sense strand starting at position 362 of SEQ ID NO: 1888646
gguacuucugaaggaggca

SEQ ID NO: 2547713 - RNA, 19 nt, Artificial Sequence
  Description of Artificial Sequence: Synthetic oligonucleotide
  Antisense strand to SEQ ID NO: 2547712
ugccuccuucagaaguacc

SEQ ID NO: 2547714 - RNA, 19 nt, Artificial Sequence
  Description of Artificial Sequence: Synthetic oligonucleotide
  Sense strand starting at position 2844 of SEQ ID NO: 1888647
uccagucugggugauaagu

SEQ ID NO: 2547715 - RNA, 19 nt, Artificial Sequence
  Description of Artificial Sequence: Synthetic oligonucleotide
  Antisense strand to SEQ ID NO: 2547714
acuuaucacccagacugga

SEQ ID NO: 2547716 - RNA, 19 nt, Artificial Sequence
  Description of Artificial Sequence: Synthetic oligonucleotide
  Sense strand starting at position 965 of SEQ ID NO: 1888646
acaacuucuuaagucagua

SEQ ID NO: 2547717 - RNA, 19 nt, Artificial Sequence
  Description of Artificial Sequence: Synthetic oligonucleotide
  Antisense strand to SEQ ID NO: 2547716
uacugacuuaagaaguugu

SEQ ID NO: 2547718 - RNA, 19 nt, Artificial Sequence
  Description of Artificial Sequence: Synthetic oligonucleotide
  Sense strand starting at position 3595 of SEQ ID NO: 1888647
agacauuaaugcuuaguca

SEQ ID NO: 2547719 - RNA, 19 nt, Artificial Sequence
  Description of Artificial Sequence: Synthetic oligonucleotide
  Antisense strand to SEQ ID NO: 2547718
ugacuaagcauuaaugucu

SEQ ID NO: 2547720 - RNA, 19 nt, Artificial Sequence
  Description of Artificial Sequence: Synthetic oligonucleotide
  Sense strand starting at position 3599 of SEQ ID NO: 1888647
auuaaugcuuagucagaau

SEQ ID NO: 2547721 - RNA, 19 nt, Artificial Sequence
  Description of Artificial Sequence: Synthetic oligonucleotide
  Antisense strand to SEQ ID NO: 2547720
auucugacuaagcauuaau

SEQ ID NO: 2547722 - RNA, 19 nt, Artificial Sequence
  Description of Artificial Sequence: Synthetic oligonucleotide
  Sense strand starting at position 3804 of SEQ ID NO: 1888646
ggauccagcucuuucuaaa

SEQ ID NO: 2547723 - RNA, 19 nt, Artificial Sequence
  Description of Artificial Sequence: Synthetic oligonucleotide
  Antisense strand to SEQ ID NO: 2547722
uuuagaaagagcuggaucc

SEQ ID NO: 2547724 - RNA, 19 nt, Artificial Sequence
  Description of Artificial Sequence: Synthetic oligonucleotide
  Sense strand starting at position 3752 of SEQ ID NO: 1888646
aggguaaaucaguggccaa

SEQ ID NO: 2547725 - RNA, 19 nt, Artificial Sequence
  Description of Artificial Sequence: Synthetic oligonucleotide
  Antisense strand to SEQ ID NO: 2547724
uuggccacugauuuacccu

SEQ ID NO: 2547726 - RNA, 19 nt, Artificial Sequence
  Description of Artificial Sequence: Synthetic oligonucleotide
  Sense strand starting at position 3245 of SEQ ID NO: 1888646
uaucuagagugcuuagaac

SEQ ID NO: 2547727 - RNA, 19 nt, Artificial Sequence
  Description of Artificial Sequence: Synthetic oligonucleotide
  Antisense strand to SEQ ID NO: 2547726
guucuaagcacucuagaua

SEQ ID NO: 2547728 - RNA, 19 nt, Artificial Sequence
  Description of Artificial Sequence: Synthetic oligonucleotide
  Sense strand starting at position 3753 of SEQ ID NO: 1888646
ggguaaaucaguggccaag

SEQ ID NO: 2547729 - RNA, 19 nt, Artificial Sequence
  Description of Artificial Sequence: Synthetic oligonucleotide
  Antisense strand to SEQ ID NO: 2547728
cuuggccacugauuuaccc

SEQ ID NO: 2547730 - RNA, 19 nt, Artificial Sequence
  Description of Artificial Sequence: Synthetic oligonucleotide
  Sense strand starting at position 2707 of SEQ ID NO: 1888646
ugcagaguguaauuauaga

SEQ ID NO: 2547731 - RNA, 19 nt, Artificial Sequence
  Description of Artificial Sequence: Synthetic oligonucleotide
  Antisense strand to SEQ ID NO: 2547730
ucuauaauuacacucugca

SEQ ID NO: 2547732 - RNA, 19 nt, Artificial Sequence
  Description of Artificial Sequence: Synthetic oligonucleotide
  Sense strand starting at position 2704 of SEQ ID NO: 1888646
aguugcagaguguaauuau

SEQ ID NO: 2547733 - RNA, 19 nt, Artificial Sequence
  Description of Artificial Sequence: Synthetic oligonucleotide
  Antisense strand to SEQ ID NO: 2547732
auaauuacacucugcaacu

SEQ ID NO: 2547734 - RNA, 19 nt, Artificial Sequence
  Description of Artificial Sequence: Synthetic oligonucleotide
  Sense strand starting at position 969 of SEQ ID NO: 1888646
cuucuuaagucaguacuga

SEQ ID NO: 2547735 - RNA, 19 nt, Artificial Sequence
  Description of Artificial Sequence: Synthetic oligonucleotide
  Antisense strand to SEQ ID NO: 2547734
ucaguacugacuuaagaag

SEQ ID NO: 2547736 - RNA, 19 nt, Artificial Sequence
  Description of Artificial Sequence: Synthetic oligonucleotide
  Sense strand starting at position 2699 of SEQ ID NO: 1888646
ucuagaguugcagagugua

SEQ ID NO: 2547737 - RNA, 19 nt, Artificial Sequence
  Description of Artificial Sequence: Synthetic oligonucleotide
  Antisense strand to SEQ ID NO: 2547736
uacacucugcaacucuaga

SEQ ID NO: 2547738 - RNA, 19 nt, Artificial Sequence
  Description of Artificial Sequence: Synthetic oligonucleotide
  Sense strand starting at position 3742 of SEQ ID NO: 1888646
uggcuugugaaggguaaau

SEQ ID NO: 2547739 - RNA, 19 nt, Artificial Sequence
  Description of Artificial Sequence: Synthetic oligonucleotide
  Antisense strand to SEQ ID NO: 2547738
auuuacccuucacaagcca

SEQ ID NO: 2547740 - RNA, 19 nt, Artificial Sequence
  Description of Artificial Sequence: Synthetic oligonucleotide
  Sense strand starting at position 1049 of SEQ ID NO: 1888646
uuguauagcucacuugaau

SEQ ID NO: 2547741 - RNA, 19 nt, Artificial Sequence
  Description of Artificial Sequence: Synthetic oligonucleotide
  Antisense strand to SEQ ID NO: 2547740
auucaagugagcuauacaa

SEQ ID NO: 2547742 - RNA, 19 nt, Artificial Sequence
  Description of Artificial Sequence: Synthetic oligonucleotide
  Sense strand starting at position 3724 of SEQ ID NO: 1888647
ccgugaaauguccagguuu

SEQ ID NO: 2547743 - RNA, 19 nt, Artificial Sequence
  Description of Artificial Sequence: Synthetic oligonucleotide
  Antisense strand to SEQ ID NO: 2547742
aaaccuggacauuucacgg

SEQ ID NO: 2547744 - RNA, 19 nt, Artificial Sequence
  Description of Artificial Sequence: Synthetic oligonucleotide
  Sense strand starting at position 3755 of SEQ ID NO: 1888646
guaaaucaguggccaagua

SEQ ID NO: 2547745 - RNA, 19 nt, Artificial Sequence
  Description of Artificial Sequence: Synthetic oligonucleotide
  Antisense strand to SEQ ID NO: 2547744
uacuuggccacugauuuac

SEQ ID NO: 2547746 - RNA, 19 nt, Artificial Sequence
  Description of Artificial Sequence: Synthetic oligonucleotide
  Sense strand starting at position 3741 of SEQ ID NO: 1888646
guggcuugugaaggguaaa

SEQ ID NO: 2547747 - RNA, 19 nt, Artificial Sequence
  Description of Artificial Sequence: Synthetic oligonucleotide
  Antisense strand to SEQ ID NO: 2547746
uuuacccuucacaagccac

SEQ ID NO: 2547748 - RNA, 19 nt, Artificial Sequence
  Description of Artificial Sequence: Synthetic oligonucleotide
  Sense strand starting at position 868 of SEQ ID NO: 1888646
uguugugaagccuagccaa

SEQ ID NO: 2547749 - RNA, 19 nt, Artificial Sequence
  Description of Artificial Sequence: Synthetic oligonucleotide
  Antisense strand to SEQ ID NO: 2547748
uuggcuaggcuucacaaca

SEQ ID NO: 2547750 - RNA, 19 nt, Artificial Sequence
  Description of Artificial Sequence: Synthetic oligonucleotide
  Sense strand starting at position 3027 of SEQ ID NO: 1888649
uagcgauuccucucgagcu

SEQ ID NO: 2547751 - RNA, 19 nt, Artificial Sequence
  Description of Artificial Sequence: Synthetic oligonucleotide
  Antisense strand to SEQ ID NO: 2547750
agcucgagaggaaucgcua

SEQ ID NO: 2547752 - RNA, 19 nt, Artificial Sequence
  Description of Artificial Sequence: Synthetic oligonucleotide
  Sense strand starting at position 3173 of SEQ ID NO: 1888649
agguauuucugucuccuua

SEQ ID NO: 2547753 - RNA, 19 nt, Artificial Sequence
  Description of Artificial Sequence: Synthetic oligonucleotide
  Antisense strand to SEQ ID NO: 2547752
uaaggagacagaaauaccu

SEQ ID NO: 2547754 - RNA, 19 nt, Artificial Sequence
  Description of Artificial Sequence: Synthetic oligonucleotide
  Sense strand starting at position 801 of SEQ ID NO: 1888649
ccaagauuucuuuggcugu

SEQ ID NO: 2547755 - RNA, 19 nt, Artificial Sequence
  Description of Artificial Sequence: Synthetic oligonucleotide
  Antisense strand to SEQ ID NO: 2547754
acagccaaagaaaucuugg

SEQ ID NO: 2547756 - RNA, 19 nt, Artificial Sequence
  Description of Artificial Sequence: Synthetic oligonucleotide
  Sense strand starting at position 294 of SEQ ID NO: 1888649
ugccaaagucaguaaacaa

SEQ ID NO: 2547757 - RNA, 19 nt, Artificial Sequence
  Description of Artificial Sequence: Synthetic oligonucleotide
  Antisense strand to SEQ ID NO: 2547756
uuguuuacugacuuuggca

SEQ ID NO: 2547758 - RNA, 19 nt, Artificial Sequence
  Description of Artificial Sequence: Synthetic oligonucleotide
  Sense strand starting at position 3264 of SEQ ID NO: 1888649
uaaggugauguugacaagu

SEQ ID NO: 2547759 - RNA, 19 nt, Artificial Sequence
  Description of Artificial Sequence: Synthetic oligonucleotide
  Antisense strand to SEQ ID NO: 2547758
acuugucaacaucaccuua

SEQ ID NO: 2547760 - RNA, 19 nt, Artificial Sequence
  Description of Artificial Sequence: Synthetic oligonucleotide
  Sense strand starting at position 3112 of SEQ ID NO: 1888649
ugcguucccggguuauuca

SEQ ID NO: 2547761 - RNA, 19 nt, Artificial Sequence
  Description of Artificial Sequence: Synthetic oligonucleotide
  Antisense strand to SEQ ID NO: 2547760
ugaauaacccgggaacgca

SEQ ID NO: 2547762 - RNA, 19 nt, Artificial Sequence
  Description of Artificial Sequence: Synthetic oligonucleotide
  Sense strand starting at position 803 of SEQ ID NO: 1888649
aagauuucuuuggcugugu

SEQ ID NO: 2547763 - RNA, 19 nt, Artificial Sequence
  Description of Artificial Sequence: Synthetic oligonucleotide
  Antisense strand to SEQ ID NO: 2547762
acacagccaaagaaaucuu

SEQ ID NO: 2547764 - RNA, 19 nt, Artificial Sequence
  Description of Artificial Sequence: Synthetic oligonucleotide
  Sense strand starting at position 3175 of SEQ ID NO: 1888649
guauuucugucuccuuacu

SEQ ID NO: 2547765 - RNA, 19 nt, Artificial Sequence
  Description of Artificial Sequence: Synthetic oligonucleotide
  Antisense strand to SEQ ID NO: 2547764
aguaaggagacagaaauac

SEQ ID NO: 2547766 - RNA, 19 nt, Artificial Sequence
  Description of Artificial Sequence: Synthetic oligonucleotide
  Sense strand starting at position 259 of SEQ ID NO: 1888649
cauuuagguuucgcuuuaa

SEQ ID NO: 2547767 - RNA, 19 nt, Artificial Sequence
  Description of Artificial Sequence: Synthetic oligonucleotide
  Antisense strand to SEQ ID NO: 2547766
uuaaagcgaaaccuaaaug

SEQ ID NO: 2547768 - RNA, 19 nt, Artificial Sequence
  Description of Artificial Sequence: Synthetic oligonucleotide
  Sense strand starting at position 1009 of SEQ ID NO: 1888649
ggagaccucuuucugguaa

SEQ ID NO: 2547769 - RNA, 19 nt, Artificial Sequence
  Description of Artificial Sequence: Synthetic oligonucleotide
  Antisense strand to SEQ ID NO: 2547768
uuaccagaaagaggucucc

SEQ ID NO: 2547770 - RNA, 19 nt, Artificial Sequence
  Description of Artificial Sequence: Synthetic oligonucleotide
  Sense strand starting at position 3466 of SEQ ID NO: 1888649
uugauuguuugauugagac

SEQ ID NO: 2547771 - RNA, 19 nt, Artificial Sequence
  Description of Artificial Sequence: Synthetic oligonucleotide
  Antisense strand to SEQ ID NO: 2547770
gucucaaucaaacaaucaa

SEQ ID NO: 2547772 - RNA, 19 nt, Artificial Sequence
  Description of Artificial Sequence: Synthetic oligonucleotide
  Sense strand starting at position 1045 of SEQ ID NO: 1888649
uucgacuuugaaggugaaa

SEQ ID NO: 2547773 - RNA, 19 nt, Artificial Sequence
  Description of Artificial Sequence: Synthetic oligonucleotide
  Antisense strand to SEQ ID NO: 2547772
uuucaccuucaaagucgaa

SEQ ID NO: 2547774 - RNA, 19 nt, Artificial Sequence
  Description of Artificial Sequence: Synthetic oligonucleotide
  Sense strand starting at position 804 of SEQ ID NO: 1888649
agauuucuuuggcuguguu

SEQ ID NO: 2547775 - RNA, 19 nt, Artificial Sequence
  Description of Artificial Sequence: Synthetic oligonucleotide
  Antisense strand to SEQ ID NO: 2547774
aacacagccaaagaaaucu

SEQ ID NO: 2547776 - RNA, 19 nt, Artificial Sequence
  Description of Artificial Sequence: Synthetic oligonucleotide
  Sense strand starting at position 1041 of SEQ ID NO: 1888649
gagauucgacuuugaaggu

SEQ ID NO: 2547777 - RNA, 19 nt, Artificial Sequence
  Description of Artificial Sequence: Synthetic oligonucleotide
  Antisense strand to SEQ ID NO: 2547776
accuucaaagucgaaucuc

SEQ ID NO: 2547778 - RNA, 19 nt, Artificial Sequence
  Description of Artificial Sequence: Synthetic oligonucleotide
  Sense strand starting at position 3669 of SEQ ID NO: 1888649
agaccaaguugguuuccaa

SEQ ID NO: 2547779 - RNA, 19 nt, Artificial Sequence
  Description of Artificial Sequence: Synthetic oligonucleotide
  Antisense strand to SEQ ID NO: 2547778
uuggaaaccaacuuggucu

SEQ ID NO: 2547780 - RNA, 19 nt, Artificial Sequence
  Description of Artificial Sequence: Synthetic oligonucleotide
  Sense strand starting at position 2778 of SEQ ID NO: 1888649
gcuagaggucgggacucua

SEQ ID NO: 2547781 - RNA, 19 nt, Artificial Sequence
  Description of Artificial Sequence: Synthetic oligonucleotide
  Antisense strand to SEQ ID NO: 2547780
uagagucccgaccucuagc

SEQ ID NO: 2547782 - RNA, 19 nt, Artificial Sequence
  Description of Artificial Sequence: Synthetic oligonucleotide
  Sense strand starting at position 1576 of SEQ ID NO: 1888649
acggaucucacuggcugaa

SEQ ID NO: 2547783 - RNA, 19 nt, Artificial Sequence
  Description of Artificial Sequence: Synthetic oligonucleotide
  Antisense strand to SEQ ID NO: 2547782
uucagccagugagauccgu

SEQ ID NO: 2547784 - RNA, 19 nt, Artificial Sequence
  Description of Artificial Sequence: Synthetic oligonucleotide
  Sense strand starting at position 293 of SEQ ID NO: 1888649
uugccaaagucaguaaaca

SEQ ID NO: 2547785 - RNA, 19 nt, Artificial Sequence
  Description of Artificial Sequence: Synthetic oligonucleotide
  Antisense strand to SEQ ID NO: 2547784
uguuuacugacuuuggcaa

SEQ ID NO: 2547786 - RNA, 19 nt, Artificial Sequence
  Description of Artificial Sequence: Synthetic oligonucleotide
  Sense strand starting at position 3825 of SEQ ID NO: 1888649
aaauguauugucugaagug

SEQ ID NO: 2547787 - RNA, 19 nt, Artificial Sequence
  Description of Artificial Sequence: Synthetic oligonucleotide
  Antisense strand to SEQ ID NO: 2547786
cacuucagacaauacauuu

SEQ ID NO: 2547788 - RNA, 19 nt, Artificial Sequence
  Description of Artificial Sequence: Synthetic oligonucleotide
  Sense strand starting at position 3283 of SEQ ID NO: 1888649
ugagcuuuccaagggcaga

SEQ ID NO: 2547789 - RNA, 19 nt, Artificial Sequence
  Description of Artificial Sequence: Synthetic oligonucleotide
  Antisense strand to SEQ ID NO: 2547788
ucugcccuuggaaagcuca

SEQ ID NO: 2547790 - RNA, 19 nt, Artificial Sequence
  Description of Artificial Sequence: Synthetic oligonucleotide
  Sense strand starting at position 1575 of SEQ ID NO: 1888649
gacggaucucacuggcuga

SEQ ID NO: 2547791 - RNA, 19 nt, Artificial Sequence
  Description of Artificial Sequence: Synthetic oligonucleotide
  Antisense strand to SEQ ID NO: 2547790
ucagccagugagauccguc

SEQ ID NO: 2547792 - RNA, 19 nt, Artificial Sequence
  Description of Artificial Sequence: Synthetic oligonucleotide
  Sense strand starting at position 1625 of SEQ ID NO: 1888649
aucaaaugucagcgaacga

SEQ ID NO: 2547793 - RNA, 19 nt, Artificial Sequence
  Description of Artificial Sequence: Synthetic oligonucleotide
  Antisense strand to SEQ ID NO: 2547792
ucguucgcugacauuugau

SEQ ID NO: 2547794 - RNA, 19 nt, Artificial Sequence
  Description of Artificial Sequence: Synthetic oligonucleotide
  Sense strand starting at position 3840 of SEQ ID NO: 1888649
agugucaugcuuugaaaua

SEQ ID NO: 2547795 - RNA, 19 nt, Artificial Sequence
  Description of Artificial Sequence: Synthetic oligonucleotide
  Antisense strand to SEQ ID NO: 2547794
uauuucaaagcaugacacu

SEQ ID NO: 2547796 - RNA, 19 nt, Artificial Sequence
  Description of Artificial Sequence: Synthetic oligonucleotide
  Sense strand starting at position 3890 of SEQ ID NO: 1888649
ucugguuuguaauccaagu

SEQ ID NO: 2547797 - RNA, 19 nt, Artificial Sequence
  Description of Artificial Sequence: Synthetic oligonucleotide
  Antisense strand to SEQ ID NO: 2547796
acuuggauuacaaaccaga

SEQ ID NO: 2547798 - RNA, 19 nt, Artificial Sequence
  Description of Artificial Sequence: Synthetic oligonucleotide
  Sense strand starting at position 817 of SEQ ID NO: 1888649
uguguuaccuuagauuuga

SEQ ID NO: 2547799 - RNA, 19 nt, Artificial Sequence
  Description of Artificial Sequence: Synthetic oligonucleotide
  Antisense strand to SEQ ID NO: 2547798
ucaaaucuaagguaacaca

SEQ ID NO: 2547800 - RNA, 19 nt, Artificial Sequence
  Description of Artificial Sequence: Synthetic oligonucleotide
  Sense strand starting at position 812 of SEQ ID NO: 1888649
uuggcuguguuaccuuaga

SEQ ID NO: 2547801 - RNA, 19 nt, Artificial Sequence
  Description of Artificial Sequence: Synthetic oligonucleotide
  Antisense strand to SEQ ID NO: 2547800
ucuaagguaacacagccaa

SEQ ID NO: 2547802 - RNA, 19 nt, Artificial Sequence
  Description of Artificial Sequence: Synthetic oligonucleotide
  Sense strand starting at position 756 of SEQ ID NO: 1888649
gcaugaaaccuuggucgug

SEQ ID NO: 2547803 - RNA, 19 nt, Artificial Sequence
  Description of Artificial Sequence: Synthetic oligonucleotide
  Antisense strand to SEQ ID NO: 2547802
cacgaccaagguuucaugc

SEQ ID NO: 2547804 - RNA, 19 nt, Artificial Sequence
  Description of Artificial Sequence: Synthetic oligonucleotide
  Sense strand starting at position 191 of SEQ ID NO: 1888649
gugugucauucuuuaacuc

SEQ ID NO: 2547805 - RNA, 19 nt, Artificial Sequence
  Description of Artificial Sequence: Synthetic oligonucleotide
  Antisense strand to SEQ ID NO: 2547804
gaguuaaagaaugacacac

SEQ ID NO: 2547806 - RNA, 19 nt, Artificial Sequence
  Description of Artificial Sequence: Synthetic oligonucleotide
  Sense strand starting at position 187 of SEQ ID NO: 1888649
accugugugucauucuuua

SEQ ID NO: 2547807 - RNA, 19 nt, Artificial Sequence
  Description of Artificial Sequence: Synthetic oligonucleotide
  Antisense strand to SEQ ID NO: 2547806
uaaagaaugacacacaggu

SEQ ID NO: 2547808 - RNA, 19 nt, Artificial Sequence
  Description of Artificial Sequence: Synthetic oligonucleotide
  Sense strand starting at position 963 of SEQ ID NO: 1888649
auucuuuccuacgcgacau

SEQ ID NO: 2547809 - RNA, 19 nt, Artificial Sequence
  Description of Artificial Sequence: Synthetic oligonucleotide
  Antisense strand to SEQ ID NO: 2547808
augucgcguaggaaagaau

SEQ ID NO: 2547810 - RNA, 19 nt, Artificial Sequence
  Description of Artificial Sequence: Synthetic oligonucleotide
  Sense strand starting at position 3516 of SEQ ID NO: 1888649
agugguagcucacugugua

SEQ ID NO: 2547811 - RNA, 19 nt, Artificial Sequence
  Description of Artificial Sequence: Synthetic oligonucleotide
  Antisense strand to SEQ ID NO: 2547810
uacacagugagcuaccacu

SEQ ID NO: 2547812 - RNA, 19 nt, Artificial Sequence
  Description of Artificial Sequence: Synthetic oligonucleotide
  Sense strand starting at position 3113 of SEQ ID NO: 1888649
gcguucccggguuauucau

SEQ ID NO: 2547813 - RNA, 19 nt, Artificial Sequence
  Description of Artificial Sequence: Synthetic oligonucleotide
  Antisense strand to SEQ ID NO: 2547812
augaauaacccgggaacgc

SEQ ID NO: 2547814 - RNA, 19 nt, Artificial Sequence
  Description of Artificial Sequence: Synthetic oligonucleotide
  Sense strand starting at position 3464 of SEQ ID NO: 1888649
uauugauuguuugauugag

SEQ ID NO: 2547815 - RNA, 19 nt, Artificial Sequence
  Description of Artificial Sequence: Synthetic oligonucleotide
  Antisense strand to SEQ ID NO: 2547814
cucaaucaaacaaucaaua

SEQ ID NO: 2547816 - RNA, 19 nt, Artificial Sequence
  Description of Artificial Sequence: Synthetic oligonucleotide
  Sense strand starting at position 3266 of SEQ ID NO: 1888649
aggugauguugacaaguug

SEQ ID NO: 2547817 - RNA, 19 nt, Artificial Sequence
  Description of Artificial Sequence: Synthetic oligonucleotide
  Antisense strand to SEQ ID NO: 2547816
caacuugucaacaucaccu

SEQ ID NO: 2547818 - RNA, 19 nt, Artificial Sequence
  Description of Artificial Sequence: Synthetic oligonucleotide
  Sense strand starting at position 182 of SEQ ID NO: 1888649
gcccgaccugugugucauu

SEQ ID NO: 2547819 - RNA, 19 nt, Artificial Sequence
  Description of Artificial Sequence: Synthetic oligonucleotide
  Antisense strand to SEQ ID NO: 2547818
aaugacacacaggucgggc

SEQ ID NO: 2547820 - RNA, 19 nt, Artificial Sequence
  Description of Artificial Sequence: Synthetic oligonucleotide
  Sense strand starting at position 285 of SEQ ID NO: 1888649
auagaucuuugccaaaguc

SEQ ID NO: 2547821 - RNA, 19 nt, Artificial Sequence
  Description of Artificial Sequence: Synthetic oligonucleotide
  Antisense strand to SEQ ID NO: 2547820
gacuuuggcaaagaucuau

SEQ ID NO: 2547822 - RNA, 19 nt, Artificial Sequence
  Description of Artificial Sequence: Synthetic oligonucleotide
  Sense strand starting at position 258 of SEQ ID NO: 1888649
ucauuuagguuucgcuuua

SEQ ID NO: 2547823 - RNA, 19 nt, Artificial Sequence
  Description of Artificial Sequence: Synthetic oligonucleotide
  Antisense strand to SEQ ID NO: 2547822
uaaagcgaaaccuaaauga

SEQ ID NO: 2547824 - RNA, 19 nt, Artificial Sequence
  Description of Artificial Sequence: Synthetic oligonucleotide
  Sense strand starting at position 3841 of SEQ ID NO: 1888649
gugucaugcuuugaaauaa

SEQ ID NO: 2547825 - RNA, 19 nt, Artificial Sequence
  Description of Artificial Sequence: Synthetic oligonucleotide
  Antisense strand to SEQ ID NO: 2547824
uuauuucaaagcaugacac

SEQ ID NO: 2547826 - RNA, 19 nt, Artificial Sequence
  Description of Artificial Sequence: Synthetic oligonucleotide
  Sense strand starting at position 3763 of SEQ ID NO: 1888649
aggccuuguucugaauauu

SEQ ID NO: 2547827 - RNA, 19 nt, Artificial Sequence
  Description of Artificial Sequence: Synthetic oligonucleotide
  Antisense strand to SEQ ID NO: 2547826
aauauucagaacaaggccu

SEQ ID NO: 2547828 - RNA, 19 nt, Artificial Sequence
  Description of Artificial Sequence: Synthetic oligonucleotide
  Sense strand starting at position 317 of SEQ ID NO: 1888649
gaacaauccuugugucagg

SEQ ID NO: 2547829 - RNA, 19 nt, Artificial Sequence
  Description of Artificial Sequence: Synthetic oligonucleotide
  Antisense strand to SEQ ID NO: 2547828
ccugacacaaggauuguuc

SEQ ID NO: 2547830 - RNA, 19 nt, Artificial Sequence
  Description of Artificial Sequence: Synthetic oligonucleotide
  Sense strand starting at position 1078 of SEQ ID NO: 1888648
gugauaaacuuucugaaga

SEQ ID NO: 2547831 - RNA, 19 nt, Artificial Sequence
  Description of Artificial Sequence: Synthetic oligonucleotide
  Antisense strand to SEQ ID NO: 2547830
ucuucagaaaguuuaucac

SEQ ID NO: 2547832 - RNA, 19 nt, Artificial Sequence
  Description of Artificial Sequence: Synthetic oligonucleotide
  Sense strand starting at position 984 of SEQ ID NO: 1888648
ugaucauacugaguugaaa

SEQ ID NO: 2547833 - RNA, 19 nt, Artificial Sequence
  Description of Artificial Sequence: Synthetic oligonucleotide
  Antisense strand to SEQ ID NO: 2547832
uuucaacucaguaugauca

SEQ ID NO: 2547834 - RNA, 19 nt, Artificial Sequence
  Description of Artificial Sequence: Synthetic oligonucleotide
  Sense strand starting at position 3255 of SEQ ID NO: 1888648
uuaguuaagccagauagau

SEQ ID NO: 2547835 - RNA, 19 nt, Artificial Sequence
  Description of Artificial Sequence: Synthetic oligonucleotide
  Antisense strand to SEQ ID NO: 2547834
aucuaucuggcuuaacuaa

SEQ ID NO: 2547836 - RNA, 19 nt, Artificial Sequence
  Description of Artificial Sequence: Synthetic oligonucleotide
  Sense strand starting at position 3756 of SEQ ID NO: 1888648
aucucuggguaauuacaaa

SEQ ID NO: 2547837 - RNA, 19 nt, Artificial Sequence
  Description of Artificial Sequence: Synthetic oligonucleotide
  Antisense strand to SEQ ID NO: 2547836
uuuguaauuacccagagau

SEQ ID NO: 2547838 - RNA, 19 nt, Artificial Sequence
  Description of Artificial Sequence: Synthetic oligonucleotide
  Sense strand starting at position 695 of SEQ ID NO: 1888648
uucugagguacagggauua

SEQ ID NO: 2547839 - RNA, 19 nt, Artificial Sequence
  Description of Artificial Sequence: Synthetic oligonucleotide
  Antisense strand to SEQ ID NO: 2547838
uaaucccuguaccucagaa

SEQ ID NO: 2547840 - RNA, 19 nt, Artificial Sequence
  Description of Artificial Sequence: Synthetic oligonucleotide
  Sense strand starting at position 1738 of SEQ ID NO: 1888648
uagggauaggcccaauugu

SEQ ID NO: 2547841 - RNA, 19 nt, Artificial Sequence
  Description of Artificial Sequence: Synthetic oligonucleotide
  Antisense strand to SEQ ID NO: 2547840
acaauugggccuaucccua

SEQ ID NO: 2547842 - RNA, 19 nt, Artificial Sequence
  Description of Artificial Sequence: Synthetic oligonucleotide
  Sense strand starting at position 1067 of SEQ ID NO: 1888648
acaugugaccagugauaaa

SEQ ID NO: 2547843 - RNA, 19 nt, Artificial Sequence
  Description of Artificial Sequence: Synthetic oligonucleotide
  Antisense strand to SEQ ID NO: 2547842
uuuaucacuggucacaugu

SEQ ID NO: 2547844 - RNA, 19 nt, Artificial Sequence
  Description of Artificial Sequence: Synthetic oligonucleotide
  Sense strand starting at position 328 of SEQ ID NO: 1888648
agggcaagaugucuaugaa

SEQ ID NO: 2547845 - RNA, 19 nt, Artificial Sequence
  Description of Artificial Sequence: Synthetic oligonucleotide
  Antisense strand to SEQ ID NO: 2547844
uucauagacaucuugcccu

SEQ ID NO: 2547846 - RNA, 19 nt, Artificial Sequence
  Description of Artificial Sequence: Synthetic oligonucleotide
  Sense strand starting at position 1855 of SEQ ID NO: 1888648
ugaucaaggaucugcagau

SEQ ID NO: 2547847 - RNA, 19 nt, Artificial Sequence
  Description of Artificial Sequence: Synthetic oligonucleotide
  Antisense strand to SEQ ID NO: 2547846
aucugcagauccuugauca

SEQ ID NO: 2547848 - RNA, 19 nt, Artificial Sequence
  Description of Artificial Sequence: Synthetic oligonucleotide
  Sense strand starting at position 348 of SEQ ID NO: 1888648
ggcccugagagccaauaua

SEQ ID NO: 2547849 - RNA, 19 nt, Artificial Sequence
  Description of Artificial Sequence: Synthetic oligonucleotide
  Antisense strand to SEQ ID NO: 2547848
uauauuggcucucagggcc

SEQ ID NO: 2547850 - RNA, 19 nt, Artificial Sequence
  Description of Artificial Sequence: Synthetic oligonucleotide
  Sense strand starting at position 1268 of SEQ ID NO: 1888648
ugugauaagcuguaaugaa

SEQ ID NO: 2547851 - RNA, 19 nt, Artificial Sequence
  Description of Artificial Sequence: Synthetic oligonucleotide
  Antisense strand to SEQ ID NO: 2547850
uucauuacagcuuaucaca

SEQ ID NO: 2547852 - RNA, 19 nt, Artificial Sequence
  Description of Artificial Sequence: Synthetic oligonucleotide
  Sense strand starting at position 331 of SEQ ID NO: 1888648
gcaagaugucuaugaaggg

SEQ ID NO: 2547853 - RNA, 19 nt, Artificial Sequence
  Description of Artificial Sequence: Synthetic oligonucleotide
  Antisense strand to SEQ ID NO: 2547852
cccuucauagacaucuugc

SEQ ID NO: 2547854 - RNA, 19 nt, Artificial Sequence
  Description of Artificial Sequence: Synthetic oligonucleotide
  Sense strand starting at position 1808 of SEQ ID NO: 1888648
uuggaaauguuaccuuauu

SEQ ID NO: 2547855 - RNA, 19 nt, Artificial Sequence
  Description of Artificial Sequence: Synthetic oligonucleotide
  Antisense strand to SEQ ID NO: 2547854
aauaagguaacauuuccaa

SEQ ID NO: 2547856 - RNA, 19 nt, Artificial Sequence
  Description of Artificial Sequence: Synthetic oligonucleotide
  Sense strand starting at position 424 of SEQ ID NO: 1888648
uagaccuaguggcuaaaua

SEQ ID NO: 2547857 - RNA, 19 nt, Artificial Sequence
  Description of Artificial Sequence: Synthetic oligonucleotide
  Antisense strand to SEQ ID NO: 2547856
uauuuagccacuaggucua

SEQ ID NO: 2547858 - RNA, 19 nt, Artificial Sequence
  Description of Artificial Sequence: Synthetic oligonucleotide
  Sense strand starting at position 1052 of SEQ ID NO: 1888648
cccguugugggauaaacau

SEQ ID NO: 2547859 - RNA, 19 nt, Artificial Sequence
  Description of Artificial Sequence: Synthetic oligonucleotide
  Antisense strand to SEQ ID NO: 2547858
auguuuaucccacaacggg

SEQ ID NO: 2547860 - RNA, 19 nt, Artificial Sequence
  Description of Artificial Sequence: Synthetic oligonucleotide
  Sense strand starting at position 49 of SEQ ID NO: 1888648
ggagcacacugucuaauga

SEQ ID NO: 2547861 - RNA, 19 nt, Artificial Sequence
  Description of Artificial Sequence: Synthetic oligonucleotide
  Antisense strand to SEQ ID NO: 2547860
ucauuagacagugugcucc

SEQ ID NO: 2547862 - RNA, 19 nt, Artificial Sequence
  Description of Artificial Sequence: Synthetic oligonucleotide
  Sense strand starting at position 3775 of SEQ ID NO: 1888648
aguuuagaccugcaaaguu

SEQ ID NO: 2547863 - RNA, 19 nt, Artificial Sequence
  Description of Artificial Sequence: Synthetic oligonucleotide
  Antisense strand to SEQ ID NO: 2547862
aacuuugcaggucuaaacu

SEQ ID NO: 2547864 - RNA, 19 nt, Artificial Sequence
  Description of Artificial Sequence: Synthetic oligonucleotide
  Sense strand starting at position 3251 of SEQ ID NO: 1888648
aucauuaguuaagccagau

SEQ ID NO: 2547865 - RNA, 19 nt, Artificial Sequence
  Description of Artificial Sequence: Synthetic oligonucleotide
  Antisense strand to SEQ ID NO: 2547864
aucuggcuuaacuaaugau

SEQ ID NO: 2547866 - RNA, 19 nt, Artificial Sequence
  Description of Artificial Sequence: Synthetic oligonucleotide
  Sense strand starting at position 1049 of SEQ ID NO: 1888648
aaacccguugugggauaaa

SEQ ID NO: 2547867 - RNA, 19 nt, Artificial Sequence
  Description of Artificial Sequence: Synthetic oligonucleotide
  Antisense strand to SEQ ID NO: 2547866
uuuaucccacaacggguuu

SEQ ID NO: 2547868 - RNA, 19 nt, Artificial Sequence
  Description of Artificial Sequence: Synthetic oligonucleotide
  Sense strand starting at position 3810 of SEQ ID NO: 1888648
ccaguaaacucaucuggua

SEQ ID NO: 2547869 - RNA, 19 nt, Artificial Sequence
  Description of Artificial Sequence: Synthetic oligonucleotide
  Antisense strand to SEQ ID NO: 2547868
uaccagaugaguuuacugg

SEQ ID NO: 2547870 - RNA, 19 nt, Artificial Sequence
  Description of Artificial Sequence: Synthetic oligonucleotide
  Sense strand starting at position 1169 of SEQ ID NO: 1888648
uugaaauucuguuucuaug

SEQ ID NO: 2547871 - RNA, 19 nt, Artificial Sequence
  Description of Artificial Sequence: Synthetic oligonucleotide
  Antisense strand to SEQ ID NO: 2547870
cauagaaacagaauuucaa

SEQ ID NO: 2547872 - RNA, 19 nt, Artificial Sequence
  Description of Artificial Sequence: Synthetic oligonucleotide
  Sense strand starting at position 1155 of SEQ ID NO: 1888648
cucagcauaccguauugaa

SEQ ID NO: 2547873 - RNA, 19 nt, Artificial Sequence
  Description of Artificial Sequence: Synthetic oligonucleotide
  Antisense strand to SEQ ID NO: 2547872
uucaauacgguaugcugag

SEQ ID NO: 2547874 - RNA, 19 nt, Artificial Sequence
  Description of Artificial Sequence: Synthetic oligonucleotide
  Sense strand starting at position 1749 of SEQ ID NO: 1888648
ccaauuguaguagguuaaa

SEQ ID NO: 2547875 - RNA, 19 nt, Artificial Sequence
  Description of Artificial Sequence: Synthetic oligonucleotide
  Antisense strand to SEQ ID NO: 2547874
uuuaaccuacuacaauugg

SEQ ID NO: 2547876 - RNA, 19 nt, Artificial Sequence
  Description of Artificial Sequence: Synthetic oligonucleotide
  Sense strand starting at position 3922 of SEQ ID NO: 1888648
guuccaugaaugugaguaa

SEQ ID NO: 2547877 - RNA, 19 nt, Artificial Sequence
  Description of Artificial Sequence: Synthetic oligonucleotide
  Antisense strand to SEQ ID NO: 2547876
uuacucacauucauggaac

SEQ ID NO: 2547878 - RNA, 19 nt, Artificial Sequence
  Description of Artificial Sequence: Synthetic oligonucleotide
  Sense strand starting at position 1841 of SEQ ID NO: 1888648
cugcaaaugugacuugauc

SEQ ID NO: 2547879 - RNA, 19 nt, Artificial Sequence
  Description of Artificial Sequence: Synthetic oligonucleotide
  Antisense strand to SEQ ID NO: 2547878
gaucaagucacauuugcag

SEQ ID NO: 2547880 - RNA, 19 nt, Artificial Sequence
  Description of Artificial Sequence: Synthetic oligonucleotide
  Sense strand starting at position 3799 of SEQ ID NO: 1888648
ccagaucgcagccaguaaa

SEQ ID NO: 2547881 - RNA, 19 nt, Artificial Sequence
  Description of Artificial Sequence: Synthetic oligonucleotide
  Antisense strand to SEQ ID NO: 2547880
uuuacuggcugcgaucugg

SEQ ID NO: 2547882 - RNA, 19 nt, Artificial Sequence
  Description of Artificial Sequence: Synthetic oligonucleotide
  Sense strand starting at position 3749 of SEQ ID NO: 1888648
caagcucaucucuggguaa

SEQ ID NO: 2547883 - RNA, 19 nt, Artificial Sequence
  Description of Artificial Sequence: Synthetic oligonucleotide
  Antisense strand to SEQ ID NO: 2547882
uuacccagagaugagcuug

SEQ ID NO: 2547884 - RNA, 19 nt, Artificial Sequence
  Description of Artificial Sequence: Synthetic oligonucleotide
  Sense strand starting at position 3812 of SEQ ID NO: 1888648
aguaaacucaucugguagu

SEQ ID NO: 2547885 - RNA, 19 nt, Artificial Sequence
  Description of Artificial Sequence: Synthetic oligonucleotide
  Antisense strand to SEQ ID NO: 2547884
acuaccagaugaguuuacu

SEQ ID NO: 2547886 - RNA, 19 nt, Artificial Sequence
  Description of Artificial Sequence: Synthetic oligonucleotide
  Sense strand starting at position 1134 of SEQ ID NO: 1888648
gugcgugucuguauuacag

SEQ ID NO: 2547887 - RNA, 19 nt, Artificial Sequence
  Description of Artificial Sequence: Synthetic oligonucleotide
  Antisense strand to SEQ ID NO: 2547886
cuguaauacagacacgcac

SEQ ID NO: 2547888 - RNA, 19 nt, Artificial Sequence
  Description of Artificial Sequence: Synthetic oligonucleotide
  Sense strand starting at position 1471 of SEQ ID NO: 1888648
ccgguggugccagaggauu

SEQ ID NO: 2547889 - RNA, 19 nt, Artificial Sequence
  Description of Artificial Sequence: Synthetic oligonucleotide
  Antisense strand to SEQ ID NO: 2547888
aauccucuggcaccaccgg

SEQ ID NO: 2547890 - RNA, 19 nt, Artificial Sequence
  Description of Artificial Sequence: Synthetic oligonucleotide
  Sense strand starting at position 3752 of SEQ ID NO: 1888648
gcucaucucuggguaauua

SEQ ID NO: 2547891 - RNA, 19 nt, Artificial Sequence
  Description of Artificial Sequence: Synthetic oligonucleotide
  Antisense strand to SEQ ID NO: 2547890
uaauuacccagagaugagc

SEQ ID NO: 2547892 - RNA, 19 nt, Artificial Sequence
  Description of Artificial Sequence: Synthetic oligonucleotide
  Sense strand starting at position 3649 of SEQ ID NO: 1888648
ucaccaguugaguggguua

SEQ ID NO: 2547893 - RNA, 19 nt, Artificial Sequence
  Description of Artificial Sequence: Synthetic oligonucleotide
  Antisense strand to SEQ ID NO: 2547892
uaacccacucaacugguga

SEQ ID NO: 2547894 - RNA, 19 nt, Artificial Sequence
  Description of Artificial Sequence: Synthetic oligonucleotide
  Sense strand starting at position 2601 of SEQ ID NO: 1888648
ugaugaugugcuugugaag

SEQ ID NO: 2547895 - RNA, 19 nt, Artificial Sequence
  Description of Artificial Sequence: Synthetic oligonucleotide
  Antisense strand to SEQ ID NO: 2547894
cuucacaagcacaucauca

SEQ ID NO: 2547896 - RNA, 19 nt, Artificial Sequence
  Description of Artificial Sequence: Synthetic oligonucleotide
  Sense strand starting at position 3751 of SEQ ID NO: 1888648
agcucaucucuggguaauu

SEQ ID NO: 2547897 - RNA, 19 nt, Artificial Sequence
  Description of Artificial Sequence: Synthetic oligonucleotide
  Antisense strand to SEQ ID NO: 2547896
aauuacccagagaugagcu

SEQ ID NO: 2547898 - RNA, 19 nt, Artificial Sequence
  Description of Artificial Sequence: Synthetic oligonucleotide
  Sense strand starting at position 3430 of SEQ ID NO: 1888648
gggagaaucuuuccucgcu

SEQ ID NO: 2547899 - RNA, 19 nt, Artificial Sequence
  Description of Artificial Sequence: Synthetic oligonucleotide
  Antisense strand to SEQ ID NO: 2547898
agcgaggaaagauucuccc

SEQ ID NO: 2547900 - RNA, 19 nt, Artificial Sequence
  Description of Artificial Sequence: Synthetic oligonucleotide
  Sense strand starting at position 394 of SEQ ID NO: 1888648
uaguacuagggcugucaca

SEQ ID NO: 2547901 - RNA, 19 nt, Artificial Sequence
  Description of Artificial Sequence: Synthetic oligonucleotide
  Antisense strand to SEQ ID NO: 2547900
ugugacagcccuaguacua

SEQ ID NO: 2547902 - RNA, 19 nt, Artificial Sequence
  Description of Artificial Sequence: Synthetic oligonucleotide
  Sense strand starting at position 3431 of SEQ ID NO: 1888648
ggagaaucuuuccucgcuu

SEQ ID NO: 2547903 - RNA, 19 nt, Artificial Sequence
  Description of Artificial Sequence: Synthetic oligonucleotide
  Antisense strand to SEQ ID NO: 2547902
aagcgaggaaagauucucc

SEQ ID NO: 2547904 - RNA, 19 nt, Artificial Sequence
  Description of Artificial Sequence: Synthetic oligonucleotide
  Sense strand starting at position 978 of SEQ ID NO: 1888648
cuagaaugaucauacugag

SEQ ID NO: 2547905 - RNA, 19 nt, Artificial Sequence
  Description of Artificial Sequence: Synthetic oligonucleotide
  Antisense strand to SEQ ID NO: 2547904
cucaguaugaucauucuag

SEQ ID NO: 2547906 - RNA, 19 nt, Artificial Sequence
  Description of Artificial Sequence: Synthetic oligonucleotide
  Sense strand starting at position 206 of SEQ ID NO: 1888648
agagaauccucaggaagga

SEQ ID NO: 2547907 - RNA, 19 nt, Artificial Sequence
  Description of Artificial Sequence: Synthetic oligonucleotide
  Antisense strand to SEQ ID NO: 2547906
uccuuccugaggauucucu

SEQ ID NO: 2547908 - RNA, 19 nt, Artificial Sequence
  Description of Artificial Sequence: Synthetic oligonucleotide
  Sense strand starting at position 2696 of SEQ ID NO: 1888648
cuggcauuccauuggcuau

SEQ ID NO: 2547909 - RNA, 19 nt, Artificial Sequence
  Description of Artificial Sequence: Synthetic oligonucleotide
  Antisense strand to SEQ ID NO: 2547908
auagccaauggaaugccag

SEQ ID NO: 2547910 - RNA, 19 nt, Artificial Sequence
  Description of Artificial Sequence: Synthetic oligonucleotide
  Sense strand starting at position 3253 of SEQ ID NO: 1888650
aguagaaugccauaacauc

SEQ ID NO: 2547911 - RNA, 19 nt, Artificial Sequence
  Description of Artificial Sequence: Synthetic oligonucleotide
  Antisense strand to SEQ ID NO: 2547910
gauguuauggcauucuacu

SEQ ID NO: 2547912 - RNA, 19 nt, Artificial Sequence
  Description of Artificial Sequence: Synthetic oligonucleotide
  Sense strand starting at position 2524 of SEQ ID NO: 1888650
cugaucuuugaaugauaau

SEQ ID NO: 2547913 - RNA, 19 nt, Artificial Sequence
  Description of Artificial Sequence: Synthetic oligonucleotide
  Antisense strand to SEQ ID NO: 2547912
auuaucauucaaagaucag

SEQ ID NO: 2547914 - RNA, 19 nt, Artificial Sequence
  Description of Artificial Sequence: Synthetic oligonucleotide
  Sense strand starting at position 3503 of SEQ ID NO: 1888650
cggauaugagcccaauaug

SEQ ID NO: 2547915 - RNA, 19 nt, Artificial Sequence
  Description of Artificial Sequence: Synthetic oligonucleotide
  Antisense strand to SEQ ID NO: 2547914
cauauugggcucauauccg

SEQ ID NO: 2547916 - RNA, 19 nt, Artificial Sequence
  Description of Artificial Sequence: Synthetic oligonucleotide
  Sense strand starting at position 3966 of SEQ ID NO: 1888650
auugacuucggagacaguu

SEQ ID NO: 2547917 - RNA, 19 nt, Artificial Sequence
  Description of Artificial Sequence: Synthetic oligonucleotide
  Antisense strand to SEQ ID NO: 2547916
aacugucuccgaagucaau

SEQ ID NO: 2547918 - RNA, 19 nt, Artificial Sequence
  Description of Artificial Sequence: Synthetic oligonucleotide
  Sense strand starting at position 2635 of SEQ ID NO: 1888650
ugaauuccgaccugggaga

SEQ ID NO: 2547919 - RNA, 19 nt, Artificial Sequence
  Description of Artificial Sequence: Synthetic oligonucleotide
  Antisense strand to SEQ ID NO: 2547918
ucucccaggucggaauuca

SEQ ID NO: 2547920 - RNA, 19 nt, Artificial Sequence
  Description of Artificial Sequence: Synthetic oligonucleotide
  Sense strand starting at position 3506 of SEQ ID NO: 1888650
auaugagcccaauauguua

SEQ ID NO: 2547921 - RNA, 19 nt, Artificial Sequence
  Description of Artificial Sequence: Synthetic oligonucleotide
  Antisense strand to SEQ ID NO: 2547920
uaacauauugggcucauau

SEQ ID NO: 2547922 - RNA, 19 nt, Artificial Sequence
  Description of Artificial Sequence: Synthetic oligonucleotide
  Sense strand starting at position 1110 of SEQ ID NO: 1888650
uguguguugggagaaugga

SEQ ID NO: 2547923 - RNA, 19 nt, Artificial Sequence
  Description of Artificial Sequence: Synthetic oligonucleotide
  Antisense strand to SEQ ID NO: 2547922
uccauucucccaacacaca

SEQ ID NO: 2547924 - RNA, 19 nt, Artificial Sequence
  Description of Artificial Sequence: Synthetic oligonucleotide
  Sense strand starting at position 3248 of SEQ ID NO: 1888650
gaugaaguagaaugccaua

SEQ ID NO: 2547925 - RNA, 19 nt, Artificial Sequence
  Description of Artificial Sequence: Synthetic oligonucleotide
  Antisense strand to SEQ ID NO: 2547924
uauggcauucuacuucauc

SEQ ID NO: 2547926 - RNA, 19 nt, Artificial Sequence
  Description of Artificial Sequence: Synthetic oligonucleotide
  Sense strand starting at position 2255 of SEQ ID NO: 1888650
ccggaaugggaguggaauu

SEQ ID NO: 2547927 - RNA, 19 nt, Artificial Sequence
  Description of Artificial Sequence: Synthetic oligonucleotide
  Antisense strand to SEQ ID NO: 2547926
aauuccacucccauuccgg

SEQ ID NO: 2547928 - RNA, 19 nt, Artificial Sequence
  Description of Artificial Sequence: Synthetic oligonucleotide
  Sense strand starting at position 2979 of SEQ ID NO: 1888650
uauucugaccuagguggaa

SEQ ID NO: 2547929 - RNA, 19 nt, Artificial Sequence
  Description of Artificial Sequence: Synthetic oligonucleotide
  Antisense strand to SEQ ID NO: 2547928
uuccaccuaggucagaaua

SEQ ID NO: 2547930 - RNA, 19 nt, Artificial Sequence
  Description of Artificial Sequence: Synthetic oligonucleotide
  Sense strand starting at position 3018 of SEQ ID NO: 1888650
gucuuugugaaagaaguua

SEQ ID NO: 2547931 - RNA, 19 nt, Artificial Sequence
  Description of Artificial Sequence: Synthetic oligonucleotide
  Antisense strand to SEQ ID NO: 2547930
uaacuucuuucacaaagac

SEQ ID NO: 2547932 - RNA, 19 nt, Artificial Sequence
  Description of Artificial Sequence: Synthetic oligonucleotide
  Sense strand starting at position 1447 of SEQ ID NO: 1888650
gaggguugggccugaagga

SEQ ID NO: 2547933 - RNA, 19 nt, Artificial Sequence
  Description of Artificial Sequence: Synthetic oligonucleotide
  Antisense strand to SEQ ID NO: 2547932
uccuucaggcccaacccuc

SEQ ID NO: 2547934 - RNA, 19 nt, Artificial Sequence
  Description of Artificial Sequence: Synthetic oligonucleotide
  Sense strand starting at position 2520 of SEQ ID NO: 1888650
caggcugaucuuugaauga

SEQ ID NO: 2547935 - RNA, 19 nt, Artificial Sequence
  Description of Artificial Sequence: Synthetic oligonucleotide
  Antisense strand to SEQ ID NO: 2547934
ucauucaaagaucagccug

SEQ ID NO: 2547936 - RNA, 19 nt, Artificial Sequence
  Description of Artificial Sequence: Synthetic oligonucleotide
  Sense strand starting at position 2173 of SEQ ID NO: 1888650
ggaaaguggugguuugaag

SEQ ID NO: 2547937 - RNA, 19 nt, Artificial Sequence
  Description of Artificial Sequence: Synthetic oligonucleotide
  Antisense strand to SEQ ID NO: 2547936
cuucaaaccaccacuuucc

SEQ ID NO: 2547938 - RNA, 19 nt, Artificial Sequence
  Description of Artificial Sequence: Synthetic oligonucleotide
  Sense strand starting at position 2555 of SEQ ID NO: 1888650
uuaacagccucagugaaga

SEQ ID NO: 2547939 - RNA, 19 nt, Artificial Sequence
  Description of Artificial Sequence: Synthetic oligonucleotide
  Antisense strand to SEQ ID NO: 2547938
ucuucacugaggcuguuaa

SEQ ID NO: 2547940 - RNA, 19 nt, Artificial Sequence
  Description of Artificial Sequence: Synthetic oligonucleotide
  Sense strand starting at position 3975 of SEQ ID NO: 1888650
ggagacaguuugguaguaa

SEQ ID NO: 2547941 - RNA, 19 nt, Artificial Sequence
  Description of Artificial Sequence: Synthetic oligonucleotide
  Antisense strand to SEQ ID NO: 2547940
uuacuaccaaacugucucc

SEQ ID NO: 2547942 - RNA, 19 nt, Artificial Sequence
  Description of Artificial Sequence: Synthetic oligonucleotide
  Sense strand starting at position 1089 of SEQ ID NO: 1888650
accugacgcucuguuauuu

SEQ ID NO: 2547943 - RNA, 19 nt, Artificial Sequence
  Description of Artificial Sequence: Synthetic oligonucleotide
  Antisense strand to SEQ ID NO: 2547942
aaauaacagagcgucaggu

SEQ ID NO: 2547944 - RNA, 19 nt, Artificial Sequence
  Description of Artificial Sequence: Synthetic oligonucleotide
  Sense strand starting at position 2969 of SEQ ID NO: 1888650
gaaaguguauuauucugac

SEQ ID NO: 2547945 - RNA, 19 nt, Artificial Sequence
  Description of Artificial Sequence: Synthetic oligonucleotide
  Antisense strand to SEQ ID NO: 2547944
gucagaauaauacacuuuc

SEQ ID NO: 2547946 - RNA, 19 nt, Artificial Sequence
  Description of Artificial Sequence: Synthetic oligonucleotide
  Sense strand starting at position 2739 of SEQ ID NO: 1888650
ugaggacucccgggucaga

SEQ ID NO: 2547947 - RNA, 19 nt, Artificial Sequence
  Description of Artificial Sequence: Synthetic oligonucleotide
  Antisense strand to SEQ ID NO: 2547946
ucugacccgggaguccuca

SEQ ID NO: 2547948 - RNA, 19 nt, Artificial Sequence
  Description of Artificial Sequence: Synthetic oligonucleotide
  Sense strand starting at position 2553 of SEQ ID NO: 1888650
uguuaacagccucagugaa

SEQ ID NO: 2547949 - RNA, 19 nt, Artificial Sequence
  Description of Artificial Sequence: Synthetic oligonucleotide
  Antisense strand to SEQ ID NO: 2547948
uucacugaggcuguuaaca

SEQ ID NO: 2547950 - RNA, 19 nt, Artificial Sequence
  Description of Artificial Sequence: Synthetic oligonucleotide
  Sense strand starting at position 3952 of SEQ ID NO: 1888650
gagugcuuauaauuauuga

SEQ ID NO: 2547951 - RNA, 19 nt, Artificial Sequence
  Description of Artificial Sequence: Synthetic oligonucleotide
  Antisense strand to SEQ ID NO: 2547950
ucaauaauuauaagcacuc

SEQ ID NO: 2547952 - RNA, 19 nt, Artificial Sequence
  Description of Artificial Sequence: Synthetic oligonucleotide
  Sense strand starting at position 2463 of SEQ ID NO: 1888650
auuagaugucucugguaac

SEQ ID NO: 2547953 - RNA, 19 nt, Artificial Sequence
  Description of Artificial Sequence: Synthetic oligonucleotide
  Antisense strand to SEQ ID NO: 2547952
guuaccagagacaucuaau

SEQ ID NO: 2547954 - RNA, 19 nt, Artificial Sequence
  Description of Artificial Sequence: Synthetic oligonucleotide
  Sense strand starting at position 2975 of SEQ ID NO: 1888650
guauuauucugaccuaggu

SEQ ID NO: 2547955 - RNA, 19 nt, Artificial Sequence
  Description of Artificial Sequence: Synthetic oligonucleotide
  Antisense strand to SEQ ID NO: 2547954
accuaggucagaauaauac

SEQ ID NO: 2547956 - RNA, 19 nt, Artificial Sequence
  Description of Artificial Sequence: Synthetic oligonucleotide
  Sense strand starting at position 1100 of SEQ ID NO: 1888650
uguuauuuccuguguguug

SEQ ID NO: 2547957 - RNA, 19 nt, Artificial Sequence
  Description of Artificial Sequence: Synthetic oligonucleotide
  Antisense strand to SEQ ID NO: 2547956
caacacacaggaaauaaca

SEQ ID NO: 2547958 - RNA, 19 nt, Artificial Sequence
  Description of Artificial Sequence: Synthetic oligonucleotide
  Sense strand starting at position 226 of SEQ ID NO: 1888650
acauauuaguugcucuaca

SEQ ID NO: 2547959 - RNA, 19 nt, Artificial Sequence
  Description of Artificial Sequence: Synthetic oligonucleotide
  Antisense strand to SEQ ID NO: 2547958
uguagagcaacuaauaugu

SEQ ID NO: 2547960 - RNA, 19 nt, Artificial Sequence
  Description of Artificial Sequence: Synthetic oligonucleotide
  Sense strand starting at position 3261 of SEQ ID NO: 1888650
gccauaacaucuccuguga

SEQ ID NO: 2547961 - RNA, 19 nt, Artificial Sequence
  Description of Artificial Sequence: Synthetic oligonucleotide
  Antisense strand to SEQ ID NO: 2547960
ucacaggagauguuauggc

SEQ ID NO: 2547962 - RNA, 19 nt, Artificial Sequence
  Description of Artificial Sequence: Synthetic oligonucleotide
  Sense strand starting at position 3282 of SEQ ID NO: 1888650
ugguaugcuaguggaauua

SEQ ID NO: 2547963 - RNA, 19 nt, Artificial Sequence
  Description of Artificial Sequence: Synthetic oligonucleotide
  Antisense strand to SEQ ID NO: 2547962
uaauuccacuagcauacca

SEQ ID NO: 2547964 - RNA, 19 nt, Artificial Sequence
  Description of Artificial Sequence: Synthetic oligonucleotide
  Sense strand starting at position 2345 of SEQ ID NO: 1888650
ugugguugcggauaccaau

SEQ ID NO: 2547965 - RNA, 19 nt, Artificial Sequence
  Description of Artificial Sequence: Synthetic oligonucleotide
  Antisense strand to SEQ ID NO: 2547964
auugguauccgcaaccaca

SEQ ID NO: 2547966 - RNA, 19 nt, Artificial Sequence
  Description of Artificial Sequence: Synthetic oligonucleotide
  Sense strand starting at position 2704 of SEQ ID NO: 1888650
aguuacuuucccugguaau

SEQ ID NO: 2547967 - RNA, 19 nt, Artificial Sequence
  Description of Artificial Sequence: Synthetic oligonucleotide
  Antisense strand to SEQ ID NO: 2547966
auuaccagggaaaguaacu

SEQ ID NO: 2547968 - RNA, 19 nt, Artificial Sequence
  Description of Artificial Sequence: Synthetic oligonucleotide
  Sense strand starting at position 2705 of SEQ ID NO: 1888650
guuacuuucccugguaauu

SEQ ID NO: 2547969 - RNA, 19 nt, Artificial Sequence
  Description of Artificial Sequence: Synthetic oligonucleotide
  Antisense strand to SEQ ID NO: 2547968
aauuaccagggaaaguaac

SEQ ID NO: 2547970 - RNA, 19 nt, Artificial Sequence
  Description of Artificial Sequence: Synthetic oligonucleotide
  Sense strand starting at position 2315 of SEQ ID NO: 1888650
cugcuugugggugggauua

SEQ ID NO: 2547971 - RNA, 19 nt, Artificial Sequence
  Description of Artificial Sequence: Synthetic oligonucleotide
  Antisense strand to SEQ ID NO: 2547970
uaaucccacccacaagcag

SEQ ID NO: 2547972 - RNA, 19 nt, Artificial Sequence
  Description of Artificial Sequence: Synthetic oligonucleotide
  Sense strand starting at position 2325 of SEQ ID NO: 1888650
gugggauuauugucuguuu

SEQ ID NO: 2547973 - RNA, 19 nt, Artificial Sequence
  Description of Artificial Sequence: Synthetic oligonucleotide
  Antisense strand to SEQ ID NO: 2547972
aaacagacaauaaucccac

SEQ ID NO: 2547974 - RNA, 19 nt, Artificial Sequence
  Description of Artificial Sequence: Synthetic oligonucleotide
  Sense strand starting at position 3275 of SEQ ID NO: 1888650
ugugaaaugguaugcuagu

SEQ ID NO: 2547975 - RNA, 19 nt, Artificial Sequence
  Description of Artificial Sequence: Synthetic oligonucleotide
  Antisense strand to SEQ ID NO: 2547974
acuagcauaccauuucaca

SEQ ID NO: 2547976 - RNA, 19 nt, Artificial Sequence
  Description of Artificial Sequence: Synthetic oligonucleotide
  Sense strand starting at position 351 of SEQ ID NO: 1888650
ccgccuuaucggcaaauua

SEQ ID NO: 2547977 - RNA, 19 nt, Artificial Sequence
  Description of Artificial Sequence: Synthetic oligonucleotide
  Antisense strand to SEQ ID NO: 2547976
uaauuugccgauaaggcgg

SEQ ID NO: 2547978 - RNA, 19 nt, Artificial Sequence
  Description of Artificial Sequence: Synthetic oligonucleotide
  Sense strand starting at position 7 of SEQ ID NO: 1888650
ccuaacaucuaggacagau

SEQ ID NO: 2547979 - RNA, 19 nt, Artificial Sequence
  Description of Artificial Sequence: Synthetic oligonucleotide
  Antisense strand to SEQ ID NO: 2547978
aucuguccuagauguuagg

SEQ ID NO: 2547980 - RNA, 19 nt, Artificial Sequence
  Description of Artificial Sequence: Synthetic oligonucleotide
  Sense strand starting at position 3101 of SEQ ID NO: 1888650
uguguauguuggcucagag

SEQ ID NO: 2547981 - RNA, 19 nt, Artificial Sequence
  Description of Artificial Sequence: Synthetic oligonucleotide
  Antisense strand to SEQ ID NO: 2547980
cucugagccaacauacaca

SEQ ID NO: 2547982 - RNA, 19 nt, Artificial Sequence
  Description of Artificial Sequence: Synthetic oligonucleotide
  Sense strand starting at position 2265 of SEQ ID NO: 1888650
aguggaauuuagugaguug

SEQ ID NO: 2547983 - RNA, 19 nt, Artificial Sequence
  Description of Artificial Sequence: Synthetic oligonucleotide
  Antisense strand to SEQ ID NO: 2547982
caacucacuaaauuccacu

SEQ ID NO: 2547984 - RNA, 19 nt, Artificial Sequence
  Description of Artificial Sequence: Synthetic oligonucleotide
  Sense strand starting at position 3089 of SEQ ID NO: 1888650
ugugauugggucuguguau

SEQ ID NO: 2547985 - RNA, 19 nt, Artificial Sequence
  Description of Artificial Sequence: Synthetic oligonucleotide
  Antisense strand to SEQ ID NO: 2547984
auacacagacccaaucaca

SEQ ID NO: 2547986 - RNA, 19 nt, Artificial Sequence
  Description of Artificial Sequence: Synthetic oligonucleotide
  Sense strand starting at position 3611 of SEQ ID NO: 1888650
gacacaguguuguucuguu

SEQ ID NO: 2547987 - RNA, 19 nt, Artificial Sequence
  Description of Artificial Sequence: Synthetic oligonucleotide
  Antisense strand to SEQ ID NO: 2547986
aacagaacaacacuguguc

SEQ ID NO: 2547988 - RNA, 19 nt, Artificial Sequence
  Description of Artificial Sequence: Synthetic oligonucleotide
  Sense strand starting at position 3100 of SEQ ID NO: 1888650
cuguguauguuggcucaga

SEQ ID NO: 2547989 - RNA, 19 nt, Artificial Sequence
  Description of Artificial Sequence: Synthetic oligonucleotide
  Antisense strand to SEQ ID NO: 2547988
ucugagccaacauacacag

SEQ ID NO: 2547990 - RNA, 19 nt, Artificial Sequence
  Description of Artificial Sequence: Synthetic oligonucleotide
  Sense strand starting at position 2468 of SEQ ID NO: 1888651
cuugcucuccugucuugua

SEQ ID NO: 2547991 - RNA, 19 nt, Artificial Sequence
  Description of Artificial Sequence: Synthetic oligonucleotide
  Antisense strand to SEQ ID NO: 2547990
uacaagacaggagagcaag

SEQ ID NO: 2547992 - RNA, 19 nt, Artificial Sequence
  Description of Artificial Sequence: Synthetic oligonucleotide
  Sense strand starting at position 1416 of SEQ ID NO: 1888651
cuacauacacccugggaau

SEQ ID NO: 2547993 - RNA, 19 nt, Artificial Sequence
  Description of Artificial Sequence: Synthetic oligonucleotide
  Antisense strand to SEQ ID NO: 2547992
auucccaggguguauguag

SEQ ID NO: 2547994 - RNA, 19 nt, Artificial Sequence
  Description of Artificial Sequence: Synthetic oligonucleotide
  Sense strand starting at position 1346 of SEQ ID NO: 1888651
auaauugaucuuuggacau

SEQ ID NO: 2547995 - RNA, 19 nt, Artificial Sequence
  Description of Artificial Sequence: Synthetic oligonucleotide
  Antisense strand to SEQ ID NO: 2547994
auguccaaagaucaauuau

SEQ ID NO: 2547996 - RNA, 19 nt, Artificial Sequence
  Description of Artificial Sequence: Synthetic oligonucleotide
  Sense strand starting at position 365 of SEQ ID NO: 1888651
uguccaucucuugagacaa

SEQ ID NO: 2547997 - RNA, 19 nt, Artificial Sequence
  Description of Artificial Sequence: Synthetic oligonucleotide
  Antisense strand to SEQ ID NO: 2547996
uugucucaagagauggaca

SEQ ID NO: 2547998 - RNA, 19 nt, Artificial Sequence
  Description of Artificial Sequence: Synthetic oligonucleotide
  Sense strand starting at position 132 of SEQ ID NO: 1888651
ggaaguuggucaccaagaa

SEQ ID NO: 2547999 - RNA, 19 nt, Artificial Sequence
  Description of Artificial Sequence: Synthetic oligonucleotide
  Antisense strand to SEQ ID NO: 2547998
uucuuggugaccaacuucc

SEQ ID NO: 2548000 - RNA, 19 nt, Artificial Sequence
  Description of Artificial Sequence: Synthetic oligonucleotide
  Sense strand starting at position 3078 of SEQ ID NO: 1888651
gcuguuaucagugcuguga

SEQ ID NO: 2548001 - RNA, 19 nt, Artificial Sequence
  Description of Artificial Sequence: Synthetic oligonucleotide
  Antisense strand to SEQ ID NO: 2548000
ucacagcacugauaacagc

SEQ ID NO: 2548002 - RNA, 19 nt, Artificial Sequence
  Description of Artificial Sequence: Synthetic oligonucleotide
  Sense strand starting at position 1951 of SEQ ID NO: 1888651
cuugaucugagucacggaa

SEQ ID NO: 2548003 - RNA, 19 nt, Artificial Sequence
  Description of Artificial Sequence: Synthetic oligonucleotide
  Antisense strand to SEQ ID NO: 2548002
uuccgugacucagaucaag

SEQ ID NO: 2548004 - RNA, 19 nt, Artificial Sequence
  Description of Artificial Sequence: Synthetic oligonucleotide
  Sense strand starting at position 737 of SEQ ID NO: 1888651
cagccugcugcuucuagua

SEQ ID NO: 2548005 - RNA, 19 nt, Artificial Sequence
  Description of Artificial Sequence: Synthetic oligonucleotide
  Antisense strand to SEQ ID NO: 2548004
uacuagaagcagcaggcug

SEQ ID NO: 2548006 - RNA, 19 nt, Artificial Sequence
  Description of Artificial Sequence: Synthetic oligonucleotide
  Sense strand starting at position 1982 of SEQ ID NO: 1888651
uugguugugauggaaaucu

SEQ ID NO: 2548007 - RNA, 19 nt, Artificial Sequence
  Description of Artificial Sequence: Synthetic oligonucleotide
  Antisense strand to SEQ ID NO: 2548006
agauuuccaucacaaccaa

SEQ ID NO: 2548008 - RNA, 19 nt, Artificial Sequence
  Description of Artificial Sequence: Synthetic oligonucleotide
  Sense strand starting at position 129 of SEQ ID NO: 1888651
caaggaaguuggucaccaa

SEQ ID NO: 2548009 - RNA, 19 nt, Artificial Sequence
  Description of Artificial Sequence: Synthetic oligonucleotide
  Antisense strand to SEQ ID NO: 2548008
uuggugaccaacuuccuug

SEQ ID NO: 2548010 - RNA, 19 nt, Artificial Sequence
  Description of Artificial Sequence: Synthetic oligonucleotide
  Sense strand starting at position 285 of SEQ ID NO: 1888651
ccacguaaggcagauugaa

SEQ ID NO: 2548011 - RNA, 19 nt, Artificial Sequence
  Description of Artificial Sequence: Synthetic oligonucleotide
  Antisense strand to SEQ ID NO: 2548010
uucaaucugccuuacgugg

SEQ ID NO: 2548012 - RNA, 19 nt, Artificial Sequence
  Description of Artificial Sequence: Synthetic oligonucleotide
  Sense strand starting at position 1835 of SEQ ID NO: 1888651
gcggguguucaagcuguca

SEQ ID NO: 2548013 - RNA, 19 nt, Artificial Sequence
  Description of Artificial Sequence: Synthetic oligonucleotide
  Antisense strand to SEQ ID NO: 2548012
ugacagcuugaacacccgc

SEQ ID NO: 2548014 - RNA, 19 nt, Artificial Sequence
  Description of Artificial Sequence: Synthetic oligonucleotide
  Sense strand starting at position 1305 of SEQ ID NO: 1888651
augacuaguggaugucaca

SEQ ID NO: 2548015 - RNA, 19 nt, Artificial Sequence
  Description of Artificial Sequence: Synthetic oligonucleotide
  Antisense strand to SEQ ID NO: 2548014
ugugacauccacuagucau

SEQ ID NO: 2548016 - RNA, 19 nt, Artificial Sequence
  Description of Artificial Sequence: Synthetic oligonucleotide
  Sense strand starting at position 1031 of SEQ ID NO: 1888651
auggguggccacuaucauu

SEQ ID NO: 2548017 - RNA, 19 nt, Artificial Sequence
  Description of Artificial Sequence: Synthetic oligonucleotide
  Antisense strand to SEQ ID NO: 2548016
aaugauaguggccacccau

SEQ ID NO: 2548018 - RNA, 19 nt, Artificial Sequence
  Description of Artificial Sequence: Synthetic oligonucleotide
  Sense strand starting at position 384 of SEQ ID NO: 1888651
guuucuuucucauuuguuc

SEQ ID NO: 2548019 - RNA, 19 nt, Artificial Sequence
  Description of Artificial Sequence: Synthetic oligonucleotide
  Antisense strand to SEQ ID NO: 2548018
gaacaaaugagaaagaaac

SEQ ID NO: 2548020 - RNA, 19 nt, Artificial Sequence
  Description of Artificial Sequence: Synthetic oligonucleotide
  Sense strand starting at position 71 of SEQ ID NO: 1888651
gggaguauccugggcaaac

SEQ ID NO: 2548021 - RNA, 19 nt, Artificial Sequence
  Description of Artificial Sequence: Synthetic oligonucleotide
  Antisense strand to SEQ ID NO: 2548020
guuugcccaggauacuccc

SEQ ID NO: 2548022 - RNA, 19 nt, Artificial Sequence
  Description of Artificial Sequence: Synthetic oligonucleotide
  Sense strand starting at position 712 of SEQ ID NO: 1888651
ccuggcgucaaccagaaua

SEQ ID NO: 2548023 - RNA, 19 nt, Artificial Sequence
  Description of Artificial Sequence: Synthetic oligonucleotide
  Antisense strand to SEQ ID NO: 2548022
uauucugguugacgccagg

SEQ ID NO: 2548024 - RNA, 19 nt, Artificial Sequence
  Description of Artificial Sequence: Synthetic oligonucleotide
  Sense strand starting at position 714 of SEQ ID NO: 1888651
uggcgucaaccagaauauu

SEQ ID NO: 2548025 - RNA, 19 nt, Artificial Sequence
  Description of Artificial Sequence: Synthetic oligonucleotide
  Antisense strand to SEQ ID NO: 2548024
aauauucugguugacgcca

SEQ ID NO: 2548026 - RNA, 19 nt, Artificial Sequence
  Description of Artificial Sequence: Synthetic oligonucleotide
  Sense strand starting at position 926 of SEQ ID NO: 1888651
agugcugcccaugagaaca

SEQ ID NO: 2548027 - RNA, 19 nt, Artificial Sequence
  Description of Artificial Sequence: Synthetic oligonucleotide
  Antisense strand to SEQ ID NO: 2548026
uguucucaugggcagcacu

SEQ ID NO: 2548028 - RNA, 19 nt, Artificial Sequence
  Description of Artificial Sequence: Synthetic oligonucleotide
  Sense strand starting at position 72 of SEQ ID NO: 1888651
ggaguauccugggcaaacu

SEQ ID NO: 2548029 - RNA, 19 nt, Artificial Sequence
  Description of Artificial Sequence: Synthetic oligonucleotide
  Antisense strand to SEQ ID NO: 2548028
aguuugcccaggauacucc

SEQ ID NO: 2548030 - RNA, 19 nt, Artificial Sequence
  Description of Artificial Sequence: Synthetic oligonucleotide
  Sense strand starting at position 687 of SEQ ID NO: 1888651
gggacuauaggcuguaacu

SEQ ID NO: 2548031 - RNA, 19 nt, Artificial Sequence
  Description of Artificial Sequence: Synthetic oligonucleotide
  Antisense strand to SEQ ID NO: 2548030
aguuacagccuauaguccc

SEQ ID NO: 2548032 - RNA, 19 nt, Artificial Sequence
  Description of Artificial Sequence: Synthetic oligonucleotide
  Sense strand starting at position 362 of SEQ ID NO: 1888651
ccauguccaucucuugaga

SEQ ID NO: 2548033 - RNA, 19 nt, Artificial Sequence
  Description of Artificial Sequence: Synthetic oligonucleotide
  Antisense strand to SEQ ID NO: 2548032
ucucaagagauggacaugg

SEQ ID NO: 2548034 - RNA, 19 nt, Artificial Sequence
  Description of Artificial Sequence: Synthetic oligonucleotide
  Sense strand starting at position 1981 of SEQ ID NO: 1888651
uuugguugugauggaaauc

SEQ ID NO: 2548035 - RNA, 19 nt, Artificial Sequence
  Description of Artificial Sequence: Synthetic oligonucleotide
  Antisense strand to SEQ ID NO: 2548034
gauuuccaucacaaccaaa

SEQ ID NO: 2548036 - RNA, 19 nt, Artificial Sequence
  Description of Artificial Sequence: Synthetic oligonucleotide
  Sense strand starting at position 1454 of SEQ ID NO: 1888651
ggaaguuaaggcuguggau

SEQ ID NO: 2548037 - RNA, 19 nt, Artificial Sequence
  Description of Artificial Sequence: Synthetic oligonucleotide
  Antisense strand to SEQ ID NO: 2548036
auccacagccuuaacuucc

SEQ ID NO: 2548038 - RNA, 19 nt, Artificial Sequence
  Description of Artificial Sequence: Synthetic oligonucleotide
  Sense strand starting at position 3338 of SEQ ID NO: 1888651
ucccaagugcagugaagaa

SEQ ID NO: 2548039 - RNA, 19 nt, Artificial Sequence
  Description of Artificial Sequence: Synthetic oligonucleotide
  Antisense strand to SEQ ID NO: 2548038
uucuucacugcacuuggga

SEQ ID NO: 2548040 - RNA, 19 nt, Artificial Sequence
  Description of Artificial Sequence: Synthetic oligonucleotide
  Sense strand starting at position 3366 of SEQ ID NO: 1888651
ucuggagucaggcauguuu

SEQ ID NO: 2548041 - RNA, 19 nt, Artificial Sequence
  Description of Artificial Sequence: Synthetic oligonucleotide
  Antisense strand to SEQ ID NO: 2548040
aaacaugccugacuccaga

SEQ ID NO: 2548042 - RNA, 19 nt, Artificial Sequence
  Description of Artificial Sequence: Synthetic oligonucleotide
  Sense strand starting at position 923 of SEQ ID NO: 1888651
uccagugcugcccaugaga

SEQ ID NO: 2548043 - RNA, 19 nt, Artificial Sequence
  Description of Artificial Sequence: Synthetic oligonucleotide
  Antisense strand to SEQ ID NO: 2548042
ucucaugggcagcacugga

SEQ ID NO: 2548044 - RNA, 19 nt, Artificial Sequence
  Description of Artificial Sequence: Synthetic oligonucleotide
  Sense strand starting at position 1280 of SEQ ID NO: 1888651
ggcacuaguggaugucaca

SEQ ID NO: 2548045 - RNA, 19 nt, Artificial Sequence
  Description of Artificial Sequence: Synthetic oligonucleotide
  Antisense strand to SEQ ID NO: 2548044
ugugacauccacuagugcc

SEQ ID NO: 2548046 - RNA, 19 nt, Artificial Sequence
  Description of Artificial Sequence: Synthetic oligonucleotide
  Sense strand starting at position 3082 of SEQ ID NO: 1888651
uuaucagugcugugagaag

SEQ ID NO: 2548047 - RNA, 19 nt, Artificial Sequence
  Description of Artificial Sequence: Synthetic oligonucleotide
  Antisense strand to SEQ ID NO: 2548046
cuucucacagcacugauaa

SEQ ID NO: 2548048 - RNA, 19 nt, Artificial Sequence
  Description of Artificial Sequence: Synthetic oligonucleotide
  Sense strand starting at position 332 of SEQ ID NO: 1888651
ggccauuucugagaccaug

SEQ ID NO: 2548049 - RNA, 19 nt, Artificial Sequence
  Description of Artificial Sequence: Synthetic oligonucleotide
  Antisense strand to SEQ ID NO: 2548048
cauggucucagaaauggcc

SEQ ID NO: 2548050 - RNA, 19 nt, Artificial Sequence
  Description of Artificial Sequence: Synthetic oligonucleotide
  Sense strand starting at position 1261 of SEQ ID NO: 1888651
gagucaugggucuggcuga

SEQ ID NO: 2548051 - RNA, 19 nt, Artificial Sequence
  Description of Artificial Sequence: Synthetic oligonucleotide
  Antisense strand to SEQ ID NO: 2548050
ucagccagacccaugacuc

SEQ ID NO: 2548052 - RNA, 19 nt, Artificial Sequence
  Description of Artificial Sequence: Synthetic oligonucleotide
  Sense strand starting at position 3702 of SEQ ID NO: 1888651
cgacucagugucugagacu

SEQ ID NO: 2548053 - RNA, 19 nt, Artificial Sequence
  Description of Artificial Sequence: Synthetic oligonucleotide
  Antisense strand to SEQ ID NO: 2548052
agucucagacacugagucg

SEQ ID NO: 2548054 - RNA, 19 nt, Artificial Sequence
  Description of Artificial Sequence: Synthetic oligonucleotide
  Sense strand starting at position 1006 of SEQ ID NO: 1888651
guggcagccauugggauua

SEQ ID NO: 2548055 - RNA, 19 nt, Artificial Sequence
  Description of Artificial Sequence: Synthetic oligonucleotide
  Antisense strand to SEQ ID NO: 2548054
uaaucccaauggcugccac

SEQ ID NO: 2548056 - RNA, 19 nt, Artificial Sequence
  Description of Artificial Sequence: Synthetic oligonucleotide
  Sense strand starting at position 862 of SEQ ID NO: 1888651
gacagaaagcucugccugu

SEQ ID NO: 2548057 - RNA, 19 nt, Artificial Sequence
  Description of Artificial Sequence: Synthetic oligonucleotide
  Antisense strand to SEQ ID NO: 2548056
acaggcagagcuuucuguc

SEQ ID NO: 2548058 - RNA, 19 nt, Artificial Sequence
  Description of Artificial Sequence: Synthetic oligonucleotide
  Sense strand starting at position 925 of SEQ ID NO: 1888651
cagugcugcccaugagaac

SEQ ID NO: 2548059 - RNA, 19 nt, Artificial Sequence
  Description of Artificial Sequence: Synthetic oligonucleotide
  Antisense strand to SEQ ID NO: 2548058
guucucaugggcagcacug

SEQ ID NO: 2548060 - RNA, 19 nt, Artificial Sequence
  Description of Artificial Sequence: Synthetic oligonucleotide
  Sense strand starting at position 1974 of SEQ ID NO: 1888651
cuuugaguuugguugugau

SEQ ID NO: 2548061 - RNA, 19 nt, Artificial Sequence
  Description of Artificial Sequence: Synthetic oligonucleotide
  Antisense strand to SEQ ID NO: 2548060
aucacaaccaaacucaaag

SEQ ID NO: 2548062 - RNA, 19 nt, Artificial Sequence
  Description of Artificial Sequence: Synthetic oligonucleotide
  Sense strand starting at position 1095 of SEQ ID NO: 1888651
ugaugccuggugugaaagu

SEQ ID NO: 2548063 - RNA, 19 nt, Artificial Sequence
  Description of Artificial Sequence: Synthetic oligonucleotide
  Antisense strand to SEQ ID NO: 2548062
acuuucacaccaggcauca

SEQ ID NO: 2548064 - RNA, 19 nt, Artificial Sequence
  Description of Artificial Sequence: Synthetic oligonucleotide
  Sense strand starting at position 98 of SEQ ID NO: 1888651
gggcaucugcccugaucuu

SEQ ID NO: 2548065 - RNA, 19 nt, Artificial Sequence
  Description of Artificial Sequence: Synthetic oligonucleotide
  Antisense strand to SEQ ID NO: 2548064
aagaucagggcagaugccc

SEQ ID NO: 2548066 - RNA, 19 nt, Artificial Sequence
  Description of Artificial Sequence: Synthetic oligonucleotide
  Sense strand starting at position 1749 of SEQ ID NO: 1888651
gugccacuccucugugaag

SEQ ID NO: 2548067 - RNA, 19 nt, Artificial Sequence
  Description of Artificial Sequence: Synthetic oligonucleotide
  Antisense strand to SEQ ID NO: 2548066
cuucacagaggaguggcac

SEQ ID NO: 2548068 - RNA, 19 nt, Artificial Sequence
  Description of Artificial Sequence: Synthetic oligonucleotide
  Sense strand starting at position 1650 of SEQ ID NO: 1888651
guuggcagccuucggaaau

SEQ ID NO: 2548069 - RNA, 19 nt, Artificial Sequence
  Description of Artificial Sequence: Synthetic oligonucleotide
  Antisense strand to SEQ ID NO: 2548068
auuuccgaaggcugccaac

SEQ ID NO: 2548070 - RNA, 19 nt, Artificial Sequence
  Description of Artificial Sequence: Synthetic oligonucleotide
  Sense strand starting at position 1113 of SEQ ID NO: 1888652
cccacagguccugaucuaa

SEQ ID NO: 2548071 - RNA, 19 nt, Artificial Sequence
  Description of Artificial Sequence: Synthetic oligonucleotide
  Antisense strand to SEQ ID NO: 2548070
uuagaucaggaccuguggg

SEQ ID NO: 2548072 - RNA, 19 nt, Artificial Sequence
  Description of Artificial Sequence: Synthetic oligonucleotide
  Sense strand starting at position 3679 of SEQ ID NO: 1888652
auaaaucagcccuggcaga

SEQ ID NO: 2548073 - RNA, 19 nt, Artificial Sequence
  Description of Artificial Sequence: Synthetic oligonucleotide
  Antisense strand to SEQ ID NO: 2548072
ucugccagggcugauuuau

SEQ ID NO: 2548074 - RNA, 19 nt, Artificial Sequence
  Description of Artificial Sequence: Synthetic oligonucleotide
  Sense strand starting at position 799 of SEQ ID NO: 1888652
caaggcaucugggagauuu

SEQ ID NO: 2548075 - RNA, 19 nt, Artificial Sequence
  Description of Artificial Sequence: Synthetic oligonucleotide
  Antisense strand to SEQ ID NO: 2548074
aaaucucccagaugccuug

SEQ ID NO: 2548076 - RNA, 19 nt, Artificial Sequence
  Description of Artificial Sequence: Synthetic oligonucleotide
  Sense strand starting at position 3351 of SEQ ID NO: 1888652
aagauuuagugugauugga

SEQ ID NO: 2548077 - RNA, 19 nt, Artificial Sequence
  Description of Artificial Sequence: Synthetic oligonucleotide
  Antisense strand to SEQ ID NO: 2548076
uccaaucacacuaaaucuu

SEQ ID NO: 2548078 - RNA, 19 nt, Artificial Sequence
  Description of Artificial Sequence: Synthetic oligonucleotide
  Sense strand starting at position 496 of SEQ ID NO: 1888652
agagauaaaugucugcugu

SEQ ID NO: 2548079 - RNA, 19 nt, Artificial Sequence
  Description of Artificial Sequence: Synthetic oligonucleotide
  Antisense strand to SEQ ID NO: 2548078
acagcagacauuuaucucu

SEQ ID NO: 2548080 - RNA, 19 nt, Artificial Sequence
  Description of Artificial Sequence: Synthetic oligonucleotide
  Sense strand starting at position 2560 of SEQ ID NO: 1888652
ggcgaugacuuugcagaaa

SEQ ID NO: 2548081 - RNA, 19 nt, Artificial Sequence
  Description of Artificial Sequence: Synthetic oligonucleotide
  Antisense strand to SEQ ID NO: 2548080
uuucugcaaagucaucgcc

SEQ ID NO: 2548082 - RNA, 19 nt, Artificial Sequence
  Description of Artificial Sequence: Synthetic oligonucleotide
  Sense strand starting at position 3522 of SEQ ID NO: 1888652
uuuaaagauccuugcaugu

SEQ ID NO: 2548083 - RNA, 19 nt, Artificial Sequence
  Description of Artificial Sequence: Synthetic oligonucleotide
  Antisense strand to SEQ ID NO: 2548082
acaugcaaggaucuuuaaa

SEQ ID NO: 2548084 - RNA, 19 nt, Artificial Sequence
  Description of Artificial Sequence: Synthetic oligonucleotide
  Sense strand starting at position 2559 of SEQ ID NO: 1888652
gggcgaugacuuugcagaa

SEQ ID NO: 2548085 - RNA, 19 nt, Artificial Sequence
  Description of Artificial Sequence: Synthetic oligonucleotide
  Antisense strand to SEQ ID NO: 2548084
uucugcaaagucaucgccc

SEQ ID NO: 2548086 - RNA, 19 nt, Artificial Sequence
  Description of Artificial Sequence: Synthetic oligonucleotide
  Sense strand starting at position 534 of SEQ ID NO: 1888652
gguacuugguugcuacaaa

SEQ ID NO: 2548087 - RNA, 19 nt, Artificial Sequence
  Description of Artificial Sequence: Synthetic oligonucleotide
  Antisense strand to SEQ ID NO: 2548086
uuuguagcaaccaaguacc

SEQ ID NO: 2548088 - RNA, 19 nt, Artificial Sequence
  Description of Artificial Sequence: Synthetic oligonucleotide
  Sense strand starting at position 497 of SEQ ID NO: 1888652
gagauaaaugucugcuguu

SEQ ID NO: 2548089 - RNA, 19 nt, Artificial Sequence
  Description of Artificial Sequence: Synthetic oligonucleotide
  Antisense strand to SEQ ID NO: 2548088
aacagcagacauuuaucuc

SEQ ID NO: 2548090 - RNA, 19 nt, Artificial Sequence
  Description of Artificial Sequence: Synthetic oligonucleotide
  Sense strand starting at position 2607 of SEQ ID NO: 1888652
ugaguaaugaccggucccu

SEQ ID NO: 2548091 - RNA, 19 nt, Artificial Sequence
  Description of Artificial Sequence: Synthetic oligonucleotide
  Antisense strand to SEQ ID NO: 2548090
agggaccggucauuacuca

SEQ ID NO: 2548092 - RNA, 19 nt, Artificial Sequence
  Description of Artificial Sequence: Synthetic oligonucleotide
  Sense strand starting at position 975 of SEQ ID NO: 1888652
gaggaaguucucggcucca

SEQ ID NO: 2548093 - RNA, 19 nt, Artificial Sequence
  Description of Artificial Sequence: Synthetic oligonucleotide
  Antisense strand to SEQ ID NO: 2548092
uggagccgagaacuuccuc

SEQ ID NO: 2548094 - RNA, 19 nt, Artificial Sequence
  Description of Artificial Sequence: Synthetic oligonucleotide
  Sense strand starting at position 503 of SEQ ID NO: 1888652
aaugucugcuguuugaaac

SEQ ID NO: 2548095 - RNA, 19 nt, Artificial Sequence
  Description of Artificial Sequence: Synthetic oligonucleotide
  Antisense strand to SEQ ID NO: 2548094
guuucaaacagcagacauu

SEQ ID NO: 2548096 - RNA, 19 nt, Artificial Sequence
  Description of Artificial Sequence: Synthetic oligonucleotide
  Sense strand starting at position 3355 of SEQ ID NO: 1888652
uuuagugugauuggaguuu

SEQ ID NO: 2548097 - RNA, 19 nt, Artificial Sequence
  Description of Artificial Sequence: Synthetic oligonucleotide
  Antisense strand to SEQ ID NO: 2548096
aaacuccaaucacacuaaa

SEQ ID NO: 2548098 - RNA, 19 nt, Artificial Sequence
  Description of Artificial Sequence: Synthetic oligonucleotide
  Sense strand starting at position 485 of SEQ ID NO: 1888652
ccggaaccaugagagauaa

SEQ ID NO: 2548099 - RNA, 19 nt, Artificial Sequence
  Description of Artificial Sequence: Synthetic oligonucleotide
  Antisense strand to SEQ ID NO: 2548098
uuaucucucaugguuccgg

SEQ ID NO: 2548100 - RNA, 19 nt, Artificial Sequence
  Description of Artificial Sequence: Synthetic oligonucleotide
  Sense strand starting at position 513 of SEQ ID NO: 1888652
guuugaaacugccuaguuu

SEQ ID NO: 2548101 - RNA, 19 nt, Artificial Sequence
  Description of Artificial Sequence: Synthetic oligonucleotide
  Antisense strand to SEQ ID NO: 2548100
aaacuaggcaguuucaaac

SEQ ID NO: 2548102 - RNA, 19 nt, Artificial Sequence
  Description of Artificial Sequence: Synthetic oligonucleotide
  Sense strand starting at position 563 of SEQ ID NO: 1888652
acacguggugucuggacau

SEQ ID NO: 2548103 - RNA, 19 nt, Artificial Sequence
  Description of Artificial Sequence: Synthetic oligonucleotide
  Antisense strand to SEQ ID NO: 2548102
auguccagacaccacgugu

SEQ ID NO: 2548104 - RNA, 19 nt, Artificial Sequence
  Description of Artificial Sequence: Synthetic oligonucleotide
  Sense strand starting at position 410 of SEQ ID NO: 1888652
gcuggaaugucccuuuccu

SEQ ID NO: 2548105 - RNA, 19 nt, Artificial Sequence
  Description of Artificial Sequence: Synthetic oligonucleotide
  Antisense strand to SEQ ID NO: 2548104
aggaaagggacauuccagc

SEQ ID NO: 2548106 - RNA, 19 nt, Artificial Sequence
  Description of Artificial Sequence: Synthetic oligonucleotide
  Sense strand starting at position 504 of SEQ ID NO: 1888652
augucugcuguuugaaacu

SEQ ID NO: 2548107 - RNA, 19 nt, Artificial Sequence
  Description of Artificial Sequence: Synthetic oligonucleotide
  Antisense strand to SEQ ID NO: 2548106
aguuucaaacagcagacau

SEQ ID NO: 2548108 - RNA, 19 nt, Artificial Sequence
  Description of Artificial Sequence: Synthetic oligonucleotide
  Sense strand starting at position 3487 of SEQ ID NO: 1888652
augugucugcuuugagcuu

SEQ ID NO: 2548109 - RNA, 19 nt, Artificial Sequence
  Description of Artificial Sequence: Synthetic oligonucleotide
  Antisense strand to SEQ ID NO: 2548108
aagcucaaagcagacacau

SEQ ID NO: 2548110 - RNA, 19 nt, Artificial Sequence
  Description of Artificial Sequence: Synthetic oligonucleotide
  Sense strand starting at position 3431 of SEQ ID NO: 1888652
ggccacugcugugagcaaa

SEQ ID NO: 2548111 - RNA, 19 nt, Artificial Sequence
  Description of Artificial Sequence: Synthetic oligonucleotide
  Antisense strand to SEQ ID NO: 2548110
uuugcucacagcaguggcc

SEQ ID NO: 2548112 - RNA, 19 nt, Artificial Sequence
  Description of Artificial Sequence: Synthetic oligonucleotide
  Sense strand starting at position 1449 of SEQ ID NO: 1888652
aggcgcugcuugugacauu

SEQ ID NO: 2548113 - RNA, 19 nt, Artificial Sequence
  Description of Artificial Sequence: Synthetic oligonucleotide
  Antisense strand to SEQ ID NO: 2548112
aaugucacaagcagcgccu

SEQ ID NO: 2548114 - RNA, 19 nt, Artificial Sequence
  Description of Artificial Sequence: Synthetic oligonucleotide
  Sense strand starting at position 2673 of SEQ ID NO: 1888653
aauaguuaggcagacagua

SEQ ID NO: 2548115 - RNA, 19 nt, Artificial Sequence
  Description of Artificial Sequence: Synthetic oligonucleotide
  Antisense strand to SEQ ID NO: 2548114
uacugucugccuaacuauu

SEQ ID NO: 2548116 - RNA, 19 nt, Artificial Sequence
  Description of Artificial Sequence: Synthetic oligonucleotide
  Sense strand starting at position 3753 of SEQ ID NO: 1888653
guuugugucccugcuuacu

SEQ ID NO: 2548117 - RNA, 19 nt, Artificial Sequence
  Description of Artificial Sequence: Synthetic oligonucleotide
  Antisense strand to SEQ ID NO: 2548116
aguaagcagggacacaaac

SEQ ID NO: 2548118 - RNA, 19 nt, Artificial Sequence
  Description of Artificial Sequence: Synthetic oligonucleotide
  Sense strand starting at position 2670 of SEQ ID NO: 1888653
uuaaauaguuaggcagaca

SEQ ID NO: 2548119 - RNA, 19 nt, Artificial Sequence
  Description of Artificial Sequence: Synthetic oligonucleotide
  Antisense strand to SEQ ID NO: 2548118
ugucugccuaacuauuuaa

SEQ ID NO: 2548120 - RNA, 19 nt, Artificial Sequence
  Description of Artificial Sequence: Synthetic oligonucleotide
  Sense strand starting at position 2139 of SEQ ID NO: 1888653
cuguaaacacauuguuaac

SEQ ID NO: 2548121 - RNA, 19 nt, Artificial Sequence
  Description of Artificial Sequence: Synthetic oligonucleotide
  Antisense strand to SEQ ID NO: 2548120
guuaacaauguguuuacag

SEQ ID NO: 2548122 - RNA, 19 nt, Artificial Sequence
  Description of Artificial Sequence: Synthetic oligonucleotide
  Sense strand starting at position 1537 of SEQ ID NO: 1888653
uucccuugguaucuacaga

SEQ ID NO: 2548123 - RNA, 19 nt, Artificial Sequence
  Description of Artificial Sequence: Synthetic oligonucleotide
  Antisense strand to SEQ ID NO: 2548122
ucuguagauaccaagggaa

SEQ ID NO: 2548124 - RNA, 19 nt, Artificial Sequence
  Description of Artificial Sequence: Synthetic oligonucleotide
  Sense strand starting at position 558 of SEQ ID NO: 1888653
uggauacuguaucugaguu

SEQ ID NO: 2548125 - RNA, 19 nt, Artificial Sequence
  Description of Artificial Sequence: Synthetic oligonucleotide
  Antisense strand to SEQ ID NO: 2548124
aacucagauacaguaucca

SEQ ID NO: 2548126 - RNA, 19 nt, Artificial Sequence
  Description of Artificial Sequence: Synthetic oligonucleotide
  Sense strand starting at position 770 of SEQ ID NO: 1888653
gguauauuaucuccuguaa

SEQ ID NO: 2548127 - RNA, 19 nt, Artificial Sequence
  Description of Artificial Sequence: Synthetic oligonucleotide
  Antisense strand to SEQ ID NO: 2548126
uuacaggagauaauauacc

SEQ ID NO: 2548128 - RNA, 19 nt, Artificial Sequence
  Description of Artificial Sequence: Synthetic oligonucleotide
  Sense strand starting at position 2666 of SEQ ID NO: 1888653
uguauuaaauaguuaggca

SEQ ID NO: 2548129 - RNA, 19 nt, Artificial Sequence
  Description of Artificial Sequence: Synthetic oligonucleotide
  Antisense strand to SEQ ID NO: 2548128
ugccuaacuauuuaauaca

SEQ ID NO: 2548130 - RNA, 19 nt, Artificial Sequence
  Description of Artificial Sequence: Synthetic oligonucleotide
  Sense strand starting at position 1753 of SEQ ID NO: 1888653
gcagcauugccgcuagcau

SEQ ID NO: 2548131 - RNA, 19 nt, Artificial Sequence
  Description of Artificial Sequence: Synthetic oligonucleotide
  Antisense strand to SEQ ID NO: 2548130
augcuagcggcaaugcugc

SEQ ID NO: 2548132 - RNA, 19 nt, Artificial Sequence
  Description of Artificial Sequence: Synthetic oligonucleotide
  Sense strand starting at position 3003 of SEQ ID NO: 1888653
guugacuuguccucaauga

SEQ ID NO: 2548133 - RNA, 19 nt, Artificial Sequence
  Description of Artificial Sequence: Synthetic oligonucleotide
  Antisense strand to SEQ ID NO: 2548132
ucauugaggacaagucaac

SEQ ID NO: 2548134 - RNA, 19 nt, Artificial Sequence
  Description of Artificial Sequence: Synthetic oligonucleotide
  Sense strand starting at position 943 of SEQ ID NO: 1888653
ucuucuccuguuugaaaug

SEQ ID NO: 2548135 - RNA, 19 nt, Artificial Sequence
  Description of Artificial Sequence: Synthetic oligonucleotide
  Antisense strand to SEQ ID NO: 2548134
cauuucaaacaggagaaga

SEQ ID NO: 2548136 - RNA, 19 nt, Artificial Sequence
  Description of Artificial Sequence: Synthetic oligonucleotide
  Sense strand starting at position 2992 of SEQ ID NO: 1888653
gggaaucucucguugacuu

SEQ ID NO: 2548137 - RNA, 19 nt, Artificial Sequence
  Description of Artificial Sequence: Synthetic oligonucleotide
  Antisense strand to SEQ ID NO: 2548136
aagucaacgagagauuccc

SEQ ID NO: 2548138 - RNA, 19 nt, Artificial Sequence
  Description of Artificial Sequence: Synthetic oligonucleotide
  Sense strand starting at position 1533 of SEQ ID NO: 1888653
ugaguucccuugguaucua

SEQ ID NO: 2548139 - RNA, 19 nt, Artificial Sequence
  Description of Artificial Sequence: Synthetic oligonucleotide
  Antisense strand to SEQ ID NO: 2548138
uagauaccaagggaacuca

SEQ ID NO: 2548140 - RNA, 19 nt, Artificial Sequence
  Description of Artificial Sequence: Synthetic oligonucleotide
  Sense strand starting at position 575 of SEQ ID NO: 1888653
uuggcauugccgggauaga

SEQ ID NO: 2548141 - RNA, 19 nt, Artificial Sequence
  Description of Artificial Sequence: Synthetic oligonucleotide
  Antisense strand to SEQ ID NO: 2548140
ucuaucccggcaaugccaa

SEQ ID NO: 2548142 - RNA, 19 nt, Artificial Sequence
  Description of Artificial Sequence: Synthetic oligonucleotide
  Sense strand starting at position 562 of SEQ ID NO: 1888653
uacuguaucugaguuggca

SEQ ID NO: 2548143 - RNA, 19 nt, Artificial Sequence
  Description of Artificial Sequence: Synthetic oligonucleotide
  Antisense strand to SEQ ID NO: 2548142
ugccaacucagauacagua

SEQ ID NO: 2548144 - RNA, 19 nt, Artificial Sequence
  Description of Artificial Sequence: Synthetic oligonucleotide
  Sense strand starting at position 1532 of SEQ ID NO: 1888653
cugaguucccuugguaucu

SEQ ID NO: 2548145 - RNA, 19 nt, Artificial Sequence
  Description of Artificial Sequence: Synthetic oligonucleotide
  Antisense strand to SEQ ID NO: 2548144
agauaccaagggaacucag

SEQ ID NO: 2548146 - RNA, 19 nt, Artificial Sequence
  Description of Artificial Sequence: Synthetic oligonucleotide
  Sense strand starting at position 2821 of SEQ ID NO: 1888653
gcucuauggucugcaugga

SEQ ID NO: 2548147 - RNA, 19 nt, Artificial Sequence
  Description of Artificial Sequence: Synthetic oligonucleotide
  Antisense strand to SEQ ID NO: 2548146
uccaugcagaccauagagc

SEQ ID NO: 2548148 - RNA, 19 nt, Artificial Sequence
  Description of Artificial Sequence: Synthetic oligonucleotide
  Sense strand starting at position 3106 of SEQ ID NO: 1888653
cauuucuccucagguggaa

SEQ ID NO: 2548149 - RNA, 19 nt, Artificial Sequence
  Description of Artificial Sequence: Synthetic oligonucleotide
  Antisense strand to SEQ ID NO: 2548148
uuccaccugaggagaaaug

SEQ ID NO: 2548150 - RNA, 19 nt, Artificial Sequence
  Description of Artificial Sequence: Synthetic oligonucleotide
  Sense strand starting at position 564 of SEQ ID NO: 1888653
cuguaucugaguuggcauu

SEQ ID NO: 2548151 - RNA, 19 nt, Artificial Sequence
  Description of Artificial Sequence: Synthetic oligonucleotide
  Antisense strand to SEQ ID NO: 2548150
aaugccaacucagauacag

SEQ ID NO: 2548152 - RNA, 19 nt, Artificial Sequence
  Description of Artificial Sequence: Synthetic oligonucleotide
  Sense strand starting at position 2207 of SEQ ID NO: 1888653
gcacauguuucuuugagca

SEQ ID NO: 2548153 - RNA, 19 nt, Artificial Sequence
  Description of Artificial Sequence: Synthetic oligonucleotide
  Antisense strand to SEQ ID NO: 2548152
ugcucaaagaaacaugugc

SEQ ID NO: 2548154 - RNA, 19 nt, Artificial Sequence
  Description of Artificial Sequence: Synthetic oligonucleotide
  Sense strand starting at position 3000 of SEQ ID NO: 1888653
cucguugacuuguccucaa

SEQ ID NO: 2548155 - RNA, 19 nt, Artificial Sequence
  Description of Artificial Sequence: Synthetic oligonucleotide
  Antisense strand to SEQ ID NO: 2548154
uugaggacaagucaacgag

SEQ ID NO: 2548156 - RNA, 19 nt, Artificial Sequence
  Description of Artificial Sequence: Synthetic oligonucleotide
  Sense strand starting at position 2681 of SEQ ID NO: 1888653
ggcagacaguaggagaaau

SEQ ID NO: 2548157 - RNA, 19 nt, Artificial Sequence
  Description of Artificial Sequence: Synthetic oligonucleotide
  Antisense strand to SEQ ID NO: 2548156
auuucuccuacugucugcc

SEQ ID NO: 2548158 - RNA, 19 nt, Artificial Sequence
  Description of Artificial Sequence: Synthetic oligonucleotide
  Sense strand starting at position 496 of SEQ ID NO: 1888653
guuggcagccgguauugau

SEQ ID NO: 2548159 - RNA, 19 nt, Artificial Sequence
  Description of Artificial Sequence: Synthetic oligonucleotide
  Antisense strand to SEQ ID NO: 2548158
aucaauaccggcugccaac

SEQ ID NO: 2548160 - RNA, 19 nt, Artificial Sequence
  Description of Artificial Sequence: Synthetic oligonucleotide
  Sense strand starting at position 1520 of SEQ ID NO: 1888653
cggccauggucucugaguu

SEQ ID NO: 2548161 - RNA, 19 nt, Artificial Sequence
  Description of Artificial Sequence: Synthetic oligonucleotide
  Antisense strand to SEQ ID NO: 2548160
aacucagagaccauggccg

SEQ ID NO: 2548162 - RNA, 19 nt, Artificial Sequence
  Description of Artificial Sequence: Synthetic oligonucleotide
  Sense strand starting at position 1754 of SEQ ID NO: 1888653
cagcauugccgcuagcaua

SEQ ID NO: 2548163 - RNA, 19 nt, Artificial Sequence
  Description of Artificial Sequence: Synthetic oligonucleotide
  Antisense strand to SEQ ID NO: 2548162
uaugcuagcggcaaugcug

SEQ ID NO: 2548164 - RNA, 19 nt, Artificial Sequence
  Description of Artificial Sequence: Synthetic oligonucleotide
  Sense strand starting at position 3881 of SEQ ID NO: 1888653
gcaccuguuucugugagca

SEQ ID NO: 2548165 - RNA, 19 nt, Artificial Sequence
  Description of Artificial Sequence: Synthetic oligonucleotide
  Antisense strand to SEQ ID NO: 2548164
ugcucacagaaacaggugc

SEQ ID NO: 2548166 - RNA, 19 nt, Artificial Sequence
  Description of Artificial Sequence: Synthetic oligonucleotide
  Sense strand starting at position 636 of SEQ ID NO: 1888653
uugucuaaccugcguuuga

SEQ ID NO: 2548167 - RNA, 19 nt, Artificial Sequence
  Description of Artificial Sequence: Synthetic oligonucleotide
  Antisense strand to SEQ ID NO: 2548166
ucaaacgcagguuagacaa

SEQ ID NO: 2548168 - RNA, 19 nt, Artificial Sequence
  Description of Artificial Sequence: Synthetic oligonucleotide
  Sense strand starting at position 2438 of SEQ ID NO: 1888653
ccuguucggcuguggugaa

SEQ ID NO: 2548169 - RNA, 19 nt, Artificial Sequence
  Description of Artificial Sequence: Synthetic oligonucleotide
  Antisense strand to SEQ ID NO: 2548168
uucaccacagccgaacagg

SEQ ID NO: 2548170 - RNA, 19 nt, Artificial Sequence
  Description of Artificial Sequence: Synthetic oligonucleotide
  Sense strand starting at position 3751 of SEQ ID NO: 1888653
guguuugugucccugcuua

SEQ ID NO: 2548171 - RNA, 19 nt, Artificial Sequence
  Description of Artificial Sequence: Synthetic oligonucleotide
  Antisense strand to SEQ ID NO: 2548170
uaagcagggacacaaacac

SEQ ID NO: 2548172 - RNA, 19 nt, Artificial Sequence
  Description of Artificial Sequence: Synthetic oligonucleotide
  Sense strand starting at position 1646 of SEQ ID NO: 1888653
gaaucugugucacaaguuc

SEQ ID NO: 2548173 - RNA, 19 nt, Artificial Sequence
  Description of Artificial Sequence: Synthetic oligonucleotide
  Antisense strand to SEQ ID NO: 2548172
gaacuugugacacagauuc

SEQ ID NO: 2548174 - RNA, 19 nt, Artificial Sequence
  Description of Artificial Sequence: Synthetic oligonucleotide
  Sense strand starting at position 3883 of SEQ ID NO: 1888653
accuguuucugugagcaca

SEQ ID NO: 2548175 - RNA, 19 nt, Artificial Sequence
  Description of Artificial Sequence: Synthetic oligonucleotide
  Antisense strand to SEQ ID NO: 2548174
ugugcucacagaaacaggu

SEQ ID NO: 2548176 - RNA, 19 nt, Artificial Sequence
  Description of Artificial Sequence: Synthetic oligonucleotide
  Sense strand starting at position 499 of SEQ ID NO: 1888653
ggcagccgguauugauaaa

SEQ ID NO: 2548177 - RNA, 19 nt, Artificial Sequence
  Description of Artificial Sequence: Synthetic oligonucleotide
  Antisense strand to SEQ ID NO: 2548176
uuuaucaauaccggcugcc

SEQ ID NO: 2548178 - RNA, 19 nt, Artificial Sequence
  Description of Artificial Sequence: Synthetic oligonucleotide
  Sense strand starting at position 2990 of SEQ ID NO: 1888653
ucgggaaucucucguugac

SEQ ID NO: 2548179 - RNA, 19 nt, Artificial Sequence
  Description of Artificial Sequence: Synthetic oligonucleotide
  Antisense strand to SEQ ID NO: 2548178
gucaacgagagauucccga

SEQ ID NO: 2548180 - RNA, 19 nt, Artificial Sequence
  Description of Artificial Sequence: Synthetic oligonucleotide
  Sense strand starting at position 372 of SEQ ID NO: 1888653
cuguguugcuggugaauua

SEQ ID NO: 2548181 - RNA, 19 nt, Artificial Sequence
  Description of Artificial Sequence: Synthetic oligonucleotide
  Antisense strand to SEQ ID NO: 2548180
uaauucaccagcaacacag

SEQ ID NO: 2548182 - RNA, 19 nt, Artificial Sequence
  Description of Artificial Sequence: Synthetic oligonucleotide
  Sense strand starting at position 2439 of SEQ ID NO: 1888653
cuguucggcuguggugaaa

SEQ ID NO: 2548183 - RNA, 19 nt, Artificial Sequence
  Description of Artificial Sequence: Synthetic oligonucleotide
  Antisense strand to SEQ ID NO: 2548182
uuucaccacagccgaacag

SEQ ID NO: 2548184 - RNA, 19 nt, Artificial Sequence
  Description of Artificial Sequence: Synthetic oligonucleotide
  Sense strand starting at position 3264 of SEQ ID NO: 1888654
guguuuccugcagaccgau

SEQ ID NO: 2548185 - RNA, 19 nt, Artificial Sequence
  Description of Artificial Sequence: Synthetic oligonucleotide
  Antisense strand to SEQ ID NO: 2548184
aucggucugcaggaaacac

SEQ ID NO: 2548186 - RNA, 19 nt, Artificial Sequence
  Description of Artificial Sequence: Synthetic oligonucleotide
  Sense strand starting at position 2 of SEQ ID NO: 1888654
gaggacugcucccacaguu

SEQ ID NO: 2548187 - RNA, 19 nt, Artificial Sequence
  Description of Artificial Sequence: Synthetic oligonucleotide
  Antisense strand to SEQ ID NO: 2548186
aacugugggagcaguccuc

SEQ ID NO: 2548188 - RNA, 19 nt, Artificial Sequence
  Description of Artificial Sequence: Synthetic oligonucleotide
  Sense strand starting at position 3260 of SEQ ID NO: 1888654
cuuuguguuuccugcagac

SEQ ID NO: 2548189 - RNA, 19 nt, Artificial Sequence
  Description of Artificial Sequence: Synthetic oligonucleotide
  Antisense strand to SEQ ID NO: 2548188
gucugcaggaaacacaaag

SEQ ID NO: 2548190 - RNA, 19 nt, Artificial Sequence
  Description of Artificial Sequence: Synthetic oligonucleotide
  Sense strand starting at position 546 of SEQ ID NO: 1888656
agaggaagucuugacuugu

SEQ ID NO: 2548191 - RNA, 19 nt, Artificial Sequence
  Description of Artificial Sequence: Synthetic oligonucleotide
  Antisense strand to SEQ ID NO: 2548190
acaagucaagacuuccucu

SEQ ID NO: 2548192 - RNA, 19 nt, Artificial Sequence
  Description of Artificial Sequence: Synthetic oligonucleotide
  Sense strand starting at position 1247 of SEQ ID NO: 1888656
aguagucauuuaguuagua

SEQ ID NO: 2548193 - RNA, 19 nt, Artificial Sequence
  Description of Artificial Sequence: Synthetic oligonucleotide
  Antisense strand to SEQ ID NO: 2548192
uacuaacuaaaugacuacu

SEQ ID NO: 2548194 - RNA, 19 nt, Artificial Sequence
  Description of Artificial Sequence: Synthetic oligonucleotide
  Sense strand starting at position 3824 of SEQ ID NO: 1888656
ucauuccuugggcagaaau

SEQ ID NO: 2548195 - RNA, 19 nt, Artificial Sequence
  Description of Artificial Sequence: Synthetic oligonucleotide
  Antisense strand to SEQ ID NO: 2548194
auuucugcccaaggaauga

SEQ ID NO: 2548196 - RNA, 19 nt, Artificial Sequence
  Description of Artificial Sequence: Synthetic oligonucleotide
  Sense strand starting at position 2174 of SEQ ID NO: 1888656
gauuguggccuugagagag

SEQ ID NO: 2548197 - RNA, 19 nt, Artificial Sequence
  Description of Artificial Sequence: Synthetic oligonucleotide
  Antisense strand to SEQ ID NO: 2548196
cucucucaaggccacaauc

SEQ ID NO: 2548198 - RNA, 19 nt, Artificial Sequence
  Description of Artificial Sequence: Synthetic oligonucleotide
  Sense strand starting at position 2560 of SEQ ID NO: 1888656
ucaagagacccaggguuua

SEQ ID NO: 2548199 - RNA, 19 nt, Artificial Sequence
  Description of Artificial Sequence: Synthetic oligonucleotide
  Antisense strand to SEQ ID NO: 2548198
uaaacccugggucucuuga

SEQ ID NO: 2548200 - RNA, 19 nt, Artificial Sequence
  Description of Artificial Sequence: Synthetic oligonucleotide
  Sense strand starting at position 1383 of SEQ ID NO: 1888656
ucaugugauggccagaaau

SEQ ID NO: 2548201 - RNA, 19 nt, Artificial Sequence
  Description of Artificial Sequence: Synthetic oligonucleotide
  Antisense strand to SEQ ID NO: 2548200
auuucuggccaucacauga

SEQ ID NO: 2548202 - RNA, 19 nt, Artificial Sequence
  Description of Artificial Sequence: Synthetic oligonucleotide
  Sense strand starting at position 1895 of SEQ ID NO: 1888656
gagagagguucuucccaag

SEQ ID NO: 2548203 - RNA, 19 nt, Artificial Sequence
  Description of Artificial Sequence: Synthetic oligonucleotide
  Antisense strand to SEQ ID NO: 2548202
cuugggaagaaccucucuc

SEQ ID NO: 2548204 - RNA, 19 nt, Artificial Sequence
  Description of Artificial Sequence: Synthetic oligonucleotide
  Sense strand starting at position 3879 of SEQ ID NO: 1888656
aggauaaaguucuuucuga

SEQ ID NO: 2548205 - RNA, 19 nt, Artificial Sequence
  Description of Artificial Sequence: Synthetic oligonucleotide
  Antisense strand to SEQ ID NO: 2548204
ucagaaagaacuuuauccu

SEQ ID NO: 2548206 - RNA, 19 nt, Artificial Sequence
  Description of Artificial Sequence: Synthetic oligonucleotide
  Sense strand starting at position 159 of SEQ ID NO: 1888656
uaaucaauacaggguagua

SEQ ID NO: 2548207 - RNA, 19 nt, Artificial Sequence
  Description of Artificial Sequence: Synthetic oligonucleotide
  Antisense strand to SEQ ID NO: 2548206
uacuacccuguauugauua

SEQ ID NO: 2548208 - RNA, 19 nt, Artificial Sequence
  Description of Artificial Sequence: Synthetic oligonucleotide
  Sense strand starting at position 3880 of SEQ ID NO: 1888656
ggauaaaguucuuucugag

SEQ ID NO: 2548209 - RNA, 19 nt, Artificial Sequence
  Description of Artificial Sequence: Synthetic oligonucleotide
  Antisense strand to SEQ ID NO: 2548208
cucagaaagaacuuuaucc

SEQ ID NO: 2548210 - RNA, 19 nt, Artificial Sequence
  Description of Artificial Sequence: Synthetic oligonucleotide
  Sense strand starting at position 1248 of SEQ ID NO: 1888656
guagucauuuaguuaguac

SEQ ID NO: 2548211 - RNA, 19 nt, Artificial Sequence
  Description of Artificial Sequence: Synthetic oligonucleotide
  Antisense strand to SEQ ID NO: 2548210
guacuaacuaaaugacuac

SEQ ID NO: 2548212 - RNA, 19 nt, Artificial Sequence
  Description of Artificial Sequence: Synthetic oligonucleotide
  Sense strand starting at position 1532 of SEQ ID NO: 1888656
cuggccugucaugaagaca

SEQ ID NO: 2548213 - RNA, 19 nt, Artificial Sequence
  Description of Artificial Sequence: Synthetic oligonucleotide
  Antisense strand to SEQ ID NO: 2548212
ugucuucaugacaggccag

SEQ ID NO: 2548214 - RNA, 19 nt, Artificial Sequence
  Description of Artificial Sequence: Synthetic oligonucleotide
  Sense strand starting at position 2097 of SEQ ID NO: 1888656
ggagguugagucuggagau

SEQ ID NO: 2548215 - RNA, 19 nt, Artificial Sequence
  Description of Artificial Sequence: Synthetic oligonucleotide
  Antisense strand to SEQ ID NO: 2548214
aucuccagacucaaccucc

SEQ ID NO: 2548216 - RNA, 19 nt, Artificial Sequence
  Description of Artificial Sequence: Synthetic oligonucleotide
  Sense strand starting at position 2687 of SEQ ID NO: 1888656
ggcuguuaugaggauccca

SEQ ID NO: 2548217 - RNA, 19 nt, Artificial Sequence
  Description of Artificial Sequence: Synthetic oligonucleotide
  Antisense strand to SEQ ID NO: 2548216
ugggauccucauaacagcc

SEQ ID NO: 2548218 - RNA, 19 nt, Artificial Sequence
  Description of Artificial Sequence: Synthetic oligonucleotide
  Sense strand starting at position 3333 of SEQ ID NO: 1888656
ggagaagggugcucaugau

SEQ ID NO: 2548219 - RNA, 19 nt, Artificial Sequence
  Description of Artificial Sequence: Synthetic oligonucleotide
  Antisense strand to SEQ ID NO: 2548218
aucaugagcacccuucucc

SEQ ID NO: 2548220 - RNA, 19 nt, Artificial Sequence
  Description of Artificial Sequence: Synthetic oligonucleotide
  Sense strand starting at position 101 of SEQ ID NO: 1888656
ugagauaagugccucuaaa

SEQ ID NO: 2548221 - RNA, 19 nt, Artificial Sequence
  Description of Artificial Sequence: Synthetic oligonucleotide
  Antisense strand to SEQ ID NO: 2548220
uuuagaggcacuuaucuca

SEQ ID NO: 2548222 - RNA, 19 nt, Artificial Sequence
  Description of Artificial Sequence: Synthetic oligonucleotide
  Sense strand starting at position 3823 of SEQ ID NO: 1888656
cucauuccuugggcagaaa

SEQ ID NO: 2548223 - RNA, 19 nt, Artificial Sequence
  Description of Artificial Sequence: Synthetic oligonucleotide
  Antisense strand to SEQ ID NO: 2548222
uuucugcccaaggaaugag

SEQ ID NO: 2548224 - RNA, 19 nt, Artificial Sequence
  Description of Artificial Sequence: Synthetic oligonucleotide
  Sense strand starting at position 3887 of SEQ ID NO: 1888656
guucuuucugagcaccaaa

SEQ ID NO: 2548225 - RNA, 19 nt, Artificial Sequence
  Description of Artificial Sequence: Synthetic oligonucleotide
  Antisense strand to SEQ ID NO: 2548224
uuuggugcucagaaagaac

SEQ ID NO: 2548226 - RNA, 19 nt, Artificial Sequence
  Description of Artificial Sequence: Synthetic oligonucleotide
  Sense strand starting at position 3746 of SEQ ID NO: 1888656
caugcuggguacucagaaa

SEQ ID NO: 2548227 - RNA, 19 nt, Artificial Sequence
  Description of Artificial Sequence: Synthetic oligonucleotide
  Antisense strand to SEQ ID NO: 2548226
uuucugaguacccagcaug

SEQ ID NO: 2548228 - RNA, 19 nt, Artificial Sequence
  Description of Artificial Sequence: Synthetic oligonucleotide
  Sense strand starting at position 3804 of SEQ ID NO: 1888656
gcaggauucuacuccugga

SEQ ID NO: 2548229 - RNA, 19 nt, Artificial Sequence
  Description of Artificial Sequence: Synthetic oligonucleotide
  Antisense strand to SEQ ID NO: 2548228
uccaggaguagaauccugc

SEQ ID NO: 2548230 - RNA, 19 nt, Artificial Sequence
  Description of Artificial Sequence: Synthetic oligonucleotide
  Sense strand starting at position 2739 of SEQ ID NO: 1888656
gggagacucuauccuugca

SEQ ID NO: 2548231 - RNA, 19 nt, Artificial Sequence
  Description of Artificial Sequence: Synthetic oligonucleotide
  Antisense strand to SEQ ID NO: 2548230
ugcaaggauagagucuccc

SEQ ID NO: 2548232 - RNA, 19 nt, Artificial Sequence
  Description of Artificial Sequence: Synthetic oligonucleotide
  Sense strand starting at position 3567 of SEQ ID NO: 1888656
gggcaacagccauaagcua

SEQ ID NO: 2548233 - RNA, 19 nt, Artificial Sequence
  Description of Artificial Sequence: Synthetic oligonucleotide
  Antisense strand to SEQ ID NO: 2548232
uagcuuauggcuguugccc

SEQ ID NO: 2548234 - RNA, 19 nt, Artificial Sequence
  Description of Artificial Sequence: Synthetic oligonucleotide
  Sense strand starting at position 1175 of SEQ ID NO: 1888656
ugagcaaauguguaacucu

SEQ ID NO: 2548235 - RNA, 19 nt, Artificial Sequence
  Description of Artificial Sequence: Synthetic oligonucleotide
  Antisense strand to SEQ ID NO: 2548234
agaguuacacauuugcuca

SEQ ID NO: 2548236 - RNA, 19 nt, Artificial Sequence
  Description of Artificial Sequence: Synthetic oligonucleotide
  Sense strand starting at position 3703 of SEQ ID NO: 1888656
gucccuuuccugcaagaag

SEQ ID NO: 2548237 - RNA, 19 nt, Artificial Sequence
  Description of Artificial Sequence: Synthetic oligonucleotide
  Antisense strand to SEQ ID NO: 2548236
cuucuugcaggaaagggac

SEQ ID NO: 2548238 - RNA, 19 nt, Artificial Sequence
  Description of Artificial Sequence: Synthetic oligonucleotide
  Sense strand starting at position 2775 of SEQ ID NO: 1888656
gaaagacaugcuuguugac

SEQ ID NO: 2548239 - RNA, 19 nt, Artificial Sequence
  Description of Artificial Sequence: Synthetic oligonucleotide
  Antisense strand to SEQ ID NO: 2548238
gucaacaagcaugucuuuc

SEQ ID NO: 2548240 - RNA, 19 nt, Artificial Sequence
  Description of Artificial Sequence: Synthetic oligonucleotide
  Sense strand starting at position 1070 of SEQ ID NO: 1888656
caggaaggcugguuuauau

SEQ ID NO: 2548241 - RNA, 19 nt, Artificial Sequence
  Description of Artificial Sequence: Synthetic oligonucleotide
  Antisense strand to SEQ ID NO: 2548240
auauaaaccagccuuccug

SEQ ID NO: 2548242 - RNA, 19 nt, Artificial Sequence
  Description of Artificial Sequence: Synthetic oligonucleotide
  Sense strand starting at position 3821 of SEQ ID NO: 1888656
gacucauuccuugggcaga

SEQ ID NO: 2548243 - RNA, 19 nt, Artificial Sequence
  Description of Artificial Sequence: Synthetic oligonucleotide
  Antisense strand to SEQ ID NO: 2548242
ucugcccaaggaaugaguc

SEQ ID NO: 2548244 - RNA, 19 nt, Artificial Sequence
  Description of Artificial Sequence: Synthetic oligonucleotide
  Sense strand starting at position 2771 of SEQ ID NO: 1888656
uugggaaagacaugcuugu

SEQ ID NO: 2548245 - RNA, 19 nt, Artificial Sequence
  Description of Artificial Sequence: Synthetic oligonucleotide
  Antisense strand to SEQ ID NO: 2548244
acaagcaugucuuucccaa

SEQ ID NO: 2548246 - RNA, 19 nt, Artificial Sequence
  Description of Artificial Sequence: Synthetic oligonucleotide
  Sense strand starting at position 1644 of SEQ ID NO: 1888656
guaucuguaaccgagguaa

SEQ ID NO: 2548247 - RNA, 19 nt, Artificial Sequence
  Description of Artificial Sequence: Synthetic oligonucleotide
  Antisense strand to SEQ ID NO: 2548246
uuaccucgguuacagauac

SEQ ID NO: 2548248 - RNA, 19 nt, Artificial Sequence
  Description of Artificial Sequence: Synthetic oligonucleotide
  Sense strand starting at position 1997 of SEQ ID NO: 1888656
gggaguuaguaggucccaa

SEQ ID NO: 2548249 - RNA, 19 nt, Artificial Sequence
  Description of Artificial Sequence: Synthetic oligonucleotide
  Antisense strand to SEQ ID NO: 2548248
uugggaccuacuaacuccc

SEQ ID NO: 2548250 - RNA, 19 nt, Artificial Sequence
  Description of Artificial Sequence: Synthetic oligonucleotide
  Sense strand starting at position 2330 of SEQ ID NO: 1888656
uuggaagugcuagauguuu

SEQ ID NO: 2548251 - RNA, 19 nt, Artificial Sequence
  Description of Artificial Sequence: Synthetic oligonucleotide
  Antisense strand to SEQ ID NO: 2548250
aaacaucuagcacuuccaa

SEQ ID NO: 2548252 - RNA, 19 nt, Artificial Sequence
  Description of Artificial Sequence: Synthetic oligonucleotide
  Sense strand starting at position 1280 of SEQ ID NO: 1888656
ucaagugucccguaaggag

SEQ ID NO: 2548253 - RNA, 19 nt, Artificial Sequence
  Description of Artificial Sequence: Synthetic oligonucleotide
  Antisense strand to SEQ ID NO: 2548252
cuccuuacgggacacuuga

SEQ ID NO: 2548254 - RNA, 19 nt, Artificial Sequence
  Description of Artificial Sequence: Synthetic oligonucleotide
  Sense strand starting at position 1325 of SEQ ID NO: 1888656
uuggcauucuggguaggga

SEQ ID NO: 2548255 - RNA, 19 nt, Artificial Sequence
  Description of Artificial Sequence: Synthetic oligonucleotide
  Antisense strand to SEQ ID NO: 2548254
ucccuacccagaaugccaa

SEQ ID NO: 2548256 - RNA, 19 nt, Artificial Sequence
  Description of Artificial Sequence: Synthetic oligonucleotide
  Sense strand starting at position 939 of SEQ ID NO: 1888656
acgaauaauuaucucugca

SEQ ID NO: 2548257 - RNA, 19 nt, Artificial Sequence
  Description of Artificial Sequence: Synthetic oligonucleotide
  Antisense strand to SEQ ID NO: 2548256
ugcagagauaauuauucgu

SEQ ID NO: 2548258 - RNA, 19 nt, Artificial Sequence
  Description of Artificial Sequence: Synthetic oligonucleotide
  Sense strand starting at position 2244 of SEQ ID NO: 1888656
cuaaguagugucuaacucu

SEQ ID NO: 2548259 - RNA, 19 nt, Artificial Sequence
  Description of Artificial Sequence: Synthetic oligonucleotide
  Antisense strand to SEQ ID NO: 2548258
agaguuagacacuacuuag

SEQ ID NO: 2548260 - RNA, 19 nt, Artificial Sequence
  Description of Artificial Sequence: Synthetic oligonucleotide
  Sense strand starting at position 1847 of SEQ ID NO: 1888656
ggugcuuagaaugggaagu

SEQ ID NO: 2548261 - RNA, 19 nt, Artificial Sequence
  Description of Artificial Sequence: Synthetic oligonucleotide
  Antisense strand to SEQ ID NO: 2548260
acuucccauucuaagcacc

SEQ ID NO: 2548262 - RNA, 19 nt, Artificial Sequence
  Description of Artificial Sequence: Synthetic oligonucleotide
  Sense strand starting at position 1269 of SEQ ID NO: 1888656
gugauucccacucaagugu

SEQ ID NO: 2548263 - RNA, 19 nt, Artificial Sequence
  Description of Artificial Sequence: Synthetic oligonucleotide
  Antisense strand to SEQ ID NO: 2548262
acacuugagugggaaucac

SEQ ID NO: 2548264 - RNA, 19 nt, Artificial Sequence
  Description of Artificial Sequence: Synthetic oligonucleotide
  Sense strand starting at position 3471 of SEQ ID NO: 1888656
ugggaaaguuggcccagua

SEQ ID NO: 2548265 - RNA, 19 nt, Artificial Sequence
  Description of Artificial Sequence: Synthetic oligonucleotide
  Antisense strand to SEQ ID NO: 2548264
uacugggccaacuuuccca

SEQ ID NO: 2548266 - RNA, 19 nt, Artificial Sequence
  Description of Artificial Sequence: Synthetic oligonucleotide
  Sense strand starting at position 1380 of SEQ ID NO: 1888656
aggucaugugauggccaga

SEQ ID NO: 2548267 - RNA, 19 nt, Artificial Sequence
  Description of Artificial Sequence: Synthetic oligonucleotide
  Antisense strand to SEQ ID NO: 2548266
ucuggccaucacaugaccu

SEQ ID NO: 2548268 - RNA, 19 nt, Artificial Sequence
  Description of Artificial Sequence: Synthetic oligonucleotide
  Sense strand starting at position 1119 of SEQ ID NO: 1888656
uguaauucugugcauuaua

SEQ ID NO: 2548269 - RNA, 19 nt, Artificial Sequence
  Description of Artificial Sequence: Synthetic oligonucleotide
  Antisense strand to SEQ ID NO: 2548268
uauaaugcacagaauuaca

SEQ ID NO: 2548270 - RNA, 19 nt, Artificial Sequence
  Description of Artificial Sequence: Synthetic oligonucleotide
  Sense strand starting at position 1430 of SEQ ID NO: 1888657
ugcuaaucugaagauguaa

SEQ ID NO: 2548271 - RNA, 19 nt, Artificial Sequence
  Description of Artificial Sequence: Synthetic oligonucleotide
  Antisense strand to SEQ ID NO: 2548270
uuacaucuucagauuagca

SEQ ID NO: 2548272 - RNA, 19 nt, Artificial Sequence
  Description of Artificial Sequence: Synthetic oligonucleotide
  Sense strand starting at position 1635 of SEQ ID NO: 1888657
uagucagauccugauacga

SEQ ID NO: 2548273 - RNA, 19 nt, Artificial Sequence
  Description of Artificial Sequence: Synthetic oligonucleotide
  Antisense strand to SEQ ID NO: 2548272
ucguaucaggaucugacua

SEQ ID NO: 2548274 - RNA, 19 nt, Artificial Sequence
  Description of Artificial Sequence: Synthetic oligonucleotide
  Sense strand starting at position 1484 of SEQ ID NO: 1888657
gaaauccagccuuggaaug

SEQ ID NO: 2548275 - RNA, 19 nt, Artificial Sequence
  Description of Artificial Sequence: Synthetic oligonucleotide
  Antisense strand to SEQ ID NO: 2548274
cauuccaaggcuggauuuc

SEQ ID NO: 2548276 - RNA, 19 nt, Artificial Sequence
  Description of Artificial Sequence: Synthetic oligonucleotide
  Sense strand starting at position 3248 of SEQ ID NO: 1888657
cggaauucaggguaugcaa

SEQ ID NO: 2548277 - RNA, 19 nt, Artificial Sequence
  Description of Artificial Sequence: Synthetic oligonucleotide
  Antisense strand to SEQ ID NO: 2548276
uugcauacccugaauuccg

SEQ ID NO: 2548278 - RNA, 19 nt, Artificial Sequence
  Description of Artificial Sequence: Synthetic oligonucleotide
  Sense strand starting at position 3698 of SEQ ID NO: 1888657
uguggagucauagaacugu

SEQ ID NO: 2548279 - RNA, 19 nt, Artificial Sequence
  Description of Artificial Sequence: Synthetic oligonucleotide
  Antisense strand to SEQ ID NO: 2548278
acaguucuaugacuccaca

SEQ ID NO: 2548280 - RNA, 19 nt, Artificial Sequence
  Description of Artificial Sequence: Synthetic oligonucleotide
  Sense strand starting at position 2604 of SEQ ID NO: 1888657
cugguuacaacaugaguga

SEQ ID NO: 2548281 - RNA, 19 nt, Artificial Sequence
  Description of Artificial Sequence: Synthetic oligonucleotide
  Antisense strand to SEQ ID NO: 2548280
ucacucauguuguaaccag

SEQ ID NO: 2548282 - RNA, 19 nt, Artificial Sequence
  Description of Artificial Sequence: Synthetic oligonucleotide
  Sense strand starting at position 1335 of SEQ ID NO: 1888657
gcucaaauauaagcugaau

SEQ ID NO: 2548283 - RNA, 19 nt, Artificial Sequence
  Description of Artificial Sequence: Synthetic oligonucleotide
  Antisense strand to SEQ ID NO: 2548282
auucagcuuauauuugagc

SEQ ID NO: 2548284 - RNA, 19 nt, Artificial Sequence
  Description of Artificial Sequence: Synthetic oligonucleotide
  Sense strand starting at position 1598 of SEQ ID NO: 1888657
ucacuuaucuggucacaua

SEQ ID NO: 2548285 - RNA, 19 nt, Artificial Sequence
  Description of Artificial Sequence: Synthetic oligonucleotide
  Antisense strand to SEQ ID NO: 2548284
uaugugaccagauaaguga

SEQ ID NO: 2548286 - RNA, 19 nt, Artificial Sequence
  Description of Artificial Sequence: Synthetic oligonucleotide
  Sense strand starting at position 3108 of SEQ ID NO: 1888657
ggaaguagggagugcuuau

SEQ ID NO: 2548287 - RNA, 19 nt, Artificial Sequence
  Description of Artificial Sequence: Synthetic oligonucleotide
  Antisense strand to SEQ ID NO: 2548286
auaagcacucccuacuucc

SEQ ID NO: 2548288 - RNA, 19 nt, Artificial Sequence
  Description of Artificial Sequence: Synthetic oligonucleotide
  Sense strand starting at position 686 of SEQ ID NO: 1888657
cugagcugugaggguuaaa

SEQ ID NO: 2548289 - RNA, 19 nt, Artificial Sequence
  Description of Artificial Sequence: Synthetic oligonucleotide
  Antisense strand to SEQ ID NO: 2548288
uuuaacccucacagcucag

SEQ ID NO: 2548290 - RNA, 19 nt, Artificial Sequence
  Description of Artificial Sequence: Synthetic oligonucleotide
  Sense strand starting at position 3506 of SEQ ID NO: 1888657
ccaagacuaguuuggccua

SEQ ID NO: 2548291 - RNA, 19 nt, Artificial Sequence
  Description of Artificial Sequence: Synthetic oligonucleotide
  Antisense strand to SEQ ID NO: 2548290
uaggccaaacuagucuugg

SEQ ID NO: 2548292 - RNA, 19 nt, Artificial Sequence
  Description of Artificial Sequence: Synthetic oligonucleotide
  Sense strand starting at position 2465 of SEQ ID NO: 1888657
ucuuuccucacguggaaga

SEQ ID NO: 2548293 - RNA, 19 nt, Artificial Sequence
  Description of Artificial Sequence: Synthetic oligonucleotide
  Antisense strand to SEQ ID NO: 2548292
ucuuccacgugaggaaaga

SEQ ID NO: 2548294 - RNA, 19 nt, Artificial Sequence
  Description of Artificial Sequence: Synthetic oligonucleotide
  Sense strand starting at position 2979 of SEQ ID NO: 1888657
ugauauuggccaggcugau

SEQ ID NO: 2548295 - RNA, 19 nt, Artificial Sequence
  Description of Artificial Sequence: Synthetic oligonucleotide
  Antisense strand to SEQ ID NO: 2548294
aucagccuggccaauauca

SEQ ID NO: 2548296 - RNA, 19 nt, Artificial Sequence
  Description of Artificial Sequence: Synthetic oligonucleotide
  Sense strand starting at position 3157 of SEQ ID NO: 1888657
ggaagugaguucuugcuga

SEQ ID NO: 2548297 - RNA, 19 nt, Artificial Sequence
  Description of Artificial Sequence: Synthetic oligonucleotide
  Antisense strand to SEQ ID NO: 2548296
ucagcaagaacucacuucc

SEQ ID NO: 2548298 - RNA, 19 nt, Artificial Sequence
  Description of Artificial Sequence: Synthetic oligonucleotide
  Sense strand starting at position 3811 of SEQ ID NO: 1888657
gggaucauccuugguuugu

SEQ ID NO: 2548299 - RNA, 19 nt, Artificial Sequence
  Description of Artificial Sequence: Synthetic oligonucleotide
  Antisense strand to SEQ ID NO: 2548298
acaaaccaaggaugauccc

SEQ ID NO: 2548300 - RNA, 19 nt, Artificial Sequence
  Description of Artificial Sequence: Synthetic oligonucleotide
  Sense strand starting at position 3812 of SEQ ID NO: 1888657
ggaucauccuugguuuguu

SEQ ID NO: 2548301 - RNA, 19 nt, Artificial Sequence
  Description of Artificial Sequence: Synthetic oligonucleotide
  Antisense strand to SEQ ID NO: 2548300
aacaaaccaaggaugaucc

SEQ ID NO: 2548302 - RNA, 19 nt, Artificial Sequence
  Description of Artificial Sequence: Synthetic oligonucleotide
  Sense strand starting at position 1567 of SEQ ID NO: 1888657
uaccuaguuguuugguaag

SEQ ID NO: 2548303 - RNA, 19 nt, Artificial Sequence
  Description of Artificial Sequence: Synthetic oligonucleotide
  Antisense strand to SEQ ID NO: 2548302
cuuaccaaacaacuaggua

SEQ ID NO: 2548304 - RNA, 19 nt, Artificial Sequence
  Description of Artificial Sequence: Synthetic oligonucleotide
  Sense strand starting at position 1496 of SEQ ID NO: 1888657
uggaaugugcugugaaccu

SEQ ID NO: 2548305 - RNA, 19 nt, Artificial Sequence
  Description of Artificial Sequence: Synthetic oligonucleotide
  Antisense strand to SEQ ID NO: 2548304
agguucacagcacauucca

SEQ ID NO: 2548306 - RNA, 19 nt, Artificial Sequence
  Description of Artificial Sequence: Synthetic oligonucleotide
  Sense strand starting at position 836 of SEQ ID NO: 1888657
gcauuuacauauugauaga

SEQ ID NO: 2548307 - RNA, 19 nt, Artificial Sequence
  Description of Artificial Sequence: Synthetic oligonucleotide
  Antisense strand to SEQ ID NO: 2548306
ucuaucaauauguaaaugc

SEQ ID NO: 2548308 - RNA, 19 nt, Artificial Sequence
  Description of Artificial Sequence: Synthetic oligonucleotide
  Sense strand starting at position 1601 of SEQ ID NO: 1888657
cuuaucuggucacauauuu

SEQ ID NO: 2548309 - RNA, 19 nt, Artificial Sequence
  Description of Artificial Sequence: Synthetic oligonucleotide
  Antisense strand to SEQ ID NO: 2548308
aaauaugugaccagauaag

SEQ ID NO: 2548310 - RNA, 19 nt, Artificial Sequence
  Description of Artificial Sequence: Synthetic oligonucleotide
  Sense strand starting at position 1566 of SEQ ID NO: 1888657
uuaccuaguuguuugguaa

SEQ ID NO: 2548311 - RNA, 19 nt, Artificial Sequence
  Description of Artificial Sequence: Synthetic oligonucleotide
  Antisense strand to SEQ ID NO: 2548310
uuaccaaacaacuagguaa

SEQ ID NO: 2548312 - RNA, 19 nt, Artificial Sequence
  Description of Artificial Sequence: Synthetic oligonucleotide
  Sense strand starting at position 1441 of SEQ ID NO: 1888657
agauguaacuuagacaaag

SEQ ID NO: 2548313 - RNA, 19 nt, Artificial Sequence
  Description of Artificial Sequence: Synthetic oligonucleotide
  Antisense strand to SEQ ID NO: 2548312
cuuugucuaaguuacaucu

SEQ ID NO: 2548314 - RNA, 19 nt, Artificial Sequence
  Description of Artificial Sequence: Synthetic oligonucleotide
  Sense strand starting at position 2786 of SEQ ID NO: 1888657
cuauguauuuauugagaug

SEQ ID NO: 2548315 - RNA, 19 nt, Artificial Sequence
  Description of Artificial Sequence: Synthetic oligonucleotide
  Antisense strand to SEQ ID NO: 2548314
caucucaauaaauacauag

SEQ ID NO: 2548316 - RNA, 19 nt, Artificial Sequence
  Description of Artificial Sequence: Synthetic oligonucleotide
  Sense strand starting at position 3174 of SEQ ID NO: 1888657
gauuucucuuccuggauga

SEQ ID NO: 2548317 - RNA, 19 nt, Artificial Sequence
  Description of Artificial Sequence: Synthetic oligonucleotide
  Antisense strand to SEQ ID NO: 2548316
ucauccaggaagagaaauc

SEQ ID NO: 2548318 - RNA, 19 nt, Artificial Sequence
  Description of Artificial Sequence: Synthetic oligonucleotide
  Sense strand starting at position 1573 of SEQ ID NO: 1888657
guuguuugguaagcacaca

SEQ ID NO: 2548319 - RNA, 19 nt, Artificial Sequence
  Description of Artificial Sequence: Synthetic oligonucleotide
  Antisense strand to SEQ ID NO: 2548318
ugugugcuuaccaaacaac

SEQ ID NO: 2548320 - RNA, 19 nt, Artificial Sequence
  Description of Artificial Sequence: Synthetic oligonucleotide
  Sense strand starting at position 849 of SEQ ID NO: 1888657
gauagaaauuccgcgguuu

SEQ ID NO: 2548321 - RNA, 19 nt, Artificial Sequence
  Description of Artificial Sequence: Synthetic oligonucleotide
  Antisense strand to SEQ ID NO: 2548320
aaaccgcggaauuucuauc

SEQ ID NO: 2548322 - RNA, 19 nt, Artificial Sequence
  Description of Artificial Sequence: Synthetic oligonucleotide
  Sense strand starting at position 945 of SEQ ID NO: 1888657
aaaguagguuauuaaagga

SEQ ID NO: 2548323 - RNA, 19 nt, Artificial Sequence
  Description of Artificial Sequence: Synthetic oligonucleotide
  Antisense strand to SEQ ID NO: 2548322
uccuuuaauaaccuacuuu

SEQ ID NO: 2548324 - RNA, 19 nt, Artificial Sequence
  Description of Artificial Sequence: Synthetic oligonucleotide
  Sense strand starting at position 3372 of SEQ ID NO: 1888657
cguaaucucucaucuugua

SEQ ID NO: 2548325 - RNA, 19 nt, Artificial Sequence
  Description of Artificial Sequence: Synthetic oligonucleotide
  Antisense strand to SEQ ID NO: 2548324
uacaagaugagagauuacg

SEQ ID NO: 2548326 - RNA, 19 nt, Artificial Sequence
  Description of Artificial Sequence: Synthetic oligonucleotide
  Sense strand starting at position 714 of SEQ ID NO: 1888657
guguauugagcuugaagca

SEQ ID NO: 2548327 - RNA, 19 nt, Artificial Sequence
  Description of Artificial Sequence: Synthetic oligonucleotide
  Antisense strand to SEQ ID NO: 2548326
ugcuucaagcucaauacac

SEQ ID NO: 2548328 - RNA, 19 nt, Artificial Sequence
  Description of Artificial Sequence: Synthetic oligonucleotide
  Sense strand starting at position 2486 of SEQ ID NO: 1888657
ggaauugcucucugcucuu

SEQ ID NO: 2548329 - RNA, 19 nt, Artificial Sequence
  Description of Artificial Sequence: Synthetic oligonucleotide
  Antisense strand to SEQ ID NO: 2548328
aagagcagagagcaauucc

SEQ ID NO: 2548330 - RNA, 19 nt, Artificial Sequence
  Description of Artificial Sequence: Synthetic oligonucleotide
  Sense strand starting at position 1569 of SEQ ID NO: 1888657
ccuaguuguuugguaagca

SEQ ID NO: 2548331 - RNA, 19 nt, Artificial Sequence
  Description of Artificial Sequence: Synthetic oligonucleotide
  Antisense strand to SEQ ID NO: 2548330
ugcuuaccaaacaacuagg

SEQ ID NO: 2548332 - RNA, 19 nt, Artificial Sequence
  Description of Artificial Sequence: Synthetic oligonucleotide
  Sense strand starting at position 44 of SEQ ID NO: 1888657
gaagaagugucacaaugac

SEQ ID NO: 2548333 - RNA, 19 nt, Artificial Sequence
  Description of Artificial Sequence: Synthetic oligonucleotide
  Antisense strand to SEQ ID NO: 2548332
gucauugugacacuucuuc

SEQ ID NO: 2548334 - RNA, 19 nt, Artificial Sequence
  Description of Artificial Sequence: Synthetic oligonucleotide
  Sense strand starting at position 365 of SEQ ID NO: 1888657
aguagaaagcugugugcca

SEQ ID NO: 2548335 - RNA, 19 nt, Artificial Sequence
  Description of Artificial Sequence: Synthetic oligonucleotide
  Antisense strand to SEQ ID NO: 2548334
uggcacacagcuuucuacu

SEQ ID NO: 2548336 - RNA, 19 nt, Artificial Sequence
  Description of Artificial Sequence: Synthetic oligonucleotide
  Sense strand starting at position 3561 of SEQ ID NO: 1888657
agcaagguguggucgguua

SEQ ID NO: 2548337 - RNA, 19 nt, Artificial Sequence
  Description of Artificial Sequence: Synthetic oligonucleotide
  Antisense strand to SEQ ID NO: 2548336
uaaccgaccacaccuugcu

SEQ ID NO: 2548338 - RNA, 19 nt, Artificial Sequence
  Description of Artificial Sequence: Synthetic oligonucleotide
  Sense strand starting at position 372 of SEQ ID NO: 1888657
agcugugugccagggcaua

SEQ ID NO: 2548339 - RNA, 19 nt, Artificial Sequence
  Description of Artificial Sequence: Synthetic oligonucleotide
  Antisense strand to SEQ ID NO: 2548338
uaugcccuggcacacagcu

SEQ ID NO: 2548340 - RNA, 19 nt, Artificial Sequence
  Description of Artificial Sequence: Synthetic oligonucleotide
  Sense strand starting at position 160 of SEQ ID NO: 1888657
gagguaccuuaacaguuau

SEQ ID NO: 2548341 - RNA, 19 nt, Artificial Sequence
  Description of Artificial Sequence: Synthetic oligonucleotide
  Antisense strand to SEQ ID NO: 2548340
auaacuguuaagguaccuc

SEQ ID NO: 2548342 - RNA, 19 nt, Artificial Sequence
  Description of Artificial Sequence: Synthetic oligonucleotide
  Sense strand starting at position 1637 of SEQ ID NO: 1888657
gucagauccugauacgaac

SEQ ID NO: 2548343 - RNA, 19 nt, Artificial Sequence
  Description of Artificial Sequence: Synthetic oligonucleotide
  Antisense strand to SEQ ID NO: 2548342
guucguaucaggaucugac

SEQ ID NO: 2548344 - RNA, 19 nt, Artificial Sequence
  Description of Artificial Sequence: Synthetic oligonucleotide
  Sense strand starting at position 3643 of SEQ ID NO: 1888657
gggugacuauaguaaguua

SEQ ID NO: 2548345 - RNA, 19 nt, Artificial Sequence
  Description of Artificial Sequence: Synthetic oligonucleotide
  Antisense strand to SEQ ID NO: 2548344
uaacuuacuauagucaccc

SEQ ID NO: 2548346 - RNA, 19 nt, Artificial Sequence
  Description of Artificial Sequence: Synthetic oligonucleotide
  Sense strand starting at position 3161 of SEQ ID NO: 1888657
gugaguucuugcugauuuc

SEQ ID NO: 2548347 - RNA, 19 nt, Artificial Sequence
  Description of Artificial Sequence: Synthetic oligonucleotide
  Antisense strand to SEQ ID NO: 2548346
gaaaucagcaagaacucac

SEQ ID NO: 2548348 - RNA, 19 nt, Artificial Sequence
  Description of Artificial Sequence: Synthetic oligonucleotide
  Sense strand starting at position 1596 of SEQ ID NO: 1888657
acucacuuaucuggucaca

SEQ ID NO: 2548349 - RNA, 19 nt, Artificial Sequence
  Description of Artificial Sequence: Synthetic oligonucleotide
  Antisense strand to SEQ ID NO: 2548348
ugugaccagauaagugagu

SEQ ID NO: 2548350 - RNA, 19 nt, Artificial Sequence
  Description of Artificial Sequence: Synthetic oligonucleotide
  Sense strand starting at position 2921 of SEQ ID NO: 1888658
agguguucggcacauauuu

SEQ ID NO: 2548351 - RNA, 19 nt, Artificial Sequence
  Description of Artificial Sequence: Synthetic oligonucleotide
  Antisense strand to SEQ ID NO: 2548350
aaauaugugccgaacaccu

SEQ ID NO: 2548352 - RNA, 19 nt, Artificial Sequence
  Description of Artificial Sequence: Synthetic oligonucleotide
  Sense strand starting at position 308 of SEQ ID NO: 1888658
cagucaguaguugaggaaa

SEQ ID NO: 2548353 - RNA, 19 nt, Artificial Sequence
  Description of Artificial Sequence: Synthetic oligonucleotide
  Antisense strand to SEQ ID NO: 2548352
uuuccucaacuacugacug

SEQ ID NO: 2548354 - RNA, 19 nt, Artificial Sequence
  Description of Artificial Sequence: Synthetic oligonucleotide
  Sense strand starting at position 331 of SEQ ID NO: 1888658
uacuaaugugugcccguua

SEQ ID NO: 2548355 - RNA, 19 nt, Artificial Sequence
  Description of Artificial Sequence: Synthetic oligonucleotide
  Antisense strand to SEQ ID NO: 2548354
uaacgggcacacauuagua

SEQ ID NO: 2548356 - RNA, 19 nt, Artificial Sequence
  Description of Artificial Sequence: Synthetic oligonucleotide
  Sense strand starting at position 1438 of SEQ ID NO: 1888658
uugucucaacucuaagaug

SEQ ID NO: 2548357 - RNA, 19 nt, Artificial Sequence
  Description of Artificial Sequence: Synthetic oligonucleotide
  Antisense strand to SEQ ID NO: 2548356
caucuuagaguugagacaa

SEQ ID NO: 2548358 - RNA, 19 nt, Artificial Sequence
  Description of Artificial Sequence: Synthetic oligonucleotide
  Sense strand starting at position 3923 of SEQ ID NO: 1888658
cauuuagagcuguguugau

SEQ ID NO: 2548359 - RNA, 19 nt, Artificial Sequence
  Description of Artificial Sequence: Synthetic oligonucleotide
  Antisense strand to SEQ ID NO: 2548358
aucaacacagcucuaaaug

SEQ ID NO: 2548360 - RNA, 19 nt, Artificial Sequence
  Description of Artificial Sequence: Synthetic oligonucleotide
  Sense strand starting at position 2852 of SEQ ID NO: 1888658
guguuaaauacagggaaug

SEQ ID NO: 2548361 - RNA, 19 nt, Artificial Sequence
  Description of Artificial Sequence: Synthetic oligonucleotide
  Antisense strand to SEQ ID NO: 2548360
cauucccuguauuuaacac

SEQ ID NO: 2548362 - RNA, 19 nt, Artificial Sequence
  Description of Artificial Sequence: Synthetic oligonucleotide
  Sense strand starting at position 917 of SEQ ID NO: 1888658
ggaaacuauugggcaaagu

SEQ ID NO: 2548363 - RNA, 19 nt, Artificial Sequence
  Description of Artificial Sequence: Synthetic oligonucleotide
  Antisense strand to SEQ ID NO: 2548362
acuuugcccaauaguuucc

SEQ ID NO: 2548364 - RNA, 19 nt, Artificial Sequence
  Description of Artificial Sequence: Synthetic oligonucleotide
  Sense strand starting at position 227 of SEQ ID NO: 1888658
cguggauggacuuagaagu

SEQ ID NO: 2548365 - RNA, 19 nt, Artificial Sequence
  Description of Artificial Sequence: Synthetic oligonucleotide
  Antisense strand to SEQ ID NO: 2548364
acuucuaaguccauccacg

SEQ ID NO: 2548366 - RNA, 19 nt, Artificial Sequence
  Description of Artificial Sequence: Synthetic oligonucleotide
  Sense strand starting at position 334 of SEQ ID NO: 1888658
uaaugugugcccguuacga

SEQ ID NO: 2548367 - RNA, 19 nt, Artificial Sequence
  Description of Artificial Sequence: Synthetic oligonucleotide
  Antisense strand to SEQ ID NO: 2548366
ucguaacgggcacacauua

SEQ ID NO: 2548368 - RNA, 19 nt, Artificial Sequence
  Description of Artificial Sequence: Synthetic oligonucleotide
  Sense strand starting at position 2771 of SEQ ID NO: 1888658
guucgugacagcguuuaau

SEQ ID NO: 2548369 - RNA, 19 nt, Artificial Sequence
  Description of Artificial Sequence: Synthetic oligonucleotide
  Antisense strand to SEQ ID NO: 2548368
auuaaacgcugucacgaac

SEQ ID NO: 2548370 - RNA, 19 nt, Artificial Sequence
  Description of Artificial Sequence: Synthetic oligonucleotide
  Sense strand starting at position 2769 of SEQ ID NO: 1888658
caguucgugacagcguuua

SEQ ID NO: 2548371 - RNA, 19 nt, Artificial Sequence
  Description of Artificial Sequence: Synthetic oligonucleotide
  Antisense strand to SEQ ID NO: 2548370
uaaacgcugucacgaacug

SEQ ID NO: 2548372 - RNA, 19 nt, Artificial Sequence
  Description of Artificial Sequence: Synthetic oligonucleotide
  Sense strand starting at position 2207 of SEQ ID NO: 1888658
agucaacuacgauagucau

SEQ ID NO: 2548373 - RNA, 19 nt, Artificial Sequence
  Description of Artificial Sequence: Synthetic oligonucleotide
  Antisense strand to SEQ ID NO: 2548372
augacuaucguaguugacu

SEQ ID NO: 2548374 - RNA, 19 nt, Artificial Sequence
  Description of Artificial Sequence: Synthetic oligonucleotide
  Sense strand starting at position 410 of SEQ ID NO: 1888658
ugauacaaguguccaggau

SEQ ID NO: 2548375 - RNA, 19 nt, Artificial Sequence
  Description of Artificial Sequence: Synthetic oligonucleotide
  Antisense strand to SEQ ID NO: 2548374
auccuggacacuuguauca

SEQ ID NO: 2548376 - RNA, 19 nt, Artificial Sequence
  Description of Artificial Sequence: Synthetic oligonucleotide
  Sense strand starting at position 2815 of SEQ ID NO: 1888658
agggcguugggagaguuaa

SEQ ID NO: 2548377 - RNA, 19 nt, Artificial Sequence
  Description of Artificial Sequence: Synthetic oligonucleotide
  Antisense strand to SEQ ID NO: 2548376
uuaacucucccaacgcccu

SEQ ID NO: 2548378 - RNA, 19 nt, Artificial Sequence
  Description of Artificial Sequence: Synthetic oligonucleotide
  Sense strand starting at position 307 of SEQ ID NO: 1888658
acagucaguaguugaggaa

SEQ ID NO: 2548379 - RNA, 19 nt, Artificial Sequence
  Description of Artificial Sequence: Synthetic oligonucleotide
  Antisense strand to SEQ ID NO: 2548378
uuccucaacuacugacugu

SEQ ID NO: 2548380 - RNA, 19 nt, Artificial Sequence
  Description of Artificial Sequence: Synthetic oligonucleotide
  Sense strand starting at position 2087 of SEQ ID NO: 1888658
ggaaguucggcacauuaug

SEQ ID NO: 2548381 - RNA, 19 nt, Artificial Sequence
  Description of Artificial Sequence: Synthetic oligonucleotide
  Antisense strand to SEQ ID NO: 2548380
cauaaugugccgaacuucc

SEQ ID NO: 2548382 - RNA, 19 nt, Artificial Sequence
  Description of Artificial Sequence: Synthetic oligonucleotide
  Sense strand starting at position 1290 of SEQ ID NO: 1888658
aggcaucguguauaugaaa

SEQ ID NO: 2548383 - RNA, 19 nt, Artificial Sequence
  Description of Artificial Sequence: Synthetic oligonucleotide
  Antisense strand to SEQ ID NO: 2548382
uuucauauacacgaugccu

SEQ ID NO: 2548384 - RNA, 19 nt, Artificial Sequence
  Description of Artificial Sequence: Synthetic oligonucleotide
  Sense strand starting at position 2622 of SEQ ID NO: 1888658
uaagguugcccacaguauu

SEQ ID NO: 2548385 - RNA, 19 nt, Artificial Sequence
  Description of Artificial Sequence: Synthetic oligonucleotide
  Antisense strand to SEQ ID NO: 2548384
aauacugugggcaaccuua

SEQ ID NO: 2548386 - RNA, 19 nt, Artificial Sequence
  Description of Artificial Sequence: Synthetic oligonucleotide
  Sense strand starting at position 1869 of SEQ ID NO: 1888658
gaguucguccagggagaug

SEQ ID NO: 2548387 - RNA, 19 nt, Artificial Sequence
  Description of Artificial Sequence: Synthetic oligonucleotide
  Antisense strand to SEQ ID NO: 2548386
caucucccuggacgaacuc

SEQ ID NO: 2548388 - RNA, 19 nt, Artificial Sequence
  Description of Artificial Sequence: Synthetic oligonucleotide
  Sense strand starting at position 399 of SEQ ID NO: 1888658
gcaguuguaguugauacaa

SEQ ID NO: 2548389 - RNA, 19 nt, Artificial Sequence
  Description of Artificial Sequence: Synthetic oligonucleotide
  Antisense strand to SEQ ID NO: 2548388
uuguaucaacuacaacugc

SEQ ID NO: 2548390 - RNA, 19 nt, Artificial Sequence
  Description of Artificial Sequence: Synthetic oligonucleotide
  Sense strand starting at position 901 of SEQ ID NO: 1888658
aacuuaauguguguuggga

SEQ ID NO: 2548391 - RNA, 19 nt, Artificial Sequence
  Description of Artificial Sequence: Synthetic oligonucleotide
  Antisense strand to SEQ ID NO: 2548390
ucccaacacacauuaaguu

SEQ ID NO: 2548392 - RNA, 19 nt, Artificial Sequence
  Description of Artificial Sequence: Synthetic oligonucleotide
  Sense strand starting at position 2085 of SEQ ID NO: 1888658
acggaaguucggcacauua

SEQ ID NO: 2548393 - RNA, 19 nt, Artificial Sequence
  Description of Artificial Sequence: Synthetic oligonucleotide
  Antisense strand to SEQ ID NO: 2548392
uaaugugccgaacuuccgu

SEQ ID NO: 2548394 - RNA, 19 nt, Artificial Sequence
  Description of Artificial Sequence: Synthetic oligonucleotide
  Sense strand starting at position 1288 of SEQ ID NO: 1888658
ugaggcaucguguauauga

SEQ ID NO: 2548395 - RNA, 19 nt, Artificial Sequence
  Description of Artificial Sequence: Synthetic oligonucleotide
  Antisense strand to SEQ ID NO: 2548394
ucauauacacgaugccuca

SEQ ID NO: 2548396 - RNA, 19 nt, Artificial Sequence
  Description of Artificial Sequence: Synthetic oligonucleotide
  Sense strand starting at position 1881 of SEQ ID NO: 1888658
ggagauguccgccaucuug

SEQ ID NO: 2548397 - RNA, 19 nt, Artificial Sequence
  Description of Artificial Sequence: Synthetic oligonucleotide
  Antisense strand to SEQ ID NO: 2548396
caagauggcggacaucucc

SEQ ID NO: 2548398 - RNA, 19 nt, Artificial Sequence
  Description of Artificial Sequence: Synthetic oligonucleotide
  Sense strand starting at position 2072 of SEQ ID NO: 1888658
ugcucaucugcauacggaa

SEQ ID NO: 2548399 - RNA, 19 nt, Artificial Sequence
  Description of Artificial Sequence: Synthetic oligonucleotide
  Antisense strand to SEQ ID NO: 2548398
uuccguaugcagaugagca

SEQ ID NO: 2548400 - RNA, 19 nt, Artificial Sequence
  Description of Artificial Sequence: Synthetic oligonucleotide
  Sense strand starting at position 1868 of SEQ ID NO: 1888658
ugaguucguccagggagau

SEQ ID NO: 2548401 - RNA, 19 nt, Artificial Sequence
  Description of Artificial Sequence: Synthetic oligonucleotide
  Antisense strand to SEQ ID NO: 2548400
aucucccuggacgaacuca

SEQ ID NO: 2548402 - RNA, 19 nt, Artificial Sequence
  Description of Artificial Sequence: Synthetic oligonucleotide
  Sense strand starting at position 3964 of SEQ ID NO: 1888658
aggugauacugccugugaa

SEQ ID NO: 2548403 - RNA, 19 nt, Artificial Sequence
  Description of Artificial Sequence: Synthetic oligonucleotide
  Antisense strand to SEQ ID NO: 2548402
uucacaggcaguaucaccu

SEQ ID NO: 2548404 - RNA, 19 nt, Artificial Sequence
  Description of Artificial Sequence: Synthetic oligonucleotide
  Sense strand starting at position 3967 of SEQ ID NO: 1888658
ugauacugccugugaauuc

SEQ ID NO: 2548405 - RNA, 19 nt, Artificial Sequence
  Description of Artificial Sequence: Synthetic oligonucleotide
  Antisense strand to SEQ ID NO: 2548404
gaauucacaggcaguauca

SEQ ID NO: 2548406 - RNA, 19 nt, Artificial Sequence
  Description of Artificial Sequence: Synthetic oligonucleotide
  Sense strand starting at position 379 of SEQ ID NO: 1888658
cgaauuaugaggugguggu

SEQ ID NO: 2548407 - RNA, 19 nt, Artificial Sequence
  Description of Artificial Sequence: Synthetic oligonucleotide
  Antisense strand to SEQ ID NO: 2548406
accaccaccucauaauucg

SEQ ID NO: 2548408 - RNA, 19 nt, Artificial Sequence
  Description of Artificial Sequence: Synthetic oligonucleotide
  Sense strand starting at position 3965 of SEQ ID NO: 1888658
ggugauacugccugugaau

SEQ ID NO: 2548409 - RNA, 19 nt, Artificial Sequence
  Description of Artificial Sequence: Synthetic oligonucleotide
  Antisense strand to SEQ ID NO: 2548408
auucacaggcaguaucacc

SEQ ID NO: 2548410 - RNA, 19 nt, Artificial Sequence
  Description of Artificial Sequence: Synthetic oligonucleotide
  Sense strand starting at position 3953 of SEQ ID NO: 1888658
uucguauagguaggugaua

SEQ ID NO: 2548411 - RNA, 19 nt, Artificial Sequence
  Description of Artificial Sequence: Synthetic oligonucleotide
  Antisense strand to SEQ ID NO: 2548410
uaucaccuaccuauacgaa

SEQ ID NO: 2548412 - RNA, 19 nt, Artificial Sequence
  Description of Artificial Sequence: Synthetic oligonucleotide
  Sense strand starting at position 3955 of SEQ ID NO: 1888658
cguauagguaggugauacu

SEQ ID NO: 2548413 - RNA, 19 nt, Artificial Sequence
  Description of Artificial Sequence: Synthetic oligonucleotide
  Antisense strand to SEQ ID NO: 2548412
aguaucaccuaccuauacg

SEQ ID NO: 2548414 - RNA, 19 nt, Artificial Sequence
  Description of Artificial Sequence: Synthetic oligonucleotide
  Sense strand starting at position 481 of SEQ ID NO: 1888658
aggcauacgggugguauua

SEQ ID NO: 2548415 - RNA, 19 nt, Artificial Sequence
  Description of Artificial Sequence: Synthetic oligonucleotide
  Antisense strand to SEQ ID NO: 2548414
uaauaccacccguaugccu

SEQ ID NO: 2548416 - RNA, 19 nt, Artificial Sequence
  Description of Artificial Sequence: Synthetic oligonucleotide
  Sense strand starting at position 2697 of SEQ ID NO: 1888658
ccaaacuucugcguauaac

SEQ ID NO: 2548417 - RNA, 19 nt, Artificial Sequence
  Description of Artificial Sequence: Synthetic oligonucleotide
  Antisense strand to SEQ ID NO: 2548416
guuauacgcagaaguuugg

SEQ ID NO: 2548418 - RNA, 19 nt, Artificial Sequence
  Description of Artificial Sequence: Synthetic oligonucleotide
  Sense strand starting at position 2696 of SEQ ID NO: 1888658
cccaaacuucugcguauaa

SEQ ID NO: 2548419 - RNA, 19 nt, Artificial Sequence
  Description of Artificial Sequence: Synthetic oligonucleotide
  Antisense strand to SEQ ID NO: 2548418
uuauacgcagaaguuuggg

SEQ ID NO: 2548420 - RNA, 19 nt, Artificial Sequence
  Description of Artificial Sequence: Synthetic oligonucleotide
  Sense strand starting at position 2774 of SEQ ID NO: 1888658
cgugacagcguuuaauaug

SEQ ID NO: 2548421 - RNA, 19 nt, Artificial Sequence
  Description of Artificial Sequence: Synthetic oligonucleotide
  Antisense strand to SEQ ID NO: 2548420
cauauuaaacgcugucacg

SEQ ID NO: 2548422 - RNA, 19 nt, Artificial Sequence
  Description of Artificial Sequence: Synthetic oligonucleotide
  Sense strand starting at position 398 of SEQ ID NO: 1888658
ggcaguuguaguugauaca

SEQ ID NO: 2548423 - RNA, 19 nt, Artificial Sequence
  Description of Artificial Sequence: Synthetic oligonucleotide
  Antisense strand to SEQ ID NO: 2548422
uguaucaacuacaacugcc

SEQ ID NO: 2548424 - RNA, 19 nt, Artificial Sequence
  Description of Artificial Sequence: Synthetic oligonucleotide
  Sense strand starting at position 1867 of SEQ ID NO: 1888658
augaguucguccagggaga

SEQ ID NO: 2548425 - RNA, 19 nt, Artificial Sequence
  Description of Artificial Sequence: Synthetic oligonucleotide
  Antisense strand to SEQ ID NO: 2548424
ucucccuggacgaacucau

SEQ ID NO: 2548426 - RNA, 19 nt, Artificial Sequence
  Description of Artificial Sequence: Synthetic oligonucleotide
  Sense strand starting at position 2919 of SEQ ID NO: 1888658
guagguguucggcacauau

SEQ ID NO: 2548427 - RNA, 19 nt, Artificial Sequence
  Description of Artificial Sequence: Synthetic oligonucleotide
  Antisense strand to SEQ ID NO: 2548426
auaugugccgaacaccuac

SEQ ID NO: 2548428 - RNA, 19 nt, Artificial Sequence
  Description of Artificial Sequence: Synthetic oligonucleotide
  Sense strand starting at position 1427 of SEQ ID NO: 1888658
cuaaacuucgguugucuca

SEQ ID NO: 2548429 - RNA, 19 nt, Artificial Sequence
  Description of Artificial Sequence: Synthetic oligonucleotide
  Antisense strand to SEQ ID NO: 2548428
ugagacaaccgaaguuuag

SEQ ID NO: 2548430 - RNA, 19 nt, Artificial Sequence
  Description of Artificial Sequence: Synthetic oligonucleotide
  Sense strand starting at position 3387 of SEQ ID NO: 1888659
gccuguuucggcccacaau

SEQ ID NO: 2548431 - RNA, 19 nt, Artificial Sequence
  Description of Artificial Sequence: Synthetic oligonucleotide
  Antisense strand to SEQ ID NO: 2548430
auugugggccgaaacaggc

SEQ ID NO: 2548432 - RNA, 19 nt, Artificial Sequence
  Description of Artificial Sequence: Synthetic oligonucleotide
  Sense strand starting at position 1440 of SEQ ID NO: 1888659
acuacauacgucuagaacu

SEQ ID NO: 2548433 - RNA, 19 nt, Artificial Sequence
  Description of Artificial Sequence: Synthetic oligonucleotide
  Antisense strand to SEQ ID NO: 2548432
aguucuagacguauguagu

SEQ ID NO: 2548434 - RNA, 19 nt, Artificial Sequence
  Description of Artificial Sequence: Synthetic oligonucleotide
  Sense strand starting at position 3226 of SEQ ID NO: 1888659
caacuuucccgaggaagac

SEQ ID NO: 2548435 - RNA, 19 nt, Artificial Sequence
  Description of Artificial Sequence: Synthetic oligonucleotide
  Antisense strand to SEQ ID NO: 2548434
gucuuccucgggaaaguug

SEQ ID NO: 2548436 - RNA, 19 nt, Artificial Sequence
  Description of Artificial Sequence: Synthetic oligonucleotide
  Sense strand starting at position 2206 of SEQ ID NO: 1888659
agggucuuagggugaaauu

SEQ ID NO: 2548437 - RNA, 19 nt, Artificial Sequence
  Description of Artificial Sequence: Synthetic oligonucleotide
  Antisense strand to SEQ ID NO: 2548436
aauuucacccuaagacccu

SEQ ID NO: 2548438 - RNA, 19 nt, Artificial Sequence
  Description of Artificial Sequence: Synthetic oligonucleotide
  Sense strand starting at position 2476 of SEQ ID NO: 1888659
gggugugucauugcgucuu

SEQ ID NO: 2548439 - RNA, 19 nt, Artificial Sequence
  Description of Artificial Sequence: Synthetic oligonucleotide
  Antisense strand to SEQ ID NO: 2548438
aagacgcaaugacacaccc

SEQ ID NO: 2548440 - RNA, 19 nt, Artificial Sequence
  Description of Artificial Sequence: Synthetic oligonucleotide
  Sense strand starting at position 2289 of SEQ ID NO: 1888659
aggagacuucccugccaca

SEQ ID NO: 2548441 - RNA, 19 nt, Artificial Sequence
  Description of Artificial Sequence: Synthetic oligonucleotide
  Antisense strand to SEQ ID NO: 2548440
uguggcagggaagucuccu

SEQ ID NO: 2548442 - RNA, 19 nt, Artificial Sequence
  Description of Artificial Sequence: Synthetic oligonucleotide
  Sense strand starting at position 2172 of SEQ ID NO: 1888659
gcccacuucuauguggaga

SEQ ID NO: 2548443 - RNA, 19 nt, Artificial Sequence
  Description of Artificial Sequence: Synthetic oligonucleotide
  Antisense strand to SEQ ID NO: 2548442
ucuccacauagaagugggc

SEQ ID NO: 2548444 - RNA, 19 nt, Artificial Sequence
  Description of Artificial Sequence: Synthetic oligonucleotide
  Sense strand starting at position 3316 of SEQ ID NO: 1888659
acaagcuguagucaguuau

SEQ ID NO: 2548445 - RNA, 19 nt, Artificial Sequence
  Description of Artificial Sequence: Synthetic oligonucleotide
  Antisense strand to SEQ ID NO: 2548444
auaacugacuacagcuugu

SEQ ID NO: 2548446 - RNA, 19 nt, Artificial Sequence
  Description of Artificial Sequence: Synthetic oligonucleotide
  Sense strand starting at position 2614 of SEQ ID NO: 1888659
agaggucaguccguuaaag

SEQ ID NO: 2548447 - RNA, 19 nt, Artificial Sequence
  Description of Artificial Sequence: Synthetic oligonucleotide
  Antisense strand to SEQ ID NO: 2548446
cuuuaacggacugaccucu

SEQ ID NO: 2548448 - RNA, 19 nt, Artificial Sequence
  Description of Artificial Sequence: Synthetic oligonucleotide
  Sense strand starting at position 1606 of SEQ ID NO: 1888659
uggaacauuugcugaagga

SEQ ID NO: 2548449 - RNA, 19 nt, Artificial Sequence
  Description of Artificial Sequence: Synthetic oligonucleotide
  Antisense strand to SEQ ID NO: 2548448
uccuucagcaaauguucca

SEQ ID NO: 2548450 - RNA, 19 nt, Artificial Sequence
  Description of Artificial Sequence: Synthetic oligonucleotide
  Sense strand starting at position 691 of SEQ ID NO: 1888659
gaucuaucagcuggcacau

SEQ ID NO: 2548451 - RNA, 19 nt, Artificial Sequence
  Description of Artificial Sequence: Synthetic oligonucleotide
  Antisense strand to SEQ ID NO: 2548450
augugccagcugauagauc

SEQ ID NO: 2548452 - RNA, 19 nt, Artificial Sequence
  Description of Artificial Sequence: Synthetic oligonucleotide
  Sense strand starting at position 2260 of SEQ ID NO: 1888659
gaccauggcuguguuaaca

SEQ ID NO: 2548453 - RNA, 19 nt, Artificial Sequence
  Description of Artificial Sequence: Synthetic oligonucleotide
  Antisense strand to SEQ ID NO: 2548452
uguuaacacagccaugguc

SEQ ID NO: 2548454 - RNA, 19 nt, Artificial Sequence
  Description of Artificial Sequence: Synthetic oligonucleotide
  Sense strand starting at position 2234 of SEQ ID NO: 1888659
gcauaucacucagugggua

SEQ ID NO: 2548455 - RNA, 19 nt, Artificial Sequence
  Description of Artificial Sequence: Synthetic oligonucleotide
  Antisense strand to SEQ ID NO: 2548454
uacccacugagugauaugc

SEQ ID NO: 2548456 - RNA, 19 nt, Artificial Sequence
  Description of Artificial Sequence: Synthetic oligonucleotide
  Sense strand starting at position 2836 of SEQ ID NO: 1888659
ggccgucacugaccugaaa

SEQ ID NO: 2548457 - RNA, 19 nt, Artificial Sequence
  Description of Artificial Sequence: Synthetic oligonucleotide
  Antisense strand to SEQ ID NO: 2548456
uuucaggucagugacggcc

SEQ ID NO: 2548458 - RNA, 19 nt, Artificial Sequence
  Description of Artificial Sequence: Synthetic oligonucleotide
  Sense strand starting at position 2616 of SEQ ID NO: 1888659
aggucaguccguuaaagca

SEQ ID NO: 2548459 - RNA, 19 nt, Artificial Sequence
  Description of Artificial Sequence: Synthetic oligonucleotide
  Antisense strand to SEQ ID NO: 2548458
ugcuuuaacggacugaccu

SEQ ID NO: 2548460 - RNA, 19 nt, Artificial Sequence
  Description of Artificial Sequence: Synthetic oligonucleotide
  Sense strand starting at position 872 of SEQ ID NO: 1888659
guagcaaucccacacguuu

SEQ ID NO: 2548461 - RNA, 19 nt, Artificial Sequence
  Description of Artificial Sequence: Synthetic oligonucleotide
  Antisense strand to SEQ ID NO: 2548460
aaacgugugggauugcuac

SEQ ID NO: 2548462 - RNA, 19 nt, Artificial Sequence
  Description of Artificial Sequence: Synthetic oligonucleotide
  Sense strand starting at position 3388 of SEQ ID NO: 1888659
ccuguuucggcccacaauu

SEQ ID NO: 2548463 - RNA, 19 nt, Artificial Sequence
  Description of Artificial Sequence: Synthetic oligonucleotide
  Antisense strand to SEQ ID NO: 2548462
aauugugggccgaaacagg

SEQ ID NO: 2548464 - RNA, 19 nt, Artificial Sequence
  Description of Artificial Sequence: Synthetic oligonucleotide
  Sense strand starting at position 2259 of SEQ ID NO: 1888659
ugaccauggcuguguuaac

SEQ ID NO: 2548465 - RNA, 19 nt, Artificial Sequence
  Description of Artificial Sequence: Synthetic oligonucleotide
  Antisense strand to SEQ ID NO: 2548464
guuaacacagccaugguca

SEQ ID NO: 2548466 - RNA, 19 nt, Artificial Sequence
  Description of Artificial Sequence: Synthetic oligonucleotide
  Sense strand starting at position 2047 of SEQ ID NO: 1888659
gugugugcgcguuucuaua

SEQ ID NO: 2548467 - RNA, 19 nt, Artificial Sequence
  Description of Artificial Sequence: Synthetic oligonucleotide
  Antisense strand to SEQ ID NO: 2548466
uauagaaacgcgcacacac

SEQ ID NO: 2548468 - RNA, 19 nt, Artificial Sequence
  Description of Artificial Sequence: Synthetic oligonucleotide
  Sense strand starting at position 2490 of SEQ ID NO: 1888659
gucuuucccuccucagagu

SEQ ID NO: 2548469 - RNA, 19 nt, Artificial Sequence
  Description of Artificial Sequence: Synthetic oligonucleotide
  Antisense strand to SEQ ID NO: 2548468
acucugaggagggaaagac

SEQ ID NO: 2548470 - RNA, 19 nt, Artificial Sequence
  Description of Artificial Sequence: Synthetic oligonucleotide
  Sense strand starting at position 2046 of SEQ ID NO: 1888659
ggugugugcgcguuucuau

SEQ ID NO: 2548471 - RNA, 19 nt, Artificial Sequence
  Description of Artificial Sequence: Synthetic oligonucleotide
  Antisense strand to SEQ ID NO: 2548470
auagaaacgcgcacacacc

SEQ ID NO: 2548472 - RNA, 19 nt, Artificial Sequence
  Description of Artificial Sequence: Synthetic oligonucleotide
  Sense strand starting at position 2045 of SEQ ID NO: 1888659
uggugugugcgcguuucua

SEQ ID NO: 2548473 - RNA, 19 nt, Artificial Sequence
  Description of Artificial Sequence: Synthetic oligonucleotide
  Antisense strand to SEQ ID NO: 2548472
uagaaacgcgcacacacca

SEQ ID NO: 2548474 - RNA, 19 nt, Artificial Sequence
  Description of Artificial Sequence: Synthetic oligonucleotide
  Sense strand starting at position 3147 of SEQ ID NO: 1888659
ggugcuacaccuugccaaa

SEQ ID NO: 2548475 - RNA, 19 nt, Artificial Sequence
  Description of Artificial Sequence: Synthetic oligonucleotide
  Antisense strand to SEQ ID NO: 2548474
uuuggcaagguguagcacc

SEQ ID NO: 2548476 - RNA, 19 nt, Artificial Sequence
  Description of Artificial Sequence: Synthetic oligonucleotide
  Sense strand starting at position 2989 of SEQ ID NO: 1888659
guaguuacccucuguaacu

SEQ ID NO: 2548477 - RNA, 19 nt, Artificial Sequence
  Description of Artificial Sequence: Synthetic oligonucleotide
  Antisense strand to SEQ ID NO: 2548476
aguuacagaggguaacuac

SEQ ID NO: 2548478 - RNA, 19 nt, Artificial Sequence
  Description of Artificial Sequence: Synthetic oligonucleotide
  Sense strand starting at position 3018 of SEQ ID NO: 1888659
guaccugaccuguggcuua

SEQ ID NO: 2548479 - RNA, 19 nt, Artificial Sequence
  Description of Artificial Sequence: Synthetic oligonucleotide
  Antisense strand to SEQ ID NO: 2548478
uaagccacaggucagguac

SEQ ID NO: 2548480 - RNA, 19 nt, Artificial Sequence
  Description of Artificial Sequence: Synthetic oligonucleotide
  Sense strand starting at position 3274 of SEQ ID NO: 1888659
acuguuaugugcccucaca

SEQ ID NO: 2548481 - RNA, 19 nt, Artificial Sequence
  Description of Artificial Sequence: Synthetic oligonucleotide
  Antisense strand to SEQ ID NO: 2548480
ugugagggcacauaacagu

SEQ ID NO: 2548482 - RNA, 19 nt, Artificial Sequence
  Description of Artificial Sequence: Synthetic oligonucleotide
  Sense strand starting at position 3419 of SEQ ID NO: 1888659
ccugaaacaugaugaacaa

SEQ ID NO: 2548483 - RNA, 19 nt, Artificial Sequence
  Description of Artificial Sequence: Synthetic oligonucleotide
  Antisense strand to SEQ ID NO: 2548482
uuguucaucauguuucagg

SEQ ID NO: 2548484 - RNA, 19 nt, Artificial Sequence
  Description of Artificial Sequence: Synthetic oligonucleotide
  Sense strand starting at position 2109 of SEQ ID NO: 1888659
gcaguauuucugcguggca

SEQ ID NO: 2548485 - RNA, 19 nt, Artificial Sequence
  Description of Artificial Sequence: Synthetic oligonucleotide
  Antisense strand to SEQ ID NO: 2548484
ugccacgcagaaauacugc

SEQ ID NO: 2548486 - RNA, 19 nt, Artificial Sequence
  Description of Artificial Sequence: Synthetic oligonucleotide
  Sense strand starting at position 637 of SEQ ID NO: 1888659
uaaugaucuccacguugcu

SEQ ID NO: 2548487 - RNA, 19 nt, Artificial Sequence
  Description of Artificial Sequence: Synthetic oligonucleotide
  Antisense strand to SEQ ID NO: 2548486
agcaacguggagaucauua

SEQ ID NO: 2548488 - RNA, 19 nt, Artificial Sequence
  Description of Artificial Sequence: Synthetic oligonucleotide
  Sense strand starting at position 3981 of SEQ ID NO: 1888659
gguggucguaagugcuaua

SEQ ID NO: 2548489 - RNA, 19 nt, Artificial Sequence
  Description of Artificial Sequence: Synthetic oligonucleotide
  Antisense strand to SEQ ID NO: 2548488
uauagcacuuacgaccacc

SEQ ID NO: 2548490 - RNA, 19 nt, Artificial Sequence
  Description of Artificial Sequence: Synthetic oligonucleotide
  Sense strand starting at position 2978 of SEQ ID NO: 1888659
gaagaauggugguaguuac

SEQ ID NO: 2548491 - RNA, 19 nt, Artificial Sequence
  Description of Artificial Sequence: Synthetic oligonucleotide
  Antisense strand to SEQ ID NO: 2548490
guaacuaccaccauucuuc

SEQ ID NO: 2548492 - RNA, 19 nt, Artificial Sequence
  Description of Artificial Sequence: Synthetic oligonucleotide
  Sense strand starting at position 2975 of SEQ ID NO: 1888659
agagaagaauggugguagu

SEQ ID NO: 2548493 - RNA, 19 nt, Artificial Sequence
  Description of Artificial Sequence: Synthetic oligonucleotide
  Antisense strand to SEQ ID NO: 2548492
acuaccaccauucuucucu

SEQ ID NO: 2548494 - RNA, 19 nt, Artificial Sequence
  Description of Artificial Sequence: Synthetic oligonucleotide
  Sense strand starting at position 3327 of SEQ ID NO: 1888659
ucaguuauuugguguccca

SEQ ID NO: 2548495 - RNA, 19 nt, Artificial Sequence
  Description of Artificial Sequence: Synthetic oligonucleotide
  Antisense strand to SEQ ID NO: 2548494
ugggacaccaaauaacuga

SEQ ID NO: 2548496 - RNA, 19 nt, Artificial Sequence
  Description of Artificial Sequence: Synthetic oligonucleotide
  Sense strand starting at position 3190 of SEQ ID NO: 1888659
guaguuaacuccuaugcau

SEQ ID NO: 2548497 - RNA, 19 nt, Artificial Sequence
  Description of Artificial Sequence: Synthetic oligonucleotide
  Antisense strand to SEQ ID NO: 2548496
augcauaggaguuaacuac

SEQ ID NO: 2548498 - RNA, 19 nt, Artificial Sequence
  Description of Artificial Sequence: Synthetic oligonucleotide
  Sense strand starting at position 2247 of SEQ ID NO: 1888659
uggguacuguugugaccau

SEQ ID NO: 2548499 - RNA, 19 nt, Artificial Sequence
  Description of Artificial Sequence: Synthetic oligonucleotide
  Antisense strand to SEQ ID NO: 2548498
auggucacaacaguaccca

SEQ ID NO: 2548500 - RNA, 19 nt, Artificial Sequence
  Description of Artificial Sequence: Synthetic oligonucleotide
  Sense strand starting at position 2365 of SEQ ID NO: 1888659
ugggcacugucgcaauauu

SEQ ID NO: 2548501 - RNA, 19 nt, Artificial Sequence
  Description of Artificial Sequence: Synthetic oligonucleotide
  Antisense strand to SEQ ID NO: 2548500
aauauugcgacagugccca

SEQ ID NO: 2548502 - RNA, 19 nt, Artificial Sequence
  Description of Artificial Sequence: Synthetic oligonucleotide
  Sense strand starting at position 2392 of SEQ ID NO: 1888659
gcaucauucucuggcucga

SEQ ID NO: 2548503 - RNA, 19 nt, Artificial Sequence
  Description of Artificial Sequence: Synthetic oligonucleotide
  Antisense strand to SEQ ID NO: 2548502
ucgagccagagaaugaugc

SEQ ID NO: 2548504 - RNA, 19 nt, Artificial Sequence
  Description of Artificial Sequence: Synthetic oligonucleotide
  Sense strand starting at position 3411 of SEQ ID NO: 1888660
acacuugagagcugggaau

SEQ ID NO: 2548505 - RNA, 19 nt, Artificial Sequence
  Description of Artificial Sequence: Synthetic oligonucleotide
  Antisense strand to SEQ ID NO: 2548504
auucccagcucucaagugu

SEQ ID NO: 2548506 - RNA, 19 nt, Artificial Sequence
  Description of Artificial Sequence: Synthetic oligonucleotide
  Sense strand starting at position 3453 of SEQ ID NO: 1888660
auaugugguuucuugcaaa

SEQ ID NO: 2548507 - RNA, 19 nt, Artificial Sequence
  Description of Artificial Sequence: Synthetic oligonucleotide
  Antisense strand to SEQ ID NO: 2548506
uuugcaagaaaccacauau

SEQ ID NO: 2548508 - RNA, 19 nt, Artificial Sequence
  Description of Artificial Sequence: Synthetic oligonucleotide
  Sense strand starting at position 3389 of SEQ ID NO: 1888660
ucaauuugcuuaggaaaca

SEQ ID NO: 2548509 - RNA, 19 nt, Artificial Sequence
  Description of Artificial Sequence: Synthetic oligonucleotide
  Antisense strand to SEQ ID NO: 2548508
uguuuccuaagcaaauuga

SEQ ID NO: 2548510 - RNA, 19 nt, Artificial Sequence
  Description of Artificial Sequence: Synthetic oligonucleotide
  Sense strand starting at position 3832 of SEQ ID NO: 1888660
agcgaaaccucgucacaca

SEQ ID NO: 2548511 - RNA, 19 nt, Artificial Sequence
  Description of Artificial Sequence: Synthetic oligonucleotide
  Antisense strand to SEQ ID NO: 2548510
ugugugacgagguuucgcu

SEQ ID NO: 2548512 - RNA, 19 nt, Artificial Sequence
  Description of Artificial Sequence: Synthetic oligonucleotide
  Sense strand starting at position 3516 of SEQ ID NO: 1888660
uuugauuucuuccauaugu

SEQ ID NO: 2548513 - RNA, 19 nt, Artificial Sequence
  Description of Artificial Sequence: Synthetic oligonucleotide
  Antisense strand to SEQ ID NO: 2548512
acauauggaagaaaucaaa

SEQ ID NO: 2548514 - RNA, 19 nt, Artificial Sequence
  Description of Artificial Sequence: Synthetic oligonucleotide
  Sense strand starting at position 211 of SEQ ID NO: 1888660
guccucacucaguguguuu

SEQ ID NO: 2548515 - RNA, 19 nt, Artificial Sequence
  Description of Artificial Sequence: Synthetic oligonucleotide
  Antisense strand to SEQ ID NO: 2548514
aaacacacugagugaggac

SEQ ID NO: 2548516 - RNA, 19 nt, Artificial Sequence
  Description of Artificial Sequence: Synthetic oligonucleotide
  Sense strand starting at position 107 of SEQ ID NO: 1888661
ugggugugacccgaagaga

SEQ ID NO: 2548517 - RNA, 19 nt, Artificial Sequence
  Description of Artificial Sequence: Synthetic oligonucleotide
  Antisense strand to SEQ ID NO: 2548516
ucucuucgggucacaccca

SEQ ID NO: 2548518 - RNA, 19 nt, Artificial Sequence
  Description of Artificial Sequence: Synthetic oligonucleotide
  Sense strand starting at position 3572 of SEQ ID NO: 1888662
uggcuugauagguacugga

SEQ ID NO: 2548519 - RNA, 19 nt, Artificial Sequence
  Description of Artificial Sequence: Synthetic oligonucleotide
  Antisense strand to SEQ ID NO: 2548518
uccaguaccuaucaagcca

SEQ ID NO: 2548520 - RNA, 19 nt, Artificial Sequence
  Description of Artificial Sequence: Synthetic oligonucleotide
  Sense strand starting at position 3351 of SEQ ID NO: 1888662
gccgauuguggacaugaaa

SEQ ID NO: 2548521 - RNA, 19 nt, Artificial Sequence
  Description of Artificial Sequence: Synthetic oligonucleotide
  Antisense strand to SEQ ID NO: 2548520
uuucauguccacaaucggc

SEQ ID NO: 2548522 - RNA, 19 nt, Artificial Sequence
  Description of Artificial Sequence: Synthetic oligonucleotide
  Sense strand starting at position 3365 of SEQ ID NO: 1888662
ugaaauauaugguuucuug

SEQ ID NO: 2548523 - RNA, 19 nt, Artificial Sequence
  Description of Artificial Sequence: Synthetic oligonucleotide
  Antisense strand to SEQ ID NO: 2548522
caagaaaccauauauuuca

SEQ ID NO: 2548524 - RNA, 19 nt, Artificial Sequence
  Description of Artificial Sequence: Synthetic oligonucleotide
  Sense strand starting at position 3488 of SEQ ID NO: 1888662
cggaguuucgcuguugucu

SEQ ID NO: 2548525 - RNA, 19 nt, Artificial Sequence
  Description of Artificial Sequence: Synthetic oligonucleotide
  Antisense strand to SEQ ID NO: 2548524
agacaacagcgaaacuccg

SEQ ID NO: 2548526 - RNA, 19 nt, Artificial Sequence
  Description of Artificial Sequence: Synthetic oligonucleotide
  Sense strand starting at position 3166 of SEQ ID NO: 1888662
gcagucacccgagaucuca

SEQ ID NO: 2548527 - RNA, 19 nt, Artificial Sequence
  Description of Artificial Sequence: Synthetic oligonucleotide
  Antisense strand to SEQ ID NO: 2548526
ugagaucucgggugacugc

SEQ ID NO: 2548528 - RNA, 19 nt, Artificial Sequence
  Description of Artificial Sequence: Synthetic oligonucleotide
  Sense strand starting at position 3369 of SEQ ID NO: 1888662
auauaugguuucuugcaaa

SEQ ID NO: 2548529 - RNA, 19 nt, Artificial Sequence
  Description of Artificial Sequence: Synthetic oligonucleotide
  Antisense strand to SEQ ID NO: 2548528
uuugcaagaaaccauauau

SEQ ID NO: 2548530 - RNA, 19 nt, Artificial Sequence
  Description of Artificial Sequence: Synthetic oligonucleotide
  Sense strand starting at position 3210 of SEQ ID NO: 1888662
gugcgaaccuccgucucaa

SEQ ID NO: 2548531 - RNA, 19 nt, Artificial Sequence
  Description of Artificial Sequence: Synthetic oligonucleotide
  Antisense strand to SEQ ID NO: 2548530
uugagacggagguucgcac

SEQ ID NO: 2548532 - RNA, 19 nt, Artificial Sequence
  Description of Artificial Sequence: Synthetic oligonucleotide
  Sense strand starting at position 2616 of SEQ ID NO: 1888662
gcaacagagucagagucuu

SEQ ID NO: 2548533 - RNA, 19 nt, Artificial Sequence
  Description of Artificial Sequence: Synthetic oligonucleotide
  Antisense strand to SEQ ID NO: 2548532
aagacucugacucuguugc

SEQ ID NO: 2548534 - RNA, 19 nt, Artificial Sequence
  Description of Artificial Sequence: Synthetic oligonucleotide
  Sense strand starting at position 3366 of SEQ ID NO: 1888663
ggacaugaaauaugugguu

SEQ ID NO: 2548535 - RNA, 19 nt, Artificial Sequence
  Description of Artificial Sequence: Synthetic oligonucleotide
  Antisense strand to SEQ ID NO: 2548534
aaccacauauuucaugucc

SEQ ID NO: 2548536 - RNA, 19 nt, Artificial Sequence
  Description of Artificial Sequence: Synthetic oligonucleotide
  Sense strand starting at position 3371 of SEQ ID NO: 1888663
ugaaauaugugguuucuug

SEQ ID NO: 2548537 - RNA, 19 nt, Artificial Sequence
  Description of Artificial Sequence: Synthetic oligonucleotide
  Antisense strand to SEQ ID NO: 2548536
caagaaaccacauauuuca

SEQ ID NO: 2548538 - RNA, 19 nt, Artificial Sequence
  Description of Artificial Sequence: Synthetic oligonucleotide
  Sense strand starting at position 3375 of SEQ ID NO: 1888663
auaugugguuucuugccaa

SEQ ID NO: 2548539 - RNA, 19 nt, Artificial Sequence
  Description of Artificial Sequence: Synthetic oligonucleotide
  Antisense strand to SEQ ID NO: 2548538
uuggcaagaaaccacauau

SEQ ID NO: 2548540 - RNA, 19 nt, Artificial Sequence
  Description of Artificial Sequence: Synthetic oligonucleotide
  Sense strand starting at position 3369 of SEQ ID NO: 1888663
caugaaauaugugguuucu

SEQ ID NO: 2548541 - RNA, 19 nt, Artificial Sequence
  Description of Artificial Sequence: Synthetic oligonucleotide
  Antisense strand to SEQ ID NO: 2548540
agaaaccacauauuucaug

SEQ ID NO: 2548542 - RNA, 19 nt, Artificial Sequence
  Description of Artificial Sequence: Synthetic oligonucleotide
  Sense strand starting at position 3970 of SEQ ID NO: 1888664
gagucagacuggucuugca

SEQ ID NO: 2548543 - RNA, 19 nt, Artificial Sequence
  Description of Artificial Sequence: Synthetic oligonucleotide
  Antisense strand to SEQ ID NO: 2548542
ugcaagaccagucugacuc

SEQ ID NO: 2548544 - RNA, 19 nt, Artificial Sequence
  Description of Artificial Sequence: Synthetic oligonucleotide
  Sense strand starting at position 2669 of SEQ ID NO: 1888664
ggauugugaugcgccgaga

SEQ ID NO: 2548545 - RNA, 19 nt, Artificial Sequence
  Description of Artificial Sequence: Synthetic oligonucleotide
  Antisense strand to SEQ ID NO: 2548544
ucucggcgcaucacaaucc

SEQ ID NO: 2548546 - RNA, 19 nt, Artificial Sequence
  Description of Artificial Sequence: Synthetic oligonucleotide
  Sense strand starting at position 3295 of SEQ ID NO: 1888664
gcccuuucugcaggguuua

SEQ ID NO: 2548547 - RNA, 19 nt, Artificial Sequence
  Description of Artificial Sequence: Synthetic oligonucleotide
  Antisense strand to SEQ ID NO: 2548546
uaaacccugcagaaagggc

SEQ ID NO: 2548548 - RNA, 19 nt, Artificial Sequence
  Description of Artificial Sequence: Synthetic oligonucleotide
  Sense strand starting at position 3973 of SEQ ID NO: 1888664
ucagacuggucuugcaaga

SEQ ID NO: 2548549 - RNA, 19 nt, Artificial Sequence
  Description of Artificial Sequence: Synthetic oligonucleotide
  Antisense strand to SEQ ID NO: 2548548
ucuugcaagaccagucuga

SEQ ID NO: 2548550 - RNA, 19 nt, Artificial Sequence
  Description of Artificial Sequence: Synthetic oligonucleotide
  Sense strand starting at position 1214 of SEQ ID NO: 1888665
cuguuaaguucuguuauuc

SEQ ID NO: 2548551 - RNA, 19 nt, Artificial Sequence
  Description of Artificial Sequence: Synthetic oligonucleotide
  Antisense strand to SEQ ID NO: 2548550
gaauaacagaacuuaacag

SEQ ID NO: 2548552 - RNA, 19 nt, Artificial Sequence
  Description of Artificial Sequence: Synthetic oligonucleotide
  Sense strand starting at position 1213 of SEQ ID NO: 1888665
acuguuaaguucuguuauu

SEQ ID NO: 2548553 - RNA, 19 nt, Artificial Sequence
  Description of Artificial Sequence: Synthetic oligonucleotide
  Antisense strand to SEQ ID NO: 2548552
aauaacagaacuuaacagu

SEQ ID NO: 2548554 - RNA, 19 nt, Artificial Sequence
  Description of Artificial Sequence: Synthetic oligonucleotide
  Sense strand starting at position 3058 of SEQ ID NO: 1888666
gccacccuucuagaaagau

SEQ ID NO: 2548555 - RNA, 19 nt, Artificial Sequence
  Description of Artificial Sequence: Synthetic oligonucleotide
  Antisense strand to SEQ ID NO: 2548554
aucuuucuagaaggguggc

SEQ ID NO: 2548556 - RNA, 19 nt, Artificial Sequence
  Description of Artificial Sequence: Synthetic oligonucleotide
  Sense strand starting at position 921 of SEQ ID NO: 1888666
gccguuuguccagugacca

SEQ ID NO: 2548557 - RNA, 19 nt, Artificial Sequence
  Description of Artificial Sequence: Synthetic oligonucleotide
  Antisense strand to SEQ ID NO: 2548556
uggucacuggacaaacggc

SEQ ID NO: 2548558 - RNA, 19 nt, Artificial Sequence
  Description of Artificial Sequence: Synthetic oligonucleotide
  Sense strand starting at position 376 of SEQ ID NO: 1888666
aggaauccuuugucaaaca

SEQ ID NO: 2548559 - RNA, 19 nt, Artificial Sequence
  Description of Artificial Sequence: Synthetic oligonucleotide
  Antisense strand to SEQ ID NO: 2548558
uguuugacaaaggauuccu

SEQ ID NO: 2548560 - RNA, 19 nt, Artificial Sequence
  Description of Artificial Sequence: Synthetic oligonucleotide
  Sense strand starting at position 990 of SEQ ID NO: 1888666
gugugaaucccucaccaga

SEQ ID NO: 2548561 - RNA, 19 nt, Artificial Sequence
  Description of Artificial Sequence: Synthetic oligonucleotide
  Antisense strand to SEQ ID NO: 2548560
ucuggugagggauucacac

SEQ ID NO: 2548562 - RNA, 19 nt, Artificial Sequence
  Description of Artificial Sequence: Synthetic oligonucleotide
  Sense strand starting at position 38 of SEQ ID NO: 1888666
cgagcaacacacugaaaua

SEQ ID NO: 2548563 - RNA, 19 nt, Artificial Sequence
  Description of Artificial Sequence: Synthetic oligonucleotide
  Antisense strand to SEQ ID NO: 2548562
uauuucaguguguugcucg

SEQ ID NO: 2548564 - RNA, 19 nt, Artificial Sequence
  Description of Artificial Sequence: Synthetic oligonucleotide
  Sense strand starting at position 3085 of SEQ ID NO: 1888666
aagugagugccaggaaaga

SEQ ID NO: 2548565 - RNA, 19 nt, Artificial Sequence
  Description of Artificial Sequence: Synthetic oligonucleotide
  Antisense strand to SEQ ID NO: 2548564
ucuuuccuggcacucacuu

SEQ ID NO: 2548566 - RNA, 19 nt, Artificial Sequence
  Description of Artificial Sequence: Synthetic oligonucleotide
  Sense strand starting at position 374 of SEQ ID NO: 1888666
cuaggaauccuuugucaaa

SEQ ID NO: 2548567 - RNA, 19 nt, Artificial Sequence
  Description of Artificial Sequence: Synthetic oligonucleotide
  Antisense strand to SEQ ID NO: 2548566
uuugacaaaggauuccuag

SEQ ID NO: 2548568 - RNA, 19 nt, Artificial Sequence
  Description of Artificial Sequence: Synthetic oligonucleotide
  Sense strand starting at position 992 of SEQ ID NO: 1888666
gugaaucccucaccagaug

SEQ ID NO: 2548569 - RNA, 19 nt, Artificial Sequence
  Description of Artificial Sequence: Synthetic oligonucleotide
  Antisense strand to SEQ ID NO: 2548568
caucuggugagggauucac

SEQ ID NO: 2548570 - RNA, 19 nt, Artificial Sequence
  Description of Artificial Sequence: Synthetic oligonucleotide
  Sense strand starting at position 3246 of SEQ ID NO: 1888666
ugauaugaaugcccacuau

SEQ ID NO: 2548571 - RNA, 19 nt, Artificial Sequence
  Description of Artificial Sequence: Synthetic oligonucleotide
  Antisense strand to SEQ ID NO: 2548570
auagugggcauucauauca

SEQ ID NO: 2548572 - RNA, 19 nt, Artificial Sequence
  Description of Artificial Sequence: Synthetic oligonucleotide
  Sense strand starting at position 3424 of SEQ ID NO: 1888666
ggacacuggucagaaauuu

SEQ ID NO: 2548573 - RNA, 19 nt, Artificial Sequence
  Description of Artificial Sequence: Synthetic oligonucleotide
  Antisense strand to SEQ ID NO: 2548572
aaauuucugaccagugucc

SEQ ID NO: 2548574 - RNA, 19 nt, Artificial Sequence
  Description of Artificial Sequence: Synthetic oligonucleotide
  Sense strand starting at position 2439 of SEQ ID NO: 1888666
cccggcccucaugaauaau

SEQ ID NO: 2548575 - RNA, 19 nt, Artificial Sequence
  Description of Artificial Sequence: Synthetic oligonucleotide
  Antisense strand to SEQ ID NO: 2548574
auuauucaugagggccggg

SEQ ID NO: 2548576 - RNA, 19 nt, Artificial Sequence
  Description of Artificial Sequence: Synthetic oligonucleotide
  Sense strand starting at position 1435 of SEQ ID NO: 1888666
ggugcaggagaugguuaaa

SEQ ID NO: 2548577 - RNA, 19 nt, Artificial Sequence
  Description of Artificial Sequence: Synthetic oligonucleotide
  Antisense strand to SEQ ID NO: 2548576
uuuaaccaucuccugcacc

SEQ ID NO: 2548578 - RNA, 19 nt, Artificial Sequence
  Description of Artificial Sequence: Synthetic oligonucleotide
  Sense strand starting at position 3459 of SEQ ID NO: 1888666
gaauucuuguggccaagag

SEQ ID NO: 2548579 - RNA, 19 nt, Artificial Sequence
  Description of Artificial Sequence: Synthetic oligonucleotide
  Antisense strand to SEQ ID NO: 2548578
cucuuggccacaagaauuc

SEQ ID NO: 2548580 - RNA, 19 nt, Artificial Sequence
  Description of Artificial Sequence: Synthetic oligonucleotide
  Sense strand starting at position 3460 of SEQ ID NO: 1888666
aauucuuguggccaagagu

SEQ ID NO: 2548581 - RNA, 19 nt, Artificial Sequence
  Description of Artificial Sequence: Synthetic oligonucleotide
  Antisense strand to SEQ ID NO: 2548580
acucuuggccacaagaauu

SEQ ID NO: 2548582 - RNA, 19 nt, Artificial Sequence
  Description of Artificial Sequence: Synthetic oligonucleotide
  Sense strand starting at position 2503 of SEQ ID NO: 1888666
gcguaugauuaauuaagaa

SEQ ID NO: 2548583 - RNA, 19 nt, Artificial Sequence
  Description of Artificial Sequence: Synthetic oligonucleotide
  Antisense strand to SEQ ID NO: 2548582
uucuuaauuaaucauacgc

SEQ ID NO: 2548584 - RNA, 19 nt, Artificial Sequence
  Description of Artificial Sequence: Synthetic oligonucleotide
  Sense strand starting at position 142 of SEQ ID NO: 1888666
gcuauuagaagguguuaaa

SEQ ID NO: 2548585 - RNA, 19 nt, Artificial Sequence
  Description of Artificial Sequence: Synthetic oligonucleotide
  Antisense strand to SEQ ID NO: 2548584
uuuaacaccuucuaauagc

SEQ ID NO: 2548586 - RNA, 19 nt, Artificial Sequence
  Description of Artificial Sequence: Synthetic oligonucleotide
  Sense strand starting at position 3163 of SEQ ID NO: 1888666
gccuuauuguuugccauuu

SEQ ID NO: 2548587 - RNA, 19 nt, Artificial Sequence
  Description of Artificial Sequence: Synthetic oligonucleotide
  Antisense strand to SEQ ID NO: 2548586
aaauggcaaacaauaaggc

SEQ ID NO: 2548588 - RNA, 19 nt, Artificial Sequence
  Description of Artificial Sequence: Synthetic oligonucleotide
  Sense strand starting at position 363 of SEQ ID NO: 1888666
cacgcaggugucuaggaau

SEQ ID NO: 2548589 - RNA, 19 nt, Artificial Sequence
  Description of Artificial Sequence: Synthetic oligonucleotide
  Antisense strand to SEQ ID NO: 2548588
auuccuagacaccugcgug

SEQ ID NO: 2548590 - RNA, 19 nt, Artificial Sequence
  Description of Artificial Sequence: Synthetic oligonucleotide
  Sense strand starting at position 3433 of SEQ ID NO: 1888666
ucagaaauuugcugagaaa

SEQ ID NO: 2548591 - RNA, 19 nt, Artificial Sequence
  Description of Artificial Sequence: Synthetic oligonucleotide
  Antisense strand to SEQ ID NO: 2548590
uuucucagcaaauuucuga

SEQ ID NO: 2548592 - RNA, 19 nt, Artificial Sequence
  Description of Artificial Sequence: Synthetic oligonucleotide
  Sense strand starting at position 3610 of SEQ ID NO: 1888666
gggucugggcagcauuauu

SEQ ID NO: 2548593 - RNA, 19 nt, Artificial Sequence
  Description of Artificial Sequence: Synthetic oligonucleotide
  Antisense strand to SEQ ID NO: 2548592
aauaaugcugcccagaccc

SEQ ID NO: 2548594 - RNA, 19 nt, Artificial Sequence
  Description of Artificial Sequence: Synthetic oligonucleotide
  Sense strand starting at position 979 of SEQ ID NO: 1888666
caguaaacagugugugaau

SEQ ID NO: 2548595 - RNA, 19 nt, Artificial Sequence
  Description of Artificial Sequence: Synthetic oligonucleotide
  Antisense strand to SEQ ID NO: 2548594
auucacacacuguuuacug

SEQ ID NO: 2548596 - RNA, 19 nt, Artificial Sequence
  Description of Artificial Sequence: Synthetic oligonucleotide
  Sense strand starting at position 2869 of SEQ ID NO: 1888666
cgggaacugaccugucuuu

SEQ ID NO: 2548597 - RNA, 19 nt, Artificial Sequence
  Description of Artificial Sequence: Synthetic oligonucleotide
  Antisense strand to SEQ ID NO: 2548596
aaagacaggucaguucccg

SEQ ID NO: 2548598 - RNA, 19 nt, Artificial Sequence
  Description of Artificial Sequence: Synthetic oligonucleotide
  Sense strand starting at position 3155 of SEQ ID NO: 1888666
aagguuuggccuuauuguu

SEQ ID NO: 2548599 - RNA, 19 nt, Artificial Sequence
  Description of Artificial Sequence: Synthetic oligonucleotide
  Antisense strand to SEQ ID NO: 2548598
aacaauaaggccaaaccuu

SEQ ID NO: 2548600 - RNA, 19 nt, Artificial Sequence
  Description of Artificial Sequence: Synthetic oligonucleotide
  Sense strand starting at position 140 of SEQ ID NO: 1888666
uggcuauuagaagguguua

SEQ ID NO: 2548601 - RNA, 19 nt, Artificial Sequence
  Description of Artificial Sequence: Synthetic oligonucleotide
  Antisense strand to SEQ ID NO: 2548600
uaacaccuucuaauagcca

SEQ ID NO: 2548602 - RNA, 19 nt, Artificial Sequence
  Description of Artificial Sequence: Synthetic oligonucleotide
  Sense strand starting at position 977 of SEQ ID NO: 1888666
cucaguaaacaguguguga

SEQ ID NO: 2548603 - RNA, 19 nt, Artificial Sequence
  Description of Artificial Sequence: Synthetic oligonucleotide
  Antisense strand to SEQ ID NO: 2548602
ucacacacuguuuacugag

SEQ ID NO: 2548604 - RNA, 19 nt, Artificial Sequence
  Description of Artificial Sequence: Synthetic oligonucleotide
  Sense strand starting at position 988 of SEQ ID NO: 1888666
gugugugaaucccucacca

SEQ ID NO: 2548605 - RNA, 19 nt, Artificial Sequence
  Description of Artificial Sequence: Synthetic oligonucleotide
  Antisense strand to SEQ ID NO: 2548604
uggugagggauucacacac

SEQ ID NO: 2548606 - RNA, 19 nt, Artificial Sequence
  Description of Artificial Sequence: Synthetic oligonucleotide
  Sense strand starting at position 101 of SEQ ID NO: 1888666
aagugaaucuuacccgcuu

SEQ ID NO: 2548607 - RNA, 19 nt, Artificial Sequence
  Description of Artificial Sequence: Synthetic oligonucleotide
  Antisense strand to SEQ ID NO: 2548606
aagcggguaagauucacuu

SEQ ID NO: 2548608 - RNA, 19 nt, Artificial Sequence
  Description of Artificial Sequence: Synthetic oligonucleotide
  Sense strand starting at position 102 of SEQ ID NO: 1888666
agugaaucuuacccgcuua

SEQ ID NO: 2548609 - RNA, 19 nt, Artificial Sequence
  Description of Artificial Sequence: Synthetic oligonucleotide
  Antisense strand to SEQ ID NO: 2548608
uaagcggguaagauucacu

SEQ ID NO: 2548610 - RNA, 19 nt, Artificial Sequence
  Description of Artificial Sequence: Synthetic oligonucleotide
  Sense strand starting at position 2499 of SEQ ID NO: 1888666
agcagcguaugauuaauua

SEQ ID NO: 2548611 - RNA, 19 nt, Artificial Sequence
  Description of Artificial Sequence: Synthetic oligonucleotide
  Antisense strand to SEQ ID NO: 2548610
uaauuaaucauacgcugcu

SEQ ID NO: 2548612 - RNA, 19 nt, Artificial Sequence
  Description of Artificial Sequence: Synthetic oligonucleotide
  Sense strand starting at position 2081 of SEQ ID NO: 1888666
cgaacuuuccagcgagggu

SEQ ID NO: 2548613 - RNA, 19 nt, Artificial Sequence
  Description of Artificial Sequence: Synthetic oligonucleotide
  Antisense strand to SEQ ID NO: 2548612
acccucgcuggaaaguucg

SEQ ID NO: 2548614 - RNA, 19 nt, Artificial Sequence
  Description of Artificial Sequence: Synthetic oligonucleotide
  Sense strand starting at position 2494 of SEQ ID NO: 1888666
ugggcagcagcguaugauu

SEQ ID NO: 2548615 - RNA, 19 nt, Artificial Sequence
  Description of Artificial Sequence: Synthetic oligonucleotide
  Antisense strand to SEQ ID NO: 2548614
aaucauacgcugcugccca

SEQ ID NO: 2548616 - RNA, 19 nt, Artificial Sequence
  Description of Artificial Sequence: Synthetic oligonucleotide
  Sense strand starting at position 395 of SEQ ID NO: 1888666
cuggcaugcacacgaguau

SEQ ID NO: 2548617 - RNA, 19 nt, Artificial Sequence
  Description of Artificial Sequence: Synthetic oligonucleotide
  Antisense strand to SEQ ID NO: 2548616
auacucgugugcaugccag

SEQ ID NO: 2548618 - RNA, 19 nt, Artificial Sequence
  Description of Artificial Sequence: Synthetic oligonucleotide
  Sense strand starting at position 1063 of SEQ ID NO: 1888666
cugggaugccagugugguu

SEQ ID NO: 2548619 - RNA, 19 nt, Artificial Sequence
  Description of Artificial Sequence: Synthetic oligonucleotide
  Antisense strand to SEQ ID NO: 2548618
aaccacacuggcaucccag

SEQ ID NO: 2548620 - RNA, 19 nt, Artificial Sequence
  Description of Artificial Sequence: Synthetic oligonucleotide
  Sense strand starting at position 145 of SEQ ID NO: 1888666
auuagaagguguuaaauga

SEQ ID NO: 2548621 - RNA, 19 nt, Artificial Sequence
  Description of Artificial Sequence: Synthetic oligonucleotide
  Antisense strand to SEQ ID NO: 2548620
ucauuuaacaccuucuaau

SEQ ID NO: 2548622 - RNA, 19 nt, Artificial Sequence
  Description of Artificial Sequence: Synthetic oligonucleotide
  Sense strand starting at position 3677 of SEQ ID NO: 1888666
gagcauaccugagaucaca

SEQ ID NO: 2548623 - RNA, 19 nt, Artificial Sequence
  Description of Artificial Sequence: Synthetic oligonucleotide
  Antisense strand to SEQ ID NO: 2548622
ugugaucucagguaugcuc

SEQ ID NO: 2548624 - RNA, 19 nt, Artificial Sequence
  Description of Artificial Sequence: Synthetic oligonucleotide
  Sense strand starting at position 500 of SEQ ID NO: 1888666
ccagcuagccuucguggaa

SEQ ID NO: 2548625 - RNA, 19 nt, Artificial Sequence
  Description of Artificial Sequence: Synthetic oligonucleotide
  Antisense strand to SEQ ID NO: 2548624
uuccacgaaggcuagcugg

SEQ ID NO: 2548626 - RNA, 19 nt, Artificial Sequence
  Description of Artificial Sequence: Synthetic oligonucleotide
  Sense strand starting at position 2496 of SEQ ID NO: 1888666
ggcagcagcguaugauuaa

SEQ ID NO: 2548627 - RNA, 19 nt, Artificial Sequence
  Description of Artificial Sequence: Synthetic oligonucleotide
  Antisense strand to SEQ ID NO: 2548626
uuaaucauacgcugcugcc

SEQ ID NO: 2548628 - RNA, 19 nt, Artificial Sequence
  Description of Artificial Sequence: Synthetic oligonucleotide
  Sense strand starting at position 3133 of SEQ ID NO: 1888666
gauuuagagucuggccauc

SEQ ID NO: 2548629 - RNA, 19 nt, Artificial Sequence
  Description of Artificial Sequence: Synthetic oligonucleotide
  Antisense strand to SEQ ID NO: 2548628
gauggccagacucuaaauc

SEQ ID NO: 2548630 - RNA, 19 nt, Artificial Sequence
  Description of Artificial Sequence: Synthetic oligonucleotide
  Sense strand starting at position 722 of SEQ ID NO: 1888666
ggucgaauucauugucgua

SEQ ID NO: 2548631 - RNA, 19 nt, Artificial Sequence
  Description of Artificial Sequence: Synthetic oligonucleotide
  Antisense strand to SEQ ID NO: 2548630
uacgacaaugaauucgacc

SEQ ID NO: 2548632 - RNA, 19 nt, Artificial Sequence
  Description of Artificial Sequence: Synthetic oligonucleotide
  Sense strand starting at position 3101 of SEQ ID NO: 1888666
agacuauauuccuaaggca

SEQ ID NO: 2548633 - RNA, 19 nt, Artificial Sequence
  Description of Artificial Sequence: Synthetic oligonucleotide
  Antisense strand to SEQ ID NO: 2548632
ugccuuaggaauauagucu

SEQ ID NO: 2548634 - RNA, 19 nt, Artificial Sequence
  Description of Artificial Sequence: Synthetic oligonucleotide
  Sense strand starting at position 3951 of SEQ ID NO: 1888667
ggagaacugugagcagaag

SEQ ID NO: 2548635 - RNA, 19 nt, Artificial Sequence
  Description of Artificial Sequence: Synthetic oligonucleotide
  Antisense strand to SEQ ID NO: 2548634
cuucugcucacaguucucc

SEQ ID NO: 2548636 - RNA, 19 nt, Artificial Sequence
  Description of Artificial Sequence: Synthetic oligonucleotide
  Sense strand starting at position 423 of SEQ ID NO: 1888667
aguuaugacgaacaacuuu

SEQ ID NO: 2548637 - RNA, 19 nt, Artificial Sequence
  Description of Artificial Sequence: Synthetic oligonucleotide
  Antisense strand to SEQ ID NO: 2548636
aaaguuguucgucauaacu

SEQ ID NO: 2548638 - RNA, 19 nt, Artificial Sequence
  Description of Artificial Sequence: Synthetic oligonucleotide
  Sense strand starting at position 215 of SEQ ID NO: 1888667
aucuauauuggugaucauc

SEQ ID NO: 2548639 - RNA, 19 nt, Artificial Sequence
  Description of Artificial Sequence: Synthetic oligonucleotide
  Antisense strand to SEQ ID NO: 2548638
gaugaucaccaauauagau

SEQ ID NO: 2548640 - RNA, 19 nt, Artificial Sequence
  Description of Artificial Sequence: Synthetic oligonucleotide
  Sense strand starting at position 3706 of SEQ ID NO: 1888667
aguauuccuccugagauca

SEQ ID NO: 2548641 - RNA, 19 nt, Artificial Sequence
  Description of Artificial Sequence: Synthetic oligonucleotide
  Antisense strand to SEQ ID NO: 2548640
ugaucucaggaggaauacu

SEQ ID NO: 2548642 - RNA, 19 nt, Artificial Sequence
  Description of Artificial Sequence: Synthetic oligonucleotide
  Sense strand starting at position 1009 of SEQ ID NO: 1888667
uacugaguugagcaauaca

SEQ ID NO: 2548643 - RNA, 19 nt, Artificial Sequence
  Description of Artificial Sequence: Synthetic oligonucleotide
  Antisense strand to SEQ ID NO: 2548642
uguauugcucaacucagua

SEQ ID NO: 2548644 - RNA, 19 nt, Artificial Sequence
  Description of Artificial Sequence: Synthetic oligonucleotide
  Sense strand starting at position 3178 of SEQ ID NO: 1888667
auguacucagcugaaauga

SEQ ID NO: 2548645 - RNA, 19 nt, Artificial Sequence
  Description of Artificial Sequence: Synthetic oligonucleotide
  Antisense strand to SEQ ID NO: 2548644
ucauuucagcugaguacau

SEQ ID NO: 2548646 - RNA, 19 nt, Artificial Sequence
  Description of Artificial Sequence: Synthetic oligonucleotide
  Sense strand starting at position 1006 of SEQ ID NO: 1888667
auauacugaguugagcaau

SEQ ID NO: 2548647 - RNA, 19 nt, Artificial Sequence
  Description of Artificial Sequence: Synthetic oligonucleotide
  Antisense strand to SEQ ID NO: 2548646
auugcucaacucaguauau

SEQ ID NO: 2548648 - RNA, 19 nt, Artificial Sequence
  Description of Artificial Sequence: Synthetic oligonucleotide
  Sense strand starting at position 1242 of SEQ ID NO: 1888667
cuaugagaauuugaacuag

SEQ ID NO: 2548649 - RNA, 19 nt, Artificial Sequence
  Description of Artificial Sequence: Synthetic oligonucleotide
  Antisense strand to SEQ ID NO: 2548648
cuaguucaaauucucauag

SEQ ID NO: 2548650 - RNA, 19 nt, Artificial Sequence
  Description of Artificial Sequence: Synthetic oligonucleotide
  Sense strand starting at position 3337 of SEQ ID NO: 1888667
ggaguucuccaacaaggca

SEQ ID NO: 2548651 - RNA, 19 nt, Artificial Sequence
  Description of Artificial Sequence: Synthetic oligonucleotide
  Antisense strand to SEQ ID NO: 2548650
ugccuuguuggagaacucc

SEQ ID NO: 2548652 - RNA, 19 nt, Artificial Sequence
  Description of Artificial Sequence: Synthetic oligonucleotide
  Sense strand starting at position 2972 of SEQ ID NO: 1888667
cucucaauuccuugagaga

SEQ ID NO: 2548653 - RNA, 19 nt, Artificial Sequence
  Description of Artificial Sequence: Synthetic oligonucleotide
  Antisense strand to SEQ ID NO: 2548652
ucucucaaggaauugagag

SEQ ID NO: 2548654 - RNA, 19 nt, Artificial Sequence
  Description of Artificial Sequence: Synthetic oligonucleotide
  Sense strand starting at position 301 of SEQ ID NO: 1888667
uucuuuaggccagaucaca

SEQ ID NO: 2548655 - RNA, 19 nt, Artificial Sequence
  Description of Artificial Sequence: Synthetic oligonucleotide
  Antisense strand to SEQ ID NO: 2548654
ugugaucuggccuaaagaa

SEQ ID NO: 2548656 - RNA, 19 nt, Artificial Sequence
  Description of Artificial Sequence: Synthetic oligonucleotide
  Sense strand starting at position 420 of SEQ ID NO: 1888667
gucaguuaugacgaacaac

SEQ ID NO: 2548657 - RNA, 19 nt, Artificial Sequence
  Description of Artificial Sequence: Synthetic oligonucleotide
  Antisense strand to SEQ ID NO: 2548656
guuguucgucauaacugac

SEQ ID NO: 2548658 - RNA, 19 nt, Artificial Sequence
  Description of Artificial Sequence: Synthetic oligonucleotide
  Sense strand starting at position 218 of SEQ ID NO: 1888667
uauauuggugaucaucagu

SEQ ID NO: 2548659 - RNA, 19 nt, Artificial Sequence
  Description of Artificial Sequence: Synthetic oligonucleotide
  Antisense strand to SEQ ID NO: 2548658
acugaugaucaccaauaua

SEQ ID NO: 2548660 - RNA, 19 nt, Artificial Sequence
  Description of Artificial Sequence: Synthetic oligonucleotide
  Sense strand starting at position 3701 of SEQ ID NO: 1888667
gggagaguauuccuccuga

SEQ ID NO: 2548661 - RNA, 19 nt, Artificial Sequence
  Description of Artificial Sequence: Synthetic oligonucleotide
  Antisense strand to SEQ ID NO: 2548660
ucaggaggaauacucuccc

SEQ ID NO: 2548662 - RNA, 19 nt, Artificial Sequence
  Description of Artificial Sequence: Synthetic oligonucleotide
  Sense strand starting at position 390 of SEQ ID NO: 1888667
uguauuuacugcccuuauu

SEQ ID NO: 2548663 - RNA, 19 nt, Artificial Sequence
  Description of Artificial Sequence: Synthetic oligonucleotide
  Antisense strand to SEQ ID NO: 2548662
aauaagggcaguaaauaca

SEQ ID NO: 2548664 - RNA, 19 nt, Artificial Sequence
  Description of Artificial Sequence: Synthetic oligonucleotide
  Sense strand starting at position 2971 of SEQ ID NO: 1888667
ucucucaauuccuugagag

SEQ ID NO: 2548665 - RNA, 19 nt, Artificial Sequence
  Description of Artificial Sequence: Synthetic oligonucleotide
  Antisense strand to SEQ ID NO: 2548664
cucucaaggaauugagaga

SEQ ID NO: 2548666 - RNA, 19 nt, Artificial Sequence
  Description of Artificial Sequence: Synthetic oligonucleotide
  Sense strand starting at position 1253 of SEQ ID NO: 1888667
ugaacuagucagggaaguu

SEQ ID NO: 2548667 - RNA, 19 nt, Artificial Sequence
  Description of Artificial Sequence: Synthetic oligonucleotide
  Antisense strand to SEQ ID NO: 2548666
aacuucccugacuaguuca

SEQ ID NO: 2548668 - RNA, 19 nt, Artificial Sequence
  Description of Artificial Sequence: Synthetic oligonucleotide
  Sense strand starting at position 1209 of SEQ ID NO: 1888667
ugaauaagaguuggguauu

SEQ ID NO: 2548669 - RNA, 19 nt, Artificial Sequence
  Description of Artificial Sequence: Synthetic oligonucleotide
  Antisense strand to SEQ ID NO: 2548668
aauacccaacucuuauuca

SEQ ID NO: 2548670 - RNA, 19 nt, Artificial Sequence
  Description of Artificial Sequence: Synthetic oligonucleotide
  Sense strand starting at position 217 of SEQ ID NO: 1888667
cuauauuggugaucaucag

SEQ ID NO: 2548671 - RNA, 19 nt, Artificial Sequence
  Description of Artificial Sequence: Synthetic oligonucleotide
  Antisense strand to SEQ ID NO: 2548670
cugaugaucaccaauauag

SEQ ID NO: 2548672 - RNA, 19 nt, Artificial Sequence
  Description of Artificial Sequence: Synthetic oligonucleotide
  Sense strand starting at position 2929 of SEQ ID NO: 1888667
gacuguuaugaaugacucu

SEQ ID NO: 2548673 - RNA, 19 nt, Artificial Sequence
  Description of Artificial Sequence: Synthetic oligonucleotide
  Antisense strand to SEQ ID NO: 2548672
agagucauucauaacaguc

SEQ ID NO: 2548674 - RNA, 19 nt, Artificial Sequence
  Description of Artificial Sequence: Synthetic oligonucleotide
  Sense strand starting at position 3938 of SEQ ID NO: 1888667
ccaaacgucccugggagaa

SEQ ID NO: 2548675 - RNA, 19 nt, Artificial Sequence
  Description of Artificial Sequence: Synthetic oligonucleotide
  Antisense strand to SEQ ID NO: 2548674
uucucccagggacguuugg

SEQ ID NO: 2548676 - RNA, 19 nt, Artificial Sequence
  Description of Artificial Sequence: Synthetic oligonucleotide
  Sense strand starting at position 2932 of SEQ ID NO: 1888667
uguuaugaaugacucuauu

SEQ ID NO: 2548677 - RNA, 19 nt, Artificial Sequence
  Description of Artificial Sequence: Synthetic oligonucleotide
  Antisense strand to SEQ ID NO: 2548676
aauagagucauucauaaca

SEQ ID NO: 2548678 - RNA, 19 nt, Artificial Sequence
  Description of Artificial Sequence: Synthetic oligonucleotide
  Sense strand starting at position 3636 of SEQ ID NO: 1888667
uugguaagguuucuggaga

SEQ ID NO: 2548679 - RNA, 19 nt, Artificial Sequence
  Description of Artificial Sequence: Synthetic oligonucleotide
  Antisense strand to SEQ ID NO: 2548678
ucuccagaaaccuuaccaa

SEQ ID NO: 2548680 - RNA, 19 nt, Artificial Sequence
  Description of Artificial Sequence: Synthetic oligonucleotide
  Sense strand starting at position 1208 of SEQ ID NO: 1888667
gugaauaagaguuggguau

SEQ ID NO: 2548681 - RNA, 19 nt, Artificial Sequence
  Description of Artificial Sequence: Synthetic oligonucleotide
  Antisense strand to SEQ ID NO: 2548680
auacccaacucuuauucac

SEQ ID NO: 2548682 - RNA, 19 nt, Artificial Sequence
  Description of Artificial Sequence: Synthetic oligonucleotide
  Sense strand starting at position 2697 of SEQ ID NO: 1888667
cauugcucaguauagguaa

SEQ ID NO: 2548683 - RNA, 19 nt, Artificial Sequence
  Description of Artificial Sequence: Synthetic oligonucleotide
  Antisense strand to SEQ ID NO: 2548682
uuaccuauacugagcaaug

SEQ ID NO: 2548684 - RNA, 19 nt, Artificial Sequence
  Description of Artificial Sequence: Synthetic oligonucleotide
  Sense strand starting at position 247 of SEQ ID NO: 1888667
gaaggaucauauguucugu

SEQ ID NO: 2548685 - RNA, 19 nt, Artificial Sequence
  Description of Artificial Sequence: Synthetic oligonucleotide
  Antisense strand to SEQ ID NO: 2548684
acagaacauaugauccuuc

SEQ ID NO: 2548686 - RNA, 19 nt, Artificial Sequence
  Description of Artificial Sequence: Synthetic oligonucleotide
  Sense strand starting at position 1220 of SEQ ID NO: 1888667
uggguauugccacaaagca

SEQ ID NO: 2548687 - RNA, 19 nt, Artificial Sequence
  Description of Artificial Sequence: Synthetic oligonucleotide
  Antisense strand to SEQ ID NO: 2548686
ugcuuuguggcaauaccca

SEQ ID NO: 2548688 - RNA, 19 nt, Artificial Sequence
  Description of Artificial Sequence: Synthetic oligonucleotide
  Sense strand starting at position 1262 of SEQ ID NO: 1888667
cagggaaguugccucauga

SEQ ID NO: 2548689 - RNA, 19 nt, Artificial Sequence
  Description of Artificial Sequence: Synthetic oligonucleotide
  Antisense strand to SEQ ID NO: 2548688
ucaugaggcaacuucccug

SEQ ID NO: 2548690 - RNA, 19 nt, Artificial Sequence
  Description of Artificial Sequence: Synthetic oligonucleotide
  Sense strand starting at position 2897 of SEQ ID NO: 1888667
ccaaacuguugagcauuaa

SEQ ID NO: 2548691 - RNA, 19 nt, Artificial Sequence
  Description of Artificial Sequence: Synthetic oligonucleotide
  Antisense strand to SEQ ID NO: 2548690
uuaaugcucaacaguuugg

SEQ ID NO: 2548692 - RNA, 19 nt, Artificial Sequence
  Description of Artificial Sequence: Synthetic oligonucleotide
  Sense strand starting at position 3937 of SEQ ID NO: 1888667
uccaaacgucccugggaga

SEQ ID NO: 2548693 - RNA, 19 nt, Artificial Sequence
  Description of Artificial Sequence: Synthetic oligonucleotide
  Antisense strand to SEQ ID NO: 2548692
ucucccagggacguuugga

SEQ ID NO: 2548694 - RNA, 19 nt, Artificial Sequence
  Description of Artificial Sequence: Synthetic oligonucleotide
  Sense strand starting at position 3804 of SEQ ID NO: 1888667
agacuuuaguuacuaaugu

SEQ ID NO: 2548695 - RNA, 19 nt, Artificial Sequence
  Description of Artificial Sequence: Synthetic oligonucleotide
  Antisense strand to SEQ ID NO: 2548694
acauuaguaacuaaagucu

SEQ ID NO: 2548696 - RNA, 19 nt, Artificial Sequence
  Description of Artificial Sequence: Synthetic oligonucleotide
  Sense strand starting at position 2970 of SEQ ID NO: 1888667
gucucucaauuccuugaga

SEQ ID NO: 2548697 - RNA, 19 nt, Artificial Sequence
  Description of Artificial Sequence: Synthetic oligonucleotide
  Antisense strand to SEQ ID NO: 2548696
ucucaaggaauugagagac

SEQ ID NO: 2548698 - RNA, 19 nt, Artificial Sequence
  Description of Artificial Sequence: Synthetic oligonucleotide
  Sense strand starting at position 940 of SEQ ID NO: 1888667
cugucagaaccaugcacaa

SEQ ID NO: 2548699 - RNA, 19 nt, Artificial Sequence
  Description of Artificial Sequence: Synthetic oligonucleotide
  Antisense strand to SEQ ID NO: 2548698
uugugcaugguucugacag

SEQ ID NO: 2548700 - RNA, 19 nt, Artificial Sequence
  Description of Artificial Sequence: Synthetic oligonucleotide
  Sense strand starting at position 2332 of SEQ ID NO: 1888667
uggauuaugugacuuucuu

SEQ ID NO: 2548701 - RNA, 19 nt, Artificial Sequence
  Description of Artificial Sequence: Synthetic oligonucleotide
  Antisense strand to SEQ ID NO: 2548700
aagaaagucacauaaucca

SEQ ID NO: 2548702 - RNA, 19 nt, Artificial Sequence
  Description of Artificial Sequence: Synthetic oligonucleotide
  Sense strand starting at position 2695 of SEQ ID NO: 1888667
aucauugcucaguauaggu

SEQ ID NO: 2548703 - RNA, 19 nt, Artificial Sequence
  Description of Artificial Sequence: Synthetic oligonucleotide
  Antisense strand to SEQ ID NO: 2548702
accuauacugagcaaugau

SEQ ID NO: 2548704 - RNA, 19 nt, Artificial Sequence
  Description of Artificial Sequence: Synthetic oligonucleotide
  Sense strand starting at position 3437 of SEQ ID NO: 1888667
gggugacuuuauguuaauu

SEQ ID NO: 2548705 - RNA, 19 nt, Artificial Sequence
  Description of Artificial Sequence: Synthetic oligonucleotide
  Antisense strand to SEQ ID NO: 2548704
aauuaacauaaagucaccc

SEQ ID NO: 2548706 - RNA, 19 nt, Artificial Sequence
  Description of Artificial Sequence: Synthetic oligonucleotide
  Sense strand starting at position 195 of SEQ ID NO: 1888667
gucuuacuguaaucuauaa

SEQ ID NO: 2548707 - RNA, 19 nt, Artificial Sequence
  Description of Artificial Sequence: Synthetic oligonucleotide
  Antisense strand to SEQ ID NO: 2548706
uuauagauuacaguaagac

SEQ ID NO: 2548708 - RNA, 19 nt, Artificial Sequence
  Description of Artificial Sequence: Synthetic oligonucleotide
  Sense strand starting at position 3879 of SEQ ID NO: 1888667
aggcauccaugcuuagaau

SEQ ID NO: 2548709 - RNA, 19 nt, Artificial Sequence
  Description of Artificial Sequence: Synthetic oligonucleotide
  Antisense strand to SEQ ID NO: 2548708
auucuaagcauggaugccu

SEQ ID NO: 2548710 - RNA, 19 nt, Artificial Sequence
  Description of Artificial Sequence: Synthetic oligonucleotide
  Sense strand starting at position 1092 of SEQ ID NO: 1888667
caugcaucaaggugguaga

SEQ ID NO: 2548711 - RNA, 19 nt, Artificial Sequence
  Description of Artificial Sequence: Synthetic oligonucleotide
  Antisense strand to SEQ ID NO: 2548710
ucuaccaccuugaugcaug

SEQ ID NO: 2548712 - RNA, 19 nt, Artificial Sequence
  Description of Artificial Sequence: Synthetic oligonucleotide
  Sense strand starting at position 252 of SEQ ID NO: 1888667
aucauauguucuguagauu

SEQ ID NO: 2548713 - RNA, 19 nt, Artificial Sequence
  Description of Artificial Sequence: Synthetic oligonucleotide
  Antisense strand to SEQ ID NO: 2548712
aaucuacagaacauaugau

SEQ ID NO: 2548714 - RNA, 19 nt, Artificial Sequence
  Description of Artificial Sequence: Synthetic oligonucleotide
  Sense strand starting at position 2676 of SEQ ID NO: 1888668
agcauaaauggauauuguu

SEQ ID NO: 2548715 - RNA, 19 nt, Artificial Sequence
  Description of Artificial Sequence: Synthetic oligonucleotide
  Antisense strand to SEQ ID NO: 2548714
aacaauauccauuuaugcu

SEQ ID NO: 2548716 - RNA, 19 nt, Artificial Sequence
  Description of Artificial Sequence: Synthetic oligonucleotide
  Sense strand starting at position 3059 of SEQ ID NO: 1888668
ugaacacuuugggugaaua

SEQ ID NO: 2548717 - RNA, 19 nt, Artificial Sequence
  Description of Artificial Sequence: Synthetic oligonucleotide
  Antisense strand to SEQ ID NO: 2548716
uauucacccaaaguguuca

SEQ ID NO: 2548718 - RNA, 19 nt, Artificial Sequence
  Description of Artificial Sequence: Synthetic oligonucleotide
  Sense strand starting at position 809 of SEQ ID NO: 1888668
ugaacuacucucuggauga

SEQ ID NO: 2548719 - RNA, 19 nt, Artificial Sequence
  Description of Artificial Sequence: Synthetic oligonucleotide
  Antisense strand to SEQ ID NO: 2548718
ucauccagagaguaguuca

SEQ ID NO: 2548720 - RNA, 19 nt, Artificial Sequence
  Description of Artificial Sequence: Synthetic oligonucleotide
  Sense strand starting at position 551 of SEQ ID NO: 1888668
cgaacaaccuccuuagaaa

SEQ ID NO: 2548721 - RNA, 19 nt, Artificial Sequence
  Description of Artificial Sequence: Synthetic oligonucleotide
  Antisense strand to SEQ ID NO: 2548720
uuucuaaggagguuguucg

SEQ ID NO: 2548722 - RNA, 19 nt, Artificial Sequence
  Description of Artificial Sequence: Synthetic oligonucleotide
  Sense strand starting at position 3060 of SEQ ID NO: 1888668
gaacacuuugggugaauac

SEQ ID NO: 2548723 - RNA, 19 nt, Artificial Sequence
  Description of Artificial Sequence: Synthetic oligonucleotide
  Antisense strand to SEQ ID NO: 2548722
guauucacccaaaguguuc

SEQ ID NO: 2548724 - RNA, 19 nt, Artificial Sequence
  Description of Artificial Sequence: Synthetic oligonucleotide
  Sense strand starting at position 880 of SEQ ID NO: 1888668
ggugauugacuauaauugu

SEQ ID NO: 2548725 - RNA, 19 nt, Artificial Sequence
  Description of Artificial Sequence: Synthetic oligonucleotide
  Antisense strand to SEQ ID NO: 2548724
acaauuauagucaaucacc

SEQ ID NO: 2548726 - RNA, 19 nt, Artificial Sequence
  Description of Artificial Sequence: Synthetic oligonucleotide
  Sense strand starting at position 2017 of SEQ ID NO: 1888668
uguauugugagguccgcuu

SEQ ID NO: 2548727 - RNA, 19 nt, Artificial Sequence
  Description of Artificial Sequence: Synthetic oligonucleotide
  Antisense strand to SEQ ID NO: 2548726
aagcggaccucacaauaca

SEQ ID NO: 2548728 - RNA, 19 nt, Artificial Sequence
  Description of Artificial Sequence: Synthetic oligonucleotide
  Sense strand starting at position 3615 of SEQ ID NO: 1888668
aguacaaaugucuaucauu

SEQ ID NO: 2548729 - RNA, 19 nt, Artificial Sequence
  Description of Artificial Sequence: Synthetic oligonucleotide
  Antisense strand to SEQ ID NO: 2548728
aaugauagacauuuguacu

SEQ ID NO: 2548730 - RNA, 19 nt, Artificial Sequence
  Description of Artificial Sequence: Synthetic oligonucleotide
  Sense strand starting at position 1962 of SEQ ID NO: 1888668
ucacauaaccauggugaua

SEQ ID NO: 2548731 - RNA, 19 nt, Artificial Sequence
  Description of Artificial Sequence: Synthetic oligonucleotide
  Antisense strand to SEQ ID NO: 2548730
uaucaccaugguuauguga

SEQ ID NO: 2548732 - RNA, 19 nt, Artificial Sequence
  Description of Artificial Sequence: Synthetic oligonucleotide
  Sense strand starting at position 1961 of SEQ ID NO: 1888668
aucacauaaccauggugau

SEQ ID NO: 2548733 - RNA, 19 nt, Artificial Sequence
  Description of Artificial Sequence: Synthetic oligonucleotide
  Antisense strand to SEQ ID NO: 2548732
aucaccaugguuaugugau

SEQ ID NO: 2548734 - RNA, 19 nt, Artificial Sequence
  Description of Artificial Sequence: Synthetic oligonucleotide
  Sense strand starting at position 2789 of SEQ ID NO: 1888668
gaucuaauguuucuagaag

SEQ ID NO: 2548735 - RNA, 19 nt, Artificial Sequence
  Description of Artificial Sequence: Synthetic oligonucleotide
  Antisense strand to SEQ ID NO: 2548734
cuucuagaaacauuagauc

SEQ ID NO: 2548736 - RNA, 19 nt, Artificial Sequence
  Description of Artificial Sequence: Synthetic oligonucleotide
  Sense strand starting at position 2773 of SEQ ID NO: 1888668
ucuaccauuccugagugau

SEQ ID NO: 2548737 - RNA, 19 nt, Artificial Sequence
  Description of Artificial Sequence: Synthetic oligonucleotide
  Antisense strand to SEQ ID NO: 2548736
aucacucaggaaugguaga

SEQ ID NO: 2548738 - RNA, 19 nt, Artificial Sequence
  Description of Artificial Sequence: Synthetic oligonucleotide
  Sense strand starting at position 877 of SEQ ID NO: 1888668
uugggugauugacuauaau

SEQ ID NO: 2548739 - RNA, 19 nt, Artificial Sequence
  Description of Artificial Sequence: Synthetic oligonucleotide
  Antisense strand to SEQ ID NO: 2548738
auuauagucaaucacccaa

SEQ ID NO: 2548740 - RNA, 19 nt, Artificial Sequence
  Description of Artificial Sequence: Synthetic oligonucleotide
  Sense strand starting at position 1775 of SEQ ID NO: 1888668
acuaguacauuugagagga

SEQ ID NO: 2548741 - RNA, 19 nt, Artificial Sequence
  Description of Artificial Sequence: Synthetic oligonucleotide
  Antisense strand to SEQ ID NO: 2548740
uccucucaaauguacuagu

SEQ ID NO: 2548742 - RNA, 19 nt, Artificial Sequence
  Description of Artificial Sequence: Synthetic oligonucleotide
  Sense strand starting at position 1777 of SEQ ID NO: 1888668
uaguacauuugagaggaca

SEQ ID NO: 2548743 - RNA, 19 nt, Artificial Sequence
  Description of Artificial Sequence: Synthetic oligonucleotide
  Antisense strand to SEQ ID NO: 2548742
uguccucucaaauguacua

SEQ ID NO: 2548744 - RNA, 19 nt, Artificial Sequence
  Description of Artificial Sequence: Synthetic oligonucleotide
  Sense strand starting at position 2612 of SEQ ID NO: 1888668
ucuaccauuccugagucau

SEQ ID NO: 2548745 - RNA, 19 nt, Artificial Sequence
  Description of Artificial Sequence: Synthetic oligonucleotide
  Antisense strand to SEQ ID NO: 2548744
augacucaggaaugguaga

SEQ ID NO: 2548746 - RNA, 19 nt, Artificial Sequence
  Description of Artificial Sequence: Synthetic oligonucleotide
  Sense strand starting at position 3556 of SEQ ID NO: 1888668
agaugagagaguugcuaug

SEQ ID NO: 2548747 - RNA, 19 nt, Artificial Sequence
  Description of Artificial Sequence: Synthetic oligonucleotide
  Antisense strand to SEQ ID NO: 2548746
cauagcaacucucucaucu

SEQ ID NO: 2548748 - RNA, 19 nt, Artificial Sequence
  Description of Artificial Sequence: Synthetic oligonucleotide
  Sense strand starting at position 2779 of SEQ ID NO: 1888668
auuccugagugaucuaaug

SEQ ID NO: 2548749 - RNA, 19 nt, Artificial Sequence
  Description of Artificial Sequence: Synthetic oligonucleotide
  Antisense strand to SEQ ID NO: 2548748
cauuagaucacucaggaau

SEQ ID NO: 2548750 - RNA, 19 nt, Artificial Sequence
  Description of Artificial Sequence: Synthetic oligonucleotide
  Sense strand starting at position 3802 of SEQ ID NO: 1888668
uggcuuccagauugaacaa

SEQ ID NO: 2548751 - RNA, 19 nt, Artificial Sequence
  Description of Artificial Sequence: Synthetic oligonucleotide
  Antisense strand to SEQ ID NO: 2548750
uuguucaaucuggaagcca

SEQ ID NO: 2548752 - RNA, 19 nt, Artificial Sequence
  Description of Artificial Sequence: Synthetic oligonucleotide
  Sense strand starting at position 3755 of SEQ ID NO: 1888668
gcugaaagaauaggucauu

SEQ ID NO: 2548753 - RNA, 19 nt, Artificial Sequence
  Description of Artificial Sequence: Synthetic oligonucleotide
  Antisense strand to SEQ ID NO: 2548752
aaugaccuauucuuucagc

SEQ ID NO: 2548754 - RNA, 19 nt, Artificial Sequence
  Description of Artificial Sequence: Synthetic oligonucleotide
  Sense strand starting at position 3056 of SEQ ID NO: 1888668
gggugaacacuuuggguga

SEQ ID NO: 2548755 - RNA, 19 nt, Artificial Sequence
  Description of Artificial Sequence: Synthetic oligonucleotide
  Antisense strand to SEQ ID NO: 2548754
ucacccaaaguguucaccc

SEQ ID NO: 2548756 - RNA, 19 nt, Artificial Sequence
  Description of Artificial Sequence: Synthetic oligonucleotide
  Sense strand starting at position 131 of SEQ ID NO: 1888668
ccauaugaggucuaguuuc

SEQ ID NO: 2548757 - RNA, 19 nt, Artificial Sequence
  Description of Artificial Sequence: Synthetic oligonucleotide
  Antisense strand to SEQ ID NO: 2548756
gaaacuagaccucauaugg

SEQ ID NO: 2548758 - RNA, 19 nt, Artificial Sequence
  Description of Artificial Sequence: Synthetic oligonucleotide
  Sense strand starting at position 3856 of SEQ ID NO: 1888668
acgauacuauaguuauaug

SEQ ID NO: 2548759 - RNA, 19 nt, Artificial Sequence
  Description of Artificial Sequence: Synthetic oligonucleotide
  Antisense strand to SEQ ID NO: 2548758
cauauaacuauaguaucgu

SEQ ID NO: 2548760 - RNA, 19 nt, Artificial Sequence
  Description of Artificial Sequence: Synthetic oligonucleotide
  Sense strand starting at position 1506 of SEQ ID NO: 1888668
auagguucuuaauuaggua

SEQ ID NO: 2548761 - RNA, 19 nt, Artificial Sequence
  Description of Artificial Sequence: Synthetic oligonucleotide
  Antisense strand to SEQ ID NO: 2548760
uaccuaauuaagaaccuau

SEQ ID NO: 2548762 - RNA, 19 nt, Artificial Sequence
  Description of Artificial Sequence: Synthetic oligonucleotide
  Sense strand starting at position 2776 of SEQ ID NO: 1888668
accauuccugagugaucua

SEQ ID NO: 2548763 - RNA, 19 nt, Artificial Sequence
  Description of Artificial Sequence: Synthetic oligonucleotide
  Antisense strand to SEQ ID NO: 2548762
uagaucacucaggaauggu

SEQ ID NO: 2548764 - RNA, 19 nt, Artificial Sequence
  Description of Artificial Sequence: Synthetic oligonucleotide
  Sense strand starting at position 255 of SEQ ID NO: 1888668
accugaggcuaauugugaa

SEQ ID NO: 2548765 - RNA, 19 nt, Artificial Sequence
  Description of Artificial Sequence: Synthetic oligonucleotide
  Antisense strand to SEQ ID NO: 2548764
uucacaauuagccucaggu

SEQ ID NO: 2548766 - RNA, 19 nt, Artificial Sequence
  Description of Artificial Sequence: Synthetic oligonucleotide
  Sense strand starting at position 3437 of SEQ ID NO: 1888668
uguauucuggcugauacau

SEQ ID NO: 2548767 - RNA, 19 nt, Artificial Sequence
  Description of Artificial Sequence: Synthetic oligonucleotide
  Antisense strand to SEQ ID NO: 2548766
auguaucagccagaauaca

SEQ ID NO: 2548768 - RNA, 19 nt, Artificial Sequence
  Description of Artificial Sequence: Synthetic oligonucleotide
  Sense strand starting at position 734 of SEQ ID NO: 1888668
ugaguaaaucuguauguuc

SEQ ID NO: 2548769 - RNA, 19 nt, Artificial Sequence
  Description of Artificial Sequence: Synthetic oligonucleotide
  Antisense strand to SEQ ID NO: 2548768
gaacauacagauuuacuca

SEQ ID NO: 2548770 - RNA, 19 nt, Artificial Sequence
  Description of Artificial Sequence: Synthetic oligonucleotide
  Sense strand starting at position 2550 of SEQ ID NO: 1888668
accgauauguuaguaacaa

SEQ ID NO: 2548771 - RNA, 19 nt, Artificial Sequence
  Description of Artificial Sequence: Synthetic oligonucleotide
  Antisense strand to SEQ ID NO: 2548770
uuguuacuaacauaucggu

SEQ ID NO: 2548772 - RNA, 19 nt, Artificial Sequence
  Description of Artificial Sequence: Synthetic oligonucleotide
  Sense strand starting at position 3713 of SEQ ID NO: 1888668
uuuguccagugauuauaaa

SEQ ID NO: 2548773 - RNA, 19 nt, Artificial Sequence
  Description of Artificial Sequence: Synthetic oligonucleotide
  Antisense strand to SEQ ID NO: 2548772
uuuauaaucacuggacaaa

SEQ ID NO: 2548774 - RNA, 19 nt, Artificial Sequence
  Description of Artificial Sequence: Synthetic oligonucleotide
  Sense strand starting at position 1570 of SEQ ID NO: 1888668
accuaauugggugguuuga

SEQ ID NO: 2548775 - RNA, 19 nt, Artificial Sequence
  Description of Artificial Sequence: Synthetic oligonucleotide
  Antisense strand to SEQ ID NO: 2548774
ucaaaccacccaauuaggu

SEQ ID NO: 2548776 - RNA, 19 nt, Artificial Sequence
  Description of Artificial Sequence: Synthetic oligonucleotide
  Sense strand starting at position 873 of SEQ ID NO: 1888668
ugguuugggugauugacua

SEQ ID NO: 2548777 - RNA, 19 nt, Artificial Sequence
  Description of Artificial Sequence: Synthetic oligonucleotide
  Antisense strand to SEQ ID NO: 2548776
uagucaaucacccaaacca

SEQ ID NO: 2548778 - RNA, 19 nt, Artificial Sequence
  Description of Artificial Sequence: Synthetic oligonucleotide
  Sense strand starting at position 2787 of SEQ ID NO: 1888668
gugaucuaauguuucuaga

SEQ ID NO: 2548779 - RNA, 19 nt, Artificial Sequence
  Description of Artificial Sequence: Synthetic oligonucleotide
  Antisense strand to SEQ ID NO: 2548778
ucuagaaacauuagaucac

SEQ ID NO: 2548780 - RNA, 19 nt, Artificial Sequence
  Description of Artificial Sequence: Synthetic oligonucleotide
  Sense strand starting at position 2965 of SEQ ID NO: 1888668
ucuaccauuguguauguaa

SEQ ID NO: 2548781 - RNA, 19 nt, Artificial Sequence
  Description of Artificial Sequence: Synthetic oligonucleotide
  Antisense strand to SEQ ID NO: 2548780
uuacauacacaaugguaga

SEQ ID NO: 2548782 - RNA, 19 nt, Artificial Sequence
  Description of Artificial Sequence: Synthetic oligonucleotide
  Sense strand starting at position 1647 of SEQ ID NO: 1888668
ggcauccugcuugauacua

SEQ ID NO: 2548783 - RNA, 19 nt, Artificial Sequence
  Description of Artificial Sequence: Synthetic oligonucleotide
  Antisense strand to SEQ ID NO: 2548782
uaguaucaagcaggaugcc

SEQ ID NO: 2548784 - RNA, 19 nt, Artificial Sequence
  Description of Artificial Sequence: Synthetic oligonucleotide
  Sense strand starting at position 2589 of SEQ ID NO: 1888668
ucgaaauuccauugccaaa

SEQ ID NO: 2548785 - RNA, 19 nt, Artificial Sequence
  Description of Artificial Sequence: Synthetic oligonucleotide
  Antisense strand to SEQ ID NO: 2548784
uuuggcaauggaauuucga

SEQ ID NO: 2548786 - RNA, 19 nt, Artificial Sequence
  Description of Artificial Sequence: Synthetic oligonucleotide
  Sense strand starting at position 746 of SEQ ID NO: 1888668
uauguucuugguuaauagu

SEQ ID NO: 2548787 - RNA, 19 nt, Artificial Sequence
  Description of Artificial Sequence: Synthetic oligonucleotide
  Antisense strand to SEQ ID NO: 2548786
acuauuaaccaagaacaua

SEQ ID NO: 2548788 - RNA, 19 nt, Artificial Sequence
  Description of Artificial Sequence: Synthetic oligonucleotide
  Sense strand starting at position 788 of SEQ ID NO: 1888668
cuaucuuuguauguugaaa

SEQ ID NO: 2548789 - RNA, 19 nt, Artificial Sequence
  Description of Artificial Sequence: Synthetic oligonucleotide
  Antisense strand to SEQ ID NO: 2548788
uuucaacauacaaagauag

SEQ ID NO: 2548790 - RNA, 19 nt, Artificial Sequence
  Description of Artificial Sequence: Synthetic oligonucleotide
  Sense strand starting at position 3880 of SEQ ID NO: 1888668
guguuuguauacucagaaa

SEQ ID NO: 2548791 - RNA, 19 nt, Artificial Sequence
  Description of Artificial Sequence: Synthetic oligonucleotide
  Antisense strand to SEQ ID NO: 2548790
uuucugaguauacaaacac

SEQ ID NO: 2548792 - RNA, 19 nt, Artificial Sequence
  Description of Artificial Sequence: Synthetic oligonucleotide
  Sense strand starting at position 3385 of SEQ ID NO: 1888668
aguguuucugaaugcagaa

SEQ ID NO: 2548793 - RNA, 19 nt, Artificial Sequence
  Description of Artificial Sequence: Synthetic oligonucleotide
  Antisense strand to SEQ ID NO: 2548792
uucugcauucagaaacacu

SEQ ID NO: 2548794 - RNA, 19 nt, Artificial Sequence
  Description of Artificial Sequence: Synthetic oligonucleotide
  Sense strand starting at position 3971 of SEQ ID NO: 1888669
auuugauuagggugcaguu

SEQ ID NO: 2548795 - RNA, 19 nt, Artificial Sequence
  Description of Artificial Sequence: Synthetic oligonucleotide
  Antisense strand to SEQ ID NO: 2548794
aacugcacccuaaucaaau

SEQ ID NO: 2548796 - RNA, 19 nt, Artificial Sequence
  Description of Artificial Sequence: Synthetic oligonucleotide
  Sense strand starting at position 2488 of SEQ ID NO: 1888669
agcauaaauggauauuguu

SEQ ID NO: 2548797 - RNA, 19 nt, Artificial Sequence
  Description of Artificial Sequence: Synthetic oligonucleotide
  Antisense strand to SEQ ID NO: 2548796
aacaauauccauuuaugcu

SEQ ID NO: 2548798 - RNA, 19 nt, Artificial Sequence
  Description of Artificial Sequence: Synthetic oligonucleotide
  Sense strand starting at position 2871 of SEQ ID NO: 1888669
ugaacacuuugggugaaua

SEQ ID NO: 2548799 - RNA, 19 nt, Artificial Sequence
  Description of Artificial Sequence: Synthetic oligonucleotide
  Antisense strand to SEQ ID NO: 2548798
uauucacccaaaguguuca

SEQ ID NO: 2548800 - RNA, 19 nt, Artificial Sequence
  Description of Artificial Sequence: Synthetic oligonucleotide
  Sense strand starting at position 621 of SEQ ID NO: 1888669
ugaacuacucucuggauga

SEQ ID NO: 2548801 - RNA, 19 nt, Artificial Sequence
  Description of Artificial Sequence: Synthetic oligonucleotide
  Antisense strand to SEQ ID NO: 2548800
ucauccagagaguaguuca

SEQ ID NO: 2548802 - RNA, 19 nt, Artificial Sequence
  Description of Artificial Sequence: Synthetic oligonucleotide
  Sense strand starting at position 363 of SEQ ID NO: 1888669
cgaacaaccuccuuagaaa

SEQ ID NO: 2548803 - RNA, 19 nt, Artificial Sequence
  Description of Artificial Sequence: Synthetic oligonucleotide
  Antisense strand to SEQ ID NO: 2548802
uuucuaaggagguuguucg

SEQ ID NO: 2548804 - RNA, 19 nt, Artificial Sequence
  Description of Artificial Sequence: Synthetic oligonucleotide
  Sense strand starting at position 2872 of SEQ ID NO: 1888669
gaacacuuugggugaauac

SEQ ID NO: 2548805 - RNA, 19 nt, Artificial Sequence
  Description of Artificial Sequence: Synthetic oligonucleotide
  Antisense strand to SEQ ID NO: 2548804
guauucacccaaaguguuc

SEQ ID NO: 2548806 - RNA, 19 nt, Artificial Sequence
  Description of Artificial Sequence: Synthetic oligonucleotide
  Sense strand starting at position 692 of SEQ ID NO: 1888669
ggugauugacuauaauugu

SEQ ID NO: 2548807 - RNA, 19 nt, Artificial Sequence
  Description of Artificial Sequence: Synthetic oligonucleotide
  Antisense strand to SEQ ID NO: 2548806
acaauuauagucaaucacc

SEQ ID NO: 2548808 - RNA, 19 nt, Artificial Sequence
  Description of Artificial Sequence: Synthetic oligonucleotide
  Sense strand starting at position 1829 of SEQ ID NO: 1888669
uguauugugagguccgcuu

SEQ ID NO: 2548809 - RNA, 19 nt, Artificial Sequence
  Description of Artificial Sequence: Synthetic oligonucleotide
  Antisense strand to SEQ ID NO: 2548808
aagcggaccucacaauaca

SEQ ID NO: 2548810 - RNA, 19 nt, Artificial Sequence
  Description of Artificial Sequence: Synthetic oligonucleotide
  Sense strand starting at position 3427 of SEQ ID NO: 1888669
aguacaaaugucuaucauu

SEQ ID NO: 2548811 - RNA, 19 nt, Artificial Sequence
  Description of Artificial Sequence: Synthetic oligonucleotide
  Antisense strand to SEQ ID NO: 2548810
aaugauagacauuuguacu

SEQ ID NO: 2548812 - RNA, 19 nt, Artificial Sequence
  Description of Artificial Sequence: Synthetic oligonucleotide
  Sense strand starting at position 1774 of SEQ ID NO: 1888669
ucacauaaccauggugaua

SEQ ID NO: 2548813 - RNA, 19 nt, Artificial Sequence
  Description of Artificial Sequence: Synthetic oligonucleotide
  Antisense strand to SEQ ID NO: 2548812
uaucaccaugguuauguga

SEQ ID NO: 2548814 - RNA, 19 nt, Artificial Sequence
  Description of Artificial Sequence: Synthetic oligonucleotide
  Sense strand starting at position 1773 of SEQ ID NO: 1888669
aucacauaaccauggugau

SEQ ID NO: 2548815 - RNA, 19 nt, Artificial Sequence
  Description of Artificial Sequence: Synthetic oligonucleotide
  Antisense strand to SEQ ID NO: 2548814
aucaccaugguuaugugau

SEQ ID NO: 2548816 - RNA, 19 nt, Artificial Sequence
  Description of Artificial Sequence: Synthetic oligonucleotide
  Sense strand starting at position 2601 of SEQ ID NO: 1888669
gaucuaauguuucuagaag

SEQ ID NO: 2548817 - RNA, 19 nt, Artificial Sequence
  Description of Artificial Sequence: Synthetic oligonucleotide
  Antisense strand to SEQ ID NO: 2548816
cuucuagaaacauuagauc

SEQ ID NO: 2548818 - RNA, 19 nt, Artificial Sequence
  Description of Artificial Sequence: Synthetic oligonucleotide
  Sense strand starting at position 2585 of SEQ ID NO: 1888669
ucuaccauuccugagugau

SEQ ID NO: 2548819 - RNA, 19 nt, Artificial Sequence
  Description of Artificial Sequence: Synthetic oligonucleotide
  Antisense strand to SEQ ID NO: 2548818
aucacucaggaaugguaga

SEQ ID NO: 2548820 - RNA, 19 nt, Artificial Sequence
  Description of Artificial Sequence: Synthetic oligonucleotide
  Sense strand starting at position 689 of SEQ ID NO: 1888669
uugggugauugacuauaau

SEQ ID NO: 2548821 - RNA, 19 nt, Artificial Sequence
  Description of Artificial Sequence: Synthetic oligonucleotide
  Antisense strand to SEQ ID NO: 2548820
auuauagucaaucacccaa

SEQ ID NO: 2548822 - RNA, 19 nt, Artificial Sequence
  Description of Artificial Sequence: Synthetic oligonucleotide
  Sense strand starting at position 1587 of SEQ ID NO: 1888669
acuaguacauuugagagga

SEQ ID NO: 2548823 - RNA, 19 nt, Artificial Sequence
  Description of Artificial Sequence: Synthetic oligonucleotide
  Antisense strand to SEQ ID NO: 2548822
uccucucaaauguacuagu

SEQ ID NO: 2548824 - RNA, 19 nt, Artificial Sequence
  Description of Artificial Sequence: Synthetic oligonucleotide
  Sense strand starting at position 1589 of SEQ ID NO: 1888669
uaguacauuugagaggaca

SEQ ID NO: 2548825 - RNA, 19 nt, Artificial Sequence
  Description of Artificial Sequence: Synthetic oligonucleotide
  Antisense strand to SEQ ID NO: 2548824
uguccucucaaauguacua

SEQ ID NO: 2548826 - RNA, 19 nt, Artificial Sequence
  Description of Artificial Sequence: Synthetic oligonucleotide
  Sense strand starting at position 2424 of SEQ ID NO: 1888669
ucuaccauuccugagucau

SEQ ID NO: 2548827 - RNA, 19 nt, Artificial Sequence
  Description of Artificial Sequence: Synthetic oligonucleotide
  Antisense strand to SEQ ID NO: 2548826
augacucaggaaugguaga

SEQ ID NO: 2548828 - RNA, 19 nt, Artificial Sequence
  Description of Artificial Sequence: Synthetic oligonucleotide
  Sense strand starting at position 3368 of SEQ ID NO: 1888669
agaugagagaguugcuaug

SEQ ID NO: 2548829 - RNA, 19 nt, Artificial Sequence
  Description of Artificial Sequence: Synthetic oligonucleotide
  Antisense strand to SEQ ID NO: 2548828
cauagcaacucucucaucu

SEQ ID NO: 2548830 - RNA, 19 nt, Artificial Sequence
  Description of Artificial Sequence: Synthetic oligonucleotide
  Sense strand starting at position 2591 of SEQ ID NO: 1888669
auuccugagugaucuaaug

SEQ ID NO: 2548831 - RNA, 19 nt, Artificial Sequence
  Description of Artificial Sequence: Synthetic oligonucleotide
  Antisense strand to SEQ ID NO: 2548830
cauuagaucacucaggaau

SEQ ID NO: 2548832 - RNA, 19 nt, Artificial Sequence
  Description of Artificial Sequence: Synthetic oligonucleotide
  Sense strand starting at position 3614 of SEQ ID NO: 1888669
uggcuuccagauugaacaa

SEQ ID NO: 2548833 - RNA, 19 nt, Artificial Sequence
  Description of Artificial Sequence: Synthetic oligonucleotide
  Antisense strand to SEQ ID NO: 2548832
uuguucaaucuggaagcca

SEQ ID NO: 2548834 - RNA, 19 nt, Artificial Sequence
  Description of Artificial Sequence: Synthetic oligonucleotide
  Sense strand starting at position 3567 of SEQ ID NO: 1888669
gcugaaagaauaggucauu

SEQ ID NO: 2548835 - RNA, 19 nt, Artificial Sequence
  Description of Artificial Sequence: Synthetic oligonucleotide
  Antisense strand to SEQ ID NO: 2548834
aaugaccuauucuuucagc

SEQ ID NO: 2548836 - RNA, 19 nt, Artificial Sequence
  Description of Artificial Sequence: Synthetic oligonucleotide
  Sense strand starting at position 2868 of SEQ ID NO: 1888669
gggugaacacuuuggguga

SEQ ID NO: 2548837 - RNA, 19 nt, Artificial Sequence
  Description of Artificial Sequence: Synthetic oligonucleotide
  Antisense strand to SEQ ID NO: 2548836
ucacccaaaguguucaccc

SEQ ID NO: 2548838 - RNA, 19 nt, Artificial Sequence
  Description of Artificial Sequence: Synthetic oligonucleotide
  Sense strand starting at position 3668 of SEQ ID NO: 1888669
acgauacuauaguuauaug

SEQ ID NO: 2548839 - RNA, 19 nt, Artificial Sequence
  Description of Artificial Sequence: Synthetic oligonucleotide
  Antisense strand to SEQ ID NO: 2548838
cauauaacuauaguaucgu

SEQ ID NO: 2548840 - RNA, 19 nt, Artificial Sequence
  Description of Artificial Sequence: Synthetic oligonucleotide
  Sense strand starting at position 1318 of SEQ ID NO: 1888669
auagguucuuaauuaggua

SEQ ID NO: 2548841 - RNA, 19 nt, Artificial Sequence
  Description of Artificial Sequence: Synthetic oligonucleotide
  Antisense strand to SEQ ID NO: 2548840
uaccuaauuaagaaccuau

SEQ ID NO: 2548842 - RNA, 19 nt, Artificial Sequence
  Description of Artificial Sequence: Synthetic oligonucleotide
  Sense strand starting at position 2588 of SEQ ID NO: 1888669
accauuccugagugaucua

SEQ ID NO: 2548843 - RNA, 19 nt, Artificial Sequence
  Description of Artificial Sequence: Synthetic oligonucleotide
  Antisense strand to SEQ ID NO: 2548842
uagaucacucaggaauggu

SEQ ID NO: 2548844 - RNA, 19 nt, Artificial Sequence
  Description of Artificial Sequence: Synthetic oligonucleotide
  Sense strand starting at position 67 of SEQ ID NO: 1888669
accugaggcuaauugugaa

SEQ ID NO: 2548845 - RNA, 19 nt, Artificial Sequence
  Description of Artificial Sequence: Synthetic oligonucleotide
  Antisense strand to SEQ ID NO: 2548844
uucacaauuagccucaggu

SEQ ID NO: 2548846 - RNA, 19 nt, Artificial Sequence
  Description of Artificial Sequence: Synthetic oligonucleotide
  Sense strand starting at position 3249 of SEQ ID NO: 1888669
uguauucuggcugauacau

SEQ ID NO: 2548847 - RNA, 19 nt, Artificial Sequence
  Description of Artificial Sequence: Synthetic oligonucleotide
  Antisense strand to SEQ ID NO: 2548846
auguaucagccagaauaca

SEQ ID NO: 2548848 - RNA, 19 nt, Artificial Sequence
  Description of Artificial Sequence: Synthetic oligonucleotide
  Sense strand starting at position 546 of SEQ ID NO: 1888669
ugaguaaaucuguauguuc

SEQ ID NO: 2548849 - RNA, 19 nt, Artificial Sequence
  Description of Artificial Sequence: Synthetic oligonucleotide
  Antisense strand to SEQ ID NO: 2548848
gaacauacagauuuacuca

SEQ ID NO: 2548850 - RNA, 19 nt, Artificial Sequence
  Description of Artificial Sequence: Synthetic oligonucleotide
  Sense strand starting at position 2362 of SEQ ID NO: 1888669
accgauauguuaguaacaa

SEQ ID NO: 2548851 - RNA, 19 nt, Artificial Sequence
  Description of Artificial Sequence: Synthetic oligonucleotide
  Antisense strand to SEQ ID NO: 2548850
uuguuacuaacauaucggu

SEQ ID NO: 2548852 - RNA, 19 nt, Artificial Sequence
  Description of Artificial Sequence: Synthetic oligonucleotide
  Sense strand starting at position 3525 of SEQ ID NO: 1888669
uuuguccagugauuauaaa

SEQ ID NO: 2548853 - RNA, 19 nt, Artificial Sequence
  Description of Artificial Sequence: Synthetic oligonucleotide
  Antisense strand to SEQ ID NO: 2548852
uuuauaaucacuggacaaa

SEQ ID NO: 2548854 - RNA, 19 nt, Artificial Sequence
  Description of Artificial Sequence: Synthetic oligonucleotide
  Sense strand starting at position 1382 of SEQ ID NO: 1888669
accuaauugggugguuuga

SEQ ID NO: 2548855 - RNA, 19 nt, Artificial Sequence
  Description of Artificial Sequence: Synthetic oligonucleotide
  Antisense strand to SEQ ID NO: 2548854
ucaaaccacccaauuaggu

SEQ ID NO: 2548856 - RNA, 19 nt, Artificial Sequence
  Description of Artificial Sequence: Synthetic oligonucleotide
  Sense strand starting at position 685 of SEQ ID NO: 1888669
ugguuugggugauugacua

SEQ ID NO: 2548857 - RNA, 19 nt, Artificial Sequence
  Description of Artificial Sequence: Synthetic oligonucleotide
  Antisense strand to SEQ ID NO: 2548856
uagucaaucacccaaacca

SEQ ID NO: 2548858 - RNA, 19 nt, Artificial Sequence
  Description of Artificial Sequence: Synthetic oligonucleotide
  Sense strand starting at position 2599 of SEQ ID NO: 1888669
gugaucuaauguuucuaga

SEQ ID NO: 2548859 - RNA, 19 nt, Artificial Sequence
  Description of Artificial Sequence: Synthetic oligonucleotide
  Antisense strand to SEQ ID NO: 2548858
ucuagaaacauuagaucac

SEQ ID NO: 2548860 - RNA, 19 nt, Artificial Sequence
  Description of Artificial Sequence: Synthetic oligonucleotide
  Sense strand starting at position 2777 of SEQ ID NO: 1888669
ucuaccauuguguauguaa

SEQ ID NO: 2548861 - RNA, 19 nt, Artificial Sequence
  Description of Artificial Sequence: Synthetic oligonucleotide
  Antisense strand to SEQ ID NO: 2548860
uuacauacacaaugguaga

SEQ ID NO: 2548862 - RNA, 19 nt, Artificial Sequence
  Description of Artificial Sequence: Synthetic oligonucleotide
  Sense strand starting at position 1459 of SEQ ID NO: 1888669
ggcauccugcuugauacua

SEQ ID NO: 2548863 - RNA, 19 nt, Artificial Sequence
  Description of Artificial Sequence: Synthetic oligonucleotide
  Antisense strand to SEQ ID NO: 2548862
uaguaucaagcaggaugcc

SEQ ID NO: 2548864 - RNA, 19 nt, Artificial Sequence
  Description of Artificial Sequence: Synthetic oligonucleotide
  Sense strand starting at position 2401 of SEQ ID NO: 1888669
ucgaaauuccauugccaaa

SEQ ID NO: 2548865 - RNA, 19 nt, Artificial Sequence
  Description of Artificial Sequence: Synthetic oligonucleotide
  Antisense strand to SEQ ID NO: 2548864
uuuggcaauggaauuucga

SEQ ID NO: 2548866 - RNA, 19 nt, Artificial Sequence
  Description of Artificial Sequence: Synthetic oligonucleotide
  Sense strand starting at position 558 of SEQ ID NO: 1888669
uauguucuugguuaauagu

SEQ ID NO: 2548867 - RNA, 19 nt, Artificial Sequence
  Description of Artificial Sequence: Synthetic oligonucleotide
  Antisense strand to SEQ ID NO: 2548866
acuauuaaccaagaacaua

SEQ ID NO: 2548868 - RNA, 19 nt, Artificial Sequence
  Description of Artificial Sequence: Synthetic oligonucleotide
  Sense strand starting at position 600 of SEQ ID NO: 1888669
cuaucuuuguauguugaaa

SEQ ID NO: 2548869 - RNA, 19 nt, Artificial Sequence
  Description of Artificial Sequence: Synthetic oligonucleotide
  Antisense strand to SEQ ID NO: 2548868
uuucaacauacaaagauag

SEQ ID NO: 2548870 - RNA, 19 nt, Artificial Sequence
  Description of Artificial Sequence: Synthetic oligonucleotide
  Sense strand starting at position 3878 of SEQ ID NO: 1888669
guaaauguuuaggauuuga

SEQ ID NO: 2548871 - RNA, 19 nt, Artificial Sequence
  Description of Artificial Sequence: Synthetic oligonucleotide
  Antisense strand to SEQ ID NO: 2548870
ucaaauccuaaacauuuac

SEQ ID NO: 2548872 - RNA, 19 nt, Artificial Sequence
  Description of Artificial Sequence: Synthetic oligonucleotide
  Sense strand starting at position 3692 of SEQ ID NO: 1888669
guguuuguauacucagaaa

SEQ ID NO: 2548873 - RNA, 19 nt, Artificial Sequence
  Description of Artificial Sequence: Synthetic oligonucleotide
  Antisense strand to SEQ ID NO: 2548872
uuucugaguauacaaacac

SEQ ID NO: 2548874 - RNA, 19 nt, Artificial Sequence
  Description of Artificial Sequence: Synthetic oligonucleotide
  Sense strand starting at position 1008 of SEQ ID NO: 1888670
guccuaguucugccucuuu

SEQ ID NO: 2548875 - RNA, 19 nt, Artificial Sequence
  Description of Artificial Sequence: Synthetic oligonucleotide
  Antisense strand to SEQ ID NO: 2548874
aaagaggcagaacuaggac

SEQ ID NO: 2548876 - RNA, 19 nt, Artificial Sequence
  Description of Artificial Sequence: Synthetic oligonucleotide
  Sense strand starting at position 2458 of SEQ ID NO: 1888670
uaacucauuccggaaagua

SEQ ID NO: 2548877 - RNA, 19 nt, Artificial Sequence
  Description of Artificial Sequence: Synthetic oligonucleotide
  Antisense strand to SEQ ID NO: 2548876
uacuuuccggaaugaguua

SEQ ID NO: 2548878 - RNA, 19 nt, Artificial Sequence
  Description of Artificial Sequence: Synthetic oligonucleotide
  Sense strand starting at position 781 of SEQ ID NO: 1888670
ucacauuugccuugagagc

SEQ ID NO: 2548879 - RNA, 19 nt, Artificial Sequence
  Description of Artificial Sequence: Synthetic oligonucleotide
  Antisense strand to SEQ ID NO: 2548878
gcucucaaggcaaauguga

SEQ ID NO: 2548880 - RNA, 19 nt, Artificial Sequence
  Description of Artificial Sequence: Synthetic oligonucleotide
  Sense strand starting at position 332 of SEQ ID NO: 1888670
uuauaugaugcauggaaag

SEQ ID NO: 2548881 - RNA, 19 nt, Artificial Sequence
  Description of Artificial Sequence: Synthetic oligonucleotide
  Antisense strand to SEQ ID NO: 2548880
cuuuccaugcaucauauaa

SEQ ID NO: 2548882 - RNA, 19 nt, Artificial Sequence
  Description of Artificial Sequence: Synthetic oligonucleotide
  Sense strand starting at position 334 of SEQ ID NO: 1888670
auaugaugcauggaaagcu

SEQ ID NO: 2548883 - RNA, 19 nt, Artificial Sequence
  Description of Artificial Sequence: Synthetic oligonucleotide
  Antisense strand to SEQ ID NO: 2548882
agcuuuccaugcaucauau

SEQ ID NO: 2548884 - RNA, 19 nt, Artificial Sequence
  Description of Artificial Sequence: Synthetic oligonucleotide
  Sense strand starting at position 2861 of SEQ ID NO: 1888670
guuacagagguuuaaccua

SEQ ID NO: 2548885 - RNA, 19 nt, Artificial Sequence
  Description of Artificial Sequence: Synthetic oligonucleotide
  Antisense strand to SEQ ID NO: 2548884
uagguuaaaccucuguaac

SEQ ID NO: 2548886 - RNA, 19 nt, Artificial Sequence
  Description of Artificial Sequence: Synthetic oligonucleotide
  Sense strand starting at position 3093 of SEQ ID NO: 1888670
acuguuccaguuuaaagga

SEQ ID NO: 2548887 - RNA, 19 nt, Artificial Sequence
  Description of Artificial Sequence: Synthetic oligonucleotide
  Antisense strand to SEQ ID NO: 2548886
uccuuuaaacuggaacagu

SEQ ID NO: 2548888 - RNA, 19 nt, Artificial Sequence
  Description of Artificial Sequence: Synthetic oligonucleotide
  Sense strand starting at position 734 of SEQ ID NO: 1888670
ggagauguaggcuaaagug

SEQ ID NO: 2548889 - RNA, 19 nt, Artificial Sequence
  Description of Artificial Sequence: Synthetic oligonucleotide
  Antisense strand to SEQ ID NO: 2548888
cacuuuagccuacaucucc

SEQ ID NO: 2548890 - RNA, 19 nt, Artificial Sequence
  Description of Artificial Sequence: Synthetic oligonucleotide
  Sense strand starting at position 731 of SEQ ID NO: 1888670
acaggagauguaggcuaaa

SEQ ID NO: 2548891 - RNA, 19 nt, Artificial Sequence
  Description of Artificial Sequence: Synthetic oligonucleotide
  Antisense strand to SEQ ID NO: 2548890
uuuagccuacaucuccugu

SEQ ID NO: 2548892 - RNA, 19 nt, Artificial Sequence
  Description of Artificial Sequence: Synthetic oligonucleotide
  Sense strand starting at position 2453 of SEQ ID NO: 1888670
agaacuaacucauuccgga

SEQ ID NO: 2548893 - RNA, 19 nt, Artificial Sequence
  Description of Artificial Sequence: Synthetic oligonucleotide
  Antisense strand to SEQ ID NO: 2548892
uccggaaugaguuaguucu

SEQ ID NO: 2548894 - RNA, 19 nt, Artificial Sequence
  Description of Artificial Sequence: Synthetic oligonucleotide
  Sense strand starting at position 638 of SEQ ID NO: 1888670
gauauugggucauuccaaa

SEQ ID NO: 2548895 - RNA, 19 nt, Artificial Sequence
  Description of Artificial Sequence: Synthetic oligonucleotide
  Antisense strand to SEQ ID NO: 2548894
uuuggaaugacccaauauc

SEQ ID NO: 2548896 - RNA, 19 nt, Artificial Sequence
  Description of Artificial Sequence: Synthetic oligonucleotide
  Sense strand starting at position 2654 of SEQ ID NO: 1888670
auaguaauccaugagucuu

SEQ ID NO: 2548897 - RNA, 19 nt, Artificial Sequence
  Description of Artificial Sequence: Synthetic oligonucleotide
  Antisense strand to SEQ ID NO: 2548896
aagacucauggauuacuau

SEQ ID NO: 2548898 - RNA, 19 nt, Artificial Sequence
  Description of Artificial Sequence: Synthetic oligonucleotide
  Sense strand starting at position 304 of SEQ ID NO: 1888670
gcaagucaagucuauaaga

SEQ ID NO: 2548899 - RNA, 19 nt, Artificial Sequence
  Description of Artificial Sequence: Synthetic oligonucleotide
  Antisense strand to SEQ ID NO: 2548898
ucuuauagacuugacuugc

SEQ ID NO: 2548900 - RNA, 19 nt, Artificial Sequence
  Description of Artificial Sequence: Synthetic oligonucleotide
  Sense strand starting at position 1310 of SEQ ID NO: 1888670
cggcaucucagagaauuac

SEQ ID NO: 2548901 - RNA, 19 nt, Artificial Sequence
  Description of Artificial Sequence: Synthetic oligonucleotide
  Antisense strand to SEQ ID NO: 2548900
guaauucucugagaugccg

SEQ ID NO: 2548902 - RNA, 19 nt, Artificial Sequence
  Description of Artificial Sequence: Synthetic oligonucleotide
  Sense strand starting at position 2738 of SEQ ID NO: 1888670
gcuaauaaacaugguggaa

SEQ ID NO: 2548903 - RNA, 19 nt, Artificial Sequence
  Description of Artificial Sequence: Synthetic oligonucleotide
  Antisense strand to SEQ ID NO: 2548902
uuccaccauguuuauuagc

SEQ ID NO: 2548904 - RNA, 19 nt, Artificial Sequence
  Description of Artificial Sequence: Synthetic oligonucleotide
  Sense strand starting at position 2691 of SEQ ID NO: 1888670
agcauauuaaugggugaag

SEQ ID NO: 2548905 - RNA, 19 nt, Artificial Sequence
  Description of Artificial Sequence: Synthetic oligonucleotide
  Antisense strand to SEQ ID NO: 2548904
cuucacccauuaauaugcu

SEQ ID NO: 2548906 - RNA, 19 nt, Artificial Sequence
  Description of Artificial Sequence: Synthetic oligonucleotide
  Sense strand starting at position 435 of SEQ ID NO: 1888670
agagaaggcuggucugaac

SEQ ID NO: 2548907 - RNA, 19 nt, Artificial Sequence
  Description of Artificial Sequence: Synthetic oligonucleotide
  Antisense strand to SEQ ID NO: 2548906
guucagaccagccuucucu

SEQ ID NO: 2548908 - RNA, 19 nt, Artificial Sequence
  Description of Artificial Sequence: Synthetic oligonucleotide
  Sense strand starting at position 2573 of SEQ ID NO: 1888670
ggagaucuuacuggccaag

SEQ ID NO: 2548909 - RNA, 19 nt, Artificial Sequence
  Description of Artificial Sequence: Synthetic oligonucleotide
  Antisense strand to SEQ ID NO: 2548908
cuuggccaguaagaucucc

SEQ ID NO: 2548910 - RNA, 19 nt, Artificial Sequence
  Description of Artificial Sequence: Synthetic oligonucleotide
  Sense strand starting at position 748 of SEQ ID NO: 1888670
aagugauggaagugucaaa

SEQ ID NO: 2548911 - RNA, 19 nt, Artificial Sequence
  Description of Artificial Sequence: Synthetic oligonucleotide
  Antisense strand to SEQ ID NO: 2548910
uuugacacuuccaucacuu

SEQ ID NO: 2548912 - RNA, 19 nt, Artificial Sequence
  Description of Artificial Sequence: Synthetic oligonucleotide
  Sense strand starting at position 2531 of SEQ ID NO: 1888670
gaaucaugggaauguguca

SEQ ID NO: 2548913 - RNA, 19 nt, Artificial Sequence
  Description of Artificial Sequence: Synthetic oligonucleotide
  Antisense strand to SEQ ID NO: 2548912
ugacacauucccaugauuc

SEQ ID NO: 2548914 - RNA, 19 nt, Artificial Sequence
  Description of Artificial Sequence: Synthetic oligonucleotide
  Sense strand starting at position 3788 of SEQ ID NO: 1888670
aaguuccugugaucaagaa

SEQ ID NO: 2548915 - RNA, 19 nt, Artificial Sequence
  Description of Artificial Sequence: Synthetic oligonucleotide
  Antisense strand to SEQ ID NO: 2548914
uucuugaucacaggaacuu

SEQ ID NO: 2548916 - RNA, 19 nt, Artificial Sequence
  Description of Artificial Sequence: Synthetic oligonucleotide
  Sense strand starting at position 634 of SEQ ID NO: 1888670
aucagauauugggucauuc

SEQ ID NO: 2548917 - RNA, 19 nt, Artificial Sequence
  Description of Artificial Sequence: Synthetic oligonucleotide
  Antisense strand to SEQ ID NO: 2548916
gaaugacccaauaucugau

SEQ ID NO: 2548918 - RNA, 19 nt, Artificial Sequence
  Description of Artificial Sequence: Synthetic oligonucleotide
  Sense strand starting at position 1289 of SEQ ID NO: 1888670
uugagucccgcgcuguaaa

SEQ ID NO: 2548919 - RNA, 19 nt, Artificial Sequence
  Description of Artificial Sequence: Synthetic oligonucleotide
  Antisense strand to SEQ ID NO: 2548918
uuuacagcgcgggacucaa

SEQ ID NO: 2548920 - RNA, 19 nt, Artificial Sequence
  Description of Artificial Sequence: Synthetic oligonucleotide
  Sense strand starting at position 2917 of SEQ ID NO: 1888670
acuaguuaaugggucagau

SEQ ID NO: 2548921 - RNA, 19 nt, Artificial Sequence
  Description of Artificial Sequence: Synthetic oligonucleotide
  Antisense strand to SEQ ID NO: 2548920
aucugacccauuaacuagu

SEQ ID NO: 2548922 - RNA, 19 nt, Artificial Sequence
  Description of Artificial Sequence: Synthetic oligonucleotide
  Sense strand starting at position 2961 of SEQ ID NO: 1888670
gagaacacaucugugguau

SEQ ID NO: 2548923 - RNA, 19 nt, Artificial Sequence
  Description of Artificial Sequence: Synthetic oligonucleotide
  Antisense strand to SEQ ID NO: 2548922
auaccacagauguguucuc

SEQ ID NO: 2548924 - RNA, 19 nt, Artificial Sequence
  Description of Artificial Sequence: Synthetic oligonucleotide
  Sense strand starting at position 2576 of SEQ ID NO: 1888670
gaucuuacuggccaaguca

SEQ ID NO: 2548925 - RNA, 19 nt, Artificial Sequence
  Description of Artificial Sequence: Synthetic oligonucleotide
  Antisense strand to SEQ ID NO: 2548924
ugacuuggccaguaagauc

SEQ ID NO: 2548926 - RNA, 19 nt, Artificial Sequence
  Description of Artificial Sequence: Synthetic oligonucleotide
  Sense strand starting at position 2855 of SEQ ID NO: 1888670
ggugauguuacagagguuu

SEQ ID NO: 2548927 - RNA, 19 nt, Artificial Sequence
  Description of Artificial Sequence: Synthetic oligonucleotide
  Antisense strand to SEQ ID NO: 2548926
aaaccucuguaacaucacc

SEQ ID NO: 2548928 - RNA, 19 nt, Artificial Sequence
  Description of Artificial Sequence: Synthetic oligonucleotide
  Sense strand starting at position 2960 of SEQ ID NO: 1888670
ugagaacacaucuguggua

SEQ ID NO: 2548929 - RNA, 19 nt, Artificial Sequence
  Description of Artificial Sequence: Synthetic oligonucleotide
  Antisense strand to SEQ ID NO: 2548928
uaccacagauguguucuca

SEQ ID NO: 2548930 - RNA, 19 nt, Artificial Sequence
  Description of Artificial Sequence: Synthetic oligonucleotide
  Sense strand starting at position 2857 of SEQ ID NO: 1888670
ugauguuacagagguuuaa

SEQ ID NO: 2548931 - RNA, 19 nt, Artificial Sequence
  Description of Artificial Sequence: Synthetic oligonucleotide
  Antisense strand to SEQ ID NO: 2548930
uuaaaccucuguaacauca

SEQ ID NO: 2548932 - RNA, 19 nt, Artificial Sequence
  Description of Artificial Sequence: Synthetic oligonucleotide
  Sense strand starting at position 2562 of SEQ ID NO: 1888670
gcugucuuuaaggagaucu

SEQ ID NO: 2548933 - RNA, 19 nt, Artificial Sequence
  Description of Artificial Sequence: Synthetic oligonucleotide
  Antisense strand to SEQ ID NO: 2548932
agaucuccuuaaagacagc

SEQ ID NO: 2548934 - RNA, 19 nt, Artificial Sequence
  Description of Artificial Sequence: Synthetic oligonucleotide
  Sense strand starting at position 3375 of SEQ ID NO: 1888670
caguuaucccaggaacggu

SEQ ID NO: 2548935 - RNA, 19 nt, Artificial Sequence
  Description of Artificial Sequence: Synthetic oligonucleotide
  Antisense strand to SEQ ID NO: 2548934
accguuccugggauaacug

SEQ ID NO: 2548936 - RNA, 19 nt, Artificial Sequence
  Description of Artificial Sequence: Synthetic oligonucleotide
  Sense strand starting at position 2763 of SEQ ID NO: 1888670
aaucaauaaugugugguaa

SEQ ID NO: 2548937 - RNA, 19 nt, Artificial Sequence
  Description of Artificial Sequence: Synthetic oligonucleotide
  Antisense strand to SEQ ID NO: 2548936
uuaccacacauuauugauu

SEQ ID NO: 2548938 - RNA, 19 nt, Artificial Sequence
  Description of Artificial Sequence: Synthetic oligonucleotide
  Sense strand starting at position 744 of SEQ ID NO: 1888670
gcuaaagugauggaagugu

SEQ ID NO: 2548939 - RNA, 19 nt, Artificial Sequence
  Description of Artificial Sequence: Synthetic oligonucleotide
  Antisense strand to SEQ ID NO: 2548938
acacuuccaucacuuuagc

SEQ ID NO: 2548940 - RNA, 19 nt, Artificial Sequence
  Description of Artificial Sequence: Synthetic oligonucleotide
  Sense strand starting at position 2764 of SEQ ID NO: 1888670
aucaauaaugugugguaaa

SEQ ID NO: 2548941 - RNA, 19 nt, Artificial Sequence
  Description of Artificial Sequence: Synthetic oligonucleotide
  Antisense strand to SEQ ID NO: 2548940
uuuaccacacauuauugau

SEQ ID NO: 2548942 - RNA, 19 nt, Artificial Sequence
  Description of Artificial Sequence: Synthetic oligonucleotide
  Sense strand starting at position 2962 of SEQ ID NO: 1888670
agaacacaucugugguauu

SEQ ID NO: 2548943 - RNA, 19 nt, Artificial Sequence
  Description of Artificial Sequence: Synthetic oligonucleotide
  Antisense strand to SEQ ID NO: 2548942
aauaccacagauguguucu

SEQ ID NO: 2548944 - RNA, 19 nt, Artificial Sequence
  Description of Artificial Sequence: Synthetic oligonucleotide
  Sense strand starting at position 2656 of SEQ ID NO: 1888670
aguaauccaugagucuuua

SEQ ID NO: 2548945 - RNA, 19 nt, Artificial Sequence
  Description of Artificial Sequence: Synthetic oligonucleotide
  Antisense strand to SEQ ID NO: 2548944
uaaagacucauggauuacu

SEQ ID NO: 2548946 - RNA, 19 nt, Artificial Sequence
  Description of Artificial Sequence: Synthetic oligonucleotide
  Sense strand starting at position 511 of SEQ ID NO: 1888670
gcuucuccuggucaaacau

SEQ ID NO: 2548947 - RNA, 19 nt, Artificial Sequence
  Description of Artificial Sequence: Synthetic oligonucleotide
  Antisense strand to SEQ ID NO: 2548946
auguuugaccaggagaagc

SEQ ID NO: 2548948 - RNA, 19 nt, Artificial Sequence
  Description of Artificial Sequence: Synthetic oligonucleotide
  Sense strand starting at position 2727 of SEQ ID NO: 1888670
guagaaugcuagcuaauaa

SEQ ID NO: 2548949 - RNA, 19 nt, Artificial Sequence
  Description of Artificial Sequence: Synthetic oligonucleotide
  Antisense strand to SEQ ID NO: 2548948
uuauuagcuagcauucuac

SEQ ID NO: 2548950 - RNA, 19 nt, Artificial Sequence
  Description of Artificial Sequence: Synthetic oligonucleotide
  Sense strand starting at position 1661 of SEQ ID NO: 1888670
guauucaugggacgcagaa

SEQ ID NO: 2548951 - RNA, 19 nt, Artificial Sequence
  Description of Artificial Sequence: Synthetic oligonucleotide
  Antisense strand to SEQ ID NO: 2548950
uucugcgucccaugaauac

SEQ ID NO: 2548952 - RNA, 19 nt, Artificial Sequence
  Description of Artificial Sequence: Synthetic oligonucleotide
  Sense strand starting at position 720 of SEQ ID NO: 1888670
uggccuuauuuacaggaga

SEQ ID NO: 2548953 - RNA, 19 nt, Artificial Sequence
  Description of Artificial Sequence: Synthetic oligonucleotide
  Antisense strand to SEQ ID NO: 2548952
ucuccuguaaauaaggcca

SEQ ID NO: 2548954 - RNA, 19 nt, Artificial Sequence
  Description of Artificial Sequence: Synthetic oligonucleotide
  Sense strand starting at position 3792 of SEQ ID NO: 1888671
acccguaugccugugguua

SEQ ID NO: 2548955 - RNA, 19 nt, Artificial Sequence
  Description of Artificial Sequence: Synthetic oligonucleotide
  Antisense strand to SEQ ID NO: 2548954
uaaccacaggcauacgggu

SEQ ID NO: 2548956 - RNA, 19 nt, Artificial Sequence
  Description of Artificial Sequence: Synthetic oligonucleotide
  Sense strand starting at position 3395 of SEQ ID NO: 1888671
guaaauagccaggauguaa

SEQ ID NO: 2548957 - RNA, 19 nt, Artificial Sequence
  Description of Artificial Sequence: Synthetic oligonucleotide
  Antisense strand to SEQ ID NO: 2548956
uuacauccuggcuauuuac

SEQ ID NO: 2548958 - RNA, 19 nt, Artificial Sequence
  Description of Artificial Sequence: Synthetic oligonucleotide
  Sense strand starting at position 3963 of SEQ ID NO: 1888671
ucaacuacugacugugaaa

SEQ ID NO: 2548959 - RNA, 19 nt, Artificial Sequence
  Description of Artificial Sequence: Synthetic oligonucleotide
  Antisense strand to SEQ ID NO: 2548958
uuucacagucaguaguuga

SEQ ID NO: 2548960 - RNA, 19 nt, Artificial Sequence
  Description of Artificial Sequence: Synthetic oligonucleotide
  Sense strand starting at position 3248 of SEQ ID NO: 1888671
gugauuugcagucaugucu

SEQ ID NO: 2548961 - RNA, 19 nt, Artificial Sequence
  Description of Artificial Sequence: Synthetic oligonucleotide
  Antisense strand to SEQ ID NO: 2548960
agacaugacugcaaaucac

SEQ ID NO: 2548962 - RNA, 19 nt, Artificial Sequence
  Description of Artificial Sequence: Synthetic oligonucleotide
  Sense strand starting at position 3012 of SEQ ID NO: 1888671
uccuguugucugcuagcua

SEQ ID NO: 2548963 - RNA, 19 nt, Artificial Sequence
  Description of Artificial Sequence: Synthetic oligonucleotide
  Antisense strand to SEQ ID NO: 2548962
uagcuagcagacaacagga

SEQ ID NO: 2548964 - RNA, 19 nt, Artificial Sequence
  Description of Artificial Sequence: Synthetic oligonucleotide
  Sense strand starting at position 2074 of SEQ ID NO: 1888671
gacuguugaggucaugauc

SEQ ID NO: 2548965 - RNA, 19 nt, Artificial Sequence
  Description of Artificial Sequence: Synthetic oligonucleotide
  Antisense strand to SEQ ID NO: 2548964
gaucaugaccucaacaguc

SEQ ID NO: 2548966 - RNA, 19 nt, Artificial Sequence
  Description of Artificial Sequence: Synthetic oligonucleotide
  Sense strand starting at position 3406 of SEQ ID NO: 1888671
ggauguaaauauguuagau

SEQ ID NO: 2548967 - RNA, 19 nt, Artificial Sequence
  Description of Artificial Sequence: Synthetic oligonucleotide
  Antisense strand to SEQ ID NO: 2548966
aucuaacauauuuacaucc

SEQ ID NO: 2548968 - RNA, 19 nt, Artificial Sequence
  Description of Artificial Sequence: Synthetic oligonucleotide
  Sense strand starting at position 3345 of SEQ ID NO: 1888671
gagaacuuugcccaauagu

SEQ ID NO: 2548969 - RNA, 19 nt, Artificial Sequence
  Description of Artificial Sequence: Synthetic oligonucleotide
  Antisense strand to SEQ ID NO: 2548968
acuauugggcaaaguucuc

SEQ ID NO: 2548970 - RNA, 19 nt, Artificial Sequence
  Description of Artificial Sequence: Synthetic oligonucleotide
  Sense strand starting at position 801 of SEQ ID NO: 1888671
cguucuaugggugaggaaa

SEQ ID NO: 2548971 - RNA, 19 nt, Artificial Sequence
  Description of Artificial Sequence: Synthetic oligonucleotide
  Antisense strand to SEQ ID NO: 2548970
uuuccucacccauagaacg

SEQ ID NO: 2548972 - RNA, 19 nt, Artificial Sequence
  Description of Artificial Sequence: Synthetic oligonucleotide
  Sense strand starting at position 2394 of SEQ ID NO: 1888671
ggacaucucccuggacgaa

SEQ ID NO: 2548973 - RNA, 19 nt, Artificial Sequence
  Description of Artificial Sequence: Synthetic oligonucleotide
  Antisense strand to SEQ ID NO: 2548972
uucguccagggagaugucc

SEQ ID NO: 2548974 - RNA, 19 nt, Artificial Sequence
  Description of Artificial Sequence: Synthetic oligonucleotide
  Sense strand starting at position 3344 of SEQ ID NO: 1888671
ugagaacuuugcccaauag

SEQ ID NO: 2548975 - RNA, 19 nt, Artificial Sequence
  Description of Artificial Sequence: Synthetic oligonucleotide
  Antisense strand to SEQ ID NO: 2548974
cuauugggcaaaguucuca

SEQ ID NO: 2548976 - RNA, 19 nt, Artificial Sequence
  Description of Artificial Sequence: Synthetic oligonucleotide
  Sense strand starting at position 3817 of SEQ ID NO: 1888671
ucucuugaugucugaaaug

SEQ ID NO: 2548977 - RNA, 19 nt, Artificial Sequence
  Description of Artificial Sequence: Synthetic oligonucleotide
  Antisense strand to SEQ ID NO: 2548976
cauuucagacaucaagaga

SEQ ID NO: 2548978 - RNA, 19 nt, Artificial Sequence
  Description of Artificial Sequence: Synthetic oligonucleotide
  Sense strand starting at position 1537 of SEQ ID NO: 1888671
ccggacuuaucuuucugaa

SEQ ID NO: 2548979 - RNA, 19 nt, Artificial Sequence
  Description of Artificial Sequence: Synthetic oligonucleotide
  Antisense strand to SEQ ID NO: 2548978
uucagaaagauaaguccgg

SEQ ID NO: 2548980 - RNA, 19 nt, Artificial Sequence
  Description of Artificial Sequence: Synthetic oligonucleotide
  Sense strand starting at position 3343 of SEQ ID NO: 1888671
gugagaacuuugcccaaua

SEQ ID NO: 2548981 - RNA, 19 nt, Artificial Sequence
  Description of Artificial Sequence: Synthetic oligonucleotide
  Antisense strand to SEQ ID NO: 2548980
uauugggcaaaguucucac

SEQ ID NO: 2548982 - RNA, 19 nt, Artificial Sequence
  Description of Artificial Sequence: Synthetic oligonucleotide
  Sense strand starting at position 1539 of SEQ ID NO: 1888671
ggacuuaucuuucugaagc

SEQ ID NO: 2548983 - RNA, 19 nt, Artificial Sequence
  Description of Artificial Sequence: Synthetic oligonucleotide
  Antisense strand to SEQ ID NO: 2548982
gcuucagaaagauaagucc

SEQ ID NO: 2548984 - RNA, 19 nt, Artificial Sequence
  Description of Artificial Sequence: Synthetic oligonucleotide
  Sense strand starting at position 3211 of SEQ ID NO: 1888671
agaagaaagugcuugagcu

SEQ ID NO: 2548985 - RNA, 19 nt, Artificial Sequence
  Description of Artificial Sequence: Synthetic oligonucleotide
  Antisense strand to SEQ ID NO: 2548984
agcucaagcacuuucuucu

SEQ ID NO: 2548986 - RNA, 19 nt, Artificial Sequence
  Description of Artificial Sequence: Synthetic oligonucleotide
  Sense strand starting at position 3116 of SEQ ID NO: 1888671
cgggcugagcgcgauuuaa

SEQ ID NO: 2548987 - RNA, 19 nt, Artificial Sequence
  Description of Artificial Sequence: Synthetic oligonucleotide
  Antisense strand to SEQ ID NO: 2548986
uuaaaucgcgcucagcccg

SEQ ID NO: 2548988 - RNA, 19 nt, Artificial Sequence
  Description of Artificial Sequence: Synthetic oligonucleotide
  Sense strand starting at position 3394 of SEQ ID NO: 1888671
uguaaauagccaggaugua

SEQ ID NO: 2548989 - RNA, 19 nt, Artificial Sequence
  Description of Artificial Sequence: Synthetic oligonucleotide
  Antisense strand to SEQ ID NO: 2548988
uacauccuggcuauuuaca

SEQ ID NO: 2548990 - RNA, 19 nt, Artificial Sequence
  Description of Artificial Sequence: Synthetic oligonucleotide
  Sense strand starting at position 1566 of SEQ ID NO: 1888671
gcgguuauacgcagaaguu

SEQ ID NO: 2548991 - RNA, 19 nt, Artificial Sequence
  Description of Artificial Sequence: Synthetic oligonucleotide
  Antisense strand to SEQ ID NO: 2548990
aacuucugcguauaaccgc

SEQ ID NO: 2548992 - RNA, 19 nt, Artificial Sequence
  Description of Artificial Sequence: Synthetic oligonucleotide
  Sense strand starting at position 2393 of SEQ ID NO: 1888671
cggacaucucccuggacga

SEQ ID NO: 2548993 - RNA, 19 nt, Artificial Sequence
  Description of Artificial Sequence: Synthetic oligonucleotide
  Antisense strand to SEQ ID NO: 2548992
ucguccagggagauguccg

SEQ ID NO: 2548994 - RNA, 19 nt, Artificial Sequence
  Description of Artificial Sequence: Synthetic oligonucleotide
  Sense strand starting at position 2043 of SEQ ID NO: 1888671
ucucauuaggcguaugaug

SEQ ID NO: 2548995 - RNA, 19 nt, Artificial Sequence
  Description of Artificial Sequence: Synthetic oligonucleotide
  Antisense strand to SEQ ID NO: 2548994
caucauacgccuaaugaga

SEQ ID NO: 2548996 - RNA, 19 nt, Artificial Sequence
  Description of Artificial Sequence: Synthetic oligonucleotide
  Sense strand starting at position 3197 of SEQ ID NO: 1888671
uuauuuccuuagggagaag

SEQ ID NO: 2548997 - RNA, 19 nt, Artificial Sequence
  Description of Artificial Sequence: Synthetic oligonucleotide
  Antisense strand to SEQ ID NO: 2548996
cuucucccuaaggaaauaa

SEQ ID NO: 2548998 - RNA, 19 nt, Artificial Sequence
  Description of Artificial Sequence: Synthetic oligonucleotide
  Sense strand starting at position 351 of SEQ ID NO: 1888671
agcucuaaaugaguuguaa

SEQ ID NO: 2548999 - RNA, 19 nt, Artificial Sequence
  Description of Artificial Sequence: Synthetic oligonucleotide
  Antisense strand to SEQ ID NO: 2548998
uuacaacucauuuagagcu

SEQ ID NO: 2549000 - RNA, 19 nt, Artificial Sequence
  Description of Artificial Sequence: Synthetic oligonucleotide
  Sense strand starting at position 3212 of SEQ ID NO: 1888671
gaagaaagugcuugagcug

SEQ ID NO: 2549001 - RNA, 19 nt, Artificial Sequence
  Description of Artificial Sequence: Synthetic oligonucleotide
  Antisense strand to SEQ ID NO: 2549000
cagcucaagcacuuucuuc

SEQ ID NO: 2549002 - RNA, 19 nt, Artificial Sequence
  Description of Artificial Sequence: Synthetic oligonucleotide
  Sense strand starting at position 3975 of SEQ ID NO: 1888671
ugugaaagcucucucagau

SEQ ID NO: 2549003 - RNA, 19 nt, Artificial Sequence
  Description of Artificial Sequence: Synthetic oligonucleotide
  Antisense strand to SEQ ID NO: 2549002
aucugagagagcuuucaca

SEQ ID NO: 2549004 - RNA, 19 nt, Artificial Sequence
  Description of Artificial Sequence: Synthetic oligonucleotide
  Sense strand starting at position 3770 of SEQ ID NO: 1888671
uccgcagauguuuauuaau

SEQ ID NO: 2549005 - RNA, 19 nt, Artificial Sequence
  Description of Artificial Sequence: Synthetic oligonucleotide
  Antisense strand to SEQ ID NO: 2549004
auuaauaaacaucugcgga

SEQ ID NO: 2549006 - RNA, 19 nt, Artificial Sequence
  Description of Artificial Sequence: Synthetic oligonucleotide
  Sense strand starting at position 800 of SEQ ID NO: 1888671
ccguucuaugggugaggaa

SEQ ID NO: 2549007 - RNA, 19 nt, Artificial Sequence
  Description of Artificial Sequence: Synthetic oligonucleotide
  Antisense strand to SEQ ID NO: 2549006
uuccucacccauagaacgg

SEQ ID NO: 2549008 - RNA, 19 nt, Artificial Sequence
  Description of Artificial Sequence: Synthetic oligonucleotide
  Sense strand starting at position 1842 of SEQ ID NO: 1888671
gugaauaaggucgggcaga

SEQ ID NO: 2549009 - RNA, 19 nt, Artificial Sequence
  Description of Artificial Sequence: Synthetic oligonucleotide
  Antisense strand to SEQ ID NO: 2549008
ucugcccgaccuuauucac

SEQ ID NO: 2549010 - RNA, 19 nt, Artificial Sequence
  Description of Artificial Sequence: Synthetic oligonucleotide
  Sense strand starting at position 2108 of SEQ ID NO: 1888671
uugucucacuuguuaauaa

SEQ ID NO: 2549011 - RNA, 19 nt, Artificial Sequence
  Description of Artificial Sequence: Synthetic oligonucleotide
  Antisense strand to SEQ ID NO: 2549010
uuauuaacaagugagacaa

SEQ ID NO: 2549012 - RNA, 19 nt, Artificial Sequence
  Description of Artificial Sequence: Synthetic oligonucleotide
  Sense strand starting at position 2100 of SEQ ID NO: 1888671
auugaaguuugucucacuu

SEQ ID NO: 2549013 - RNA, 19 nt, Artificial Sequence
  Description of Artificial Sequence: Synthetic oligonucleotide
  Antisense strand to SEQ ID NO: 2549012
aagugagacaaacuucaau

SEQ ID NO: 2549014 - RNA, 19 nt, Artificial Sequence
  Description of Artificial Sequence: Synthetic oligonucleotide
  Sense strand starting at position 2097 of SEQ ID NO: 1888671
uccauugaaguuugucuca

SEQ ID NO: 2549015 - RNA, 19 nt, Artificial Sequence
  Description of Artificial Sequence: Synthetic oligonucleotide
  Antisense strand to SEQ ID NO: 2549014
ugagacaaacuucaaugga

SEQ ID NO: 2549016 - RNA, 19 nt, Artificial Sequence
  Description of Artificial Sequence: Synthetic oligonucleotide
  Sense strand starting at position 3444 of SEQ ID NO: 1888671
guucucucagcagauguuu

SEQ ID NO: 2549017 - RNA, 19 nt, Artificial Sequence
  Description of Artificial Sequence: Synthetic oligonucleotide
  Antisense strand to SEQ ID NO: 2549016
aaacaucugcugagagaac

SEQ ID NO: 2549018 - RNA, 19 nt, Artificial Sequence
  Description of Artificial Sequence: Synthetic oligonucleotide
  Sense strand starting at position 2045 of SEQ ID NO: 1888671
ucauuaggcguaugaugac

SEQ ID NO: 2549019 - RNA, 19 nt, Artificial Sequence
  Description of Artificial Sequence: Synthetic oligonucleotide
  Antisense strand to SEQ ID NO: 2549018
gucaucauacgccuaauga

SEQ ID NO: 2549020 - RNA, 19 nt, Artificial Sequence
  Description of Artificial Sequence: Synthetic oligonucleotide
  Sense strand starting at position 3772 of SEQ ID NO: 1888671
cgcagauguuuauuaauac

SEQ ID NO: 2549021 - RNA, 19 nt, Artificial Sequence
  Description of Artificial Sequence: Synthetic oligonucleotide
  Antisense strand to SEQ ID NO: 2549020
guauuaauaaacaucugcg

SEQ ID NO: 2549022 - RNA, 19 nt, Artificial Sequence
  Description of Artificial Sequence: Synthetic oligonucleotide
  Sense strand starting at position 3196 of SEQ ID NO: 1888671
guuauuuccuuagggagaa

SEQ ID NO: 2549023 - RNA, 19 nt, Artificial Sequence
  Description of Artificial Sequence: Synthetic oligonucleotide
  Antisense strand to SEQ ID NO: 2549022
uucucccuaaggaaauaac

SEQ ID NO: 2549024 - RNA, 19 nt, Artificial Sequence
  Description of Artificial Sequence: Synthetic oligonucleotide
  Sense strand starting at position 3285 of SEQ ID NO: 1888671
ccuuaaauguuguuaguca

SEQ ID NO: 2549025 - RNA, 19 nt, Artificial Sequence
  Description of Artificial Sequence: Synthetic oligonucleotide
  Antisense strand to SEQ ID NO: 2549024
ugacuaacaacauuuaagg

SEQ ID NO: 2549026 - RNA, 19 nt, Artificial Sequence
  Description of Artificial Sequence: Synthetic oligonucleotide
  Sense strand starting at position 285 of SEQ ID NO: 1888671
cccuuuacgcugcagaauu

SEQ ID NO: 2549027 - RNA, 19 nt, Artificial Sequence
  Description of Artificial Sequence: Synthetic oligonucleotide
  Antisense strand to SEQ ID NO: 2549026
aauucugcagcguaaaggg

SEQ ID NO: 2549028 - RNA, 19 nt, Artificial Sequence
  Description of Artificial Sequence: Synthetic oligonucleotide
  Sense strand starting at position 3441 of SEQ ID NO: 1888671
uuuguucucucagcagaug

SEQ ID NO: 2549029 - RNA, 19 nt, Artificial Sequence
  Description of Artificial Sequence: Synthetic oligonucleotide
  Antisense strand to SEQ ID NO: 2549028
caucugcugagagaacaaa

SEQ ID NO: 2549030 - RNA, 19 nt, Artificial Sequence
  Description of Artificial Sequence: Synthetic oligonucleotide
  Sense strand starting at position 2041 of SEQ ID NO: 1888671
auucucauuaggcguauga

SEQ ID NO: 2549031 - RNA, 19 nt, Artificial Sequence
  Description of Artificial Sequence: Synthetic oligonucleotide
  Antisense strand to SEQ ID NO: 2549030
ucauacgccuaaugagaau

SEQ ID NO: 2549032 - RNA, 19 nt, Artificial Sequence
  Description of Artificial Sequence: Synthetic oligonucleotide
  Sense strand starting at position 1639 of SEQ ID NO: 1888671
acgucaauacugugggcaa

SEQ ID NO: 2549033 - RNA, 19 nt, Artificial Sequence
  Description of Artificial Sequence: Synthetic oligonucleotide
  Antisense strand to SEQ ID NO: 2549032
uugcccacaguauugacgu

SEQ ID NO: 2549034 - RNA, 19 nt, Artificial Sequence
  Description of Artificial Sequence: Synthetic oligonucleotide
  Sense strand starting at position 2543 of SEQ ID NO: 1888672
ggaacuuacugaucacgaa

SEQ ID NO: 2549035 - RNA, 19 nt, Artificial Sequence
  Description of Artificial Sequence: Synthetic oligonucleotide
  Antisense strand to SEQ ID NO: 2549034
uucgugaucaguaaguucc

SEQ ID NO: 2549036 - RNA, 19 nt, Artificial Sequence
  Description of Artificial Sequence: Synthetic oligonucleotide
  Sense strand starting at position 452 of SEQ ID NO: 1888672
aaugaugcauuugugcaau

SEQ ID NO: 2549037 - RNA, 19 nt, Artificial Sequence
  Description of Artificial Sequence: Synthetic oligonucleotide
  Antisense strand to SEQ ID NO: 2549036
auugcacaaaugcaucauu

SEQ ID NO: 2549038 - RNA, 19 nt, Artificial Sequence
  Description of Artificial Sequence: Synthetic oligonucleotide
  Sense strand starting at position 2043 of SEQ ID NO: 1888672
acauuauucguggaaauac

SEQ ID NO: 2549039 - RNA, 19 nt, Artificial Sequence
  Description of Artificial Sequence: Synthetic oligonucleotide
  Antisense strand to SEQ ID NO: 2549038
guauuuccacgaauaaugu

SEQ ID NO: 2549040 - RNA, 19 nt, Artificial Sequence
  Description of Artificial Sequence: Synthetic oligonucleotide
  Sense strand starting at position 467 of SEQ ID NO: 1888672
caauuucugcagugaaugu

SEQ ID NO: 2549041 - RNA, 19 nt, Artificial Sequence
  Description of Artificial Sequence: Synthetic oligonucleotide
  Antisense strand to SEQ ID NO: 2549040
acauucacugcagaaauug

SEQ ID NO: 2549042 - RNA, 19 nt, Artificial Sequence
  Description of Artificial Sequence: Synthetic oligonucleotide
  Sense strand starting at position 345 of SEQ ID NO: 1888672
guaaacaucuagguaaaca

SEQ ID NO: 2549043 - RNA, 19 nt, Artificial Sequence
  Description of Artificial Sequence: Synthetic oligonucleotide
  Antisense strand to SEQ ID NO: 2549042
uguuuaccuagauguuuac

SEQ ID NO: 2549044 - RNA, 19 nt, Artificial Sequence
  Description of Artificial Sequence: Synthetic oligonucleotide
  Sense strand starting at position 2550 of SEQ ID NO: 1888672
acugaucacgaaugaauuc

SEQ ID NO: 2549045 - RNA, 19 nt, Artificial Sequence
  Description of Artificial Sequence: Synthetic oligonucleotide
  Antisense strand to SEQ ID NO: 2549044
gaauucauucgugaucagu

SEQ ID NO: 2549046 - RNA, 19 nt, Artificial Sequence
  Description of Artificial Sequence: Synthetic oligonucleotide
  Sense strand starting at position 2576 of SEQ ID NO: 1888672
uuaccauauggcgaauaua

SEQ ID NO: 2549047 - RNA, 19 nt, Artificial Sequence
  Description of Artificial Sequence: Synthetic oligonucleotide
  Antisense strand to SEQ ID NO: 2549046
uauauucgccauaugguaa

SEQ ID NO: 2549048 - RNA, 19 nt, Artificial Sequence
  Description of Artificial Sequence: Synthetic oligonucleotide
  Sense strand starting at position 714 of SEQ ID NO: 1888672
gagaaaccaugagcuaagu

SEQ ID NO: 2549049 - RNA, 19 nt, Artificial Sequence
  Description of Artificial Sequence: Synthetic oligonucleotide
  Antisense strand to SEQ ID NO: 2549048
acuuagcucaugguuucuc

SEQ ID NO: 2549050 - RNA, 19 nt, Artificial Sequence
  Description of Artificial Sequence: Synthetic oligonucleotide
  Sense strand starting at position 2809 of SEQ ID NO: 1888672
guggaaagcaaaugaaucu

SEQ ID NO: 2549051 - RNA, 19 nt, Artificial Sequence
  Description of Artificial Sequence: Synthetic oligonucleotide
  Antisense strand to SEQ ID NO: 2549050
agauucauuugcuuuccac

SEQ ID NO: 2549052 - RNA, 19 nt, Artificial Sequence
  Description of Artificial Sequence: Synthetic oligonucleotide
  Sense strand starting at position 2920 of SEQ ID NO: 1888672
uucugacauuauguagaau

SEQ ID NO: 2549053 - RNA, 19 nt, Artificial Sequence
  Description of Artificial Sequence: Synthetic oligonucleotide
  Antisense strand to SEQ ID NO: 2549052
auucuacauaaugucagaa

SEQ ID NO: 2549054 - RNA, 19 nt, Artificial Sequence
  Description of Artificial Sequence: Synthetic oligonucleotide
  Sense strand starting at position 2717 of SEQ ID NO: 1888672
agcagccuuccuuaaagaa

SEQ ID NO: 2549055 - RNA, 19 nt, Artificial Sequence
  Description of Artificial Sequence: Synthetic oligonucleotide
  Antisense strand to SEQ ID NO: 2549054
uucuuuaaggaaggcugcu

SEQ ID NO: 2549056 - RNA, 19 nt, Artificial Sequence
  Description of Artificial Sequence: Synthetic oligonucleotide
  Sense strand starting at position 344 of SEQ ID NO: 1888672
uguaaacaucuagguaaac

SEQ ID NO: 2549057 - RNA, 19 nt, Artificial Sequence
  Description of Artificial Sequence: Synthetic oligonucleotide
  Antisense strand to SEQ ID NO: 2549056
guuuaccuagauguuuaca

SEQ ID NO: 2549058 - RNA, 19 nt, Artificial Sequence
  Description of Artificial Sequence: Synthetic oligonucleotide
  Sense strand starting at position 2042 of SEQ ID NO: 1888672
aacauuauucguggaaaua

SEQ ID NO: 2549059 - RNA, 19 nt, Artificial Sequence
  Description of Artificial Sequence: Synthetic oligonucleotide
  Antisense strand to SEQ ID NO: 2549058
uauuuccacgaauaauguu

SEQ ID NO: 2549060 - RNA, 19 nt, Artificial Sequence
  Description of Artificial Sequence: Synthetic oligonucleotide
  Sense strand starting at position 724 of SEQ ID NO: 1888672
gagcuaagucaauacaguu

SEQ ID NO: 2549061 - RNA, 19 nt, Artificial Sequence
  Description of Artificial Sequence: Synthetic oligonucleotide
  Antisense strand to SEQ ID NO: 2549060
aacuguauugacuuagcuc

SEQ ID NO: 2549062 - RNA, 19 nt, Artificial Sequence
  Description of Artificial Sequence: Synthetic oligonucleotide
  Sense strand starting at position 670 of SEQ ID NO: 1888672
gugguaucccagcacaaga

SEQ ID NO: 2549063 - RNA, 19 nt, Artificial Sequence
  Description of Artificial Sequence: Synthetic oligonucleotide
  Antisense strand to SEQ ID NO: 2549062
ucuugugcugggauaccac

SEQ ID NO: 2549064 - RNA, 19 nt, Artificial Sequence
  Description of Artificial Sequence: Synthetic oligonucleotide
  Sense strand starting at position 100 of SEQ ID NO: 1888672
ugcuuaagugaacagaugu

SEQ ID NO: 2549065 - RNA, 19 nt, Artificial Sequence
  Description of Artificial Sequence: Synthetic oligonucleotide
  Antisense strand to SEQ ID NO: 2549064
acaucuguucacuuaagca

SEQ ID NO: 2549066 - RNA, 19 nt, Artificial Sequence
  Description of Artificial Sequence: Synthetic oligonucleotide
  Sense strand starting at position 2040 of SEQ ID NO: 1888672
uuaacauuauucguggaaa

SEQ ID NO: 2549067 - RNA, 19 nt, Artificial Sequence
  Description of Artificial Sequence: Synthetic oligonucleotide
  Antisense strand to SEQ ID NO: 2549066
uuuccacgaauaauguuaa

SEQ ID NO: 2549068 - RNA, 19 nt, Artificial Sequence
  Description of Artificial Sequence: Synthetic oligonucleotide
  Sense strand starting at position 162 of SEQ ID NO: 1888672
cuaguuacacacugacauu

SEQ ID NO: 2549069 - RNA, 19 nt, Artificial Sequence
  Description of Artificial Sequence: Synthetic oligonucleotide
  Antisense strand to SEQ ID NO: 2549068
aaugucaguguguaacuag

SEQ ID NO: 2549070 - RNA, 19 nt, Artificial Sequence
  Description of Artificial Sequence: Synthetic oligonucleotide
  Sense strand starting at position 3397 of SEQ ID NO: 1888672
cgaaaucgucucuacuaaa

SEQ ID NO: 2549071 - RNA, 19 nt, Artificial Sequence
  Description of Artificial Sequence: Synthetic oligonucleotide
  Antisense strand to SEQ ID NO: 2549070
uuuaguagagacgauuucg

SEQ ID NO: 2549072 - RNA, 19 nt, Artificial Sequence
  Description of Artificial Sequence: Synthetic oligonucleotide
  Sense strand starting at position 2878 of SEQ ID NO: 1888672
gcagaaauccuaugcagaa

SEQ ID NO: 2549073 - RNA, 19 nt, Artificial Sequence
  Description of Artificial Sequence: Synthetic oligonucleotide
  Antisense strand to SEQ ID NO: 2549072
uucugcauaggauuucugc

SEQ ID NO: 2549074 - RNA, 19 nt, Artificial Sequence
  Description of Artificial Sequence: Synthetic oligonucleotide
  Sense strand starting at position 1526 of SEQ ID NO: 1888672
aguuuagugccacacauag

SEQ ID NO: 2549075 - RNA, 19 nt, Artificial Sequence
  Description of Artificial Sequence: Synthetic oligonucleotide
  Antisense strand to SEQ ID NO: 2549074
cuauguguggcacuaaacu

SEQ ID NO: 2549076 - RNA, 19 nt, Artificial Sequence
  Description of Artificial Sequence: Synthetic oligonucleotide
  Sense strand starting at position 308 of SEQ ID NO: 1888672
gacaacucuuggguuguaa

SEQ ID NO: 2549077 - RNA, 19 nt, Artificial Sequence
  Description of Artificial Sequence: Synthetic oligonucleotide
  Antisense strand to SEQ ID NO: 2549076
uuacaacccaagaguuguc

SEQ ID NO: 2549078 - RNA, 19 nt, Artificial Sequence
  Description of Artificial Sequence: Synthetic oligonucleotide
  Sense strand starting at position 463 of SEQ ID NO: 1888672
ugugcaauuucugcaguga

SEQ ID NO: 2549079 - RNA, 19 nt, Artificial Sequence
  Description of Artificial Sequence: Synthetic oligonucleotide
  Antisense strand to SEQ ID NO: 2549078
ucacugcagaaauugcaca

SEQ ID NO: 2549080 - RNA, 19 nt, Artificial Sequence
  Description of Artificial Sequence: Synthetic oligonucleotide
  Sense strand starting at position 406 of SEQ ID NO: 1888672
cauggugucaaggagugua

SEQ ID NO: 2549081 - RNA, 19 nt, Artificial Sequence
  Description of Artificial Sequence: Synthetic oligonucleotide
  Antisense strand to SEQ ID NO: 2549080
uacacuccuugacaccaug

SEQ ID NO: 2549082 - RNA, 19 nt, Artificial Sequence
  Description of Artificial Sequence: Synthetic oligonucleotide
  Sense strand starting at position 653 of SEQ ID NO: 1888672
auccuaagaugcuuaaggu

SEQ ID NO: 2549083 - RNA, 19 nt, Artificial Sequence
  Description of Artificial Sequence: Synthetic oligonucleotide
  Antisense strand to SEQ ID NO: 2549082
accuuaagcaucuuaggau

SEQ ID NO: 2549084 - RNA, 19 nt, Artificial Sequence
  Description of Artificial Sequence: Synthetic oligonucleotide
  Sense strand starting at position 618 of SEQ ID NO: 1888672
uguuuacagcacuaaaugu

SEQ ID NO: 2549085 - RNA, 19 nt, Artificial Sequence
  Description of Artificial Sequence: Synthetic oligonucleotide
  Antisense strand to SEQ ID NO: 2549084
acauuuagugcuguaaaca

SEQ ID NO: 2549086 - RNA, 19 nt, Artificial Sequence
  Description of Artificial Sequence: Synthetic oligonucleotide
  Sense strand starting at position 800 of SEQ ID NO: 1888672
gcuaucacuugagucagga

SEQ ID NO: 2549087 - RNA, 19 nt, Artificial Sequence
  Description of Artificial Sequence: Synthetic oligonucleotide
  Antisense strand to SEQ ID NO: 2549086
uccugacucaagugauagc

SEQ ID NO: 2549088 - RNA, 19 nt, Artificial Sequence
  Description of Artificial Sequence: Synthetic oligonucleotide
  Sense strand starting at position 92 of SEQ ID NO: 1888672
aggugugaugcuuaaguga

SEQ ID NO: 2549089 - RNA, 19 nt, Artificial Sequence
  Description of Artificial Sequence: Synthetic oligonucleotide
  Antisense strand to SEQ ID NO: 2549088
ucacuuaagcaucacaccu

SEQ ID NO: 2549090 - RNA, 19 nt, Artificial Sequence
  Description of Artificial Sequence: Synthetic oligonucleotide
  Sense strand starting at position 409 of SEQ ID NO: 1888672
ggugucaaggaguguaaga

SEQ ID NO: 2549091 - RNA, 19 nt, Artificial Sequence
  Description of Artificial Sequence: Synthetic oligonucleotide
  Antisense strand to SEQ ID NO: 2549090
ucuuacacuccuugacacc

SEQ ID NO: 2549092 - RNA, 19 nt, Artificial Sequence
  Description of Artificial Sequence: Synthetic oligonucleotide
  Sense strand starting at position 95 of SEQ ID NO: 1888672
ugugaugcuuaagugaaca

SEQ ID NO: 2549093 - RNA, 19 nt, Artificial Sequence
  Description of Artificial Sequence: Synthetic oligonucleotide
  Antisense strand to SEQ ID NO: 2549092
uguucacuuaagcaucaca

SEQ ID NO: 2549094 - RNA, 19 nt, Artificial Sequence
  Description of Artificial Sequence: Synthetic oligonucleotide
  Sense strand starting at position 3582 of SEQ ID NO: 1888672
gucagaagcuauucucuau

SEQ ID NO: 2549095 - RNA, 19 nt, Artificial Sequence
  Description of Artificial Sequence: Synthetic oligonucleotide
  Antisense strand to SEQ ID NO: 2549094
auagagaauagcuucugac

SEQ ID NO: 2549096 - RNA, 19 nt, Artificial Sequence
  Description of Artificial Sequence: Synthetic oligonucleotide
  Sense strand starting at position 3657 of SEQ ID NO: 1888672
uugacacauuaagauugaa

SEQ ID NO: 2549097 - RNA, 19 nt, Artificial Sequence
  Description of Artificial Sequence: Synthetic oligonucleotide
  Antisense strand to SEQ ID NO: 2549096
uucaaucuuaaugugucaa

SEQ ID NO: 2549098 - RNA, 19 nt, Artificial Sequence
  Description of Artificial Sequence: Synthetic oligonucleotide
  Sense strand starting at position 2137 of SEQ ID NO: 1888672
aggagugcuuccuucuuau

SEQ ID NO: 2549099 - RNA, 19 nt, Artificial Sequence
  Description of Artificial Sequence: Synthetic oligonucleotide
  Antisense strand to SEQ ID NO: 2549098
auaagaaggaagcacuccu

SEQ ID NO: 2549100 - RNA, 19 nt, Artificial Sequence
  Description of Artificial Sequence: Synthetic oligonucleotide
  Sense strand starting at position 154 of SEQ ID NO: 1888672
guagcaagcuaguuacaca

SEQ ID NO: 2549101 - RNA, 19 nt, Artificial Sequence
  Description of Artificial Sequence: Synthetic oligonucleotide
  Antisense strand to SEQ ID NO: 2549100
uguguaacuagcuugcuac

SEQ ID NO: 2549102 - RNA, 19 nt, Artificial Sequence
  Description of Artificial Sequence: Synthetic oligonucleotide
  Sense strand starting at position 2764 of SEQ ID NO: 1888672
gggaauuacuaguaugaac

SEQ ID NO: 2549103 - RNA, 19 nt, Artificial Sequence
  Description of Artificial Sequence: Synthetic oligonucleotide
  Antisense strand to SEQ ID NO: 2549102
guucauacuaguaauuccc

SEQ ID NO: 2549104 - RNA, 19 nt, Artificial Sequence
  Description of Artificial Sequence: Synthetic oligonucleotide
  Sense strand starting at position 3396 of SEQ ID NO: 1888672
gcgaaaucgucucuacuaa

SEQ ID NO: 2549105 - RNA, 19 nt, Artificial Sequence
  Description of Artificial Sequence: Synthetic oligonucleotide
  Antisense strand to SEQ ID NO: 2549104
uuaguagagacgauuucgc

SEQ ID NO: 2549106 - RNA, 19 nt, Artificial Sequence
  Description of Artificial Sequence: Synthetic oligonucleotide
  Sense strand starting at position 59 of SEQ ID NO: 1888672
uuucguuguugacuuuaca

SEQ ID NO: 2549107 - RNA, 19 nt, Artificial Sequence
  Description of Artificial Sequence: Synthetic oligonucleotide
  Antisense strand to SEQ ID NO: 2549106
uguaaagucaacaacgaaa

SEQ ID NO: 2549108 - RNA, 19 nt, Artificial Sequence
  Description of Artificial Sequence: Synthetic oligonucleotide
  Sense strand starting at position 2912 of SEQ ID NO: 1888672
gauggaccuucugacauua

SEQ ID NO: 2549109 - RNA, 19 nt, Artificial Sequence
  Description of Artificial Sequence: Synthetic oligonucleotide
  Antisense strand to SEQ ID NO: 2549108
uaaugucagaagguccauc

SEQ ID NO: 2549110 - RNA, 19 nt, Artificial Sequence
  Description of Artificial Sequence: Synthetic oligonucleotide
  Sense strand starting at position 1954 of SEQ ID NO: 1888672
uucucuguauuguugcaau

SEQ ID NO: 2549111 - RNA, 19 nt, Artificial Sequence
  Description of Artificial Sequence: Synthetic oligonucleotide
  Antisense strand to SEQ ID NO: 2549110
auugcaacaauacagagaa

SEQ ID NO: 2549112 - RNA, 19 nt, Artificial Sequence
  Description of Artificial Sequence: Synthetic oligonucleotide
  Sense strand starting at position 2106 of SEQ ID NO: 1888672
acagaauacuugggaagug

SEQ ID NO: 2549113 - RNA, 19 nt, Artificial Sequence
  Description of Artificial Sequence: Synthetic oligonucleotide
  Antisense strand to SEQ ID NO: 2549112
cacuucccaaguauucugu

SEQ ID NO: 2549114 - RNA, 19 nt, Artificial Sequence
  Description of Artificial Sequence: Synthetic oligonucleotide
  Sense strand starting at position 1709 of SEQ ID NO: 1888673
ggagaagccuacccauaag

SEQ ID NO: 2549115 - RNA, 19 nt, Artificial Sequence
  Description of Artificial Sequence: Synthetic oligonucleotide
  Antisense strand to SEQ ID NO: 2549114
cuuauggguaggcuucucc

SEQ ID NO: 2549116 - RNA, 19 nt, Artificial Sequence
  Description of Artificial Sequence: Synthetic oligonucleotide
  Sense strand starting at position 3588 of SEQ ID NO: 1888673
acgggucauccuuagggaa

SEQ ID NO: 2549117 - RNA, 19 nt, Artificial Sequence
  Description of Artificial Sequence: Synthetic oligonucleotide
  Antisense strand to SEQ ID NO: 2549116
uucccuaaggaugacccgu

SEQ ID NO: 2549118 - RNA, 19 nt, Artificial Sequence
  Description of Artificial Sequence: Synthetic oligonucleotide
  Sense strand starting at position 3107 of SEQ ID NO: 1888673
guuagacaucucuaaguag

SEQ ID NO: 2549119 - RNA, 19 nt, Artificial Sequence
  Description of Artificial Sequence: Synthetic oligonucleotide
  Antisense strand to SEQ ID NO: 2549118
cuacuuagagaugucuaac

SEQ ID NO: 2549120 - RNA, 19 nt, Artificial Sequence
  Description of Artificial Sequence: Synthetic oligonucleotide
  Sense strand starting at position 2046 of SEQ ID NO: 1888673
gcucauugccggcuucuaa

SEQ ID NO: 2549121 - RNA, 19 nt, Artificial Sequence
  Description of Artificial Sequence: Synthetic oligonucleotide
  Antisense strand to SEQ ID NO: 2549120
uuagaagccggcaaugagc

SEQ ID NO: 2549122 - RNA, 19 nt, Artificial Sequence
  Description of Artificial Sequence: Synthetic oligonucleotide
  Sense strand starting at position 3047 of SEQ ID NO: 1888673
agagauuagucaguaucaa

SEQ ID NO: 2549123 - RNA, 19 nt, Artificial Sequence
  Description of Artificial Sequence: Synthetic oligonucleotide
  Antisense strand to SEQ ID NO: 2549122
uugauacugacuaaucucu

SEQ ID NO: 2549124 - RNA, 19 nt, Artificial Sequence
  Description of Artificial Sequence: Synthetic oligonucleotide
  Sense strand starting at position 1563 of SEQ ID NO: 1888673
cuagguuuccaggagagca

SEQ ID NO: 2549125 - RNA, 19 nt, Artificial Sequence
  Description of Artificial Sequence: Synthetic oligonucleotide
  Antisense strand to SEQ ID NO: 2549124
ugcucuccuggaaaccuag

SEQ ID NO: 2549126 - RNA, 19 nt, Artificial Sequence
  Description of Artificial Sequence: Synthetic oligonucleotide
  Sense strand starting at position 337 of SEQ ID NO: 1888673
aguagagaaugguucuaca

SEQ ID NO: 2549127 - RNA, 19 nt, Artificial Sequence
  Description of Artificial Sequence: Synthetic oligonucleotide
  Antisense strand to SEQ ID NO: 2549126
uguagaaccauucucuacu

SEQ ID NO: 2549128 - RNA, 19 nt, Artificial Sequence
  Description of Artificial Sequence: Synthetic oligonucleotide
  Sense strand starting at position 3485 of SEQ ID NO: 1888673
uuaggaugucuguacauac

SEQ ID NO: 2549129 - RNA, 19 nt, Artificial Sequence
  Description of Artificial Sequence: Synthetic oligonucleotide
  Antisense strand to SEQ ID NO: 2549128
guauguacagacauccuaa

SEQ ID NO: 2549130 - RNA, 19 nt, Artificial Sequence
  Description of Artificial Sequence: Synthetic oligonucleotide
  Sense strand starting at position 2132 of SEQ ID NO: 1888673
agagguccacaagguuaau

SEQ ID NO: 2549131 - RNA, 19 nt, Artificial Sequence
  Description of Artificial Sequence: Synthetic oligonucleotide
  Antisense strand to SEQ ID NO: 2549130
auuaaccuuguggaccucu

SEQ ID NO: 2549132 - RNA, 19 nt, Artificial Sequence
  Description of Artificial Sequence: Synthetic oligonucleotide
  Sense strand starting at position 3680 of SEQ ID NO: 1888673
gagaacuuucugugagacu

SEQ ID NO: 2549133 - RNA, 19 nt, Artificial Sequence
  Description of Artificial Sequence: Synthetic oligonucleotide
  Antisense strand to SEQ ID NO: 2549132
agucucacagaaaguucuc

SEQ ID NO: 2549134 - RNA, 19 nt, Artificial Sequence
  Description of Artificial Sequence: Synthetic oligonucleotide
  Sense strand starting at position 1290 of SEQ ID NO: 1888673
cugagauagggcuauugca

SEQ ID NO: 2549135 - RNA, 19 nt, Artificial Sequence
  Description of Artificial Sequence: Synthetic oligonucleotide
  Antisense strand to SEQ ID NO: 2549134
ugcaauagcccuaucucag

SEQ ID NO: 2549136 - RNA, 19 nt, Artificial Sequence
  Description of Artificial Sequence: Synthetic oligonucleotide
  Sense strand starting at position 37 of SEQ ID NO: 1888673
gggucaucugagggaguga

SEQ ID NO: 2549137 - RNA, 19 nt, Artificial Sequence
  Description of Artificial Sequence: Synthetic oligonucleotide
  Antisense strand to SEQ ID NO: 2549136
ucacucccucagaugaccc

SEQ ID NO: 2549138 - RNA, 19 nt, Artificial Sequence
  Description of Artificial Sequence: Synthetic oligonucleotide
  Sense strand starting at position 115 of SEQ ID NO: 1888673
gggugucacccugaacuca

SEQ ID NO: 2549139 - RNA, 19 nt, Artificial Sequence
  Description of Artificial Sequence: Synthetic oligonucleotide
  Antisense strand to SEQ ID NO: 2549138
ugaguucagggugacaccc

SEQ ID NO: 2549140 - RNA, 19 nt, Artificial Sequence
  Description of Artificial Sequence: Synthetic oligonucleotide
  Sense strand starting at position 2129 of SEQ ID NO: 1888673
agcagagguccacaagguu

SEQ ID NO: 2549141 - RNA, 19 nt, Artificial Sequence
  Description of Artificial Sequence: Synthetic oligonucleotide
  Antisense strand to SEQ ID NO: 2549140
aaccuuguggaccucugcu

SEQ ID NO: 2549142 - RNA, 19 nt, Artificial Sequence
  Description of Artificial Sequence: Synthetic oligonucleotide
  Sense strand starting at position 3034 of SEQ ID NO: 1888673
uagcucugagcucagagau

SEQ ID NO: 2549143 - RNA, 19 nt, Artificial Sequence
  Description of Artificial Sequence: Synthetic oligonucleotide
  Antisense strand to SEQ ID NO: 2549142
aucucugagcucagagcua

SEQ ID NO: 2549144 - RNA, 19 nt, Artificial Sequence
  Description of Artificial Sequence: Synthetic oligonucleotide
  Sense strand starting at position 3044 of SEQ ID NO: 1888673
cucagagauuagucaguau

SEQ ID NO: 2549145 - RNA, 19 nt, Artificial Sequence
  Description of Artificial Sequence: Synthetic oligonucleotide
  Antisense strand to SEQ ID NO: 2549144
auacugacuaaucucugag

SEQ ID NO: 2549146 - RNA, 19 nt, Artificial Sequence
  Description of Artificial Sequence: Synthetic oligonucleotide
  Sense strand starting at position 2210 of SEQ ID NO: 1888673
aagcccacucagugaugaa

SEQ ID NO: 2549147 - RNA, 19 nt, Artificial Sequence
  Description of Artificial Sequence: Synthetic oligonucleotide
  Antisense strand to SEQ ID NO: 2549146
uucaucacugagugggcuu

SEQ ID NO: 2549148 - RNA, 19 nt, Artificial Sequence
  Description of Artificial Sequence: Synthetic oligonucleotide
  Sense strand starting at position 2473 of SEQ ID NO: 1888673
cugcuacagagcugagaaa

SEQ ID NO: 2549149 - RNA, 19 nt, Artificial Sequence
  Description of Artificial Sequence: Synthetic oligonucleotide
  Antisense strand to SEQ ID NO: 2549148
uuucucagcucuguagcag

SEQ ID NO: 2549150 - RNA, 19 nt, Artificial Sequence
  Description of Artificial Sequence: Synthetic oligonucleotide
  Sense strand starting at position 1329 of SEQ ID NO: 1888673
acgaaauucugucucuaaa

SEQ ID NO: 2549151 - RNA, 19 nt, Artificial Sequence
  Description of Artificial Sequence: Synthetic oligonucleotide
  Antisense strand to SEQ ID NO: 2549150
uuuagagacagaauuucgu

SEQ ID NO: 2549152 - RNA, 19 nt, Artificial Sequence
  Description of Artificial Sequence: Synthetic oligonucleotide
  Sense strand starting at position 3134 of SEQ ID NO: 1888673
cagguaaguggccauuauu

SEQ ID NO: 2549153 - RNA, 19 nt, Artificial Sequence
  Description of Artificial Sequence: Synthetic oligonucleotide
  Antisense strand to SEQ ID NO: 2549152
aauaauggccacuuaccug

SEQ ID NO: 2549154 - RNA, 19 nt, Artificial Sequence
  Description of Artificial Sequence: Synthetic oligonucleotide
  Sense strand starting at position 3322 of SEQ ID NO: 1888673
guagccuuggaauauuagu

SEQ ID NO: 2549155 - RNA, 19 nt, Artificial Sequence
  Description of Artificial Sequence: Synthetic oligonucleotide
  Antisense strand to SEQ ID NO: 2549154
acuaauauuccaaggcuac

SEQ ID NO: 2549156 - RNA, 19 nt, Artificial Sequence
  Description of Artificial Sequence: Synthetic oligonucleotide
  Sense strand starting at position 2991 of SEQ ID NO: 1888673
agacaagauugcuauuuau

SEQ ID NO: 2549157 - RNA, 19 nt, Artificial Sequence
  Description of Artificial Sequence: Synthetic oligonucleotide
  Antisense strand to SEQ ID NO: 2549156
auaaauagcaaucuugucu

SEQ ID NO: 2549158 - RNA, 19 nt, Artificial Sequence
  Description of Artificial Sequence: Synthetic oligonucleotide
  Sense strand starting at position 2596 of SEQ ID NO: 1888673
cacugaugugcucagcaaa

SEQ ID NO: 2549159 - RNA, 19 nt, Artificial Sequence
  Description of Artificial Sequence: Synthetic oligonucleotide
  Antisense strand to SEQ ID NO: 2549158
uuugcugagcacaucagug

SEQ ID NO: 2549160 - RNA, 19 nt, Artificial Sequence
  Description of Artificial Sequence: Synthetic oligonucleotide
  Sense strand starting at position 2988 of SEQ ID NO: 1888673
ggcagacaagauugcuauu

SEQ ID NO: 2549161 - RNA, 19 nt, Artificial Sequence
  Description of Artificial Sequence: Synthetic oligonucleotide
  Antisense strand to SEQ ID NO: 2549160
aauagcaaucuugucugcc

SEQ ID NO: 2549162 - RNA, 19 nt, Artificial Sequence
  Description of Artificial Sequence: Synthetic oligonucleotide
  Sense strand starting at position 335 of SEQ ID NO: 1888673
gcaguagagaaugguucua

SEQ ID NO: 2549163 - RNA, 19 nt, Artificial Sequence
  Description of Artificial Sequence: Synthetic oligonucleotide
  Antisense strand to SEQ ID NO: 2549162
uagaaccauucucuacugc

SEQ ID NO: 2549164 - RNA, 19 nt, Artificial Sequence
  Description of Artificial Sequence: Synthetic oligonucleotide
  Sense strand starting at position 223 of SEQ ID NO: 1888673
aguuaucaguaggcuacaa

SEQ ID NO: 2549165 - RNA, 19 nt, Artificial Sequence
  Description of Artificial Sequence: Synthetic oligonucleotide
  Antisense strand to SEQ ID NO: 2549164
uuguagccuacugauaacu

SEQ ID NO: 2549166 - RNA, 19 nt, Artificial Sequence
  Description of Artificial Sequence: Synthetic oligonucleotide
  Sense strand starting at position 310 of SEQ ID NO: 1888673
ccacaaggcuguucucaga

SEQ ID NO: 2549167 - RNA, 19 nt, Artificial Sequence
  Description of Artificial Sequence: Synthetic oligonucleotide
  Antisense strand to SEQ ID NO: 2549166
ucugagaacagccuugugg

SEQ ID NO: 2549168 - RNA, 19 nt, Artificial Sequence
  Description of Artificial Sequence: Synthetic oligonucleotide
  Sense strand starting at position 3133 of SEQ ID NO: 1888673
acagguaaguggccauuau

SEQ ID NO: 2549169 - RNA, 19 nt, Artificial Sequence
  Description of Artificial Sequence: Synthetic oligonucleotide
  Antisense strand to SEQ ID NO: 2549168
auaauggccacuuaccugu

SEQ ID NO: 2549170 - RNA, 19 nt, Artificial Sequence
  Description of Artificial Sequence: Synthetic oligonucleotide
  Sense strand starting at position 3318 of SEQ ID NO: 1888673
aucuguagccuuggaauau

SEQ ID NO: 2549171 - RNA, 19 nt, Artificial Sequence
  Description of Artificial Sequence: Synthetic oligonucleotide
  Antisense strand to SEQ ID NO: 2549170
auauuccaaggcuacagau

SEQ ID NO: 2549172 - RNA, 19 nt, Artificial Sequence
  Description of Artificial Sequence: Synthetic oligonucleotide
  Sense strand starting at position 2173 of SEQ ID NO: 1888673
aaauucuugcuccgggaca

SEQ ID NO: 2549173 - RNA, 19 nt, Artificial Sequence
  Description of Artificial Sequence: Synthetic oligonucleotide
  Antisense strand to SEQ ID NO: 2549172
ugucccggagcaagaauuu

SEQ ID NO: 2549174 - RNA, 19 nt, Artificial Sequence
  Description of Artificial Sequence: Synthetic oligonucleotide
  Sense strand starting at position 2175 of SEQ ID NO: 1888673
auucuugcuccgggacaaa

SEQ ID NO: 2549175 - RNA, 19 nt, Artificial Sequence
  Description of Artificial Sequence: Synthetic oligonucleotide
  Antisense strand to SEQ ID NO: 2549174
uuugucccggagcaagaau

SEQ ID NO: 2549176 - RNA, 19 nt, Artificial Sequence
  Description of Artificial Sequence: Synthetic oligonucleotide
  Sense strand starting at position 1654 of SEQ ID NO: 1888673
gggaaugguucccuugcua

SEQ ID NO: 2549177 - RNA, 19 nt, Artificial Sequence
  Description of Artificial Sequence: Synthetic oligonucleotide
  Antisense strand to SEQ ID NO: 2549176
uagcaagggaaccauuccc

SEQ ID NO: 2549178 - RNA, 19 nt, Artificial Sequence
  Description of Artificial Sequence: Synthetic oligonucleotide
  Sense strand starting at position 1827 of SEQ ID NO: 1888673
cacggaugacuuggcagua

SEQ ID NO: 2549179 - RNA, 19 nt, Artificial Sequence
  Description of Artificial Sequence: Synthetic oligonucleotide
  Antisense strand to SEQ ID NO: 2549178
uacugccaagucauccgug

SEQ ID NO: 2549180 - RNA, 19 nt, Artificial Sequence
  Description of Artificial Sequence: Synthetic oligonucleotide
  Sense strand starting at position 2278 of SEQ ID NO: 1888673
ggguuuaauuauucugcua

SEQ ID NO: 2549181 - RNA, 19 nt, Artificial Sequence
  Description of Artificial Sequence: Synthetic oligonucleotide
  Antisense strand to SEQ ID NO: 2549180
uagcagaauaauuaaaccc

SEQ ID NO: 2549182 - RNA, 19 nt, Artificial Sequence
  Description of Artificial Sequence: Synthetic oligonucleotide
  Sense strand starting at position 222 of SEQ ID NO: 1888673
caguuaucaguaggcuaca

SEQ ID NO: 2549183 - RNA, 19 nt, Artificial Sequence
  Description of Artificial Sequence: Synthetic oligonucleotide
  Antisense strand to SEQ ID NO: 2549182
uguagccuacugauaacug

SEQ ID NO: 2549184 - RNA, 19 nt, Artificial Sequence
  Description of Artificial Sequence: Synthetic oligonucleotide
  Sense strand starting at position 251 of SEQ ID NO: 1888673
gguccaggaacguguuaag

SEQ ID NO: 2549185 - RNA, 19 nt, Artificial Sequence
  Description of Artificial Sequence: Synthetic oligonucleotide
  Antisense strand to SEQ ID NO: 2549184
cuuaacacguuccuggacc

SEQ ID NO: 2549186 - RNA, 19 nt, Artificial Sequence
  Description of Artificial Sequence: Synthetic oligonucleotide
  Sense strand starting at position 2302 of SEQ ID NO: 1888673
ccugguuucuaguuggacu

SEQ ID NO: 2549187 - RNA, 19 nt, Artificial Sequence
  Description of Artificial Sequence: Synthetic oligonucleotide
  Antisense strand to SEQ ID NO: 2549186
aguccaacuagaaaccagg

SEQ ID NO: 2549188 - RNA, 19 nt, Artificial Sequence
  Description of Artificial Sequence: Synthetic oligonucleotide
  Sense strand starting at position 220 of SEQ ID NO: 1888673
ugcaguuaucaguaggcua

SEQ ID NO: 2549189 - RNA, 19 nt, Artificial Sequence
  Description of Artificial Sequence: Synthetic oligonucleotide
  Antisense strand to SEQ ID NO: 2549188
uagccuacugauaacugca

SEQ ID NO: 2549190 - RNA, 19 nt, Artificial Sequence
  Description of Artificial Sequence: Synthetic oligonucleotide
  Sense strand starting at position 846 of SEQ ID NO: 1888673
gauacuggugccugaguua

SEQ ID NO: 2549191 - RNA, 19 nt, Artificial Sequence
  Description of Artificial Sequence: Synthetic oligonucleotide
  Antisense strand to SEQ ID NO: 2549190
uaacucaggcaccaguauc

SEQ ID NO: 2549192 - RNA, 19 nt, Artificial Sequence
  Description of Artificial Sequence: Synthetic oligonucleotide
  Sense strand starting at position 845 of SEQ ID NO: 1888673
ggauacuggugccugaguu

SEQ ID NO: 2549193 - RNA, 19 nt, Artificial Sequence
  Description of Artificial Sequence: Synthetic oligonucleotide
  Antisense strand to SEQ ID NO: 2549192
aacucaggcaccaguaucc

SEQ ID NO: 2549194 - RNA, 19 nt, Artificial Sequence
  Description of Artificial Sequence: Synthetic oligonucleotide
  Sense strand starting at position 453 of SEQ ID NO: 1888674
gauguuggaagauguauac

SEQ ID NO: 2549195 - RNA, 19 nt, Artificial Sequence
  Description of Artificial Sequence: Synthetic oligonucleotide
  Antisense strand to SEQ ID NO: 2549194
guauacaucuuccaacauc

SEQ ID NO: 2549196 - RNA, 19 nt, Artificial Sequence
  Description of Artificial Sequence: Synthetic oligonucleotide
  Sense strand starting at position 1210 of SEQ ID NO: 1888674
uucuguauacuaggaauca

SEQ ID NO: 2549197 - RNA, 19 nt, Artificial Sequence
  Description of Artificial Sequence: Synthetic oligonucleotide
  Antisense strand to SEQ ID NO: 2549196
ugauuccuaguauacagaa

SEQ ID NO: 2549198 - RNA, 19 nt, Artificial Sequence
  Description of Artificial Sequence: Synthetic oligonucleotide
  Sense strand starting at position 1497 of SEQ ID NO: 1888674
agaagacauuuacaaugca

SEQ ID NO: 2549199 - RNA, 19 nt, Artificial Sequence
  Description of Artificial Sequence: Synthetic oligonucleotide
  Antisense strand to SEQ ID NO: 2549198
ugcauuguaaaugucuucu

SEQ ID NO: 2549200 - RNA, 19 nt, Artificial Sequence
  Description of Artificial Sequence: Synthetic oligonucleotide
  Sense strand starting at position 577 of SEQ ID NO: 1888674
gccagacauauaugaacga

SEQ ID NO: 2549201 - RNA, 19 nt, Artificial Sequence
  Description of Artificial Sequence: Synthetic oligonucleotide
  Antisense strand to SEQ ID NO: 2549200
ucguucauauaugucuggc

SEQ ID NO: 2549202 - RNA, 19 nt, Artificial Sequence
  Description of Artificial Sequence: Synthetic oligonucleotide
  Sense strand starting at position 47 of SEQ ID NO: 1888674
gcugaaucucagcagaauu

SEQ ID NO: 2549203 - RNA, 19 nt, Artificial Sequence
  Description of Artificial Sequence: Synthetic oligonucleotide
  Antisense strand to SEQ ID NO: 2549202
aauucugcugagauucagc

SEQ ID NO: 2549204 - RNA, 19 nt, Artificial Sequence
  Description of Artificial Sequence: Synthetic oligonucleotide
  Sense strand starting at position 2086 of SEQ ID NO: 1888674
gggagauuauauccugcau

SEQ ID NO: 2549205 - RNA, 19 nt, Artificial Sequence
  Description of Artificial Sequence: Synthetic oligonucleotide
  Antisense strand to SEQ ID NO: 2549204
augcaggauauaaucuccc

SEQ ID NO: 2549206 - RNA, 19 nt, Artificial Sequence
  Description of Artificial Sequence: Synthetic oligonucleotide
  Sense strand starting at position 968 of SEQ ID NO: 1888674
gugaaacuaugucucagga

SEQ ID NO: 2549207 - RNA, 19 nt, Artificial Sequence
  Description of Artificial Sequence: Synthetic oligonucleotide
  Antisense strand to SEQ ID NO: 2549206
uccugagacauaguuucac

SEQ ID NO: 2549208 - RNA, 19 nt, Artificial Sequence
  Description of Artificial Sequence: Synthetic oligonucleotide
  Sense strand starting at position 21 of SEQ ID NO: 1888674
uuacauguauacccaguaa

SEQ ID NO: 2549209 - RNA, 19 nt, Artificial Sequence
  Description of Artificial Sequence: Synthetic oligonucleotide
  Antisense strand to SEQ ID NO: 2549208
uuacuggguauacauguaa

SEQ ID NO: 2549210 - RNA, 19 nt, Artificial Sequence
  Description of Artificial Sequence: Synthetic oligonucleotide
  Sense strand starting at position 652 of SEQ ID NO: 1888674
cauauagugcuggagcaau

SEQ ID NO: 2549211 - RNA, 19 nt, Artificial Sequence
  Description of Artificial Sequence: Synthetic oligonucleotide
  Antisense strand to SEQ ID NO: 2549210
auugcuccagcacuauaug

SEQ ID NO: 2549212 - RNA, 19 nt, Artificial Sequence
  Description of Artificial Sequence: Synthetic oligonucleotide
  Sense strand starting at position 3876 of SEQ ID NO: 1888674
gaauaugccguauagguga

SEQ ID NO: 2549213 - RNA, 19 nt, Artificial Sequence
  Description of Artificial Sequence: Synthetic oligonucleotide
  Antisense strand to SEQ ID NO: 2549212
ucaccuauacggcauauuc

SEQ ID NO: 2549214 - RNA, 19 nt, Artificial Sequence
  Description of Artificial Sequence: Synthetic oligonucleotide
  Sense strand starting at position 3940 of SEQ ID NO: 1888674
caauaauaggcucguggaa

SEQ ID NO: 2549215 - RNA, 19 nt, Artificial Sequence
  Description of Artificial Sequence: Synthetic oligonucleotide
  Antisense strand to SEQ ID NO: 2549214
uuccacgagccuauuauug

SEQ ID NO: 2549216 - RNA, 19 nt, Artificial Sequence
  Description of Artificial Sequence: Synthetic oligonucleotide
  Sense strand starting at position 3874 of SEQ ID NO: 1888674
cagaauaugccguauaggu

SEQ ID NO: 2549217 - RNA, 19 nt, Artificial Sequence
  Description of Artificial Sequence: Synthetic oligonucleotide
  Antisense strand to SEQ ID NO: 2549216
accuauacggcauauucug

SEQ ID NO: 2549218 - RNA, 19 nt, Artificial Sequence
  Description of Artificial Sequence: Synthetic oligonucleotide
  Sense strand starting at position 46 of SEQ ID NO: 1888674
ugcugaaucucagcagaau

SEQ ID NO: 2549219 - RNA, 19 nt, Artificial Sequence
  Description of Artificial Sequence: Synthetic oligonucleotide
  Antisense strand to SEQ ID NO: 2549218
auucugcugagauucagca

SEQ ID NO: 2549220 - RNA, 19 nt, Artificial Sequence
  Description of Artificial Sequence: Synthetic oligonucleotide
  Sense strand starting at position 651 of SEQ ID NO: 1888674
acauauagugcuggagcaa

SEQ ID NO: 2549221 - RNA, 19 nt, Artificial Sequence
  Description of Artificial Sequence: Synthetic oligonucleotide
  Antisense strand to SEQ ID NO: 2549220
uugcuccagcacuauaugu

SEQ ID NO: 2549222 - RNA, 19 nt, Artificial Sequence
  Description of Artificial Sequence: Synthetic oligonucleotide
  Sense strand starting at position 1418 of SEQ ID NO: 1888674
guuguacucccucaaaguu

SEQ ID NO: 2549223 - RNA, 19 nt, Artificial Sequence
  Description of Artificial Sequence: Synthetic oligonucleotide
  Antisense strand to SEQ ID NO: 2549222
aacuuugagggaguacaac

SEQ ID NO: 2549224 - RNA, 19 nt, Artificial Sequence
  Description of Artificial Sequence: Synthetic oligonucleotide
  Sense strand starting at position 1407 of SEQ ID NO: 1888674
uacagugauuaguuguacu

SEQ ID NO: 2549225 - RNA, 19 nt, Artificial Sequence
  Description of Artificial Sequence: Synthetic oligonucleotide
  Antisense strand to SEQ ID NO: 2549224
aguacaacuaaucacugua

SEQ ID NO: 2549226 - RNA, 19 nt, Artificial Sequence
  Description of Artificial Sequence: Synthetic oligonucleotide
  Sense strand starting at position 1229 of SEQ ID NO: 1888674
acaauugaguaucagaaua

SEQ ID NO: 2549227 - RNA, 19 nt, Artificial Sequence
  Description of Artificial Sequence: Synthetic oligonucleotide
  Antisense strand to SEQ ID NO: 2549226
uauucugauacucaauugu

SEQ ID NO: 2549228 - RNA, 19 nt, Artificial Sequence
  Description of Artificial Sequence: Synthetic oligonucleotide
  Sense strand starting at position 1231 of SEQ ID NO: 1888674
aauugaguaucagaauaug

SEQ ID NO: 2549229 - RNA, 19 nt, Artificial Sequence
  Description of Artificial Sequence: Synthetic oligonucleotide
  Antisense strand to SEQ ID NO: 2549228
cauauucugauacucaauu

SEQ ID NO: 2549230 - RNA, 19 nt, Artificial Sequence
  Description of Artificial Sequence: Synthetic oligonucleotide
  Sense strand starting at position 460 of SEQ ID NO: 1888674
gaagauguauacuaccuga

SEQ ID NO: 2549231 - RNA, 19 nt, Artificial Sequence
  Description of Artificial Sequence: Synthetic oligonucleotide
  Antisense strand to SEQ ID NO: 2549230
ucagguaguauacaucuuc

SEQ ID NO: 2549232 - RNA, 19 nt, Artificial Sequence
  Description of Artificial Sequence: Synthetic oligonucleotide
  Sense strand starting at position 1484 of SEQ ID NO: 1888674
agcucugacuuggagaaga

SEQ ID NO: 2549233 - RNA, 19 nt, Artificial Sequence
  Description of Artificial Sequence: Synthetic oligonucleotide
  Antisense strand to SEQ ID NO: 2549232
ucuucuccaagucagagcu

SEQ ID NO: 2549234 - RNA, 19 nt, Artificial Sequence
  Description of Artificial Sequence: Synthetic oligonucleotide
  Sense strand starting at position 1211 of SEQ ID NO: 1888674
ucuguauacuaggaaucaa

SEQ ID NO: 2549235 - RNA, 19 nt, Artificial Sequence
  Description of Artificial Sequence: Synthetic oligonucleotide
  Antisense strand to SEQ ID NO: 2549234
uugauuccuaguauacaga

SEQ ID NO: 2549236 - RNA, 19 nt, Artificial Sequence
  Description of Artificial Sequence: Synthetic oligonucleotide
  Sense strand starting at position 1457 of SEQ ID NO: 1888674
agacaccguuuagagaauu

SEQ ID NO: 2549237 - RNA, 19 nt, Artificial Sequence
  Description of Artificial Sequence: Synthetic oligonucleotide
  Antisense strand to SEQ ID NO: 2549236
aauucucuaaacggugucu

SEQ ID NO: 2549238 - RNA, 19 nt, Artificial Sequence
  Description of Artificial Sequence: Synthetic oligonucleotide
  Sense strand starting at position 519 of SEQ ID NO: 1888674
ugguacuggugucaagaua

SEQ ID NO: 2549239 - RNA, 19 nt, Artificial Sequence
  Description of Artificial Sequence: Synthetic oligonucleotide
  Antisense strand to SEQ ID NO: 2549238
uaucuugacaccaguacca

SEQ ID NO: 2549240 - RNA, 19 nt, Artificial Sequence
  Description of Artificial Sequence: Synthetic oligonucleotide
  Sense strand starting at position 2088 of SEQ ID NO: 1888674
gagauuauauccugcaugu

SEQ ID NO: 2549241 - RNA, 19 nt, Artificial Sequence
  Description of Artificial Sequence: Synthetic oligonucleotide
  Antisense strand to SEQ ID NO: 2549240
acaugcaggauauaaucuc

SEQ ID NO: 2549242 - RNA, 19 nt, Artificial Sequence
  Description of Artificial Sequence: Synthetic oligonucleotide
  Sense strand starting at position 3853 of SEQ ID NO: 1888674
aaacguuguuagugaacaa

SEQ ID NO: 2549243 - RNA, 19 nt, Artificial Sequence
  Description of Artificial Sequence: Synthetic oligonucleotide
  Antisense strand to SEQ ID NO: 2549242
uuguucacuaacaacguuu

SEQ ID NO: 2549244 - RNA, 19 nt, Artificial Sequence
  Description of Artificial Sequence: Synthetic oligonucleotide
  Sense strand starting at position 3942 of SEQ ID NO: 1888674
auaauaggcucguggaacu

SEQ ID NO: 2549245 - RNA, 19 nt, Artificial Sequence
  Description of Artificial Sequence: Synthetic oligonucleotide
  Antisense strand to SEQ ID NO: 2549244
aguuccacgagccuauuau

SEQ ID NO: 2549246 - RNA, 19 nt, Artificial Sequence
  Description of Artificial Sequence: Synthetic oligonucleotide
  Sense strand starting at position 505 of SEQ ID NO: 1888674
gcaguaagaugguguggua

SEQ ID NO: 2549247 - RNA, 19 nt, Artificial Sequence
  Description of Artificial Sequence: Synthetic oligonucleotide
  Antisense strand to SEQ ID NO: 2549246
uaccacaccaucuuacugc

SEQ ID NO: 2549248 - RNA, 19 nt, Artificial Sequence
  Description of Artificial Sequence: Synthetic oligonucleotide
  Sense strand starting at position 516 of SEQ ID NO: 1888674
gugugguacuggugucaag

SEQ ID NO: 2549249 - RNA, 19 nt, Artificial Sequence
  Description of Artificial Sequence: Synthetic oligonucleotide
  Antisense strand to SEQ ID NO: 2549248
cuugacaccaguaccacac

SEQ ID NO: 2549250 - RNA, 19 nt, Artificial Sequence
  Description of Artificial Sequence: Synthetic oligonucleotide
  Sense strand starting at position 3939 of SEQ ID NO: 1888675
cuggguagaacugacgauu

SEQ ID NO: 2549251 - RNA, 19 nt, Artificial Sequence
  Description of Artificial Sequence: Synthetic oligonucleotide
  Antisense strand to SEQ ID NO: 2549250
aaucgucaguucuacccag

SEQ ID NO: 2549252 - RNA, 19 nt, Artificial Sequence
  Description of Artificial Sequence: Synthetic oligonucleotide
  Sense strand starting at position 1061 of SEQ ID NO: 1888675
uucguuacagccucgugaa

SEQ ID NO: 2549253 - RNA, 19 nt, Artificial Sequence
  Description of Artificial Sequence: Synthetic oligonucleotide
  Antisense strand to SEQ ID NO: 2549252
uucacgaggcuguaacgaa

SEQ ID NO: 2549254 - RNA, 19 nt, Artificial Sequence
  Description of Artificial Sequence: Synthetic oligonucleotide
  Sense strand starting at position 3039 of SEQ ID NO: 1888675
uuacauucucaggaauguu

SEQ ID NO: 2549255 - RNA, 19 nt, Artificial Sequence
  Description of Artificial Sequence: Synthetic oligonucleotide
  Antisense strand to SEQ ID NO: 2549254
aacauuccugagaauguaa

SEQ ID NO: 2549256 - RNA, 19 nt, Artificial Sequence
  Description of Artificial Sequence: Synthetic oligonucleotide
  Sense strand starting at position 2747 of SEQ ID NO: 1888675
auugucucccuggauaaac

SEQ ID NO: 2549257 - RNA, 19 nt, Artificial Sequence
  Description of Artificial Sequence: Synthetic oligonucleotide
  Antisense strand to SEQ ID NO: 2549256
guuuauccagggagacaau

SEQ ID NO: 2549258 - RNA, 19 nt, Artificial Sequence
  Description of Artificial Sequence: Synthetic oligonucleotide
  Sense strand starting at position 3958 of SEQ ID NO: 1888675
gacuauaaucauugugaag

SEQ ID NO: 2549259 - RNA, 19 nt, Artificial Sequence
  Description of Artificial Sequence: Synthetic oligonucleotide
  Antisense strand to SEQ ID NO: 2549258
cuucacaaugauuauaguc

SEQ ID NO: 2549260 - RNA, 19 nt, Artificial Sequence
  Description of Artificial Sequence: Synthetic oligonucleotide
  Sense strand starting at position 3945 of SEQ ID NO: 1888675
agaacugacgauugacuau

SEQ ID NO: 2549261 - RNA, 19 nt, Artificial Sequence
  Description of Artificial Sequence: Synthetic oligonucleotide
  Antisense strand to SEQ ID NO: 2549260
auagucaaucgucaguucu

SEQ ID NO: 2549262 - RNA, 19 nt, Artificial Sequence
  Description of Artificial Sequence: Synthetic oligonucleotide
  Sense strand starting at position 3338 of SEQ ID NO: 1888675
gggacuuaucucugacaac

SEQ ID NO: 2549263 - RNA, 19 nt, Artificial Sequence
  Description of Artificial Sequence: Synthetic oligonucleotide
  Antisense strand to SEQ ID NO: 2549262
guugucagagauaaguccc

SEQ ID NO: 2549264 - RNA, 19 nt, Artificial Sequence
  Description of Artificial Sequence: Synthetic oligonucleotide
  Sense strand starting at position 3957 of SEQ ID NO: 1888675
ugacuauaaucauugugaa

SEQ ID NO: 2549265 - RNA, 19 nt, Artificial Sequence
  Description of Artificial Sequence: Synthetic oligonucleotide
  Antisense strand to SEQ ID NO: 2549264
uucacaaugauuauaguca

SEQ ID NO: 2549266 - RNA, 19 nt, Artificial Sequence
  Description of Artificial Sequence: Synthetic oligonucleotide
  Sense strand starting at position 3948 of SEQ ID NO: 1888675
acugacgauugacuauaau

SEQ ID NO: 2549267 - RNA, 19 nt, Artificial Sequence
  Description of Artificial Sequence: Synthetic oligonucleotide
  Antisense strand to SEQ ID NO: 2549266
auuauagucaaucgucagu

SEQ ID NO: 2549268 - RNA, 19 nt, Artificial Sequence
  Description of Artificial Sequence: Synthetic oligonucleotide
  Sense strand starting at position 791 of SEQ ID NO: 1888675
cccagcuuucuggauggaa

SEQ ID NO: 2549269 - RNA, 19 nt, Artificial Sequence
  Description of Artificial Sequence: Synthetic oligonucleotide
  Antisense strand to SEQ ID NO: 2549268
uuccauccagaaagcuggg

SEQ ID NO: 2549270 - RNA, 19 nt, Artificial Sequence
  Description of Artificial Sequence: Synthetic oligonucleotide
  Sense strand starting at position 295 of SEQ ID NO: 1888675
ccaaguucugccuaagaaa

SEQ ID NO: 2549271 - RNA, 19 nt, Artificial Sequence
  Description of Artificial Sequence: Synthetic oligonucleotide
  Antisense strand to SEQ ID NO: 2549270
uuucuuaggcagaacuugg

SEQ ID NO: 2549272 - RNA, 19 nt, Artificial Sequence
  Description of Artificial Sequence: Synthetic oligonucleotide
  Sense strand starting at position 670 of SEQ ID NO: 1888675
cuaagauaggugcauaucu

SEQ ID NO: 2549273 - RNA, 19 nt, Artificial Sequence
  Description of Artificial Sequence: Synthetic oligonucleotide
  Antisense strand to SEQ ID NO: 2549272
agauaugcaccuaucuuag

SEQ ID NO: 2549274 - RNA, 19 nt, Artificial Sequence
  Description of Artificial Sequence: Synthetic oligonucleotide
  Sense strand starting at position 150 of SEQ ID NO: 1888675
agaggucauccguaaacac

SEQ ID NO: 2549275 - RNA, 19 nt, Artificial Sequence
  Description of Artificial Sequence: Synthetic oligonucleotide
  Antisense strand to SEQ ID NO: 2549274
guguuuacggaugaccucu

SEQ ID NO: 2549276 - RNA, 19 nt, Artificial Sequence
  Description of Artificial Sequence: Synthetic oligonucleotide
  Sense strand starting at position 1216 of SEQ ID NO: 1888675
ugcucacugagauagguua

SEQ ID NO: 2549277 - RNA, 19 nt, Artificial Sequence
  Description of Artificial Sequence: Synthetic oligonucleotide
  Antisense strand to SEQ ID NO: 2549276
uaaccuaucucagugagca

SEQ ID NO: 2549278 - RNA, 19 nt, Artificial Sequence
  Description of Artificial Sequence: Synthetic oligonucleotide
  Sense strand starting at position 3503 of SEQ ID NO: 1888675
agaucaucugccugggaga

SEQ ID NO: 2549279 - RNA, 19 nt, Artificial Sequence
  Description of Artificial Sequence: Synthetic oligonucleotide
  Antisense strand to SEQ ID NO: 2549278
ucucccaggcagaugaucu

SEQ ID NO: 2549280 - RNA, 19 nt, Artificial Sequence
  Description of Artificial Sequence: Synthetic oligonucleotide
  Sense strand starting at position 3901 of SEQ ID NO: 1888675
agaugcuuucuuggaggga

SEQ ID NO: 2549281 - RNA, 19 nt, Artificial Sequence
  Description of Artificial Sequence: Synthetic oligonucleotide
  Antisense strand to SEQ ID NO: 2549280
ucccuccaagaaagcaucu

SEQ ID NO: 2549282 - RNA, 19 nt, Artificial Sequence
  Description of Artificial Sequence: Synthetic oligonucleotide
  Sense strand starting at position 3311 of SEQ ID NO: 1888675
ggagguacagcuggagauu

SEQ ID NO: 2549283 - RNA, 19 nt, Artificial Sequence
  Description of Artificial Sequence: Synthetic oligonucleotide
  Antisense strand to SEQ ID NO: 2549282
aaucuccagcuguaccucc

SEQ ID NO: 2549284 - RNA, 19 nt, Artificial Sequence
  Description of Artificial Sequence: Synthetic oligonucleotide
  Sense strand starting at position 2742 of SEQ ID NO: 1888675
caggaauugucucccugga

SEQ ID NO: 2549285 - RNA, 19 nt, Artificial Sequence
  Description of Artificial Sequence: Synthetic oligonucleotide
  Antisense strand to SEQ ID NO: 2549284
uccagggagacaauuccug

SEQ ID NO: 2549286 - RNA, 19 nt, Artificial Sequence
  Description of Artificial Sequence: Synthetic oligonucleotide
  Sense strand starting at position 2744 of SEQ ID NO: 1888675
ggaauugucucccuggaua

SEQ ID NO: 2549287 - RNA, 19 nt, Artificial Sequence
  Description of Artificial Sequence: Synthetic oligonucleotide
  Antisense strand to SEQ ID NO: 2549286
uauccagggagacaauucc

SEQ ID NO: 2549288 - RNA, 19 nt, Artificial Sequence
  Description of Artificial Sequence: Synthetic oligonucleotide
  Sense strand starting at position 3532 of SEQ ID NO: 1888675
ggcaaauccaaguauguug

SEQ ID NO: 2549289 - RNA, 19 nt, Artificial Sequence
  Description of Artificial Sequence: Synthetic oligonucleotide
  Antisense strand to SEQ ID NO: 2549288
caacauacuuggauuugcc

SEQ ID NO: 2549290 - RNA, 19 nt, Artificial Sequence
  Description of Artificial Sequence: Synthetic oligonucleotide
  Sense strand starting at position 667 of SEQ ID NO: 1888675
ucacuaagauaggugcaua

SEQ ID NO: 2549291 - RNA, 19 nt, Artificial Sequence
  Description of Artificial Sequence: Synthetic oligonucleotide
  Antisense strand to SEQ ID NO: 2549290
uaugcaccuaucuuaguga

SEQ ID NO: 2549292 - RNA, 19 nt, Artificial Sequence
  Description of Artificial Sequence: Synthetic oligonucleotide
  Sense strand starting at position 2958 of SEQ ID NO: 1888675
cccaguaaggcucaccuau

SEQ ID NO: 2549293 - RNA, 19 nt, Artificial Sequence
  Description of Artificial Sequence: Synthetic oligonucleotide
  Antisense strand to SEQ ID NO: 2549292
auaggugagccuuacuggg

SEQ ID NO: 2549294 - RNA, 19 nt, Artificial Sequence
  Description of Artificial Sequence: Synthetic oligonucleotide
  Sense strand starting at position 3035 of SEQ ID NO: 1888675
gugguuacauucucaggaa

SEQ ID NO: 2549295 - RNA, 19 nt, Artificial Sequence
  Description of Artificial Sequence: Synthetic oligonucleotide
  Antisense strand to SEQ ID NO: 2549294
uuccugagaauguaaccac

SEQ ID NO: 2549296 - RNA, 19 nt, Artificial Sequence
  Description of Artificial Sequence: Synthetic oligonucleotide
  Sense strand starting at position 2733 of SEQ ID NO: 1888675
gccacuucccaggaauugu

SEQ ID NO: 2549297 - RNA, 19 nt, Artificial Sequence
  Description of Artificial Sequence: Synthetic oligonucleotide
  Antisense strand to SEQ ID NO: 2549296
acaauuccugggaaguggc

SEQ ID NO: 2549298 - RNA, 19 nt, Artificial Sequence
  Description of Artificial Sequence: Synthetic oligonucleotide
  Sense strand starting at position 3067 of SEQ ID NO: 1888675
auauuuaggugugaggaga

SEQ ID NO: 2549299 - RNA, 19 nt, Artificial Sequence
  Description of Artificial Sequence: Synthetic oligonucleotide
  Antisense strand to SEQ ID NO: 2549298
ucuccucacaccuaaauau

SEQ ID NO: 2549300 - RNA, 19 nt, Artificial Sequence
  Description of Artificial Sequence: Synthetic oligonucleotide
  Sense strand starting at position 3760 of SEQ ID NO: 1888675
uccucugagcccugagaga

SEQ ID NO: 2549301 - RNA, 19 nt, Artificial Sequence
  Description of Artificial Sequence: Synthetic oligonucleotide
  Antisense strand to SEQ ID NO: 2549300
ucucucagggcucagagga

SEQ ID NO: 2549302 - RNA, 19 nt, Artificial Sequence
  Description of Artificial Sequence: Synthetic oligonucleotide
  Sense strand starting at position 3874 of SEQ ID NO: 1888675
ccgugacagauuggguaaa

SEQ ID NO: 2549303 - RNA, 19 nt, Artificial Sequence
  Description of Artificial Sequence: Synthetic oligonucleotide
  Antisense strand to SEQ ID NO: 2549302
uuuacccaaucugucacgg

SEQ ID NO: 2549304 - RNA, 19 nt, Artificial Sequence
  Description of Artificial Sequence: Synthetic oligonucleotide
  Sense strand starting at position 337 of SEQ ID NO: 1888675
ccuaauaucccagguggua

SEQ ID NO: 2549305 - RNA, 19 nt, Artificial Sequence
  Description of Artificial Sequence: Synthetic oligonucleotide
  Antisense strand to SEQ ID NO: 2549304
uaccaccugggauauuagg

SEQ ID NO: 2549306 - RNA, 19 nt, Artificial Sequence
  Description of Artificial Sequence: Synthetic oligonucleotide
  Sense strand starting at position 2889 of SEQ ID NO: 1888675
acaguagacucugcuauca

SEQ ID NO: 2549307 - RNA, 19 nt, Artificial Sequence
  Description of Artificial Sequence: Synthetic oligonucleotide
  Antisense strand to SEQ ID NO: 2549306
ugauagcagagucuacugu

SEQ ID NO: 2549308 - RNA, 19 nt, Artificial Sequence
  Description of Artificial Sequence: Synthetic oligonucleotide
  Sense strand starting at position 361 of SEQ ID NO: 1888675
agagcauuaucugcuagac

SEQ ID NO: 2549309 - RNA, 19 nt, Artificial Sequence
  Description of Artificial Sequence: Synthetic oligonucleotide
  Antisense strand to SEQ ID NO: 2549308
gucuagcagauaaugcucu

SEQ ID NO: 2549310 - RNA, 19 nt, Artificial Sequence
  Description of Artificial Sequence: Synthetic oligonucleotide
  Sense strand starting at position 3361 of SEQ ID NO: 1888675
ucuuguugaucuucccaga

SEQ ID NO: 2549311 - RNA, 19 nt, Artificial Sequence
  Description of Artificial Sequence: Synthetic oligonucleotide
  Antisense strand to SEQ ID NO: 2549310
ucugggaagaucaacaaga

SEQ ID NO: 2549312 - RNA, 19 nt, Artificial Sequence
  Description of Artificial Sequence: Synthetic oligonucleotide
  Sense strand starting at position 3047 of SEQ ID NO: 1888675
ucaggaauguuugcaaagu

SEQ ID NO: 2549313 - RNA, 19 nt, Artificial Sequence
  Description of Artificial Sequence: Synthetic oligonucleotide
  Antisense strand to SEQ ID NO: 2549312
acuuugcaaacauuccuga

SEQ ID NO: 2549314 - RNA, 19 nt, Artificial Sequence
  Description of Artificial Sequence: Synthetic oligonucleotide
  Sense strand starting at position 3794 of SEQ ID NO: 1888675
gaggacauuguaugugguu

SEQ ID NO: 2549315 - RNA, 19 nt, Artificial Sequence
  Description of Artificial Sequence: Synthetic oligonucleotide
  Antisense strand to SEQ ID NO: 2549314
aaccacauacaauguccuc

SEQ ID NO: 2549316 - RNA, 19 nt, Artificial Sequence
  Description of Artificial Sequence: Synthetic oligonucleotide
  Sense strand starting at position 1253 of SEQ ID NO: 1888675
ugcggaggcuauucagaaa

SEQ ID NO: 2549317 - RNA, 19 nt, Artificial Sequence
  Description of Artificial Sequence: Synthetic oligonucleotide
  Antisense strand to SEQ ID NO: 2549316
uuucugaauagccuccgca

SEQ ID NO: 2549318 - RNA, 19 nt, Artificial Sequence
  Description of Artificial Sequence: Synthetic oligonucleotide
  Sense strand starting at position 358 of SEQ ID NO: 1888675
cuaagagcauuaucugcua

SEQ ID NO: 2549319 - RNA, 19 nt, Artificial Sequence
  Description of Artificial Sequence: Synthetic oligonucleotide
  Antisense strand to SEQ ID NO: 2549318
uagcagauaaugcucuuag

SEQ ID NO: 2549320 - RNA, 19 nt, Artificial Sequence
  Description of Artificial Sequence: Synthetic oligonucleotide
  Sense strand starting at position 3027 of SEQ ID NO: 1888675
ucuggacugugguuacauu

SEQ ID NO: 2549321 - RNA, 19 nt, Artificial Sequence
  Description of Artificial Sequence: Synthetic oligonucleotide
  Antisense strand to SEQ ID NO: 2549320
aauguaaccacaguccaga

SEQ ID NO: 2549322 - RNA, 19 nt, Artificial Sequence
  Description of Artificial Sequence: Synthetic oligonucleotide
  Sense strand starting at position 919 of SEQ ID NO: 1888675
gggugcaccucuuucuaaa

SEQ ID NO: 2549323 - RNA, 19 nt, Artificial Sequence
  Description of Artificial Sequence: Synthetic oligonucleotide
  Antisense strand to SEQ ID NO: 2549322
uuuagaaagaggugcaccc

SEQ ID NO: 2549324 - RNA, 19 nt, Artificial Sequence
  Description of Artificial Sequence: Synthetic oligonucleotide
  Sense strand starting at position 3184 of SEQ ID NO: 1888675
gugcgcaggacuuaacuau

SEQ ID NO: 2549325 - RNA, 19 nt, Artificial Sequence
  Description of Artificial Sequence: Synthetic oligonucleotide
  Antisense strand to SEQ ID NO: 2549324
auaguuaaguccugcgcac

SEQ ID NO: 2549326 - RNA, 19 nt, Artificial Sequence
  Description of Artificial Sequence: Synthetic oligonucleotide
  Sense strand starting at position 2938 of SEQ ID NO: 1888675
aggucugcucauggugaau

SEQ ID NO: 2549327 - RNA, 19 nt, Artificial Sequence
  Description of Artificial Sequence: Synthetic oligonucleotide
  Antisense strand to SEQ ID NO: 2549326
auucaccaugagcagaccu

SEQ ID NO: 2549328 - RNA, 19 nt, Artificial Sequence
  Description of Artificial Sequence: Synthetic oligonucleotide
  Sense strand starting at position 3914 of SEQ ID NO: 1888675
gagggacucucugaaauag

SEQ ID NO: 2549329 - RNA, 19 nt, Artificial Sequence
  Description of Artificial Sequence: Synthetic oligonucleotide
  Antisense strand to SEQ ID NO: 2549328
cuauuucagagagucccuc

SEQ ID NO: 2549330 - RNA, 19 nt, Artificial Sequence
  Description of Artificial Sequence: Synthetic oligonucleotide
  Sense strand starting at position 3372 of SEQ ID NO: 1888676
uugaaaucccugcaagauu

SEQ ID NO: 2549331 - RNA, 19 nt, Artificial Sequence
  Description of Artificial Sequence: Synthetic oligonucleotide
  Antisense strand to SEQ ID NO: 2549330
aaucuugcagggauuucaa

SEQ ID NO: 2549332 - RNA, 19 nt, Artificial Sequence
  Description of Artificial Sequence: Synthetic oligonucleotide
  Sense strand starting at position 1124 of SEQ ID NO: 1888676
aucaaucgugaaggaaaca

SEQ ID NO: 2549333 - RNA, 19 nt, Artificial Sequence
  Description of Artificial Sequence: Synthetic oligonucleotide
  Antisense strand to SEQ ID NO: 2549332
uguuuccuucacgauugau

SEQ ID NO: 2549334 - RNA, 19 nt, Artificial Sequence
  Description of Artificial Sequence: Synthetic oligonucleotide
  Sense strand starting at position 3316 of SEQ ID NO: 1888676
guaucauagcaagaaucug

SEQ ID NO: 2549335 - RNA, 19 nt, Artificial Sequence
  Description of Artificial Sequence: Synthetic oligonucleotide
  Antisense strand to SEQ ID NO: 2549334
cagauucuugcuaugauac

SEQ ID NO: 2549336 - RNA, 19 nt, Artificial Sequence
  Description of Artificial Sequence: Synthetic oligonucleotide
  Sense strand starting at position 2421 of SEQ ID NO: 1888676
ggcaaucagauaugagacu

SEQ ID NO: 2549337 - RNA, 19 nt, Artificial Sequence
  Description of Artificial Sequence: Synthetic oligonucleotide
  Antisense strand to SEQ ID NO: 2549336
agucucauaucugauugcc

SEQ ID NO: 2549338 - RNA, 19 nt, Artificial Sequence
  Description of Artificial Sequence: Synthetic oligonucleotide
  Sense strand starting at position 1121 of SEQ ID NO: 1888676
uguaucaaucgugaaggaa

SEQ ID NO: 2549339 - RNA, 19 nt, Artificial Sequence
  Description of Artificial Sequence: Synthetic oligonucleotide
  Antisense strand to SEQ ID NO: 2549338
uuccuucacgauugauaca

SEQ ID NO: 2549340 - RNA, 19 nt, Artificial Sequence
  Description of Artificial Sequence: Synthetic oligonucleotide
  Sense strand starting at position 3926 of SEQ ID NO: 1888676
guaccagauggucaccuau

SEQ ID NO: 2549341 - RNA, 19 nt, Artificial Sequence
  Description of Artificial Sequence: Synthetic oligonucleotide
  Antisense strand to SEQ ID NO: 2549340
auaggugaccaucugguac

SEQ ID NO: 2549342 - RNA, 19 nt, Artificial Sequence
  Description of Artificial Sequence: Synthetic oligonucleotide
  Sense strand starting at position 283 of SEQ ID NO: 1888676
ugccgugugcucucacaua

SEQ ID NO: 2549343 - RNA, 19 nt, Artificial Sequence
  Description of Artificial Sequence: Synthetic oligonucleotide
  Antisense strand to SEQ ID NO: 2549342
uaugugagagcacacggca

SEQ ID NO: 2549344 - RNA, 19 nt, Artificial Sequence
  Description of Artificial Sequence: Synthetic oligonucleotide
  Sense strand starting at position 3126 of SEQ ID NO: 1888676
gucacaucuggucaaagua

SEQ ID NO: 2549345 - RNA, 19 nt, Artificial Sequence
  Description of Artificial Sequence: Synthetic oligonucleotide
  Antisense strand to SEQ ID NO: 2549344
uacuuugaccagaugugac

SEQ ID NO: 2549346 - RNA, 19 nt, Artificial Sequence
  Description of Artificial Sequence: Synthetic oligonucleotide
  Sense strand starting at position 2 of SEQ ID NO: 1888676
caugccuggcaggauuaua

SEQ ID NO: 2549347 - RNA, 19 nt, Artificial Sequence
  Description of Artificial Sequence: Synthetic oligonucleotide
  Antisense strand to SEQ ID NO: 2549346
uauaauccugccaggcaug

SEQ ID NO: 2549348 - RNA, 19 nt, Artificial Sequence
  Description of Artificial Sequence: Synthetic oligonucleotide
  Sense strand starting at position 3870 of SEQ ID NO: 1888676
ccggucucccaagaugacu

SEQ ID NO: 2549349 - RNA, 19 nt, Artificial Sequence
  Description of Artificial Sequence: Synthetic oligonucleotide
  Antisense strand to SEQ ID NO: 2549348
agucaucuugggagaccgg

SEQ ID NO: 2549350 - RNA, 19 nt, Artificial Sequence
  Description of Artificial Sequence: Synthetic oligonucleotide
  Sense strand starting at position 3058 of SEQ ID NO: 1888676
gagaauguuccaggcacag

SEQ ID NO: 2549351 - RNA, 19 nt, Artificial Sequence
  Description of Artificial Sequence: Synthetic oligonucleotide
  Antisense strand to SEQ ID NO: 2549350
cugugccuggaacauucuc

SEQ ID NO: 2549352 - RNA, 19 nt, Artificial Sequence
  Description of Artificial Sequence: Synthetic oligonucleotide
  Sense strand starting at position 2407 of SEQ ID NO: 1888676
ggagaugucaggugggcaa

SEQ ID NO: 2549353 - RNA, 19 nt, Artificial Sequence
  Description of Artificial Sequence: Synthetic oligonucleotide
  Antisense strand to SEQ ID NO: 2549352
uugcccaccugacaucucc

SEQ ID NO: 2549354 - RNA, 19 nt, Artificial Sequence
  Description of Artificial Sequence: Synthetic oligonucleotide
  Sense strand starting at position 3876 of SEQ ID NO: 1888676
ucccaagaugacugcuuau

SEQ ID NO: 2549355 - RNA, 19 nt, Artificial Sequence
  Description of Artificial Sequence: Synthetic oligonucleotide
  Antisense strand to SEQ ID NO: 2549354
auaagcagucaucuuggga

SEQ ID NO: 2549356 - RNA, 19 nt, Artificial Sequence
  Description of Artificial Sequence: Synthetic oligonucleotide
  Sense strand starting at position 3370 of SEQ ID NO: 1888676
uguugaaaucccugcaaga

SEQ ID NO: 2549357 - RNA, 19 nt, Artificial Sequence
  Description of Artificial Sequence: Synthetic oligonucleotide
  Antisense strand to SEQ ID NO: 2549356
ucuugcagggauuucaaca

SEQ ID NO: 2549358 - RNA, 19 nt, Artificial Sequence
  Description of Artificial Sequence: Synthetic oligonucleotide
  Sense strand starting at position 2563 of SEQ ID NO: 1888676
uccugaguagcugagcuaa

SEQ ID NO: 2549359 - RNA, 19 nt, Artificial Sequence
  Description of Artificial Sequence: Synthetic oligonucleotide
  Antisense strand to SEQ ID NO: 2549358
uuagcucagcuacucagga

SEQ ID NO: 2549360 - RNA, 19 nt, Artificial Sequence
  Description of Artificial Sequence: Synthetic oligonucleotide
  Sense strand starting at position 3125 of SEQ ID NO: 1888676
agucacaucuggucaaagu

SEQ ID NO: 2549361 - RNA, 19 nt, Artificial Sequence
  Description of Artificial Sequence: Synthetic oligonucleotide
  Antisense strand to SEQ ID NO: 2549360
acuuugaccagaugugacu

SEQ ID NO: 2549362 - RNA, 19 nt, Artificial Sequence
  Description of Artificial Sequence: Synthetic oligonucleotide
  Sense strand starting at position 1118 of SEQ ID NO: 1888676
acuuguaucaaucgugaag

SEQ ID NO: 2549363 - RNA, 19 nt, Artificial Sequence
  Description of Artificial Sequence: Synthetic oligonucleotide
  Antisense strand to SEQ ID NO: 2549362
cuucacgauugauacaagu

SEQ ID NO: 2549364 - RNA, 19 nt, Artificial Sequence
  Description of Artificial Sequence: Synthetic oligonucleotide
  Sense strand starting at position 1624 of SEQ ID NO: 1888676
agcagguguggacggaaau

SEQ ID NO: 2549365 - RNA, 19 nt, Artificial Sequence
  Description of Artificial Sequence: Synthetic oligonucleotide
  Antisense strand to SEQ ID NO: 2549364
auuuccguccacaccugcu

SEQ ID NO: 2549366 - RNA, 19 nt, Artificial Sequence
  Description of Artificial Sequence: Synthetic oligonucleotide
  Sense strand starting at position 2565 of SEQ ID NO: 1888676
cugaguagcugagcuaauu

SEQ ID NO: 2549367 - RNA, 19 nt, Artificial Sequence
  Description of Artificial Sequence: Synthetic oligonucleotide
  Antisense strand to SEQ ID NO: 2549366
aauuagcucagcuacucag

SEQ ID NO: 2549368 - RNA, 19 nt, Artificial Sequence
  Description of Artificial Sequence: Synthetic oligonucleotide
  Sense strand starting at position 2352 of SEQ ID NO: 1888676
ucgaguagaucaguucucu

SEQ ID NO: 2549369 - RNA, 19 nt, Artificial Sequence
  Description of Artificial Sequence: Synthetic oligonucleotide
  Antisense strand to SEQ ID NO: 2549368
agagaacugaucuacucga

SEQ ID NO: 2549370 - RNA, 19 nt, Artificial Sequence
  Description of Artificial Sequence: Synthetic oligonucleotide
  Sense strand starting at position 97 of SEQ ID NO: 1888676
ucccauuagcuauguccau

SEQ ID NO: 2549371 - RNA, 19 nt, Artificial Sequence
  Description of Artificial Sequence: Synthetic oligonucleotide
  Antisense strand to SEQ ID NO: 2549370
auggacauagcuaauggga

SEQ ID NO: 2549372 - RNA, 19 nt, Artificial Sequence
  Description of Artificial Sequence: Synthetic oligonucleotide
  Sense strand starting at position 1025 of SEQ ID NO: 1888676
cacaguaccgguuggcaua

SEQ ID NO: 2549373 - RNA, 19 nt, Artificial Sequence
  Description of Artificial Sequence: Synthetic oligonucleotide
  Antisense strand to SEQ ID NO: 2549372
uaugccaaccgguacugug

SEQ ID NO: 2549374 - RNA, 19 nt, Artificial Sequence
  Description of Artificial Sequence: Synthetic oligonucleotide
  Sense strand starting at position 3313 of SEQ ID NO: 1888676
uggguaucauagcaagaau

SEQ ID NO: 2549375 - RNA, 19 nt, Artificial Sequence
  Description of Artificial Sequence: Synthetic oligonucleotide
  Antisense strand to SEQ ID NO: 2549374
auucuugcuaugauaccca

SEQ ID NO: 2549376 - RNA, 19 nt, Artificial Sequence
  Description of Artificial Sequence: Synthetic oligonucleotide
  Sense strand starting at position 3134 of SEQ ID NO: 1888676
uggucaaaguaguaacaga

SEQ ID NO: 2549377 - RNA, 19 nt, Artificial Sequence
  Description of Artificial Sequence: Synthetic oligonucleotide
  Antisense strand to SEQ ID NO: 2549376
ucuguuacuacuuugacca

SEQ ID NO: 2549378 - RNA, 19 nt, Artificial Sequence
  Description of Artificial Sequence: Synthetic oligonucleotide
  Sense strand starting at position 3044 of SEQ ID NO: 1888676
ugucaaggcucccagagaa

SEQ ID NO: 2549379 - RNA, 19 nt, Artificial Sequence
  Description of Artificial Sequence: Synthetic oligonucleotide
  Antisense strand to SEQ ID NO: 2549378
uucucugggagccuugaca

SEQ ID NO: 2549380 - RNA, 19 nt, Artificial Sequence
  Description of Artificial Sequence: Synthetic oligonucleotide
  Sense strand starting at position 2135 of SEQ ID NO: 1888676
ggcaaaucagcgcgccaaa

SEQ ID NO: 2549381 - RNA, 19 nt, Artificial Sequence
  Description of Artificial Sequence: Synthetic oligonucleotide
  Antisense strand to SEQ ID NO: 2549380
uuuggcgcgcugauuugcc

SEQ ID NO: 2549382 - RNA, 19 nt, Artificial Sequence
  Description of Artificial Sequence: Synthetic oligonucleotide
  Sense strand starting at position 927 of SEQ ID NO: 1888676
gggcuauauugaugagauu

SEQ ID NO: 2549383 - RNA, 19 nt, Artificial Sequence
  Description of Artificial Sequence: Synthetic oligonucleotide
  Antisense strand to SEQ ID NO: 2549382
aaucucaucaauauagccc

SEQ ID NO: 2549384 - RNA, 19 nt, Artificial Sequence
  Description of Artificial Sequence: Synthetic oligonucleotide
  Sense strand starting at position 3123 of SEQ ID NO: 1888676
agagucacaucuggucaaa

SEQ ID NO: 2549385 - RNA, 19 nt, Artificial Sequence
  Description of Artificial Sequence: Synthetic oligonucleotide
  Antisense strand to SEQ ID NO: 2549384
uuugaccagaugugacucu

SEQ ID NO: 2549386 - RNA, 19 nt, Artificial Sequence
  Description of Artificial Sequence: Synthetic oligonucleotide
  Sense strand starting at position 2158 of SEQ ID NO: 1888676
gagugaaugucagagucga

SEQ ID NO: 2549387 - RNA, 19 nt, Artificial Sequence
  Description of Artificial Sequence: Synthetic oligonucleotide
  Antisense strand to SEQ ID NO: 2549386
ucgacucugacauucacuc

SEQ ID NO: 2549388 - RNA, 19 nt, Artificial Sequence
  Description of Artificial Sequence: Synthetic oligonucleotide
  Sense strand starting at position 1120 of SEQ ID NO: 1888676
uuguaucaaucgugaagga

SEQ ID NO: 2549389 - RNA, 19 nt, Artificial Sequence
  Description of Artificial Sequence: Synthetic oligonucleotide
  Antisense strand to SEQ ID NO: 2549388
uccuucacgauugauacaa

SEQ ID NO: 2549390 - RNA, 19 nt, Artificial Sequence
  Description of Artificial Sequence: Synthetic oligonucleotide
  Sense strand starting at position 1114 of SEQ ID NO: 1888676
gcaaacuuguaucaaucgu

SEQ ID NO: 2549391 - RNA, 19 nt, Artificial Sequence
  Description of Artificial Sequence: Synthetic oligonucleotide
  Antisense strand to SEQ ID NO: 2549390
acgauugauacaaguuugc

SEQ ID NO: 2549392 - RNA, 19 nt, Artificial Sequence
  Description of Artificial Sequence: Synthetic oligonucleotide
  Sense strand starting at position 693 of SEQ ID NO: 1888676
gugaccucuucuuguacca

SEQ ID NO: 2549393 - RNA, 19 nt, Artificial Sequence
  Description of Artificial Sequence: Synthetic oligonucleotide
  Antisense strand to SEQ ID NO: 2549392
ugguacaagaagaggucac

SEQ ID NO: 2549394 - RNA, 19 nt, Artificial Sequence
  Description of Artificial Sequence: Synthetic oligonucleotide
  Sense strand starting at position 3613 of SEQ ID NO: 1888677
gacagugaaugauucuaua

SEQ ID NO: 2549395 - RNA, 19 nt, Artificial Sequence
  Description of Artificial Sequence: Synthetic oligonucleotide
  Antisense strand to SEQ ID NO: 2549394
uauagaaucauucacuguc

SEQ ID NO: 2549396 - RNA, 19 nt, Artificial Sequence
  Description of Artificial Sequence: Synthetic oligonucleotide
  Sense strand starting at position 2526 of SEQ ID NO: 1888677
cuuuacauggcugaauaau

SEQ ID NO: 2549397 - RNA, 19 nt, Artificial Sequence
  Description of Artificial Sequence: Synthetic oligonucleotide
  Antisense strand to SEQ ID NO: 2549396
auuauucagccauguaaag

SEQ ID NO: 2549398 - RNA, 19 nt, Artificial Sequence
  Description of Artificial Sequence: Synthetic oligonucleotide
  Sense strand starting at position 2016 of SEQ ID NO: 1888677
agagucuuccaguagggau

SEQ ID NO: 2549399 - RNA, 19 nt, Artificial Sequence
  Description of Artificial Sequence: Synthetic oligonucleotide
  Antisense strand to SEQ ID NO: 2549398
aucccuacuggaagacucu

SEQ ID NO: 2549400 - RNA, 19 nt, Artificial Sequence
  Description of Artificial Sequence: Synthetic oligonucleotide
  Sense strand starting at position 2695 of SEQ ID NO: 1888677
uggguauaaccuuaggagu

SEQ ID NO: 2549401 - RNA, 19 nt, Artificial Sequence
  Description of Artificial Sequence: Synthetic oligonucleotide
  Antisense strand to SEQ ID NO: 2549400
acuccuaagguuauaccca

SEQ ID NO: 2549402 - RNA, 19 nt, Artificial Sequence
  Description of Artificial Sequence: Synthetic oligonucleotide
  Sense strand starting at position 3976 of SEQ ID NO: 1888677
ugagucucacaaggaaauu

SEQ ID NO: 2549403 - RNA, 19 nt, Artificial Sequence
  Description of Artificial Sequence: Synthetic oligonucleotide
  Antisense strand to SEQ ID NO: 2549402
aauuuccuugugagacuca

SEQ ID NO: 2549404 - RNA, 19 nt, Artificial Sequence
  Description of Artificial Sequence: Synthetic oligonucleotide
  Sense strand starting at position 1883 of SEQ ID NO: 1888677
cagggaugugguuaucuag

SEQ ID NO: 2549405 - RNA, 19 nt, Artificial Sequence
  Description of Artificial Sequence: Synthetic oligonucleotide
  Antisense strand to SEQ ID NO: 2549404
cuagauaaccacaucccug

SEQ ID NO: 2549406 - RNA, 19 nt, Artificial Sequence
  Description of Artificial Sequence: Synthetic oligonucleotide
  Sense strand starting at position 625 of SEQ ID NO: 1888677
ggauucuaaacuggaaguu

SEQ ID NO: 2549407 - RNA, 19 nt, Artificial Sequence
  Description of Artificial Sequence: Synthetic oligonucleotide
  Antisense strand to SEQ ID NO: 2549406
aacuuccaguuuagaaucc

SEQ ID NO: 2549408 - RNA, 19 nt, Artificial Sequence
  Description of Artificial Sequence: Synthetic oligonucleotide
  Sense strand starting at position 2701 of SEQ ID NO: 1888677
uaaccuuaggaguggaauu

SEQ ID NO: 2549409 - RNA, 19 nt, Artificial Sequence
  Description of Artificial Sequence: Synthetic oligonucleotide
  Antisense strand to SEQ ID NO: 2549408
aauuccacuccuaagguua

SEQ ID NO: 2549410 - RNA, 19 nt, Artificial Sequence
  Description of Artificial Sequence: Synthetic oligonucleotide
  Sense strand starting at position 624 of SEQ ID NO: 1888677
uggauucuaaacuggaagu

SEQ ID NO: 2549411 - RNA, 19 nt, Artificial Sequence
  Description of Artificial Sequence: Synthetic oligonucleotide
  Antisense strand to SEQ ID NO: 2549410
acuuccaguuuagaaucca

SEQ ID NO: 2549412 - RNA, 19 nt, Artificial Sequence
  Description of Artificial Sequence: Synthetic oligonucleotide
  Sense strand starting at position 943 of SEQ ID NO: 1888677
ggaggauugcuugauucuu

SEQ ID NO: 2549413 - RNA, 19 nt, Artificial Sequence
  Description of Artificial Sequence: Synthetic oligonucleotide
  Antisense strand to SEQ ID NO: 2549412
aagaaucaagcaauccucc

SEQ ID NO: 2549414 - RNA, 19 nt, Artificial Sequence
  Description of Artificial Sequence: Synthetic oligonucleotide
  Sense strand starting at position 3901 of SEQ ID NO: 1888677
auggaugcugcugaaacau

SEQ ID NO: 2549415 - RNA, 19 nt, Artificial Sequence
  Description of Artificial Sequence: Synthetic oligonucleotide
  Antisense strand to SEQ ID NO: 2549414
auguuucagcagcauccau

SEQ ID NO: 2549416 - RNA, 19 nt, Artificial Sequence
  Description of Artificial Sequence: Synthetic oligonucleotide
  Sense strand starting at position 3017 of SEQ ID NO: 1888677
agaaaugucuagucaaacu

SEQ ID NO: 2549417 - RNA, 19 nt, Artificial Sequence
  Description of Artificial Sequence: Synthetic oligonucleotide
  Antisense strand to SEQ ID NO: 2549416
aguuugacuagacauuucu

SEQ ID NO: 2549418 - RNA, 19 nt, Artificial Sequence
  Description of Artificial Sequence: Synthetic oligonucleotide
  Sense strand starting at position 1321 of SEQ ID NO: 1888677
aggagaauuguuugaaucg

SEQ ID NO: 2549419 - RNA, 19 nt, Artificial Sequence
  Description of Artificial Sequence: Synthetic oligonucleotide
  Antisense strand to SEQ ID NO: 2549418
cgauucaaacaauucuccu

SEQ ID NO: 2549420 - RNA, 19 nt, Artificial Sequence
  Description of Artificial Sequence: Synthetic oligonucleotide
  Sense strand starting at position 1886 of SEQ ID NO: 1888677
ggaugugguuaucuagaag

SEQ ID NO: 2549421 - RNA, 19 nt, Artificial Sequence
  Description of Artificial Sequence: Synthetic oligonucleotide
  Antisense strand to SEQ ID NO: 2549420
cuucuagauaaccacaucc

SEQ ID NO: 2549422 - RNA, 19 nt, Artificial Sequence
  Description of Artificial Sequence: Synthetic oligonucleotide
  Sense strand starting at position 2382 of SEQ ID NO: 1888677
uuucuaucucuacagaugu

SEQ ID NO: 2549423 - RNA, 19 nt, Artificial Sequence
  Description of Artificial Sequence: Synthetic oligonucleotide
  Antisense strand to SEQ ID NO: 2549422
acaucuguagagauagaaa

SEQ ID NO: 2549424 - RNA, 19 nt, Artificial Sequence
  Description of Artificial Sequence: Synthetic oligonucleotide
  Sense strand starting at position 1160 of SEQ ID NO: 1888677
gccuguaaucacguugcuu

SEQ ID NO: 2549425 - RNA, 19 nt, Artificial Sequence
  Description of Artificial Sequence: Synthetic oligonucleotide
  Antisense strand to SEQ ID NO: 2549424
aagcaacgugauuacaggc

SEQ ID NO: 2549426 - RNA, 19 nt, Artificial Sequence
  Description of Artificial Sequence: Synthetic oligonucleotide
  Sense strand starting at position 2544 of SEQ ID NO: 1888677
ucuucuauucuauggauag

SEQ ID NO: 2549427 - RNA, 19 nt, Artificial Sequence
  Description of Artificial Sequence: Synthetic oligonucleotide
  Antisense strand to SEQ ID NO: 2549426
cuauccauagaauagaaga

SEQ ID NO: 2549428 - RNA, 19 nt, Artificial Sequence
  Description of Artificial Sequence: Synthetic oligonucleotide
  Sense strand starting at position 2630 of SEQ ID NO: 1888677
ugaauaauguugguaugac

SEQ ID NO: 2549429 - RNA, 19 nt, Artificial Sequence
  Description of Artificial Sequence: Synthetic oligonucleotide
  Antisense strand to SEQ ID NO: 2549428
gucauaccaacauuauuca

SEQ ID NO: 2549430 - RNA, 19 nt, Artificial Sequence
  Description of Artificial Sequence: Synthetic oligonucleotide
  Sense strand starting at position 3002 of SEQ ID NO: 1888677
guauauugucuauggagaa

SEQ ID NO: 2549431 - RNA, 19 nt, Artificial Sequence
  Description of Artificial Sequence: Synthetic oligonucleotide
  Antisense strand to SEQ ID NO: 2549430
uucuccauagacaauauac

SEQ ID NO: 2549432 - RNA, 19 nt, Artificial Sequence
  Description of Artificial Sequence: Synthetic oligonucleotide
  Sense strand starting at position 3815 of SEQ ID NO: 1888677
gucugagggugaucaccaa

SEQ ID NO: 2549433 - RNA, 19 nt, Artificial Sequence
  Description of Artificial Sequence: Synthetic oligonucleotide
  Antisense strand to SEQ ID NO: 2549432
uuggugaucacccucagac

SEQ ID NO: 2549434 - RNA, 19 nt, Artificial Sequence
  Description of Artificial Sequence: Synthetic oligonucleotide
  Sense strand starting at position 2525 of SEQ ID NO: 1888677
ccuuuacauggcugaauaa

SEQ ID NO: 2549435 - RNA, 19 nt, Artificial Sequence
  Description of Artificial Sequence: Synthetic oligonucleotide
  Antisense strand to SEQ ID NO: 2549434
uuauucagccauguaaagg

SEQ ID NO: 2549436 - RNA, 19 nt, Artificial Sequence
  Description of Artificial Sequence: Synthetic oligonucleotide
  Sense strand starting at position 2065 of SEQ ID NO: 1888677
gguugaugaccucaguuuc

SEQ ID NO: 2549437 - RNA, 19 nt, Artificial Sequence
  Description of Artificial Sequence: Synthetic oligonucleotide
  Antisense strand to SEQ ID NO: 2549436
gaaacugaggucaucaacc

SEQ ID NO: 2549438 - RNA, 19 nt, Artificial Sequence
  Description of Artificial Sequence: Synthetic oligonucleotide
  Sense strand starting at position 945 of SEQ ID NO: 1888677
aggauugcuugauucuuga

SEQ ID NO: 2549439 - RNA, 19 nt, Artificial Sequence
  Description of Artificial Sequence: Synthetic oligonucleotide
  Antisense strand to SEQ ID NO: 2549438
ucaagaaucaagcaauccu

SEQ ID NO: 2549440 - RNA, 19 nt, Artificial Sequence
  Description of Artificial Sequence: Synthetic oligonucleotide
  Sense strand starting at position 3583 of SEQ ID NO: 1888677
gguugcuaugguuacagga

SEQ ID NO: 2549441 - RNA, 19 nt, Artificial Sequence
  Description of Artificial Sequence: Synthetic oligonucleotide
  Antisense strand to SEQ ID NO: 2549440
uccuguaaccauagcaacc

SEQ ID NO: 2549442 - RNA, 19 nt, Artificial Sequence
  Description of Artificial Sequence: Synthetic oligonucleotide
  Sense strand starting at position 3934 of SEQ ID NO: 1888677
ggauuugaaucuuaacuuc

SEQ ID NO: 2549443 - RNA, 19 nt, Artificial Sequence
  Description of Artificial Sequence: Synthetic oligonucleotide
  Antisense strand to SEQ ID NO: 2549442
gaaguuaagauucaaaucc

SEQ ID NO: 2549444 - RNA, 19 nt, Artificial Sequence
  Description of Artificial Sequence: Synthetic oligonucleotide
  Sense strand starting at position 2078 of SEQ ID NO: 1888677
aguuucuuggauugacuca

SEQ ID NO: 2549445 - RNA, 19 nt, Artificial Sequence
  Description of Artificial Sequence: Synthetic oligonucleotide
  Antisense strand to SEQ ID NO: 2549444
ugagucaauccaagaaacu

SEQ ID NO: 2549446 - RNA, 19 nt, Artificial Sequence
  Description of Artificial Sequence: Synthetic oligonucleotide
  Sense strand starting at position 2389 of SEQ ID NO: 1888677
cucuacagauguccauauu

SEQ ID NO: 2549447 - RNA, 19 nt, Artificial Sequence
  Description of Artificial Sequence: Synthetic oligonucleotide
  Antisense strand to SEQ ID NO: 2549446
aauauggacaucuguagag

SEQ ID NO: 2549448 - RNA, 19 nt, Artificial Sequence
  Description of Artificial Sequence: Synthetic oligonucleotide
  Sense strand starting at position 1541 of SEQ ID NO: 1888677
ccaaaccagugcucauaga

SEQ ID NO: 2549449 - RNA, 19 nt, Artificial Sequence
  Description of Artificial Sequence: Synthetic oligonucleotide
  Antisense strand to SEQ ID NO: 2549448
ucuaugagcacugguuugg

SEQ ID NO: 2549450 - RNA, 19 nt, Artificial Sequence
  Description of Artificial Sequence: Synthetic oligonucleotide
  Sense strand starting at position 2524 of SEQ ID NO: 1888677
uccuuuacauggcugaaua

SEQ ID NO: 2549451 - RNA, 19 nt, Artificial Sequence
  Description of Artificial Sequence: Synthetic oligonucleotide
  Antisense strand to SEQ ID NO: 2549450
uauucagccauguaaagga

SEQ ID NO: 2549452 - RNA, 19 nt, Artificial Sequence
  Description of Artificial Sequence: Synthetic oligonucleotide
  Sense strand starting at position 3391 of SEQ ID NO: 1888677
ucaugaugacgauguugau

SEQ ID NO: 2549453 - RNA, 19 nt, Artificial Sequence
  Description of Artificial Sequence: Synthetic oligonucleotide
  Antisense strand to SEQ ID NO: 2549452
aucaacaucgucaucauga

SEQ ID NO: 2549454 - RNA, 19 nt, Artificial Sequence
  Description of Artificial Sequence: Synthetic oligonucleotide
  Sense strand starting at position 1889 of SEQ ID NO: 1888677
ugugguuaucuagaagcac

SEQ ID NO: 2549455 - RNA, 19 nt, Artificial Sequence
  Description of Artificial Sequence: Synthetic oligonucleotide
  Antisense strand to SEQ ID NO: 2549454
gugcuucuagauaaccaca

SEQ ID NO: 2549456 - RNA, 19 nt, Artificial Sequence
  Description of Artificial Sequence: Synthetic oligonucleotide
  Sense strand starting at position 1103 of SEQ ID NO: 1888677
agacgauguuucuccagac

SEQ ID NO: 2549457 - RNA, 19 nt, Artificial Sequence
  Description of Artificial Sequence: Synthetic oligonucleotide
  Antisense strand to SEQ ID NO: 2549456
gucuggagaaacaucgucu

SEQ ID NO: 2549458 - RNA, 19 nt, Artificial Sequence
  Description of Artificial Sequence: Synthetic oligonucleotide
  Sense strand starting at position 1104 of SEQ ID NO: 1888677
gacgauguuucuccagaca

SEQ ID NO: 2549459 - RNA, 19 nt, Artificial Sequence
  Description of Artificial Sequence: Synthetic oligonucleotide
  Antisense strand to SEQ ID NO: 2549458
ugucuggagaaacaucguc

SEQ ID NO: 2549460 - RNA, 19 nt, Artificial Sequence
  Description of Artificial Sequence: Synthetic oligonucleotide
  Sense strand starting at position 2072 of SEQ ID NO: 1888677
gaccucaguuucuuggauu

SEQ ID NO: 2549461 - RNA, 19 nt, Artificial Sequence
  Description of Artificial Sequence: Synthetic oligonucleotide
  Antisense strand to SEQ ID NO: 2549460
aauccaagaaacugagguc

SEQ ID NO: 2549462 - RNA, 19 nt, Artificial Sequence
  Description of Artificial Sequence: Synthetic oligonucleotide
  Sense strand starting at position 360 of SEQ ID NO: 1888677
gcaugauccuaaguacuca

SEQ ID NO: 2549463 - RNA, 19 nt, Artificial Sequence
  Description of Artificial Sequence: Synthetic oligonucleotide
  Antisense strand to SEQ ID NO: 2549462
ugaguacuuaggaucaugc

SEQ ID NO: 2549464 - RNA, 19 nt, Artificial Sequence
  Description of Artificial Sequence: Synthetic oligonucleotide
  Sense strand starting at position 3913 of SEQ ID NO: 1888677
gaaacaugggccuggcuau

SEQ ID NO: 2549465 - RNA, 19 nt, Artificial Sequence
  Description of Artificial Sequence: Synthetic oligonucleotide
  Antisense strand to SEQ ID NO: 2549464
auagccaggcccauguuuc

SEQ ID NO: 2549466 - RNA, 19 nt, Artificial Sequence
  Description of Artificial Sequence: Synthetic oligonucleotide
  Sense strand starting at position 2725 of SEQ ID NO: 1888677
cuuguauagugauucuaua

SEQ ID NO: 2549467 - RNA, 19 nt, Artificial Sequence
  Description of Artificial Sequence: Synthetic oligonucleotide
  Antisense strand to SEQ ID NO: 2549466
uauagaaucacuauacaag

SEQ ID NO: 2549468 - RNA, 19 nt, Artificial Sequence
  Description of Artificial Sequence: Synthetic oligonucleotide
  Sense strand starting at position 1879 of SEQ ID NO: 1888677
cucucagggaugugguuau

SEQ ID NO: 2549469 - RNA, 19 nt, Artificial Sequence
  Description of Artificial Sequence: Synthetic oligonucleotide
  Antisense strand to SEQ ID NO: 2549468
auaaccacaucccugagag

SEQ ID NO: 2549470 - RNA, 19 nt, Artificial Sequence
  Description of Artificial Sequence: Synthetic oligonucleotide
  Sense strand starting at position 2999 of SEQ ID NO: 1888677
uuuguauauugucuaugga

SEQ ID NO: 2549471 - RNA, 19 nt, Artificial Sequence
  Description of Artificial Sequence: Synthetic oligonucleotide
  Antisense strand to SEQ ID NO: 2549470
uccauagacaauauacaaa

SEQ ID NO: 2549472 - RNA, 19 nt, Artificial Sequence
  Description of Artificial Sequence: Synthetic oligonucleotide
  Sense strand starting at position 3563 of SEQ ID NO: 1888677
ugcuauuuauuacaggaau

SEQ ID NO: 2549473 - RNA, 19 nt, Artificial Sequence
  Description of Artificial Sequence: Synthetic oligonucleotide
  Antisense strand to SEQ ID NO: 2549472
auuccuguaauaaauagca

SEQ ID NO: 2549474 - RNA, 19 nt, Artificial Sequence
  Description of Artificial Sequence: Synthetic oligonucleotide
  Sense strand starting at position 3134 of SEQ ID NO: 1888678
ugcaguaaugggcaagaga

SEQ ID NO: 2549475 - RNA, 19 nt, Artificial Sequence
  Description of Artificial Sequence: Synthetic oligonucleotide
  Antisense strand to SEQ ID NO: 2549474
ucucuugcccauuacugca

SEQ ID NO: 2549476 - RNA, 19 nt, Artificial Sequence
  Description of Artificial Sequence: Synthetic oligonucleotide
  Sense strand starting at position 2681 of SEQ ID NO: 1888678
cuuccugagccauaugaca

SEQ ID NO: 2549477 - RNA, 19 nt, Artificial Sequence
  Description of Artificial Sequence: Synthetic oligonucleotide
  Antisense strand to SEQ ID NO: 2549476
ugucauauggcucaggaag

SEQ ID NO: 2549478 - RNA, 19 nt, Artificial Sequence
  Description of Artificial Sequence: Synthetic oligonucleotide
  Sense strand starting at position 3308 of SEQ ID NO: 1888678
gacgcaugugucccugcau

SEQ ID NO: 2549479 - RNA, 19 nt, Artificial Sequence
  Description of Artificial Sequence: Synthetic oligonucleotide
  Antisense strand to SEQ ID NO: 2549478
augcagggacacaugcguc

SEQ ID NO: 2549480 - RNA, 19 nt, Artificial Sequence
  Description of Artificial Sequence: Synthetic oligonucleotide
  Sense strand starting at position 2528 of SEQ ID NO: 1888678
gcaagaaucucacucucag

SEQ ID NO: 2549481 - RNA, 19 nt, Artificial Sequence
  Description of Artificial Sequence: Synthetic oligonucleotide
  Antisense strand to SEQ ID NO: 2549480
cugagagugagauucuugc

SEQ ID NO: 2549482 - RNA, 19 nt, Artificial Sequence
  Description of Artificial Sequence: Synthetic oligonucleotide
  Sense strand starting at position 2679 of SEQ ID NO: 1888678
ggcuuccugagccauauga

SEQ ID NO: 2549483 - RNA, 19 nt, Artificial Sequence
  Description of Artificial Sequence: Synthetic oligonucleotide
  Antisense strand to SEQ ID NO: 2549482
ucauauggcucaggaagcc

SEQ ID NO: 2549484 - RNA, 19 nt, Artificial Sequence
  Description of Artificial Sequence: Synthetic oligonucleotide
  Sense strand starting at position 86 of SEQ ID NO: 1888678
cggagcagcgccuauuuau

SEQ ID NO: 2549485 - RNA, 19 nt, Artificial Sequence
  Description of Artificial Sequence: Synthetic oligonucleotide
  Antisense strand to SEQ ID NO: 2549484
auaaauaggcgcugcuccg

SEQ ID NO: 2549486 - RNA, 19 nt, Artificial Sequence
  Description of Artificial Sequence: Synthetic oligonucleotide
  Sense strand starting at position 3425 of SEQ ID NO: 1888678
gugucccuuccaggagaau

SEQ ID NO: 2549487 - RNA, 19 nt, Artificial Sequence
  Description of Artificial Sequence: Synthetic oligonucleotide
  Antisense strand to SEQ ID NO: 2549486
auucuccuggaagggacac

SEQ ID NO: 2549488 - RNA, 19 nt, Artificial Sequence
  Description of Artificial Sequence: Synthetic oligonucleotide
  Sense strand starting at position 2428 of SEQ ID NO: 1888678
caggcuaggaggugucuaa

SEQ ID NO: 2549489 - RNA, 19 nt, Artificial Sequence
  Description of Artificial Sequence: Synthetic oligonucleotide
  Antisense strand to SEQ ID NO: 2549488
uuagacaccuccuagccug

SEQ ID NO: 2549490 - RNA, 19 nt, Artificial Sequence
  Description of Artificial Sequence: Synthetic oligonucleotide
  Sense strand starting at position 2059 of SEQ ID NO: 1888678
ggcucuccuggcugagaga

SEQ ID NO: 2549491 - RNA, 19 nt, Artificial Sequence
  Description of Artificial Sequence: Synthetic oligonucleotide
  Antisense strand to SEQ ID NO: 2549490
ucucucagccaggagagcc

SEQ ID NO: 2549492 - RNA, 19 nt, Artificial Sequence
  Description of Artificial Sequence: Synthetic oligonucleotide
  Sense strand starting at position 3733 of SEQ ID NO: 1888678
auuguuuaacccugagcuc

SEQ ID NO: 2549493 - RNA, 19 nt, Artificial Sequence
  Description of Artificial Sequence: Synthetic oligonucleotide
  Antisense strand to SEQ ID NO: 2549492
gagcucaggguuaaacaau

SEQ ID NO: 2549494 - RNA, 19 nt, Artificial Sequence
  Description of Artificial Sequence: Synthetic oligonucleotide
  Sense strand starting at position 3723 of SEQ ID NO: 1888678
gccucacagcauuguuuaa

SEQ ID NO: 2549495 - RNA, 19 nt, Artificial Sequence
  Description of Artificial Sequence: Synthetic oligonucleotide
  Antisense strand to SEQ ID NO: 2549494
uuaaacaaugcugugaggc

SEQ ID NO: 2549496 - RNA, 19 nt, Artificial Sequence
  Description of Artificial Sequence: Synthetic oligonucleotide
  Sense strand starting at position 2435 of SEQ ID NO: 1888678
ggaggugucuaacagagug

SEQ ID NO: 2549497 - RNA, 19 nt, Artificial Sequence
  Description of Artificial Sequence: Synthetic oligonucleotide
  Antisense strand to SEQ ID NO: 2549496
cacucuguuagacaccucc

SEQ ID NO: 2549498 - RNA, 19 nt, Artificial Sequence
  Description of Artificial Sequence: Synthetic oligonucleotide
  Sense strand starting at position 3545 of SEQ ID NO: 1888678
auccauggcuccugagaaa

SEQ ID NO: 2549499 - RNA, 19 nt, Artificial Sequence
  Description of Artificial Sequence: Synthetic oligonucleotide
  Antisense strand to SEQ ID NO: 2549498
uuucucaggagccauggau

SEQ ID NO: 2549500 - RNA, 19 nt, Artificial Sequence
  Description of Artificial Sequence: Synthetic oligonucleotide
  Sense strand starting at position 3423 of SEQ ID NO: 1888678
gugugucccuuccaggaga

SEQ ID NO: 2549501 - RNA, 19 nt, Artificial Sequence
  Description of Artificial Sequence: Synthetic oligonucleotide
  Antisense strand to SEQ ID NO: 2549500
ucuccuggaagggacacac

SEQ ID NO: 2549502 - RNA, 19 nt, Artificial Sequence
  Description of Artificial Sequence: Synthetic oligonucleotide
  Sense strand starting at position 896 of SEQ ID NO: 1888679
acacaaagguuucuccaga

SEQ ID NO: 2549503 - RNA, 19 nt, Artificial Sequence
  Description of Artificial Sequence: Synthetic oligonucleotide
  Antisense strand to SEQ ID NO: 2549502
ucuggagaaaccuuugugu

SEQ ID NO: 2549504 - RNA, 19 nt, Artificial Sequence
  Description of Artificial Sequence: Synthetic oligonucleotide
  Sense strand starting at position 3930 of SEQ ID NO: 1888679
cuuccugagccauaugaca

SEQ ID NO: 2549505 - RNA, 19 nt, Artificial Sequence
  Description of Artificial Sequence: Synthetic oligonucleotide
  Antisense strand to SEQ ID NO: 2549504
ugucauauggcucaggaag

SEQ ID NO: 2549506 - RNA, 19 nt, Artificial Sequence
  Description of Artificial Sequence: Synthetic oligonucleotide
  Sense strand starting at position 3777 of SEQ ID NO: 1888679
gcaagaaucucacucucag

SEQ ID NO: 2549507 - RNA, 19 nt, Artificial Sequence
  Description of Artificial Sequence: Synthetic oligonucleotide
  Antisense strand to SEQ ID NO: 2549506
cugagagugagauucuugc

SEQ ID NO: 2549508 - RNA, 19 nt, Artificial Sequence
  Description of Artificial Sequence: Synthetic oligonucleotide
  Sense strand starting at position 3928 of SEQ ID NO: 1888679
ggcuuccugagccauauga

SEQ ID NO: 2549509 - RNA, 19 nt, Artificial Sequence
  Description of Artificial Sequence: Synthetic oligonucleotide
  Antisense strand to SEQ ID NO: 2549508
ucauauggcucaggaagcc

SEQ ID NO: 2549510 - RNA, 19 nt, Artificial Sequence
  Description of Artificial Sequence: Synthetic oligonucleotide
  Sense strand starting at position 1335 of SEQ ID NO: 1888679
cggagcagcgccuauuuau

SEQ ID NO: 2549511 - RNA, 19 nt, Artificial Sequence
  Description of Artificial Sequence: Synthetic oligonucleotide
  Antisense strand to SEQ ID NO: 2549510
auaaauaggcgcugcuccg

SEQ ID NO: 2549512 - RNA, 19 nt, Artificial Sequence
  Description of Artificial Sequence: Synthetic oligonucleotide
  Sense strand starting at position 3677 of SEQ ID NO: 1888679
caggcuaggaggugucuaa

SEQ ID NO: 2549513 - RNA, 19 nt, Artificial Sequence
  Description of Artificial Sequence: Synthetic oligonucleotide
  Antisense strand to SEQ ID NO: 2549512
uuagacaccuccuagccug

SEQ ID NO: 2549514 - RNA, 19 nt, Artificial Sequence
  Description of Artificial Sequence: Synthetic oligonucleotide
  Sense strand starting at position 3308 of SEQ ID NO: 1888679
ggcucuccuggcugagaga

SEQ ID NO: 2549515 - RNA, 19 nt, Artificial Sequence
  Description of Artificial Sequence: Synthetic oligonucleotide
  Antisense strand to SEQ ID NO: 2549514
ucucucagccaggagagcc

SEQ ID NO: 2549516 - RNA, 19 nt, Artificial Sequence
  Description of Artificial Sequence: Synthetic oligonucleotide
  Sense strand starting at position 3684 of SEQ ID NO: 1888679
ggaggugucuaacagagug

SEQ ID NO: 2549517 - RNA, 19 nt, Artificial Sequence
  Description of Artificial Sequence: Synthetic oligonucleotide
  Antisense strand to SEQ ID NO: 2549516
cacucuguuagacaccucc

SEQ ID NO: 2549518 - RNA, 19 nt, Artificial Sequence
  Description of Artificial Sequence: Synthetic oligonucleotide
  Sense strand starting at position 1630 of SEQ ID NO: 1888680
aacucagggucuccuagaa

SEQ ID NO: 2549519 - RNA, 19 nt, Artificial Sequence
  Description of Artificial Sequence: Synthetic oligonucleotide
  Antisense strand to SEQ ID NO: 2549518
uucuaggagacccugaguu

SEQ ID NO: 2549520 - RNA, 19 nt, Artificial Sequence
  Description of Artificial Sequence: Synthetic oligonucleotide
  Sense strand starting at position 3012 of SEQ ID NO: 1888680
gccuuuccugaggaauuac

SEQ ID NO: 2549521 - RNA, 19 nt, Artificial Sequence
  Description of Artificial Sequence: Synthetic oligonucleotide
  Antisense strand to SEQ ID NO: 2549520
guaauuccucaggaaaggc

SEQ ID NO: 2549522 - RNA, 19 nt, Artificial Sequence
  Description of Artificial Sequence: Synthetic oligonucleotide
  Sense strand starting at position 3221 of SEQ ID NO: 1888680
ugggcauaucuuuaaagug

SEQ ID NO: 2549523 - RNA, 19 nt, Artificial Sequence
  Description of Artificial Sequence: Synthetic oligonucleotide
  Antisense strand to SEQ ID NO: 2549522
cacuuuaaagauaugccca

SEQ ID NO: 2549524 - RNA, 19 nt, Artificial Sequence
  Description of Artificial Sequence: Synthetic oligonucleotide
  Sense strand starting at position 2965 of SEQ ID NO: 1888680
gcagauucucaccaaugug

SEQ ID NO: 2549525 - RNA, 19 nt, Artificial Sequence
  Description of Artificial Sequence: Synthetic oligonucleotide
  Antisense strand to SEQ ID NO: 2549524
cacauuggugagaaucugc

SEQ ID NO: 2549526 - RNA, 19 nt, Artificial Sequence
  Description of Artificial Sequence: Synthetic oligonucleotide
  Sense strand starting at position 2995 of SEQ ID NO: 1888680
agaauauuguucccaaagc

SEQ ID NO: 2549527 - RNA, 19 nt, Artificial Sequence
  Description of Artificial Sequence: Synthetic oligonucleotide
  Antisense strand to SEQ ID NO: 2549526
gcuuugggaacaauauucu

SEQ ID NO: 2549528 - RNA, 19 nt, Artificial Sequence
  Description of Artificial Sequence: Synthetic oligonucleotide
  Sense strand starting at position 3575 of SEQ ID NO: 1888680
cuugcagucagggaaguuu

SEQ ID NO: 2549529 - RNA, 19 nt, Artificial Sequence
  Description of Artificial Sequence: Synthetic oligonucleotide
  Antisense strand to SEQ ID NO: 2549528
aaacuucccugacugcaag

SEQ ID NO: 2549530 - RNA, 19 nt, Artificial Sequence
  Description of Artificial Sequence: Synthetic oligonucleotide
  Sense strand starting at position 2964 of SEQ ID NO: 1888680
agcagauucucaccaaugu

SEQ ID NO: 2549531 - RNA, 19 nt, Artificial Sequence
  Description of Artificial Sequence: Synthetic oligonucleotide
  Antisense strand to SEQ ID NO: 2549530
acauuggugagaaucugcu

SEQ ID NO: 2549532 - RNA, 19 nt, Artificial Sequence
  Description of Artificial Sequence: Synthetic oligonucleotide
  Sense strand starting at position 2456 of SEQ ID NO: 1888680
ugggcaguccuguaauuau

SEQ ID NO: 2549533 - RNA, 19 nt, Artificial Sequence
  Description of Artificial Sequence: Synthetic oligonucleotide
  Antisense strand to SEQ ID NO: 2549532
auaauuacaggacugccca

SEQ ID NO: 2549534 - RNA, 19 nt, Artificial Sequence
  Description of Artificial Sequence: Synthetic oligonucleotide
  Sense strand starting at position 3220 of SEQ ID NO: 1888680
gugggcauaucuuuaaagu

SEQ ID NO: 2549535 - RNA, 19 nt, Artificial Sequence
  Description of Artificial Sequence: Synthetic oligonucleotide
  Antisense strand to SEQ ID NO: 2549534
acuuuaaagauaugcccac

SEQ ID NO: 2549536 - RNA, 19 nt, Artificial Sequence
  Description of Artificial Sequence: Synthetic oligonucleotide
  Sense strand starting at position 1023 of SEQ ID NO: 1888680
ccuuaucucucccugaugu

SEQ ID NO: 2549537 - RNA, 19 nt, Artificial Sequence
  Description of Artificial Sequence: Synthetic oligonucleotide
  Antisense strand to SEQ ID NO: 2549536
acaucagggagagauaagg

SEQ ID NO: 2549538 - RNA, 19 nt, Artificial Sequence
  Description of Artificial Sequence: Synthetic oligonucleotide
  Sense strand starting at position 2459 of SEQ ID NO: 1888680
gcaguccuguaauuauagu

SEQ ID NO: 2549539 - RNA, 19 nt, Artificial Sequence
  Description of Artificial Sequence: Synthetic oligonucleotide
  Antisense strand to SEQ ID NO: 2549538
acuauaauuacaggacugc

SEQ ID NO: 2549540 - RNA, 19 nt, Artificial Sequence
  Description of Artificial Sequence: Synthetic oligonucleotide
  Sense strand starting at position 1033 of SEQ ID NO: 1888680
cccugaugugcuugagcca

SEQ ID NO: 2549541 - RNA, 19 nt, Artificial Sequence
  Description of Artificial Sequence: Synthetic oligonucleotide
  Antisense strand to SEQ ID NO: 2549540
uggcucaagcacaucaggg

SEQ ID NO: 2549542 - RNA, 19 nt, Artificial Sequence
  Description of Artificial Sequence: Synthetic oligonucleotide
  Sense strand starting at position 3604 of SEQ ID NO: 1888680
agauucguaucccagcaaa

SEQ ID NO: 2549543 - RNA, 19 nt, Artificial Sequence
  Description of Artificial Sequence: Synthetic oligonucleotide
  Antisense strand to SEQ ID NO: 2549542
uuugcugggauacgaaucu

SEQ ID NO: 2549544 - RNA, 19 nt, Artificial Sequence
  Description of Artificial Sequence: Synthetic oligonucleotide
  Sense strand starting at position 3149 of SEQ ID NO: 1888680
gauggaguguaaugguuac

SEQ ID NO: 2549545 - RNA, 19 nt, Artificial Sequence
  Description of Artificial Sequence: Synthetic oligonucleotide
  Antisense strand to SEQ ID NO: 2549544
guaaccauuacacuccauc

SEQ ID NO: 2549546 - RNA, 19 nt, Artificial Sequence
  Description of Artificial Sequence: Synthetic oligonucleotide
  Sense strand starting at position 3812 of SEQ ID NO: 1888680
gcuuccuguuuccauggau

SEQ ID NO: 2549547 - RNA, 19 nt, Artificial Sequence
  Description of Artificial Sequence: Synthetic oligonucleotide
  Antisense strand to SEQ ID NO: 2549546
auccauggaaacaggaagc

SEQ ID NO: 2549548 - RNA, 19 nt, Artificial Sequence
  Description of Artificial Sequence: Synthetic oligonucleotide
  Sense strand starting at position 2772 of SEQ ID NO: 1888681
acaauaucugccuggaaag

SEQ ID NO: 2549549 - RNA, 19 nt, Artificial Sequence
  Description of Artificial Sequence: Synthetic oligonucleotide
  Antisense strand to SEQ ID NO: 2549548
cuuuccaggcagauauugu

SEQ ID NO: 2549550 - RNA, 19 nt, Artificial Sequence
  Description of Artificial Sequence: Synthetic oligonucleotide
  Sense strand starting at position 2751 of SEQ ID NO: 1888681
ccuccaggugagggauuau

SEQ ID NO: 2549551 - RNA, 19 nt, Artificial Sequence
  Description of Artificial Sequence: Synthetic oligonucleotide
  Antisense strand to SEQ ID NO: 2549550
auaaucccucaccuggagg

SEQ ID NO: 2549552 - RNA, 19 nt, Artificial Sequence
  Description of Artificial Sequence: Synthetic oligonucleotide
  Sense strand starting at position 2874 of SEQ ID NO: 1888681
acccuuugagucugaaaca

SEQ ID NO: 2549553 - RNA, 19 nt, Artificial Sequence
  Description of Artificial Sequence: Synthetic oligonucleotide
  Antisense strand to SEQ ID NO: 2549552
uguuucagacucaaagggu

SEQ ID NO: 2549554 - RNA, 19 nt, Artificial Sequence
  Description of Artificial Sequence: Synthetic oligonucleotide
  Sense strand starting at position 3835 of SEQ ID NO: 1888681
acugauugcccacaguuau

SEQ ID NO: 2549555 - RNA, 19 nt, Artificial Sequence
  Description of Artificial Sequence: Synthetic oligonucleotide
  Antisense strand to SEQ ID NO: 2549554
auaacugugggcaaucagu

SEQ ID NO: 2549556 - RNA, 19 nt, Artificial Sequence
  Description of Artificial Sequence: Synthetic oligonucleotide
  Sense strand starting at position 2893 of SEQ ID NO: 1888681
guggcaagucuaggacaaa

SEQ ID NO: 2549557 - RNA, 19 nt, Artificial Sequence
  Description of Artificial Sequence: Synthetic oligonucleotide
  Antisense strand to SEQ ID NO: 2549556
uuuguccuagacuugccac

SEQ ID NO: 2549558 - RNA, 19 nt, Artificial Sequence
  Description of Artificial Sequence: Synthetic oligonucleotide
  Sense strand starting at position 3391 of SEQ ID NO: 1888681
gccguaccaguauaauaaa

SEQ ID NO: 2549559 - RNA, 19 nt, Artificial Sequence
  Description of Artificial Sequence: Synthetic oligonucleotide
  Antisense strand to SEQ ID NO: 2549558
uuuauuauacugguacggc

SEQ ID NO: 2549560 - RNA, 19 nt, Artificial Sequence
  Description of Artificial Sequence: Synthetic oligonucleotide
  Sense strand starting at position 3587 of SEQ ID NO: 1888681
gcgagaagugaccggaaga

SEQ ID NO: 2549561 - RNA, 19 nt, Artificial Sequence
  Description of Artificial Sequence: Synthetic oligonucleotide
  Antisense strand to SEQ ID NO: 2549560
ucuuccggucacuucucgc

SEQ ID NO: 2549562 - RNA, 19 nt, Artificial Sequence
  Description of Artificial Sequence: Synthetic oligonucleotide
  Sense strand starting at position 2966 of SEQ ID NO: 1888681
aacagagucucgcuuugua

SEQ ID NO: 2549563 - RNA, 19 nt, Artificial Sequence
  Description of Artificial Sequence: Synthetic oligonucleotide
  Antisense strand to SEQ ID NO: 2549562
uacaaagcgagacucuguu

SEQ ID NO: 2549564 - RNA, 19 nt, Artificial Sequence
  Description of Artificial Sequence: Synthetic oligonucleotide
  Sense strand starting at position 2295 of SEQ ID NO: 1888681
uuuguuuaguggcuuacua

SEQ ID NO: 2549565 - RNA, 19 nt, Artificial Sequence
  Description of Artificial Sequence: Synthetic oligonucleotide
  Antisense strand to SEQ ID NO: 2549564
uaguaagccacuaaacaaa

SEQ ID NO: 2549566 - RNA, 19 nt, Artificial Sequence
  Description of Artificial Sequence: Synthetic oligonucleotide
  Sense strand starting at position 2875 of SEQ ID NO: 1888681
cccuuugagucugaaacag

SEQ ID NO: 2549567 - RNA, 19 nt, Artificial Sequence
  Description of Artificial Sequence: Synthetic oligonucleotide
  Antisense strand to SEQ ID NO: 2549566
cuguuucagacucaaaggg

SEQ ID NO: 2549568 - RNA, 19 nt, Artificial Sequence
  Description of Artificial Sequence: Synthetic oligonucleotide
  Sense strand starting at position 2894 of SEQ ID NO: 1888681
uggcaagucuaggacaaau

SEQ ID NO: 2549569 - RNA, 19 nt, Artificial Sequence
  Description of Artificial Sequence: Synthetic oligonucleotide
  Antisense strand to SEQ ID NO: 2549568
auuuguccuagacuugcca

SEQ ID NO: 2549570 - RNA, 19 nt, Artificial Sequence
  Description of Artificial Sequence: Synthetic oligonucleotide
  Sense strand starting at position 2292 of SEQ ID NO: 1888681
cccuuuguuuaguggcuua

SEQ ID NO: 2549571 - RNA, 19 nt, Artificial Sequence
  Description of Artificial Sequence: Synthetic oligonucleotide
  Antisense strand to SEQ ID NO: 2549570
uaagccacuaaacaaaggg

SEQ ID NO: 2549572 - RNA, 19 nt, Artificial Sequence
  Description of Artificial Sequence: Synthetic oligonucleotide
  Sense strand starting at position 3052 of SEQ ID NO: 1888682
ggagcagaggcauauccau

SEQ ID NO: 2549573 - RNA, 19 nt, Artificial Sequence
  Description of Artificial Sequence: Synthetic oligonucleotide
  Antisense strand to SEQ ID NO: 2549572
auggauaugccucugcucc

SEQ ID NO: 2549574 - RNA, 19 nt, Artificial Sequence
  Description of Artificial Sequence: Synthetic oligonucleotide
  Sense strand starting at position 2957 of SEQ ID NO: 1888682
augcuccuuggagaaguua

SEQ ID NO: 2549575 - RNA, 19 nt, Artificial Sequence
  Description of Artificial Sequence: Synthetic oligonucleotide
  Antisense strand to SEQ ID NO: 2549574
uaacuucuccaaggagcau

SEQ ID NO: 2549576 - RNA, 19 nt, Artificial Sequence
  Description of Artificial Sequence: Synthetic oligonucleotide
  Sense strand starting at position 2953 of SEQ ID NO: 1888682
ugacaugcuccuuggagaa

SEQ ID NO: 2549577 - RNA, 19 nt, Artificial Sequence
  Description of Artificial Sequence: Synthetic oligonucleotide
  Antisense strand to SEQ ID NO: 2549576
uucuccaaggagcauguca

SEQ ID NO: 2549578 - RNA, 19 nt, Artificial Sequence
  Description of Artificial Sequence: Synthetic oligonucleotide
  Sense strand starting at position 2899 of SEQ ID NO: 1888682
auaaauauuguccaggugu

SEQ ID NO: 2549579 - RNA, 19 nt, Artificial Sequence
  Description of Artificial Sequence: Synthetic oligonucleotide
  Antisense strand to SEQ ID NO: 2549578
acaccuggacaauauuuau

SEQ ID NO: 2549580 - RNA, 19 nt, Artificial Sequence
  Description of Artificial Sequence: Synthetic oligonucleotide
  Sense strand starting at position 3304 of SEQ ID NO: 1888682
aggauaagcuagucuccaa

SEQ ID NO: 2549581 - RNA, 19 nt, Artificial Sequence
  Description of Artificial Sequence: Synthetic oligonucleotide
  Antisense strand to SEQ ID NO: 2549580
uuggagacuagcuuauccu

SEQ ID NO: 2549582 - RNA, 19 nt, Artificial Sequence
  Description of Artificial Sequence: Synthetic oligonucleotide
  Sense strand starting at position 977 of SEQ ID NO: 1888682
ugcugaggaacucgaacau

SEQ ID NO: 2549583 - RNA, 19 nt, Artificial Sequence
  Description of Artificial Sequence: Synthetic oligonucleotide
  Antisense strand to SEQ ID NO: 2549582
auguucgaguuccucagca

SEQ ID NO: 2549584 - RNA, 19 nt, Artificial Sequence
  Description of Artificial Sequence: Synthetic oligonucleotide
  Sense strand starting at position 2605 of SEQ ID NO: 1888682
gcaccuuugccuggauaaa

SEQ ID NO: 2549585 - RNA, 19 nt, Artificial Sequence
  Description of Artificial Sequence: Synthetic oligonucleotide
  Antisense strand to SEQ ID NO: 2549584
uuuauccaggcaaaggugc

SEQ ID NO: 2549586 - RNA, 19 nt, Artificial Sequence
  Description of Artificial Sequence: Synthetic oligonucleotide
  Sense strand starting at position 2604 of SEQ ID NO: 1888682
agcaccuuugccuggauaa

SEQ ID NO: 2549587 - RNA, 19 nt, Artificial Sequence
  Description of Artificial Sequence: Synthetic oligonucleotide
  Antisense strand to SEQ ID NO: 2549586
uuauccaggcaaaggugcu

SEQ ID NO: 2549588 - RNA, 19 nt, Artificial Sequence
  Description of Artificial Sequence: Synthetic oligonucleotide
  Sense strand starting at position 2603 of SEQ ID NO: 1888682
gagcaccuuugccuggaua

SEQ ID NO: 2549589 - RNA, 19 nt, Artificial Sequence
  Description of Artificial Sequence: Synthetic oligonucleotide
  Antisense strand to SEQ ID NO: 2549588
uauccaggcaaaggugcuc

SEQ ID NO: 2549590 - RNA, 19 nt, Artificial Sequence
  Description of Artificial Sequence: Synthetic oligonucleotide
  Sense strand starting at position 317 of SEQ ID NO: 1888682
aggucuggucguggaugaa

SEQ ID NO: 2549591 - RNA, 19 nt, Artificial Sequence
  Description of Artificial Sequence: Synthetic oligonucleotide
  Antisense strand to SEQ ID NO: 2549590
uucauccacgaccagaccu

SEQ ID NO: 2549592 - RNA, 19 nt, Artificial Sequence
  Description of Artificial Sequence: Synthetic oligonucleotide
  Sense strand starting at position 3699 of SEQ ID NO: 1888682
caacauuccugggcguaca

SEQ ID NO: 2549593 - RNA, 19 nt, Artificial Sequence
  Description of Artificial Sequence: Synthetic oligonucleotide
  Antisense strand to SEQ ID NO: 2549592
uguacgcccaggaauguug

SEQ ID NO: 2549594 - RNA, 19 nt, Artificial Sequence
  Description of Artificial Sequence: Synthetic oligonucleotide
  Sense strand starting at position 314 of SEQ ID NO: 1888682
gggaggucuggucguggau

SEQ ID NO: 2549595 - RNA, 19 nt, Artificial Sequence
  Description of Artificial Sequence: Synthetic oligonucleotide
  Antisense strand to SEQ ID NO: 2549594
auccacgaccagaccuccc

SEQ ID NO: 2549596 - RNA, 19 nt, Artificial Sequence
  Description of Artificial Sequence: Synthetic oligonucleotide
  Sense strand starting at position 2972 of SEQ ID NO: 1888682
guuaguaacucugcaggua

SEQ ID NO: 2549597 - RNA, 19 nt, Artificial Sequence
  Description of Artificial Sequence: Synthetic oligonucleotide
  Antisense strand to SEQ ID NO: 2549596
uaccugcagaguuacuaac

SEQ ID NO: 2549598 - RNA, 19 nt, Artificial Sequence
  Description of Artificial Sequence: Synthetic oligonucleotide
  Sense strand starting at position 3697 of SEQ ID NO: 1888682
gccaacauuccugggcgua

SEQ ID NO: 2549599 - RNA, 19 nt, Artificial Sequence
  Description of Artificial Sequence: Synthetic oligonucleotide
  Antisense strand to SEQ ID NO: 2549598
uacgcccaggaauguuggc

SEQ ID NO: 2549600 - RNA, 19 nt, Artificial Sequence
  Description of Artificial Sequence: Synthetic oligonucleotide
  Sense strand starting at position 2798 of SEQ ID NO: 1888682
ucuguugucggcuaaagcu

SEQ ID NO: 2549601 - RNA, 19 nt, Artificial Sequence
  Description of Artificial Sequence: Synthetic oligonucleotide
  Antisense strand to SEQ ID NO: 2549600
agcuuuagccgacaacaga

SEQ ID NO: 2549602 - RNA, 19 nt, Artificial Sequence
  Description of Artificial Sequence: Synthetic oligonucleotide
  Sense strand starting at position 3388 of SEQ ID NO: 1888682
gaaugacauuaauggugga

SEQ ID NO: 2549603 - RNA, 19 nt, Artificial Sequence
  Description of Artificial Sequence: Synthetic oligonucleotide
  Antisense strand to SEQ ID NO: 2549602
uccaccauuaaugucauuc

SEQ ID NO: 2549604 - RNA, 19 nt, Artificial Sequence
  Description of Artificial Sequence: Synthetic oligonucleotide
  Sense strand starting at position 2965 of SEQ ID NO: 1888682
uggagaaguuaguaacucu

SEQ ID NO: 2549605 - RNA, 19 nt, Artificial Sequence
  Description of Artificial Sequence: Synthetic oligonucleotide
  Antisense strand to SEQ ID NO: 2549604
agaguuacuaacuucucca

SEQ ID NO: 2549606 - RNA, 19 nt, Artificial Sequence
  Description of Artificial Sequence: Synthetic oligonucleotide
  Sense strand starting at position 2795 of SEQ ID NO: 1888682
gucucuguugucggcuaaa

SEQ ID NO: 2549607 - RNA, 19 nt, Artificial Sequence
  Description of Artificial Sequence: Synthetic oligonucleotide
  Antisense strand to SEQ ID NO: 2549606
uuuagccgacaacagagac

SEQ ID NO: 2549608 - RNA, 19 nt, Artificial Sequence
  Description of Artificial Sequence: Synthetic oligonucleotide
  Sense strand starting at position 2955 of SEQ ID NO: 1888682
acaugcuccuuggagaagu

SEQ ID NO: 2549609 - RNA, 19 nt, Artificial Sequence
  Description of Artificial Sequence: Synthetic oligonucleotide
  Antisense strand to SEQ ID NO: 2549608
acuucuccaaggagcaugu

SEQ ID NO: 2549610 - RNA, 19 nt, Artificial Sequence
  Description of Artificial Sequence: Synthetic oligonucleotide
  Sense strand starting at position 1312 of SEQ ID NO: 1888682
gcagcugcgucuucacgua

SEQ ID NO: 2549611 - RNA, 19 nt, Artificial Sequence
  Description of Artificial Sequence: Synthetic oligonucleotide
  Antisense strand to SEQ ID NO: 2549610
uacgugaagacgcagcugc

SEQ ID NO: 2549612 - RNA, 19 nt, Artificial Sequence
  Description of Artificial Sequence: Synthetic oligonucleotide
  Sense strand starting at position 2473 of SEQ ID NO: 1888682
gcuguauucuccuaggcag

SEQ ID NO: 2549613 - RNA, 19 nt, Artificial Sequence
  Description of Artificial Sequence: Synthetic oligonucleotide
  Antisense strand to SEQ ID NO: 2549612
cugccuaggagaauacagc

SEQ ID NO: 2549614 - RNA, 19 nt, Artificial Sequence
  Description of Artificial Sequence: Synthetic oligonucleotide
  Sense strand starting at position 316 of SEQ ID NO: 1888682
gaggucuggucguggauga

SEQ ID NO: 2549615 - RNA, 19 nt, Artificial Sequence
  Description of Artificial Sequence: Synthetic oligonucleotide
  Antisense strand to SEQ ID NO: 2549614
ucauccacgaccagaccuc

SEQ ID NO: 2549616 - RNA, 19 nt, Artificial Sequence
  Description of Artificial Sequence: Synthetic oligonucleotide
  Sense strand starting at position 253 of SEQ ID NO: 1888682
ucaccuuguucccgcacaa

SEQ ID NO: 2549617 - RNA, 19 nt, Artificial Sequence
  Description of Artificial Sequence: Synthetic oligonucleotide
  Antisense strand to SEQ ID NO: 2549616
uugugcgggaacaagguga

SEQ ID NO: 2549618 - RNA, 19 nt, Artificial Sequence
  Description of Artificial Sequence: Synthetic oligonucleotide
  Sense strand starting at position 2866 of SEQ ID NO: 1888682
cucagagguugccgucauu

SEQ ID NO: 2549619 - RNA, 19 nt, Artificial Sequence
  Description of Artificial Sequence: Synthetic oligonucleotide
  Antisense strand to SEQ ID NO: 2549618
aaugacggcaaccucugag

SEQ ID NO: 2549620 - RNA, 19 nt, Artificial Sequence
  Description of Artificial Sequence: Synthetic oligonucleotide
  Sense strand starting at position 2920 of SEQ ID NO: 1888683
gaaucaugacgugaaagug

SEQ ID NO: 2549621 - RNA, 19 nt, Artificial Sequence
  Description of Artificial Sequence: Synthetic oligonucleotide
  Antisense strand to SEQ ID NO: 2549620
cacuuucacgucaugauuc

SEQ ID NO: 2549622 - RNA, 19 nt, Artificial Sequence
  Description of Artificial Sequence: Synthetic oligonucleotide
  Sense strand starting at position 2698 of SEQ ID NO: 1888683
cagggauucuuuccugaga

SEQ ID NO: 2549623 - RNA, 19 nt, Artificial Sequence
  Description of Artificial Sequence: Synthetic oligonucleotide
  Antisense strand to SEQ ID NO: 2549622
ucucaggaaagaaucccug

SEQ ID NO: 2549624 - RNA, 19 nt, Artificial Sequence
  Description of Artificial Sequence: Synthetic oligonucleotide
  Sense strand starting at position 2440 of SEQ ID NO: 1888683
cuaguuggcaacuauggaa

SEQ ID NO: 2549625 - RNA, 19 nt, Artificial Sequence
  Description of Artificial Sequence: Synthetic oligonucleotide
  Antisense strand to SEQ ID NO: 2549624
uuccauaguugccaacuag

SEQ ID NO: 2549626 - RNA, 19 nt, Artificial Sequence
  Description of Artificial Sequence: Synthetic oligonucleotide
  Sense strand starting at position 2345 of SEQ ID NO: 1888683
ggaaacuucuuccuccaga

SEQ ID NO: 2549627 - RNA, 19 nt, Artificial Sequence
  Description of Artificial Sequence: Synthetic oligonucleotide
  Antisense strand to SEQ ID NO: 2549626
ucuggaggaagaaguuucc

SEQ ID NO: 2549628 - RNA, 19 nt, Artificial Sequence
  Description of Artificial Sequence: Synthetic oligonucleotide
  Sense strand starting at position 2753 of SEQ ID NO: 1888683
gaauauccucgugauaacu

SEQ ID NO: 2549629 - RNA, 19 nt, Artificial Sequence
  Description of Artificial Sequence: Synthetic oligonucleotide
  Antisense strand to SEQ ID NO: 2549628
aguuaucacgaggauauuc

SEQ ID NO: 2549630 - RNA, 19 nt, Artificial Sequence
  Description of Artificial Sequence: Synthetic oligonucleotide
  Sense strand starting at position 2485 of SEQ ID NO: 1888683
gugaaaugacaauguacua

SEQ ID NO: 2549631 - RNA, 19 nt, Artificial Sequence
  Description of Artificial Sequence: Synthetic oligonucleotide
  Antisense strand to SEQ ID NO: 2549630
uaguacauugucauuucac

SEQ ID NO: 2549632 - RNA, 19 nt, Artificial Sequence
  Description of Artificial Sequence: Synthetic oligonucleotide
  Sense strand starting at position 1419 of SEQ ID NO: 1888683
gaagcaugugacuaagcaa

SEQ ID NO: 2549633 - RNA, 19 nt, Artificial Sequence
  Description of Artificial Sequence: Synthetic oligonucleotide
  Antisense strand to SEQ ID NO: 2549632
uugcuuagucacaugcuuc

SEQ ID NO: 2549634 - RNA, 19 nt, Artificial Sequence
  Description of Artificial Sequence: Synthetic oligonucleotide
  Sense strand starting at position 2333 of SEQ ID NO: 1888683
acuuguggacuuggaaacu

SEQ ID NO: 2549635 - RNA, 19 nt, Artificial Sequence
  Description of Artificial Sequence: Synthetic oligonucleotide
  Antisense strand to SEQ ID NO: 2549634
aguuuccaaguccacaagu

SEQ ID NO: 2549636 - RNA, 19 nt, Artificial Sequence
  Description of Artificial Sequence: Synthetic oligonucleotide
  Sense strand starting at position 3329 of SEQ ID NO: 1888683
agaacucaguucucauuga

SEQ ID NO: 2549637 - RNA, 19 nt, Artificial Sequence
  Description of Artificial Sequence: Synthetic oligonucleotide
  Antisense strand to SEQ ID NO: 2549636
ucaaugagaacugaguucu

SEQ ID NO: 2549638 - RNA, 19 nt, Artificial Sequence
  Description of Artificial Sequence: Synthetic oligonucleotide
  Sense strand starting at position 2522 of SEQ ID NO: 1888683
ugcugugaggauuacgaaa

SEQ ID NO: 2549639 - RNA, 19 nt, Artificial Sequence
  Description of Artificial Sequence: Synthetic oligonucleotide
  Antisense strand to SEQ ID NO: 2549638
uuucguaauccucacagca

SEQ ID NO: 2549640 - RNA, 19 nt, Artificial Sequence
  Description of Artificial Sequence: Synthetic oligonucleotide
  Sense strand starting at position 3386 of SEQ ID NO: 1888683
uggauuaugcaucauaguu

SEQ ID NO: 2549641 - RNA, 19 nt, Artificial Sequence
  Description of Artificial Sequence: Synthetic oligonucleotide
  Antisense strand to SEQ ID NO: 2549640
aacuaugaugcauaaucca

SEQ ID NO: 2549642 - RNA, 19 nt, Artificial Sequence
  Description of Artificial Sequence: Synthetic oligonucleotide
  Sense strand starting at position 2677 of SEQ ID NO: 1888683
ucaggaugcuccucaggga

SEQ ID NO: 2549643 - RNA, 19 nt, Artificial Sequence
  Description of Artificial Sequence: Synthetic oligonucleotide
  Antisense strand to SEQ ID NO: 2549642
ucccugaggagcauccuga

SEQ ID NO: 2549644 - RNA, 19 nt, Artificial Sequence
  Description of Artificial Sequence: Synthetic oligonucleotide
  Sense strand starting at position 2919 of SEQ ID NO: 1888683
agaaucaugacgugaaagu

SEQ ID NO: 2549645 - RNA, 19 nt, Artificial Sequence
  Description of Artificial Sequence: Synthetic oligonucleotide
  Antisense strand to SEQ ID NO: 2549644
acuuucacgucaugauucu

SEQ ID NO: 2549646 - RNA, 19 nt, Artificial Sequence
  Description of Artificial Sequence: Synthetic oligonucleotide
  Sense strand starting at position 734 of SEQ ID NO: 1888683
gaaguuucuggaggcuaaa

SEQ ID NO: 2549647 - RNA, 19 nt, Artificial Sequence
  Description of Artificial Sequence: Synthetic oligonucleotide
  Antisense strand to SEQ ID NO: 2549646
uuuagccuccagaaacuuc

SEQ ID NO: 2549648 - RNA, 19 nt, Artificial Sequence
  Description of Artificial Sequence: Synthetic oligonucleotide
  Sense strand starting at position 355 of SEQ ID NO: 1888683
aaagguaaaucagcaaguu

SEQ ID NO: 2549649 - RNA, 19 nt, Artificial Sequence
  Description of Artificial Sequence: Synthetic oligonucleotide
  Antisense strand to SEQ ID NO: 2549648
aacuugcugauuuaccuuu

SEQ ID NO: 2549650 - RNA, 19 nt, Artificial Sequence
  Description of Artificial Sequence: Synthetic oligonucleotide
  Sense strand starting at position 225 of SEQ ID NO: 1888683
ggucaaugaucacuucuac

SEQ ID NO: 2549651 - RNA, 19 nt, Artificial Sequence
  Description of Artificial Sequence: Synthetic oligonucleotide
  Antisense strand to SEQ ID NO: 2549650
guagaagugaucauugacc

SEQ ID NO: 2549652 - RNA, 19 nt, Artificial Sequence
  Description of Artificial Sequence: Synthetic oligonucleotide
  Sense strand starting at position 1499 of SEQ ID NO: 1888683
guagccugaccuuaaacuu

SEQ ID NO: 2549653 - RNA, 19 nt, Artificial Sequence
  Description of Artificial Sequence: Synthetic oligonucleotide
  Antisense strand to SEQ ID NO: 2549652
aaguuuaaggucaggcuac

SEQ ID NO: 2549654 - RNA, 19 nt, Artificial Sequence
  Description of Artificial Sequence: Synthetic oligonucleotide
  Sense strand starting at position 607 of SEQ ID NO: 1888683
cugugagguagguaucacu

SEQ ID NO: 2549655 - RNA, 19 nt, Artificial Sequence
  Description of Artificial Sequence: Synthetic oligonucleotide
  Antisense strand to SEQ ID NO: 2549654
agugauaccuaccucacag

SEQ ID NO: 2549656 - RNA, 19 nt, Artificial Sequence
  Description of Artificial Sequence: Synthetic oligonucleotide
  Sense strand starting at position 2597 of SEQ ID NO: 1888683
guugcaaagugacuaacaa

SEQ ID NO: 2549657 - RNA, 19 nt, Artificial Sequence
  Description of Artificial Sequence: Synthetic oligonucleotide
  Antisense strand to SEQ ID NO: 2549656
uuguuagucacuuugcaac

SEQ ID NO: 2549658 - RNA, 19 nt, Artificial Sequence
  Description of Artificial Sequence: Synthetic oligonucleotide
  Sense strand starting at position 1077 of SEQ ID NO: 1888683
aaucgagaggaucguuuga

SEQ ID NO: 2549659 - RNA, 19 nt, Artificial Sequence
  Description of Artificial Sequence: Synthetic oligonucleotide
  Antisense strand to SEQ ID NO: 2549658
ucaaacgauccucucgauu

SEQ ID NO: 2549660 - RNA, 19 nt, Artificial Sequence
  Description of Artificial Sequence: Synthetic oligonucleotide
  Sense strand starting at position 2750 of SEQ ID NO: 1888683
uuagaauauccucgugaua

SEQ ID NO: 2549661 - RNA, 19 nt, Artificial Sequence
  Description of Artificial Sequence: Synthetic oligonucleotide
  Antisense strand to SEQ ID NO: 2549660
uaucacgaggauauucuaa

SEQ ID NO: 2549662 - RNA, 19 nt, Artificial Sequence
  Description of Artificial Sequence: Synthetic oligonucleotide
  Sense strand starting at position 3305 of SEQ ID NO: 1888683
gaaacuaguuggcuguaaa

SEQ ID NO: 2549663 - RNA, 19 nt, Artificial Sequence
  Description of Artificial Sequence: Synthetic oligonucleotide
  Antisense strand to SEQ ID NO: 2549662
uuuacagccaacuaguuuc

SEQ ID NO: 2549664 - RNA, 19 nt, Artificial Sequence
  Description of Artificial Sequence: Synthetic oligonucleotide
  Sense strand starting at position 3304 of SEQ ID NO: 1888683
agaaacuaguuggcuguaa

SEQ ID NO: 2549665 - RNA, 19 nt, Artificial Sequence
  Description of Artificial Sequence: Synthetic oligonucleotide
  Antisense strand to SEQ ID NO: 2549664
uuacagccaacuaguuucu

SEQ ID NO: 2549666 - RNA, 19 nt, Artificial Sequence
  Description of Artificial Sequence: Synthetic oligonucleotide
  Sense strand starting at position 342 of SEQ ID NO: 1888683
ggugaucacguuuaaaggu

SEQ ID NO: 2549667 - RNA, 19 nt, Artificial Sequence
  Description of Artificial Sequence: Synthetic oligonucleotide
  Antisense strand to SEQ ID NO: 2549666
accuuuaaacgugaucacc

SEQ ID NO: 2549668 - RNA, 19 nt, Artificial Sequence
  Description of Artificial Sequence: Synthetic oligonucleotide
  Sense strand starting at position 3366 of SEQ ID NO: 1888683
gcuugcugucaagaauaua

SEQ ID NO: 2549669 - RNA, 19 nt, Artificial Sequence
  Description of Artificial Sequence: Synthetic oligonucleotide
  Antisense strand to SEQ ID NO: 2549668
uauauucuugacagcaagc

SEQ ID NO: 2549670 - RNA, 19 nt, Artificial Sequence
  Description of Artificial Sequence: Synthetic oligonucleotide
  Sense strand starting at position 598 of SEQ ID NO: 1888683
cucuaaacucugugaggua

SEQ ID NO: 2549671 - RNA, 19 nt, Artificial Sequence
  Description of Artificial Sequence: Synthetic oligonucleotide
  Antisense strand to SEQ ID NO: 2549670
uaccucacagaguuuagag

SEQ ID NO: 2549672 - RNA, 19 nt, Artificial Sequence
  Description of Artificial Sequence: Synthetic oligonucleotide
  Sense strand starting at position 762 of SEQ ID NO: 1888683
cagugauguuccucugaag

SEQ ID NO: 2549673 - RNA, 19 nt, Artificial Sequence
  Description of Artificial Sequence: Synthetic oligonucleotide
  Antisense strand to SEQ ID NO: 2549672
cuucagaggaacaucacug

SEQ ID NO: 2549674 - RNA, 19 nt, Artificial Sequence
  Description of Artificial Sequence: Synthetic oligonucleotide
  Sense strand starting at position 2664 of SEQ ID NO: 1888683
gugagauucugcuucagga

SEQ ID NO: 2549675 - RNA, 19 nt, Artificial Sequence
  Description of Artificial Sequence: Synthetic oligonucleotide
  Antisense strand to SEQ ID NO: 2549674
uccugaagcagaaucucac

SEQ ID NO: 2549676 - RNA, 19 nt, Artificial Sequence
  Description of Artificial Sequence: Synthetic oligonucleotide
  Sense strand starting at position 1510 of SEQ ID NO: 1888683
uuaaacuucccacggcaaa

SEQ ID NO: 2549677 - RNA, 19 nt, Artificial Sequence
  Description of Artificial Sequence: Synthetic oligonucleotide
  Antisense strand to SEQ ID NO: 2549676
uuugccgugggaaguuuaa

SEQ ID NO: 2549678 - RNA, 19 nt, Artificial Sequence
  Description of Artificial Sequence: Synthetic oligonucleotide
  Sense strand starting at position 722 of SEQ ID NO: 1888683
ugagcucucagugaaguuu

SEQ ID NO: 2549679 - RNA, 19 nt, Artificial Sequence
  Description of Artificial Sequence: Synthetic oligonucleotide
  Antisense strand to SEQ ID NO: 2549678
aaacuucacugagagcuca

SEQ ID NO: 2549680 - RNA, 19 nt, Artificial Sequence
  Description of Artificial Sequence: Synthetic oligonucleotide
  Sense strand starting at position 809 of SEQ ID NO: 1888683
gugcuaacaacuggugaag

SEQ ID NO: 2549681 - RNA, 19 nt, Artificial Sequence
  Description of Artificial Sequence: Synthetic oligonucleotide
  Antisense strand to SEQ ID NO: 2549680
cuucaccaguuguuagcac

SEQ ID NO: 2549682 - RNA, 19 nt, Artificial Sequence
  Description of Artificial Sequence: Synthetic oligonucleotide
  Sense strand starting at position 2749 of SEQ ID NO: 1888683
uuuagaauauccucgugau

SEQ ID NO: 2549683 - RNA, 19 nt, Artificial Sequence
  Description of Artificial Sequence: Synthetic oligonucleotide
  Antisense strand to SEQ ID NO: 2549682
aucacgaggauauucuaaa

SEQ ID NO: 2549684 - RNA, 19 nt, Artificial Sequence
  Description of Artificial Sequence: Synthetic oligonucleotide
  Sense strand starting at position 2765 of SEQ ID NO: 1888683
gauaacuccucagugcuga

SEQ ID NO: 2549685 - RNA, 19 nt, Artificial Sequence
  Description of Artificial Sequence: Synthetic oligonucleotide
  Antisense strand to SEQ ID NO: 2549684
ucagcacugaggaguuauc

SEQ ID NO: 2549686 - RNA, 19 nt, Artificial Sequence
  Description of Artificial Sequence: Synthetic oligonucleotide
  Sense strand starting at position 2474 of SEQ ID NO: 1888683
ggguuuccucugugaaaug

SEQ ID NO: 2549687 - RNA, 19 nt, Artificial Sequence
  Description of Artificial Sequence: Synthetic oligonucleotide
  Antisense strand to SEQ ID NO: 2549686
cauuucacagaggaaaccc

SEQ ID NO: 2549688 - RNA, 19 nt, Artificial Sequence
  Description of Artificial Sequence: Synthetic oligonucleotide
  Sense strand starting at position 597 of SEQ ID NO: 1888683
ucucuaaacucugugaggu

SEQ ID NO: 2549689 - RNA, 19 nt, Artificial Sequence
  Description of Artificial Sequence: Synthetic oligonucleotide
  Antisense strand to SEQ ID NO: 2549688
accucacagaguuuagaga

SEQ ID NO: 2549690 - RNA, 19 nt, Artificial Sequence
  Description of Artificial Sequence: Synthetic oligonucleotide
  Sense strand starting at position 2653 of SEQ ID NO: 1888683
ccugucauacugugagauu

SEQ ID NO: 2549691 - RNA, 19 nt, Artificial Sequence
  Description of Artificial Sequence: Synthetic oligonucleotide
  Antisense strand to SEQ ID NO: 2549690
aaucucacaguaugacagg

SEQ ID NO: 2549692 - RNA, 19 nt, Artificial Sequence
  Description of Artificial Sequence: Synthetic oligonucleotide
  Sense strand starting at position 2763 of SEQ ID NO: 1888683
gugauaacuccucagugcu

SEQ ID NO: 2549693 - RNA, 19 nt, Artificial Sequence
  Description of Artificial Sequence: Synthetic oligonucleotide
  Antisense strand to SEQ ID NO: 2549692
agcacugaggaguuaucac

SEQ ID NO: 2549694 - RNA, 19 nt, Artificial Sequence
  Description of Artificial Sequence: Synthetic oligonucleotide
  Sense strand starting at position 2473 of SEQ ID NO: 1888683
uggguuuccucugugaaau

SEQ ID NO: 2549695 - RNA, 19 nt, Artificial Sequence
  Description of Artificial Sequence: Synthetic oligonucleotide
  Antisense strand to SEQ ID NO: 2549694
auuucacagaggaaaccca

SEQ ID NO: 2549696 - RNA, 19 nt, Artificial Sequence
  Description of Artificial Sequence: Synthetic oligonucleotide
  Sense strand starting at position 3983 of SEQ ID NO: 1888683
ugacgcgaucuugacucau

SEQ ID NO: 2549697 - RNA, 19 nt, Artificial Sequence
  Description of Artificial Sequence: Synthetic oligonucleotide
  Antisense strand to SEQ ID NO: 2549696
augagucaagaucgcguca

SEQ ID NO: 2549698 - RNA, 19 nt, Artificial Sequence
  Description of Artificial Sequence: Synthetic oligonucleotide
  Sense strand starting at position 808 of SEQ ID NO: 1888683
ugugcuaacaacuggugaa

SEQ ID NO: 2549699 - RNA, 19 nt, Artificial Sequence
  Description of Artificial Sequence: Synthetic oligonucleotide
  Antisense strand to SEQ ID NO: 2549698
uucaccaguuguuagcaca

SEQ ID NO: 2549700 - RNA, 19 nt, Artificial Sequence
  Description of Artificial Sequence: Synthetic oligonucleotide
  Sense strand starting at position 843 of SEQ ID NO: 1888684
cgcagugagcguuugagag

SEQ ID NO: 2549701 - RNA, 19 nt, Artificial Sequence
  Description of Artificial Sequence: Synthetic oligonucleotide
  Antisense strand to SEQ ID NO: 2549700
cucucaaacgcucacugcg

SEQ ID NO: 2549702 - RNA, 19 nt, Artificial Sequence
  Description of Artificial Sequence: Synthetic oligonucleotide
  Sense strand starting at position 2235 of SEQ ID NO: 1888684
uguuaaugagaucaguuac

SEQ ID NO: 2549703 - RNA, 19 nt, Artificial Sequence
  Description of Artificial Sequence: Synthetic oligonucleotide
  Antisense strand to SEQ ID NO: 2549702
guaacugaucucauuaaca

SEQ ID NO: 2549704 - RNA, 19 nt, Artificial Sequence
  Description of Artificial Sequence: Synthetic oligonucleotide
  Sense strand starting at position 957 of SEQ ID NO: 1888684
gggacuaaggccugagacu

SEQ ID NO: 2549705 - RNA, 19 nt, Artificial Sequence
  Description of Artificial Sequence: Synthetic oligonucleotide
  Antisense strand to SEQ ID NO: 2549704
agucucaggccuuaguccc

SEQ ID NO: 2549706 - RNA, 19 nt, Artificial Sequence
  Description of Artificial Sequence: Synthetic oligonucleotide
  Sense strand starting at position 2272 of SEQ ID NO: 1888684
gguaaaccauucuugaauu

SEQ ID NO: 2549707 - RNA, 19 nt, Artificial Sequence
  Description of Artificial Sequence: Synthetic oligonucleotide
  Antisense strand to SEQ ID NO: 2549706
aauucaagaaugguuuacc

SEQ ID NO: 2549708 - RNA, 19 nt, Artificial Sequence
  Description of Artificial Sequence: Synthetic oligonucleotide
  Sense strand starting at position 2218 of SEQ ID NO: 1888684
gguauucuccuuuaaucug

SEQ ID NO: 2549709 - RNA, 19 nt, Artificial Sequence
  Description of Artificial Sequence: Synthetic oligonucleotide
  Antisense strand to SEQ ID NO: 2549708
cagauuaaaggagaauacc

SEQ ID NO: 2549710 - RNA, 19 nt, Artificial Sequence
  Description of Artificial Sequence: Synthetic oligonucleotide
  Sense strand starting at position 2301 of SEQ ID NO: 1888684
acgcaacuuggucauaaua

SEQ ID NO: 2549711 - RNA, 19 nt, Artificial Sequence
  Description of Artificial Sequence: Synthetic oligonucleotide
  Antisense strand to SEQ ID NO: 2549710
uauuaugaccaaguugcgu

SEQ ID NO: 2549712 - RNA, 19 nt, Artificial Sequence
  Description of Artificial Sequence: Synthetic oligonucleotide
  Sense strand starting at position 850 of SEQ ID NO: 1888684
agcguuugagaggagcaaa

SEQ ID NO: 2549713 - RNA, 19 nt, Artificial Sequence
  Description of Artificial Sequence: Synthetic oligonucleotide
  Antisense strand to SEQ ID NO: 2549712
uuugcuccucucaaacgcu

SEQ ID NO: 2549714 - RNA, 19 nt, Artificial Sequence
  Description of Artificial Sequence: Synthetic oligonucleotide
  Sense strand starting at position 842 of SEQ ID NO: 1888684
gcgcagugagcguuugaga

SEQ ID NO: 2549715 - RNA, 19 nt, Artificial Sequence
  Description of Artificial Sequence: Synthetic oligonucleotide
  Antisense strand to SEQ ID NO: 2549714
ucucaaacgcucacugcgc

SEQ ID NO: 2549716 - RNA, 19 nt, Artificial Sequence
  Description of Artificial Sequence: Synthetic oligonucleotide
  Sense strand starting at position 114 of SEQ ID NO: 1888684
uuuaaauaaggcugucaag

SEQ ID NO: 2549717 - RNA, 19 nt, Artificial Sequence
  Description of Artificial Sequence: Synthetic oligonucleotide
  Antisense strand to SEQ ID NO: 2549716
cuugacagccuuauuuaaa

SEQ ID NO: 2549718 - RNA, 19 nt, Artificial Sequence
  Description of Artificial Sequence: Synthetic oligonucleotide
  Sense strand starting at position 407 of SEQ ID NO: 1888684
ggcugaucggcagaggauu

SEQ ID NO: 2549719 - RNA, 19 nt, Artificial Sequence
  Description of Artificial Sequence: Synthetic oligonucleotide
  Antisense strand to SEQ ID NO: 2549718
aauccucugccgaucagcc

SEQ ID NO: 2549720 - RNA, 19 nt, Artificial Sequence
  Description of Artificial Sequence: Synthetic oligonucleotide
  Sense strand starting at position 946 of SEQ ID NO: 1888684
aaacgauggccgggacuaa

SEQ ID NO: 2549721 - RNA, 19 nt, Artificial Sequence
  Description of Artificial Sequence: Synthetic oligonucleotide
  Antisense strand to SEQ ID NO: 2549720
uuagucccggccaucguuu

SEQ ID NO: 2549722 - RNA, 19 nt, Artificial Sequence
  Description of Artificial Sequence: Synthetic oligonucleotide
  Sense strand starting at position 928 of SEQ ID NO: 1888684
gaggguucgcgcaacgcua

SEQ ID NO: 2549723 - RNA, 19 nt, Artificial Sequence
  Description of Artificial Sequence: Synthetic oligonucleotide
  Antisense strand to SEQ ID NO: 2549722
uagcguugcgcgaacccuc

SEQ ID NO: 2549724 - RNA, 19 nt, Artificial Sequence
  Description of Artificial Sequence: Synthetic oligonucleotide
  Sense strand starting at position 2299 of SEQ ID NO: 1888684
agacgcaacuuggucauaa

SEQ ID NO: 2549725 - RNA, 19 nt, Artificial Sequence
  Description of Artificial Sequence: Synthetic oligonucleotide
  Antisense strand to SEQ ID NO: 2549724
uuaugaccaaguugcgucu

SEQ ID NO: 2549726 - RNA, 19 nt, Artificial Sequence
  Description of Artificial Sequence: Synthetic oligonucleotide
  Sense strand starting at position 622 of SEQ ID NO: 1888684
uccgcaaucccucaucuga

SEQ ID NO: 2549727 - RNA, 19 nt, Artificial Sequence
  Description of Artificial Sequence: Synthetic oligonucleotide
  Antisense strand to SEQ ID NO: 2549726
ucagaugagggauugcgga

SEQ ID NO: 2549728 - RNA, 19 nt, Artificial Sequence
  Description of Artificial Sequence: Synthetic oligonucleotide
  Sense strand starting at position 2216 of SEQ ID NO: 1888684
uggguauucuccuuuaauc

SEQ ID NO: 2549729 - RNA, 19 nt, Artificial Sequence
  Description of Artificial Sequence: Synthetic oligonucleotide
  Antisense strand to SEQ ID NO: 2549728
gauuaaaggagaauaccca

SEQ ID NO: 2549730 - RNA, 19 nt, Artificial Sequence
  Description of Artificial Sequence: Synthetic oligonucleotide
  Sense strand starting at position 2058 of SEQ ID NO: 1888684
agcucuauugcucagacuu

SEQ ID NO: 2549731 - RNA, 19 nt, Artificial Sequence
  Description of Artificial Sequence: Synthetic oligonucleotide
  Antisense strand to SEQ ID NO: 2549730
aagucugagcaauagagcu

SEQ ID NO: 2549732 - RNA, 19 nt, Artificial Sequence
  Description of Artificial Sequence: Synthetic oligonucleotide
  Sense strand starting at position 624 of SEQ ID NO: 1888684
cgcaaucccucaucugaaa

SEQ ID NO: 2549733 - RNA, 19 nt, Artificial Sequence
  Description of Artificial Sequence: Synthetic oligonucleotide
  Antisense strand to SEQ ID NO: 2549732
uuucagaugagggauugcg

SEQ ID NO: 2549734 - RNA, 19 nt, Artificial Sequence
  Description of Artificial Sequence: Synthetic oligonucleotide
  Sense strand starting at position 166 of SEQ ID NO: 1888684
gggaaugugccaugcaaau

SEQ ID NO: 2549735 - RNA, 19 nt, Artificial Sequence
  Description of Artificial Sequence: Synthetic oligonucleotide
  Antisense strand to SEQ ID NO: 2549734
auuugcauggcacauuccc

SEQ ID NO: 2549736 - RNA, 19 nt, Artificial Sequence
  Description of Artificial Sequence: Synthetic oligonucleotide
  Sense strand starting at position 2300 of SEQ ID NO: 1888684
gacgcaacuuggucauaau

SEQ ID NO: 2549737 - RNA, 19 nt, Artificial Sequence
  Description of Artificial Sequence: Synthetic oligonucleotide
  Antisense strand to SEQ ID NO: 2549736
auuaugaccaaguugcguc

SEQ ID NO: 2549738 - RNA, 19 nt, Artificial Sequence
  Description of Artificial Sequence: Synthetic oligonucleotide
  Sense strand starting at position 849 of SEQ ID NO: 1888684
gagcguuugagaggagcaa

SEQ ID NO: 2549739 - RNA, 19 nt, Artificial Sequence
  Description of Artificial Sequence: Synthetic oligonucleotide
  Antisense strand to SEQ ID NO: 2549738
uugcuccucucaaacgcuc

SEQ ID NO: 2549740 - RNA, 19 nt, Artificial Sequence
  Description of Artificial Sequence: Synthetic oligonucleotide
  Sense strand starting at position 561 of SEQ ID NO: 1888684
uugaacauuugacgacuua

SEQ ID NO: 2549741 - RNA, 19 nt, Artificial Sequence
  Description of Artificial Sequence: Synthetic oligonucleotide
  Antisense strand to SEQ ID NO: 2549740
uaagucgucaaauguucaa

SEQ ID NO: 2549742 - RNA, 19 nt, Artificial Sequence
  Description of Artificial Sequence: Synthetic oligonucleotide
  Sense strand starting at position 55 of SEQ ID NO: 1888684
cuauuagaucccugcagcu

SEQ ID NO: 2549743 - RNA, 19 nt, Artificial Sequence
  Description of Artificial Sequence: Synthetic oligonucleotide
  Antisense strand to SEQ ID NO: 2549742
agcugcagggaucuaauag

SEQ ID NO: 2549744 - RNA, 19 nt, Artificial Sequence
  Description of Artificial Sequence: Synthetic oligonucleotide
  Sense strand starting at position 2040 of SEQ ID NO: 1888684
ugugaugggcacuguagua

SEQ ID NO: 2549745 - RNA, 19 nt, Artificial Sequence
  Description of Artificial Sequence: Synthetic oligonucleotide
  Antisense strand to SEQ ID NO: 2549744
uacuacagugcccaucaca

SEQ ID NO: 2549746 - RNA, 19 nt, Artificial Sequence
  Description of Artificial Sequence: Synthetic oligonucleotide
  Sense strand starting at position 72 of SEQ ID NO: 1888684
cuucgaacuccugggcgau

SEQ ID NO: 2549747 - RNA, 19 nt, Artificial Sequence
  Description of Artificial Sequence: Synthetic oligonucleotide
  Antisense strand to SEQ ID NO: 2549746
aucgcccaggaguucgaag

SEQ ID NO: 2549748 - RNA, 19 nt, Artificial Sequence
  Description of Artificial Sequence: Synthetic oligonucleotide
  Sense strand starting at position 117 of SEQ ID NO: 1888684
aaauaaggcugucaaggaa

SEQ ID NO: 2549749 - RNA, 19 nt, Artificial Sequence
  Description of Artificial Sequence: Synthetic oligonucleotide
  Antisense strand to SEQ ID NO: 2549748
uuccuugacagccuuauuu

SEQ ID NO: 2549750 - RNA, 19 nt, Artificial Sequence
  Description of Artificial Sequence: Synthetic oligonucleotide
  Sense strand starting at position 2241 of SEQ ID NO: 1888684
ugagaucaguuacaucaau

SEQ ID NO: 2549751 - RNA, 19 nt, Artificial Sequence
  Description of Artificial Sequence: Synthetic oligonucleotide
  Antisense strand to SEQ ID NO: 2549750
auugauguaacugaucuca

SEQ ID NO: 2549752 - RNA, 19 nt, Artificial Sequence
  Description of Artificial Sequence: Synthetic oligonucleotide
  Sense strand starting at position 491 of SEQ ID NO: 1888684
ggcguaaacaccugccuau

SEQ ID NO: 2549753 - RNA, 19 nt, Artificial Sequence
  Description of Artificial Sequence: Synthetic oligonucleotide
  Antisense strand to SEQ ID NO: 2549752
auaggcagguguuuacgcc

SEQ ID NO: 2549754 - RNA, 19 nt, Artificial Sequence
  Description of Artificial Sequence: Synthetic oligonucleotide
  Sense strand starting at position 47 of SEQ ID NO: 1888684
gugagauccuauuagaucc

SEQ ID NO: 2549755 - RNA, 19 nt, Artificial Sequence
  Description of Artificial Sequence: Synthetic oligonucleotide
  Antisense strand to SEQ ID NO: 2549754
ggaucuaauaggaucucac

SEQ ID NO: 2549756 - RNA, 19 nt, Artificial Sequence
  Description of Artificial Sequence: Synthetic oligonucleotide
  Sense strand starting at position 651 of SEQ ID NO: 1888684
cugggcaaguaugagaauu

SEQ ID NO: 2549757 - RNA, 19 nt, Artificial Sequence
  Description of Artificial Sequence: Synthetic oligonucleotide
  Antisense strand to SEQ ID NO: 2549756
aauucucauacuugcccag

SEQ ID NO: 2549758 - RNA, 19 nt, Artificial Sequence
  Description of Artificial Sequence: Synthetic oligonucleotide
  Sense strand starting at position 2226 of SEQ ID NO: 1888684
ccuuuaaucuguuaaugag

SEQ ID NO: 2549759 - RNA, 19 nt, Artificial Sequence
  Description of Artificial Sequence: Synthetic oligonucleotide
  Antisense strand to SEQ ID NO: 2549758
cucauuaacagauuaaagg

SEQ ID NO: 2549760 - RNA, 19 nt, Artificial Sequence
  Description of Artificial Sequence: Synthetic oligonucleotide
  Sense strand starting at position 2232 of SEQ ID NO: 1888684
aucuguuaaugagaucagu

SEQ ID NO: 2549761 - RNA, 19 nt, Artificial Sequence
  Description of Artificial Sequence: Synthetic oligonucleotide
  Antisense strand to SEQ ID NO: 2549760
acugaucucauuaacagau

SEQ ID NO: 2549762 - RNA, 19 nt, Artificial Sequence
  Description of Artificial Sequence: Synthetic oligonucleotide
  Sense strand starting at position 2205 of SEQ ID NO: 1888684
agaugaucauauggguauu

SEQ ID NO: 2549763 - RNA, 19 nt, Artificial Sequence
  Description of Artificial Sequence: Synthetic oligonucleotide
  Antisense strand to SEQ ID NO: 2549762
aauacccauaugaucaucu

SEQ ID NO: 2549764 - RNA, 19 nt, Artificial Sequence
  Description of Artificial Sequence: Synthetic oligonucleotide
  Sense strand starting at position 2229 of SEQ ID NO: 1888684
uuaaucuguuaaugagauc

SEQ ID NO: 2549765 - RNA, 19 nt, Artificial Sequence
  Description of Artificial Sequence: Synthetic oligonucleotide
  Antisense strand to SEQ ID NO: 2549764
gaucucauuaacagauuaa

SEQ ID NO: 2549766 - RNA, 19 nt, Artificial Sequence
  Description of Artificial Sequence: Synthetic oligonucleotide
  Sense strand starting at position 2303 of SEQ ID NO: 1888684
gcaacuuggucauaauauu

SEQ ID NO: 2549767 - RNA, 19 nt, Artificial Sequence
  Description of Artificial Sequence: Synthetic oligonucleotide
  Antisense strand to SEQ ID NO: 2549766
aauauuaugaccaaguugc

SEQ ID NO: 2549768 - RNA, 19 nt, Artificial Sequence
  Description of Artificial Sequence: Synthetic oligonucleotide
  Sense strand starting at position 164 of SEQ ID NO: 1888684
gagggaaugugccaugcaa

SEQ ID NO: 2549769 - RNA, 19 nt, Artificial Sequence
  Description of Artificial Sequence: Synthetic oligonucleotide
  Antisense strand to SEQ ID NO: 2549768
uugcauggcacauucccuc

SEQ ID NO: 2549770 - RNA, 19 nt, Artificial Sequence
  Description of Artificial Sequence: Synthetic oligonucleotide
  Sense strand starting at position 2191 of SEQ ID NO: 1888684
ucgugcaucuauuaagaug

SEQ ID NO: 2549771 - RNA, 19 nt, Artificial Sequence
  Description of Artificial Sequence: Synthetic oligonucleotide
  Antisense strand to SEQ ID NO: 2549770
caucuuaauagaugcacga

SEQ ID NO: 2549772 - RNA, 19 nt, Artificial Sequence
  Description of Artificial Sequence: Synthetic oligonucleotide
  Sense strand starting at position 3509 of SEQ ID NO: 1888685
gagggaugccaugagcuaa

SEQ ID NO: 2549773 - RNA, 19 nt, Artificial Sequence
  Description of Artificial Sequence: Synthetic oligonucleotide
  Antisense strand to SEQ ID NO: 2549772
uuagcucauggcaucccuc

SEQ ID NO: 2549774 - RNA, 19 nt, Artificial Sequence
  Description of Artificial Sequence: Synthetic oligonucleotide
  Sense strand starting at position 1482 of SEQ ID NO: 1888685
gccugugcucugcccaaga

SEQ ID NO: 2549775 - RNA, 19 nt, Artificial Sequence
  Description of Artificial Sequence: Synthetic oligonucleotide
  Antisense strand to SEQ ID NO: 2549774
ucuugggcagagcacaggc

SEQ ID NO: 2549776 - RNA, 19 nt, Artificial Sequence
  Description of Artificial Sequence: Synthetic oligonucleotide
  Sense strand starting at position 3636 of SEQ ID NO: 1888685
uagaaacuggucugaccaa

SEQ ID NO: 2549777 - RNA, 19 nt, Artificial Sequence
  Description of Artificial Sequence: Synthetic oligonucleotide
  Antisense strand to SEQ ID NO: 2549776
uuggucagaccaguuucua

SEQ ID NO: 2549778 - RNA, 19 nt, Artificial Sequence
  Description of Artificial Sequence: Synthetic oligonucleotide
  Sense strand starting at position 3920 of SEQ ID NO: 1888685
gagcaaacaggaugaguua

SEQ ID NO: 2549779 - RNA, 19 nt, Artificial Sequence
  Description of Artificial Sequence: Synthetic oligonucleotide
  Antisense strand to SEQ ID NO: 2549778
uaacucauccuguuugcuc

SEQ ID NO: 2549780 - RNA, 19 nt, Artificial Sequence
  Description of Artificial Sequence: Synthetic oligonucleotide
  Sense strand starting at position 337 of SEQ ID NO: 1888685
aagagugucacugagcaga

SEQ ID NO: 2549781 - RNA, 19 nt, Artificial Sequence
  Description of Artificial Sequence: Synthetic oligonucleotide
  Antisense strand to SEQ ID NO: 2549780
ucugcucagugacacucuu

SEQ ID NO: 2549782 - RNA, 19 nt, Artificial Sequence
  Description of Artificial Sequence: Synthetic oligonucleotide
  Sense strand starting at position 1959 of SEQ ID NO: 1888685
cgugcucaggaagaagaau

SEQ ID NO: 2549783 - RNA, 19 nt, Artificial Sequence
  Description of Artificial Sequence: Synthetic oligonucleotide
  Antisense strand to SEQ ID NO: 2549782
auucuucuuccugagcacg

SEQ ID NO: 2549784 - RNA, 19 nt, Artificial Sequence
  Description of Artificial Sequence: Synthetic oligonucleotide
  Sense strand starting at position 2185 of SEQ ID NO: 1888685
agagcuggucccuaagaug

SEQ ID NO: 2549785 - RNA, 19 nt, Artificial Sequence
  Description of Artificial Sequence: Synthetic oligonucleotide
  Antisense strand to SEQ ID NO: 2549784
caucuuagggaccagcucu

SEQ ID NO: 2549786 - RNA, 19 nt, Artificial Sequence
  Description of Artificial Sequence: Synthetic oligonucleotide
  Sense strand starting at position 243 of SEQ ID NO: 1888685
guagaagacaucgauguug

SEQ ID NO: 2549787 - RNA, 19 nt, Artificial Sequence
  Description of Artificial Sequence: Synthetic oligonucleotide
  Antisense strand to SEQ ID NO: 2549786
caacaucgaugucuucuac

SEQ ID NO: 2549788 - RNA, 19 nt, Artificial Sequence
  Description of Artificial Sequence: Synthetic oligonucleotide
  Sense strand starting at position 100 of SEQ ID NO: 1888685
ccaucuggaccuugguaaa

SEQ ID NO: 2549789 - RNA, 19 nt, Artificial Sequence
  Description of Artificial Sequence: Synthetic oligonucleotide
  Antisense strand to SEQ ID NO: 2549788
uuuaccaagguccagaugg

SEQ ID NO: 2549790 - RNA, 19 nt, Artificial Sequence
  Description of Artificial Sequence: Synthetic oligonucleotide
  Sense strand starting at position 3788 of SEQ ID NO: 1888685
ggcagauaaauaugagcuu

SEQ ID NO: 2549791 - RNA, 19 nt, Artificial Sequence
  Description of Artificial Sequence: Synthetic oligonucleotide
  Antisense strand to SEQ ID NO: 2549790
aagcucauauuuaucugcc

SEQ ID NO: 2549792 - RNA, 19 nt, Artificial Sequence
  Description of Artificial Sequence: Synthetic oligonucleotide
  Sense strand starting at position 1217 of SEQ ID NO: 1888685
gauccucaugggugugaga

SEQ ID NO: 2549793 - RNA, 19 nt, Artificial Sequence
  Description of Artificial Sequence: Synthetic oligonucleotide
  Antisense strand to SEQ ID NO: 2549792
ucucacacccaugaggauc

SEQ ID NO: 2549794 - RNA, 19 nt, Artificial Sequence
  Description of Artificial Sequence: Synthetic oligonucleotide
  Sense strand starting at position 2184 of SEQ ID NO: 1888685
gagagcuggucccuaagau

SEQ ID NO: 2549795 - RNA, 19 nt, Artificial Sequence
  Description of Artificial Sequence: Synthetic oligonucleotide
  Antisense strand to SEQ ID NO: 2549794
aucuuagggaccagcucuc

SEQ ID NO: 2549796 - RNA, 19 nt, Artificial Sequence
  Description of Artificial Sequence: Synthetic oligonucleotide
  Sense strand starting at position 242 of SEQ ID NO: 1888685
aguagaagacaucgauguu

SEQ ID NO: 2549797 - RNA, 19 nt, Artificial Sequence
  Description of Artificial Sequence: Synthetic oligonucleotide
  Antisense strand to SEQ ID NO: 2549796
aacaucgaugucuucuacu

SEQ ID NO: 2549798 - RNA, 19 nt, Artificial Sequence
  Description of Artificial Sequence: Synthetic oligonucleotide
  Sense strand starting at position 1629 of SEQ ID NO: 1888685
aggugucauuaccuacuaa

SEQ ID NO: 2549799 - RNA, 19 nt, Artificial Sequence
  Description of Artificial Sequence: Synthetic oligonucleotide
  Antisense strand to SEQ ID NO: 2549798
uuaguagguaaugacaccu

SEQ ID NO: 2549800 - RNA, 19 nt, Artificial Sequence
  Description of Artificial Sequence: Synthetic oligonucleotide
  Sense strand starting at position 335 of SEQ ID NO: 1888685
ggaagagugucacugagca

SEQ ID NO: 2549801 - RNA, 19 nt, Artificial Sequence
  Description of Artificial Sequence: Synthetic oligonucleotide
  Antisense strand to SEQ ID NO: 2549800
ugcucagugacacucuucc

SEQ ID NO: 2549802 - RNA, 19 nt, Artificial Sequence
  Description of Artificial Sequence: Synthetic oligonucleotide
  Sense strand starting at position 3415 of SEQ ID NO: 1888685
ugaguccucagagggcaau

SEQ ID NO: 2549803 - RNA, 19 nt, Artificial Sequence
  Description of Artificial Sequence: Synthetic oligonucleotide
  Antisense strand to SEQ ID NO: 2549802
auugcccucugaggacuca

SEQ ID NO: 2549804 - RNA, 19 nt, Artificial Sequence
  Description of Artificial Sequence: Synthetic oligonucleotide
  Sense strand starting at position 1446 of SEQ ID NO: 1888685
gcugcugagaaucagaguu

SEQ ID NO: 2549805 - RNA, 19 nt, Artificial Sequence
  Description of Artificial Sequence: Synthetic oligonucleotide
  Antisense strand to SEQ ID NO: 2549804
aacucugauucucagcagc

SEQ ID NO: 2549806 - RNA, 19 nt, Artificial Sequence
  Description of Artificial Sequence: Synthetic oligonucleotide
  Sense strand starting at position 1219 of SEQ ID NO: 1888685
uccucaugggugugagaca

SEQ ID NO: 2549807 - RNA, 19 nt, Artificial Sequence
  Description of Artificial Sequence: Synthetic oligonucleotide
  Antisense strand to SEQ ID NO: 2549806
ugucucacacccaugagga

SEQ ID NO: 2549808 - RNA, 19 nt, Artificial Sequence
  Description of Artificial Sequence: Synthetic oligonucleotide
  Sense strand starting at position 1131 of SEQ ID NO: 1888685
cagaacuugccaggucaca

SEQ ID NO: 2549809 - RNA, 19 nt, Artificial Sequence
  Description of Artificial Sequence: Synthetic oligonucleotide
  Antisense strand to SEQ ID NO: 2549808
ugugaccuggcaaguucug

SEQ ID NO: 2549810 - RNA, 19 nt, Artificial Sequence
  Description of Artificial Sequence: Synthetic oligonucleotide
  Sense strand starting at position 3098 of SEQ ID NO: 1888685
gggugaaggugccugagau

SEQ ID NO: 2549811 - RNA, 19 nt, Artificial Sequence
  Description of Artificial Sequence: Synthetic oligonucleotide
  Antisense strand to SEQ ID NO: 2549810
aucucaggcaccuucaccc

SEQ ID NO: 2549812 - RNA, 19 nt, Artificial Sequence
  Description of Artificial Sequence: Synthetic oligonucleotide
  Sense strand starting at position 245 of SEQ ID NO: 1888685
agaagacaucgauguuguu

SEQ ID NO: 2549813 - RNA, 19 nt, Artificial Sequence
  Description of Artificial Sequence: Synthetic oligonucleotide
  Antisense strand to SEQ ID NO: 2549812
aacaacaucgaugucuucu

SEQ ID NO: 2549814 - RNA, 19 nt, Artificial Sequence
  Description of Artificial Sequence: Synthetic oligonucleotide
  Sense strand starting at position 1117 of SEQ ID NO: 1888685
uuuacucucuuggccagaa

SEQ ID NO: 2549815 - RNA, 19 nt, Artificial Sequence
  Description of Artificial Sequence: Synthetic oligonucleotide
  Antisense strand to SEQ ID NO: 2549814
uucuggccaagagaguaaa

SEQ ID NO: 2549816 - RNA, 19 nt, Artificial Sequence
  Description of Artificial Sequence: Synthetic oligonucleotide
  Sense strand starting at position 1757 of SEQ ID NO: 1888685
guaaguuugcuagaggcaa

SEQ ID NO: 2549817 - RNA, 19 nt, Artificial Sequence
  Description of Artificial Sequence: Synthetic oligonucleotide
  Antisense strand to SEQ ID NO: 2549816
uugccucuagcaaacuuac

SEQ ID NO: 2549818 - RNA, 19 nt, Artificial Sequence
  Description of Artificial Sequence: Synthetic oligonucleotide
  Sense strand starting at position 3624 of SEQ ID NO: 1888685
ggccuuuggcuguagaaac

SEQ ID NO: 2549819 - RNA, 19 nt, Artificial Sequence
  Description of Artificial Sequence: Synthetic oligonucleotide
  Antisense strand to SEQ ID NO: 2549818
guuucuacagccaaaggcc

SEQ ID NO: 2549820 - RNA, 19 nt, Artificial Sequence
  Description of Artificial Sequence: Synthetic oligonucleotide
  Sense strand starting at position 3099 of SEQ ID NO: 1888685
ggugaaggugccugagauc

SEQ ID NO: 2549821 - RNA, 19 nt, Artificial Sequence
  Description of Artificial Sequence: Synthetic oligonucleotide
  Antisense strand to SEQ ID NO: 2549820
gaucucaggcaccuucacc

SEQ ID NO: 2549822 - RNA, 19 nt, Artificial Sequence
  Description of Artificial Sequence: Synthetic oligonucleotide
  Sense strand starting at position 339 of SEQ ID NO: 1888685
gagugucacugagcagauu

SEQ ID NO: 2549823 - RNA, 19 nt, Artificial Sequence
  Description of Artificial Sequence: Synthetic oligonucleotide
  Antisense strand to SEQ ID NO: 2549822
aaucugcucagugacacuc

SEQ ID NO: 2549824 - RNA, 19 nt, Artificial Sequence
  Description of Artificial Sequence: Synthetic oligonucleotide
  Sense strand starting at position 364 of SEQ ID NO: 1888685
cagggccuucccugguaaa

SEQ ID NO: 2549825 - RNA, 19 nt, Artificial Sequence
  Description of Artificial Sequence: Synthetic oligonucleotide
  Antisense strand to SEQ ID NO: 2549824
uuuaccagggaaggcccug

SEQ ID NO: 2549826 - RNA, 19 nt, Artificial Sequence
  Description of Artificial Sequence: Synthetic oligonucleotide
  Sense strand starting at position 1940 of SEQ ID NO: 1888685
ucaguuugcucaucaugag

SEQ ID NO: 2549827 - RNA, 19 nt, Artificial Sequence
  Description of Artificial Sequence: Synthetic oligonucleotide
  Antisense strand to SEQ ID NO: 2549826
cucaugaugagcaaacuga

SEQ ID NO: 2549828 - RNA, 19 nt, Artificial Sequence
  Description of Artificial Sequence: Synthetic oligonucleotide
  Sense strand starting at position 433 of SEQ ID NO: 1888685
gagcaugacuccgcagaca

SEQ ID NO: 2549829 - RNA, 19 nt, Artificial Sequence
  Description of Artificial Sequence: Synthetic oligonucleotide
  Antisense strand to SEQ ID NO: 2549828
ugucugcggagucaugcuc

SEQ ID NO: 2549830 - RNA, 19 nt, Artificial Sequence
  Description of Artificial Sequence: Synthetic oligonucleotide
  Sense strand starting at position 1652 of SEQ ID NO: 1888685
gggugauggcagugacuuu

SEQ ID NO: 2549831 - RNA, 19 nt, Artificial Sequence
  Description of Artificial Sequence: Synthetic oligonucleotide
  Antisense strand to SEQ ID NO: 2549830
aaagucacugccaucaccc

SEQ ID NO: 2549832 - RNA, 19 nt, Artificial Sequence
  Description of Artificial Sequence: Synthetic oligonucleotide
  Sense strand starting at position 1019 of SEQ ID NO: 1888685
agcugcuucuaccuugaaa

SEQ ID NO: 2549833 - RNA, 19 nt, Artificial Sequence
  Description of Artificial Sequence: Synthetic oligonucleotide
  Antisense strand to SEQ ID NO: 2549832
uuucaagguagaagcagcu

SEQ ID NO: 2549834 - RNA, 19 nt, Artificial Sequence
  Description of Artificial Sequence: Synthetic oligonucleotide
  Sense strand starting at position 3065 of SEQ ID NO: 1888685
gcugcagguccauggagau

SEQ ID NO: 2549835 - RNA, 19 nt, Artificial Sequence
  Description of Artificial Sequence: Synthetic oligonucleotide
  Antisense strand to SEQ ID NO: 2549834
aucuccauggaccugcagc

SEQ ID NO: 2549836 - RNA, 19 nt, Artificial Sequence
  Description of Artificial Sequence: Synthetic oligonucleotide
  Sense strand starting at position 1168 of SEQ ID NO: 1888685
ucaggaaagcucugcuucu

SEQ ID NO: 2549837 - RNA, 19 nt, Artificial Sequence
  Description of Artificial Sequence: Synthetic oligonucleotide
  Antisense strand to SEQ ID NO: 2549836
agaagcagagcuuuccuga

SEQ ID NO: 2549838 - RNA, 19 nt, Artificial Sequence
  Description of Artificial Sequence: Synthetic oligonucleotide
  Sense strand starting at position 1458 of SEQ ID NO: 1888685
cagaguuugggcugucuga

SEQ ID NO: 2549839 - RNA, 19 nt, Artificial Sequence
  Description of Artificial Sequence: Synthetic oligonucleotide
  Antisense strand to SEQ ID NO: 2549838
ucagacagcccaaacucug

SEQ ID NO: 2549840 - RNA, 19 nt, Artificial Sequence
  Description of Artificial Sequence: Synthetic oligonucleotide
  Sense strand starting at position 3794 of SEQ ID NO: 1888685
uaaauaugagcuugugucu

SEQ ID NO: 2549841 - RNA, 19 nt, Artificial Sequence
  Description of Artificial Sequence: Synthetic oligonucleotide
  Antisense strand to SEQ ID NO: 2549840
agacacaagcucauauuua

SEQ ID NO: 2549842 - RNA, 19 nt, Artificial Sequence
  Description of Artificial Sequence: Synthetic oligonucleotide
  Sense strand starting at position 2946 of SEQ ID NO: 1888685
ccgaguggguucucucaca

SEQ ID NO: 2549843 - RNA, 19 nt, Artificial Sequence
  Description of Artificial Sequence: Synthetic oligonucleotide
  Antisense strand to SEQ ID NO: 2549842
ugugagagaacccacucgg

SEQ ID NO: 2549844 - RNA, 19 nt, Artificial Sequence
  Description of Artificial Sequence: Synthetic oligonucleotide
  Sense strand starting at position 3933 of SEQ ID NO: 1888685
gaguuagagcccugccaug

SEQ ID NO: 2549845 - RNA, 19 nt, Artificial Sequence
  Description of Artificial Sequence: Synthetic oligonucleotide
  Antisense strand to SEQ ID NO: 2549844
cauggcagggcucuaacuc

SEQ ID NO: 2549846 - RNA, 19 nt, Artificial Sequence
  Description of Artificial Sequence: Synthetic oligonucleotide
  Sense strand starting at position 3910 of SEQ ID NO: 1888685
aguguuugcugagcaaaca

SEQ ID NO: 2549847 - RNA, 19 nt, Artificial Sequence
  Description of Artificial Sequence: Synthetic oligonucleotide
  Antisense strand to SEQ ID NO: 2549846
uguuugcucagcaaacacu

SEQ ID NO: 2549848 - RNA, 19 nt, Artificial Sequence
  Description of Artificial Sequence: Synthetic oligonucleotide
  Sense strand starting at position 1410 of SEQ ID NO: 1888685
ggagcaggccugugucaga

SEQ ID NO: 2549849 - RNA, 19 nt, Artificial Sequence
  Description of Artificial Sequence: Synthetic oligonucleotide
  Antisense strand to SEQ ID NO: 2549848
ucugacacaggccugcucc

SEQ ID NO: 2549850 - RNA, 19 nt, Artificial Sequence
  Description of Artificial Sequence: Synthetic oligonucleotide
  Sense strand starting at position 1594 of SEQ ID NO: 1888685
acuacugcucgcuauguga

SEQ ID NO: 2549851 - RNA, 19 nt, Artificial Sequence
  Description of Artificial Sequence: Synthetic oligonucleotide
  Antisense strand to SEQ ID NO: 2549850
ucacauagcgagcaguagu

SEQ ID NO: 2549852 - RNA, 19 nt, Artificial Sequence
  Description of Artificial Sequence: Synthetic oligonucleotide
  Sense strand starting at position 1371 of SEQ ID NO: 1888686
acgggucauccuuagggaa

SEQ ID NO: 2549853 - RNA, 19 nt, Artificial Sequence
  Description of Artificial Sequence: Synthetic oligonucleotide
  Antisense strand to SEQ ID NO: 2549852
uucccuaaggaugacccgu

SEQ ID NO: 2549854 - RNA, 19 nt, Artificial Sequence
  Description of Artificial Sequence: Synthetic oligonucleotide
  Sense strand starting at position 890 of SEQ ID NO: 1888686
guuagacaucucuaaguag

SEQ ID NO: 2549855 - RNA, 19 nt, Artificial Sequence
  Description of Artificial Sequence: Synthetic oligonucleotide
  Antisense strand to SEQ ID NO: 2549854
cuacuuagagaugucuaac

SEQ ID NO: 2549856 - RNA, 19 nt, Artificial Sequence
  Description of Artificial Sequence: Synthetic oligonucleotide
  Sense strand starting at position 1968 of SEQ ID NO: 1888686
ucuguccgcccgucaauaa

SEQ ID NO: 2549857 - RNA, 19 nt, Artificial Sequence
  Description of Artificial Sequence: Synthetic oligonucleotide
  Antisense strand to SEQ ID NO: 2549856
uuauugacgggcggacaga

SEQ ID NO: 2549858 - RNA, 19 nt, Artificial Sequence
  Description of Artificial Sequence: Synthetic oligonucleotide
  Sense strand starting at position 830 of SEQ ID NO: 1888686
agagauuagucaguaucaa

SEQ ID NO: 2549859 - RNA, 19 nt, Artificial Sequence
  Description of Artificial Sequence: Synthetic oligonucleotide
  Antisense strand to SEQ ID NO: 2549858
uugauacugacuaaucucu

SEQ ID NO: 2549860 - RNA, 19 nt, Artificial Sequence
  Description of Artificial Sequence: Synthetic oligonucleotide
  Sense strand starting at position 1268 of SEQ ID NO: 1888686
uuaggaugucuguacauac

SEQ ID NO: 2549861 - RNA, 19 nt, Artificial Sequence
  Description of Artificial Sequence: Synthetic oligonucleotide
  Antisense strand to SEQ ID NO: 2549860
guauguacagacauccuaa

SEQ ID NO: 2549862 - RNA, 19 nt, Artificial Sequence
  Description of Artificial Sequence: Synthetic oligonucleotide
  Sense strand starting at position 1463 of SEQ ID NO: 1888686
gagaacuuucugugagacu

SEQ ID NO: 2549863 - RNA, 19 nt, Artificial Sequence
  Description of Artificial Sequence: Synthetic oligonucleotide
  Antisense strand to SEQ ID NO: 2549862
agucucacagaaaguucuc

SEQ ID NO: 2549864 - RNA, 19 nt, Artificial Sequence
  Description of Artificial Sequence: Synthetic oligonucleotide
  Sense strand starting at position 1967 of SEQ ID NO: 1888686
uucuguccgcccgucaaua

SEQ ID NO: 2549865 - RNA, 19 nt, Artificial Sequence
  Description of Artificial Sequence: Synthetic oligonucleotide
  Antisense strand to SEQ ID NO: 2549864
uauugacgggcggacagaa

SEQ ID NO: 2549866 - RNA, 19 nt, Artificial Sequence
  Description of Artificial Sequence: Synthetic oligonucleotide
  Sense strand starting at position 2669 of SEQ ID NO: 1888686
gucagcuucggagacagaa

SEQ ID NO: 2549867 - RNA, 19 nt, Artificial Sequence
  Description of Artificial Sequence: Synthetic oligonucleotide
  Antisense strand to SEQ ID NO: 2549866
uucugucuccgaagcugac

SEQ ID NO: 2549868 - RNA, 19 nt, Artificial Sequence
  Description of Artificial Sequence: Synthetic oligonucleotide
  Sense strand starting at position 2184 of SEQ ID NO: 1888686
auuggugaggucgaaacuu

SEQ ID NO: 2549869 - RNA, 19 nt, Artificial Sequence
  Description of Artificial Sequence: Synthetic oligonucleotide
  Antisense strand to SEQ ID NO: 2549868
aaguuucgaccucaccaau

SEQ ID NO: 2549870 - RNA, 19 nt, Artificial Sequence
  Description of Artificial Sequence: Synthetic oligonucleotide
  Sense strand starting at position 817 of SEQ ID NO: 1888686
uagcucugagcucagagau

SEQ ID NO: 2549871 - RNA, 19 nt, Artificial Sequence
  Description of Artificial Sequence: Synthetic oligonucleotide
  Antisense strand to SEQ ID NO: 2549870
aucucugagcucagagcua

SEQ ID NO: 2549872 - RNA, 19 nt, Artificial Sequence
  Description of Artificial Sequence: Synthetic oligonucleotide
  Sense strand starting at position 2755 of SEQ ID NO: 1888686
gugggugagccacaaaucu

SEQ ID NO: 2549873 - RNA, 19 nt, Artificial Sequence
  Description of Artificial Sequence: Synthetic oligonucleotide
  Antisense strand to SEQ ID NO: 2549872
agauuuguggcucacccac

SEQ ID NO: 2549874 - RNA, 19 nt, Artificial Sequence
  Description of Artificial Sequence: Synthetic oligonucleotide
  Sense strand starting at position 827 of SEQ ID NO: 1888686
cucagagauuagucaguau

SEQ ID NO: 2549875 - RNA, 19 nt, Artificial Sequence
  Description of Artificial Sequence: Synthetic oligonucleotide
  Antisense strand to SEQ ID NO: 2549874
auacugacuaaucucugag

SEQ ID NO: 2549876 - RNA, 19 nt, Artificial Sequence
  Description of Artificial Sequence: Synthetic oligonucleotide
  Sense strand starting at position 3896 of SEQ ID NO: 1888686
cgauggugugcgucuguaa

SEQ ID NO: 2549877 - RNA, 19 nt, Artificial Sequence
  Description of Artificial Sequence: Synthetic oligonucleotide
  Antisense strand to SEQ ID NO: 2549876
uuacagacgcacaccaucg

SEQ ID NO: 2549878 - RNA, 19 nt, Artificial Sequence
  Description of Artificial Sequence: Synthetic oligonucleotide
  Sense strand starting at position 256 of SEQ ID NO: 1888686
cugcuacagagcugagaaa

SEQ ID NO: 2549879 - RNA, 19 nt, Artificial Sequence
  Description of Artificial Sequence: Synthetic oligonucleotide
  Antisense strand to SEQ ID NO: 2549878
uuucucagcucuguagcag

SEQ ID NO: 2549880 - RNA, 19 nt, Artificial Sequence
  Description of Artificial Sequence: Synthetic oligonucleotide
  Sense strand starting at position 2317 of SEQ ID NO: 1888686
ccucucgacuuuccagaaa

SEQ ID NO: 2549881 - RNA, 19 nt, Artificial Sequence
  Description of Artificial Sequence: Synthetic oligonucleotide
  Antisense strand to SEQ ID NO: 2549880
uuucuggaaagucgagagg

SEQ ID NO: 2549882 - RNA, 19 nt, Artificial Sequence
  Description of Artificial Sequence: Synthetic oligonucleotide
  Sense strand starting at position 917 of SEQ ID NO: 1888686
cagguaaguggccauuauu

SEQ ID NO: 2549883 - RNA, 19 nt, Artificial Sequence
  Description of Artificial Sequence: Synthetic oligonucleotide
  Antisense strand to SEQ ID NO: 2549882
aauaauggccacuuaccug

SEQ ID NO: 2549884 - RNA, 19 nt, Artificial Sequence
  Description of Artificial Sequence: Synthetic oligonucleotide
  Sense strand starting at position 1105 of SEQ ID NO: 1888686
guagccuuggaauauuagu

SEQ ID NO: 2549885 - RNA, 19 nt, Artificial Sequence
  Description of Artificial Sequence: Synthetic oligonucleotide
  Antisense strand to SEQ ID NO: 2549884
acuaauauuccaaggcuac

SEQ ID NO: 2549886 - RNA, 19 nt, Artificial Sequence
  Description of Artificial Sequence: Synthetic oligonucleotide
  Sense strand starting at position 1935 of SEQ ID NO: 1888686
gccaaaucagaacgugaca

SEQ ID NO: 2549887 - RNA, 19 nt, Artificial Sequence
  Description of Artificial Sequence: Synthetic oligonucleotide
  Antisense strand to SEQ ID NO: 2549886
ugucacguucugauuuggc

SEQ ID NO: 2549888 - RNA, 19 nt, Artificial Sequence
  Description of Artificial Sequence: Synthetic oligonucleotide
  Sense strand starting at position 774 of SEQ ID NO: 1888686
agacaagauugcuauuuau

SEQ ID NO: 2549889 - RNA, 19 nt, Artificial Sequence
  Description of Artificial Sequence: Synthetic oligonucleotide
  Antisense strand to SEQ ID NO: 2549888
auaaauagcaaucuugucu

SEQ ID NO: 2549890 - RNA, 19 nt, Artificial Sequence
  Description of Artificial Sequence: Synthetic oligonucleotide
  Sense strand starting at position 379 of SEQ ID NO: 1888686
cacugaugugcucagcaaa

SEQ ID NO: 2549891 - RNA, 19 nt, Artificial Sequence
  Description of Artificial Sequence: Synthetic oligonucleotide
  Antisense strand to SEQ ID NO: 2549890
uuugcugagcacaucagug

SEQ ID NO: 2549892 - RNA, 19 nt, Artificial Sequence
  Description of Artificial Sequence: Synthetic oligonucleotide
  Sense strand starting at position 771 of SEQ ID NO: 1888686
ggcagacaagauugcuauu

SEQ ID NO: 2549893 - RNA, 19 nt, Artificial Sequence
  Description of Artificial Sequence: Synthetic oligonucleotide
  Antisense strand to SEQ ID NO: 2549892
aauagcaaucuugucugcc

SEQ ID NO: 2549894 - RNA, 19 nt, Artificial Sequence
  Description of Artificial Sequence: Synthetic oligonucleotide
  Sense strand starting at position 3527 of SEQ ID NO: 1888686
agaaucaaguaucucguua

SEQ ID NO: 2549895 - RNA, 19 nt, Artificial Sequence
  Description of Artificial Sequence: Synthetic oligonucleotide
  Antisense strand to SEQ ID NO: 2549894
uaacgagauacuugauucu

SEQ ID NO: 2549896 - RNA, 19 nt, Artificial Sequence
  Description of Artificial Sequence: Synthetic oligonucleotide
  Sense strand starting at position 916 of SEQ ID NO: 1888686
acagguaaguggccauuau

SEQ ID NO: 2549897 - RNA, 19 nt, Artificial Sequence
  Description of Artificial Sequence: Synthetic oligonucleotide
  Antisense strand to SEQ ID NO: 2549896
auaauggccacuuaccugu

SEQ ID NO: 2549898 - RNA, 19 nt, Artificial Sequence
  Description of Artificial Sequence: Synthetic oligonucleotide
  Sense strand starting at position 1101 of SEQ ID NO: 1888686
aucuguagccuuggaauau

SEQ ID NO: 2549899 - RNA, 19 nt, Artificial Sequence
  Description of Artificial Sequence: Synthetic oligonucleotide
  Antisense strand to SEQ ID NO: 2549898
auauuccaaggcuacagau

SEQ ID NO: 2549900 - RNA, 19 nt, Artificial Sequence
  Description of Artificial Sequence: Synthetic oligonucleotide
  Sense strand starting at position 2787 of SEQ ID NO: 1888686
gcagccaaauuugauaaua

SEQ ID NO: 2549901 - RNA, 19 nt, Artificial Sequence
  Description of Artificial Sequence: Synthetic oligonucleotide
  Antisense strand to SEQ ID NO: 2549900
uauuaucaaauuuggcugc

SEQ ID NO: 2549902 - RNA, 19 nt, Artificial Sequence
  Description of Artificial Sequence: Synthetic oligonucleotide
  Sense strand starting at position 61 of SEQ ID NO: 1888686
ggguuuaauuauucugcua

SEQ ID NO: 2549903 - RNA, 19 nt, Artificial Sequence
  Description of Artificial Sequence: Synthetic oligonucleotide
  Antisense strand to SEQ ID NO: 2549902
uagcagaauaauuaaaccc

SEQ ID NO: 2549904 - RNA, 19 nt, Artificial Sequence
  Description of Artificial Sequence: Synthetic oligonucleotide
  Sense strand starting at position 2828 of SEQ ID NO: 1888686
cuucuccuccugugauaug

SEQ ID NO: 2549905 - RNA, 19 nt, Artificial Sequence
  Description of Artificial Sequence: Synthetic oligonucleotide
  Antisense strand to SEQ ID NO: 2549904
cauaucacaggaggagaag

SEQ ID NO: 2549906 - RNA, 19 nt, Artificial Sequence
  Description of Artificial Sequence: Synthetic oligonucleotide
  Sense strand starting at position 85 of SEQ ID NO: 1888686
ccugguuucuaguuggacu

SEQ ID NO: 2549907 - RNA, 19 nt, Artificial Sequence
  Description of Artificial Sequence: Synthetic oligonucleotide
  Antisense strand to SEQ ID NO: 2549906
aguccaacuagaaaccagg

SEQ ID NO: 2549908 - RNA, 19 nt, Artificial Sequence
  Description of Artificial Sequence: Synthetic oligonucleotide
  Sense strand starting at position 2845 of SEQ ID NO: 1888686
ugcagcuaucucuggaauu

SEQ ID NO: 2549909 - RNA, 19 nt, Artificial Sequence
  Description of Artificial Sequence: Synthetic oligonucleotide
  Antisense strand to SEQ ID NO: 2549908
aauuccagagauagcugca

SEQ ID NO: 2549910 - RNA, 19 nt, Artificial Sequence
  Description of Artificial Sequence: Synthetic oligonucleotide
  Sense strand starting at position 1158 of SEQ ID NO: 1888686
caguucugacaacguguaa

SEQ ID NO: 2549911 - RNA, 19 nt, Artificial Sequence
  Description of Artificial Sequence: Synthetic oligonucleotide
  Antisense strand to SEQ ID NO: 2549910
uuacacguugucagaacug

SEQ ID NO: 2549912 - RNA, 19 nt, Artificial Sequence
  Description of Artificial Sequence: Synthetic oligonucleotide
  Sense strand starting at position 1028 of SEQ ID NO: 1888686
uaagguuccuggcaaauuu

SEQ ID NO: 2549913 - RNA, 19 nt, Artificial Sequence
  Description of Artificial Sequence: Synthetic oligonucleotide
  Antisense strand to SEQ ID NO: 2549912
aaauuugccaggaaccuua

SEQ ID NO: 2549914 - RNA, 19 nt, Artificial Sequence
  Description of Artificial Sequence: Synthetic oligonucleotide
  Sense strand starting at position 3531 of SEQ ID NO: 1888686
ucaaguaucucguuacuuu

SEQ ID NO: 2549915 - RNA, 19 nt, Artificial Sequence
  Description of Artificial Sequence: Synthetic oligonucleotide
  Antisense strand to SEQ ID NO: 2549914
aaaguaacgagauacuuga

SEQ ID NO: 2549916 - RNA, 19 nt, Artificial Sequence
  Description of Artificial Sequence: Synthetic oligonucleotide
  Sense strand starting at position 2412 of SEQ ID NO: 1888686
cggcgaugcgucgcggauu

SEQ ID NO: 2549917 - RNA, 19 nt, Artificial Sequence
  Description of Artificial Sequence: Synthetic oligonucleotide
  Antisense strand to SEQ ID NO: 2549916
aauccgcgacgcaucgccg

SEQ ID NO: 2549918 - RNA, 19 nt, Artificial Sequence
  Description of Artificial Sequence: Synthetic oligonucleotide
  Sense strand starting at position 1780 of SEQ ID NO: 1888686
gcagcuuuauaugccaauu

SEQ ID NO: 2549919 - RNA, 19 nt, Artificial Sequence
  Description of Artificial Sequence: Synthetic oligonucleotide
  Antisense strand to SEQ ID NO: 2549918
aauuggcauauaaagcugc

SEQ ID NO: 2549920 - RNA, 19 nt, Artificial Sequence
  Description of Artificial Sequence: Synthetic oligonucleotide
  Sense strand starting at position 2192 of SEQ ID NO: 1888686
ggucgaaacuuagaaauga

SEQ ID NO: 2549921 - RNA, 19 nt, Artificial Sequence
  Description of Artificial Sequence: Synthetic oligonucleotide
  Antisense strand to SEQ ID NO: 2549920
ucauuucuaaguuucgacc

SEQ ID NO: 2549922 - RNA, 19 nt, Artificial Sequence
  Description of Artificial Sequence: Synthetic oligonucleotide
  Sense strand starting at position 3722 of SEQ ID NO: 1888686
cucccaccgucguuugaaa

SEQ ID NO: 2549923 - RNA, 19 nt, Artificial Sequence
  Description of Artificial Sequence: Synthetic oligonucleotide
  Antisense strand to SEQ ID NO: 2549922
uuucaaacgacggugggag

SEQ ID NO: 2549924 - RNA, 19 nt, Artificial Sequence
  Description of Artificial Sequence: Synthetic oligonucleotide
  Sense strand starting at position 1464 of SEQ ID NO: 1888686
agaacuuucugugagacua

SEQ ID NO: 2549925 - RNA, 19 nt, Artificial Sequence
  Description of Artificial Sequence: Synthetic oligonucleotide
  Antisense strand to SEQ ID NO: 2549924
uagucucacagaaaguucu

SEQ ID NO: 2549926 - RNA, 19 nt, Artificial Sequence
  Description of Artificial Sequence: Synthetic oligonucleotide
  Sense strand starting at position 3562 of SEQ ID NO: 1888686
cguuguuuccucggaauua

SEQ ID NO: 2549927 - RNA, 19 nt, Artificial Sequence
  Description of Artificial Sequence: Synthetic oligonucleotide
  Antisense strand to SEQ ID NO: 2549926
uaauuccgaggaaacaacg

SEQ ID NO: 2549928 - RNA, 19 nt, Artificial Sequence
  Description of Artificial Sequence: Synthetic oligonucleotide
  Sense strand starting at position 1010 of SEQ ID NO: 1888686
guguuaacuucucuuugcu

SEQ ID NO: 2549929 - RNA, 19 nt, Artificial Sequence
  Description of Artificial Sequence: Synthetic oligonucleotide
  Antisense strand to SEQ ID NO: 2549928
agcaaagagaaguuaacac

SEQ ID NO: 2549930 - RNA, 19 nt, Artificial Sequence
  Description of Artificial Sequence: Synthetic oligonucleotide
  Sense strand starting at position 3560 of SEQ ID NO: 1888686
cucguuguuuccucggaau

SEQ ID NO: 2549931 - RNA, 19 nt, Artificial Sequence
  Description of Artificial Sequence: Synthetic oligonucleotide
  Antisense strand to SEQ ID NO: 2549930
auuccgaggaaacaacgag

SEQ ID NO: 2549932 - RNA, 19 nt, Artificial Sequence
  Description of Artificial Sequence: Synthetic oligonucleotide
  Sense strand starting at position 857 of SEQ ID NO: 1888687
cagcuugccguccuugaua

SEQ ID NO: 2549933 - RNA, 19 nt, Artificial Sequence
  Description of Artificial Sequence: Synthetic oligonucleotide
  Antisense strand to SEQ ID NO: 2549932
uaucaaggacggcaagcug

SEQ ID NO: 2549934 - RNA, 19 nt, Artificial Sequence
  Description of Artificial Sequence: Synthetic oligonucleotide
  Sense strand starting at position 3298 of SEQ ID NO: 1888687
ggagaagccuacccauaag

SEQ ID NO: 2549935 - RNA, 19 nt, Artificial Sequence
  Description of Artificial Sequence: Synthetic oligonucleotide
  Antisense strand to SEQ ID NO: 2549934
cuuauggguaggcuucucc

SEQ ID NO: 2549936 - RNA, 19 nt, Artificial Sequence
  Description of Artificial Sequence: Synthetic oligonucleotide
  Sense strand starting at position 3635 of SEQ ID NO: 1888687
gcucauugccggcuucuaa

SEQ ID NO: 2549937 - RNA, 19 nt, Artificial Sequence
  Description of Artificial Sequence: Synthetic oligonucleotide
  Antisense strand to SEQ ID NO: 2549936
uuagaagccggcaaugagc

SEQ ID NO: 2549938 - RNA, 19 nt, Artificial Sequence
  Description of Artificial Sequence: Synthetic oligonucleotide
  Sense strand starting at position 3152 of SEQ ID NO: 1888687
cuagguuuccaggagagca

SEQ ID NO: 2549939 - RNA, 19 nt, Artificial Sequence
  Description of Artificial Sequence: Synthetic oligonucleotide
  Antisense strand to SEQ ID NO: 2549938
ugcucuccuggaaaccuag

SEQ ID NO: 2549940 - RNA, 19 nt, Artificial Sequence
  Description of Artificial Sequence: Synthetic oligonucleotide
  Sense strand starting at position 1926 of SEQ ID NO: 1888687
aguagagaaugguucuaca

SEQ ID NO: 2549941 - RNA, 19 nt, Artificial Sequence
  Description of Artificial Sequence: Synthetic oligonucleotide
  Antisense strand to SEQ ID NO: 2549940
uguagaaccauucucuacu

SEQ ID NO: 2549942 - RNA, 19 nt, Artificial Sequence
  Description of Artificial Sequence: Synthetic oligonucleotide
  Sense strand starting at position 3721 of SEQ ID NO: 1888687
agagguccacaagguuaau

SEQ ID NO: 2549943 - RNA, 19 nt, Artificial Sequence
  Description of Artificial Sequence: Synthetic oligonucleotide
  Antisense strand to SEQ ID NO: 2549942
auuaaccuuguggaccucu

SEQ ID NO: 2549944 - RNA, 19 nt, Artificial Sequence
  Description of Artificial Sequence: Synthetic oligonucleotide
  Sense strand starting at position 792 of SEQ ID NO: 1888687
uuacuuaccagaggguuga

SEQ ID NO: 2549945 - RNA, 19 nt, Artificial Sequence
  Description of Artificial Sequence: Synthetic oligonucleotide
  Antisense strand to SEQ ID NO: 2549944
ucaacccucugguaaguaa

SEQ ID NO: 2549946 - RNA, 19 nt, Artificial Sequence
  Description of Artificial Sequence: Synthetic oligonucleotide
  Sense strand starting at position 2879 of SEQ ID NO: 1888687
cugagauagggcuauugca

SEQ ID NO: 2549947 - RNA, 19 nt, Artificial Sequence
  Description of Artificial Sequence: Synthetic oligonucleotide
  Antisense strand to SEQ ID NO: 2549946
ugcaauagcccuaucucag

SEQ ID NO: 2549948 - RNA, 19 nt, Artificial Sequence
  Description of Artificial Sequence: Synthetic oligonucleotide
  Sense strand starting at position 1626 of SEQ ID NO: 1888687
gggucaucugagggaguga

SEQ ID NO: 2549949 - RNA, 19 nt, Artificial Sequence
  Description of Artificial Sequence: Synthetic oligonucleotide
  Antisense strand to SEQ ID NO: 2549948
ucacucccucagaugaccc

SEQ ID NO: 2549950 - RNA, 19 nt, Artificial Sequence
  Description of Artificial Sequence: Synthetic oligonucleotide
  Sense strand starting at position 690 of SEQ ID NO: 1888687
uguuguguuggcuucaguu

SEQ ID NO: 2549951 - RNA, 19 nt, Artificial Sequence
  Description of Artificial Sequence: Synthetic oligonucleotide
  Antisense strand to SEQ ID NO: 2549950
aacugaagccaacacaaca

SEQ ID NO: 2549952 - RNA, 19 nt, Artificial Sequence
  Description of Artificial Sequence: Synthetic oligonucleotide
  Sense strand starting at position 1704 of SEQ ID NO: 1888687
gggugucacccugaacuca

SEQ ID NO: 2549953 - RNA, 19 nt, Artificial Sequence
  Description of Artificial Sequence: Synthetic oligonucleotide
  Antisense strand to SEQ ID NO: 2549952
ugaguucagggugacaccc

SEQ ID NO: 2549954 - RNA, 19 nt, Artificial Sequence
  Description of Artificial Sequence: Synthetic oligonucleotide
  Sense strand starting at position 3718 of SEQ ID NO: 1888687
agcagagguccacaagguu

SEQ ID NO: 2549955 - RNA, 19 nt, Artificial Sequence
  Description of Artificial Sequence: Synthetic oligonucleotide
  Antisense strand to SEQ ID NO: 2549954
aaccuuguggaccucugcu

SEQ ID NO: 2549956 - RNA, 19 nt, Artificial Sequence
  Description of Artificial Sequence: Synthetic oligonucleotide
  Sense strand starting at position 3799 of SEQ ID NO: 1888687
aagcccacucagugaugaa

SEQ ID NO: 2549957 - RNA, 19 nt, Artificial Sequence
  Description of Artificial Sequence: Synthetic oligonucleotide
  Antisense strand to SEQ ID NO: 2549956
uucaucacugagugggcuu

SEQ ID NO: 2549958 - RNA, 19 nt, Artificial Sequence
  Description of Artificial Sequence: Synthetic oligonucleotide
  Sense strand starting at position 2918 of SEQ ID NO: 1888687
acgaaauucugucucuaaa

SEQ ID NO: 2549959 - RNA, 19 nt, Artificial Sequence
  Description of Artificial Sequence: Synthetic oligonucleotide
  Antisense strand to SEQ ID NO: 2549958
uuuagagacagaauuucgu

SEQ ID NO: 2549960 - RNA, 19 nt, Artificial Sequence
  Description of Artificial Sequence: Synthetic oligonucleotide
  Sense strand starting at position 460 of SEQ ID NO: 1888687
gggauugucgugcagauga

SEQ ID NO: 2549961 - RNA, 19 nt, Artificial Sequence
  Description of Artificial Sequence: Synthetic oligonucleotide
  Antisense strand to SEQ ID NO: 2549960
ucaucugcacgacaauccc

SEQ ID NO: 2549962 - RNA, 19 nt, Artificial Sequence
  Description of Artificial Sequence: Synthetic oligonucleotide
  Sense strand starting at position 1924 of SEQ ID NO: 1888687
gcaguagagaaugguucua

SEQ ID NO: 2549963 - RNA, 19 nt, Artificial Sequence
  Description of Artificial Sequence: Synthetic oligonucleotide
  Antisense strand to SEQ ID NO: 2549962
uagaaccauucucuacugc

SEQ ID NO: 2549964 - RNA, 19 nt, Artificial Sequence
  Description of Artificial Sequence: Synthetic oligonucleotide
  Sense strand starting at position 1812 of SEQ ID NO: 1888687
aguuaucaguaggcuacaa

SEQ ID NO: 2549965 - RNA, 19 nt, Artificial Sequence
  Description of Artificial Sequence: Synthetic oligonucleotide
  Antisense strand to SEQ ID NO: 2549964
uuguagccuacugauaacu

SEQ ID NO: 2549966 - RNA, 19 nt, Artificial Sequence
  Description of Artificial Sequence: Synthetic oligonucleotide
  Sense strand starting at position 1899 of SEQ ID NO: 1888687
ccacaaggcuguucucaga

SEQ ID NO: 2549967 - RNA, 19 nt, Artificial Sequence
  Description of Artificial Sequence: Synthetic oligonucleotide
  Antisense strand to SEQ ID NO: 2549966
ucugagaacagccuugugg

SEQ ID NO: 2549968 - RNA, 19 nt, Artificial Sequence
  Description of Artificial Sequence: Synthetic oligonucleotide
  Sense strand starting at position 3762 of SEQ ID NO: 1888687
aaauucuugcuccgggaca

SEQ ID NO: 2549969 - RNA, 19 nt, Artificial Sequence
  Description of Artificial Sequence: Synthetic oligonucleotide
  Antisense strand to SEQ ID NO: 2549968
ugucccggagcaagaauuu

SEQ ID NO: 2549970 - RNA, 19 nt, Artificial Sequence
  Description of Artificial Sequence: Synthetic oligonucleotide
  Sense strand starting at position 3764 of SEQ ID NO: 1888687
auucuugcuccgggacaaa

SEQ ID NO: 2549971 - RNA, 19 nt, Artificial Sequence
  Description of Artificial Sequence: Synthetic oligonucleotide
  Antisense strand to SEQ ID NO: 2549970
uuugucccggagcaagaau

SEQ ID NO: 2549972 - RNA, 19 nt, Artificial Sequence
  Description of Artificial Sequence: Synthetic oligonucleotide
  Sense strand starting at position 3243 of SEQ ID NO: 1888687
gggaaugguucccuugcua

SEQ ID NO: 2549973 - RNA, 19 nt, Artificial Sequence
  Description of Artificial Sequence: Synthetic oligonucleotide
  Antisense strand to SEQ ID NO: 2549972
uagcaagggaaccauuccc

SEQ ID NO: 2549974 - RNA, 19 nt, Artificial Sequence
  Description of Artificial Sequence: Synthetic oligonucleotide
  Sense strand starting at position 3416 of SEQ ID NO: 1888687
cacggaugacuuggcagua

SEQ ID NO: 2549975 - RNA, 19 nt, Artificial Sequence
  Description of Artificial Sequence: Synthetic oligonucleotide
  Antisense strand to SEQ ID NO: 2549974
uacugccaagucauccgug

SEQ ID NO: 2549976 - RNA, 19 nt, Artificial Sequence
  Description of Artificial Sequence: Synthetic oligonucleotide
  Sense strand starting at position 3867 of SEQ ID NO: 1888687
ggguuuaauuauucugcua

SEQ ID NO: 2549977 - RNA, 19 nt, Artificial Sequence
  Description of Artificial Sequence: Synthetic oligonucleotide
  Antisense strand to SEQ ID NO: 2549976
uagcagaauaauuaaaccc

SEQ ID NO: 2549978 - RNA, 19 nt, Artificial Sequence
  Description of Artificial Sequence: Synthetic oligonucleotide
  Sense strand starting at position 1811 of SEQ ID NO: 1888687
caguuaucaguaggcuaca

SEQ ID NO: 2549979 - RNA, 19 nt, Artificial Sequence
  Description of Artificial Sequence: Synthetic oligonucleotide
  Antisense strand to SEQ ID NO: 2549978
uguagccuacugauaacug

SEQ ID NO: 2549980 - RNA, 19 nt, Artificial Sequence
  Description of Artificial Sequence: Synthetic oligonucleotide
  Sense strand starting at position 1267 of SEQ ID NO: 1888687
ccacgugaugcauaagcua

SEQ ID NO: 2549981 - RNA, 19 nt, Artificial Sequence
  Description of Artificial Sequence: Synthetic oligonucleotide
  Antisense strand to SEQ ID NO: 2549980
uagcuuaugcaucacgugg

SEQ ID NO: 2549982 - RNA, 19 nt, Artificial Sequence
  Description of Artificial Sequence: Synthetic oligonucleotide
  Sense strand starting at position 1840 of SEQ ID NO: 1888687
gguccaggaacguguuaag

SEQ ID NO: 2549983 - RNA, 19 nt, Artificial Sequence
  Description of Artificial Sequence: Synthetic oligonucleotide
  Antisense strand to SEQ ID NO: 2549982
cuuaacacguuccuggacc

SEQ ID NO: 2549984 - RNA, 19 nt, Artificial Sequence
  Description of Artificial Sequence: Synthetic oligonucleotide
  Sense strand starting at position 3891 of SEQ ID NO: 1888687
ccugguuucuaguuggacu

SEQ ID NO: 2549985 - RNA, 19 nt, Artificial Sequence
  Description of Artificial Sequence: Synthetic oligonucleotide
  Antisense strand to SEQ ID NO: 2549984
aguccaacuagaaaccagg

SEQ ID NO: 2549986 - RNA, 19 nt, Artificial Sequence
  Description of Artificial Sequence: Synthetic oligonucleotide
  Sense strand starting at position 1809 of SEQ ID NO: 1888687
ugcaguuaucaguaggcua

SEQ ID NO: 2549987 - RNA, 19 nt, Artificial Sequence
  Description of Artificial Sequence: Synthetic oligonucleotide
  Antisense strand to SEQ ID NO: 2549986
uagccuacugauaacugca

SEQ ID NO: 2549988 - RNA, 19 nt, Artificial Sequence
  Description of Artificial Sequence: Synthetic oligonucleotide
  Sense strand starting at position 1258 of SEQ ID NO: 1888687
cacugauguccacgugaug

SEQ ID NO: 2549989 - RNA, 19 nt, Artificial Sequence
  Description of Artificial Sequence: Synthetic oligonucleotide
  Antisense strand to SEQ ID NO: 2549988
caucacguggacaucagug

SEQ ID NO: 2549990 - RNA, 19 nt, Artificial Sequence
  Description of Artificial Sequence: Synthetic oligonucleotide
  Sense strand starting at position 1261 of SEQ ID NO: 1888687
ugauguccacgugaugcau

SEQ ID NO: 2549991 - RNA, 19 nt, Artificial Sequence
  Description of Artificial Sequence: Synthetic oligonucleotide
  Antisense strand to SEQ ID NO: 2549990
augcaucacguggacauca

SEQ ID NO: 2549992 - RNA, 19 nt, Artificial Sequence
  Description of Artificial Sequence: Synthetic oligonucleotide
  Sense strand starting at position 2435 of SEQ ID NO: 1888687
gauacuggugccugaguua

SEQ ID NO: 2549993 - RNA, 19 nt, Artificial Sequence
  Description of Artificial Sequence: Synthetic oligonucleotide
  Antisense strand to SEQ ID NO: 2549992
uaacucaggcaccaguauc

SEQ ID NO: 2549994 - RNA, 19 nt, Artificial Sequence
  Description of Artificial Sequence: Synthetic oligonucleotide
  Sense strand starting at position 2434 of SEQ ID NO: 1888687
ggauacuggugccugaguu

SEQ ID NO: 2549995 - RNA, 19 nt, Artificial Sequence
  Description of Artificial Sequence: Synthetic oligonucleotide
  Antisense strand to SEQ ID NO: 2549994
aacucaggcaccaguaucc

SEQ ID NO: 2549996 - RNA, 19 nt, Artificial Sequence
  Description of Artificial Sequence: Synthetic oligonucleotide
  Sense strand starting at position 1777 of SEQ ID NO: 1888687
gggacugacuaacauaauu

SEQ ID NO: 2549997 - RNA, 19 nt, Artificial Sequence
  Description of Artificial Sequence: Synthetic oligonucleotide
  Antisense strand to SEQ ID NO: 2549996
aauuauguuagucaguccc

SEQ ID NO: 2549998 - RNA, 19 nt, Artificial Sequence
  Description of Artificial Sequence: Synthetic oligonucleotide
  Sense strand starting at position 1017 of SEQ ID NO: 1888687
agcguaucccaaggucaga

SEQ ID NO: 2549999 - RNA, 19 nt, Artificial Sequence
  Description of Artificial Sequence: Synthetic oligonucleotide
  Antisense strand to SEQ ID NO: 2549998
ucugaccuugggauacgcu

SEQ ID NO: 2550000 - RNA, 19 nt, Artificial Sequence
  Description of Artificial Sequence: Synthetic oligonucleotide
  Sense strand starting at position 1929 of SEQ ID NO: 1888687
agagaaugguucuacacug

SEQ ID NO: 2550001 - RNA, 19 nt, Artificial Sequence
  Description of Artificial Sequence: Synthetic oligonucleotide
  Antisense strand to SEQ ID NO: 2550000
caguguagaaccauucucu

SEQ ID NO: 2550002 - RNA, 19 nt, Artificial Sequence
  Description of Artificial Sequence: Synthetic oligonucleotide
  Sense strand starting at position 3149 of SEQ ID NO: 1888687
caacuagguuuccaggaga

SEQ ID NO: 2550003 - RNA, 19 nt, Artificial Sequence
  Description of Artificial Sequence: Synthetic oligonucleotide
  Antisense strand to SEQ ID NO: 2550002
ucuccuggaaaccuaguug

SEQ ID NO: 2550004 - RNA, 19 nt, Artificial Sequence
  Description of Artificial Sequence: Synthetic oligonucleotide
  Sense strand starting at position 3345 of SEQ ID NO: 1888687
auaggucacuucuacuaag

SEQ ID NO: 2550005 - RNA, 19 nt, Artificial Sequence
  Description of Artificial Sequence: Synthetic oligonucleotide
  Antisense strand to SEQ ID NO: 2550004
cuuaguagaagugaccuau

SEQ ID NO: 2550006 - RNA, 19 nt, Artificial Sequence
  Description of Artificial Sequence: Synthetic oligonucleotide
  Sense strand starting at position 859 of SEQ ID NO: 1888687
gcuugccguccuugauaag

SEQ ID NO: 2550007 - RNA, 19 nt, Artificial Sequence
  Description of Artificial Sequence: Synthetic oligonucleotide
  Antisense strand to SEQ ID NO: 2550006
cuuaucaaggacggcaagc

SEQ ID NO: 2550008 - RNA, 19 nt, Artificial Sequence
  Description of Artificial Sequence: Synthetic oligonucleotide
  Sense strand starting at position 1843 of SEQ ID NO: 1888687
ccaggaacguguuaagaag

SEQ ID NO: 2550009 - RNA, 19 nt, Artificial Sequence
  Description of Artificial Sequence: Synthetic oligonucleotide
  Antisense strand to SEQ ID NO: 2550008
cuucuuaacacguuccugg

SEQ ID NO: 2550010 - RNA, 19 nt, Artificial Sequence
  Description of Artificial Sequence: Synthetic oligonucleotide
  Sense strand starting at position 2354 of SEQ ID NO: 1888687
gccaguaacucugaacaag

SEQ ID NO: 2550011 - RNA, 19 nt, Artificial Sequence
  Description of Artificial Sequence: Synthetic oligonucleotide
  Antisense strand to SEQ ID NO: 2550010
cuuguucagaguuacuggc

SEQ ID NO: 2550012 - RNA, 19 nt, Artificial Sequence
  Description of Artificial Sequence: Synthetic oligonucleotide
  Sense strand starting at position 943 of SEQ ID NO: 1888688
agccucucuccugaagaaa

SEQ ID NO: 2550013 - RNA, 19 nt, Artificial Sequence
  Description of Artificial Sequence: Synthetic oligonucleotide
  Antisense strand to SEQ ID NO: 2550012
uuucuucaggagagaggcu

SEQ ID NO: 2550014 - RNA, 19 nt, Artificial Sequence
  Description of Artificial Sequence: Synthetic oligonucleotide
  Sense strand starting at position 2253 of SEQ ID NO: 1888688
cagcuugccguccuugaua

SEQ ID NO: 2550015 - RNA, 19 nt, Artificial Sequence
  Description of Artificial Sequence: Synthetic oligonucleotide
  Antisense strand to SEQ ID NO: 2550014
uaucaaggacggcaagcug

SEQ ID NO: 2550016 - RNA, 19 nt, Artificial Sequence
  Description of Artificial Sequence: Synthetic oligonucleotide
  Sense strand starting at position 1268 of SEQ ID NO: 1888688
agaggugcucaccaugaau

SEQ ID NO: 2550017 - RNA, 19 nt, Artificial Sequence
  Description of Artificial Sequence: Synthetic oligonucleotide
  Antisense strand to SEQ ID NO: 2550016
auucauggugagcaccucu

SEQ ID NO: 2550018 - RNA, 19 nt, Artificial Sequence
  Description of Artificial Sequence: Synthetic oligonucleotide
  Sense strand starting at position 3322 of SEQ ID NO: 1888688
aguagagaaugguucuaca

SEQ ID NO: 2550019 - RNA, 19 nt, Artificial Sequence
  Description of Artificial Sequence: Synthetic oligonucleotide
  Antisense strand to SEQ ID NO: 2550018
uguagaaccauucucuacu

SEQ ID NO: 2550020 - RNA, 19 nt, Artificial Sequence
  Description of Artificial Sequence: Synthetic oligonucleotide
  Sense strand starting at position 362 of SEQ ID NO: 1888688
agccaagucccagaaggua

SEQ ID NO: 2550021 - RNA, 19 nt, Artificial Sequence
  Description of Artificial Sequence: Synthetic oligonucleotide
  Antisense strand to SEQ ID NO: 2550020
uaccuucugggacuuggcu

SEQ ID NO: 2550022 - RNA, 19 nt, Artificial Sequence
  Description of Artificial Sequence: Synthetic oligonucleotide
  Sense strand starting at position 2188 of SEQ ID NO: 1888688
uuacuuaccagaggguuga

SEQ ID NO: 2550023 - RNA, 19 nt, Artificial Sequence
  Description of Artificial Sequence: Synthetic oligonucleotide
  Antisense strand to SEQ ID NO: 2550022
ucaacccucugguaaguaa

SEQ ID NO: 2550024 - RNA, 19 nt, Artificial Sequence
  Description of Artificial Sequence: Synthetic oligonucleotide
  Sense strand starting at position 3022 of SEQ ID NO: 1888688
gggucaucugagggaguga

SEQ ID NO: 2550025 - RNA, 19 nt, Artificial Sequence
  Description of Artificial Sequence: Synthetic oligonucleotide
  Antisense strand to SEQ ID NO: 2550024
ucacucccucagaugaccc

SEQ ID NO: 2550026 - RNA, 19 nt, Artificial Sequence
  Description of Artificial Sequence: Synthetic oligonucleotide
  Sense strand starting at position 2086 of SEQ ID NO: 1888688
uguuguguuggcuucaguu

SEQ ID NO: 2550027 - RNA, 19 nt, Artificial Sequence
  Description of Artificial Sequence: Synthetic oligonucleotide
  Antisense strand to SEQ ID NO: 2550026
aacugaagccaacacaaca

SEQ ID NO: 2550028 - RNA, 19 nt, Artificial Sequence
  Description of Artificial Sequence: Synthetic oligonucleotide
  Sense strand starting at position 3100 of SEQ ID NO: 1888688
gggugucacccugaacuca

SEQ ID NO: 2550029 - RNA, 19 nt, Artificial Sequence
  Description of Artificial Sequence: Synthetic oligonucleotide
  Antisense strand to SEQ ID NO: 2550028
ugaguucagggugacaccc

SEQ ID NO: 2550030 - RNA, 19 nt, Artificial Sequence
  Description of Artificial Sequence: Synthetic oligonucleotide
  Sense strand starting at position 479 of SEQ ID NO: 1888688
auguucucccaguaccaga

SEQ ID NO: 2550031 - RNA, 19 nt, Artificial Sequence
  Description of Artificial Sequence: Synthetic oligonucleotide
  Antisense strand to SEQ ID NO: 2550030
ucugguacugggagaacau

SEQ ID NO: 2550032 - RNA, 19 nt, Artificial Sequence
  Description of Artificial Sequence: Synthetic oligonucleotide
  Sense strand starting at position 7 of SEQ ID NO: 1888688
gcaccuugagucugaggga

SEQ ID NO: 2550033 - RNA, 19 nt, Artificial Sequence
  Description of Artificial Sequence: Synthetic oligonucleotide
  Antisense strand to SEQ ID NO: 2550032
ucccucagacucaaggugc

SEQ ID NO: 2550034 - RNA, 19 nt, Artificial Sequence
  Description of Artificial Sequence: Synthetic oligonucleotide
  Sense strand starting at position 1856 of SEQ ID NO: 1888688
gggauugucgugcagauga

SEQ ID NO: 2550035 - RNA, 19 nt, Artificial Sequence
  Description of Artificial Sequence: Synthetic oligonucleotide
  Antisense strand to SEQ ID NO: 2550034
ucaucugcacgacaauccc

SEQ ID NO: 2550036 - RNA, 19 nt, Artificial Sequence
  Description of Artificial Sequence: Synthetic oligonucleotide
  Sense strand starting at position 3320 of SEQ ID NO: 1888688
gcaguagagaaugguucua

SEQ ID NO: 2550037 - RNA, 19 nt, Artificial Sequence
  Description of Artificial Sequence: Synthetic oligonucleotide
  Antisense strand to SEQ ID NO: 2550036
uagaaccauucucuacugc

SEQ ID NO: 2550038 - RNA, 19 nt, Artificial Sequence
  Description of Artificial Sequence: Synthetic oligonucleotide
  Sense strand starting at position 3208 of SEQ ID NO: 1888688
aguuaucaguaggcuacaa

SEQ ID NO: 2550039 - RNA, 19 nt, Artificial Sequence
  Description of Artificial Sequence: Synthetic oligonucleotide
  Antisense strand to SEQ ID NO: 2550038
uuguagccuacugauaacu

SEQ ID NO: 2550040 - RNA, 19 nt, Artificial Sequence
  Description of Artificial Sequence: Synthetic oligonucleotide
  Sense strand starting at position 3295 of SEQ ID NO: 1888688
ccacaaggcuguucucaga

SEQ ID NO: 2550041 - RNA, 19 nt, Artificial Sequence
  Description of Artificial Sequence: Synthetic oligonucleotide
  Antisense strand to SEQ ID NO: 2550040
ucugagaacagccuugugg

SEQ ID NO: 2550042 - RNA, 19 nt, Artificial Sequence
  Description of Artificial Sequence: Synthetic oligonucleotide
  Sense strand starting at position 544 of SEQ ID NO: 1888688
gccacccuucccuggauua

SEQ ID NO: 2550043 - RNA, 19 nt, Artificial Sequence
  Description of Artificial Sequence: Synthetic oligonucleotide
  Antisense strand to SEQ ID NO: 2550042
uaauccagggaaggguggc

SEQ ID NO: 2550044 - RNA, 19 nt, Artificial Sequence
  Description of Artificial Sequence: Synthetic oligonucleotide
  Sense strand starting at position 3207 of SEQ ID NO: 1888688
caguuaucaguaggcuaca

SEQ ID NO: 2550045 - RNA, 19 nt, Artificial Sequence
  Description of Artificial Sequence: Synthetic oligonucleotide
  Antisense strand to SEQ ID NO: 2550044
uguagccuacugauaacug

SEQ ID NO: 2550046 - RNA, 19 nt, Artificial Sequence
  Description of Artificial Sequence: Synthetic oligonucleotide
  Sense strand starting at position 2663 of SEQ ID NO: 1888688
ccacgugaugcauaagcua

SEQ ID NO: 2550047 - RNA, 19 nt, Artificial Sequence
  Description of Artificial Sequence: Synthetic oligonucleotide
  Antisense strand to SEQ ID NO: 2550046
uagcuuaugcaucacgugg

SEQ ID NO: 2550048 - RNA, 19 nt, Artificial Sequence
  Description of Artificial Sequence: Synthetic oligonucleotide
  Sense strand starting at position 3236 of SEQ ID NO: 1888688
gguccaggaacguguuaag

SEQ ID NO: 2550049 - RNA, 19 nt, Artificial Sequence
  Description of Artificial Sequence: Synthetic oligonucleotide
  Antisense strand to SEQ ID NO: 2550048
cuuaacacguuccuggacc

SEQ ID NO: 2550050 - RNA, 19 nt, Artificial Sequence
  Description of Artificial Sequence: Synthetic oligonucleotide
  Sense strand starting at position 3205 of SEQ ID NO: 1888688
ugcaguuaucaguaggcua

SEQ ID NO: 2550051 - RNA, 19 nt, Artificial Sequence
  Description of Artificial Sequence: Synthetic oligonucleotide
  Antisense strand to SEQ ID NO: 2550050
uagccuacugauaacugca

SEQ ID NO: 2550052 - RNA, 19 nt, Artificial Sequence
  Description of Artificial Sequence: Synthetic oligonucleotide
  Sense strand starting at position 2654 of SEQ ID NO: 1888688
cacugauguccacgugaug

SEQ ID NO: 2550053 - RNA, 19 nt, Artificial Sequence
  Description of Artificial Sequence: Synthetic oligonucleotide
  Antisense strand to SEQ ID NO: 2550052
caucacguggacaucagug

SEQ ID NO: 2550054 - RNA, 19 nt, Artificial Sequence
  Description of Artificial Sequence: Synthetic oligonucleotide
  Sense strand starting at position 2657 of SEQ ID NO: 1888688
ugauguccacgugaugcau

SEQ ID NO: 2550055 - RNA, 19 nt, Artificial Sequence
  Description of Artificial Sequence: Synthetic oligonucleotide
  Antisense strand to SEQ ID NO: 2550054
augcaucacguggacauca

SEQ ID NO: 2550056 - RNA, 19 nt, Artificial Sequence
  Description of Artificial Sequence: Synthetic oligonucleotide
  Sense strand starting at position 3831 of SEQ ID NO: 1888688
gauacuggugccugaguua

SEQ ID NO: 2550057 - RNA, 19 nt, Artificial Sequence
  Description of Artificial Sequence: Synthetic oligonucleotide
  Antisense strand to SEQ ID NO: 2550056
uaacucaggcaccaguauc

SEQ ID NO: 2550058 - RNA, 19 nt, Artificial Sequence
  Description of Artificial Sequence: Synthetic oligonucleotide
  Sense strand starting at position 3830 of SEQ ID NO: 1888688
ggauacuggugccugaguu

SEQ ID NO: 2550059 - RNA, 19 nt, Artificial Sequence
  Description of Artificial Sequence: Synthetic oligonucleotide
  Antisense strand to SEQ ID NO: 2550058
aacucaggcaccaguaucc

SEQ ID NO: 2550060 - RNA, 19 nt, Artificial Sequence
  Description of Artificial Sequence: Synthetic oligonucleotide
  Sense strand starting at position 3173 of SEQ ID NO: 1888688
gggacugacuaacauaauu

SEQ ID NO: 2550061 - RNA, 19 nt, Artificial Sequence
  Description of Artificial Sequence: Synthetic oligonucleotide
  Antisense strand to SEQ ID NO: 2550060
aauuauguuagucaguccc

SEQ ID NO: 2550062 - RNA, 19 nt, Artificial Sequence
  Description of Artificial Sequence: Synthetic oligonucleotide
  Sense strand starting at position 2413 of SEQ ID NO: 1888688
agcguaucccaaggucaga

SEQ ID NO: 2550063 - RNA, 19 nt, Artificial Sequence
  Description of Artificial Sequence: Synthetic oligonucleotide
  Antisense strand to SEQ ID NO: 2550062
ucugaccuugggauacgcu

SEQ ID NO: 2550064 - RNA, 19 nt, Artificial Sequence
  Description of Artificial Sequence: Synthetic oligonucleotide
  Sense strand starting at position 3325 of SEQ ID NO: 1888688
agagaaugguucuacacug

SEQ ID NO: 2550065 - RNA, 19 nt, Artificial Sequence
  Description of Artificial Sequence: Synthetic oligonucleotide
  Antisense strand to SEQ ID NO: 2550064
caguguagaaccauucucu

SEQ ID NO: 2550066 - RNA, 19 nt, Artificial Sequence
  Description of Artificial Sequence: Synthetic oligonucleotide
  Sense strand starting at position 2255 of SEQ ID NO: 1888688
gcuugccguccuugauaag

SEQ ID NO: 2550067 - RNA, 19 nt, Artificial Sequence
  Description of Artificial Sequence: Synthetic oligonucleotide
  Antisense strand to SEQ ID NO: 2550066
cuuaucaaggacggcaagc

SEQ ID NO: 2550068 - RNA, 19 nt, Artificial Sequence
  Description of Artificial Sequence: Synthetic oligonucleotide
  Sense strand starting at position 3239 of SEQ ID NO: 1888688
ccaggaacguguuaagaag

SEQ ID NO: 2550069 - RNA, 19 nt, Artificial Sequence
  Description of Artificial Sequence: Synthetic oligonucleotide
  Antisense strand to SEQ ID NO: 2550068
cuucuuaacacguuccugg

SEQ ID NO: 2550070 - RNA, 19 nt, Artificial Sequence
  Description of Artificial Sequence: Synthetic oligonucleotide
  Sense strand starting at position 3750 of SEQ ID NO: 1888688
gccaguaacucugaacaag

SEQ ID NO: 2550071 - RNA, 19 nt, Artificial Sequence
  Description of Artificial Sequence: Synthetic oligonucleotide
  Antisense strand to SEQ ID NO: 2550070
cuuguucagaguuacuggc

SEQ ID NO: 2550072 - RNA, 19 nt, Artificial Sequence
  Description of Artificial Sequence: Synthetic oligonucleotide
  Sense strand starting at position 3842 of SEQ ID NO: 1888688
cugaguuacugucaggaug

SEQ ID NO: 2550073 - RNA, 19 nt, Artificial Sequence
  Description of Artificial Sequence: Synthetic oligonucleotide
  Antisense strand to SEQ ID NO: 2550072
cauccugacaguaacucag

SEQ ID NO: 2550074 - RNA, 19 nt, Artificial Sequence
  Description of Artificial Sequence: Synthetic oligonucleotide
  Sense strand starting at position 3844 of SEQ ID NO: 1888688
gaguuacugucaggaugag

SEQ ID NO: 2550075 - RNA, 19 nt, Artificial Sequence
  Description of Artificial Sequence: Synthetic oligonucleotide
  Antisense strand to SEQ ID NO: 2550074
cucauccugacaguaacuc

SEQ ID NO: 2550076 - RNA, 19 nt, Artificial Sequence
  Description of Artificial Sequence: Synthetic oligonucleotide
  Sense strand starting at position 720 of SEQ ID NO: 1888688
gccucacccuggugacaaa

SEQ ID NO: 2550077 - RNA, 19 nt, Artificial Sequence
  Description of Artificial Sequence: Synthetic oligonucleotide
  Antisense strand to SEQ ID NO: 2550076
uuugucaccagggugaggc

SEQ ID NO: 2550078 - RNA, 19 nt, Artificial Sequence
  Description of Artificial Sequence: Synthetic oligonucleotide
  Sense strand starting at position 2258 of SEQ ID NO: 1888688
ugccguccuugauaaggua

SEQ ID NO: 2550079 - RNA, 19 nt, Artificial Sequence
  Description of Artificial Sequence: Synthetic oligonucleotide
  Antisense strand to SEQ ID NO: 2550078
uaccuuaucaaggacggca

SEQ ID NO: 2550080 - RNA, 19 nt, Artificial Sequence
  Description of Artificial Sequence: Synthetic oligonucleotide
  Sense strand starting at position 3718 of SEQ ID NO: 1888688
cggccugauugaugucaag

SEQ ID NO: 2550081 - RNA, 19 nt, Artificial Sequence
  Description of Artificial Sequence: Synthetic oligonucleotide
  Antisense strand to SEQ ID NO: 2550080
cuugacaucaaucaggccg

SEQ ID NO: 2550082 - RNA, 19 nt, Artificial Sequence
  Description of Artificial Sequence: Synthetic oligonucleotide
  Sense strand starting at position 2659 of SEQ ID NO: 1888688
auguccacgugaugcauaa

SEQ ID NO: 2550083 - RNA, 19 nt, Artificial Sequence
  Description of Artificial Sequence: Synthetic oligonucleotide
  Antisense strand to SEQ ID NO: 2550082
uuaugcaucacguggacau

SEQ ID NO: 2550084 - RNA, 19 nt, Artificial Sequence
  Description of Artificial Sequence: Synthetic oligonucleotide
  Sense strand starting at position 3912 of SEQ ID NO: 1888688
gcccaauguuccuguggcu

SEQ ID NO: 2550085 - RNA, 19 nt, Artificial Sequence
  Description of Artificial Sequence: Synthetic oligonucleotide
  Antisense strand to SEQ ID NO: 2550084
agccacaggaacauugggc

SEQ ID NO: 2550086 - RNA, 19 nt, Artificial Sequence
  Description of Artificial Sequence: Synthetic oligonucleotide
  Sense strand starting at position 993 of SEQ ID NO: 1888689
auggauagaacguaagguu

SEQ ID NO: 2550087 - RNA, 19 nt, Artificial Sequence
  Description of Artificial Sequence: Synthetic oligonucleotide
  Antisense strand to SEQ ID NO: 2550086
aaccuuacguucuauccau

SEQ ID NO: 2550088 - RNA, 19 nt, Artificial Sequence
  Description of Artificial Sequence: Synthetic oligonucleotide
  Sense strand starting at position 375 of SEQ ID NO: 1888689
cccuuaauuguagaugauu

SEQ ID NO: 2550089 - RNA, 19 nt, Artificial Sequence
  Description of Artificial Sequence: Synthetic oligonucleotide
  Antisense strand to SEQ ID NO: 2550088
aaucaucuacaauuaaggg

SEQ ID NO: 2550090 - RNA, 19 nt, Artificial Sequence
  Description of Artificial Sequence: Synthetic oligonucleotide
  Sense strand starting at position 3197 of SEQ ID NO: 1888689
acgugauuccuguccugcu

SEQ ID NO: 2550091 - RNA, 19 nt, Artificial Sequence
  Description of Artificial Sequence: Synthetic oligonucleotide
  Antisense strand to SEQ ID NO: 2550090
agcaggacaggaaucacgu

SEQ ID NO: 2550092 - RNA, 19 nt, Artificial Sequence
  Description of Artificial Sequence: Synthetic oligonucleotide
  Sense strand starting at position 1317 of SEQ ID NO: 1888689
cagaaaugacuucgagauu

SEQ ID NO: 2550093 - RNA, 19 nt, Artificial Sequence
  Description of Artificial Sequence: Synthetic oligonucleotide
  Antisense strand to SEQ ID NO: 2550092
aaucucgaagucauuucug

SEQ ID NO: 2550094 - RNA, 19 nt, Artificial Sequence
  Description of Artificial Sequence: Synthetic oligonucleotide
  Sense strand starting at position 2071 of SEQ ID NO: 1888689
uacggauaaaguuagguau

SEQ ID NO: 2550095 - RNA, 19 nt, Artificial Sequence
  Description of Artificial Sequence: Synthetic oligonucleotide
  Antisense strand to SEQ ID NO: 2550094
auaccuaacuuuauccgua

SEQ ID NO: 2550096 - RNA, 19 nt, Artificial Sequence
  Description of Artificial Sequence: Synthetic oligonucleotide
  Sense strand starting at position 3930 of SEQ ID NO: 1888689
ugcugucuugugccacauu

SEQ ID NO: 2550097 - RNA, 19 nt, Artificial Sequence
  Description of Artificial Sequence: Synthetic oligonucleotide
  Antisense strand to SEQ ID NO: 2550096
aauguggcacaagacagca

SEQ ID NO: 2550098 - RNA, 19 nt, Artificial Sequence
  Description of Artificial Sequence: Synthetic oligonucleotide
  Sense strand starting at position 2063 of SEQ ID NO: 1888689
guaucugguacggauaaag

SEQ ID NO: 2550099 - RNA, 19 nt, Artificial Sequence
  Description of Artificial Sequence: Synthetic oligonucleotide
  Antisense strand to SEQ ID NO: 2550098
cuuuauccguaccagauac

SEQ ID NO: 2550100 - RNA, 19 nt, Artificial Sequence
  Description of Artificial Sequence: Synthetic oligonucleotide
  Sense strand starting at position 3595 of SEQ ID NO: 1888689
gagucugagauggguuaag

SEQ ID NO: 2550101 - RNA, 19 nt, Artificial Sequence
  Description of Artificial Sequence: Synthetic oligonucleotide
  Antisense strand to SEQ ID NO: 2550100
cuuaacccaucucagacuc

SEQ ID NO: 2550102 - RNA, 19 nt, Artificial Sequence
  Description of Artificial Sequence: Synthetic oligonucleotide
  Sense strand starting at position 3149 of SEQ ID NO: 1888689
augucuuggccguuaguuu

SEQ ID NO: 2550103 - RNA, 19 nt, Artificial Sequence
  Description of Artificial Sequence: Synthetic oligonucleotide
  Antisense strand to SEQ ID NO: 2550102
aaacuaacggccaagacau

SEQ ID NO: 2550104 - RNA, 19 nt, Artificial Sequence
  Description of Artificial Sequence: Synthetic oligonucleotide
  Sense strand starting at position 170 of SEQ ID NO: 1888689
ggcaaauaugugcaagaug

SEQ ID NO: 2550105 - RNA, 19 nt, Artificial Sequence
  Description of Artificial Sequence: Synthetic oligonucleotide
  Antisense strand to SEQ ID NO: 2550104
caucuugcacauauuugcc

SEQ ID NO: 2550106 - RNA, 19 nt, Artificial Sequence
  Description of Artificial Sequence: Synthetic oligonucleotide
  Sense strand starting at position 356 of SEQ ID NO: 1888689
uugcacuguuauuuguuaa

SEQ ID NO: 2550107 - RNA, 19 nt, Artificial Sequence
  Description of Artificial Sequence: Synthetic oligonucleotide
  Antisense strand to SEQ ID NO: 2550106
uuaacaaauaacagugcaa

SEQ ID NO: 2550108 - RNA, 19 nt, Artificial Sequence
  Description of Artificial Sequence: Synthetic oligonucleotide
  Sense strand starting at position 3594 of SEQ ID NO: 1888689
ugagucugagauggguuaa

SEQ ID NO: 2550109 - RNA, 19 nt, Artificial Sequence
  Description of Artificial Sequence: Synthetic oligonucleotide
  Antisense strand to SEQ ID NO: 2550108
uuaacccaucucagacuca

SEQ ID NO: 2550110 - RNA, 19 nt, Artificial Sequence
  Description of Artificial Sequence: Synthetic oligonucleotide
  Sense strand starting at position 1992 of SEQ ID NO: 1888689
aggacuucccgucacaauu

SEQ ID NO: 2550111 - RNA, 19 nt, Artificial Sequence
  Description of Artificial Sequence: Synthetic oligonucleotide
  Antisense strand to SEQ ID NO: 2550110
aauugugacgggaaguccu

SEQ ID NO: 2550112 - RNA, 19 nt, Artificial Sequence
  Description of Artificial Sequence: Synthetic oligonucleotide
  Sense strand starting at position 710 of SEQ ID NO: 1888689
aggaaaugcuugucaugga

SEQ ID NO: 2550113 - RNA, 19 nt, Artificial Sequence
  Description of Artificial Sequence: Synthetic oligonucleotide
  Antisense strand to SEQ ID NO: 2550112
uccaugacaagcauuuccu

SEQ ID NO: 2550114 - RNA, 19 nt, Artificial Sequence
  Description of Artificial Sequence: Synthetic oligonucleotide
  Sense strand starting at position 714 of SEQ ID NO: 1888689
aaugcuugucauggaggaa

SEQ ID NO: 2550115 - RNA, 19 nt, Artificial Sequence
  Description of Artificial Sequence: Synthetic oligonucleotide
  Antisense strand to SEQ ID NO: 2550114
uuccuccaugacaagcauu

SEQ ID NO: 2550116 - RNA, 19 nt, Artificial Sequence
  Description of Artificial Sequence: Synthetic oligonucleotide
  Sense strand starting at position 3593 of SEQ ID NO: 1888689
cugagucugagauggguua

SEQ ID NO: 2550117 - RNA, 19 nt, Artificial Sequence
  Description of Artificial Sequence: Synthetic oligonucleotide
  Antisense strand to SEQ ID NO: 2550116
uaacccaucucagacucag

SEQ ID NO: 2550118 - RNA, 19 nt, Artificial Sequence
  Description of Artificial Sequence: Synthetic oligonucleotide
  Sense strand starting at position 2253 of SEQ ID NO: 1888689
caggaaaugcacgagcuuu

SEQ ID NO: 2550119 - RNA, 19 nt, Artificial Sequence
  Description of Artificial Sequence: Synthetic oligonucleotide
  Antisense strand to SEQ ID NO: 2550118
aaagcucgugcauuuccug

SEQ ID NO: 2550120 - RNA, 19 nt, Artificial Sequence
  Description of Artificial Sequence: Synthetic oligonucleotide
  Sense strand starting at position 1329 of SEQ ID NO: 1888689
cgagauuacugccuggaag

SEQ ID NO: 2550121 - RNA, 19 nt, Artificial Sequence
  Description of Artificial Sequence: Synthetic oligonucleotide
  Antisense strand to SEQ ID NO: 2550120
cuuccaggcaguaaucucg

SEQ ID NO: 2550122 - RNA, 19 nt, Artificial Sequence
  Description of Artificial Sequence: Synthetic oligonucleotide
  Sense strand starting at position 1332 of SEQ ID NO: 1888689
gauuacugccuggaagcuu

SEQ ID NO: 2550123 - RNA, 19 nt, Artificial Sequence
  Description of Artificial Sequence: Synthetic oligonucleotide
  Antisense strand to SEQ ID NO: 2550122
aagcuuccaggcaguaauc

SEQ ID NO: 2550124 - RNA, 19 nt, Artificial Sequence
  Description of Artificial Sequence: Synthetic oligonucleotide
  Sense strand starting at position 815 of SEQ ID NO: 1888689
ucaacuuaagcguaccuaa

SEQ ID NO: 2550125 - RNA, 19 nt, Artificial Sequence
  Description of Artificial Sequence: Synthetic oligonucleotide
  Antisense strand to SEQ ID NO: 2550124
uuagguacgcuuaaguuga

SEQ ID NO: 2550126 - RNA, 19 nt, Artificial Sequence
  Description of Artificial Sequence: Synthetic oligonucleotide
  Sense strand starting at position 370 of SEQ ID NO: 1888689
guuaacccuuaauuguaga

SEQ ID NO: 2550127 - RNA, 19 nt, Artificial Sequence
  Description of Artificial Sequence: Synthetic oligonucleotide
  Antisense strand to SEQ ID NO: 2550126
ucuacaauuaaggguuaac

SEQ ID NO: 2550128 - RNA, 19 nt, Artificial Sequence
  Description of Artificial Sequence: Synthetic oligonucleotide
  Sense strand starting at position 2061 of SEQ ID NO: 1888689
agguaucugguacggauaa

SEQ ID NO: 2550129 - RNA, 19 nt, Artificial Sequence
  Description of Artificial Sequence: Synthetic oligonucleotide
  Antisense strand to SEQ ID NO: 2550128
uuauccguaccagauaccu

SEQ ID NO: 2550130 - RNA, 19 nt, Artificial Sequence
  Description of Artificial Sequence: Synthetic oligonucleotide
  Sense strand starting at position 367 of SEQ ID NO: 1888689
uuuguuaacccuuaauugu

SEQ ID NO: 2550131 - RNA, 19 nt, Artificial Sequence
  Description of Artificial Sequence: Synthetic oligonucleotide
  Antisense strand to SEQ ID NO: 2550130
acaauuaaggguuaacaaa

SEQ ID NO: 2550132 - RNA, 19 nt, Artificial Sequence
  Description of Artificial Sequence: Synthetic oligonucleotide
  Sense strand starting at position 355 of SEQ ID NO: 1888689
guugcacuguuauuuguua

SEQ ID NO: 2550133 - RNA, 19 nt, Artificial Sequence
  Description of Artificial Sequence: Synthetic oligonucleotide
  Antisense strand to SEQ ID NO: 2550132
uaacaaauaacagugcaac

SEQ ID NO: 2550134 - RNA, 19 nt, Artificial Sequence
  Description of Artificial Sequence: Synthetic oligonucleotide
  Sense strand starting at position 697 of SEQ ID NO: 1888689
acgugcuauaugcaggaaa

SEQ ID NO: 2550135 - RNA, 19 nt, Artificial Sequence
  Description of Artificial Sequence: Synthetic oligonucleotide
  Antisense strand to SEQ ID NO: 2550134
uuuccugcauauagcacgu

SEQ ID NO: 2550136 - RNA, 19 nt, Artificial Sequence
  Description of Artificial Sequence: Synthetic oligonucleotide
  Sense strand starting at position 1330 of SEQ ID NO: 1888689
gagauuacugccuggaagc

SEQ ID NO: 2550137 - RNA, 19 nt, Artificial Sequence
  Description of Artificial Sequence: Synthetic oligonucleotide
  Antisense strand to SEQ ID NO: 2550136
gcuuccaggcaguaaucuc

SEQ ID NO: 2550138 - RNA, 19 nt, Artificial Sequence
  Description of Artificial Sequence: Synthetic oligonucleotide
  Sense strand starting at position 3239 of SEQ ID NO: 1888689
cggaguucuagcuaguaaa

SEQ ID NO: 2550139 - RNA, 19 nt, Artificial Sequence
  Description of Artificial Sequence: Synthetic oligonucleotide
  Antisense strand to SEQ ID NO: 2550138
uuuacuagcuagaacuccg

SEQ ID NO: 2550140 - RNA, 19 nt, Artificial Sequence
  Description of Artificial Sequence: Synthetic oligonucleotide
  Sense strand starting at position 169 of SEQ ID NO: 1888689
uggcaaauaugugcaagau

SEQ ID NO: 2550141 - RNA, 19 nt, Artificial Sequence
  Description of Artificial Sequence: Synthetic oligonucleotide
  Antisense strand to SEQ ID NO: 2550140
aucuugcacauauuugcca

SEQ ID NO: 2550142 - RNA, 19 nt, Artificial Sequence
  Description of Artificial Sequence: Synthetic oligonucleotide
  Sense strand starting at position 168 of SEQ ID NO: 1888689
cuggcaaauaugugcaaga

SEQ ID NO: 2550143 - RNA, 19 nt, Artificial Sequence
  Description of Artificial Sequence: Synthetic oligonucleotide
  Antisense strand to SEQ ID NO: 2550142
ucuugcacauauuugccag

SEQ ID NO: 2550144 - RNA, 19 nt, Artificial Sequence
  Description of Artificial Sequence: Synthetic oligonucleotide
  Sense strand starting at position 1331 of SEQ ID NO: 1888689
agauuacugccuggaagcu

SEQ ID NO: 2550145 - RNA, 19 nt, Artificial Sequence
  Description of Artificial Sequence: Synthetic oligonucleotide
  Antisense strand to SEQ ID NO: 2550144
agcuuccaggcaguaaucu

SEQ ID NO: 2550146 - RNA, 19 nt, Artificial Sequence
  Description of Artificial Sequence: Synthetic oligonucleotide
  Sense strand starting at position 3469 of SEQ ID NO: 1888689
gggaguguucuaugaggca

SEQ ID NO: 2550147 - RNA, 19 nt, Artificial Sequence
  Description of Artificial Sequence: Synthetic oligonucleotide
  Antisense strand to SEQ ID NO: 2550146
ugccucauagaacacuccc

SEQ ID NO: 2550148 - RNA, 19 nt, Artificial Sequence
  Description of Artificial Sequence: Synthetic oligonucleotide
  Sense strand starting at position 3249 of SEQ ID NO: 1888689
gcuaguaaacucugaagug

SEQ ID NO: 2550149 - RNA, 19 nt, Artificial Sequence
  Description of Artificial Sequence: Synthetic oligonucleotide
  Antisense strand to SEQ ID NO: 2550148
cacuucagaguuuacuagc

SEQ ID NO: 2550150 - RNA, 19 nt, Artificial Sequence
  Description of Artificial Sequence: Synthetic oligonucleotide
  Sense strand starting at position 3726 of SEQ ID NO: 1888689
uuguguuuagaaggcuaaa

SEQ ID NO: 2550151 - RNA, 19 nt, Artificial Sequence
  Description of Artificial Sequence: Synthetic oligonucleotide
  Antisense strand to SEQ ID NO: 2550150
uuuagccuucuaaacacaa

SEQ ID NO: 2550152 - RNA, 19 nt, Artificial Sequence
  Description of Artificial Sequence: Synthetic oligonucleotide
  Sense strand starting at position 242 of SEQ ID NO: 1888689
gagcaucucccauggguca

SEQ ID NO: 2550153 - RNA, 19 nt, Artificial Sequence
  Description of Artificial Sequence: Synthetic oligonucleotide
  Antisense strand to SEQ ID NO: 2550152
ugacccaugggagaugcuc

SEQ ID NO: 2550154 - RNA, 19 nt, Artificial Sequence
  Description of Artificial Sequence: Synthetic oligonucleotide
  Sense strand starting at position 699 of SEQ ID NO: 1888689
gugcuauaugcaggaaaug

SEQ ID NO: 2550155 - RNA, 19 nt, Artificial Sequence
  Description of Artificial Sequence: Synthetic oligonucleotide
  Antisense strand to SEQ ID NO: 2550154
cauuuccugcauauagcac

SEQ ID NO: 2550156 - RNA, 19 nt, Artificial Sequence
  Description of Artificial Sequence: Synthetic oligonucleotide
  Sense strand starting at position 884 of SEQ ID NO: 1888689
ggcuuucagccuuaggagu

SEQ ID NO: 2550157 - RNA, 19 nt, Artificial Sequence
  Description of Artificial Sequence: Synthetic oligonucleotide
  Antisense strand to SEQ ID NO: 2550156
acuccuaaggcugaaagcc

SEQ ID NO: 2550158 - RNA, 19 nt, Artificial Sequence
  Description of Artificial Sequence: Synthetic oligonucleotide
  Sense strand starting at position 767 of SEQ ID NO: 1888689
agcaucaagcagugaacuu

SEQ ID NO: 2550159 - RNA, 19 nt, Artificial Sequence
  Description of Artificial Sequence: Synthetic oligonucleotide
  Antisense strand to SEQ ID NO: 2550158
aaguucacugcuugaugcu

SEQ ID NO: 2550160 - RNA, 19 nt, Artificial Sequence
  Description of Artificial Sequence: Synthetic oligonucleotide
  Sense strand starting at position 417 of SEQ ID NO: 1888689
cgagcuguccaauacagca

SEQ ID NO: 2550161 - RNA, 19 nt, Artificial Sequence
  Description of Artificial Sequence: Synthetic oligonucleotide
  Antisense strand to SEQ ID NO: 2550160
ugcuguauuggacagcucg

SEQ ID NO: 2550162 - RNA, 19 nt, Artificial Sequence
  Description of Artificial Sequence: Synthetic oligonucleotide
  Sense strand starting at position 3975 of SEQ ID NO: 1888689
acagucauagccuggcaga

SEQ ID NO: 2550163 - RNA, 19 nt, Artificial Sequence
  Description of Artificial Sequence: Synthetic oligonucleotide
  Antisense strand to SEQ ID NO: 2550162
ucugccaggcuaugacugu

SEQ ID NO: 2550164 - RNA, 19 nt, Artificial Sequence
  Description of Artificial Sequence: Synthetic oligonucleotide
  Sense strand starting at position 3976 of SEQ ID NO: 1888689
cagucauagccuggcagaa

SEQ ID NO: 2550165 - RNA, 19 nt, Artificial Sequence
  Description of Artificial Sequence: Synthetic oligonucleotide
  Antisense strand to SEQ ID NO: 2550164
uucugccaggcuaugacug

SEQ ID NO: 2550166 - RNA, 19 nt, Artificial Sequence
  Description of Artificial Sequence: Synthetic oligonucleotide
  Sense strand starting at position 2424 of SEQ ID NO: 1888690
agaauaagcgagcaacaua

SEQ ID NO: 2550167 - RNA, 19 nt, Artificial Sequence
  Description of Artificial Sequence: Synthetic oligonucleotide
  Antisense strand to SEQ ID NO: 2550166
uauguugcucgcuuauucu

SEQ ID NO: 2550168 - RNA, 19 nt, Artificial Sequence
  Description of Artificial Sequence: Synthetic oligonucleotide
  Sense strand starting at position 3433 of SEQ ID NO: 1888690
aggcaaauuuggucgugga

SEQ ID NO: 2550169 - RNA, 19 nt, Artificial Sequence
  Description of Artificial Sequence: Synthetic oligonucleotide
  Antisense strand to SEQ ID NO: 2550168
uccacgaccaaauuugccu

SEQ ID NO: 2550170 - RNA, 19 nt, Artificial Sequence
  Description of Artificial Sequence: Synthetic oligonucleotide
  Sense strand starting at position 3877 of SEQ ID NO: 1888690
uguggccuacgcuuguaaa

SEQ ID NO: 2550171 - RNA, 19 nt, Artificial Sequence
  Description of Artificial Sequence: Synthetic oligonucleotide
  Antisense strand to SEQ ID NO: 2550170
uuuacaagcguaggccaca

SEQ ID NO: 2550172 - RNA, 19 nt, Artificial Sequence
  Description of Artificial Sequence: Synthetic oligonucleotide
  Sense strand starting at position 2745 of SEQ ID NO: 1888690
cacgguggucaagaaggau

SEQ ID NO: 2550173 - RNA, 19 nt, Artificial Sequence
  Description of Artificial Sequence: Synthetic oligonucleotide
  Antisense strand to SEQ ID NO: 2550172
auccuucuugaccaccgug

SEQ ID NO: 2550174 - RNA, 19 nt, Artificial Sequence
  Description of Artificial Sequence: Synthetic oligonucleotide
  Sense strand starting at position 1190 of SEQ ID NO: 1888690
agacuuaacuacuuaaggu

SEQ ID NO: 2550175 - RNA, 19 nt, Artificial Sequence
  Description of Artificial Sequence: Synthetic oligonucleotide
  Antisense strand to SEQ ID NO: 2550174
accuuaaguaguuaagucu

SEQ ID NO: 2550176 - RNA, 19 nt, Artificial Sequence
  Description of Artificial Sequence: Synthetic oligonucleotide
  Sense strand starting at position 3673 of SEQ ID NO: 1888690
gugauacauguuuaaucca

SEQ ID NO: 2550177 - RNA, 19 nt, Artificial Sequence
  Description of Artificial Sequence: Synthetic oligonucleotide
  Antisense strand to SEQ ID NO: 2550176
uggauuaaacauguaucac

SEQ ID NO: 2550178 - RNA, 19 nt, Artificial Sequence
  Description of Artificial Sequence: Synthetic oligonucleotide
  Sense strand starting at position 3434 of SEQ ID NO: 1888690
ggcaaauuuggucguggac

SEQ ID NO: 2550179 - RNA, 19 nt, Artificial Sequence
  Description of Artificial Sequence: Synthetic oligonucleotide
  Antisense strand to SEQ ID NO: 2550178
guccacgaccaaauuugcc

SEQ ID NO: 2550180 - RNA, 19 nt, Artificial Sequence
  Description of Artificial Sequence: Synthetic oligonucleotide
  Sense strand starting at position 930 of SEQ ID NO: 1888690
auauuaucauggcuuaaga

SEQ ID NO: 2550181 - RNA, 19 nt, Artificial Sequence
  Description of Artificial Sequence: Synthetic oligonucleotide
  Antisense strand to SEQ ID NO: 2550180
ucuuaagccaugauaauau

SEQ ID NO: 2550182 - RNA, 19 nt, Artificial Sequence
  Description of Artificial Sequence: Synthetic oligonucleotide
  Sense strand starting at position 3742 of SEQ ID NO: 1888690
auaagaaguuaguccauac

SEQ ID NO: 2550183 - RNA, 19 nt, Artificial Sequence
  Description of Artificial Sequence: Synthetic oligonucleotide
  Antisense strand to SEQ ID NO: 2550182
guauggacuaacuucuuau

SEQ ID NO: 2550184 - RNA, 19 nt, Artificial Sequence
  Description of Artificial Sequence: Synthetic oligonucleotide
  Sense strand starting at position 3852 of SEQ ID NO: 1888690
cugaaagauuaucuaggcu

SEQ ID NO: 2550185 - RNA, 19 nt, Artificial Sequence
  Description of Artificial Sequence: Synthetic oligonucleotide
  Antisense strand to SEQ ID NO: 2550184
agccuagauaaucuuucag

SEQ ID NO: 2550186 - RNA, 19 nt, Artificial Sequence
  Description of Artificial Sequence: Synthetic oligonucleotide
  Sense strand starting at position 2304 of SEQ ID NO: 1888690
guucuccucagcguguuua

SEQ ID NO: 2550187 - RNA, 19 nt, Artificial Sequence
  Description of Artificial Sequence: Synthetic oligonucleotide
  Antisense strand to SEQ ID NO: 2550186
uaaacacgcugaggagaac

SEQ ID NO: 2550188 - RNA, 19 nt, Artificial Sequence
  Description of Artificial Sequence: Synthetic oligonucleotide
  Sense strand starting at position 2684 of SEQ ID NO: 1888690
gaaugcugaugccuaagaa

SEQ ID NO: 2550189 - RNA, 19 nt, Artificial Sequence
  Description of Artificial Sequence: Synthetic oligonucleotide
  Antisense strand to SEQ ID NO: 2550188
uucuuaggcaucagcauuc

SEQ ID NO: 2550190 - RNA, 19 nt, Artificial Sequence
  Description of Artificial Sequence: Synthetic oligonucleotide
  Sense strand starting at position 2271 of SEQ ID NO: 1888690
cggaaugaugcucagaguc

SEQ ID NO: 2550191 - RNA, 19 nt, Artificial Sequence
  Description of Artificial Sequence: Synthetic oligonucleotide
  Antisense strand to SEQ ID NO: 2550190
gacucugagcaucauuccg

SEQ ID NO: 2550192 - RNA, 19 nt, Artificial Sequence
  Description of Artificial Sequence: Synthetic oligonucleotide
  Sense strand starting at position 912 of SEQ ID NO: 1888690
cuguuauaagcuugggaaa

SEQ ID NO: 2550193 - RNA, 19 nt, Artificial Sequence
  Description of Artificial Sequence: Synthetic oligonucleotide
  Antisense strand to SEQ ID NO: 2550192
uuucccaagcuuauaacag

SEQ ID NO: 2550194 - RNA, 19 nt, Artificial Sequence
  Description of Artificial Sequence: Synthetic oligonucleotide
  Sense strand starting at position 913 of SEQ ID NO: 1888690
uguuauaagcuugggaaau

SEQ ID NO: 2550195 - RNA, 19 nt, Artificial Sequence
  Description of Artificial Sequence: Synthetic oligonucleotide
  Antisense strand to SEQ ID NO: 2550194
auuucccaagcuuauaaca

SEQ ID NO: 2550196 - RNA, 19 nt, Artificial Sequence
  Description of Artificial Sequence: Synthetic oligonucleotide
  Sense strand starting at position 3663 of SEQ ID NO: 1888690
caacuuggucgugauacau

SEQ ID NO: 2550197 - RNA, 19 nt, Artificial Sequence
  Description of Artificial Sequence: Synthetic oligonucleotide
  Antisense strand to SEQ ID NO: 2550196
auguaucacgaccaaguug

SEQ ID NO: 2550198 - RNA, 19 nt, Artificial Sequence
  Description of Artificial Sequence: Synthetic oligonucleotide
  Sense strand starting at position 3135 of SEQ ID NO: 1888690
gaggcuacuacgugaagga

SEQ ID NO: 2550199 - RNA, 19 nt, Artificial Sequence
  Description of Artificial Sequence: Synthetic oligonucleotide
  Antisense strand to SEQ ID NO: 2550198
uccuucacguaguagccuc

SEQ ID NO: 2550200 - RNA, 19 nt, Artificial Sequence
  Description of Artificial Sequence: Synthetic oligonucleotide
  Sense strand starting at position 1175 of SEQ ID NO: 1888690
cgacuaugaugucuuagac

SEQ ID NO: 2550201 - RNA, 19 nt, Artificial Sequence
  Description of Artificial Sequence: Synthetic oligonucleotide
  Antisense strand to SEQ ID NO: 2550200
gucuaagacaucauagucg

SEQ ID NO: 2550202 - RNA, 19 nt, Artificial Sequence
  Description of Artificial Sequence: Synthetic oligonucleotide
  Sense strand starting at position 2391 of SEQ ID NO: 1888690
uggcacucccgguacauaa

SEQ ID NO: 2550203 - RNA, 19 nt, Artificial Sequence
  Description of Artificial Sequence: Synthetic oligonucleotide
  Antisense strand to SEQ ID NO: 2550202
uuauguaccgggagugcca

SEQ ID NO: 2550204 - RNA, 19 nt, Artificial Sequence
  Description of Artificial Sequence: Synthetic oligonucleotide
  Sense strand starting at position 2315 of SEQ ID NO: 1888690
cguguuuaccgugugccaa

SEQ ID NO: 2550205 - RNA, 19 nt, Artificial Sequence
  Description of Artificial Sequence: Synthetic oligonucleotide
  Antisense strand to SEQ ID NO: 2550204
uuggcacacgguaaacacg

SEQ ID NO: 2550206 - RNA, 19 nt, Artificial Sequence
  Description of Artificial Sequence: Synthetic oligonucleotide
  Sense strand starting at position 3457 of SEQ ID NO: 1888690
ucagccaccucaguagaau

SEQ ID NO: 2550207 - RNA, 19 nt, Artificial Sequence
  Description of Artificial Sequence: Synthetic oligonucleotide
  Antisense strand to SEQ ID NO: 2550206
auucuacugagguggcuga

SEQ ID NO: 2550208 - RNA, 19 nt, Artificial Sequence
  Description of Artificial Sequence: Synthetic oligonucleotide
  Sense strand starting at position 992 of SEQ ID NO: 1888690
ggcuguucacgggaaucuu

SEQ ID NO: 2550209 - RNA, 19 nt, Artificial Sequence
  Description of Artificial Sequence: Synthetic oligonucleotide
  Antisense strand to SEQ ID NO: 2550208
aagauucccgugaacagcc

SEQ ID NO: 2550210 - RNA, 19 nt, Artificial Sequence
  Description of Artificial Sequence: Synthetic oligonucleotide
  Sense strand starting at position 2431 of SEQ ID NO: 1888690
gcgagcaacauauauguau

SEQ ID NO: 2550211 - RNA, 19 nt, Artificial Sequence
  Description of Artificial Sequence: Synthetic oligonucleotide
  Antisense strand to SEQ ID NO: 2550210
auacauauauguugcucgc

SEQ ID NO: 2550212 - RNA, 19 nt, Artificial Sequence
  Description of Artificial Sequence: Synthetic oligonucleotide
  Sense strand starting at position 2333 of SEQ ID NO: 1888690
aggacugugcuaugcauga

SEQ ID NO: 2550213 - RNA, 19 nt, Artificial Sequence
  Description of Artificial Sequence: Synthetic oligonucleotide
  Antisense strand to SEQ ID NO: 2550212
ucaugcauagcacaguccu

SEQ ID NO: 2550214 - RNA, 19 nt, Artificial Sequence
  Description of Artificial Sequence: Synthetic oligonucleotide
  Sense strand starting at position 3123 of SEQ ID NO: 1888690
ucauguagucccgaggcua

SEQ ID NO: 2550215 - RNA, 19 nt, Artificial Sequence
  Description of Artificial Sequence: Synthetic oligonucleotide
  Antisense strand to SEQ ID NO: 2550214
uagccucgggacuacauga

SEQ ID NO: 2550216 - RNA, 19 nt, Artificial Sequence
  Description of Artificial Sequence: Synthetic oligonucleotide
  Sense strand starting at position 902 of SEQ ID NO: 1888690
aggcuuguaucuguuauaa

SEQ ID NO: 2550217 - RNA, 19 nt, Artificial Sequence
  Description of Artificial Sequence: Synthetic oligonucleotide
  Antisense strand to SEQ ID NO: 2550216
uuauaacagauacaagccu

SEQ ID NO: 2550218 - RNA, 19 nt, Artificial Sequence
  Description of Artificial Sequence: Synthetic oligonucleotide
  Sense strand starting at position 900 of SEQ ID NO: 1888690
aaaggcuuguaucuguuau

SEQ ID NO: 2550219 - RNA, 19 nt, Artificial Sequence
  Description of Artificial Sequence: Synthetic oligonucleotide
  Antisense strand to SEQ ID NO: 2550218
auaacagauacaagccuuu

SEQ ID NO: 2550220 - RNA, 19 nt, Artificial Sequence
  Description of Artificial Sequence: Synthetic oligonucleotide
  Sense strand starting at position 819 of SEQ ID NO: 1888690
gacugcuguugucuacaaa

SEQ ID NO: 2550221 - RNA, 19 nt, Artificial Sequence
  Description of Artificial Sequence: Synthetic oligonucleotide
  Antisense strand to SEQ ID NO: 2550220
uuuguagacaacagcaguc

SEQ ID NO: 2550222 - RNA, 19 nt, Artificial Sequence
  Description of Artificial Sequence: Synthetic oligonucleotide
  Sense strand starting at position 1281 of SEQ ID NO: 1888690
ugcaauuaaccacgucuca

SEQ ID NO: 2550223 - RNA, 19 nt, Artificial Sequence
  Description of Artificial Sequence: Synthetic oligonucleotide
  Antisense strand to SEQ ID NO: 2550222
ugagacgugguuaauugca

SEQ ID NO: 2550224 - RNA, 19 nt, Artificial Sequence
  Description of Artificial Sequence: Synthetic oligonucleotide
  Sense strand starting at position 2270 of SEQ ID NO: 1888690
gcggaaugaugcucagagu

SEQ ID NO: 2550225 - RNA, 19 nt, Artificial Sequence
  Description of Artificial Sequence: Synthetic oligonucleotide
  Antisense strand to SEQ ID NO: 2550224
acucugagcaucauuccgc

SEQ ID NO: 2550226 - RNA, 19 nt, Artificial Sequence
  Description of Artificial Sequence: Synthetic oligonucleotide
  Sense strand starting at position 3669 of SEQ ID NO: 1888690
ggucgugauacauguuuaa

SEQ ID NO: 2550227 - RNA, 19 nt, Artificial Sequence
  Description of Artificial Sequence: Synthetic oligonucleotide
  Antisense strand to SEQ ID NO: 2550226
uuaaacauguaucacgacc

SEQ ID NO: 2550228 - RNA, 19 nt, Artificial Sequence
  Description of Artificial Sequence: Synthetic oligonucleotide
  Sense strand starting at position 1074 of SEQ ID NO: 1888690
uuugaaugaucacagaauu

SEQ ID NO: 2550229 - RNA, 19 nt, Artificial Sequence
  Description of Artificial Sequence: Synthetic oligonucleotide
  Antisense strand to SEQ ID NO: 2550228
aauucugugaucauucaaa

SEQ ID NO: 2550230 - RNA, 19 nt, Artificial Sequence
  Description of Artificial Sequence: Synthetic oligonucleotide
  Sense strand starting at position 1098 of SEQ ID NO: 1888690
guguucuguaaaugggcua

SEQ ID NO: 2550231 - RNA, 19 nt, Artificial Sequence
  Description of Artificial Sequence: Synthetic oligonucleotide
  Antisense strand to SEQ ID NO: 2550230
uagcccauuuacagaacac

SEQ ID NO: 2550232 - RNA, 19 nt, Artificial Sequence
  Description of Artificial Sequence: Synthetic oligonucleotide
  Sense strand starting at position 915 of SEQ ID NO: 1888690
uuauaagcuugggaaauau

SEQ ID NO: 2550233 - RNA, 19 nt, Artificial Sequence
  Description of Artificial Sequence: Synthetic oligonucleotide
  Antisense strand to SEQ ID NO: 2550232
auauuucccaagcuuauaa

SEQ ID NO: 2550234 - RNA, 19 nt, Artificial Sequence
  Description of Artificial Sequence: Synthetic oligonucleotide
  Sense strand starting at position 925 of SEQ ID NO: 1888690
gggaaauauuaucauggcu

SEQ ID NO: 2550235 - RNA, 19 nt, Artificial Sequence
  Description of Artificial Sequence: Synthetic oligonucleotide
  Antisense strand to SEQ ID NO: 2550234
agccaugauaauauuuccc

SEQ ID NO: 2550236 - RNA, 19 nt, Artificial Sequence
  Description of Artificial Sequence: Synthetic oligonucleotide
  Sense strand starting at position 417 of SEQ ID NO: 1888690
ggagcucggccuuguuaua

SEQ ID NO: 2550237 - RNA, 19 nt, Artificial Sequence
  Description of Artificial Sequence: Synthetic oligonucleotide
  Antisense strand to SEQ ID NO: 2550236
uauaacaaggccgagcucc

SEQ ID NO: 2550238 - RNA, 19 nt, Artificial Sequence
  Description of Artificial Sequence: Synthetic oligonucleotide
  Sense strand starting at position 3436 of SEQ ID NO: 1888690
caaauuuggucguggacac

SEQ ID NO: 2550239 - RNA, 19 nt, Artificial Sequence
  Description of Artificial Sequence: Synthetic oligonucleotide
  Antisense strand to SEQ ID NO: 2550238
guguccacgaccaaauuug

SEQ ID NO: 2550240 - RNA, 19 nt, Artificial Sequence
  Description of Artificial Sequence: Synthetic oligonucleotide
  Sense strand starting at position 3765 of SEQ ID NO: 1888690
gccuccuuguacuauuuau

SEQ ID NO: 2550241 - RNA, 19 nt, Artificial Sequence
  Description of Artificial Sequence: Synthetic oligonucleotide
  Antisense strand to SEQ ID NO: 2550240
auaaauaguacaaggaggc

SEQ ID NO: 2550242 - RNA, 19 nt, Artificial Sequence
  Description of Artificial Sequence: Synthetic oligonucleotide
  Sense strand starting at position 2337 of SEQ ID NO: 1888690
cugugcuaugcaugagcca

SEQ ID NO: 2550243 - RNA, 19 nt, Artificial Sequence
  Description of Artificial Sequence: Synthetic oligonucleotide
  Antisense strand to SEQ ID NO: 2550242
uggcucaugcauagcacag

SEQ ID NO: 2550244 - RNA, 19 nt, Artificial Sequence
  Description of Artificial Sequence: Synthetic oligonucleotide
  Sense strand starting at position 1286 of SEQ ID NO: 1888690
uuaaccacgucucaagaaa

SEQ ID NO: 2550245 - RNA, 19 nt, Artificial Sequence
  Description of Artificial Sequence: Synthetic oligonucleotide
  Antisense strand to SEQ ID NO: 2550244
uuucuugagacgugguuaa

SEQ ID NO: 2550246 - RNA, 19 nt, Artificial Sequence
  Description of Artificial Sequence: Synthetic oligonucleotide
  Sense strand starting at position 3390 of SEQ ID NO: 1888691
ucaagaagccucugaagaa

SEQ ID NO: 2550247 - RNA, 19 nt, Artificial Sequence
  Description of Artificial Sequence: Synthetic oligonucleotide
  Antisense strand to SEQ ID NO: 2550246
uucuucagaggcuucuuga

SEQ ID NO: 2550248 - RNA, 19 nt, Artificial Sequence
  Description of Artificial Sequence: Synthetic oligonucleotide
  Sense strand starting at position 3345 of SEQ ID NO: 1888691
agguaauggaugugaugaa

SEQ ID NO: 2550249 - RNA, 19 nt, Artificial Sequence
  Description of Artificial Sequence: Synthetic oligonucleotide
  Antisense strand to SEQ ID NO: 2550248
uucaucacauccauuaccu

SEQ ID NO: 2550250 - RNA, 19 nt, Artificial Sequence
  Description of Artificial Sequence: Synthetic oligonucleotide
  Sense strand starting at position 3408 of SEQ ID NO: 1888691
agugacauuuaagaugaaa

SEQ ID NO: 2550251 - RNA, 19 nt, Artificial Sequence
  Description of Artificial Sequence: Synthetic oligonucleotide
  Antisense strand to SEQ ID NO: 2550250
uuucaucuuaaaugucacu

SEQ ID NO: 2550252 - RNA, 19 nt, Artificial Sequence
  Description of Artificial Sequence: Synthetic oligonucleotide
  Sense strand starting at position 3325 of SEQ ID NO: 1888691
ugguacaagugaucaagga

SEQ ID NO: 2550253 - RNA, 19 nt, Artificial Sequence
  Description of Artificial Sequence: Synthetic oligonucleotide
  Antisense strand to SEQ ID NO: 2550252
uccuugaucacuuguacca

SEQ ID NO: 2550254 - RNA, 19 nt, Artificial Sequence
  Description of Artificial Sequence: Synthetic oligonucleotide
  Sense strand starting at position 820 of SEQ ID NO: 1888691
acuggacucuuucuugaaa

SEQ ID NO: 2550255 - RNA, 19 nt, Artificial Sequence
  Description of Artificial Sequence: Synthetic oligonucleotide
  Antisense strand to SEQ ID NO: 2550254
uuucaagaaagaguccagu

SEQ ID NO: 2550256 - RNA, 19 nt, Artificial Sequence
  Description of Artificial Sequence: Synthetic oligonucleotide
  Sense strand starting at position 1133 of SEQ ID NO: 1888691
gagagauguguccacacuc

SEQ ID NO: 2550257 - RNA, 19 nt, Artificial Sequence
  Description of Artificial Sequence: Synthetic oligonucleotide
  Antisense strand to SEQ ID NO: 2550256
gaguguggacacaucucuc

SEQ ID NO: 2550258 - RNA, 19 nt, Artificial Sequence
  Description of Artificial Sequence: Synthetic oligonucleotide
  Sense strand starting at position 560 of SEQ ID NO: 1888691
uagugagauccuggacaug

SEQ ID NO: 2550259 - RNA, 19 nt, Artificial Sequence
  Description of Artificial Sequence: Synthetic oligonucleotide
  Antisense strand to SEQ ID NO: 2550258
cauguccaggaucucacua

SEQ ID NO: 2550260 - RNA, 19 nt, Artificial Sequence
  Description of Artificial Sequence: Synthetic oligonucleotide
  Sense strand starting at position 802 of SEQ ID NO: 1888691
agauuacuagccuagucaa

SEQ ID NO: 2550261 - RNA, 19 nt, Artificial Sequence
  Description of Artificial Sequence: Synthetic oligonucleotide
  Antisense strand to SEQ ID NO: 2550260
uugacuaggcuaguaaucu

SEQ ID NO: 2550262 - RNA, 19 nt, Artificial Sequence
  Description of Artificial Sequence: Synthetic oligonucleotide
  Sense strand starting at position 821 of SEQ ID NO: 1888691
cuggacucuuucuugaaag

SEQ ID NO: 2550263 - RNA, 19 nt, Artificial Sequence
  Description of Artificial Sequence: Synthetic oligonucleotide
  Antisense strand to SEQ ID NO: 2550262
cuuucaagaaagaguccag

SEQ ID NO: 2550264 - RNA, 19 nt, Artificial Sequence
  Description of Artificial Sequence: Synthetic oligonucleotide
  Sense strand starting at position 528 of SEQ ID NO: 1888691
ggauguagccaucauacau

SEQ ID NO: 2550265 - RNA, 19 nt, Artificial Sequence
  Description of Artificial Sequence: Synthetic oligonucleotide
  Antisense strand to SEQ ID NO: 2550264
auguaugauggcuacaucc

SEQ ID NO: 2550266 - RNA, 19 nt, Artificial Sequence
  Description of Artificial Sequence: Synthetic oligonucleotide
  Sense strand starting at position 2766 of SEQ ID NO: 1888691
gcuggucguguuguaaacu

SEQ ID NO: 2550267 - RNA, 19 nt, Artificial Sequence
  Description of Artificial Sequence: Synthetic oligonucleotide
  Antisense strand to SEQ ID NO: 2550266
aguuuacaacacgaccagc

SEQ ID NO: 2550268 - RNA, 19 nt, Artificial Sequence
  Description of Artificial Sequence: Synthetic oligonucleotide
  Sense strand starting at position 1121 of SEQ ID NO: 1888691
gucuccaucccggagagau

SEQ ID NO: 2550269 - RNA, 19 nt, Artificial Sequence
  Description of Artificial Sequence: Synthetic oligonucleotide
  Antisense strand to SEQ ID NO: 2550268
aucucuccgggauggagac

SEQ ID NO: 2550270 - RNA, 19 nt, Artificial Sequence
  Description of Artificial Sequence: Synthetic oligonucleotide
  Sense strand starting at position 3759 of SEQ ID NO: 1888691
ccagcuaaccgguaggaga

SEQ ID NO: 2550271 - RNA, 19 nt, Artificial Sequence
  Description of Artificial Sequence: Synthetic oligonucleotide
  Antisense strand to SEQ ID NO: 2550270
ucuccuaccgguuagcugg

SEQ ID NO: 2550272 - RNA, 19 nt, Artificial Sequence
  Description of Artificial Sequence: Synthetic oligonucleotide
  Sense strand starting at position 3017 of SEQ ID NO: 1888691
uugcuuagugaucaauaau

SEQ ID NO: 2550273 - RNA, 19 nt, Artificial Sequence
  Description of Artificial Sequence: Synthetic oligonucleotide
  Antisense strand to SEQ ID NO: 2550272
auuauugaucacuaagcaa

SEQ ID NO: 2550274 - RNA, 19 nt, Artificial Sequence
  Description of Artificial Sequence: Synthetic oligonucleotide
  Sense strand starting at position 317 of SEQ ID NO: 1888691
agagucugugguuagaacu

SEQ ID NO: 2550275 - RNA, 19 nt, Artificial Sequence
  Description of Artificial Sequence: Synthetic oligonucleotide
  Antisense strand to SEQ ID NO: 2550274
aguucuaaccacagacucu

SEQ ID NO: 2550276 - RNA, 19 nt, Artificial Sequence
  Description of Artificial Sequence: Synthetic oligonucleotide
  Sense strand starting at position 2185 of SEQ ID NO: 1888691
guagccguccggucaucau

SEQ ID NO: 2550277 - RNA, 19 nt, Artificial Sequence
  Description of Artificial Sequence: Synthetic oligonucleotide
  Antisense strand to SEQ ID NO: 2550276
augaugaccggacggcuac

SEQ ID NO: 2550278 - RNA, 19 nt, Artificial Sequence
  Description of Artificial Sequence: Synthetic oligonucleotide
  Sense strand starting at position 644 of SEQ ID NO: 1888691
ggccuuagauaagucaaca

SEQ ID NO: 2550279 - RNA, 19 nt, Artificial Sequence
  Description of Artificial Sequence: Synthetic oligonucleotide
  Antisense strand to SEQ ID NO: 2550278
uguugacuuaucuaaggcc

SEQ ID NO: 2550280 - RNA, 19 nt, Artificial Sequence
  Description of Artificial Sequence: Synthetic oligonucleotide
  Sense strand starting at position 2104 of SEQ ID NO: 1888691
ggugauggcgcgucaucga

SEQ ID NO: 2550281 - RNA, 19 nt, Artificial Sequence
  Description of Artificial Sequence: Synthetic oligonucleotide
  Antisense strand to SEQ ID NO: 2550280
ucgaugacgcgccaucacc

SEQ ID NO: 2550282 - RNA, 19 nt, Artificial Sequence
  Description of Artificial Sequence: Synthetic oligonucleotide
  Sense strand starting at position 2778 of SEQ ID NO: 1888691
guaaacuucuaggaauuua

SEQ ID NO: 2550283 - RNA, 19 nt, Artificial Sequence
  Description of Artificial Sequence: Synthetic oligonucleotide
  Antisense strand to SEQ ID NO: 2550282
uaaauuccuagaaguuuac

SEQ ID NO: 2550284 - RNA, 19 nt, Artificial Sequence
  Description of Artificial Sequence: Synthetic oligonucleotide
  Sense strand starting at position 316 of SEQ ID NO: 1888691
aagagucugugguuagaac

SEQ ID NO: 2550285 - RNA, 19 nt, Artificial Sequence
  Description of Artificial Sequence: Synthetic oligonucleotide
  Antisense strand to SEQ ID NO: 2550284
guucuaaccacagacucuu

SEQ ID NO: 2550286 - RNA, 19 nt, Artificial Sequence
  Description of Artificial Sequence: Synthetic oligonucleotide
  Sense strand starting at position 2763 of SEQ ID NO: 1888691
gcagcuggucguguuguaa

SEQ ID NO: 2550287 - RNA, 19 nt, Artificial Sequence
  Description of Artificial Sequence: Synthetic oligonucleotide
  Antisense strand to SEQ ID NO: 2550286
uuacaacacgaccagcugc

SEQ ID NO: 2550288 - RNA, 19 nt, Artificial Sequence
  Description of Artificial Sequence: Synthetic oligonucleotide
  Sense strand starting at position 1120 of SEQ ID NO: 1888691
ggucuccaucccggagaga

SEQ ID NO: 2550289 - RNA, 19 nt, Artificial Sequence
  Description of Artificial Sequence: Synthetic oligonucleotide
  Antisense strand to SEQ ID NO: 2550288
ucucuccgggauggagacc

SEQ ID NO: 2550290 - RNA, 19 nt, Artificial Sequence
  Description of Artificial Sequence: Synthetic oligonucleotide
  Sense strand starting at position 3530 of SEQ ID NO: 1888691
uaagcuuuggcauacagua

SEQ ID NO: 2550291 - RNA, 19 nt, Artificial Sequence
  Description of Artificial Sequence: Synthetic oligonucleotide
  Antisense strand to SEQ ID NO: 2550290
uacuguaugccaaagcuua

SEQ ID NO: 2550292 - RNA, 19 nt, Artificial Sequence
  Description of Artificial Sequence: Synthetic oligonucleotide
  Sense strand starting at position 3087 of SEQ ID NO: 1888691
gugaccuuggguuaauugu

SEQ ID NO: 2550293 - RNA, 19 nt, Artificial Sequence
  Description of Artificial Sequence: Synthetic oligonucleotide
  Antisense strand to SEQ ID NO: 2550292
acaauuaacccaaggucac

SEQ ID NO: 2550294 - RNA, 19 nt, Artificial Sequence
  Description of Artificial Sequence: Synthetic oligonucleotide
  Sense strand starting at position 3093 of SEQ ID NO: 1888691
uuggguuaauuguucuaag

SEQ ID NO: 2550295 - RNA, 19 nt, Artificial Sequence
  Description of Artificial Sequence: Synthetic oligonucleotide
  Antisense strand to SEQ ID NO: 2550294
cuuagaacaauuaacccaa

SEQ ID NO: 2550296 - RNA, 19 nt, Artificial Sequence
  Description of Artificial Sequence: Synthetic oligonucleotide
  Sense strand starting at position 3083 of SEQ ID NO: 1888691
cacugugaccuuggguuaa

SEQ ID NO: 2550297 - RNA, 19 nt, Artificial Sequence
  Description of Artificial Sequence: Synthetic oligonucleotide
  Antisense strand to SEQ ID NO: 2550296
uuaacccaaggucacagug

SEQ ID NO: 2550298 - RNA, 19 nt, Artificial Sequence
  Description of Artificial Sequence: Synthetic oligonucleotide
  Sense strand starting at position 3156 of SEQ ID NO: 1888691
cauagcugugguuaaguga

SEQ ID NO: 2550299 - RNA, 19 nt, Artificial Sequence
  Description of Artificial Sequence: Synthetic oligonucleotide
  Antisense strand to SEQ ID NO: 2550298
ucacuuaaccacagcuaug

SEQ ID NO: 2550300 - RNA, 19 nt, Artificial Sequence
  Description of Artificial Sequence: Synthetic oligonucleotide
  Sense strand starting at position 3114 of SEQ ID NO: 1888691
ucaguuuagucaucucuaa

SEQ ID NO: 2550301 - RNA, 19 nt, Artificial Sequence
  Description of Artificial Sequence: Synthetic oligonucleotide
  Antisense strand to SEQ ID NO: 2550300
uuagagaugacuaaacuga

SEQ ID NO: 2550302 - RNA, 19 nt, Artificial Sequence
  Description of Artificial Sequence: Synthetic oligonucleotide
  Sense strand starting at position 131 of SEQ ID NO: 1888691
guauaacaguucucucuac

SEQ ID NO: 2550303 - RNA, 19 nt, Artificial Sequence
  Description of Artificial Sequence: Synthetic oligonucleotide
  Antisense strand to SEQ ID NO: 2550302
guagagagaacuguuauac

SEQ ID NO: 2550304 - RNA, 19 nt, Artificial Sequence
  Description of Artificial Sequence: Synthetic oligonucleotide
  Sense strand starting at position 185 of SEQ ID NO: 1888691
guguauaacuguuuaacac

SEQ ID NO: 2550305 - RNA, 19 nt, Artificial Sequence
  Description of Artificial Sequence: Synthetic oligonucleotide
  Antisense strand to SEQ ID NO: 2550304
guguuaaacaguuauacac

SEQ ID NO: 2550306 - RNA, 19 nt, Artificial Sequence
  Description of Artificial Sequence: Synthetic oligonucleotide
  Sense strand starting at position 3016 of SEQ ID NO: 1888691
guugcuuagugaucaauaa

SEQ ID NO: 2550307 - RNA, 19 nt, Artificial Sequence
  Description of Artificial Sequence: Synthetic oligonucleotide
  Antisense strand to SEQ ID NO: 2550306
uuauugaucacuaagcaac

SEQ ID NO: 2550308 - RNA, 19 nt, Artificial Sequence
  Description of Artificial Sequence: Synthetic oligonucleotide
  Sense strand starting at position 780 of SEQ ID NO: 1888691
gagugcaacuauccaguua

SEQ ID NO: 2550309 - RNA, 19 nt, Artificial Sequence
  Description of Artificial Sequence: Synthetic oligonucleotide
  Antisense strand to SEQ ID NO: 2550308
uaacuggauaguugcacuc

SEQ ID NO: 2550310 - RNA, 19 nt, Artificial Sequence
  Description of Artificial Sequence: Synthetic oligonucleotide
  Sense strand starting at position 3103 of SEQ ID NO: 1888691
uguucuaagccucaguuua

SEQ ID NO: 2550311 - RNA, 19 nt, Artificial Sequence
  Description of Artificial Sequence: Synthetic oligonucleotide
  Antisense strand to SEQ ID NO: 2550310
uaaacugaggcuuagaaca

SEQ ID NO: 2550312 - RNA, 19 nt, Artificial Sequence
  Description of Artificial Sequence: Synthetic oligonucleotide
  Sense strand starting at position 3172 of SEQ ID NO: 1888691
ugagauuauuugcacauuc

SEQ ID NO: 2550313 - RNA, 19 nt, Artificial Sequence
  Description of Artificial Sequence: Synthetic oligonucleotide
  Antisense strand to SEQ ID NO: 2550312
gaaugugcaaauaaucuca

SEQ ID NO: 2550314 - RNA, 19 nt, Artificial Sequence
  Description of Artificial Sequence: Synthetic oligonucleotide
  Sense strand starting at position 312 of SEQ ID NO: 1888691
agcaaagagucugugguua

SEQ ID NO: 2550315 - RNA, 19 nt, Artificial Sequence
  Description of Artificial Sequence: Synthetic oligonucleotide
  Antisense strand to SEQ ID NO: 2550314
uaaccacagacucuuugcu

SEQ ID NO: 2550316 - RNA, 19 nt, Artificial Sequence
  Description of Artificial Sequence: Synthetic oligonucleotide
  Sense strand starting at position 3159 of SEQ ID NO: 1888691
agcugugguuaagugagau

SEQ ID NO: 2550317 - RNA, 19 nt, Artificial Sequence
  Description of Artificial Sequence: Synthetic oligonucleotide
  Antisense strand to SEQ ID NO: 2550316
aucucacuuaaccacagcu

SEQ ID NO: 2550318 - RNA, 19 nt, Artificial Sequence
  Description of Artificial Sequence: Synthetic oligonucleotide
  Sense strand starting at position 486 of SEQ ID NO: 1888691
agagaaucuucugcugcuu

SEQ ID NO: 2550319 - RNA, 19 nt, Artificial Sequence
  Description of Artificial Sequence: Synthetic oligonucleotide
  Antisense strand to SEQ ID NO: 2550318
aagcagcagaagauucucu

SEQ ID NO: 2550320 - RNA, 19 nt, Artificial Sequence
  Description of Artificial Sequence: Synthetic oligonucleotide
  Sense strand starting at position 3527 of SEQ ID NO: 1888691
gcauaagcuuuggcauaca

SEQ ID NO: 2550321 - RNA, 19 nt, Artificial Sequence
  Description of Artificial Sequence: Synthetic oligonucleotide
  Antisense strand to SEQ ID NO: 2550320
uguaugccaaagcuuaugc

SEQ ID NO: 2550322 - RNA, 19 nt, Artificial Sequence
  Description of Artificial Sequence: Synthetic oligonucleotide
  Sense strand starting at position 2892 of SEQ ID NO: 1888691
ggaauaccaugggaucauu

SEQ ID NO: 2550323 - RNA, 19 nt, Artificial Sequence
  Description of Artificial Sequence: Synthetic oligonucleotide
  Antisense strand to SEQ ID NO: 2550322
aaugaucccaugguauucc

SEQ ID NO: 2550324 - RNA, 19 nt, Artificial Sequence
  Description of Artificial Sequence: Synthetic oligonucleotide
  Sense strand starting at position 181 of SEQ ID NO: 1888691
uaacguguauaacuguuua

SEQ ID NO: 2550325 - RNA, 19 nt, Artificial Sequence
  Description of Artificial Sequence: Synthetic oligonucleotide
  Antisense strand to SEQ ID NO: 2550324
uaaacaguuauacacguua

SEQ ID NO: 2550326 - RNA, 19 nt, Artificial Sequence
  Description of Artificial Sequence: Synthetic oligonucleotide
  Sense strand starting at position 2829 of SEQ ID NO: 1888692
aaugauaauguguaaagca

SEQ ID NO: 2550327 - RNA, 19 nt, Artificial Sequence
  Description of Artificial Sequence: Synthetic oligonucleotide
  Antisense strand to SEQ ID NO: 2550326
ugcuuuacacauuaucauu

SEQ ID NO: 2550328 - RNA, 19 nt, Artificial Sequence
  Description of Artificial Sequence: Synthetic oligonucleotide
  Sense strand starting at position 251 of SEQ ID NO: 1888692
cgggccauuucucuccaga

SEQ ID NO: 2550329 - RNA, 19 nt, Artificial Sequence
  Description of Artificial Sequence: Synthetic oligonucleotide
  Antisense strand to SEQ ID NO: 2550328
ucuggagagaaauggcccg

SEQ ID NO: 2550330 - RNA, 19 nt, Artificial Sequence
  Description of Artificial Sequence: Synthetic oligonucleotide
  Sense strand starting at position 2165 of SEQ ID NO: 1888692
gucugagcgcuuccugauc

SEQ ID NO: 2550331 - RNA, 19 nt, Artificial Sequence
  Description of Artificial Sequence: Synthetic oligonucleotide
  Antisense strand to SEQ ID NO: 2550330
gaucaggaagcgcucagac

SEQ ID NO: 2550332 - RNA, 19 nt, Artificial Sequence
  Description of Artificial Sequence: Synthetic oligonucleotide
  Sense strand starting at position 3433 of SEQ ID NO: 1888692
cuggacaugaguugaccaa

SEQ ID NO: 2550333 - RNA, 19 nt, Artificial Sequence
  Description of Artificial Sequence: Synthetic oligonucleotide
  Antisense strand to SEQ ID NO: 2550332
uuggucaacucauguccag

SEQ ID NO: 2550334 - RNA, 19 nt, Artificial Sequence
  Description of Artificial Sequence: Synthetic oligonucleotide
  Sense strand starting at position 2906 of SEQ ID NO: 1888692
ugagacuuggagcaguuau

SEQ ID NO: 2550335 - RNA, 19 nt, Artificial Sequence
  Description of Artificial Sequence: Synthetic oligonucleotide
  Antisense strand to SEQ ID NO: 2550334
auaacugcuccaagucuca

SEQ ID NO: 2550336 - RNA, 19 nt, Artificial Sequence
  Description of Artificial Sequence: Synthetic oligonucleotide
  Sense strand starting at position 1001 of SEQ ID NO: 1888692
ucacaucugccucauggaa

SEQ ID NO: 2550337 - RNA, 19 nt, Artificial Sequence
  Description of Artificial Sequence: Synthetic oligonucleotide
  Antisense strand to SEQ ID NO: 2550336
uuccaugaggcagauguga

SEQ ID NO: 2550338 - RNA, 19 nt, Artificial Sequence
  Description of Artificial Sequence: Synthetic oligonucleotide
  Sense strand starting at position 3657 of SEQ ID NO: 1888692
ggcagaugaaaugggucua

SEQ ID NO: 2550339 - RNA, 19 nt, Artificial Sequence
  Description of Artificial Sequence: Synthetic oligonucleotide
  Antisense strand to SEQ ID NO: 2550338
uagacccauuucaucugcc

SEQ ID NO: 2550340 - RNA, 19 nt, Artificial Sequence
  Description of Artificial Sequence: Synthetic oligonucleotide
  Sense strand starting at position 1148 of SEQ ID NO: 1888692
ggacuuguccaagggcaga

SEQ ID NO: 2550341 - RNA, 19 nt, Artificial Sequence
  Description of Artificial Sequence: Synthetic oligonucleotide
  Antisense strand to SEQ ID NO: 2550340
ucugcccuuggacaagucc

SEQ ID NO: 2550342 - RNA, 19 nt, Artificial Sequence
  Description of Artificial Sequence: Synthetic oligonucleotide
  Sense strand starting at position 2163 of SEQ ID NO: 1888692
gcgucugagcgcuuccuga

SEQ ID NO: 2550343 - RNA, 19 nt, Artificial Sequence
  Description of Artificial Sequence: Synthetic oligonucleotide
  Antisense strand to SEQ ID NO: 2550342
ucaggaagcgcucagacgc

SEQ ID NO: 2550344 - RNA, 19 nt, Artificial Sequence
  Description of Artificial Sequence: Synthetic oligonucleotide
  Sense strand starting at position 2725 of SEQ ID NO: 1888692
gccuauguggcagaaaggu

SEQ ID NO: 2550345 - RNA, 19 nt, Artificial Sequence
  Description of Artificial Sequence: Synthetic oligonucleotide
  Antisense strand to SEQ ID NO: 2550344
accuuucugccacauaggc

SEQ ID NO: 2550346 - RNA, 19 nt, Artificial Sequence
  Description of Artificial Sequence: Synthetic oligonucleotide
  Sense strand starting at position 215 of SEQ ID NO: 1888692
gcccuacuucgagaagucu

SEQ ID NO: 2550347 - RNA, 19 nt, Artificial Sequence
  Description of Artificial Sequence: Synthetic oligonucleotide
  Antisense strand to SEQ ID NO: 2550346
agacuucucgaaguagggc

SEQ ID NO: 2550348 - RNA, 19 nt, Artificial Sequence
  Description of Artificial Sequence: Synthetic oligonucleotide
  Sense strand starting at position 3596 of SEQ ID NO: 1888692
ucuucuuugucaccacuga

SEQ ID NO: 2550349 - RNA, 19 nt, Artificial Sequence
  Description of Artificial Sequence: Synthetic oligonucleotide
  Antisense strand to SEQ ID NO: 2550348
ucaguggugacaaagaaga

SEQ ID NO: 2550350 - RNA, 19 nt, Artificial Sequence
  Description of Artificial Sequence: Synthetic oligonucleotide
  Sense strand starting at position 186 of SEQ ID NO: 1888692
augcaucuggagugucaau

SEQ ID NO: 2550351 - RNA, 19 nt, Artificial Sequence
  Description of Artificial Sequence: Synthetic oligonucleotide
  Antisense strand to SEQ ID NO: 2550350
auugacacuccagaugcau

SEQ ID NO: 2550352 - RNA, 19 nt, Artificial Sequence
  Description of Artificial Sequence: Synthetic oligonucleotide
  Sense strand starting at position 777 of SEQ ID NO: 1888692
cagggacacuccuaagaga

SEQ ID NO: 2550353 - RNA, 19 nt, Artificial Sequence
  Description of Artificial Sequence: Synthetic oligonucleotide
  Antisense strand to SEQ ID NO: 2550352
ucucuuaggagugucccug

SEQ ID NO: 2550354 - RNA, 19 nt, Artificial Sequence
  Description of Artificial Sequence: Synthetic oligonucleotide
  Sense strand starting at position 697 of SEQ ID NO: 1888692
cucugcuguguccaucuaa

SEQ ID NO: 2550355 - RNA, 19 nt, Artificial Sequence
  Description of Artificial Sequence: Synthetic oligonucleotide
  Antisense strand to SEQ ID NO: 2550354
uuagauggacacagcagag

SEQ ID NO: 2550356 - RNA, 19 nt, Artificial Sequence
  Description of Artificial Sequence: Synthetic oligonucleotide
  Sense strand starting at position 224 of SEQ ID NO: 1888692
cgagaagucuucccagccu

SEQ ID NO: 2550357 - RNA, 19 nt, Artificial Sequence
  Description of Artificial Sequence: Synthetic oligonucleotide
  Antisense strand to SEQ ID NO: 2550356
aggcugggaagacuucucg

SEQ ID NO: 2550358 - RNA, 19 nt, Artificial Sequence
  Description of Artificial Sequence: Synthetic oligonucleotide
  Sense strand starting at position 954 of SEQ ID NO: 1888692
gagaaagccuuccaaagag

SEQ ID NO: 2550359 - RNA, 19 nt, Artificial Sequence
  Description of Artificial Sequence: Synthetic oligonucleotide
  Antisense strand to SEQ ID NO: 2550358
cucuuuggaaggcuuucuc

SEQ ID NO: 2550360 - RNA, 19 nt, Artificial Sequence
  Description of Artificial Sequence: Synthetic oligonucleotide
  Sense strand starting at position 3210 of SEQ ID NO: 1888692
gccagacaugguugucucu

SEQ ID NO: 2550361 - RNA, 19 nt, Artificial Sequence
  Description of Artificial Sequence: Synthetic oligonucleotide
  Antisense strand to SEQ ID NO: 2550360
agagacaaccaugucuggc

SEQ ID NO: 2550362 - RNA, 19 nt, Artificial Sequence
  Description of Artificial Sequence: Synthetic oligonucleotide
  Sense strand starting at position 3489 of SEQ ID NO: 1888692
gucagauggugguuugcau

SEQ ID NO: 2550363 - RNA, 19 nt, Artificial Sequence
  Description of Artificial Sequence: Synthetic oligonucleotide
  Antisense strand to SEQ ID NO: 2550362
augcaaaccaccaucugac

SEQ ID NO: 2550364 - RNA, 19 nt, Artificial Sequence
  Description of Artificial Sequence: Synthetic oligonucleotide
  Sense strand starting at position 2460 of SEQ ID NO: 1888692
cccugaugucccugccauu

SEQ ID NO: 2550365 - RNA, 19 nt, Artificial Sequence
  Description of Artificial Sequence: Synthetic oligonucleotide
  Antisense strand to SEQ ID NO: 2550364
aauggcagggacaucaggg

SEQ ID NO: 2550366 - RNA, 19 nt, Artificial Sequence
  Description of Artificial Sequence: Synthetic oligonucleotide
  Sense strand starting at position 389 of SEQ ID NO: 1888692
ggaucaaguucccaggaca

SEQ ID NO: 2550367 - RNA, 19 nt, Artificial Sequence
  Description of Artificial Sequence: Synthetic oligonucleotide
  Antisense strand to SEQ ID NO: 2550366
uguccugggaacuugaucc

SEQ ID NO: 2550368 - RNA, 19 nt, Artificial Sequence
  Description of Artificial Sequence: Synthetic oligonucleotide
  Sense strand starting at position 2450 of SEQ ID NO: 1888692
gcucuuuccucccugaugu

SEQ ID NO: 2550369 - RNA, 19 nt, Artificial Sequence
  Description of Artificial Sequence: Synthetic oligonucleotide
  Antisense strand to SEQ ID NO: 2550368
acaucagggaggaaagagc

SEQ ID NO: 2550370 - RNA, 19 nt, Artificial Sequence
  Description of Artificial Sequence: Synthetic oligonucleotide
  Sense strand starting at position 863 of SEQ ID NO: 1888692
gccaccuuagccugaguuu

SEQ ID NO: 2550371 - RNA, 19 nt, Artificial Sequence
  Description of Artificial Sequence: Synthetic oligonucleotide
  Antisense strand to SEQ ID NO: 2550370
aaacucaggcuaagguggc

SEQ ID NO: 2550372 - RNA, 19 nt, Artificial Sequence
  Description of Artificial Sequence: Synthetic oligonucleotide
  Sense strand starting at position 3115 of SEQ ID NO: 1888692
uugcuaucuuaucuguguu

SEQ ID NO: 2550373 - RNA, 19 nt, Artificial Sequence
  Description of Artificial Sequence: Synthetic oligonucleotide
  Antisense strand to SEQ ID NO: 2550372
aacacagauaagauagcaa

SEQ ID NO: 2550374 - RNA, 19 nt, Artificial Sequence
  Description of Artificial Sequence: Synthetic oligonucleotide
  Sense strand starting at position 2825 of SEQ ID NO: 1888692
ggauaaugauaauguguaa

SEQ ID NO: 2550375 - RNA, 19 nt, Artificial Sequence
  Description of Artificial Sequence: Synthetic oligonucleotide
  Antisense strand to SEQ ID NO: 2550374
uuacacauuaucauuaucc

SEQ ID NO: 2550376 - RNA, 19 nt, Artificial Sequence
  Description of Artificial Sequence: Synthetic oligonucleotide
  Sense strand starting at position 1109 of SEQ ID NO: 1888692
augugacauuccugaagag

SEQ ID NO: 2550377 - RNA, 19 nt, Artificial Sequence
  Description of Artificial Sequence: Synthetic oligonucleotide
  Antisense strand to SEQ ID NO: 2550376
cucuucaggaaugucacau

SEQ ID NO: 2550378 - RNA, 19 nt, Artificial Sequence
  Description of Artificial Sequence: Synthetic oligonucleotide
  Sense strand starting at position 674 of SEQ ID NO: 1888692
cuaggauccugugggaaca

SEQ ID NO: 2550379 - RNA, 19 nt, Artificial Sequence
  Description of Artificial Sequence: Synthetic oligonucleotide
  Antisense strand to SEQ ID NO: 2550378
uguucccacaggauccuag

SEQ ID NO: 2550380 - RNA, 19 nt, Artificial Sequence
  Description of Artificial Sequence: Synthetic oligonucleotide
  Sense strand starting at position 195 of SEQ ID NO: 1888692
gagugucaaugacaagcau

SEQ ID NO: 2550381 - RNA, 19 nt, Artificial Sequence
  Description of Artificial Sequence: Synthetic oligonucleotide
  Antisense strand to SEQ ID NO: 2550380
augcuugucauugacacuc

SEQ ID NO: 2550382 - RNA, 19 nt, Artificial Sequence
  Description of Artificial Sequence: Synthetic oligonucleotide
  Sense strand starting at position 1003 of SEQ ID NO: 1888692
acaucugccucauggaaga

SEQ ID NO: 2550383 - RNA, 19 nt, Artificial Sequence
  Description of Artificial Sequence: Synthetic oligonucleotide
  Antisense strand to SEQ ID NO: 2550382
ucuuccaugaggcagaugu

SEQ ID NO: 2550384 - RNA, 19 nt, Artificial Sequence
  Description of Artificial Sequence: Synthetic oligonucleotide
  Sense strand starting at position 213 of SEQ ID NO: 1888692
uggcccuacuucgagaagu

SEQ ID NO: 2550385 - RNA, 19 nt, Artificial Sequence
  Description of Artificial Sequence: Synthetic oligonucleotide
  Antisense strand to SEQ ID NO: 2550384
acuucucgaaguagggcca

SEQ ID NO: 2550386 - RNA, 19 nt, Artificial Sequence
  Description of Artificial Sequence: Synthetic oligonucleotide
  Sense strand starting at position 3503 of SEQ ID NO: 1888692
ugcauccuguucugucaua

SEQ ID NO: 2550387 - RNA, 19 nt, Artificial Sequence
  Description of Artificial Sequence: Synthetic oligonucleotide
  Antisense strand to SEQ ID NO: 2550386
uaugacagaacaggaugca

SEQ ID NO: 2550388 - RNA, 19 nt, Artificial Sequence
  Description of Artificial Sequence: Synthetic oligonucleotide
  Sense strand starting at position 987 of SEQ ID NO: 1888692
ccuuauagcugccgucaca

SEQ ID NO: 2550389 - RNA, 19 nt, Artificial Sequence
  Description of Artificial Sequence: Synthetic oligonucleotide
  Antisense strand to SEQ ID NO: 2550388
ugugacggcagcuauaagg

SEQ ID NO: 2550390 - RNA, 19 nt, Artificial Sequence
  Description of Artificial Sequence: Synthetic oligonucleotide
  Sense strand starting at position 844 of SEQ ID NO: 1888693
agauguguuauccaggaug

SEQ ID NO: 2550391 - RNA, 19 nt, Artificial Sequence
  Description of Artificial Sequence: Synthetic oligonucleotide
  Antisense strand to SEQ ID NO: 2550390
cauccuggauaacacaucu

SEQ ID NO: 2550392 - RNA, 19 nt, Artificial Sequence
  Description of Artificial Sequence: Synthetic oligonucleotide
  Sense strand starting at position 2546 of SEQ ID NO: 1888693
cccggacgucgccuauuaa

SEQ ID NO: 2550393 - RNA, 19 nt, Artificial Sequence
  Description of Artificial Sequence: Synthetic oligonucleotide
  Antisense strand to SEQ ID NO: 2550392
uuaauaggcgacguccggg

SEQ ID NO: 2550394 - RNA, 19 nt, Artificial Sequence
  Description of Artificial Sequence: Synthetic oligonucleotide
  Sense strand starting at position 3305 of SEQ ID NO: 1888693
gcacaugugcaaugauuua

SEQ ID NO: 2550395 - RNA, 19 nt, Artificial Sequence
  Description of Artificial Sequence: Synthetic oligonucleotide
  Antisense strand to SEQ ID NO: 2550394
uaaaucauugcacaugugc

SEQ ID NO: 2550396 - RNA, 19 nt, Artificial Sequence
  Description of Artificial Sequence: Synthetic oligonucleotide
  Sense strand starting at position 1130 of SEQ ID NO: 1888693
auuccuuggccugaaauga

SEQ ID NO: 2550397 - RNA, 19 nt, Artificial Sequence
  Description of Artificial Sequence: Synthetic oligonucleotide
  Antisense strand to SEQ ID NO: 2550396
ucauuucaggccaaggaau

SEQ ID NO: 2550398 - RNA, 19 nt, Artificial Sequence
  Description of Artificial Sequence: Synthetic oligonucleotide
  Sense strand starting at position 3807 of SEQ ID NO: 1888693
acucaagaugcuggaugaa

SEQ ID NO: 2550399 - RNA, 19 nt, Artificial Sequence
  Description of Artificial Sequence: Synthetic oligonucleotide
  Antisense strand to SEQ ID NO: 2550398
uucauccagcaucuugagu

SEQ ID NO: 2550400 - RNA, 19 nt, Artificial Sequence
  Description of Artificial Sequence: Synthetic oligonucleotide
  Sense strand starting at position 3869 of SEQ ID NO: 1888693
gcagcauuuggccaacagu

SEQ ID NO: 2550401 - RNA, 19 nt, Artificial Sequence
  Description of Artificial Sequence: Synthetic oligonucleotide
  Antisense strand to SEQ ID NO: 2550400
acuguuggccaaaugcugc

SEQ ID NO: 2550402 - RNA, 19 nt, Artificial Sequence
  Description of Artificial Sequence: Synthetic oligonucleotide
  Sense strand starting at position 1320 of SEQ ID NO: 1888693
guuauaucucugccucguu

SEQ ID NO: 2550403 - RNA, 19 nt, Artificial Sequence
  Description of Artificial Sequence: Synthetic oligonucleotide
  Antisense strand to SEQ ID NO: 2550402
aacgaggcagagauauaac

SEQ ID NO: 2550404 - RNA, 19 nt, Artificial Sequence
  Description of Artificial Sequence: Synthetic oligonucleotide
  Sense strand starting at position 2889 of SEQ ID NO: 1888693
aagacacuuugucuuggaa

SEQ ID NO: 2550405 - RNA, 19 nt, Artificial Sequence
  Description of Artificial Sequence: Synthetic oligonucleotide
  Antisense strand to SEQ ID NO: 2550404
uuccaagacaaagugucuu

SEQ ID NO: 2550406 - RNA, 19 nt, Artificial Sequence
  Description of Artificial Sequence: Synthetic oligonucleotide
  Sense strand starting at position 842 of SEQ ID NO: 1888693
agagauguguuauccagga

SEQ ID NO: 2550407 - RNA, 19 nt, Artificial Sequence
  Description of Artificial Sequence: Synthetic oligonucleotide
  Antisense strand to SEQ ID NO: 2550406
uccuggauaacacaucucu

SEQ ID NO: 2550408 - RNA, 19 nt, Artificial Sequence
  Description of Artificial Sequence: Synthetic oligonucleotide
  Sense strand starting at position 2333 of SEQ ID NO: 1888693
ggagccacacugugagaaa

SEQ ID NO: 2550409 - RNA, 19 nt, Artificial Sequence
  Description of Artificial Sequence: Synthetic oligonucleotide
  Antisense strand to SEQ ID NO: 2550408
uuucucacaguguggcucc

SEQ ID NO: 2550410 - RNA, 19 nt, Artificial Sequence
  Description of Artificial Sequence: Synthetic oligonucleotide
  Sense strand starting at position 1310 of SEQ ID NO: 1888693
uuagauguggguuauaucu

SEQ ID NO: 2550411 - RNA, 19 nt, Artificial Sequence
  Description of Artificial Sequence: Synthetic oligonucleotide
  Antisense strand to SEQ ID NO: 2550410
agauauaacccacaucuaa

SEQ ID NO: 2550412 - RNA, 19 nt, Artificial Sequence
  Description of Artificial Sequence: Synthetic oligonucleotide
  Sense strand starting at position 949 of SEQ ID NO: 1888693
cccuacauucuuuagaguu

SEQ ID NO: 2550413 - RNA, 19 nt, Artificial Sequence
  Description of Artificial Sequence: Synthetic oligonucleotide
  Antisense strand to SEQ ID NO: 2550412
aacucuaaagaauguaggg

SEQ ID NO: 2550414 - RNA, 19 nt, Artificial Sequence
  Description of Artificial Sequence: Synthetic oligonucleotide
  Sense strand starting at position 2892 of SEQ ID NO: 1888693
acacuuugucuuggaaaua

SEQ ID NO: 2550415 - RNA, 19 nt, Artificial Sequence
  Description of Artificial Sequence: Synthetic oligonucleotide
  Antisense strand to SEQ ID NO: 2550414
uauuuccaagacaaagugu

SEQ ID NO: 2550416 - RNA, 19 nt, Artificial Sequence
  Description of Artificial Sequence: Synthetic oligonucleotide
  Sense strand starting at position 3285 of SEQ ID NO: 1888693
acccaaguucccugaaaug

SEQ ID NO: 2550417 - RNA, 19 nt, Artificial Sequence
  Description of Artificial Sequence: Synthetic oligonucleotide
  Antisense strand to SEQ ID NO: 2550416
cauuucagggaacuugggu

SEQ ID NO: 2550418 - RNA, 19 nt, Artificial Sequence
  Description of Artificial Sequence: Synthetic oligonucleotide
  Sense strand starting at position 146 of SEQ ID NO: 1888693
gagaaaucccgaggccaac

SEQ ID NO: 2550419 - RNA, 19 nt, Artificial Sequence
  Description of Artificial Sequence: Synthetic oligonucleotide
  Antisense strand to SEQ ID NO: 2550418
guuggccucgggauuucuc

SEQ ID NO: 2550420 - RNA, 19 nt, Artificial Sequence
  Description of Artificial Sequence: Synthetic oligonucleotide
  Sense strand starting at position 107 of SEQ ID NO: 1888693
acauuucgucuuuggcuua

SEQ ID NO: 2550421 - RNA, 19 nt, Artificial Sequence
  Description of Artificial Sequence: Synthetic oligonucleotide
  Antisense strand to SEQ ID NO: 2550420
uaagccaaagacgaaaugu

SEQ ID NO: 2550422 - RNA, 19 nt, Artificial Sequence
  Description of Artificial Sequence: Synthetic oligonucleotide
  Sense strand starting at position 1129 of SEQ ID NO: 1888693
gauuccuuggccugaaaug

SEQ ID NO: 2550423 - RNA, 19 nt, Artificial Sequence
  Description of Artificial Sequence: Synthetic oligonucleotide
  Antisense strand to SEQ ID NO: 2550422
cauuucaggccaaggaauc

SEQ ID NO: 2550424 - RNA, 19 nt, Artificial Sequence
  Description of Artificial Sequence: Synthetic oligonucleotide
  Sense strand starting at position 1336 of SEQ ID NO: 1888693
guucucuguguggauaaau

SEQ ID NO: 2550425 - RNA, 19 nt, Artificial Sequence
  Description of Artificial Sequence: Synthetic oligonucleotide
  Antisense strand to SEQ ID NO: 2550424
auuuauccacacagagaac

SEQ ID NO: 2550426 - RNA, 19 nt, Artificial Sequence
  Description of Artificial Sequence: Synthetic oligonucleotide
  Sense strand starting at position 1127 of SEQ ID NO: 1888693
cugauuccuuggccugaaa

SEQ ID NO: 2550427 - RNA, 19 nt, Artificial Sequence
  Description of Artificial Sequence: Synthetic oligonucleotide
  Antisense strand to SEQ ID NO: 2550426
uuucaggccaaggaaucag

SEQ ID NO: 2550428 - RNA, 19 nt, Artificial Sequence
  Description of Artificial Sequence: Synthetic oligonucleotide
  Sense strand starting at position 207 of SEQ ID NO: 1888693
cggguucugagugaaagca

SEQ ID NO: 2550429 - RNA, 19 nt, Artificial Sequence
  Description of Artificial Sequence: Synthetic oligonucleotide
  Antisense strand to SEQ ID NO: 2550428
ugcuuucacucagaacccg

SEQ ID NO: 2550430 - RNA, 19 nt, Artificial Sequence
  Description of Artificial Sequence: Synthetic oligonucleotide
  Sense strand starting at position 3294 of SEQ ID NO: 1888693
cccugaaaugugcacaugu

SEQ ID NO: 2550431 - RNA, 19 nt, Artificial Sequence
  Description of Artificial Sequence: Synthetic oligonucleotide
  Antisense strand to SEQ ID NO: 2550430
acaugugcacauuucaggg

SEQ ID NO: 2550432 - RNA, 19 nt, Artificial Sequence
  Description of Artificial Sequence: Synthetic oligonucleotide
  Sense strand starting at position 2264 of SEQ ID NO: 1888693
gucuuaaggccuggacaca

SEQ ID NO: 2550433 - RNA, 19 nt, Artificial Sequence
  Description of Artificial Sequence: Synthetic oligonucleotide
  Antisense strand to SEQ ID NO: 2550432
uguguccaggccuuaagac

SEQ ID NO: 2550434 - RNA, 19 nt, Artificial Sequence
  Description of Artificial Sequence: Synthetic oligonucleotide
  Sense strand starting at position 1282 of SEQ ID NO: 1888693
gcauuagagagugguuaca

SEQ ID NO: 2550435 - RNA, 19 nt, Artificial Sequence
  Description of Artificial Sequence: Synthetic oligonucleotide
  Antisense strand to SEQ ID NO: 2550434
uguaaccacucucuaaugc

SEQ ID NO: 2550436 - RNA, 19 nt, Artificial Sequence
  Description of Artificial Sequence: Synthetic oligonucleotide
  Sense strand starting at position 1126 of SEQ ID NO: 1888693
ccugauuccuuggccugaa

SEQ ID NO: 2550437 - RNA, 19 nt, Artificial Sequence
  Description of Artificial Sequence: Synthetic oligonucleotide
  Antisense strand to SEQ ID NO: 2550436
uucaggccaaggaaucagg

SEQ ID NO: 2550438 - RNA, 19 nt, Artificial Sequence
  Description of Artificial Sequence: Synthetic oligonucleotide
  Sense strand starting at position 1014 of SEQ ID NO: 1888693
gucaauaguucuuuccuaa

SEQ ID NO: 2550439 - RNA, 19 nt, Artificial Sequence
  Description of Artificial Sequence: Synthetic oligonucleotide
  Antisense strand to SEQ ID NO: 2550438
uuaggaaagaacuauugac

SEQ ID NO: 2550440 - RNA, 19 nt, Artificial Sequence
  Description of Artificial Sequence: Synthetic oligonucleotide
  Sense strand starting at position 1013 of SEQ ID NO: 1888693
agucaauaguucuuuccua

SEQ ID NO: 2550441 - RNA, 19 nt, Artificial Sequence
  Description of Artificial Sequence: Synthetic oligonucleotide
  Antisense strand to SEQ ID NO: 2550440
uaggaaagaacuauugacu

SEQ ID NO: 2550442 - RNA, 19 nt, Artificial Sequence
  Description of Artificial Sequence: Synthetic oligonucleotide
  Sense strand starting at position 2645 of SEQ ID NO: 1888693
uaguuagcucagggacuuu

SEQ ID NO: 2550443 - RNA, 19 nt, Artificial Sequence
  Description of Artificial Sequence: Synthetic oligonucleotide
  Antisense strand to SEQ ID NO: 2550442
aaagucccugagcuaacua

SEQ ID NO: 2550444 - RNA, 19 nt, Artificial Sequence
  Description of Artificial Sequence: Synthetic oligonucleotide
  Sense strand starting at position 837 of SEQ ID NO: 1888693
uuaguagagauguguuauc

SEQ ID NO: 2550445 - RNA, 19 nt, Artificial Sequence
  Description of Artificial Sequence: Synthetic oligonucleotide
  Antisense strand to SEQ ID NO: 2550444
gauaacacaucucuacuaa

SEQ ID NO: 2550446 - RNA, 19 nt, Artificial Sequence
  Description of Artificial Sequence: Synthetic oligonucleotide
  Sense strand starting at position 2253 of SEQ ID NO: 1888693
gcaccaugguagucuuaag

SEQ ID NO: 2550447 - RNA, 19 nt, Artificial Sequence
  Description of Artificial Sequence: Synthetic oligonucleotide
  Antisense strand to SEQ ID NO: 2550446
cuuaagacuaccauggugc

SEQ ID NO: 2550448 - RNA, 19 nt, Artificial Sequence
  Description of Artificial Sequence: Synthetic oligonucleotide
  Sense strand starting at position 1125 of SEQ ID NO: 1888693
uccugauuccuuggccuga

SEQ ID NO: 2550449 - RNA, 19 nt, Artificial Sequence
  Description of Artificial Sequence: Synthetic oligonucleotide
  Antisense strand to SEQ ID NO: 2550448
ucaggccaaggaaucagga

SEQ ID NO: 2550450 - RNA, 19 nt, Artificial Sequence
  Description of Artificial Sequence: Synthetic oligonucleotide
  Sense strand starting at position 1004 of SEQ ID NO: 1888693
cccuguagcagucaauagu

SEQ ID NO: 2550451 - RNA, 19 nt, Artificial Sequence
  Description of Artificial Sequence: Synthetic oligonucleotide
  Antisense strand to SEQ ID NO: 2550450
acuauugacugcuacaggg

SEQ ID NO: 2550452 - RNA, 19 nt, Artificial Sequence
  Description of Artificial Sequence: Synthetic oligonucleotide
  Sense strand starting at position 1172 of SEQ ID NO: 1888693
cagcauggugucuaugcaa

SEQ ID NO: 2550453 - RNA, 19 nt, Artificial Sequence
  Description of Artificial Sequence: Synthetic oligonucleotide
  Antisense strand to SEQ ID NO: 2550452
uugcauagacaccaugcug

SEQ ID NO: 2550454 - RNA, 19 nt, Artificial Sequence
  Description of Artificial Sequence: Synthetic oligonucleotide
  Sense strand starting at position 76 of SEQ ID NO: 1888693
gcgcacauuugcucaguca

SEQ ID NO: 2550455 - RNA, 19 nt, Artificial Sequence
  Description of Artificial Sequence: Synthetic oligonucleotide
  Antisense strand to SEQ ID NO: 2550454
ugacugagcaaaugugcgc

SEQ ID NO: 2550456 - RNA, 19 nt, Artificial Sequence
  Description of Artificial Sequence: Synthetic oligonucleotide
  Sense strand starting at position 206 of SEQ ID NO: 1888693
acggguucugagugaaagc

SEQ ID NO: 2550457 - RNA, 19 nt, Artificial Sequence
  Description of Artificial Sequence: Synthetic oligonucleotide
  Antisense strand to SEQ ID NO: 2550456
gcuuucacucagaacccgu

SEQ ID NO: 2550458 - RNA, 19 nt, Artificial Sequence
  Description of Artificial Sequence: Synthetic oligonucleotide
  Sense strand starting at position 2556 of SEQ ID NO: 1888693
gccuauuaauuguugggua

SEQ ID NO: 2550459 - RNA, 19 nt, Artificial Sequence
  Description of Artificial Sequence: Synthetic oligonucleotide
  Antisense strand to SEQ ID NO: 2550458
uacccaacaauuaauaggc

SEQ ID NO: 2550460 - RNA, 19 nt, Artificial Sequence
  Description of Artificial Sequence: Synthetic oligonucleotide
  Sense strand starting at position 566 of SEQ ID NO: 1888693
gcuucuaucucuguauaca

SEQ ID NO: 2550461 - RNA, 19 nt, Artificial Sequence
  Description of Artificial Sequence: Synthetic oligonucleotide
  Antisense strand to SEQ ID NO: 2550460
uguauacagagauagaagc

SEQ ID NO: 2550462 - RNA, 19 nt, Artificial Sequence
  Description of Artificial Sequence: Synthetic oligonucleotide
  Sense strand starting at position 541 of SEQ ID NO: 1888693
gggucuucucgguaugcag

SEQ ID NO: 2550463 - RNA, 19 nt, Artificial Sequence
  Description of Artificial Sequence: Synthetic oligonucleotide
  Antisense strand to SEQ ID NO: 2550462
cugcauaccgagaagaccc

SEQ ID NO: 2550464 - RNA, 19 nt, Artificial Sequence
  Description of Artificial Sequence: Synthetic oligonucleotide
  Sense strand starting at position 339 of SEQ ID NO: 1888693
gguugagucucuucagcag

SEQ ID NO: 2550465 - RNA, 19 nt, Artificial Sequence
  Description of Artificial Sequence: Synthetic oligonucleotide
  Antisense strand to SEQ ID NO: 2550464
cugcugaagagacucaacc

SEQ ID NO: 2550466 - RNA, 19 nt, Artificial Sequence
  Description of Artificial Sequence: Synthetic oligonucleotide
  Sense strand starting at position 1647 of SEQ ID NO: 1888693
augucacuccucuguccua

SEQ ID NO: 2550467 - RNA, 19 nt, Artificial Sequence
  Description of Artificial Sequence: Synthetic oligonucleotide
  Antisense strand to SEQ ID NO: 2550466
uaggacagaggagugacau

SEQ ID NO: 2550468 - RNA, 19 nt, Artificial Sequence
  Description of Artificial Sequence: Synthetic oligonucleotide
  Sense strand starting at position 1175 of SEQ ID NO: 1888693
cauggugucuaugcaacuu

SEQ ID NO: 2550469 - RNA, 19 nt, Artificial Sequence
  Description of Artificial Sequence: Synthetic oligonucleotide
  Antisense strand to SEQ ID NO: 2550468
aaguugcauagacaccaug

SEQ ID NO: 2550470 - RNA, 19 nt, Artificial Sequence
  Description of Artificial Sequence: Synthetic oligonucleotide
  Sense strand starting at position 3565 of SEQ ID NO: 1888694
cguauucgaagagaugaga

SEQ ID NO: 2550471 - RNA, 19 nt, Artificial Sequence
  Description of Artificial Sequence: Synthetic oligonucleotide
  Antisense strand to SEQ ID NO: 2550470
ucucaucucuucgaauacg

SEQ ID NO: 2550472 - RNA, 19 nt, Artificial Sequence
  Description of Artificial Sequence: Synthetic oligonucleotide
  Sense strand starting at position 3675 of SEQ ID NO: 1888694
cggcuaucacgugcuugaa

SEQ ID NO: 2550473 - RNA, 19 nt, Artificial Sequence
  Description of Artificial Sequence: Synthetic oligonucleotide
  Antisense strand to SEQ ID NO: 2550472
uucaagcacgugauagccg

SEQ ID NO: 2550474 - RNA, 19 nt, Artificial Sequence
  Description of Artificial Sequence: Synthetic oligonucleotide
  Sense strand starting at position 3329 of SEQ ID NO: 1888694
ucgagcuccucauuuccaa

SEQ ID NO: 2550475 - RNA, 19 nt, Artificial Sequence
  Description of Artificial Sequence: Synthetic oligonucleotide
  Antisense strand to SEQ ID NO: 2550474
uuggaaaugaggagcucga

SEQ ID NO: 2550476 - RNA, 19 nt, Artificial Sequence
  Description of Artificial Sequence: Synthetic oligonucleotide
  Sense strand starting at position 606 of SEQ ID NO: 1888694
ccucgaacucuccaagacu

SEQ ID NO: 2550477 - RNA, 19 nt, Artificial Sequence
  Description of Artificial Sequence: Synthetic oligonucleotide
  Antisense strand to SEQ ID NO: 2550476
agucuuggagaguucgagg

SEQ ID NO: 2550478 - RNA, 19 nt, Artificial Sequence
  Description of Artificial Sequence: Synthetic oligonucleotide
  Sense strand starting at position 3509 of SEQ ID NO: 1888694
auacucaguggacgaaaua

SEQ ID NO: 2550479 - RNA, 19 nt, Artificial Sequence
  Description of Artificial Sequence: Synthetic oligonucleotide
  Antisense strand to SEQ ID NO: 2550478
uauuucguccacugaguau

SEQ ID NO: 2550480 - RNA, 19 nt, Artificial Sequence
  Description of Artificial Sequence: Synthetic oligonucleotide
  Sense strand starting at position 1155 of SEQ ID NO: 1888694
uaguuuccagauggacaua

SEQ ID NO: 2550481 - RNA, 19 nt, Artificial Sequence
  Description of Artificial Sequence: Synthetic oligonucleotide
  Antisense strand to SEQ ID NO: 2550480
uauguccaucuggaaacua

SEQ ID NO: 2550482 - RNA, 19 nt, Artificial Sequence
  Description of Artificial Sequence: Synthetic oligonucleotide
  Sense strand starting at position 3491 of SEQ ID NO: 1888694
cugagugacgaucagcaaa

SEQ ID NO: 2550483 - RNA, 19 nt, Artificial Sequence
  Description of Artificial Sequence: Synthetic oligonucleotide
  Antisense strand to SEQ ID NO: 2550482
uuugcugaucgucacucag

SEQ ID NO: 2550484 - RNA, 19 nt, Artificial Sequence
  Description of Artificial Sequence: Synthetic oligonucleotide
  Sense strand starting at position 376 of SEQ ID NO: 1888694
ugcauagguguggacuaaa

SEQ ID NO: 2550485 - RNA, 19 nt, Artificial Sequence
  Description of Artificial Sequence: Synthetic oligonucleotide
  Antisense strand to SEQ ID NO: 2550484
uuuaguccacaccuaugca

SEQ ID NO: 2550486 - RNA, 19 nt, Artificial Sequence
  Description of Artificial Sequence: Synthetic oligonucleotide
  Sense strand starting at position 3710 of SEQ ID NO: 1888694
gugagaugcgcuuuacgug

SEQ ID NO: 2550487 - RNA, 19 nt, Artificial Sequence
  Description of Artificial Sequence: Synthetic oligonucleotide
  Antisense strand to SEQ ID NO: 2550486
cacguaaagcgcaucucac

SEQ ID NO: 2550488 - RNA, 19 nt, Artificial Sequence
  Description of Artificial Sequence: Synthetic oligonucleotide
  Sense strand starting at position 3612 of SEQ ID NO: 1888694
ggaagaaugguuugagcac

SEQ ID NO: 2550489 - RNA, 19 nt, Artificial Sequence
  Description of Artificial Sequence: Synthetic oligonucleotide
  Antisense strand to SEQ ID NO: 2550488
gugcucaaaccauucuucc

SEQ ID NO: 2550490 - RNA, 19 nt, Artificial Sequence
  Description of Artificial Sequence: Synthetic oligonucleotide
  Sense strand starting at position 2299 of SEQ ID NO: 1888694
gucauuccagccgaagaaa

SEQ ID NO: 2550491 - RNA, 19 nt, Artificial Sequence
  Description of Artificial Sequence: Synthetic oligonucleotide
  Antisense strand to SEQ ID NO: 2550490
uuucuucggcuggaaugac

SEQ ID NO: 2550492 - RNA, 19 nt, Artificial Sequence
  Description of Artificial Sequence: Synthetic oligonucleotide
  Sense strand starting at position 2036 of SEQ ID NO: 1888694
guuuaugaaugauucuacu

SEQ ID NO: 2550493 - RNA, 19 nt, Artificial Sequence
  Description of Artificial Sequence: Synthetic oligonucleotide
  Antisense strand to SEQ ID NO: 2550492
aguagaaucauucauaaac

SEQ ID NO: 2550494 - RNA, 19 nt, Artificial Sequence
  Description of Artificial Sequence: Synthetic oligonucleotide
  Sense strand starting at position 3563 of SEQ ID NO: 1888694
agcguauucgaagagauga

SEQ ID NO: 2550495 - RNA, 19 nt, Artificial Sequence
  Description of Artificial Sequence: Synthetic oligonucleotide
  Antisense strand to SEQ ID NO: 2550494
ucaucucuucgaauacgcu

SEQ ID NO: 2550496 - RNA, 19 nt, Artificial Sequence
  Description of Artificial Sequence: Synthetic oligonucleotide
  Sense strand starting at position 3493 of SEQ ID NO: 1888694
gagugacgaucagcaaaua

SEQ ID NO: 2550497 - RNA, 19 nt, Artificial Sequence
  Description of Artificial Sequence: Synthetic oligonucleotide
  Antisense strand to SEQ ID NO: 2550496
uauuugcugaucgucacuc

SEQ ID NO: 2550498 - RNA, 19 nt, Artificial Sequence
  Description of Artificial Sequence: Synthetic oligonucleotide
  Sense strand starting at position 2413 of SEQ ID NO: 1888694
gggaaacucuaguccucuu

SEQ ID NO: 2550499 - RNA, 19 nt, Artificial Sequence
  Description of Artificial Sequence: Synthetic oligonucleotide
  Antisense strand to SEQ ID NO: 2550498
aagaggacuagaguuuccc

SEQ ID NO: 2550500 - RNA, 19 nt, Artificial Sequence
  Description of Artificial Sequence: Synthetic oligonucleotide
  Sense strand starting at position 2124 of SEQ ID NO: 1888694
uucugaaaucuugacguuu

SEQ ID NO: 2550501 - RNA, 19 nt, Artificial Sequence
  Description of Artificial Sequence: Synthetic oligonucleotide
  Antisense strand to SEQ ID NO: 2550500
aaacgucaagauuucagaa

SEQ ID NO: 2550502 - RNA, 19 nt, Artificial Sequence
  Description of Artificial Sequence: Synthetic oligonucleotide
  Sense strand starting at position 2473 of SEQ ID NO: 1888694
gcaaaucaagugggucaaa

SEQ ID NO: 2550503 - RNA, 19 nt, Artificial Sequence
  Description of Artificial Sequence: Synthetic oligonucleotide
  Antisense strand to SEQ ID NO: 2550502
uuugacccacuugauuugc

SEQ ID NO: 2550504 - RNA, 19 nt, Artificial Sequence
  Description of Artificial Sequence: Synthetic oligonucleotide
  Sense strand starting at position 707 of SEQ ID NO: 1888694
gcugguguucgguauuuca

SEQ ID NO: 2550505 - RNA, 19 nt, Artificial Sequence
  Description of Artificial Sequence: Synthetic oligonucleotide
  Antisense strand to SEQ ID NO: 2550504
ugaaauaccgaacaccagc

SEQ ID NO: 2550506 - RNA, 19 nt, Artificial Sequence
  Description of Artificial Sequence: Synthetic oligonucleotide
  Sense strand starting at position 884 of SEQ ID NO: 1888694
cugucaagucucuagguga

SEQ ID NO: 2550507 - RNA, 19 nt, Artificial Sequence
  Description of Artificial Sequence: Synthetic oligonucleotide
  Antisense strand to SEQ ID NO: 2550506
ucaccuagagacuugacag

SEQ ID NO: 2550508 - RNA, 19 nt, Artificial Sequence
  Description of Artificial Sequence: Synthetic oligonucleotide
  Sense strand starting at position 3591 of SEQ ID NO: 1888694
gggauuaggccaggcuuga

SEQ ID NO: 2550509 - RNA, 19 nt, Artificial Sequence
  Description of Artificial Sequence: Synthetic oligonucleotide
  Antisense strand to SEQ ID NO: 2550508
ucaagccuggccuaauccc

SEQ ID NO: 2550510 - RNA, 19 nt, Artificial Sequence
  Description of Artificial Sequence: Synthetic oligonucleotide
  Sense strand starting at position 3505 of SEQ ID NO: 1888694
gcaaauacucaguggacga

SEQ ID NO: 2550511 - RNA, 19 nt, Artificial Sequence
  Description of Artificial Sequence: Synthetic oligonucleotide
  Antisense strand to SEQ ID NO: 2550510
ucguccacugaguauuugc

SEQ ID NO: 2550512 - RNA, 19 nt, Artificial Sequence
  Description of Artificial Sequence: Synthetic oligonucleotide
  Sense strand starting at position 2056 of SEQ ID NO: 1888694
agacuuaucuucguaacac

SEQ ID NO: 2550513 - RNA, 19 nt, Artificial Sequence
  Description of Artificial Sequence: Synthetic oligonucleotide
  Antisense strand to SEQ ID NO: 2550512
guguuacgaagauaagucu

SEQ ID NO: 2550514 - RNA, 19 nt, Artificial Sequence
  Description of Artificial Sequence: Synthetic oligonucleotide
  Sense strand starting at position 1382 of SEQ ID NO: 1888694
ucuuauguucuacagcauu

SEQ ID NO: 2550515 - RNA, 19 nt, Artificial Sequence
  Description of Artificial Sequence: Synthetic oligonucleotide
  Antisense strand to SEQ ID NO: 2550514
aaugcuguagaacauaaga

SEQ ID NO: 2550516 - RNA, 19 nt, Artificial Sequence
  Description of Artificial Sequence: Synthetic oligonucleotide
  Sense strand starting at position 2430 of SEQ ID NO: 1888694
uucuaugcucaaggcaaga

SEQ ID NO: 2550517 - RNA, 19 nt, Artificial Sequence
  Description of Artificial Sequence: Synthetic oligonucleotide
  Antisense strand to SEQ ID NO: 2550516
ucuugccuugagcauagaa

SEQ ID NO: 2550518 - RNA, 19 nt, Artificial Sequence
  Description of Artificial Sequence: Synthetic oligonucleotide
  Sense strand starting at position 1004 of SEQ ID NO: 1888694
gggccauuucccugugugu

SEQ ID NO: 2550519 - RNA, 19 nt, Artificial Sequence
  Description of Artificial Sequence: Synthetic oligonucleotide
  Antisense strand to SEQ ID NO: 2550518
acacacagggaaauggccc

SEQ ID NO: 2550520 - RNA, 19 nt, Artificial Sequence
  Description of Artificial Sequence: Synthetic oligonucleotide
  Sense strand starting at position 2033 of SEQ ID NO: 1888694
uguguuuaugaaugauucu

SEQ ID NO: 2550521 - RNA, 19 nt, Artificial Sequence
  Description of Artificial Sequence: Synthetic oligonucleotide
  Antisense strand to SEQ ID NO: 2550520
agaaucauucauaaacaca

SEQ ID NO: 2550522 - RNA, 19 nt, Artificial Sequence
  Description of Artificial Sequence: Synthetic oligonucleotide
  Sense strand starting at position 2298 of SEQ ID NO: 1888694
ggucauuccagccgaagaa

SEQ ID NO: 2550523 - RNA, 19 nt, Artificial Sequence
  Description of Artificial Sequence: Synthetic oligonucleotide
  Antisense strand to SEQ ID NO: 2550522
uucuucggcuggaaugacc

SEQ ID NO: 2550524 - RNA, 19 nt, Artificial Sequence
  Description of Artificial Sequence: Synthetic oligonucleotide
  Sense strand starting at position 2054 of SEQ ID NO: 1888694
ucagacuuaucuucguaac

SEQ ID NO: 2550525 - RNA, 19 nt, Artificial Sequence
  Description of Artificial Sequence: Synthetic oligonucleotide
  Antisense strand to SEQ ID NO: 2550524
guuacgaagauaagucuga

SEQ ID NO: 2550526 - RNA, 19 nt, Artificial Sequence
  Description of Artificial Sequence: Synthetic oligonucleotide
  Sense strand starting at position 3776 of SEQ ID NO: 1888694
uuugcauguuagguaacau

SEQ ID NO: 2550527 - RNA, 19 nt, Artificial Sequence
  Description of Artificial Sequence: Synthetic oligonucleotide
  Antisense strand to SEQ ID NO: 2550526
auguuaccuaacaugcaaa

SEQ ID NO: 2550528 - RNA, 19 nt, Artificial Sequence
  Description of Artificial Sequence: Synthetic oligonucleotide
  Sense strand starting at position 3741 of SEQ ID NO: 1888694
uuccaaagacgucguauaa

SEQ ID NO: 2550529 - RNA, 19 nt, Artificial Sequence
  Description of Artificial Sequence: Synthetic oligonucleotide
  Antisense strand to SEQ ID NO: 2550528
uuauacgacgucuuuggaa

SEQ ID NO: 2550530 - RNA, 19 nt, Artificial Sequence
  Description of Artificial Sequence: Synthetic oligonucleotide
  Sense strand starting at position 2197 of SEQ ID NO: 1888694
cguaaugucucauucccua

SEQ ID NO: 2550531 - RNA, 19 nt, Artificial Sequence
  Description of Artificial Sequence: Synthetic oligonucleotide
  Antisense strand to SEQ ID NO: 2550530
uagggaaugagacauuacg

SEQ ID NO: 2550532 - RNA, 19 nt, Artificial Sequence
  Description of Artificial Sequence: Synthetic oligonucleotide
  Sense strand starting at position 2130 of SEQ ID NO: 1888694
aaucuugacguuugcuuau

SEQ ID NO: 2550533 - RNA, 19 nt, Artificial Sequence
  Description of Artificial Sequence: Synthetic oligonucleotide
  Antisense strand to SEQ ID NO: 2550532
auaagcaaacgucaagauu

SEQ ID NO: 2550534 - RNA, 19 nt, Artificial Sequence
  Description of Artificial Sequence: Synthetic oligonucleotide
  Sense strand starting at position 2136 of SEQ ID NO: 1888694
gacguuugcuuaucucuga

SEQ ID NO: 2550535 - RNA, 19 nt, Artificial Sequence
  Description of Artificial Sequence: Synthetic oligonucleotide
  Antisense strand to SEQ ID NO: 2550534
ucagagauaagcaaacguc

SEQ ID NO: 2550536 - RNA, 19 nt, Artificial Sequence
  Description of Artificial Sequence: Synthetic oligonucleotide
  Sense strand starting at position 682 of SEQ ID NO: 1888694
gcaucaaagucagaggaaa

SEQ ID NO: 2550537 - RNA, 19 nt, Artificial Sequence
  Description of Artificial Sequence: Synthetic oligonucleotide
  Antisense strand to SEQ ID NO: 2550536
uuuccucugacuuugaugc

SEQ ID NO: 2550538 - RNA, 19 nt, Artificial Sequence
  Description of Artificial Sequence: Synthetic oligonucleotide
  Sense strand starting at position 3239 of SEQ ID NO: 1888694
gugguuggguuucugaguu

SEQ ID NO: 2550539 - RNA, 19 nt, Artificial Sequence
  Description of Artificial Sequence: Synthetic oligonucleotide
  Antisense strand to SEQ ID NO: 2550538
aacucagaaacccaaccac

SEQ ID NO: 2550540 - RNA, 19 nt, Artificial Sequence
  Description of Artificial Sequence: Synthetic oligonucleotide
  Sense strand starting at position 873 of SEQ ID NO: 1888694
ggccaugcucucugucaag

SEQ ID NO: 2550541 - RNA, 19 nt, Artificial Sequence
  Description of Artificial Sequence: Synthetic oligonucleotide
  Antisense strand to SEQ ID NO: 2550540
cuugacagagagcauggcc

SEQ ID NO: 2550542 - RNA, 19 nt, Artificial Sequence
  Description of Artificial Sequence: Synthetic oligonucleotide
  Sense strand starting at position 2137 of SEQ ID NO: 1888694
acguuugcuuaucucugau

SEQ ID NO: 2550543 - RNA, 19 nt, Artificial Sequence
  Description of Artificial Sequence: Synthetic oligonucleotide
  Antisense strand to SEQ ID NO: 2550542
aucagagauaagcaaacgu

SEQ ID NO: 2550544 - RNA, 19 nt, Artificial Sequence
  Description of Artificial Sequence: Synthetic oligonucleotide
  Sense strand starting at position 3677 of SEQ ID NO: 1888694
gcuaucacgugcuugaaac

SEQ ID NO: 2550545 - RNA, 19 nt, Artificial Sequence
  Description of Artificial Sequence: Synthetic oligonucleotide
  Antisense strand to SEQ ID NO: 2550544
guuucaagcacgugauagc

SEQ ID NO: 2550546 - RNA, 19 nt, Artificial Sequence
  Description of Artificial Sequence: Synthetic oligonucleotide
  Sense strand starting at position 703 of SEQ ID NO: 1888694
gaaagcugguguucgguau

SEQ ID NO: 2550547 - RNA, 19 nt, Artificial Sequence
  Description of Artificial Sequence: Synthetic oligonucleotide
  Antisense strand to SEQ ID NO: 2550546
auaccgaacaccagcuuuc

SEQ ID NO: 2550548 - RNA, 19 nt, Artificial Sequence
  Description of Artificial Sequence: Synthetic oligonucleotide
  Sense strand starting at position 2620 of SEQ ID NO: 1888694
aggaguuucucggaaagaa

SEQ ID NO: 2550549 - RNA, 19 nt, Artificial Sequence
  Description of Artificial Sequence: Synthetic oligonucleotide
  Antisense strand to SEQ ID NO: 2550548
uucuuuccgagaaacuccu

SEQ ID NO: 2550550 - RNA, 19 nt, Artificial Sequence
  Description of Artificial Sequence: Synthetic oligonucleotide
  Sense strand starting at position 2993 of SEQ ID NO: 1888695
gugcuuguucuugcagauu

SEQ ID NO: 2550551 - RNA, 19 nt, Artificial Sequence
  Description of Artificial Sequence: Synthetic oligonucleotide
  Antisense strand to SEQ ID NO: 2550550
aaucugcaagaacaagcac

SEQ ID NO: 2550552 - RNA, 19 nt, Artificial Sequence
  Description of Artificial Sequence: Synthetic oligonucleotide
  Sense strand starting at position 2739 of SEQ ID NO: 1888695
agugaaguccaguaaauac

SEQ ID NO: 2550553 - RNA, 19 nt, Artificial Sequence
  Description of Artificial Sequence: Synthetic oligonucleotide
  Antisense strand to SEQ ID NO: 2550552
guauuuacuggacuucacu

SEQ ID NO: 2550554 - RNA, 19 nt, Artificial Sequence
  Description of Artificial Sequence: Synthetic oligonucleotide
  Sense strand starting at position 3046 of SEQ ID NO: 1888695
ggagacuccaguuagcaca

SEQ ID NO: 2550555 - RNA, 19 nt, Artificial Sequence
  Description of Artificial Sequence: Synthetic oligonucleotide
  Antisense strand to SEQ ID NO: 2550554
ugugcuaacuggagucucc

SEQ ID NO: 2550556 - RNA, 19 nt, Artificial Sequence
  Description of Artificial Sequence: Synthetic oligonucleotide
  Sense strand starting at position 919 of SEQ ID NO: 1888695
uagccaugucucgcgggau

SEQ ID NO: 2550557 - RNA, 19 nt, Artificial Sequence
  Description of Artificial Sequence: Synthetic oligonucleotide
  Antisense strand to SEQ ID NO: 2550556
aucccgcgagacauggcua

SEQ ID NO: 2550558 - RNA, 19 nt, Artificial Sequence
  Description of Artificial Sequence: Synthetic oligonucleotide
  Sense strand starting at position 65 of SEQ ID NO: 1888695
auuuauuucugucagucaa

SEQ ID NO: 2550559 - RNA, 19 nt, Artificial Sequence
  Description of Artificial Sequence: Synthetic oligonucleotide
  Antisense strand to SEQ ID NO: 2550558
uugacugacagaaauaaau

SEQ ID NO: 2550560 - RNA, 19 nt, Artificial Sequence
  Description of Artificial Sequence: Synthetic oligonucleotide
  Sense strand starting at position 1904 of SEQ ID NO: 1888695
guucuuugacuuggaaaga

SEQ ID NO: 2550561 - RNA, 19 nt, Artificial Sequence
  Description of Artificial Sequence: Synthetic oligonucleotide
  Antisense strand to SEQ ID NO: 2550560
ucuuuccaagucaaagaac

SEQ ID NO: 2550562 - RNA, 19 nt, Artificial Sequence
  Description of Artificial Sequence: Synthetic oligonucleotide
  Sense strand starting at position 2848 of SEQ ID NO: 1888695
ggagaaguucucuaugcca

SEQ ID NO: 2550563 - RNA, 19 nt, Artificial Sequence
  Description of Artificial Sequence: Synthetic oligonucleotide
  Antisense strand to SEQ ID NO: 2550562
uggcauagagaacuucucc

SEQ ID NO: 2550564 - RNA, 19 nt, Artificial Sequence
  Description of Artificial Sequence: Synthetic oligonucleotide
  Sense strand starting at position 1350 of SEQ ID NO: 1888695
gagaacagagccugguaau

SEQ ID NO: 2550565 - RNA, 19 nt, Artificial Sequence
  Description of Artificial Sequence: Synthetic oligonucleotide
  Antisense strand to SEQ ID NO: 2550564
auuaccaggcucuguucuc

SEQ ID NO: 2550566 - RNA, 19 nt, Artificial Sequence
  Description of Artificial Sequence: Synthetic oligonucleotide
  Sense strand starting at position 3189 of SEQ ID NO: 1888695
gcaggucuaggaugagaau

SEQ ID NO: 2550567 - RNA, 19 nt, Artificial Sequence
  Description of Artificial Sequence: Synthetic oligonucleotide
  Antisense strand to SEQ ID NO: 2550566
auucucauccuagaccugc

SEQ ID NO: 2550568 - RNA, 19 nt, Artificial Sequence
  Description of Artificial Sequence: Synthetic oligonucleotide
  Sense strand starting at position 547 of SEQ ID NO: 1888695
cguggugugcuguccagau

SEQ ID NO: 2550569 - RNA, 19 nt, Artificial Sequence
  Description of Artificial Sequence: Synthetic oligonucleotide
  Antisense strand to SEQ ID NO: 2550568
aucuggacagcacaccacg

SEQ ID NO: 2550570 - RNA, 19 nt, Artificial Sequence
  Description of Artificial Sequence: Synthetic oligonucleotide
  Sense strand starting at position 528 of SEQ ID NO: 1888695
uaaagaagcguuuaacuug

SEQ ID NO: 2550571 - RNA, 19 nt, Artificial Sequence
  Description of Artificial Sequence: Synthetic oligonucleotide
  Antisense strand to SEQ ID NO: 2550570
caaguuaaacgcuucuuua

SEQ ID NO: 2550572 - RNA, 19 nt, Artificial Sequence
  Description of Artificial Sequence: Synthetic oligonucleotide
  Sense strand starting at position 2963 of SEQ ID NO: 1888695
gugcccauuccagaucaga

SEQ ID NO: 2550573 - RNA, 19 nt, Artificial Sequence
  Description of Artificial Sequence: Synthetic oligonucleotide
  Antisense strand to SEQ ID NO: 2550572
ucugaucuggaaugggcac

SEQ ID NO: 2550574 - RNA, 19 nt, Artificial Sequence
  Description of Artificial Sequence: Synthetic oligonucleotide
  Sense strand starting at position 3616 of SEQ ID NO: 1888695
gcaggagaucugcagugga

SEQ ID NO: 2550575 - RNA, 19 nt, Artificial Sequence
  Description of Artificial Sequence: Synthetic oligonucleotide
  Antisense strand to SEQ ID NO: 2550574
uccacugcagaucuccugc

SEQ ID NO: 2550576 - RNA, 19 nt, Artificial Sequence
  Description of Artificial Sequence: Synthetic oligonucleotide
  Sense strand starting at position 3492 of SEQ ID NO: 1888695
caggaugagacguggagua

SEQ ID NO: 2550577 - RNA, 19 nt, Artificial Sequence
  Description of Artificial Sequence: Synthetic oligonucleotide
  Antisense strand to SEQ ID NO: 2550576
uacuccacgucucauccug

SEQ ID NO: 2550578 - RNA, 19 nt, Artificial Sequence
  Description of Artificial Sequence: Synthetic oligonucleotide
  Sense strand starting at position 1151 of SEQ ID NO: 1888695
gcagcugcguggaugagau

SEQ ID NO: 2550579 - RNA, 19 nt, Artificial Sequence
  Description of Artificial Sequence: Synthetic oligonucleotide
  Antisense strand to SEQ ID NO: 2550578
aucucauccacgcagcugc

SEQ ID NO: 2550580 - RNA, 19 nt, Artificial Sequence
  Description of Artificial Sequence: Synthetic oligonucleotide
  Sense strand starting at position 2856 of SEQ ID NO: 1888695
ucucuaugccaggaagguu

SEQ ID NO: 2550581 - RNA, 19 nt, Artificial Sequence
  Description of Artificial Sequence: Synthetic oligonucleotide
  Antisense strand to SEQ ID NO: 2550580
aaccuuccuggcauagaga

SEQ ID NO: 2550582 - RNA, 19 nt, Artificial Sequence
  Description of Artificial Sequence: Synthetic oligonucleotide
  Sense strand starting at position 1646 of SEQ ID NO: 1888695
agcagacagaucugugaug

SEQ ID NO: 2550583 - RNA, 19 nt, Artificial Sequence
  Description of Artificial Sequence: Synthetic oligonucleotide
  Antisense strand to SEQ ID NO: 2550582
caucacagaucugucugcu

SEQ ID NO: 2550584 - RNA, 19 nt, Artificial Sequence
  Description of Artificial Sequence: Synthetic oligonucleotide
  Sense strand starting at position 156 of SEQ ID NO: 1888695
gguugaugcagaugaauca

SEQ ID NO: 2550585 - RNA, 19 nt, Artificial Sequence
  Description of Artificial Sequence: Synthetic oligonucleotide
  Antisense strand to SEQ ID NO: 2550584
ugauucaucugcaucaacc

SEQ ID NO: 2550586 - RNA, 19 nt, Artificial Sequence
  Description of Artificial Sequence: Synthetic oligonucleotide
  Sense strand starting at position 1123 of SEQ ID NO: 1888695
agguucuuaucuuugaaca

SEQ ID NO: 2550587 - RNA, 19 nt, Artificial Sequence
  Description of Artificial Sequence: Synthetic oligonucleotide
  Antisense strand to SEQ ID NO: 2550586
uguucaaagauaagaaccu

SEQ ID NO: 2550588 - RNA, 19 nt, Artificial Sequence
  Description of Artificial Sequence: Synthetic oligonucleotide
  Sense strand starting at position 3247 of SEQ ID NO: 1888695
aggagugacaccuggucua

SEQ ID NO: 2550589 - RNA, 19 nt, Artificial Sequence
  Description of Artificial Sequence: Synthetic oligonucleotide
  Antisense strand to SEQ ID NO: 2550588
uagaccaggugucacuccu

SEQ ID NO: 2550590 - RNA, 19 nt, Artificial Sequence
  Description of Artificial Sequence: Synthetic oligonucleotide
  Sense strand starting at position 3483 of SEQ ID NO: 1888695
gccguuuaccaggaugaga

SEQ ID NO: 2550591 - RNA, 19 nt, Artificial Sequence
  Description of Artificial Sequence: Synthetic oligonucleotide
  Antisense strand to SEQ ID NO: 2550590
ucucauccugguaaacggc

SEQ ID NO: 2550592 - RNA, 19 nt, Artificial Sequence
  Description of Artificial Sequence: Synthetic oligonucleotide
  Sense strand starting at position 3574 of SEQ ID NO: 1888695
ggcagugauugaguagaag

SEQ ID NO: 2550593 - RNA, 19 nt, Artificial Sequence
  Description of Artificial Sequence: Synthetic oligonucleotide
  Antisense strand to SEQ ID NO: 2550592
cuucuacucaaucacugcc

SEQ ID NO: 2550594 - RNA, 19 nt, Artificial Sequence
  Description of Artificial Sequence: Synthetic oligonucleotide
  Sense strand starting at position 768 of SEQ ID NO: 1888695
gguuguagcacggaagaca

SEQ ID NO: 2550595 - RNA, 19 nt, Artificial Sequence
  Description of Artificial Sequence: Synthetic oligonucleotide
  Antisense strand to SEQ ID NO: 2550594
ugucuuccgugcuacaacc

SEQ ID NO: 2550596 - RNA, 19 nt, Artificial Sequence
  Description of Artificial Sequence: Synthetic oligonucleotide
  Sense strand starting at position 3586 of SEQ ID NO: 1888695
guagaagagucuguuggga

SEQ ID NO: 2550597 - RNA, 19 nt, Artificial Sequence
  Description of Artificial Sequence: Synthetic oligonucleotide
  Antisense strand to SEQ ID NO: 2550596
ucccaacagacucuucuac

SEQ ID NO: 2550598 - RNA, 19 nt, Artificial Sequence
  Description of Artificial Sequence: Synthetic oligonucleotide
  Sense strand starting at position 3629 of SEQ ID NO: 1888695
aguggagguuagucuggaa

SEQ ID NO: 2550599 - RNA, 19 nt, Artificial Sequence
  Description of Artificial Sequence: Synthetic oligonucleotide
  Antisense strand to SEQ ID NO: 2550598
uuccagacuaaccuccacu

SEQ ID NO: 2550600 - RNA, 19 nt, Artificial Sequence
  Description of Artificial Sequence: Synthetic oligonucleotide
  Sense strand starting at position 653 of SEQ ID NO: 1888695
gggagaugacuucgguuca

SEQ ID NO: 2550601 - RNA, 19 nt, Artificial Sequence
  Description of Artificial Sequence: Synthetic oligonucleotide
  Antisense strand to SEQ ID NO: 2550600
ugaaccgaagucaucuccc

SEQ ID NO: 2550602 - RNA, 19 nt, Artificial Sequence
  Description of Artificial Sequence: Synthetic oligonucleotide
  Sense strand starting at position 1161 of SEQ ID NO: 1888695
ggaugagauuggaggguuu

SEQ ID NO: 2550603 - RNA, 19 nt, Artificial Sequence
  Description of Artificial Sequence: Synthetic oligonucleotide
  Antisense strand to SEQ ID NO: 2550602
aaacccuccaaucucaucc

SEQ ID NO: 2550604 - RNA, 19 nt, Artificial Sequence
  Description of Artificial Sequence: Synthetic oligonucleotide
  Sense strand starting at position 1121 of SEQ ID NO: 1888695
ucagguucuuaucuuugaa

SEQ ID NO: 2550605 - RNA, 19 nt, Artificial Sequence
  Description of Artificial Sequence: Synthetic oligonucleotide
  Antisense strand to SEQ ID NO: 2550604
uucaaagauaagaaccuga

SEQ ID NO: 2550606 - RNA, 19 nt, Artificial Sequence
  Description of Artificial Sequence: Synthetic oligonucleotide
  Sense strand starting at position 134 of SEQ ID NO: 1888695
cuguaauccgagcacuuaa

SEQ ID NO: 2550607 - RNA, 19 nt, Artificial Sequence
  Description of Artificial Sequence: Synthetic oligonucleotide
  Antisense strand to SEQ ID NO: 2550606
uuaagugcucggauuacag

SEQ ID NO: 2550608 - RNA, 19 nt, Artificial Sequence
  Description of Artificial Sequence: Synthetic oligonucleotide
  Sense strand starting at position 1124 of SEQ ID NO: 1888695
gguucuuaucuuugaacau

SEQ ID NO: 2550609 - RNA, 19 nt, Artificial Sequence
  Description of Artificial Sequence: Synthetic oligonucleotide
  Antisense strand to SEQ ID NO: 2550608
auguucaaagauaagaacc

SEQ ID NO: 2550610 - RNA, 19 nt, Artificial Sequence
  Description of Artificial Sequence: Synthetic oligonucleotide
  Sense strand starting at position 2851 of SEQ ID NO: 1888695
gaaguucucuaugccagga

SEQ ID NO: 2550611 - RNA, 19 nt, Artificial Sequence
  Description of Artificial Sequence: Synthetic oligonucleotide
  Antisense strand to SEQ ID NO: 2550610
uccuggcauagagaacuuc

SEQ ID NO: 2550612 - RNA, 19 nt, Artificial Sequence
  Description of Artificial Sequence: Synthetic oligonucleotide
  Sense strand starting at position 546 of SEQ ID NO: 1888695
gcguggugugcuguccaga

SEQ ID NO: 2550613 - RNA, 19 nt, Artificial Sequence
  Description of Artificial Sequence: Synthetic oligonucleotide
  Antisense strand to SEQ ID NO: 2550612
ucuggacagcacaccacgc

SEQ ID NO: 2550614 - RNA, 19 nt, Artificial Sequence
  Description of Artificial Sequence: Synthetic oligonucleotide
  Sense strand starting at position 3572 of SEQ ID NO: 1888695
ucggcagugauugaguaga

SEQ ID NO: 2550615 - RNA, 19 nt, Artificial Sequence
  Description of Artificial Sequence: Synthetic oligonucleotide
  Antisense strand to SEQ ID NO: 2550614
ucuacucaaucacugccga

SEQ ID NO: 2550616 - RNA, 19 nt, Artificial Sequence
  Description of Artificial Sequence: Synthetic oligonucleotide
  Sense strand starting at position 2429 of SEQ ID NO: 1888695
gaugcagagucuguaaaug

SEQ ID NO: 2550617 - RNA, 19 nt, Artificial Sequence
  Description of Artificial Sequence: Synthetic oligonucleotide
  Antisense strand to SEQ ID NO: 2550616
cauuuacagacucugcauc

SEQ ID NO: 2550618 - RNA, 19 nt, Artificial Sequence
  Description of Artificial Sequence: Synthetic oligonucleotide
  Sense strand starting at position 1305 of SEQ ID NO: 1888695
agaugcucugcuuagugaa

SEQ ID NO: 2550619 - RNA, 19 nt, Artificial Sequence
  Description of Artificial Sequence: Synthetic oligonucleotide
  Antisense strand to SEQ ID NO: 2550618
uucacuaagcagagcaucu

SEQ ID NO: 2550620 - RNA, 19 nt, Artificial Sequence
  Description of Artificial Sequence: Synthetic oligonucleotide
  Sense strand starting at position 1243 of SEQ ID NO: 1888695
cagagaggcuauucugguu

SEQ ID NO: 2550621 - RNA, 19 nt, Artificial Sequence
  Description of Artificial Sequence: Synthetic oligonucleotide
  Antisense strand to SEQ ID NO: 2550620
aaccagaauagccucucug

SEQ ID NO: 2550622 - RNA, 19 nt, Artificial Sequence
  Description of Artificial Sequence: Synthetic oligonucleotide
  Sense strand starting at position 3355 of SEQ ID NO: 1888695
ccugguccuggaugucaaa

SEQ ID NO: 2550623 - RNA, 19 nt, Artificial Sequence
  Description of Artificial Sequence: Synthetic oligonucleotide
  Antisense strand to SEQ ID NO: 2550622
uuugacauccaggaccagg

SEQ ID NO: 2550624 - RNA, 19 nt, Artificial Sequence
  Description of Artificial Sequence: Synthetic oligonucleotide
  Sense strand starting at position 2428 of SEQ ID NO: 1888695
ggaugcagagucuguaaau

SEQ ID NO: 2550625 - RNA, 19 nt, Artificial Sequence
  Description of Artificial Sequence: Synthetic oligonucleotide
  Antisense strand to SEQ ID NO: 2550624
auuuacagacucugcaucc

SEQ ID NO: 2550626 - RNA, 19 nt, Artificial Sequence
  Description of Artificial Sequence: Synthetic oligonucleotide
  Sense strand starting at position 153 of SEQ ID NO: 1888695
ggagguugaugcagaugaa

SEQ ID NO: 2550627 - RNA, 19 nt, Artificial Sequence
  Description of Artificial Sequence: Synthetic oligonucleotide
  Antisense strand to SEQ ID NO: 2550626
uucaucugcaucaaccucc

SEQ ID NO: 2550628 - RNA, 19 nt, Artificial Sequence
  Description of Artificial Sequence: Synthetic oligonucleotide
  Sense strand starting at position 2605 of SEQ ID NO: 1888695
guaaucaaccuuuguuuga

SEQ ID NO: 2550629 - RNA, 19 nt, Artificial Sequence
  Description of Artificial Sequence: Synthetic oligonucleotide
  Antisense strand to SEQ ID NO: 2550628
ucaaacaaagguugauuac

SEQ ID NO: 2550630 - RNA, 19 nt, Artificial Sequence
  Description of Artificial Sequence: Synthetic oligonucleotide
  Sense strand starting at position 1066 of SEQ ID NO: 1888696
ccaccauaacgcuaggaga

SEQ ID NO: 2550631 - RNA, 19 nt, Artificial Sequence
  Description of Artificial Sequence: Synthetic oligonucleotide
  Antisense strand to SEQ ID NO: 2550630
ucuccuagcguuauggugg

SEQ ID NO: 2550632 - RNA, 19 nt, Artificial Sequence
  Description of Artificial Sequence: Synthetic oligonucleotide
  Sense strand starting at position 271 of SEQ ID NO: 1888696
uggguaauauggguaauaa

SEQ ID NO: 2550633 - RNA, 19 nt, Artificial Sequence
  Description of Artificial Sequence: Synthetic oligonucleotide
  Antisense strand to SEQ ID NO: 2550632
uuauuacccauauuaccca

SEQ ID NO: 2550634 - RNA, 19 nt, Artificial Sequence
  Description of Artificial Sequence: Synthetic oligonucleotide
  Sense strand starting at position 270 of SEQ ID NO: 1888696
auggguaauauggguaaua

SEQ ID NO: 2550635 - RNA, 19 nt, Artificial Sequence
  Description of Artificial Sequence: Synthetic oligonucleotide
  Antisense strand to SEQ ID NO: 2550634
uauuacccauauuacccau

SEQ ID NO: 2550636 - RNA, 19 nt, Artificial Sequence
  Description of Artificial Sequence: Synthetic oligonucleotide
  Sense strand starting at position 2989 of SEQ ID NO: 1888696
gcgauugguguagcuguaa

SEQ ID NO: 2550637 - RNA, 19 nt, Artificial Sequence
  Description of Artificial Sequence: Synthetic oligonucleotide
  Antisense strand to SEQ ID NO: 2550636
uuacagcuacaccaaucgc

SEQ ID NO: 2550638 - RNA, 19 nt, Artificial Sequence
  Description of Artificial Sequence: Synthetic oligonucleotide
  Sense strand starting at position 588 of SEQ ID NO: 1888696
aaaggauauuaauugucga

SEQ ID NO: 2550639 - RNA, 19 nt, Artificial Sequence
  Description of Artificial Sequence: Synthetic oligonucleotide
  Antisense strand to SEQ ID NO: 2550638
ucgacaauuaauauccuuu

SEQ ID NO: 2550640 - RNA, 19 nt, Artificial Sequence
  Description of Artificial Sequence: Synthetic oligonucleotide
  Sense strand starting at position 2848 of SEQ ID NO: 1888696
ggagccuuuccagagagua

SEQ ID NO: 2550641 - RNA, 19 nt, Artificial Sequence
  Description of Artificial Sequence: Synthetic oligonucleotide
  Antisense strand to SEQ ID NO: 2550640
uacucucuggaaaggcucc

SEQ ID NO: 2550642 - RNA, 19 nt, Artificial Sequence
  Description of Artificial Sequence: Synthetic oligonucleotide
  Sense strand starting at position 582 of SEQ ID NO: 1888696
gucgucaaaggauauuaau

SEQ ID NO: 2550643 - RNA, 19 nt, Artificial Sequence
  Description of Artificial Sequence: Synthetic oligonucleotide
  Antisense strand to SEQ ID NO: 2550642
auuaauauccuuugacgac

SEQ ID NO: 2550644 - RNA, 19 nt, Artificial Sequence
  Description of Artificial Sequence: Synthetic oligonucleotide
  Sense strand starting at position 3366 of SEQ ID NO: 1888696
ggguucuugcuacacagaa

SEQ ID NO: 2550645 - RNA, 19 nt, Artificial Sequence
  Description of Artificial Sequence: Synthetic oligonucleotide
  Antisense strand to SEQ ID NO: 2550644
uucuguguagcaagaaccc

SEQ ID NO: 2550646 - RNA, 19 nt, Artificial Sequence
  Description of Artificial Sequence: Synthetic oligonucleotide
  Sense strand starting at position 591 of SEQ ID NO: 1888696
ggauauuaauugucgauag

SEQ ID NO: 2550647 - RNA, 19 nt, Artificial Sequence
  Description of Artificial Sequence: Synthetic oligonucleotide
  Antisense strand to SEQ ID NO: 2550646
cuaucgacaauuaauaucc

SEQ ID NO: 2550648 - RNA, 19 nt, Artificial Sequence
  Description of Artificial Sequence: Synthetic oligonucleotide
  Sense strand starting at position 3135 of SEQ ID NO: 1888696
guggauaucacaggcuaaa

SEQ ID NO: 2550649 - RNA, 19 nt, Artificial Sequence
  Description of Artificial Sequence: Synthetic oligonucleotide
  Antisense strand to SEQ ID NO: 2550648
uuuagccugugauauccac

SEQ ID NO: 2550650 - RNA, 19 nt, Artificial Sequence
  Description of Artificial Sequence: Synthetic oligonucleotide
  Sense strand starting at position 3178 of SEQ ID NO: 1888696
ugagucuuucuccaaguug

SEQ ID NO: 2550651 - RNA, 19 nt, Artificial Sequence
  Description of Artificial Sequence: Synthetic oligonucleotide
  Antisense strand to SEQ ID NO: 2550650
caacuuggagaaagacuca

SEQ ID NO: 2550652 - RNA, 19 nt, Artificial Sequence
  Description of Artificial Sequence: Synthetic oligonucleotide
  Sense strand starting at position 3401 of SEQ ID NO: 1888696
ggguguuaaggguggauca

SEQ ID NO: 2550653 - RNA, 19 nt, Artificial Sequence
  Description of Artificial Sequence: Synthetic oligonucleotide
  Antisense strand to SEQ ID NO: 2550652
ugauccacccuuaacaccc

SEQ ID NO: 2550654 - RNA, 19 nt, Artificial Sequence
  Description of Artificial Sequence: Synthetic oligonucleotide
  Sense strand starting at position 262 of SEQ ID NO: 1888696
uuuacuguauggguaauau

SEQ ID NO: 2550655 - RNA, 19 nt, Artificial Sequence
  Description of Artificial Sequence: Synthetic oligonucleotide
  Antisense strand to SEQ ID NO: 2550654
auauuacccauacaguaaa

SEQ ID NO: 2550656 - RNA, 19 nt, Artificial Sequence
  Description of Artificial Sequence: Synthetic oligonucleotide
  Sense strand starting at position 3854 of SEQ ID NO: 1888696
ccuugaugcccuugacaag

SEQ ID NO: 2550657 - RNA, 19 nt, Artificial Sequence
  Description of Artificial Sequence: Synthetic oligonucleotide
  Antisense strand to SEQ ID NO: 2550656
cuugucaagggcaucaagg

SEQ ID NO: 2550658 - RNA, 19 nt, Artificial Sequence
  Description of Artificial Sequence: Synthetic oligonucleotide
  Sense strand starting at position 2309 of SEQ ID NO: 1888696
gccagaugacgcugaggaa

SEQ ID NO: 2550659 - RNA, 19 nt, Artificial Sequence
  Description of Artificial Sequence: Synthetic oligonucleotide
  Antisense strand to SEQ ID NO: 2550658
uuccucagcgucaucuggc

SEQ ID NO: 2550660 - RNA, 19 nt, Artificial Sequence
  Description of Artificial Sequence: Synthetic oligonucleotide
  Sense strand starting at position 3268 of SEQ ID NO: 1888696
caggaagcgguaugugaua

SEQ ID NO: 2550661 - RNA, 19 nt, Artificial Sequence
  Description of Artificial Sequence: Synthetic oligonucleotide
  Antisense strand to SEQ ID NO: 2550660
uaucacauaccgcuuccug

SEQ ID NO: 2550662 - RNA, 19 nt, Artificial Sequence
  Description of Artificial Sequence: Synthetic oligonucleotide
  Sense strand starting at position 3550 of SEQ ID NO: 1888696
ccugcuuuccuguggaaga

SEQ ID NO: 2550663 - RNA, 19 nt, Artificial Sequence
  Description of Artificial Sequence: Synthetic oligonucleotide
  Antisense strand to SEQ ID NO: 2550662
ucuuccacaggaaagcagg

SEQ ID NO: 2550664 - RNA, 19 nt, Artificial Sequence
  Description of Artificial Sequence: Synthetic oligonucleotide
  Sense strand starting at position 128 of SEQ ID NO: 1888696
cuguguauguuauuacaug

SEQ ID NO: 2550665 - RNA, 19 nt, Artificial Sequence
  Description of Artificial Sequence: Synthetic oligonucleotide
  Antisense strand to SEQ ID NO: 2550664
cauguaauaacauacacag

SEQ ID NO: 2550666 - RNA, 19 nt, Artificial Sequence
  Description of Artificial Sequence: Synthetic oligonucleotide
  Sense strand starting at position 2816 of SEQ ID NO: 1888696
gaucacugugccugugaca

SEQ ID NO: 2550667 - RNA, 19 nt, Artificial Sequence
  Description of Artificial Sequence: Synthetic oligonucleotide
  Antisense strand to SEQ ID NO: 2550666
ugucacaggcacagugauc

SEQ ID NO: 2550668 - RNA, 19 nt, Artificial Sequence
  Description of Artificial Sequence: Synthetic oligonucleotide
  Sense strand starting at position 2 of SEQ ID NO: 1888696
uggagugugucuguaucua

SEQ ID NO: 2550669 - RNA, 19 nt, Artificial Sequence
  Description of Artificial Sequence: Synthetic oligonucleotide
  Antisense strand to SEQ ID NO: 2550668
uagauacagacacacucca

SEQ ID NO: 2550670 - RNA, 19 nt, Artificial Sequence
  Description of Artificial Sequence: Synthetic oligonucleotide
  Sense strand starting at position 602 of SEQ ID NO: 1888696
gucgauagauaacagauaa

SEQ ID NO: 2550671 - RNA, 19 nt, Artificial Sequence
  Description of Artificial Sequence: Synthetic oligonucleotide
  Antisense strand to SEQ ID NO: 2550670
uuaucuguuaucuaucgac

SEQ ID NO: 2550672 - RNA, 19 nt, Artificial Sequence
  Description of Artificial Sequence: Synthetic oligonucleotide
  Sense strand starting at position 117 of SEQ ID NO: 1888696
aagguucuagccuguguau

SEQ ID NO: 2550673 - RNA, 19 nt, Artificial Sequence
  Description of Artificial Sequence: Synthetic oligonucleotide
  Antisense strand to SEQ ID NO: 2550672
auacacaggcuagaaccuu

SEQ ID NO: 2550674 - RNA, 19 nt, Artificial Sequence
  Description of Artificial Sequence: Synthetic oligonucleotide
  Sense strand starting at position 124 of SEQ ID NO: 1888696
uagccuguguauguuauua

SEQ ID NO: 2550675 - RNA, 19 nt, Artificial Sequence
  Description of Artificial Sequence: Synthetic oligonucleotide
  Antisense strand to SEQ ID NO: 2550674
uaauaacauacacaggcua

SEQ ID NO: 2550676 - RNA, 19 nt, Artificial Sequence
  Description of Artificial Sequence: Synthetic oligonucleotide
  Sense strand starting at position 2987 of SEQ ID NO: 1888696
aagcgauugguguagcugu

SEQ ID NO: 2550677 - RNA, 19 nt, Artificial Sequence
  Description of Artificial Sequence: Synthetic oligonucleotide
  Antisense strand to SEQ ID NO: 2550676
acagcuacaccaaucgcuu

SEQ ID NO: 2550678 - RNA, 19 nt, Artificial Sequence
  Description of Artificial Sequence: Synthetic oligonucleotide
  Sense strand starting at position 3021 of SEQ ID NO: 1888696
agacguauuguuugcacga

SEQ ID NO: 2550679 - RNA, 19 nt, Artificial Sequence
  Description of Artificial Sequence: Synthetic oligonucleotide
  Antisense strand to SEQ ID NO: 2550678
ucgugcaaacaauacgucu

SEQ ID NO: 2550680 - RNA, 19 nt, Artificial Sequence
  Description of Artificial Sequence: Synthetic oligonucleotide
  Sense strand starting at position 585 of SEQ ID NO: 1888696
gucaaaggauauuaauugu

SEQ ID NO: 2550681 - RNA, 19 nt, Artificial Sequence
  Description of Artificial Sequence: Synthetic oligonucleotide
  Antisense strand to SEQ ID NO: 2550680
acaauuaauauccuuugac

SEQ ID NO: 2550682 - RNA, 19 nt, Artificial Sequence
  Description of Artificial Sequence: Synthetic oligonucleotide
  Sense strand starting at position 3022 of SEQ ID NO: 1888696
gacguauuguuugcacgau

SEQ ID NO: 2550683 - RNA, 19 nt, Artificial Sequence
  Description of Artificial Sequence: Synthetic oligonucleotide
  Antisense strand to SEQ ID NO: 2550682
aucgugcaaacaauacguc

SEQ ID NO: 2550684 - RNA, 19 nt, Artificial Sequence
  Description of Artificial Sequence: Synthetic oligonucleotide
  Sense strand starting at position 123 of SEQ ID NO: 1888696
cuagccuguguauguuauu

SEQ ID NO: 2550685 - RNA, 19 nt, Artificial Sequence
  Description of Artificial Sequence: Synthetic oligonucleotide
  Antisense strand to SEQ ID NO: 2550684
aauaacauacacaggcuag

SEQ ID NO: 2550686 - RNA, 19 nt, Artificial Sequence
  Description of Artificial Sequence: Synthetic oligonucleotide
  Sense strand starting at position 119 of SEQ ID NO: 1888696
gguucuagccuguguaugu

SEQ ID NO: 2550687 - RNA, 19 nt, Artificial Sequence
  Description of Artificial Sequence: Synthetic oligonucleotide
  Antisense strand to SEQ ID NO: 2550686
acauacacaggcuagaacc

SEQ ID NO: 2550688 - RNA, 19 nt, Artificial Sequence
  Description of Artificial Sequence: Synthetic oligonucleotide
  Sense strand starting at position 120 of SEQ ID NO: 1888696
guucuagccuguguauguu

SEQ ID NO: 2550689 - RNA, 19 nt, Artificial Sequence
  Description of Artificial Sequence: Synthetic oligonucleotide
  Antisense strand to SEQ ID NO: 2550688
aacauacacaggcuagaac

SEQ ID NO: 2550690 - RNA, 19 nt, Artificial Sequence
  Description of Artificial Sequence: Synthetic oligonucleotide
  Sense strand starting at position 592 of SEQ ID NO: 1888696
gauauuaauugucgauaga

SEQ ID NO: 2550691 - RNA, 19 nt, Artificial Sequence
  Description of Artificial Sequence: Synthetic oligonucleotide
  Antisense strand to SEQ ID NO: 2550690
ucuaucgacaauuaauauc

SEQ ID NO: 2550692 - RNA, 19 nt, Artificial Sequence
  Description of Artificial Sequence: Synthetic oligonucleotide
  Sense strand starting at position 2299 of SEQ ID NO: 1888696
ucuguuaccugccagauga

SEQ ID NO: 2550693 - RNA, 19 nt, Artificial Sequence
  Description of Artificial Sequence: Synthetic oligonucleotide
  Antisense strand to SEQ ID NO: 2550692
ucaucuggcagguaacaga

SEQ ID NO: 2550694 - RNA, 19 nt, Artificial Sequence
  Description of Artificial Sequence: Synthetic oligonucleotide
  Sense strand starting at position 2988 of SEQ ID NO: 1888696
agcgauugguguagcugua

SEQ ID NO: 2550695 - RNA, 19 nt, Artificial Sequence
  Description of Artificial Sequence: Synthetic oligonucleotide
  Antisense strand to SEQ ID NO: 2550694
uacagcuacaccaaucgcu

SEQ ID NO: 2550696 - RNA, 19 nt, Artificial Sequence
  Description of Artificial Sequence: Synthetic oligonucleotide
  Sense strand starting at position 3551 of SEQ ID NO: 1888696
cugcuuuccuguggaagag

SEQ ID NO: 2550697 - RNA, 19 nt, Artificial Sequence
  Description of Artificial Sequence: Synthetic oligonucleotide
  Antisense strand to SEQ ID NO: 2550696
cucuuccacaggaaagcag

SEQ ID NO: 2550698 - RNA, 19 nt, Artificial Sequence
  Description of Artificial Sequence: Synthetic oligonucleotide
  Sense strand starting at position 3273 of SEQ ID NO: 1888696
agcgguaugugauaugggu

SEQ ID NO: 2550699 - RNA, 19 nt, Artificial Sequence
  Description of Artificial Sequence: Synthetic oligonucleotide
  Antisense strand to SEQ ID NO: 2550698
acccauaucacauaccgcu

SEQ ID NO: 2550700 - RNA, 19 nt, Artificial Sequence
  Description of Artificial Sequence: Synthetic oligonucleotide
  Sense strand starting at position 2172 of SEQ ID NO: 1888696
gcgccuuucucagauacug

SEQ ID NO: 2550701 - RNA, 19 nt, Artificial Sequence
  Description of Artificial Sequence: Synthetic oligonucleotide
  Antisense strand to SEQ ID NO: 2550700
caguaucugagaaaggcgc

SEQ ID NO: 2550702 - RNA, 19 nt, Artificial Sequence
  Description of Artificial Sequence: Synthetic oligonucleotide
  Sense strand starting at position 126 of SEQ ID NO: 1888696
gccuguguauguuauuaca

SEQ ID NO: 2550703 - RNA, 19 nt, Artificial Sequence
  Description of Artificial Sequence: Synthetic oligonucleotide
  Antisense strand to SEQ ID NO: 2550702
uguaauaacauacacaggc

SEQ ID NO: 2550704 - RNA, 19 nt, Artificial Sequence
  Description of Artificial Sequence: Synthetic oligonucleotide
  Sense strand starting at position 3839 of SEQ ID NO: 1888697
ccuguacucacggagggaa

SEQ ID NO: 2550705 - RNA, 19 nt, Artificial Sequence
  Description of Artificial Sequence: Synthetic oligonucleotide
  Antisense strand to SEQ ID NO: 2550704
uucccuccgugaguacagg

SEQ ID NO: 2550706 - RNA, 19 nt, Artificial Sequence
  Description of Artificial Sequence: Synthetic oligonucleotide
  Sense strand starting at position 3687 of SEQ ID NO: 1888697
uuuccaggacaaugaguaa

SEQ ID NO: 2550707 - RNA, 19 nt, Artificial Sequence
  Description of Artificial Sequence: Synthetic oligonucleotide
  Antisense strand to SEQ ID NO: 2550706
uuacucauuguccuggaaa

SEQ ID NO: 2550708 - RNA, 19 nt, Artificial Sequence
  Description of Artificial Sequence: Synthetic oligonucleotide
  Sense strand starting at position 3511 of SEQ ID NO: 1888697
ggacuuauggcccaaauuc

SEQ ID NO: 2550709 - RNA, 19 nt, Artificial Sequence
  Description of Artificial Sequence: Synthetic oligonucleotide
  Antisense strand to SEQ ID NO: 2550708
gaauuugggccauaagucc

SEQ ID NO: 2550710 - RNA, 19 nt, Artificial Sequence
  Description of Artificial Sequence: Synthetic oligonucleotide
  Sense strand starting at position 3458 of SEQ ID NO: 1888697
cgaugagaacucuaaggcu

SEQ ID NO: 2550711 - RNA, 19 nt, Artificial Sequence
  Description of Artificial Sequence: Synthetic oligonucleotide
  Antisense strand to SEQ ID NO: 2550710
agccuuagaguucucaucg

SEQ ID NO: 2550712 - RNA, 19 nt, Artificial Sequence
  Description of Artificial Sequence: Synthetic oligonucleotide
  Sense strand starting at position 3631 of SEQ ID NO: 1888697
ccuaguuuggaggaagcau

SEQ ID NO: 2550713 - RNA, 19 nt, Artificial Sequence
  Description of Artificial Sequence: Synthetic oligonucleotide
  Antisense strand to SEQ ID NO: 2550712
augcuuccuccaaacuagg

SEQ ID NO: 2550714 - RNA, 19 nt, Artificial Sequence
  Description of Artificial Sequence: Synthetic oligonucleotide
  Sense strand starting at position 3857 of SEQ ID NO: 1888697
accgaugagcuugaaagua

SEQ ID NO: 2550715 - RNA, 19 nt, Artificial Sequence
  Description of Artificial Sequence: Synthetic oligonucleotide
  Antisense strand to SEQ ID NO: 2550714
uacuuucaagcucaucggu

SEQ ID NO: 2550716 - RNA, 19 nt, Artificial Sequence
  Description of Artificial Sequence: Synthetic oligonucleotide
  Sense strand starting at position 3509 of SEQ ID NO: 1888697
ugggacuuauggcccaaau

SEQ ID NO: 2550717 - RNA, 19 nt, Artificial Sequence
  Description of Artificial Sequence: Synthetic oligonucleotide
  Antisense strand to SEQ ID NO: 2550716
auuugggccauaaguccca

SEQ ID NO: 2550718 - RNA, 19 nt, Artificial Sequence
  Description of Artificial Sequence: Synthetic oligonucleotide
  Sense strand starting at position 2387 of SEQ ID NO: 1888697
ggccacgguaaauauuaua

SEQ ID NO: 2550719 - RNA, 19 nt, Artificial Sequence
  Description of Artificial Sequence: Synthetic oligonucleotide
  Antisense strand to SEQ ID NO: 2550718
uauaauauuuaccguggcc

SEQ ID NO: 2550720 - RNA, 19 nt, Artificial Sequence
  Description of Artificial Sequence: Synthetic oligonucleotide
  Sense strand starting at position 3862 of SEQ ID NO: 1888697
ugagcuugaaaguauaugu

SEQ ID NO: 2550721 - RNA, 19 nt, Artificial Sequence
  Description of Artificial Sequence: Synthetic oligonucleotide
  Antisense strand to SEQ ID NO: 2550720
acauauacuuucaagcuca

SEQ ID NO: 2550722 - RNA, 19 nt, Artificial Sequence
  Description of Artificial Sequence: Synthetic oligonucleotide
  Sense strand starting at position 2381 of SEQ ID NO: 1888697
gauaaaggccacgguaaau

SEQ ID NO: 2550723 - RNA, 19 nt, Artificial Sequence
  Description of Artificial Sequence: Synthetic oligonucleotide
  Antisense strand to SEQ ID NO: 2550722
auuuaccguggccuuuauc

SEQ ID NO: 2550724 - RNA, 19 nt, Artificial Sequence
  Description of Artificial Sequence: Synthetic oligonucleotide
  Sense strand starting at position 2551 of SEQ ID NO: 1888697
cgccucucacccuauaaga

SEQ ID NO: 2550725 - RNA, 19 nt, Artificial Sequence
  Description of Artificial Sequence: Synthetic oligonucleotide
  Antisense strand to SEQ ID NO: 2550724
ucuuauagggugagaggcg

SEQ ID NO: 2550726 - RNA, 19 nt, Artificial Sequence
  Description of Artificial Sequence: Synthetic oligonucleotide
  Sense strand starting at position 3450 of SEQ ID NO: 1888697
cgggcuuccgaugagaacu

SEQ ID NO: 2550727 - RNA, 19 nt, Artificial Sequence
  Description of Artificial Sequence: Synthetic oligonucleotide
  Antisense strand to SEQ ID NO: 2550726
aguucucaucggaagcccg

SEQ ID NO: 2550728 - RNA, 19 nt, Artificial Sequence
  Description of Artificial Sequence: Synthetic oligonucleotide
  Sense strand starting at position 3856 of SEQ ID NO: 1888697
aaccgaugagcuugaaagu

SEQ ID NO: 2550729 - RNA, 19 nt, Artificial Sequence
  Description of Artificial Sequence: Synthetic oligonucleotide
  Antisense strand to SEQ ID NO: 2550728
acuuucaagcucaucgguu

SEQ ID NO: 2550730 - RNA, 19 nt, Artificial Sequence
  Description of Artificial Sequence: Synthetic oligonucleotide
  Sense strand starting at position 3646 of SEQ ID NO: 1888697
gcaucuuuacccuaggucu

SEQ ID NO: 2550731 - RNA, 19 nt, Artificial Sequence
  Description of Artificial Sequence: Synthetic oligonucleotide
  Antisense strand to SEQ ID NO: 2550730
agaccuaggguaaagaugc

SEQ ID NO: 2550732 - RNA, 19 nt, Artificial Sequence
  Description of Artificial Sequence: Synthetic oligonucleotide
  Sense strand starting at position 3449 of SEQ ID NO: 1888697
ccgggcuuccgaugagaac

SEQ ID NO: 2550733 - RNA, 19 nt, Artificial Sequence
  Description of Artificial Sequence: Synthetic oligonucleotide
  Antisense strand to SEQ ID NO: 2550732
guucucaucggaagcccgg

SEQ ID NO: 2550734 - RNA, 19 nt, Artificial Sequence
  Description of Artificial Sequence: Synthetic oligonucleotide
  Sense strand starting at position 3624 of SEQ ID NO: 1888697
gcguaaaccuaguuuggag

SEQ ID NO: 2550735 - RNA, 19 nt, Artificial Sequence
  Description of Artificial Sequence: Synthetic oligonucleotide
  Antisense strand to SEQ ID NO: 2550734
cuccaaacuagguuuacgc

SEQ ID NO: 2550736 - RNA, 19 nt, Artificial Sequence
  Description of Artificial Sequence: Synthetic oligonucleotide
  Sense strand starting at position 3528 of SEQ ID NO: 1888697
ucacaccagugagaagauu

SEQ ID NO: 2550737 - RNA, 19 nt, Artificial Sequence
  Description of Artificial Sequence: Synthetic oligonucleotide
  Antisense strand to SEQ ID NO: 2550736
aaucuucucacugguguga

SEQ ID NO: 2550738 - RNA, 19 nt, Artificial Sequence
  Description of Artificial Sequence: Synthetic oligonucleotide
  Sense strand starting at position 2398 of SEQ ID NO: 1888697
auauuauaguaaggaggaa

SEQ ID NO: 2550739 - RNA, 19 nt, Artificial Sequence
  Description of Artificial Sequence: Synthetic oligonucleotide
  Antisense strand to SEQ ID NO: 2550738
uuccuccuuacuauaauau

SEQ ID NO: 2550740 - RNA, 19 nt, Artificial Sequence
  Description of Artificial Sequence: Synthetic oligonucleotide
  Sense strand starting at position 3869 of SEQ ID NO: 1888697
gaaaguauaugugacgaac

SEQ ID NO: 2550741 - RNA, 19 nt, Artificial Sequence
  Description of Artificial Sequence: Synthetic oligonucleotide
  Antisense strand to SEQ ID NO: 2550740
guucgucacauauacuuuc

SEQ ID NO: 2550742 - RNA, 19 nt, Artificial Sequence
  Description of Artificial Sequence: Synthetic oligonucleotide
  Sense strand starting at position 2392 of SEQ ID NO: 1888697
cgguaaauauuauaguaag

SEQ ID NO: 2550743 - RNA, 19 nt, Artificial Sequence
  Description of Artificial Sequence: Synthetic oligonucleotide
  Antisense strand to SEQ ID NO: 2550742
cuuacuauaauauuuaccg

SEQ ID NO: 2550744 - RNA, 19 nt, Artificial Sequence
  Description of Artificial Sequence: Synthetic oligonucleotide
  Sense strand starting at position 2390 of SEQ ID NO: 1888697
cacgguaaauauuauagua

SEQ ID NO: 2550745 - RNA, 19 nt, Artificial Sequence
  Description of Artificial Sequence: Synthetic oligonucleotide
  Antisense strand to SEQ ID NO: 2550744
uacuauaauauuuaccgug

SEQ ID NO: 2550746 - RNA, 19 nt, Artificial Sequence
  Description of Artificial Sequence: Synthetic oligonucleotide
  Sense strand starting at position 3028 of SEQ ID NO: 1888698
guaaauugacugcacaaau

SEQ ID NO: 2550747 - RNA, 19 nt, Artificial Sequence
  Description of Artificial Sequence: Synthetic oligonucleotide
  Antisense strand to SEQ ID NO: 2550746
auuugugcagucaauuuac

SEQ ID NO: 2550748 - RNA, 19 nt, Artificial Sequence
  Description of Artificial Sequence: Synthetic oligonucleotide
  Sense strand starting at position 175 of SEQ ID NO: 1888698
uucgcaagacacuaagaau

SEQ ID NO: 2550749 - RNA, 19 nt, Artificial Sequence
  Description of Artificial Sequence: Synthetic oligonucleotide
  Antisense strand to SEQ ID NO: 2550748
auucuuagugucuugcgaa

SEQ ID NO: 2550750 - RNA, 19 nt, Artificial Sequence
  Description of Artificial Sequence: Synthetic oligonucleotide
  Sense strand starting at position 2562 of SEQ ID NO: 1888698
ccgucucugccauaaauuu

SEQ ID NO: 2550751 - RNA, 19 nt, Artificial Sequence
  Description of Artificial Sequence: Synthetic oligonucleotide
  Antisense strand to SEQ ID NO: 2550750
aaauuuauggcagagacgg

SEQ ID NO: 2550752 - RNA, 19 nt, Artificial Sequence
  Description of Artificial Sequence: Synthetic oligonucleotide
  Sense strand starting at position 320 of SEQ ID NO: 1888698
aaccauccuccggagaagu

SEQ ID NO: 2550753 - RNA, 19 nt, Artificial Sequence
  Description of Artificial Sequence: Synthetic oligonucleotide
  Antisense strand to SEQ ID NO: 2550752
acuucuccggaggaugguu

SEQ ID NO: 2550754 - RNA, 19 nt, Artificial Sequence
  Description of Artificial Sequence: Synthetic oligonucleotide
  Sense strand starting at position 3712 of SEQ ID NO: 1888698
cuuggucauauggaguuau

SEQ ID NO: 2550755 - RNA, 19 nt, Artificial Sequence
  Description of Artificial Sequence: Synthetic oligonucleotide
  Antisense strand to SEQ ID NO: 2550754
auaacuccauaugaccaag

SEQ ID NO: 2550756 - RNA, 19 nt, Artificial Sequence
  Description of Artificial Sequence: Synthetic oligonucleotide
  Sense strand starting at position 3429 of SEQ ID NO: 1888698
augucuuuacuguacaaua

SEQ ID NO: 2550757 - RNA, 19 nt, Artificial Sequence
  Description of Artificial Sequence: Synthetic oligonucleotide
  Antisense strand to SEQ ID NO: 2550756
uauuguacaguaaagacau

SEQ ID NO: 2550758 - RNA, 19 nt, Artificial Sequence
  Description of Artificial Sequence: Synthetic oligonucleotide
  Sense strand starting at position 3431 of SEQ ID NO: 1888698
gucuuuacuguacaauaua

SEQ ID NO: 2550759 - RNA, 19 nt, Artificial Sequence
  Description of Artificial Sequence: Synthetic oligonucleotide
  Antisense strand to SEQ ID NO: 2550758
uauauuguacaguaaagac

SEQ ID NO: 2550760 - RNA, 19 nt, Artificial Sequence
  Description of Artificial Sequence: Synthetic oligonucleotide
  Sense strand starting at position 2894 of SEQ ID NO: 1888698
accuaucuauggguuauga

SEQ ID NO: 2550761 - RNA, 19 nt, Artificial Sequence
  Description of Artificial Sequence: Synthetic oligonucleotide
  Antisense strand to SEQ ID NO: 2550760
ucauaacccauagauaggu

SEQ ID NO: 2550762 - RNA, 19 nt, Artificial Sequence
  Description of Artificial Sequence: Synthetic oligonucleotide
  Sense strand starting at position 2891 of SEQ ID NO: 1888698
gauaccuaucuauggguua

SEQ ID NO: 2550763 - RNA, 19 nt, Artificial Sequence
  Description of Artificial Sequence: Synthetic oligonucleotide
  Antisense strand to SEQ ID NO: 2550762
uaacccauagauagguauc

SEQ ID NO: 2550764 - RNA, 19 nt, Artificial Sequence
  Description of Artificial Sequence: Synthetic oligonucleotide
  Sense strand starting at position 2745 of SEQ ID NO: 1888698
uuauaaccucagggaguuu

SEQ ID NO: 2550765 - RNA, 19 nt, Artificial Sequence
  Description of Artificial Sequence: Synthetic oligonucleotide
  Antisense strand to SEQ ID NO: 2550764
aaacucccugagguuauaa

SEQ ID NO: 2550766 - RNA, 19 nt, Artificial Sequence
  Description of Artificial Sequence: Synthetic oligonucleotide
  Sense strand starting at position 81 of SEQ ID NO: 1888698
cuuggagagcauugauuac

SEQ ID NO: 2550767 - RNA, 19 nt, Artificial Sequence
  Description of Artificial Sequence: Synthetic oligonucleotide
  Antisense strand to SEQ ID NO: 2550766
guaaucaaugcucuccaag

SEQ ID NO: 2550768 - RNA, 19 nt, Artificial Sequence
  Description of Artificial Sequence: Synthetic oligonucleotide
  Sense strand starting at position 170 of SEQ ID NO: 1888698
gagguuucgcaagacacua

SEQ ID NO: 2550769 - RNA, 19 nt, Artificial Sequence
  Description of Artificial Sequence: Synthetic oligonucleotide
  Antisense strand to SEQ ID NO: 2550768
uagugucuugcgaaaccuc

SEQ ID NO: 2550770 - RNA, 19 nt, Artificial Sequence
  Description of Artificial Sequence: Synthetic oligonucleotide
  Sense strand starting at position 2702 of SEQ ID NO: 1888698
ccaugagccuuucugaaga

SEQ ID NO: 2550771 - RNA, 19 nt, Artificial Sequence
  Description of Artificial Sequence: Synthetic oligonucleotide
  Antisense strand to SEQ ID NO: 2550770
ucuucagaaaggcucaugg

SEQ ID NO: 2550772 - RNA, 19 nt, Artificial Sequence
  Description of Artificial Sequence: Synthetic oligonucleotide
  Sense strand starting at position 3464 of SEQ ID NO: 1888698
guguuuccacaacacucau

SEQ ID NO: 2550773 - RNA, 19 nt, Artificial Sequence
  Description of Artificial Sequence: Synthetic oligonucleotide
  Antisense strand to SEQ ID NO: 2550772
augaguguuguggaaacac

SEQ ID NO: 2550774 - RNA, 19 nt, Artificial Sequence
  Description of Artificial Sequence: Synthetic oligonucleotide
  Sense strand starting at position 1242 of SEQ ID NO: 1888698
uugagguugggucgagaaa

SEQ ID NO: 2550775 - RNA, 19 nt, Artificial Sequence
  Description of Artificial Sequence: Synthetic oligonucleotide
  Antisense strand to SEQ ID NO: 2550774
uuucucgacccaaccucaa

SEQ ID NO: 2550776 - RNA, 19 nt, Artificial Sequence
  Description of Artificial Sequence: Synthetic oligonucleotide
  Sense strand starting at position 162 of SEQ ID NO: 1888698
gcuuucgugagguuucgca

SEQ ID NO: 2550777 - RNA, 19 nt, Artificial Sequence
  Description of Artificial Sequence: Synthetic oligonucleotide
  Antisense strand to SEQ ID NO: 2550776
ugcgaaaccucacgaaagc

SEQ ID NO: 2550778 - RNA, 19 nt, Artificial Sequence
  Description of Artificial Sequence: Synthetic oligonucleotide
  Sense strand starting at position 2530 of SEQ ID NO: 1888698
cacagauguagucacgagu

SEQ ID NO: 2550779 - RNA, 19 nt, Artificial Sequence
  Description of Artificial Sequence: Synthetic oligonucleotide
  Antisense strand to SEQ ID NO: 2550778
acucgugacuacaucugug

SEQ ID NO: 2550780 - RNA, 19 nt, Artificial Sequence
  Description of Artificial Sequence: Synthetic oligonucleotide
  Sense strand starting at position 3716 of SEQ ID NO: 1888698
gucauauggaguuauguuu

SEQ ID NO: 2550781 - RNA, 19 nt, Artificial Sequence
  Description of Artificial Sequence: Synthetic oligonucleotide
  Antisense strand to SEQ ID NO: 2550780
aaacauaacuccauaugac

SEQ ID NO: 2550782 - RNA, 19 nt, Artificial Sequence
  Description of Artificial Sequence: Synthetic oligonucleotide
  Sense strand starting at position 3722 of SEQ ID NO: 1888698
uggaguuauguuuagcaug

SEQ ID NO: 2550783 - RNA, 19 nt, Artificial Sequence
  Description of Artificial Sequence: Synthetic oligonucleotide
  Antisense strand to SEQ ID NO: 2550782
caugcuaaacauaacucca

SEQ ID NO: 2550784 - RNA, 19 nt, Artificial Sequence
  Description of Artificial Sequence: Synthetic oligonucleotide
  Sense strand starting at position 2224 of SEQ ID NO: 1888698
aagugacuugggugaguua

SEQ ID NO: 2550785 - RNA, 19 nt, Artificial Sequence
  Description of Artificial Sequence: Synthetic oligonucleotide
  Antisense strand to SEQ ID NO: 2550784
uaacucacccaagucacuu

SEQ ID NO: 2550786 - RNA, 19 nt, Artificial Sequence
  Description of Artificial Sequence: Synthetic oligonucleotide
  Sense strand starting at position 2946 of SEQ ID NO: 1888698
uaaccauggccuuaguagu

SEQ ID NO: 2550787 - RNA, 19 nt, Artificial Sequence
  Description of Artificial Sequence: Synthetic oligonucleotide
  Antisense strand to SEQ ID NO: 2550786
acuacuaaggccaugguua

SEQ ID NO: 2550788 - RNA, 19 nt, Artificial Sequence
  Description of Artificial Sequence: Synthetic oligonucleotide
  Sense strand starting at position 3563 of SEQ ID NO: 1888698
acuauugucuaacccagua

SEQ ID NO: 2550789 - RNA, 19 nt, Artificial Sequence
  Description of Artificial Sequence: Synthetic oligonucleotide
  Antisense strand to SEQ ID NO: 2550788
uacuggguuagacaauagu

SEQ ID NO: 2550790 - RNA, 19 nt, Artificial Sequence
  Description of Artificial Sequence: Synthetic oligonucleotide
  Sense strand starting at position 1052 of SEQ ID NO: 1888698
gucacagaacugugaguau

SEQ ID NO: 2550791 - RNA, 19 nt, Artificial Sequence
  Description of Artificial Sequence: Synthetic oligonucleotide
  Antisense strand to SEQ ID NO: 2550790
auacucacaguucugugac

SEQ ID NO: 2550792 - RNA, 19 nt, Artificial Sequence
  Description of Artificial Sequence: Synthetic oligonucleotide
  Sense strand starting at position 3458 of SEQ ID NO: 1888698
uuugaaguguuuccacaac

SEQ ID NO: 2550793 - RNA, 19 nt, Artificial Sequence
  Description of Artificial Sequence: Synthetic oligonucleotide
  Antisense strand to SEQ ID NO: 2550792
guuguggaaacacuucaaa

SEQ ID NO: 2550794 - RNA, 19 nt, Artificial Sequence
  Description of Artificial Sequence: Synthetic oligonucleotide
  Sense strand starting at position 2671 of SEQ ID NO: 1888698
gucacagucuccuuugaga

SEQ ID NO: 2550795 - RNA, 19 nt, Artificial Sequence
  Description of Artificial Sequence: Synthetic oligonucleotide
  Antisense strand to SEQ ID NO: 2550794
ucucaaaggagacugugac

SEQ ID NO: 2550796 - RNA, 19 nt, Artificial Sequence
  Description of Artificial Sequence: Synthetic oligonucleotide
  Sense strand starting at position 3724 of SEQ ID NO: 1888698
gaguuauguuuagcaugaa

SEQ ID NO: 2550797 - RNA, 19 nt, Artificial Sequence
  Description of Artificial Sequence: Synthetic oligonucleotide
  Antisense strand to SEQ ID NO: 2550796
uucaugcuaaacauaacuc

SEQ ID NO: 2550798 - RNA, 19 nt, Artificial Sequence
  Description of Artificial Sequence: Synthetic oligonucleotide
  Sense strand starting at position 373 of SEQ ID NO: 1888698
gguguuggugcccaagaau

SEQ ID NO: 2550799 - RNA, 19 nt, Artificial Sequence
  Description of Artificial Sequence: Synthetic oligonucleotide
  Antisense strand to SEQ ID NO: 2550798
auucuugggcaccaacacc

SEQ ID NO: 2550800 - RNA, 19 nt, Artificial Sequence
  Description of Artificial Sequence: Synthetic oligonucleotide
  Sense strand starting at position 341 of SEQ ID NO: 1888698
ggcuguuugggugaaggca

SEQ ID NO: 2550801 - RNA, 19 nt, Artificial Sequence
  Description of Artificial Sequence: Synthetic oligonucleotide
  Antisense strand to SEQ ID NO: 2550800
ugccuucacccaaacagcc

SEQ ID NO: 2550802 - RNA, 19 nt, Artificial Sequence
  Description of Artificial Sequence: Synthetic oligonucleotide
  Sense strand starting at position 3727 of SEQ ID NO: 1888698
uuauguuuagcaugaacuu

SEQ ID NO: 2550803 - RNA, 19 nt, Artificial Sequence
  Description of Artificial Sequence: Synthetic oligonucleotide
  Antisense strand to SEQ ID NO: 2550802
aaguucaugcuaaacauaa

SEQ ID NO: 2550804 - RNA, 19 nt, Artificial Sequence
  Description of Artificial Sequence: Synthetic oligonucleotide
  Sense strand starting at position 2352 of SEQ ID NO: 1888698
guaagacucuuccuguuug

SEQ ID NO: 2550805 - RNA, 19 nt, Artificial Sequence
  Description of Artificial Sequence: Synthetic oligonucleotide
  Antisense strand to SEQ ID NO: 2550804
caaacaggaagagucuuac

SEQ ID NO: 2550806 - RNA, 19 nt, Artificial Sequence
  Description of Artificial Sequence: Synthetic oligonucleotide
  Sense strand starting at position 3810 of SEQ ID NO: 1888698
caggcugguccuugaacuu

SEQ ID NO: 2550807 - RNA, 19 nt, Artificial Sequence
  Description of Artificial Sequence: Synthetic oligonucleotide
  Antisense strand to SEQ ID NO: 2550806
aaguucaaggaccagccug

SEQ ID NO: 2550808 - RNA, 19 nt, Artificial Sequence
  Description of Artificial Sequence: Synthetic oligonucleotide
  Sense strand starting at position 158 of SEQ ID NO: 1888698
acaagcuuucgugagguuu

SEQ ID NO: 2550809 - RNA, 19 nt, Artificial Sequence
  Description of Artificial Sequence: Synthetic oligonucleotide
  Antisense strand to SEQ ID NO: 2550808
aaaccucacgaaagcuugu

SEQ ID NO: 2550810 - RNA, 19 nt, Artificial Sequence
  Description of Artificial Sequence: Synthetic oligonucleotide
  Sense strand starting at position 413 of SEQ ID NO: 1888698
ccaagcgauuuccagggau

SEQ ID NO: 2550811 - RNA, 19 nt, Artificial Sequence
  Description of Artificial Sequence: Synthetic oligonucleotide
  Antisense strand to SEQ ID NO: 2550810
aucccuggaaaucgcuugg

SEQ ID NO: 2550812 - RNA, 19 nt, Artificial Sequence
  Description of Artificial Sequence: Synthetic oligonucleotide
  Sense strand starting at position 1598 of SEQ ID NO: 1888698
uuaccuacuggcugucaua

SEQ ID NO: 2550813 - RNA, 19 nt, Artificial Sequence
  Description of Artificial Sequence: Synthetic oligonucleotide
  Antisense strand to SEQ ID NO: 2550812
uaugacagccaguagguaa

SEQ ID NO: 2550814 - RNA, 19 nt, Artificial Sequence
  Description of Artificial Sequence: Synthetic oligonucleotide
  Sense strand starting at position 3703 of SEQ ID NO: 1888698
accuuauugcuuggucaua

SEQ ID NO: 2550815 - RNA, 19 nt, Artificial Sequence
  Description of Artificial Sequence: Synthetic oligonucleotide
  Antisense strand to SEQ ID NO: 2550814
uaugaccaagcaauaaggu

SEQ ID NO: 2550816 - RNA, 19 nt, Artificial Sequence
  Description of Artificial Sequence: Synthetic oligonucleotide
  Sense strand starting at position 3705 of SEQ ID NO: 1888698
cuuauugcuuggucauaug

SEQ ID NO: 2550817 - RNA, 19 nt, Artificial Sequence
  Description of Artificial Sequence: Synthetic oligonucleotide
  Antisense strand to SEQ ID NO: 2550816
cauaugaccaagcaauaag

SEQ ID NO: 2550818 - RNA, 19 nt, Artificial Sequence
  Description of Artificial Sequence: Synthetic oligonucleotide
  Sense strand starting at position 2356 of SEQ ID NO: 1888698
gacucuuccuguuugaugu

SEQ ID NO: 2550819 - RNA, 19 nt, Artificial Sequence
  Description of Artificial Sequence: Synthetic oligonucleotide
  Antisense strand to SEQ ID NO: 2550818
acaucaaacaggaagaguc

SEQ ID NO: 2550820 - RNA, 19 nt, Artificial Sequence
  Description of Artificial Sequence: Synthetic oligonucleotide
  Sense strand starting at position 562 of SEQ ID NO: 1888698
auguguauguguuucaaga

SEQ ID NO: 2550821 - RNA, 19 nt, Artificial Sequence
  Description of Artificial Sequence: Synthetic oligonucleotide
  Antisense strand to SEQ ID NO: 2550820
ucuugaaacacauacacau

SEQ ID NO: 2550822 - RNA, 19 nt, Artificial Sequence
  Description of Artificial Sequence: Synthetic oligonucleotide
  Sense strand starting at position 331 of SEQ ID NO: 1888698
ggagaaguguggcuguuug

SEQ ID NO: 2550823 - RNA, 19 nt, Artificial Sequence
  Description of Artificial Sequence: Synthetic oligonucleotide
  Antisense strand to SEQ ID NO: 2550822
caaacagccacacuucucc

SEQ ID NO: 2550824 - RNA, 19 nt, Artificial Sequence
  Description of Artificial Sequence: Synthetic oligonucleotide
  Sense strand starting at position 3338 of SEQ ID NO: 1888698
gaguaaggcugugucuuaa

SEQ ID NO: 2550825 - RNA, 19 nt, Artificial Sequence
  Description of Artificial Sequence: Synthetic oligonucleotide
  Antisense strand to SEQ ID NO: 2550824
uuaagacacagccuuacuc

SEQ ID NO: 2550826 - RNA, 19 nt, Artificial Sequence
  Description of Artificial Sequence: Synthetic oligonucleotide
  Sense strand starting at position 2009 of SEQ ID NO: 1888699
gagaucagugcuuaccaga

SEQ ID NO: 2550827 - RNA, 19 nt, Artificial Sequence
  Description of Artificial Sequence: Synthetic oligonucleotide
  Antisense strand to SEQ ID NO: 2550826
ucugguaagcacugaucuc

SEQ ID NO: 2550828 - RNA, 19 nt, Artificial Sequence
  Description of Artificial Sequence: Synthetic oligonucleotide
  Sense strand starting at position 2195 of SEQ ID NO: 1888699
augguuaauggugaggcaa

SEQ ID NO: 2550829 - RNA, 19 nt, Artificial Sequence
  Description of Artificial Sequence: Synthetic oligonucleotide
  Antisense strand to SEQ ID NO: 2550828
uugccucaccauuaaccau

SEQ ID NO: 2550830 - RNA, 19 nt, Artificial Sequence
  Description of Artificial Sequence: Synthetic oligonucleotide
  Sense strand starting at position 3630 of SEQ ID NO: 1888699
ccuuaugaauagguuaauu

SEQ ID NO: 2550831 - RNA, 19 nt, Artificial Sequence
  Description of Artificial Sequence: Synthetic oligonucleotide
  Antisense strand to SEQ ID NO: 2550830
aauuaaccuauucauaagg

SEQ ID NO: 2550832 - RNA, 19 nt, Artificial Sequence
  Description of Artificial Sequence: Synthetic oligonucleotide
  Sense strand starting at position 2852 of SEQ ID NO: 1888699
agucucuguguggaagaua

SEQ ID NO: 2550833 - RNA, 19 nt, Artificial Sequence
  Description of Artificial Sequence: Synthetic oligonucleotide
  Antisense strand to SEQ ID NO: 2550832
uaucuuccacacagagacu

SEQ ID NO: 2550834 - RNA, 19 nt, Artificial Sequence
  Description of Artificial Sequence: Synthetic oligonucleotide
  Sense strand starting at position 2099 of SEQ ID NO: 1888699
cagggaguugguuaaagcu

SEQ ID NO: 2550835 - RNA, 19 nt, Artificial Sequence
  Description of Artificial Sequence: Synthetic oligonucleotide
  Antisense strand to SEQ ID NO: 2550834
agcuuuaaccaacucccug

SEQ ID NO: 2550836 - RNA, 19 nt, Artificial Sequence
  Description of Artificial Sequence: Synthetic oligonucleotide
  Sense strand starting at position 3466 of SEQ ID NO: 1888699
agaugcuuuauuggaagua

SEQ ID NO: 2550837 - RNA, 19 nt, Artificial Sequence
  Description of Artificial Sequence: Synthetic oligonucleotide
  Antisense strand to SEQ ID NO: 2550836
uacuuccaauaaagcaucu

SEQ ID NO: 2550838 - RNA, 19 nt, Artificial Sequence
  Description of Artificial Sequence: Synthetic oligonucleotide
  Sense strand starting at position 2014 of SEQ ID NO: 1888699
cagugcuuaccagaugagu

SEQ ID NO: 2550839 - RNA, 19 nt, Artificial Sequence
  Description of Artificial Sequence: Synthetic oligonucleotide
  Antisense strand to SEQ ID NO: 2550838
acucaucugguaagcacug

SEQ ID NO: 2550840 - RNA, 19 nt, Artificial Sequence
  Description of Artificial Sequence: Synthetic oligonucleotide
  Sense strand starting at position 2047 of SEQ ID NO: 1888699
guuugaauccaaggacggu

SEQ ID NO: 2550841 - RNA, 19 nt, Artificial Sequence
  Description of Artificial Sequence: Synthetic oligonucleotide
  Antisense strand to SEQ ID NO: 2550840
accguccuuggauucaaac

SEQ ID NO: 2550842 - RNA, 19 nt, Artificial Sequence
  Description of Artificial Sequence: Synthetic oligonucleotide
  Sense strand starting at position 2005 of SEQ ID NO: 1888699
ucuagagaucagugcuuac

SEQ ID NO: 2550843 - RNA, 19 nt, Artificial Sequence
  Description of Artificial Sequence: Synthetic oligonucleotide
  Antisense strand to SEQ ID NO: 2550842
guaagcacugaucucuaga

SEQ ID NO: 2550844 - RNA, 19 nt, Artificial Sequence
  Description of Artificial Sequence: Synthetic oligonucleotide
  Sense strand starting at position 2850 of SEQ ID NO: 1888699
ugagucucuguguggaaga

SEQ ID NO: 2550845 - RNA, 19 nt, Artificial Sequence
  Description of Artificial Sequence: Synthetic oligonucleotide
  Antisense strand to SEQ ID NO: 2550844
ucuuccacacagagacuca

SEQ ID NO: 2550846 - RNA, 19 nt, Artificial Sequence
  Description of Artificial Sequence: Synthetic oligonucleotide
  Sense strand starting at position 3745 of SEQ ID NO: 1888699
ggucuuuguccacaucucu

SEQ ID NO: 2550847 - RNA, 19 nt, Artificial Sequence
  Description of Artificial Sequence: Synthetic oligonucleotide
  Antisense strand to SEQ ID NO: 2550846
agagauguggacaaagacc

SEQ ID NO: 2550848 - RNA, 19 nt, Artificial Sequence
  Description of Artificial Sequence: Synthetic oligonucleotide
  Sense strand starting at position 2016 of SEQ ID NO: 1888699
gugcuuaccagaugaguaa

SEQ ID NO: 2550849 - RNA, 19 nt, Artificial Sequence
  Description of Artificial Sequence: Synthetic oligonucleotide
  Antisense strand to SEQ ID NO: 2550848
uuacucaucugguaagcac

SEQ ID NO: 2550850 - RNA, 19 nt, Artificial Sequence
  Description of Artificial Sequence: Synthetic oligonucleotide
  Sense strand starting at position 2413 of SEQ ID NO: 1888699
ugggcugguccguguauuu

SEQ ID NO: 2550851 - RNA, 19 nt, Artificial Sequence
  Description of Artificial Sequence: Synthetic oligonucleotide
  Antisense strand to SEQ ID NO: 2550850
aaauacacggaccagccca

SEQ ID NO: 2550852 - RNA, 19 nt, Artificial Sequence
  Description of Artificial Sequence: Synthetic oligonucleotide
  Sense strand starting at position 2035 of SEQ ID NO: 1888699
gggugcuucuagguuugaa

SEQ ID NO: 2550853 - RNA, 19 nt, Artificial Sequence
  Description of Artificial Sequence: Synthetic oligonucleotide
  Antisense strand to SEQ ID NO: 2550852
uucaaaccuagaagcaccc

SEQ ID NO: 2550854 - RNA, 19 nt, Artificial Sequence
  Description of Artificial Sequence: Synthetic oligonucleotide
  Sense strand starting at position 3441 of SEQ ID NO: 1888699
aggagaaugugugucguua

SEQ ID NO: 2550855 - RNA, 19 nt, Artificial Sequence
  Description of Artificial Sequence: Synthetic oligonucleotide
  Antisense strand to SEQ ID NO: 2550854
uaacgacacacauucuccu

SEQ ID NO: 2550856 - RNA, 19 nt, Artificial Sequence
  Description of Artificial Sequence: Synthetic oligonucleotide
  Sense strand starting at position 3393 of SEQ ID NO: 1888699
ggaugcuucucugcugacu

SEQ ID NO: 2550857 - RNA, 19 nt, Artificial Sequence
  Description of Artificial Sequence: Synthetic oligonucleotide
  Antisense strand to SEQ ID NO: 2550856
agucagcagagaagcaucc

SEQ ID NO: 2550858 - RNA, 19 nt, Artificial Sequence
  Description of Artificial Sequence: Synthetic oligonucleotide
  Sense strand starting at position 3688 of SEQ ID NO: 1888699
cugagcugguuguuagagu

SEQ ID NO: 2550859 - RNA, 19 nt, Artificial Sequence
  Description of Artificial Sequence: Synthetic oligonucleotide
  Antisense strand to SEQ ID NO: 2550858
acucuaacaaccagcucag

SEQ ID NO: 2550860 - RNA, 19 nt, Artificial Sequence
  Description of Artificial Sequence: Synthetic oligonucleotide
  Sense strand starting at position 3951 of SEQ ID NO: 1888699
agagaugucuaauauaacu

SEQ ID NO: 2550861 - RNA, 19 nt, Artificial Sequence
  Description of Artificial Sequence: Synthetic oligonucleotide
  Antisense strand to SEQ ID NO: 2550860
aguuauauuagacaucucu

SEQ ID NO: 2550862 - RNA, 19 nt, Artificial Sequence
  Description of Artificial Sequence: Synthetic oligonucleotide
  Sense strand starting at position 3686 of SEQ ID NO: 1888699
gccugagcugguuguuaga

SEQ ID NO: 2550863 - RNA, 19 nt, Artificial Sequence
  Description of Artificial Sequence: Synthetic oligonucleotide
  Antisense strand to SEQ ID NO: 2550862
ucuaacaaccagcucaggc

SEQ ID NO: 2550864 - RNA, 19 nt, Artificial Sequence
  Description of Artificial Sequence: Synthetic oligonucleotide
  Sense strand starting at position 2248 of SEQ ID NO: 1888699
gggagacuucgcggcaucu

SEQ ID NO: 2550865 - RNA, 19 nt, Artificial Sequence
  Description of Artificial Sequence: Synthetic oligonucleotide
  Antisense strand to SEQ ID NO: 2550864
agaugccgcgaagucuccc

SEQ ID NO: 2550866 - RNA, 19 nt, Artificial Sequence
  Description of Artificial Sequence: Synthetic oligonucleotide
  Sense strand starting at position 3445 of SEQ ID NO: 1888699
gaaugugugucguuaguaa

SEQ ID NO: 2550867 - RNA, 19 nt, Artificial Sequence
  Description of Artificial Sequence: Synthetic oligonucleotide
  Antisense strand to SEQ ID NO: 2550866
uuacuaacgacacacauuc

SEQ ID NO: 2550868 - RNA, 19 nt, Artificial Sequence
  Description of Artificial Sequence: Synthetic oligonucleotide
  Sense strand starting at position 3623 of SEQ ID NO: 1888699
guggaauccuuaugaauag

SEQ ID NO: 2550869 - RNA, 19 nt, Artificial Sequence
  Description of Artificial Sequence: Synthetic oligonucleotide
  Antisense strand to SEQ ID NO: 2550868
cuauucauaaggauuccac

SEQ ID NO: 2550870 - RNA, 19 nt, Artificial Sequence
  Description of Artificial Sequence: Synthetic oligonucleotide
  Sense strand starting at position 3467 of SEQ ID NO: 1888699
gaugcuuuauuggaaguaa

SEQ ID NO: 2550871 - RNA, 19 nt, Artificial Sequence
  Description of Artificial Sequence: Synthetic oligonucleotide
  Antisense strand to SEQ ID NO: 2550870
uuacuuccaauaaagcauc

SEQ ID NO: 2550872 - RNA, 19 nt, Artificial Sequence
  Description of Artificial Sequence: Synthetic oligonucleotide
  Sense strand starting at position 2012 of SEQ ID NO: 1888699
aucagugcuuaccagauga

SEQ ID NO: 2550873 - RNA, 19 nt, Artificial Sequence
  Description of Artificial Sequence: Synthetic oligonucleotide
  Antisense strand to SEQ ID NO: 2550872
ucaucugguaagcacugau

SEQ ID NO: 2550874 - RNA, 19 nt, Artificial Sequence
  Description of Artificial Sequence: Synthetic oligonucleotide
  Sense strand starting at position 2197 of SEQ ID NO: 1888699
gguuaauggugaggcaaga

SEQ ID NO: 2550875 - RNA, 19 nt, Artificial Sequence
  Description of Artificial Sequence: Synthetic oligonucleotide
  Antisense strand to SEQ ID NO: 2550874
ucuugccucaccauuaacc

SEQ ID NO: 2550876 - RNA, 19 nt, Artificial Sequence
  Description of Artificial Sequence: Synthetic oligonucleotide
  Sense strand starting at position 2039 of SEQ ID NO: 1888699
gcuucuagguuugaaucca

SEQ ID NO: 2550877 - RNA, 19 nt, Artificial Sequence
  Description of Artificial Sequence: Synthetic oligonucleotide
  Antisense strand to SEQ ID NO: 2550876
uggauucaaaccuagaagc

SEQ ID NO: 2550878 - RNA, 19 nt, Artificial Sequence
  Description of Artificial Sequence: Synthetic oligonucleotide
  Sense strand starting at position 2614 of SEQ ID NO: 1888699
ccuaauucuuguggacgga

SEQ ID NO: 2550879 - RNA, 19 nt, Artificial Sequence
  Description of Artificial Sequence: Synthetic oligonucleotide
  Antisense strand to SEQ ID NO: 2550878
uccguccacaagaauuagg

SEQ ID NO: 2550880 - RNA, 19 nt, Artificial Sequence
  Description of Artificial Sequence: Synthetic oligonucleotide
  Sense strand starting at position 2851 of SEQ ID NO: 1888699
gagucucuguguggaagau

SEQ ID NO: 2550881 - RNA, 19 nt, Artificial Sequence
  Description of Artificial Sequence: Synthetic oligonucleotide
  Antisense strand to SEQ ID NO: 2550880
aucuuccacacagagacuc

SEQ ID NO: 2550882 - RNA, 19 nt, Artificial Sequence
  Description of Artificial Sequence: Synthetic oligonucleotide
  Sense strand starting at position 2838 of SEQ ID NO: 1888699
ccuagugucuugugagucu

SEQ ID NO: 2550883 - RNA, 19 nt, Artificial Sequence
  Description of Artificial Sequence: Synthetic oligonucleotide
  Antisense strand to SEQ ID NO: 2550882
agacucacaagacacuagg

SEQ ID NO: 2550884 - RNA, 19 nt, Artificial Sequence
  Description of Artificial Sequence: Synthetic oligonucleotide
  Sense strand starting at position 3443 of SEQ ID NO: 1888699
gagaaugugugucguuagu

SEQ ID NO: 2550885 - RNA, 19 nt, Artificial Sequence
  Description of Artificial Sequence: Synthetic oligonucleotide
  Antisense strand to SEQ ID NO: 2550884
acuaacgacacacauucuc

SEQ ID NO: 2550886 - RNA, 19 nt, Artificial Sequence
  Description of Artificial Sequence: Synthetic oligonucleotide
  Sense strand starting at position 3484 of SEQ ID NO: 1888700
guuugcuuucccuucuagu

SEQ ID NO: 2550887 - RNA, 19 nt, Artificial Sequence
  Description of Artificial Sequence: Synthetic oligonucleotide
  Antisense strand to SEQ ID NO: 2550886
acuagaagggaaagcaaac

SEQ ID NO: 2550888 - RNA, 19 nt, Artificial Sequence
  Description of Artificial Sequence: Synthetic oligonucleotide
  Sense strand starting at position 3405 of SEQ ID NO: 1888700
caucuugauuucguuugau

SEQ ID NO: 2550889 - RNA, 19 nt, Artificial Sequence
  Description of Artificial Sequence: Synthetic oligonucleotide
  Antisense strand to SEQ ID NO: 2550888
aucaaacgaaaucaagaug

SEQ ID NO: 2550890 - RNA, 19 nt, Artificial Sequence
  Description of Artificial Sequence: Synthetic oligonucleotide
  Sense strand starting at position 1406 of SEQ ID NO: 1888700
agaagagucgcggagaaga

SEQ ID NO: 2550891 - RNA, 19 nt, Artificial Sequence
  Description of Artificial Sequence: Synthetic oligonucleotide
  Antisense strand to SEQ ID NO: 2550890
ucuucuccgcgacucuucu

SEQ ID NO: 2550892 - RNA, 19 nt, Artificial Sequence
  Description of Artificial Sequence: Synthetic oligonucleotide
  Sense strand starting at position 687 of SEQ ID NO: 1888700
auucuacaacuucgaaaga

SEQ ID NO: 2550893 - RNA, 19 nt, Artificial Sequence
  Description of Artificial Sequence: Synthetic oligonucleotide
  Antisense strand to SEQ ID NO: 2550892
ucuuucgaaguuguagaau

SEQ ID NO: 2550894 - RNA, 19 nt, Artificial Sequence
  Description of Artificial Sequence: Synthetic oligonucleotide
  Sense strand starting at position 3505 of SEQ ID NO: 1888700
cuaggauguuaacuuuaaa

SEQ ID NO: 2550895 - RNA, 19 nt, Artificial Sequence
  Description of Artificial Sequence: Synthetic oligonucleotide
  Antisense strand to SEQ ID NO: 2550894
uuuaaaguuaacauccuag

SEQ ID NO: 2550896 - RNA, 19 nt, Artificial Sequence
  Description of Artificial Sequence: Synthetic oligonucleotide
  Sense strand starting at position 2954 of SEQ ID NO: 1888700
gguucauaaggauguaaga

SEQ ID NO: 2550897 - RNA, 19 nt, Artificial Sequence
  Description of Artificial Sequence: Synthetic oligonucleotide
  Antisense strand to SEQ ID NO: 2550896
ucuuacauccuuaugaacc

SEQ ID NO: 2550898 - RNA, 19 nt, Artificial Sequence
  Description of Artificial Sequence: Synthetic oligonucleotide
  Sense strand starting at position 3694 of SEQ ID NO: 1888700
aaaggaaauuugggauuga

SEQ ID NO: 2550899 - RNA, 19 nt, Artificial Sequence
  Description of Artificial Sequence: Synthetic oligonucleotide
  Antisense strand to SEQ ID NO: 2550898
ucaaucccaaauuuccuuu

SEQ ID NO: 2550900 - RNA, 19 nt, Artificial Sequence
  Description of Artificial Sequence: Synthetic oligonucleotide
  Sense strand starting at position 3052 of SEQ ID NO: 1888700
acguucaguguguugugau

SEQ ID NO: 2550901 - RNA, 19 nt, Artificial Sequence
  Description of Artificial Sequence: Synthetic oligonucleotide
  Antisense strand to SEQ ID NO: 2550900
aucacaacacacugaacgu

SEQ ID NO: 2550902 - RNA, 19 nt, Artificial Sequence
  Description of Artificial Sequence: Synthetic oligonucleotide
  Sense strand starting at position 300 of SEQ ID NO: 1888700
ucacgaagaagcuaaugua

SEQ ID NO: 2550903 - RNA, 19 nt, Artificial Sequence
  Description of Artificial Sequence: Synthetic oligonucleotide
  Antisense strand to SEQ ID NO: 2550902
uacauuagcuucuucguga

SEQ ID NO: 2550904 - RNA, 19 nt, Artificial Sequence
  Description of Artificial Sequence: Synthetic oligonucleotide
  Sense strand starting at position 3224 of SEQ ID NO: 1888700
acacuuggacgaugaucua

SEQ ID NO: 2550905 - RNA, 19 nt, Artificial Sequence
  Description of Artificial Sequence: Synthetic oligonucleotide
  Antisense strand to SEQ ID NO: 2550904
uagaucaucguccaagugu

SEQ ID NO: 2550906 - RNA, 19 nt, Artificial Sequence
  Description of Artificial Sequence: Synthetic oligonucleotide
  Sense strand starting at position 802 of SEQ ID NO: 1888700
auaaccguucuguaagaag

SEQ ID NO: 2550907 - RNA, 19 nt, Artificial Sequence
  Description of Artificial Sequence: Synthetic oligonucleotide
  Antisense strand to SEQ ID NO: 2550906
cuucuuacagaacgguuau

SEQ ID NO: 2550908 - RNA, 19 nt, Artificial Sequence
  Description of Artificial Sequence: Synthetic oligonucleotide
  Sense strand starting at position 3408 of SEQ ID NO: 1888700
cuugauuucguuugaucuu

SEQ ID NO: 2550909 - RNA, 19 nt, Artificial Sequence
  Description of Artificial Sequence: Synthetic oligonucleotide
  Antisense strand to SEQ ID NO: 2550908
aagaucaaacgaaaucaag

SEQ ID NO: 2550910 - RNA, 19 nt, Artificial Sequence
  Description of Artificial Sequence: Synthetic oligonucleotide
  Sense strand starting at position 3790 of SEQ ID NO: 1888700
gugauaaacauaugaugug

SEQ ID NO: 2550911 - RNA, 19 nt, Artificial Sequence
  Description of Artificial Sequence: Synthetic oligonucleotide
  Antisense strand to SEQ ID NO: 2550910
cacaucauauguuuaucac

SEQ ID NO: 2550912 - RNA, 19 nt, Artificial Sequence
  Description of Artificial Sequence: Synthetic oligonucleotide
  Sense strand starting at position 2982 of SEQ ID NO: 1888700
cgaugacagcucgagaaau

SEQ ID NO: 2550913 - RNA, 19 nt, Artificial Sequence
  Description of Artificial Sequence: Synthetic oligonucleotide
  Antisense strand to SEQ ID NO: 2550912
auuucucgagcugucaucg

SEQ ID NO: 2550914 - RNA, 19 nt, Artificial Sequence
  Description of Artificial Sequence: Synthetic oligonucleotide
  Sense strand starting at position 399 of SEQ ID NO: 1888700
guugaaggcccugaaucau

SEQ ID NO: 2550915 - RNA, 19 nt, Artificial Sequence
  Description of Artificial Sequence: Synthetic oligonucleotide
  Antisense strand to SEQ ID NO: 2550914
augauucagggccuucaac

SEQ ID NO: 2550916 - RNA, 19 nt, Artificial Sequence
  Description of Artificial Sequence: Synthetic oligonucleotide
  Sense strand starting at position 3804 of SEQ ID NO: 1888700
augugaucuagugaaaguu

SEQ ID NO: 2550917 - RNA, 19 nt, Artificial Sequence
  Description of Artificial Sequence: Synthetic oligonucleotide
  Antisense strand to SEQ ID NO: 2550916
aacuuucacuagaucacau

SEQ ID NO: 2550918 - RNA, 19 nt, Artificial Sequence
  Description of Artificial Sequence: Synthetic oligonucleotide
  Sense strand starting at position 3401 of SEQ ID NO: 1888700
cucucaucuugauuucguu

SEQ ID NO: 2550919 - RNA, 19 nt, Artificial Sequence
  Description of Artificial Sequence: Synthetic oligonucleotide
  Antisense strand to SEQ ID NO: 2550918
aacgaaaucaagaugagag

SEQ ID NO: 2550920 - RNA, 19 nt, Artificial Sequence
  Description of Artificial Sequence: Synthetic oligonucleotide
  Sense strand starting at position 3555 of SEQ ID NO: 1888700
cuuugauucccagagccua

SEQ ID NO: 2550921 - RNA, 19 nt, Artificial Sequence
  Description of Artificial Sequence: Synthetic oligonucleotide
  Antisense strand to SEQ ID NO: 2550920
uaggcucugggaaucaaag

SEQ ID NO: 2550922 - RNA, 19 nt, Artificial Sequence
  Description of Artificial Sequence: Synthetic oligonucleotide
  Sense strand starting at position 295 of SEQ ID NO: 1888700
uuguaucacgaagaagcua

SEQ ID NO: 2550923 - RNA, 19 nt, Artificial Sequence
  Description of Artificial Sequence: Synthetic oligonucleotide
  Antisense strand to SEQ ID NO: 2550922
uagcuucuucgugauacaa

SEQ ID NO: 2550924 - RNA, 19 nt, Artificial Sequence
  Description of Artificial Sequence: Synthetic oligonucleotide
  Sense strand starting at position 3813 of SEQ ID NO: 1888700
agugaaaguuuacuaagua

SEQ ID NO: 2550925 - RNA, 19 nt, Artificial Sequence
  Description of Artificial Sequence: Synthetic oligonucleotide
  Antisense strand to SEQ ID NO: 2550924
uacuuaguaaacuuucacu

SEQ ID NO: 2550926 - RNA, 19 nt, Artificial Sequence
  Description of Artificial Sequence: Synthetic oligonucleotide
  Sense strand starting at position 2 of SEQ ID NO: 1888700
gaucuaaucuuucuggagu

SEQ ID NO: 2550927 - RNA, 19 nt, Artificial Sequence
  Description of Artificial Sequence: Synthetic oligonucleotide
  Antisense strand to SEQ ID NO: 2550926
acuccagaaagauuagauc

SEQ ID NO: 2550928 - RNA, 19 nt, Artificial Sequence
  Description of Artificial Sequence: Synthetic oligonucleotide
  Sense strand starting at position 356 of SEQ ID NO: 1888700
uuaucauagcuagguaaga

SEQ ID NO: 2550929 - RNA, 19 nt, Artificial Sequence
  Description of Artificial Sequence: Synthetic oligonucleotide
  Antisense strand to SEQ ID NO: 2550928
ucuuaccuagcuaugauaa

SEQ ID NO: 2550930 - RNA, 19 nt, Artificial Sequence
  Description of Artificial Sequence: Synthetic oligonucleotide
  Sense strand starting at position 398 of SEQ ID NO: 1888700
aguugaaggcccugaauca

SEQ ID NO: 2550931 - RNA, 19 nt, Artificial Sequence
  Description of Artificial Sequence: Synthetic oligonucleotide
  Antisense strand to SEQ ID NO: 2550930
ugauucagggccuucaacu

SEQ ID NO: 2550932 - RNA, 19 nt, Artificial Sequence
  Description of Artificial Sequence: Synthetic oligonucleotide
  Sense strand starting at position 146 of SEQ ID NO: 1888700
guugcuuuaaaggaugcaa

SEQ ID NO: 2550933 - RNA, 19 nt, Artificial Sequence
  Description of Artificial Sequence: Synthetic oligonucleotide
  Antisense strand to SEQ ID NO: 2550932
uugcauccuuuaaagcaac

SEQ ID NO: 2550934 - RNA, 19 nt, Artificial Sequence
  Description of Artificial Sequence: Synthetic oligonucleotide
  Sense strand starting at position 3326 of SEQ ID NO: 1888700
ucaaccauuugugaaggau

SEQ ID NO: 2550935 - RNA, 19 nt, Artificial Sequence
  Description of Artificial Sequence: Synthetic oligonucleotide
  Antisense strand to SEQ ID NO: 2550934
auccuucacaaaugguuga

SEQ ID NO: 2550936 - RNA, 19 nt, Artificial Sequence
  Description of Artificial Sequence: Synthetic oligonucleotide
  Sense strand starting at position 1175 of SEQ ID NO: 1888700
gaacgagucgcugacaaac

SEQ ID NO: 2550937 - RNA, 19 nt, Artificial Sequence
  Description of Artificial Sequence: Synthetic oligonucleotide
  Antisense strand to SEQ ID NO: 2550936
guuugucagcgacucguuc

SEQ ID NO: 2550938 - RNA, 19 nt, Artificial Sequence
  Description of Artificial Sequence: Synthetic oligonucleotide
  Sense strand starting at position 801 of SEQ ID NO: 1888700
aauaaccguucuguaagaa

SEQ ID NO: 2550939 - RNA, 19 nt, Artificial Sequence
  Description of Artificial Sequence: Synthetic oligonucleotide
  Antisense strand to SEQ ID NO: 2550938
uucuuacagaacgguuauu

SEQ ID NO: 2550940 - RNA, 19 nt, Artificial Sequence
  Description of Artificial Sequence: Synthetic oligonucleotide
  Sense strand starting at position 3924 of SEQ ID NO: 1888700
agcuguguuccauacugaa

SEQ ID NO: 2550941 - RNA, 19 nt, Artificial Sequence
  Description of Artificial Sequence: Synthetic oligonucleotide
  Antisense strand to SEQ ID NO: 2550940
uucaguauggaacacagcu

SEQ ID NO: 2550942 - RNA, 19 nt, Artificial Sequence
  Description of Artificial Sequence: Synthetic oligonucleotide
  Sense strand starting at position 366 of SEQ ID NO: 1888700
uagguaagagcuggcaaua

SEQ ID NO: 2550943 - RNA, 19 nt, Artificial Sequence
  Description of Artificial Sequence: Synthetic oligonucleotide
  Antisense strand to SEQ ID NO: 2550942
uauugccagcucuuaccua

SEQ ID NO: 2550944 - RNA, 19 nt, Artificial Sequence
  Description of Artificial Sequence: Synthetic oligonucleotide
  Sense strand starting at position 3395 of SEQ ID NO: 1888700
ggcacacucucaucuugau

SEQ ID NO: 2550945 - RNA, 19 nt, Artificial Sequence
  Description of Artificial Sequence: Synthetic oligonucleotide
  Antisense strand to SEQ ID NO: 2550944
aucaagaugagagugugcc

SEQ ID NO: 2550946 - RNA, 19 nt, Artificial Sequence
  Description of Artificial Sequence: Synthetic oligonucleotide
  Sense strand starting at position 274 of SEQ ID NO: 1888700
uggcauaaguaaguccuaa

SEQ ID NO: 2550947 - RNA, 19 nt, Artificial Sequence
  Description of Artificial Sequence: Synthetic oligonucleotide
  Antisense strand to SEQ ID NO: 2550946
uuaggacuuacuuaugcca

SEQ ID NO: 2550948 - RNA, 19 nt, Artificial Sequence
  Description of Artificial Sequence: Synthetic oligonucleotide
  Sense strand starting at position 3264 of SEQ ID NO: 1888700
ucgauuaguauaugggagu

SEQ ID NO: 2550949 - RNA, 19 nt, Artificial Sequence
  Description of Artificial Sequence: Synthetic oligonucleotide
  Antisense strand to SEQ ID NO: 2550948
acucccauauacuaaucga

SEQ ID NO: 2550950 - RNA, 19 nt, Artificial Sequence
  Description of Artificial Sequence: Synthetic oligonucleotide
  Sense strand starting at position 3716 of SEQ ID NO: 1888700
ggaggcuggcaugguaaau

SEQ ID NO: 2550951 - RNA, 19 nt, Artificial Sequence
  Description of Artificial Sequence: Synthetic oligonucleotide
  Antisense strand to SEQ ID NO: 2550950
auuuaccaugccagccucc

SEQ ID NO: 2550952 - RNA, 19 nt, Artificial Sequence
  Description of Artificial Sequence: Synthetic oligonucleotide
  Sense strand starting at position 267 of SEQ ID NO: 1888700
acgcaaguggcauaaguaa

SEQ ID NO: 2550953 - RNA, 19 nt, Artificial Sequence
  Description of Artificial Sequence: Synthetic oligonucleotide
  Antisense strand to SEQ ID NO: 2550952
uuacuuaugccacuugcgu

SEQ ID NO: 2550954 - RNA, 19 nt, Artificial Sequence
  Description of Artificial Sequence: Synthetic oligonucleotide
  Sense strand starting at position 2909 of SEQ ID NO: 1888700
aguuacaguuuccuuauua

SEQ ID NO: 2550955 - RNA, 19 nt, Artificial Sequence
  Description of Artificial Sequence: Synthetic oligonucleotide
  Antisense strand to SEQ ID NO: 2550954
uaauaaggaaacuguaacu

SEQ ID NO: 2550956 - RNA, 19 nt, Artificial Sequence
  Description of Artificial Sequence: Synthetic oligonucleotide
  Sense strand starting at position 365 of SEQ ID NO: 1888700
cuagguaagagcuggcaau

SEQ ID NO: 2550957 - RNA, 19 nt, Artificial Sequence
  Description of Artificial Sequence: Synthetic oligonucleotide
  Antisense strand to SEQ ID NO: 2550956
auugccagcucuuaccuag

SEQ ID NO: 2550958 - RNA, 19 nt, Artificial Sequence
  Description of Artificial Sequence: Synthetic oligonucleotide
  Sense strand starting at position 3876 of SEQ ID NO: 1888700
cuuuaaaugaagugugguu

SEQ ID NO: 2550959 - RNA, 19 nt, Artificial Sequence
  Description of Artificial Sequence: Synthetic oligonucleotide
  Antisense strand to SEQ ID NO: 2550958
aaccacacuucauuuaaag

SEQ ID NO: 2550960 - RNA, 19 nt, Artificial Sequence
  Description of Artificial Sequence: Synthetic oligonucleotide
  Sense strand starting at position 353 of SEQ ID NO: 1888700
cgauuaucauagcuaggua

SEQ ID NO: 2550961 - RNA, 19 nt, Artificial Sequence
  Description of Artificial Sequence: Synthetic oligonucleotide
  Antisense strand to SEQ ID NO: 2550960
uaccuagcuaugauaaucg

SEQ ID NO: 2550962 - RNA, 19 nt, Artificial Sequence
  Description of Artificial Sequence: Synthetic oligonucleotide
  Sense strand starting at position 2881 of SEQ ID NO: 1888700
ggagucaacuucguucuaa

SEQ ID NO: 2550963 - RNA, 19 nt, Artificial Sequence
  Description of Artificial Sequence: Synthetic oligonucleotide
  Antisense strand to SEQ ID NO: 2550962
uuagaacgaaguugacucc

SEQ ID NO: 2550964 - RNA, 19 nt, Artificial Sequence
  Description of Artificial Sequence: Synthetic oligonucleotide
  Sense strand starting at position 3527 of SEQ ID NO: 1888700
ugucuucuacuugggcaaa

SEQ ID NO: 2550965 - RNA, 19 nt, Artificial Sequence
  Description of Artificial Sequence: Synthetic oligonucleotide
  Antisense strand to SEQ ID NO: 2550964
uuugcccaaguagaagaca

SEQ ID NO: 2550966 - RNA, 19 nt, Artificial Sequence
  Description of Artificial Sequence: Synthetic oligonucleotide
  Sense strand starting at position 11 of SEQ ID NO: 1888701
gauucuaagugaucagaua

SEQ ID NO: 2550967 - RNA, 19 nt, Artificial Sequence
  Description of Artificial Sequence: Synthetic oligonucleotide
  Antisense strand to SEQ ID NO: 2550966
uaucugaucacuuagaauc

SEQ ID NO: 2550968 - RNA, 19 nt, Artificial Sequence
  Description of Artificial Sequence: Synthetic oligonucleotide
  Sense strand starting at position 2030 of SEQ ID NO: 1888701
gcgaguucgggcucugaug

SEQ ID NO: 2550969 - RNA, 19 nt, Artificial Sequence
  Description of Artificial Sequence: Synthetic oligonucleotide
  Antisense strand to SEQ ID NO: 2550968
caucagagcccgaacucgc

SEQ ID NO: 2550970 - RNA, 19 nt, Artificial Sequence
  Description of Artificial Sequence: Synthetic oligonucleotide
  Sense strand starting at position 3841 of SEQ ID NO: 1888701
aauuaauacguguaagaug

SEQ ID NO: 2550971 - RNA, 19 nt, Artificial Sequence
  Description of Artificial Sequence: Synthetic oligonucleotide
  Antisense strand to SEQ ID NO: 2550970
caucuuacacguauuaauu

SEQ ID NO: 2550972 - RNA, 19 nt, Artificial Sequence
  Description of Artificial Sequence: Synthetic oligonucleotide
  Sense strand starting at position 2689 of SEQ ID NO: 1888701
guuugagcacguguucuca

SEQ ID NO: 2550973 - RNA, 19 nt, Artificial Sequence
  Description of Artificial Sequence: Synthetic oligonucleotide
  Antisense strand to SEQ ID NO: 2550972
ugagaacacgugcucaaac

SEQ ID NO: 2550974 - RNA, 19 nt, Artificial Sequence
  Description of Artificial Sequence: Synthetic oligonucleotide
  Sense strand starting at position 2705 of SEQ ID NO: 1888701
ucaggaucuccugggacua

SEQ ID NO: 2550975 - RNA, 19 nt, Artificial Sequence
  Description of Artificial Sequence: Synthetic oligonucleotide
  Antisense strand to SEQ ID NO: 2550974
uagucccaggagauccuga

SEQ ID NO: 2550976 - RNA, 19 nt, Artificial Sequence
  Description of Artificial Sequence: Synthetic oligonucleotide
  Sense strand starting at position 2706 of SEQ ID NO: 1888701
caggaucuccugggacuau

SEQ ID NO: 2550977 - RNA, 19 nt, Artificial Sequence
  Description of Artificial Sequence: Synthetic oligonucleotide
  Antisense strand to SEQ ID NO: 2550976
auagucccaggagauccug

SEQ ID NO: 2550978 - RNA, 19 nt, Artificial Sequence
  Description of Artificial Sequence: Synthetic oligonucleotide
  Sense strand starting at position 3673 of SEQ ID NO: 1888701
gugguaugaacccaaagua

SEQ ID NO: 2550979 - RNA, 19 nt, Artificial Sequence
  Description of Artificial Sequence: Synthetic oligonucleotide
  Antisense strand to SEQ ID NO: 2550978
uacuuuggguucauaccac

SEQ ID NO: 2550980 - RNA, 19 nt, Artificial Sequence
  Description of Artificial Sequence: Synthetic oligonucleotide
  Sense strand starting at position 2180 of SEQ ID NO: 1888701
auggcaggcccugaaagau

SEQ ID NO: 2550981 - RNA, 19 nt, Artificial Sequence
  Description of Artificial Sequence: Synthetic oligonucleotide
  Antisense strand to SEQ ID NO: 2550980
aucuuucagggccugccau

SEQ ID NO: 2550982 - RNA, 19 nt, Artificial Sequence
  Description of Artificial Sequence: Synthetic oligonucleotide
  Sense strand starting at position 212 of SEQ ID NO: 1888701
guaggcugaauguaaugaa

SEQ ID NO: 2550983 - RNA, 19 nt, Artificial Sequence
  Description of Artificial Sequence: Synthetic oligonucleotide
  Antisense strand to SEQ ID NO: 2550982
uucauuacauucagccuac

SEQ ID NO: 2550984 - RNA, 19 nt, Artificial Sequence
  Description of Artificial Sequence: Synthetic oligonucleotide
  Sense strand starting at position 280 of SEQ ID NO: 1888701
acagaaauuugaugacaaa

SEQ ID NO: 2550985 - RNA, 19 nt, Artificial Sequence
  Description of Artificial Sequence: Synthetic oligonucleotide
  Antisense strand to SEQ ID NO: 2550984
uuugucaucaaauuucugu

SEQ ID NO: 2550986 - RNA, 19 nt, Artificial Sequence
  Description of Artificial Sequence: Synthetic oligonucleotide
  Sense strand starting at position 3980 of SEQ ID NO: 1888701
acacaaucuccaugugaga

SEQ ID NO: 2550987 - RNA, 19 nt, Artificial Sequence
  Description of Artificial Sequence: Synthetic oligonucleotide
  Antisense strand to SEQ ID NO: 2550986
ucucacauggagauugugu

SEQ ID NO: 2550988 - RNA, 19 nt, Artificial Sequence
  Description of Artificial Sequence: Synthetic oligonucleotide
  Sense strand starting at position 3764 of SEQ ID NO: 1888701
ugauguccugaggauaugu

SEQ ID NO: 2550989 - RNA, 19 nt, Artificial Sequence
  Description of Artificial Sequence: Synthetic oligonucleotide
  Antisense strand to SEQ ID NO: 2550988
acauauccucaggacauca

SEQ ID NO: 2550990 - RNA, 19 nt, Artificial Sequence
  Description of Artificial Sequence: Synthetic oligonucleotide
  Sense strand starting at position 2095 of SEQ ID NO: 1888701
uggaauucggaccagcauu

SEQ ID NO: 2550991 - RNA, 19 nt, Artificial Sequence
  Description of Artificial Sequence: Synthetic oligonucleotide
  Antisense strand to SEQ ID NO: 2550990
aaugcugguccgaauucca

SEQ ID NO: 2550992 - RNA, 19 nt, Artificial Sequence
  Description of Artificial Sequence: Synthetic oligonucleotide
  Sense strand starting at position 7 of SEQ ID NO: 1888701
cuuagauucuaagugauca

SEQ ID NO: 2550993 - RNA, 19 nt, Artificial Sequence
  Description of Artificial Sequence: Synthetic oligonucleotide
  Antisense strand to SEQ ID NO: 2550992
ugaucacuuagaaucuaag

SEQ ID NO: 2550994 - RNA, 19 nt, Artificial Sequence
  Description of Artificial Sequence: Synthetic oligonucleotide
  Sense strand starting at position 399 of SEQ ID NO: 1888701
uuccauaaucagggcuaaa

SEQ ID NO: 2550995 - RNA, 19 nt, Artificial Sequence
  Description of Artificial Sequence: Synthetic oligonucleotide
  Antisense strand to SEQ ID NO: 2550994
uuuagcccugauuauggaa

SEQ ID NO: 2550996 - RNA, 19 nt, Artificial Sequence
  Description of Artificial Sequence: Synthetic oligonucleotide
  Sense strand starting at position 2753 of SEQ ID NO: 1888701
acaguuugacuccaagcau

SEQ ID NO: 2550997 - RNA, 19 nt, Artificial Sequence
  Description of Artificial Sequence: Synthetic oligonucleotide
  Antisense strand to SEQ ID NO: 2550996
augcuuggagucaaacugu

SEQ ID NO: 2550998 - RNA, 19 nt, Artificial Sequence
  Description of Artificial Sequence: Synthetic oligonucleotide
  Sense strand starting at position 2960 of SEQ ID NO: 1888701
cgaguuagcaucuagacaa

SEQ ID NO: 2550999 - RNA, 19 nt, Artificial Sequence
  Description of Artificial Sequence: Synthetic oligonucleotide
  Antisense strand to SEQ ID NO: 2550998
uugucuagaugcuaacucg

SEQ ID NO: 2551000 - RNA, 19 nt, Artificial Sequence
  Description of Artificial Sequence: Synthetic oligonucleotide
  Sense strand starting at position 179 of SEQ ID NO: 1888701
gcagacccuguaugagaaa

SEQ ID NO: 2551001 - RNA, 19 nt, Artificial Sequence
  Description of Artificial Sequence: Synthetic oligonucleotide
  Antisense strand to SEQ ID NO: 2551000
uuucucauacagggucugc

SEQ ID NO: 2551002 - RNA, 19 nt, Artificial Sequence
  Description of Artificial Sequence: Synthetic oligonucleotide
  Sense strand starting at position 291 of SEQ ID NO: 1888701
augacaaagcuuugucaaa

SEQ ID NO: 2551003 - RNA, 19 nt, Artificial Sequence
  Description of Artificial Sequence: Synthetic oligonucleotide
  Antisense strand to SEQ ID NO: 2551002
uuugacaaagcuuugucau

SEQ ID NO: 2551004 - RNA, 19 nt, Artificial Sequence
  Description of Artificial Sequence: Synthetic oligonucleotide
  Sense strand starting at position 3458 of SEQ ID NO: 1888701
ugagauaauucuuuggcua

SEQ ID NO: 2551005 - RNA, 19 nt, Artificial Sequence
  Description of Artificial Sequence: Synthetic oligonucleotide
  Antisense strand to SEQ ID NO: 2551004
uagccaaagaauuaucuca

SEQ ID NO: 2551006 - RNA, 19 nt, Artificial Sequence
  Description of Artificial Sequence: Synthetic oligonucleotide
  Sense strand starting at position 2029 of SEQ ID NO: 1888701
cgcgaguucgggcucugau

SEQ ID NO: 2551007 - RNA, 19 nt, Artificial Sequence
  Description of Artificial Sequence: Synthetic oligonucleotide
  Antisense strand to SEQ ID NO: 2551006
aucagagcccgaacucgcg

SEQ ID NO: 2551008 - RNA, 19 nt, Artificial Sequence
  Description of Artificial Sequence: Synthetic oligonucleotide
  Sense strand starting at position 1020 of SEQ ID NO: 1888701
gcaaaugcuccuggagaaa

SEQ ID NO: 2551009 - RNA, 19 nt, Artificial Sequence
  Description of Artificial Sequence: Synthetic oligonucleotide
  Antisense strand to SEQ ID NO: 2551008
uuucuccaggagcauuugc

SEQ ID NO: 2551010 - RNA, 19 nt, Artificial Sequence
  Description of Artificial Sequence: Synthetic oligonucleotide
  Sense strand starting at position 3457 of SEQ ID NO: 1888701
uugagauaauucuuuggcu

SEQ ID NO: 2551011 - RNA, 19 nt, Artificial Sequence
  Description of Artificial Sequence: Synthetic oligonucleotide
  Antisense strand to SEQ ID NO: 2551010
agccaaagaauuaucucaa

SEQ ID NO: 2551012 - RNA, 19 nt, Artificial Sequence
  Description of Artificial Sequence: Synthetic oligonucleotide
  Sense strand starting at position 3863 of SEQ ID NO: 1888701
acugguucugucuggaaag

SEQ ID NO: 2551013 - RNA, 19 nt, Artificial Sequence
  Description of Artificial Sequence: Synthetic oligonucleotide
  Antisense strand to SEQ ID NO: 2551012
cuuuccagacagaaccagu

SEQ ID NO: 2551014 - RNA, 19 nt, Artificial Sequence
  Description of Artificial Sequence: Synthetic oligonucleotide
  Sense strand starting at position 3061 of SEQ ID NO: 1888701
acaauaagcuaugugggua

SEQ ID NO: 2551015 - RNA, 19 nt, Artificial Sequence
  Description of Artificial Sequence: Synthetic oligonucleotide
  Antisense strand to SEQ ID NO: 2551014
uacccacauagcuuauugu

SEQ ID NO: 2551016 - RNA, 19 nt, Artificial Sequence
  Description of Artificial Sequence: Synthetic oligonucleotide
  Sense strand starting at position 891 of SEQ ID NO: 1888701
aaacgugacucugugaaug

SEQ ID NO: 2551017 - RNA, 19 nt, Artificial Sequence
  Description of Artificial Sequence: Synthetic oligonucleotide
  Antisense strand to SEQ ID NO: 2551016
cauucacagagucacguuu

SEQ ID NO: 2551018 - RNA, 19 nt, Artificial Sequence
  Description of Artificial Sequence: Synthetic oligonucleotide
  Sense strand starting at position 2879 of SEQ ID NO: 1888701
ucauaaccucgcugaauaa

SEQ ID NO: 2551019 - RNA, 19 nt, Artificial Sequence
  Description of Artificial Sequence: Synthetic oligonucleotide
  Antisense strand to SEQ ID NO: 2551018
uuauucagcgagguuauga

SEQ ID NO: 2551020 - RNA, 19 nt, Artificial Sequence
  Description of Artificial Sequence: Synthetic oligonucleotide
  Sense strand starting at position 388 of SEQ ID NO: 1888701
gguauagcaucuuccauaa

SEQ ID NO: 2551021 - RNA, 19 nt, Artificial Sequence
  Description of Artificial Sequence: Synthetic oligonucleotide
  Antisense strand to SEQ ID NO: 2551020
uuauggaagaugcuauacc

SEQ ID NO: 2551022 - RNA, 19 nt, Artificial Sequence
  Description of Artificial Sequence: Synthetic oligonucleotide
  Sense strand starting at position 3773 of SEQ ID NO: 1888701
gaggauaugugcccaaggu

SEQ ID NO: 2551023 - RNA, 19 nt, Artificial Sequence
  Description of Artificial Sequence: Synthetic oligonucleotide
  Antisense strand to SEQ ID NO: 2551022
accuugggcacauauccuc

SEQ ID NO: 2551024 - RNA, 19 nt, Artificial Sequence
  Description of Artificial Sequence: Synthetic oligonucleotide
  Sense strand starting at position 677 of SEQ ID NO: 1888701
ccauaauagcuaugguuau

SEQ ID NO: 2551025 - RNA, 19 nt, Artificial Sequence
  Description of Artificial Sequence: Synthetic oligonucleotide
  Antisense strand to SEQ ID NO: 2551024
auaaccauagcuauuaugg

SEQ ID NO: 2551026 - RNA, 19 nt, Artificial Sequence
  Description of Artificial Sequence: Synthetic oligonucleotide
  Sense strand starting at position 805 of SEQ ID NO: 1888701
gcagguguuagccgaauuu

SEQ ID NO: 2551027 - RNA, 19 nt, Artificial Sequence
  Description of Artificial Sequence: Synthetic oligonucleotide
  Antisense strand to SEQ ID NO: 2551026
aaauucggcuaacaccugc

SEQ ID NO: 2551028 - RNA, 19 nt, Artificial Sequence
  Description of Artificial Sequence: Synthetic oligonucleotide
  Sense strand starting at position 3947 of SEQ ID NO: 1888701
uccuuugggucuuugauca

SEQ ID NO: 2551029 - RNA, 19 nt, Artificial Sequence
  Description of Artificial Sequence: Synthetic oligonucleotide
  Antisense strand to SEQ ID NO: 2551028
ugaucaaagacccaaagga

SEQ ID NO: 2551030 - RNA, 19 nt, Artificial Sequence
  Description of Artificial Sequence: Synthetic oligonucleotide
  Sense strand starting at position 767 of SEQ ID NO: 1888701
uguacuaugucaucuaauc

SEQ ID NO: 2551031 - RNA, 19 nt, Artificial Sequence
  Description of Artificial Sequence: Synthetic oligonucleotide
  Antisense strand to SEQ ID NO: 2551030
gauuagaugacauaguaca

SEQ ID NO: 2551032 - RNA, 19 nt, Artificial Sequence
  Description of Artificial Sequence: Synthetic oligonucleotide
  Sense strand starting at position 546 of SEQ ID NO: 1888701
gugacauccuacucuucuu

SEQ ID NO: 2551033 - RNA, 19 nt, Artificial Sequence
  Description of Artificial Sequence: Synthetic oligonucleotide
  Antisense strand to SEQ ID NO: 2551032
aagaagaguaggaugucac

SEQ ID NO: 2551034 - RNA, 19 nt, Artificial Sequence
  Description of Artificial Sequence: Synthetic oligonucleotide
  Sense strand starting at position 3646 of SEQ ID NO: 1888701
ggcacaugugcaugagaac

SEQ ID NO: 2551035 - RNA, 19 nt, Artificial Sequence
  Description of Artificial Sequence: Synthetic oligonucleotide
  Antisense strand to SEQ ID NO: 2551034
guucucaugcacaugugcc

SEQ ID NO: 2551036 - RNA, 19 nt, Artificial Sequence
  Description of Artificial Sequence: Synthetic oligonucleotide
  Sense strand starting at position 2946 of SEQ ID NO: 1888701
ugaguucuucucuacgagu

SEQ ID NO: 2551037 - RNA, 19 nt, Artificial Sequence
  Description of Artificial Sequence: Synthetic oligonucleotide
  Antisense strand to SEQ ID NO: 2551036
acucguagagaagaacuca

SEQ ID NO: 2551038 - RNA, 19 nt, Artificial Sequence
  Description of Artificial Sequence: Synthetic oligonucleotide
  Sense strand starting at position 1211 of SEQ ID NO: 1888701
cacggucucacaggugaau

SEQ ID NO: 2551039 - RNA, 19 nt, Artificial Sequence
  Description of Artificial Sequence: Synthetic oligonucleotide
  Antisense strand to SEQ ID NO: 2551038
auucaccugugagaccgug

SEQ ID NO: 2551040 - RNA, 19 nt, Artificial Sequence
  Description of Artificial Sequence: Synthetic oligonucleotide
  Sense strand starting at position 2945 of SEQ ID NO: 1888701
cugaguucuucucuacgag

SEQ ID NO: 2551041 - RNA, 19 nt, Artificial Sequence
  Description of Artificial Sequence: Synthetic oligonucleotide
  Antisense strand to SEQ ID NO: 2551040
cucguagagaagaacucag

SEQ ID NO: 2551042 - RNA, 19 nt, Artificial Sequence
  Description of Artificial Sequence: Synthetic oligonucleotide
  Sense strand starting at position 750 of SEQ ID NO: 1888701
gcacguacucaucaguaug

SEQ ID NO: 2551043 - RNA, 19 nt, Artificial Sequence
  Description of Artificial Sequence: Synthetic oligonucleotide
  Antisense strand to SEQ ID NO: 2551042
cauacugaugaguacgugc

SEQ ID NO: 2551044 - RNA, 19 nt, Artificial Sequence
  Description of Artificial Sequence: Synthetic oligonucleotide
  Sense strand starting at position 999 of SEQ ID NO: 1888701
cguuuagaugccggaagaa

SEQ ID NO: 2551045 - RNA, 19 nt, Artificial Sequence
  Description of Artificial Sequence: Synthetic oligonucleotide
  Antisense strand to SEQ ID NO: 2551044
uucuuccggcaucuaaacg

SEQ ID NO: 2551046 - RNA, 19 nt, Artificial Sequence
  Description of Artificial Sequence: Synthetic oligonucleotide
  Sense strand starting at position 262 of SEQ ID NO: 1888702
ccaggaguucugcaggaga

SEQ ID NO: 2551047 - RNA, 19 nt, Artificial Sequence
  Description of Artificial Sequence: Synthetic oligonucleotide
  Antisense strand to SEQ ID NO: 2551046
ucuccugcagaacuccugg

SEQ ID NO: 2551048 - RNA, 19 nt, Artificial Sequence
  Description of Artificial Sequence: Synthetic oligonucleotide
  Sense strand starting at position 604 of SEQ ID NO: 1888702
gguagauccagccagacau

SEQ ID NO: 2551049 - RNA, 19 nt, Artificial Sequence
  Description of Artificial Sequence: Synthetic oligonucleotide
  Antisense strand to SEQ ID NO: 2551048
augucuggcuggaucuacc

SEQ ID NO: 2551050 - RNA, 19 nt, Artificial Sequence
  Description of Artificial Sequence: Synthetic oligonucleotide
  Sense strand starting at position 264 of SEQ ID NO: 1888702
aggaguucugcaggagacu

SEQ ID NO: 2551051 - RNA, 19 nt, Artificial Sequence
  Description of Artificial Sequence: Synthetic oligonucleotide
  Antisense strand to SEQ ID NO: 2551050
agucuccugcagaacuccu

SEQ ID NO: 2551052 - RNA, 19 nt, Artificial Sequence
  Description of Artificial Sequence: Synthetic oligonucleotide
  Sense strand starting at position 2246 of SEQ ID NO: 1888702
ucguuugucgucucuucua

SEQ ID NO: 2551053 - RNA, 19 nt, Artificial Sequence
  Description of Artificial Sequence: Synthetic oligonucleotide
  Antisense strand to SEQ ID NO: 2551052
uagaagagacgacaaacga

SEQ ID NO: 2551054 - RNA, 19 nt, Artificial Sequence
  Description of Artificial Sequence: Synthetic oligonucleotide
  Sense strand starting at position 2803 of SEQ ID NO: 1888702
ggcuacuucuacccagaca

SEQ ID NO: 2551055 - RNA, 19 nt, Artificial Sequence
  Description of Artificial Sequence: Synthetic oligonucleotide
  Antisense strand to SEQ ID NO: 2551054
ugucuggguagaaguagcc

SEQ ID NO: 2551056 - RNA, 19 nt, Artificial Sequence
  Description of Artificial Sequence: Synthetic oligonucleotide
  Sense strand starting at position 590 of SEQ ID NO: 1888702
ugugaauacuuucugguag

SEQ ID NO: 2551057 - RNA, 19 nt, Artificial Sequence
  Description of Artificial Sequence: Synthetic oligonucleotide
  Antisense strand to SEQ ID NO: 2551056
cuaccagaaaguauucaca

SEQ ID NO: 2551058 - RNA, 19 nt, Artificial Sequence
  Description of Artificial Sequence: Synthetic oligonucleotide
  Sense strand starting at position 2859 of SEQ ID NO: 1888702
caguauggcuuuccuagga

SEQ ID NO: 2551059 - RNA, 19 nt, Artificial Sequence
  Description of Artificial Sequence: Synthetic oligonucleotide
  Antisense strand to SEQ ID NO: 2551058
uccuaggaaagccauacug

SEQ ID NO: 2551060 - RNA, 19 nt, Artificial Sequence
  Description of Artificial Sequence: Synthetic oligonucleotide
  Sense strand starting at position 3117 of SEQ ID NO: 1888702
gugauucucuccucccuca

SEQ ID NO: 2551061 - RNA, 19 nt, Artificial Sequence
  Description of Artificial Sequence: Synthetic oligonucleotide
  Antisense strand to SEQ ID NO: 2551060
ugagggaggagagaaucac

SEQ ID NO: 2551062 - RNA, 19 nt, Artificial Sequence
  Description of Artificial Sequence: Synthetic oligonucleotide
  Sense strand starting at position 2894 of SEQ ID NO: 1888702
uugugagccucuuccucua

SEQ ID NO: 2551063 - RNA, 19 nt, Artificial Sequence
  Description of Artificial Sequence: Synthetic oligonucleotide
  Antisense strand to SEQ ID NO: 2551062
uagaggaagaggcucacaa

SEQ ID NO: 2551064 - RNA, 19 nt, Artificial Sequence
  Description of Artificial Sequence: Synthetic oligonucleotide
  Sense strand starting at position 2896 of SEQ ID NO: 1888702
gugagccucuuccucuauu

SEQ ID NO: 2551065 - RNA, 19 nt, Artificial Sequence
  Description of Artificial Sequence: Synthetic oligonucleotide
  Antisense strand to SEQ ID NO: 2551064
aauagaggaagaggcucac

SEQ ID NO: 2551066 - RNA, 19 nt, Artificial Sequence
  Description of Artificial Sequence: Synthetic oligonucleotide
  Sense strand starting at position 592 of SEQ ID NO: 1888702
ugaauacuuucugguagau

SEQ ID NO: 2551067 - RNA, 19 nt, Artificial Sequence
  Description of Artificial Sequence: Synthetic oligonucleotide
  Antisense strand to SEQ ID NO: 2551066
aucuaccagaaaguauuca

SEQ ID NO: 2551068 - RNA, 19 nt, Artificial Sequence
  Description of Artificial Sequence: Synthetic oligonucleotide
  Sense strand starting at position 591 of SEQ ID NO: 1888702
gugaauacuuucugguaga

SEQ ID NO: 2551069 - RNA, 19 nt, Artificial Sequence
  Description of Artificial Sequence: Synthetic oligonucleotide
  Antisense strand to SEQ ID NO: 2551068
ucuaccagaaaguauucac

SEQ ID NO: 2551070 - RNA, 19 nt, Artificial Sequence
  Description of Artificial Sequence: Synthetic oligonucleotide
  Sense strand starting at position 778 of SEQ ID NO: 1888702
cugcgugacucuggacaaa

SEQ ID NO: 2551071 - RNA, 19 nt, Artificial Sequence
  Description of Artificial Sequence: Synthetic oligonucleotide
  Antisense strand to SEQ ID NO: 2551070
uuuguccagagucacgcag

SEQ ID NO: 2551072 - RNA, 19 nt, Artificial Sequence
  Description of Artificial Sequence: Synthetic oligonucleotide
  Sense strand starting at position 2505 of SEQ ID NO: 1888702
ggcacaaagucgugggacu

SEQ ID NO: 2551073 - RNA, 19 nt, Artificial Sequence
  Description of Artificial Sequence: Synthetic oligonucleotide
  Antisense strand to SEQ ID NO: 2551072
agucccacgacuuugugcc

SEQ ID NO: 2551074 - RNA, 19 nt, Artificial Sequence
  Description of Artificial Sequence: Synthetic oligonucleotide
  Sense strand starting at position 999 of SEQ ID NO: 1888702
gcccacuguucuggcagua

SEQ ID NO: 2551075 - RNA, 19 nt, Artificial Sequence
  Description of Artificial Sequence: Synthetic oligonucleotide
  Antisense strand to SEQ ID NO: 2551074
uacugccagaacagugggc

SEQ ID NO: 2551076 - RNA, 19 nt, Artificial Sequence
  Description of Artificial Sequence: Synthetic oligonucleotide
  Sense strand starting at position 3336 of SEQ ID NO: 1888703
ucugcuacucuagaauaag

SEQ ID NO: 2551077 - RNA, 19 nt, Artificial Sequence
  Description of Artificial Sequence: Synthetic oligonucleotide
  Antisense strand to SEQ ID NO: 2551076
cuuauucuagaguagcaga

SEQ ID NO: 2551078 - RNA, 19 nt, Artificial Sequence
  Description of Artificial Sequence: Synthetic oligonucleotide
  Sense strand starting at position 2267 of SEQ ID NO: 1888703
ggagaagugguaggauauu

SEQ ID NO: 2551079 - RNA, 19 nt, Artificial Sequence
  Description of Artificial Sequence: Synthetic oligonucleotide
  Antisense strand to SEQ ID NO: 2551078
aauauccuaccacuucucc

SEQ ID NO: 2551080 - RNA, 19 nt, Artificial Sequence
  Description of Artificial Sequence: Synthetic oligonucleotide
  Sense strand starting at position 151 of SEQ ID NO: 1888703
auuuaucugcaacguuuaa

SEQ ID NO: 2551081 - RNA, 19 nt, Artificial Sequence
  Description of Artificial Sequence: Synthetic oligonucleotide
  Antisense strand to SEQ ID NO: 2551080
uuaaacguugcagauaaau

SEQ ID NO: 2551082 - RNA, 19 nt, Artificial Sequence
  Description of Artificial Sequence: Synthetic oligonucleotide
  Sense strand starting at position 3823 of SEQ ID NO: 1888703
acugaauauuggguuuaua

SEQ ID NO: 2551083 - RNA, 19 nt, Artificial Sequence
  Description of Artificial Sequence: Synthetic oligonucleotide
  Antisense strand to SEQ ID NO: 2551082
uauaaacccaauauucagu

SEQ ID NO: 2551084 - RNA, 19 nt, Artificial Sequence
  Description of Artificial Sequence: Synthetic oligonucleotide
  Sense strand starting at position 2193 of SEQ ID NO: 1888703
ugaucaaggaauugugagu

SEQ ID NO: 2551085 - RNA, 19 nt, Artificial Sequence
  Description of Artificial Sequence: Synthetic oligonucleotide
  Antisense strand to SEQ ID NO: 2551084
acucacaauuccuugauca

SEQ ID NO: 2551086 - RNA, 19 nt, Artificial Sequence
  Description of Artificial Sequence: Synthetic oligonucleotide
  Sense strand starting at position 584 of SEQ ID NO: 1888703
auguucuaagggugaaaug

SEQ ID NO: 2551087 - RNA, 19 nt, Artificial Sequence
  Description of Artificial Sequence: Synthetic oligonucleotide
  Antisense strand to SEQ ID NO: 2551086
cauuucacccuuagaacau

SEQ ID NO: 2551088 - RNA, 19 nt, Artificial Sequence
  Description of Artificial Sequence: Synthetic oligonucleotide
  Sense strand starting at position 3862 of SEQ ID NO: 1888703
guuuauacaguguaucaaa

SEQ ID NO: 2551089 - RNA, 19 nt, Artificial Sequence
  Description of Artificial Sequence: Synthetic oligonucleotide
  Antisense strand to SEQ ID NO: 2551088
uuugauacacuguauaaac

SEQ ID NO: 2551090 - RNA, 19 nt, Artificial Sequence
  Description of Artificial Sequence: Synthetic oligonucleotide
  Sense strand starting at position 3903 of SEQ ID NO: 1888703
cuagaugauguggguagau

SEQ ID NO: 2551091 - RNA, 19 nt, Artificial Sequence
  Description of Artificial Sequence: Synthetic oligonucleotide
  Antisense strand to SEQ ID NO: 2551090
aucuacccacaucaucuag

SEQ ID NO: 2551092 - RNA, 19 nt, Artificial Sequence
  Description of Artificial Sequence: Synthetic oligonucleotide
  Sense strand starting at position 699 of SEQ ID NO: 1888703
gagcguguauuuccuuaaa

SEQ ID NO: 2551093 - RNA, 19 nt, Artificial Sequence
  Description of Artificial Sequence: Synthetic oligonucleotide
  Antisense strand to SEQ ID NO: 2551092
uuuaaggaaauacacgcuc

SEQ ID NO: 2551094 - RNA, 19 nt, Artificial Sequence
  Description of Artificial Sequence: Synthetic oligonucleotide
  Sense strand starting at position 2273 of SEQ ID NO: 1888703
gugguaggauauuccuaaa

SEQ ID NO: 2551095 - RNA, 19 nt, Artificial Sequence
  Description of Artificial Sequence: Synthetic oligonucleotide
  Antisense strand to SEQ ID NO: 2551094
uuuaggaauauccuaccac

SEQ ID NO: 2551096 - RNA, 19 nt, Artificial Sequence
  Description of Artificial Sequence: Synthetic oligonucleotide
  Sense strand starting at position 3514 of SEQ ID NO: 1888703
auuugucuucccugcuuua

SEQ ID NO: 2551097 - RNA, 19 nt, Artificial Sequence
  Description of Artificial Sequence: Synthetic oligonucleotide
  Antisense strand to SEQ ID NO: 2551096
uaaagcagggaagacaaau

SEQ ID NO: 2551098 - RNA, 19 nt, Artificial Sequence
  Description of Artificial Sequence: Synthetic oligonucleotide
  Sense strand starting at position 1013 of SEQ ID NO: 1888703
uuuacuauggccuaguaau

SEQ ID NO: 2551099 - RNA, 19 nt, Artificial Sequence
  Description of Artificial Sequence: Synthetic oligonucleotide
  Antisense strand to SEQ ID NO: 2551098
auuacuaggccauaguaaa

SEQ ID NO: 2551100 - RNA, 19 nt, Artificial Sequence
  Description of Artificial Sequence: Synthetic oligonucleotide
  Sense strand starting at position 887 of SEQ ID NO: 1888703
gcccuaacuccacagaugu

SEQ ID NO: 2551101 - RNA, 19 nt, Artificial Sequence
  Description of Artificial Sequence: Synthetic oligonucleotide
  Antisense strand to SEQ ID NO: 2551100
acaucuguggaguuagggc

SEQ ID NO: 2551102 - RNA, 19 nt, Artificial Sequence
  Description of Artificial Sequence: Synthetic oligonucleotide
  Sense strand starting at position 986 of SEQ ID NO: 1888703
uucucaugguucuuagaag

SEQ ID NO: 2551103 - RNA, 19 nt, Artificial Sequence
  Description of Artificial Sequence: Synthetic oligonucleotide
  Antisense strand to SEQ ID NO: 2551102
cuucuaagaaccaugagaa

SEQ ID NO: 2551104 - RNA, 19 nt, Artificial Sequence
  Description of Artificial Sequence: Synthetic oligonucleotide
  Sense strand starting at position 3734 of SEQ ID NO: 1888703
uaacuuuggucagugacag

SEQ ID NO: 2551105 - RNA, 19 nt, Artificial Sequence
  Description of Artificial Sequence: Synthetic oligonucleotide
  Antisense strand to SEQ ID NO: 2551104
cugucacugaccaaaguua

SEQ ID NO: 2551106 - RNA, 19 nt, Artificial Sequence
  Description of Artificial Sequence: Synthetic oligonucleotide
  Sense strand starting at position 9 of SEQ ID NO: 1888703
gcaaacaucugaguacuau

SEQ ID NO: 2551107 - RNA, 19 nt, Artificial Sequence
  Description of Artificial Sequence: Synthetic oligonucleotide
  Antisense strand to SEQ ID NO: 2551106
auaguacucagauguuugc

SEQ ID NO: 2551108 - RNA, 19 nt, Artificial Sequence
  Description of Artificial Sequence: Synthetic oligonucleotide
  Sense strand starting at position 1090 of SEQ ID NO: 1888703
ucuagcugauccuugaaca

SEQ ID NO: 2551109 - RNA, 19 nt, Artificial Sequence
  Description of Artificial Sequence: Synthetic oligonucleotide
  Antisense strand to SEQ ID NO: 2551108
uguucaaggaucagcuaga

SEQ ID NO: 2551110 - RNA, 19 nt, Artificial Sequence
  Description of Artificial Sequence: Synthetic oligonucleotide
  Sense strand starting at position 701 of SEQ ID NO: 1888703
gcguguauuuccuuaaauc

SEQ ID NO: 2551111 - RNA, 19 nt, Artificial Sequence
  Description of Artificial Sequence: Synthetic oligonucleotide
  Antisense strand to SEQ ID NO: 2551110
gauuuaaggaaauacacgc

SEQ ID NO: 2551112 - RNA, 19 nt, Artificial Sequence
  Description of Artificial Sequence: Synthetic oligonucleotide
  Sense strand starting at position 3167 of SEQ ID NO: 1888703
gaugcacuucucugagacu

SEQ ID NO: 2551113 - RNA, 19 nt, Artificial Sequence
  Description of Artificial Sequence: Synthetic oligonucleotide
  Antisense strand to SEQ ID NO: 2551112
agucucagagaagugcauc

SEQ ID NO: 2551114 - RNA, 19 nt, Artificial Sequence
  Description of Artificial Sequence: Synthetic oligonucleotide
  Sense strand starting at position 2254 of SEQ ID NO: 1888703
gagauuuguugauggagaa

SEQ ID NO: 2551115 - RNA, 19 nt, Artificial Sequence
  Description of Artificial Sequence: Synthetic oligonucleotide
  Antisense strand to SEQ ID NO: 2551114
uucuccaucaacaaaucuc

SEQ ID NO: 2551116 - RNA, 19 nt, Artificial Sequence
  Description of Artificial Sequence: Synthetic oligonucleotide
  Sense strand starting at position 2241 of SEQ ID NO: 1888703
acggcagugaugggagauu

SEQ ID NO: 2551117 - RNA, 19 nt, Artificial Sequence
  Description of Artificial Sequence: Synthetic oligonucleotide
  Antisense strand to SEQ ID NO: 2551116
aaucucccaucacugccgu

SEQ ID NO: 2551118 - RNA, 19 nt, Artificial Sequence
  Description of Artificial Sequence: Synthetic oligonucleotide
  Sense strand starting at position 2199 of SEQ ID NO: 1888703
aggaauugugagugggucu

SEQ ID NO: 2551119 - RNA, 19 nt, Artificial Sequence
  Description of Artificial Sequence: Synthetic oligonucleotide
  Antisense strand to SEQ ID NO: 2551118
agacccacucacaauuccu

SEQ ID NO: 2551120 - RNA, 19 nt, Artificial Sequence
  Description of Artificial Sequence: Synthetic oligonucleotide
  Sense strand starting at position 3512 of SEQ ID NO: 1888703
guauuugucuucccugcuu

SEQ ID NO: 2551121 - RNA, 19 nt, Artificial Sequence
  Description of Artificial Sequence: Synthetic oligonucleotide
  Antisense strand to SEQ ID NO: 2551120
aagcagggaagacaaauac

SEQ ID NO: 2551122 - RNA, 19 nt, Artificial Sequence
  Description of Artificial Sequence: Synthetic oligonucleotide
  Sense strand starting at position 3529 of SEQ ID NO: 1888703
uuuaucggucuccauagua

SEQ ID NO: 2551123 - RNA, 19 nt, Artificial Sequence
  Description of Artificial Sequence: Synthetic oligonucleotide
  Antisense strand to SEQ ID NO: 2551122
uacuauggagaccgauaaa

SEQ ID NO: 2551124 - RNA, 19 nt, Artificial Sequence
  Description of Artificial Sequence: Synthetic oligonucleotide
  Sense strand starting at position 3621 of SEQ ID NO: 1888703
auguaagggccaugaguuu

SEQ ID NO: 2551125 - RNA, 19 nt, Artificial Sequence
  Description of Artificial Sequence: Synthetic oligonucleotide
  Antisense strand to SEQ ID NO: 2551124
aaacucauggcccuuacau

SEQ ID NO: 2551126 - RNA, 19 nt, Artificial Sequence
  Description of Artificial Sequence: Synthetic oligonucleotide
  Sense strand starting at position 625 of SEQ ID NO: 1888703
agcacaguacuuggcauaa

SEQ ID NO: 2551127 - RNA, 19 nt, Artificial Sequence
  Description of Artificial Sequence: Synthetic oligonucleotide
  Antisense strand to SEQ ID NO: 2551126
uuaugccaaguacugugcu

SEQ ID NO: 2551128 - RNA, 19 nt, Artificial Sequence
  Description of Artificial Sequence: Synthetic oligonucleotide
  Sense strand starting at position 1303 of SEQ ID NO: 1888703
ugaguugucuccucuagac

SEQ ID NO: 2551129 - RNA, 19 nt, Artificial Sequence
  Description of Artificial Sequence: Synthetic oligonucleotide
  Antisense strand to SEQ ID NO: 2551128
gucuagaggagacaacuca

SEQ ID NO: 2551130 - RNA, 19 nt, Artificial Sequence
  Description of Artificial Sequence: Synthetic oligonucleotide
  Sense strand starting at position 110 of SEQ ID NO: 1888703
auguccucauguuucuuaa

SEQ ID NO: 2551131 - RNA, 19 nt, Artificial Sequence
  Description of Artificial Sequence: Synthetic oligonucleotide
  Antisense strand to SEQ ID NO: 2551130
uuaagaaacaugaggacau

SEQ ID NO: 2551132 - RNA, 19 nt, Artificial Sequence
  Description of Artificial Sequence: Synthetic oligonucleotide
  Sense strand starting at position 3225 of SEQ ID NO: 1888703
agucaaagccucugcaaca

SEQ ID NO: 2551133 - RNA, 19 nt, Artificial Sequence
  Description of Artificial Sequence: Synthetic oligonucleotide
  Antisense strand to SEQ ID NO: 2551132
uguugcagaggcuuugacu

SEQ ID NO: 2551134 - RNA, 19 nt, Artificial Sequence
  Description of Artificial Sequence: Synthetic oligonucleotide
  Sense strand starting at position 1233 of SEQ ID NO: 1888703
ccaguacuccacuguauuc

SEQ ID NO: 2551135 - RNA, 19 nt, Artificial Sequence
  Description of Artificial Sequence: Synthetic oligonucleotide
  Antisense strand to SEQ ID NO: 2551134
gaauacaguggaguacugg

SEQ ID NO: 2551136 - RNA, 19 nt, Artificial Sequence
  Description of Artificial Sequence: Synthetic oligonucleotide
  Sense strand starting at position 847 of SEQ ID NO: 1888703
gucacugagucaguccauu

SEQ ID NO: 2551137 - RNA, 19 nt, Artificial Sequence
  Description of Artificial Sequence: Synthetic oligonucleotide
  Antisense strand to SEQ ID NO: 2551136
aauggacugacucagugac

SEQ ID NO: 2551138 - RNA, 19 nt, Artificial Sequence
  Description of Artificial Sequence: Synthetic oligonucleotide
  Sense strand starting at position 3810 of SEQ ID NO: 1888703
gcuuauuuauaguacugaa

SEQ ID NO: 2551139 - RNA, 19 nt, Artificial Sequence
  Description of Artificial Sequence: Synthetic oligonucleotide
  Antisense strand to SEQ ID NO: 2551138
uucaguacuauaaauaagc

SEQ ID NO: 2551140 - RNA, 19 nt, Artificial Sequence
  Description of Artificial Sequence: Synthetic oligonucleotide
  Sense strand starting at position 3668 of SEQ ID NO: 1888703
uuagaauagucccucgcau

SEQ ID NO: 2551141 - RNA, 19 nt, Artificial Sequence
  Description of Artificial Sequence: Synthetic oligonucleotide
  Antisense strand to SEQ ID NO: 2551140
augcgagggacuauucuaa

SEQ ID NO: 2551142 - RNA, 19 nt, Artificial Sequence
  Description of Artificial Sequence: Synthetic oligonucleotide
  Sense strand starting at position 2592 of SEQ ID NO: 1888703
guugguucugacugugauu

SEQ ID NO: 2551143 - RNA, 19 nt, Artificial Sequence
  Description of Artificial Sequence: Synthetic oligonucleotide
  Antisense strand to SEQ ID NO: 2551142
aaucacagucagaaccaac

SEQ ID NO: 2551144 - RNA, 19 nt, Artificial Sequence
  Description of Artificial Sequence: Synthetic oligonucleotide
  Sense strand starting at position 20 of SEQ ID NO: 1888703
aguacuaucuaugagaaga

SEQ ID NO: 2551145 - RNA, 19 nt, Artificial Sequence
  Description of Artificial Sequence: Synthetic oligonucleotide
  Antisense strand to SEQ ID NO: 2551144
ucuucucauagauaguacu

SEQ ID NO: 2551146 - RNA, 19 nt, Artificial Sequence
  Description of Artificial Sequence: Synthetic oligonucleotide
  Sense strand starting at position 1343 of SEQ ID NO: 1888703
gacugugucugcuucuaga

SEQ ID NO: 2551147 - RNA, 19 nt, Artificial Sequence
  Description of Artificial Sequence: Synthetic oligonucleotide
  Antisense strand to SEQ ID NO: 2551146
ucuagaagcagacacaguc

SEQ ID NO: 2551148 - RNA, 19 nt, Artificial Sequence
  Description of Artificial Sequence: Synthetic oligonucleotide
  Sense strand starting at position 2981 of SEQ ID NO: 1888703
gaauguucgucugucacag

SEQ ID NO: 2551149 - RNA, 19 nt, Artificial Sequence
  Description of Artificial Sequence: Synthetic oligonucleotide
  Antisense strand to SEQ ID NO: 2551148
cugugacagacgaacauuc

SEQ ID NO: 2551150 - RNA, 19 nt, Artificial Sequence
  Description of Artificial Sequence: Synthetic oligonucleotide
  Sense strand starting at position 3528 of SEQ ID NO: 1888703
cuuuaucggucuccauagu

SEQ ID NO: 2551151 - RNA, 19 nt, Artificial Sequence
  Description of Artificial Sequence: Synthetic oligonucleotide
  Antisense strand to SEQ ID NO: 2551150
acuauggagaccgauaaag

SEQ ID NO: 2551152 - RNA, 19 nt, Artificial Sequence
  Description of Artificial Sequence: Synthetic oligonucleotide
  Sense strand starting at position 2856 of SEQ ID NO: 1888703
uaacacgugcucugucaaa

SEQ ID NO: 2551153 - RNA, 19 nt, Artificial Sequence
  Description of Artificial Sequence: Synthetic oligonucleotide
  Antisense strand to SEQ ID NO: 2551152
uuugacagagcacguguua

SEQ ID NO: 2551154 - RNA, 19 nt, Artificial Sequence
  Description of Artificial Sequence: Synthetic oligonucleotide
  Sense strand starting at position 3398 of SEQ ID NO: 1888703
aaguguucuucccuuggca

SEQ ID NO: 2551155 - RNA, 19 nt, Artificial Sequence
  Description of Artificial Sequence: Synthetic oligonucleotide
  Antisense strand to SEQ ID NO: 2551154
ugccaagggaagaacacuu

SEQ ID NO: 2551156 - RNA, 19 nt, Artificial Sequence
  Description of Artificial Sequence: Synthetic oligonucleotide
  Sense strand starting at position 1500 of SEQ ID NO: 1888704
guacauugcgcccugcaaa

SEQ ID NO: 2551157 - RNA, 19 nt, Artificial Sequence
  Description of Artificial Sequence: Synthetic oligonucleotide
  Antisense strand to SEQ ID NO: 2551156
uuugcagggcgcaauguac

SEQ ID NO: 2551158 - RNA, 19 nt, Artificial Sequence
  Description of Artificial Sequence: Synthetic oligonucleotide
  Sense strand starting at position 857 of SEQ ID NO: 1888704
uuaccagugucuguaauuu

SEQ ID NO: 2551159 - RNA, 19 nt, Artificial Sequence
  Description of Artificial Sequence: Synthetic oligonucleotide
  Antisense strand to SEQ ID NO: 2551158
aaauuacagacacugguaa

SEQ ID NO: 2551160 - RNA, 19 nt, Artificial Sequence
  Description of Artificial Sequence: Synthetic oligonucleotide
  Sense strand starting at position 1499 of SEQ ID NO: 1888704
gguacauugcgcccugcaa

SEQ ID NO: 2551161 - RNA, 19 nt, Artificial Sequence
  Description of Artificial Sequence: Synthetic oligonucleotide
  Antisense strand to SEQ ID NO: 2551160
uugcagggcgcaauguacc

SEQ ID NO: 2551162 - RNA, 19 nt, Artificial Sequence
  Description of Artificial Sequence: Synthetic oligonucleotide
  Sense strand starting at position 2823 of SEQ ID NO: 1888704
gguggugugcuuucuuagu

SEQ ID NO: 2551163 - RNA, 19 nt, Artificial Sequence
  Description of Artificial Sequence: Synthetic oligonucleotide
  Antisense strand to SEQ ID NO: 2551162
acuaagaaagcacaccacc

SEQ ID NO: 2551164 - RNA, 19 nt, Artificial Sequence
  Description of Artificial Sequence: Synthetic oligonucleotide
  Sense strand starting at position 2268 of SEQ ID NO: 1888704
cgcuguuuagccucuccua

SEQ ID NO: 2551165 - RNA, 19 nt, Artificial Sequence
  Description of Artificial Sequence: Synthetic oligonucleotide
  Antisense strand to SEQ ID NO: 2551164
uaggagaggcuaaacagcg

SEQ ID NO: 2551166 - RNA, 19 nt, Artificial Sequence
  Description of Artificial Sequence: Synthetic oligonucleotide
  Sense strand starting at position 744 of SEQ ID NO: 1888704
uaacaaugucagugaugac

SEQ ID NO: 2551167 - RNA, 19 nt, Artificial Sequence
  Description of Artificial Sequence: Synthetic oligonucleotide
  Antisense strand to SEQ ID NO: 2551166
gucaucacugacauuguua

SEQ ID NO: 2551168 - RNA, 19 nt, Artificial Sequence
  Description of Artificial Sequence: Synthetic oligonucleotide
  Sense strand starting at position 1267 of SEQ ID NO: 1888704
acguuuccugagcaaagaa

SEQ ID NO: 2551169 - RNA, 19 nt, Artificial Sequence
  Description of Artificial Sequence: Synthetic oligonucleotide
  Antisense strand to SEQ ID NO: 2551168
uucuuugcucaggaaacgu

SEQ ID NO: 2551170 - RNA, 19 nt, Artificial Sequence
  Description of Artificial Sequence: Synthetic oligonucleotide
  Sense strand starting at position 3769 of SEQ ID NO: 1888704
gaacuuuaagauggcgaca

SEQ ID NO: 2551171 - RNA, 19 nt, Artificial Sequence
  Description of Artificial Sequence: Synthetic oligonucleotide
  Antisense strand to SEQ ID NO: 2551170
ugucgccaucuuaaaguuc

SEQ ID NO: 2551172 - RNA, 19 nt, Artificial Sequence
  Description of Artificial Sequence: Synthetic oligonucleotide
  Sense strand starting at position 2915 of SEQ ID NO: 1888704
agcgcaucaucauuuacuu

SEQ ID NO: 2551173 - RNA, 19 nt, Artificial Sequence
  Description of Artificial Sequence: Synthetic oligonucleotide
  Antisense strand to SEQ ID NO: 2551172
aaguaaaugaugaugcgcu

SEQ ID NO: 2551174 - RNA, 19 nt, Artificial Sequence
  Description of Artificial Sequence: Synthetic oligonucleotide
  Sense strand starting at position 1426 of SEQ ID NO: 1888704
gggaaaugucuugguccag

SEQ ID NO: 2551175 - RNA, 19 nt, Artificial Sequence
  Description of Artificial Sequence: Synthetic oligonucleotide
  Antisense strand to SEQ ID NO: 2551174
cuggaccaagacauuuccc

SEQ ID NO: 2551176 - RNA, 19 nt, Artificial Sequence
  Description of Artificial Sequence: Synthetic oligonucleotide
  Sense strand starting at position 3008 of SEQ ID NO: 1888704
uugugaggccuugagaagu

SEQ ID NO: 2551177 - RNA, 19 nt, Artificial Sequence
  Description of Artificial Sequence: Synthetic oligonucleotide
  Antisense strand to SEQ ID NO: 2551176
acuucucaaggccucacaa

SEQ ID NO: 2551178 - RNA, 19 nt, Artificial Sequence
  Description of Artificial Sequence: Synthetic oligonucleotide
  Sense strand starting at position 3915 of SEQ ID NO: 1888704
gaacucugcugaguuaaug

SEQ ID NO: 2551179 - RNA, 19 nt, Artificial Sequence
  Description of Artificial Sequence: Synthetic oligonucleotide
  Antisense strand to SEQ ID NO: 2551178
cauuaacucagcagaguuc

SEQ ID NO: 2551180 - RNA, 19 nt, Artificial Sequence
  Description of Artificial Sequence: Synthetic oligonucleotide
  Sense strand starting at position 2747 of SEQ ID NO: 1888704
gcaacuuguaagugacaga

SEQ ID NO: 2551181 - RNA, 19 nt, Artificial Sequence
  Description of Artificial Sequence: Synthetic oligonucleotide
  Antisense strand to SEQ ID NO: 2551180
ucugucacuuacaaguugc

SEQ ID NO: 2551182 - RNA, 19 nt, Artificial Sequence
  Description of Artificial Sequence: Synthetic oligonucleotide
  Sense strand starting at position 1430 of SEQ ID NO: 1888704
aaugucuugguccagucau

SEQ ID NO: 2551183 - RNA, 19 nt, Artificial Sequence
  Description of Artificial Sequence: Synthetic oligonucleotide
  Antisense strand to SEQ ID NO: 2551182
augacuggaccaagacauu

SEQ ID NO: 2551184 - RNA, 19 nt, Artificial Sequence
  Description of Artificial Sequence: Synthetic oligonucleotide
  Sense strand starting at position 2229 of SEQ ID NO: 1888704
ugugaugauuagguccgaa

SEQ ID NO: 2551185 - RNA, 19 nt, Artificial Sequence
  Description of Artificial Sequence: Synthetic oligonucleotide
  Antisense strand to SEQ ID NO: 2551184
uucggaccuaaucaucaca

SEQ ID NO: 2551186 - RNA, 19 nt, Artificial Sequence
  Description of Artificial Sequence: Synthetic oligonucleotide
  Sense strand starting at position 1266 of SEQ ID NO: 1888704
aacguuuccugagcaaaga

SEQ ID NO: 2551187 - RNA, 19 nt, Artificial Sequence
  Description of Artificial Sequence: Synthetic oligonucleotide
  Antisense strand to SEQ ID NO: 2551186
ucuuugcucaggaaacguu

SEQ ID NO: 2551188 - RNA, 19 nt, Artificial Sequence
  Description of Artificial Sequence: Synthetic oligonucleotide
  Sense strand starting at position 3780 of SEQ ID NO: 1888704
uggcgacagcagcauuaaa

SEQ ID NO: 2551189 - RNA, 19 nt, Artificial Sequence
  Description of Artificial Sequence: Synthetic oligonucleotide
  Antisense strand to SEQ ID NO: 2551188
uuuaaugcugcugucgcca

SEQ ID NO: 2551190 - RNA, 19 nt, Artificial Sequence
  Description of Artificial Sequence: Synthetic oligonucleotide
  Sense strand starting at position 1427 of SEQ ID NO: 1888704
ggaaaugucuugguccagu

SEQ ID NO: 2551191 - RNA, 19 nt, Artificial Sequence
  Description of Artificial Sequence: Synthetic oligonucleotide
  Antisense strand to SEQ ID NO: 2551190
acuggaccaagacauuucc

SEQ ID NO: 2551192 - RNA, 19 nt, Artificial Sequence
  Description of Artificial Sequence: Synthetic oligonucleotide
  Sense strand starting at position 2846 of SEQ ID NO: 1888704
auuggagcuuugcuaacau

SEQ ID NO: 2551193 - RNA, 19 nt, Artificial Sequence
  Description of Artificial Sequence: Synthetic oligonucleotide
  Antisense strand to SEQ ID NO: 2551192
auguuagcaaagcuccaau

SEQ ID NO: 2551194 - RNA, 19 nt, Artificial Sequence
  Description of Artificial Sequence: Synthetic oligonucleotide
  Sense strand starting at position 2299 of SEQ ID NO: 1888704
cggcuuccuuaucugaaga

SEQ ID NO: 2551195 - RNA, 19 nt, Artificial Sequence
  Description of Artificial Sequence: Synthetic oligonucleotide
  Antisense strand to SEQ ID NO: 2551194
ucuucagauaaggaagccg

SEQ ID NO: 2551196 - RNA, 19 nt, Artificial Sequence
  Description of Artificial Sequence: Synthetic oligonucleotide
  Sense strand starting at position 1252 of SEQ ID NO: 1888704
uaaugugcucaucaaacgu

SEQ ID NO: 2551197 - RNA, 19 nt, Artificial Sequence
  Description of Artificial Sequence: Synthetic oligonucleotide
  Antisense strand to SEQ ID NO: 2551196
acguuugaugagcacauua

SEQ ID NO: 2551198 - RNA, 19 nt, Artificial Sequence
  Description of Artificial Sequence: Synthetic oligonucleotide
  Sense strand starting at position 2670 of SEQ ID NO: 1888704
agaccuguguuaccucgaa

SEQ ID NO: 2551199 - RNA, 19 nt, Artificial Sequence
  Description of Artificial Sequence: Synthetic oligonucleotide
  Antisense strand to SEQ ID NO: 2551198
uucgagguaacacaggucu

SEQ ID NO: 2551200 - RNA, 19 nt, Artificial Sequence
  Description of Artificial Sequence: Synthetic oligonucleotide
  Sense strand starting at position 2674 of SEQ ID NO: 1888704
cuguguuaccucgaauucu

SEQ ID NO: 2551201 - RNA, 19 nt, Artificial Sequence
  Description of Artificial Sequence: Synthetic oligonucleotide
  Antisense strand to SEQ ID NO: 2551200
agaauucgagguaacacag

SEQ ID NO: 2551202 - RNA, 19 nt, Artificial Sequence
  Description of Artificial Sequence: Synthetic oligonucleotide
  Sense strand starting at position 2424 of SEQ ID NO: 1888704
aguguuuaucugggccaga

SEQ ID NO: 2551203 - RNA, 19 nt, Artificial Sequence
  Description of Artificial Sequence: Synthetic oligonucleotide
  Antisense strand to SEQ ID NO: 2551202
ucuggcccagauaaacacu

SEQ ID NO: 2551204 - RNA, 19 nt, Artificial Sequence
  Description of Artificial Sequence: Synthetic oligonucleotide
  Sense strand starting at position 2665 of SEQ ID NO: 1888704
guuauagaccuguguuacc

SEQ ID NO: 2551205 - RNA, 19 nt, Artificial Sequence
  Description of Artificial Sequence: Synthetic oligonucleotide
  Antisense strand to SEQ ID NO: 2551204
gguaacacaggucuauaac

SEQ ID NO: 2551206 - RNA, 19 nt, Artificial Sequence
  Description of Artificial Sequence: Synthetic oligonucleotide
  Sense strand starting at position 1573 of SEQ ID NO: 1888704
augaaagucugggauaaca

SEQ ID NO: 2551207 - RNA, 19 nt, Artificial Sequence
  Description of Artificial Sequence: Synthetic oligonucleotide
  Antisense strand to SEQ ID NO: 2551206
uguuaucccagacuuucau

SEQ ID NO: 2551208 - RNA, 19 nt, Artificial Sequence
  Description of Artificial Sequence: Synthetic oligonucleotide
  Sense strand starting at position 2425 of SEQ ID NO: 1888704
guguuuaucugggccagac

SEQ ID NO: 2551209 - RNA, 19 nt, Artificial Sequence
  Description of Artificial Sequence: Synthetic oligonucleotide
  Antisense strand to SEQ ID NO: 2551208
gucuggcccagauaaacac

SEQ ID NO: 2551210 - RNA, 19 nt, Artificial Sequence
  Description of Artificial Sequence: Synthetic oligonucleotide
  Sense strand starting at position 1308 of SEQ ID NO: 1888704
ggcuaacaaugauaagaua

SEQ ID NO: 2551211 - RNA, 19 nt, Artificial Sequence
  Description of Artificial Sequence: Synthetic oligonucleotide
  Antisense strand to SEQ ID NO: 2551210
uaucuuaucauuguuagcc

SEQ ID NO: 2551212 - RNA, 19 nt, Artificial Sequence
  Description of Artificial Sequence: Synthetic oligonucleotide
  Sense strand starting at position 856 of SEQ ID NO: 1888704
cuuaccagugucuguaauu

SEQ ID NO: 2551213 - RNA, 19 nt, Artificial Sequence
  Description of Artificial Sequence: Synthetic oligonucleotide
  Antisense strand to SEQ ID NO: 2551212
aauuacagacacugguaag

SEQ ID NO: 2551214 - RNA, 19 nt, Artificial Sequence
  Description of Artificial Sequence: Synthetic oligonucleotide
  Sense strand starting at position 2828 of SEQ ID NO: 1888704
ugugcuuucuuagugauga

SEQ ID NO: 2551215 - RNA, 19 nt, Artificial Sequence
  Description of Artificial Sequence: Synthetic oligonucleotide
  Antisense strand to SEQ ID NO: 2551214
ucaucacuaagaaagcaca

SEQ ID NO: 2551216 - RNA, 19 nt, Artificial Sequence
  Description of Artificial Sequence: Synthetic oligonucleotide
  Sense strand starting at position 2219 of SEQ ID NO: 1888704
gguagagcggugugaugau

SEQ ID NO: 2551217 - RNA, 19 nt, Artificial Sequence
  Description of Artificial Sequence: Synthetic oligonucleotide
  Antisense strand to SEQ ID NO: 2551216
aucaucacaccgcucuacc

SEQ ID NO: 2551218 - RNA, 19 nt, Artificial Sequence
  Description of Artificial Sequence: Synthetic oligonucleotide
  Sense strand starting at position 3921 of SEQ ID NO: 1888704
ugcugaguuaaugguguua

SEQ ID NO: 2551219 - RNA, 19 nt, Artificial Sequence
  Description of Artificial Sequence: Synthetic oligonucleotide
  Antisense strand to SEQ ID NO: 2551218
uaacaccauuaacucagca

SEQ ID NO: 2551220 - RNA, 19 nt, Artificial Sequence
  Description of Artificial Sequence: Synthetic oligonucleotide
  Sense strand starting at position 866 of SEQ ID NO: 1888704
ucuguaauuugagggcaga

SEQ ID NO: 2551221 - RNA, 19 nt, Artificial Sequence
  Description of Artificial Sequence: Synthetic oligonucleotide
  Antisense strand to SEQ ID NO: 2551220
ucugcccucaaauuacaga

SEQ ID NO: 2551222 - RNA, 19 nt, Artificial Sequence
  Description of Artificial Sequence: Synthetic oligonucleotide
  Sense strand starting at position 3091 of SEQ ID NO: 1888704
gugguuagggccuggcaua

SEQ ID NO: 2551223 - RNA, 19 nt, Artificial Sequence
  Description of Artificial Sequence: Synthetic oligonucleotide
  Antisense strand to SEQ ID NO: 2551222
uaugccaggcccuaaccac

SEQ ID NO: 2551224 - RNA, 19 nt, Artificial Sequence
  Description of Artificial Sequence: Synthetic oligonucleotide
  Sense strand starting at position 2663 of SEQ ID NO: 1888704
ucguuauagaccuguguua

SEQ ID NO: 2551225 - RNA, 19 nt, Artificial Sequence
  Description of Artificial Sequence: Synthetic oligonucleotide
  Antisense strand to SEQ ID NO: 2551224
uaacacaggucuauaacga

SEQ ID NO: 2551226 - RNA, 19 nt, Artificial Sequence
  Description of Artificial Sequence: Synthetic oligonucleotide
  Sense strand starting at position 855 of SEQ ID NO: 1888704
gcuuaccagugucuguaau

SEQ ID NO: 2551227 - RNA, 19 nt, Artificial Sequence
  Description of Artificial Sequence: Synthetic oligonucleotide
  Antisense strand to SEQ ID NO: 2551226
auuacagacacugguaagc

SEQ ID NO: 2551228 - RNA, 19 nt, Artificial Sequence
  Description of Artificial Sequence: Synthetic oligonucleotide
  Sense strand starting at position 2121 of SEQ ID NO: 1888704
gggcuuggauccuaggaaa

SEQ ID NO: 2551229 - RNA, 19 nt, Artificial Sequence
  Description of Artificial Sequence: Synthetic oligonucleotide
  Antisense strand to SEQ ID NO: 2551228
uuuccuaggauccaagccc

SEQ ID NO: 2551230 - RNA, 19 nt, Artificial Sequence
  Description of Artificial Sequence: Synthetic oligonucleotide
  Sense strand starting at position 1571 of SEQ ID NO: 1888704
caaugaaagucugggauaa

SEQ ID NO: 2551231 - RNA, 19 nt, Artificial Sequence
  Description of Artificial Sequence: Synthetic oligonucleotide
  Antisense strand to SEQ ID NO: 2551230
uuaucccagacuuucauug

SEQ ID NO: 2551232 - RNA, 19 nt, Artificial Sequence
  Description of Artificial Sequence: Synthetic oligonucleotide
  Sense strand starting at position 792 of SEQ ID NO: 1888704
cgguauugucacuguccau

SEQ ID NO: 2551233 - RNA, 19 nt, Artificial Sequence
  Description of Artificial Sequence: Synthetic oligonucleotide
  Antisense strand to SEQ ID NO: 2551232
auggacagugacaauaccg

SEQ ID NO: 2551234 - RNA, 19 nt, Artificial Sequence
  Description of Artificial Sequence: Synthetic oligonucleotide
  Sense strand starting at position 2825 of SEQ ID NO: 1888704
uggugugcuuucuuaguga

SEQ ID NO: 2551235 - RNA, 19 nt, Artificial Sequence
  Description of Artificial Sequence: Synthetic oligonucleotide
  Antisense strand to SEQ ID NO: 2551234
ucacuaagaaagcacacca

SEQ ID NO: 2551236 - RNA, 19 nt, Artificial Sequence
  Description of Artificial Sequence: Synthetic oligonucleotide
  Sense strand starting at position 3192 of SEQ ID NO: 1888705
agagcuaggcgauacaaga

SEQ ID NO: 2551237 - RNA, 19 nt, Artificial Sequence
  Description of Artificial Sequence: Synthetic oligonucleotide
  Antisense strand to SEQ ID NO: 2551236
ucuuguaucgccuagcucu

SEQ ID NO: 2551238 - RNA, 19 nt, Artificial Sequence
  Description of Artificial Sequence: Synthetic oligonucleotide
  Sense strand starting at position 176 of SEQ ID NO: 1888705
gaggcacaucccugaggaa

SEQ ID NO: 2551239 - RNA, 19 nt, Artificial Sequence
  Description of Artificial Sequence: Synthetic oligonucleotide
  Antisense strand to SEQ ID NO: 2551238
uuccucagggaugugccuc

SEQ ID NO: 2551240 - RNA, 19 nt, Artificial Sequence
  Description of Artificial Sequence: Synthetic oligonucleotide
  Sense strand starting at position 1491 of SEQ ID NO: 1888705
uuaccuguggauugggaaa

SEQ ID NO: 2551241 - RNA, 19 nt, Artificial Sequence
  Description of Artificial Sequence: Synthetic oligonucleotide
  Antisense strand to SEQ ID NO: 2551240
uuucccaauccacagguaa

SEQ ID NO: 2551242 - RNA, 19 nt, Artificial Sequence
  Description of Artificial Sequence: Synthetic oligonucleotide
  Sense strand starting at position 3308 of SEQ ID NO: 1888705
uccuuaacaucugugagag

SEQ ID NO: 2551243 - RNA, 19 nt, Artificial Sequence
  Description of Artificial Sequence: Synthetic oligonucleotide
  Antisense strand to SEQ ID NO: 2551242
cucucacagauguuaagga

SEQ ID NO: 2551244 - RNA, 19 nt, Artificial Sequence
  Description of Artificial Sequence: Synthetic oligonucleotide
  Sense strand starting at position 39 of SEQ ID NO: 1888705
gggacuuguauccagcauc

SEQ ID NO: 2551245 - RNA, 19 nt, Artificial Sequence
  Description of Artificial Sequence: Synthetic oligonucleotide
  Antisense strand to SEQ ID NO: 2551244
gaugcuggauacaaguccc

SEQ ID NO: 2551246 - RNA, 19 nt, Artificial Sequence
  Description of Artificial Sequence: Synthetic oligonucleotide
  Sense strand starting at position 1264 of SEQ ID NO: 1888705
cacugaaagcugggugaca

SEQ ID NO: 2551247 - RNA, 19 nt, Artificial Sequence
  Description of Artificial Sequence: Synthetic oligonucleotide
  Antisense strand to SEQ ID NO: 2551246
ugucacccagcuuucagug

SEQ ID NO: 2551248 - RNA, 19 nt, Artificial Sequence
  Description of Artificial Sequence: Synthetic oligonucleotide
  Sense strand starting at position 614 of SEQ ID NO: 1888705
cucucagaugucgagggua

SEQ ID NO: 2551249 - RNA, 19 nt, Artificial Sequence
  Description of Artificial Sequence: Synthetic oligonucleotide
  Antisense strand to SEQ ID NO: 2551248
uacccucgacaucugagag

SEQ ID NO: 2551250 - RNA, 19 nt, Artificial Sequence
  Description of Artificial Sequence: Synthetic oligonucleotide
  Sense strand starting at position 2265 of SEQ ID NO: 1888705
ccuuucguggacugggaaa

SEQ ID NO: 2551251 - RNA, 19 nt, Artificial Sequence
  Description of Artificial Sequence: Synthetic oligonucleotide
  Antisense strand to SEQ ID NO: 2551250
uuucccaguccacgaaagg

SEQ ID NO: 2551252 - RNA, 19 nt, Artificial Sequence
  Description of Artificial Sequence: Synthetic oligonucleotide
  Sense strand starting at position 3429 of SEQ ID NO: 1888705
agugaaggugauugucuga

SEQ ID NO: 2551253 - RNA, 19 nt, Artificial Sequence
  Description of Artificial Sequence: Synthetic oligonucleotide
  Antisense strand to SEQ ID NO: 2551252
ucagacaaucaccuucacu

SEQ ID NO: 2551254 - RNA, 19 nt, Artificial Sequence
  Description of Artificial Sequence: Synthetic oligonucleotide
  Sense strand starting at position 2513 of SEQ ID NO: 1888705
gaggucacuucuuccggaa

SEQ ID NO: 2551255 - RNA, 19 nt, Artificial Sequence
  Description of Artificial Sequence: Synthetic oligonucleotide
  Antisense strand to SEQ ID NO: 2551254
uuccggaagaagugaccuc

SEQ ID NO: 2551256 - RNA, 19 nt, Artificial Sequence
  Description of Artificial Sequence: Synthetic oligonucleotide
  Sense strand starting at position 2517 of SEQ ID NO: 1888705
ucacuucuuccggaagcuu

SEQ ID NO: 2551257 - RNA, 19 nt, Artificial Sequence
  Description of Artificial Sequence: Synthetic oligonucleotide
  Antisense strand to SEQ ID NO: 2551256
aagcuuccggaagaaguga

SEQ ID NO: 2551258 - RNA, 19 nt, Artificial Sequence
  Description of Artificial Sequence: Synthetic oligonucleotide
  Sense strand starting at position 604 of SEQ ID NO: 1888705
ucccaucugucucucagau

SEQ ID NO: 2551259 - RNA, 19 nt, Artificial Sequence
  Description of Artificial Sequence: Synthetic oligonucleotide
  Antisense strand to SEQ ID NO: 2551258
aucugagagacagauggga

SEQ ID NO: 2551260 - RNA, 19 nt, Artificial Sequence
  Description of Artificial Sequence: Synthetic oligonucleotide
  Sense strand starting at position 1223 of SEQ ID NO: 1888705
ugcagaguucaaggaugca

SEQ ID NO: 2551261 - RNA, 19 nt, Artificial Sequence
  Description of Artificial Sequence: Synthetic oligonucleotide
  Antisense strand to SEQ ID NO: 2551260
ugcauccuugaacucugca

SEQ ID NO: 2551262 - RNA, 19 nt, Artificial Sequence
  Description of Artificial Sequence: Synthetic oligonucleotide
  Sense strand starting at position 2526 of SEQ ID NO: 1888705
ccggaagcuuuccucaaca

SEQ ID NO: 2551263 - RNA, 19 nt, Artificial Sequence
  Description of Artificial Sequence: Synthetic oligonucleotide
  Antisense strand to SEQ ID NO: 2551262
uguugaggaaagcuuccgg

SEQ ID NO: 2551264 - RNA, 19 nt, Artificial Sequence
  Description of Artificial Sequence: Synthetic oligonucleotide
  Sense strand starting at position 1285 of SEQ ID NO: 1888705
gcaagacccuggcucuaau

SEQ ID NO: 2551265 - RNA, 19 nt, Artificial Sequence
  Description of Artificial Sequence: Synthetic oligonucleotide
  Antisense strand to SEQ ID NO: 2551264
auuagagccagggucuugc

SEQ ID NO: 2551266 - RNA, 19 nt, Artificial Sequence
  Description of Artificial Sequence: Synthetic oligonucleotide
  Sense strand starting at position 2795 of SEQ ID NO: 1888705
guggaagugucccuuuaac

SEQ ID NO: 2551267 - RNA, 19 nt, Artificial Sequence
  Description of Artificial Sequence: Synthetic oligonucleotide
  Antisense strand to SEQ ID NO: 2551266
guuaaagggacacuuccac

SEQ ID NO: 2551268 - RNA, 19 nt, Artificial Sequence
  Description of Artificial Sequence: Synthetic oligonucleotide
  Sense strand starting at position 1357 of SEQ ID NO: 1888705
gccucuaccugucugauga

SEQ ID NO: 2551269 - RNA, 19 nt, Artificial Sequence
  Description of Artificial Sequence: Synthetic oligonucleotide
  Antisense strand to SEQ ID NO: 2551268
ucaucagacagguagaggc

SEQ ID NO: 2551270 - RNA, 19 nt, Artificial Sequence
  Description of Artificial Sequence: Synthetic oligonucleotide
  Sense strand starting at position 3220 of SEQ ID NO: 1888705
aagaacaagcuguguguuu

SEQ ID NO: 2551271 - RNA, 19 nt, Artificial Sequence
  Description of Artificial Sequence: Synthetic oligonucleotide
  Antisense strand to SEQ ID NO: 2551270
aaacacacagcuuguucuu

SEQ ID NO: 2551272 - RNA, 19 nt, Artificial Sequence
  Description of Artificial Sequence: Synthetic oligonucleotide
  Sense strand starting at position 2398 of SEQ ID NO: 1888705
ccucuuaguuaucuugcau

SEQ ID NO: 2551273 - RNA, 19 nt, Artificial Sequence
  Description of Artificial Sequence: Synthetic oligonucleotide
  Antisense strand to SEQ ID NO: 2551272
augcaagauaacuaagagg

SEQ ID NO: 2551274 - RNA, 19 nt, Artificial Sequence
  Description of Artificial Sequence: Synthetic oligonucleotide
  Sense strand starting at position 2302 of SEQ ID NO: 1888705
uuguguuguccucacugca

SEQ ID NO: 2551275 - RNA, 19 nt, Artificial Sequence
  Description of Artificial Sequence: Synthetic oligonucleotide
  Antisense strand to SEQ ID NO: 2551274
ugcagugaggacaacacaa

SEQ ID NO: 2551276 - RNA, 19 nt, Artificial Sequence
  Description of Artificial Sequence: Synthetic oligonucleotide
  Sense strand starting at position 2415 of SEQ ID NO: 1888705
augcucuggucuuugcaua

SEQ ID NO: 2551277 - RNA, 19 nt, Artificial Sequence
  Description of Artificial Sequence: Synthetic oligonucleotide
  Antisense strand to SEQ ID NO: 2551276
uaugcaaagaccagagcau

SEQ ID NO: 2551278 - RNA, 19 nt, Artificial Sequence
  Description of Artificial Sequence: Synthetic oligonucleotide
  Sense strand starting at position 3471 of SEQ ID NO: 1888705
gcuggagcuucugucucau

SEQ ID NO: 2551279 - RNA, 19 nt, Artificial Sequence
  Description of Artificial Sequence: Synthetic oligonucleotide
  Antisense strand to SEQ ID NO: 2551278
augagacagaagcuccagc

SEQ ID NO: 2551280 - RNA, 19 nt, Artificial Sequence
  Description of Artificial Sequence: Synthetic oligonucleotide
  Sense strand starting at position 1593 of SEQ ID NO: 1888705
gcgccuucucaugguaaag

SEQ ID NO: 2551281 - RNA, 19 nt, Artificial Sequence
  Description of Artificial Sequence: Synthetic oligonucleotide
  Antisense strand to SEQ ID NO: 2551280
cuuuaccaugagaaggcgc

SEQ ID NO: 2551282 - RNA, 19 nt, Artificial Sequence
  Description of Artificial Sequence: Synthetic oligonucleotide
  Sense strand starting at position 2397 of SEQ ID NO: 1888705
gccucuuaguuaucuugca

SEQ ID NO: 2551283 - RNA, 19 nt, Artificial Sequence
  Description of Artificial Sequence: Synthetic oligonucleotide
  Antisense strand to SEQ ID NO: 2551282
ugcaagauaacuaagaggc

SEQ ID NO: 2551284 - RNA, 19 nt, Artificial Sequence
  Description of Artificial Sequence: Synthetic oligonucleotide
  Sense strand starting at position 3222 of SEQ ID NO: 1888705
gaacaagcuguguguuugu

SEQ ID NO: 2551285 - RNA, 19 nt, Artificial Sequence
  Description of Artificial Sequence: Synthetic oligonucleotide
  Antisense strand to SEQ ID NO: 2551284
acaaacacacagcuuguuc

SEQ ID NO: 2551286 - RNA, 19 nt, Artificial Sequence
  Description of Artificial Sequence: Synthetic oligonucleotide
  Sense strand starting at position 3961 of SEQ ID NO: 1888705
acaggacuuucagggaugu

SEQ ID NO: 2551287 - RNA, 19 nt, Artificial Sequence
  Description of Artificial Sequence: Synthetic oligonucleotide
  Antisense strand to SEQ ID NO: 2551286
acaucccugaaaguccugu

SEQ ID NO: 2551288 - RNA, 19 nt, Artificial Sequence
  Description of Artificial Sequence: Synthetic oligonucleotide
  Sense strand starting at position 1361 of SEQ ID NO: 1888705
cuaccugucugaugacaaa

SEQ ID NO: 2551289 - RNA, 19 nt, Artificial Sequence
  Description of Artificial Sequence: Synthetic oligonucleotide
  Antisense strand to SEQ ID NO: 2551288
uuugucaucagacagguag

SEQ ID NO: 2551290 - RNA, 19 nt, Artificial Sequence
  Description of Artificial Sequence: Synthetic oligonucleotide
  Sense strand starting at position 3434 of SEQ ID NO: 1888705
aggugauugucugagggca

SEQ ID NO: 2551291 - RNA, 19 nt, Artificial Sequence
  Description of Artificial Sequence: Synthetic oligonucleotide
  Antisense strand to SEQ ID NO: 2551290
ugcccucagacaaucaccu

SEQ ID NO: 2551292 - RNA, 19 nt, Artificial Sequence
  Description of Artificial Sequence: Synthetic oligonucleotide
  Sense strand starting at position 1031 of SEQ ID NO: 1888705
gcccgcauaugacagauaa

SEQ ID NO: 2551293 - RNA, 19 nt, Artificial Sequence
  Description of Artificial Sequence: Synthetic oligonucleotide
  Antisense strand to SEQ ID NO: 2551292
uuaucugucauaugcgggc

SEQ ID NO: 2551294 - RNA, 19 nt, Artificial Sequence
  Description of Artificial Sequence: Synthetic oligonucleotide
  Sense strand starting at position 606 of SEQ ID NO: 1888705
ccaucugucucucagaugu

SEQ ID NO: 2551295 - RNA, 19 nt, Artificial Sequence
  Description of Artificial Sequence: Synthetic oligonucleotide
  Antisense strand to SEQ ID NO: 2551294
acaucugagagacagaugg

SEQ ID NO: 2551296 - RNA, 19 nt, Artificial Sequence
  Description of Artificial Sequence: Synthetic oligonucleotide
  Sense strand starting at position 3894 of SEQ ID NO: 1888705
agaagcaugugaugccaga

SEQ ID NO: 2551297 - RNA, 19 nt, Artificial Sequence
  Description of Artificial Sequence: Synthetic oligonucleotide
  Antisense strand to SEQ ID NO: 2551296
ucuggcaucacaugcuucu

SEQ ID NO: 2551298 - RNA, 19 nt, Artificial Sequence
  Description of Artificial Sequence: Synthetic oligonucleotide
  Sense strand starting at position 2776 of SEQ ID NO: 1888705
ggaucuggauccugcuuua

SEQ ID NO: 2551299 - RNA, 19 nt, Artificial Sequence
  Description of Artificial Sequence: Synthetic oligonucleotide
  Antisense strand to SEQ ID NO: 2551298
uaaagcaggauccagaucc

SEQ ID NO: 2551300 - RNA, 19 nt, Artificial Sequence
  Description of Artificial Sequence: Synthetic oligonucleotide
  Sense strand starting at position 826 of SEQ ID NO: 1888705
gcacaaugcuauggaucca

SEQ ID NO: 2551301 - RNA, 19 nt, Artificial Sequence
  Description of Artificial Sequence: Synthetic oligonucleotide
  Antisense strand to SEQ ID NO: 2551300
uggauccauagcauugugc

SEQ ID NO: 2551302 - RNA, 19 nt, Artificial Sequence
  Description of Artificial Sequence: Synthetic oligonucleotide
  Sense strand starting at position 1595 of SEQ ID NO: 1888705
gccuucucaugguaaaguu

SEQ ID NO: 2551303 - RNA, 19 nt, Artificial Sequence
  Description of Artificial Sequence: Synthetic oligonucleotide
  Antisense strand to SEQ ID NO: 2551302
aacuuuaccaugagaaggc

SEQ ID NO: 2551304 - RNA, 19 nt, Artificial Sequence
  Description of Artificial Sequence: Synthetic oligonucleotide
  Sense strand starting at position 583 of SEQ ID NO: 1888705
ugccaucugucauagcauc

SEQ ID NO: 2551305 - RNA, 19 nt, Artificial Sequence
  Description of Artificial Sequence: Synthetic oligonucleotide
  Antisense strand to SEQ ID NO: 2551304
gaugcuaugacagauggca

SEQ ID NO: 2551306 - RNA, 19 nt, Artificial Sequence
  Description of Artificial Sequence: Synthetic oligonucleotide
  Sense strand starting at position 3436 of SEQ ID NO: 1888705
gugauugucugagggcauu

SEQ ID NO: 2551307 - RNA, 19 nt, Artificial Sequence
  Description of Artificial Sequence: Synthetic oligonucleotide
  Antisense strand to SEQ ID NO: 2551306
aaugcccucagacaaucac

SEQ ID NO: 2551308 - RNA, 19 nt, Artificial Sequence
  Description of Artificial Sequence: Synthetic oligonucleotide
  Sense strand starting at position 1333 of SEQ ID NO: 1888705
gguagcuaauccugccaga

SEQ ID NO: 2551309 - RNA, 19 nt, Artificial Sequence
  Description of Artificial Sequence: Synthetic oligonucleotide
  Antisense strand to SEQ ID NO: 2551308
ucuggcaggauuagcuacc

SEQ ID NO: 2551310 - RNA, 19 nt, Artificial Sequence
  Description of Artificial Sequence: Synthetic oligonucleotide
  Sense strand starting at position 2391 of SEQ ID NO: 1888705
cucugugccucuuaguuau

SEQ ID NO: 2551311 - RNA, 19 nt, Artificial Sequence
  Description of Artificial Sequence: Synthetic oligonucleotide
  Antisense strand to SEQ ID NO: 2551310
auaacuaagaggcacagag

SEQ ID NO: 2551312 - RNA, 19 nt, Artificial Sequence
  Description of Artificial Sequence: Synthetic oligonucleotide
  Sense strand starting at position 2516 of SEQ ID NO: 1888705
gucacuucuuccggaagcu

SEQ ID NO: 2551313 - RNA, 19 nt, Artificial Sequence
  Description of Artificial Sequence: Synthetic oligonucleotide
  Antisense strand to SEQ ID NO: 2551312
agcuuccggaagaagugac

SEQ ID NO: 2551314 - RNA, 19 nt, Artificial Sequence
  Description of Artificial Sequence: Synthetic oligonucleotide
  Sense strand starting at position 1592 of SEQ ID NO: 1888705
agcgccuucucaugguaaa

SEQ ID NO: 2551315 - RNA, 19 nt, Artificial Sequence
  Description of Artificial Sequence: Synthetic oligonucleotide
  Antisense strand to SEQ ID NO: 2551314
uuuaccaugagaaggcgcu

SEQ ID NO: 2551316 - RNA, 19 nt, Artificial Sequence
  Description of Artificial Sequence: Synthetic oligonucleotide
  Sense strand starting at position 3568 of SEQ ID NO: 1888706
guugcuaauccagaagaau

SEQ ID NO: 2551317 - RNA, 19 nt, Artificial Sequence
  Description of Artificial Sequence: Synthetic oligonucleotide
  Antisense strand to SEQ ID NO: 2551316
auucuucuggauuagcaac

SEQ ID NO: 2551318 - RNA, 19 nt, Artificial Sequence
  Description of Artificial Sequence: Synthetic oligonucleotide
  Sense strand starting at position 2398 of SEQ ID NO: 1888706
gcggcuguuggguuccaau

SEQ ID NO: 2551319 - RNA, 19 nt, Artificial Sequence
  Description of Artificial Sequence: Synthetic oligonucleotide
  Antisense strand to SEQ ID NO: 2551318
auuggaacccaacagccgc

SEQ ID NO: 2551320 - RNA, 19 nt, Artificial Sequence
  Description of Artificial Sequence: Synthetic oligonucleotide
  Sense strand starting at position 3013 of SEQ ID NO: 1888706
agacucagauugucugaau

SEQ ID NO: 2551321 - RNA, 19 nt, Artificial Sequence
  Description of Artificial Sequence: Synthetic oligonucleotide
  Antisense strand to SEQ ID NO: 2551320
auucagacaaucugagucu

SEQ ID NO: 2551322 - RNA, 19 nt, Artificial Sequence
  Description of Artificial Sequence: Synthetic oligonucleotide
  Sense strand starting at position 3518 of SEQ ID NO: 1888706
acuggauaucuugagcucu

SEQ ID NO: 2551323 - RNA, 19 nt, Artificial Sequence
  Description of Artificial Sequence: Synthetic oligonucleotide
  Antisense strand to SEQ ID NO: 2551322
agagcucaagauauccagu

SEQ ID NO: 2551324 - RNA, 19 nt, Artificial Sequence
  Description of Artificial Sequence: Synthetic oligonucleotide
  Sense strand starting at position 3228 of SEQ ID NO: 1888706
ugaagcuuuacuggacaga

SEQ ID NO: 2551325 - RNA, 19 nt, Artificial Sequence
  Description of Artificial Sequence: Synthetic oligonucleotide
  Antisense strand to SEQ ID NO: 2551324
ucuguccaguaaagcuuca

SEQ ID NO: 2551326 - RNA, 19 nt, Artificial Sequence
  Description of Artificial Sequence: Synthetic oligonucleotide
  Sense strand starting at position 3197 of SEQ ID NO: 1888706
cuuuaacugucauuaagga

SEQ ID NO: 2551327 - RNA, 19 nt, Artificial Sequence
  Description of Artificial Sequence: Synthetic oligonucleotide
  Antisense strand to SEQ ID NO: 2551326
uccuuaaugacaguuaaag

SEQ ID NO: 2551328 - RNA, 19 nt, Artificial Sequence
  Description of Artificial Sequence: Synthetic oligonucleotide
  Sense strand starting at position 3014 of SEQ ID NO: 1888706
gacucagauugucugaauu

SEQ ID NO: 2551329 - RNA, 19 nt, Artificial Sequence
  Description of Artificial Sequence: Synthetic oligonucleotide
  Antisense strand to SEQ ID NO: 2551328
aauucagacaaucugaguc

SEQ ID NO: 2551330 - RNA, 19 nt, Artificial Sequence
  Description of Artificial Sequence: Synthetic oligonucleotide
  Sense strand starting at position 3507 of SEQ ID NO: 1888706
ugaaaugugucacuggaua

SEQ ID NO: 2551331 - RNA, 19 nt, Artificial Sequence
  Description of Artificial Sequence: Synthetic oligonucleotide
  Antisense strand to SEQ ID NO: 2551330
uauccagugacacauuuca

SEQ ID NO: 2551332 - RNA, 19 nt, Artificial Sequence
  Description of Artificial Sequence: Synthetic oligonucleotide
  Sense strand starting at position 3763 of SEQ ID NO: 1888706
cuaaacaguuagguuuaua

SEQ ID NO: 2551333 - RNA, 19 nt, Artificial Sequence
  Description of Artificial Sequence: Synthetic oligonucleotide
  Antisense strand to SEQ ID NO: 2551332
uauaaaccuaacuguuuag

SEQ ID NO: 2551334 - RNA, 19 nt, Artificial Sequence
  Description of Artificial Sequence: Synthetic oligonucleotide
  Sense strand starting at position 2429 of SEQ ID NO: 1888706
gacaaaggcaguugugaga

SEQ ID NO: 2551335 - RNA, 19 nt, Artificial Sequence
  Description of Artificial Sequence: Synthetic oligonucleotide
  Antisense strand to SEQ ID NO: 2551334
ucucacaacugccuuuguc

SEQ ID NO: 2551336 - RNA, 19 nt, Artificial Sequence
  Description of Artificial Sequence: Synthetic oligonucleotide
  Sense strand starting at position 3071 of SEQ ID NO: 1888706
acagauuuaugacauaguu

SEQ ID NO: 2551337 - RNA, 19 nt, Artificial Sequence
  Description of Artificial Sequence: Synthetic oligonucleotide
  Antisense strand to SEQ ID NO: 2551336
aacuaugucauaaaucugu

SEQ ID NO: 2551338 - RNA, 19 nt, Artificial Sequence
  Description of Artificial Sequence: Synthetic oligonucleotide
  Sense strand starting at position 3526 of SEQ ID NO: 1888706
ucuugagcucuguauugaa

SEQ ID NO: 2551339 - RNA, 19 nt, Artificial Sequence
  Description of Artificial Sequence: Synthetic oligonucleotide
  Antisense strand to SEQ ID NO: 2551338
uucaauacagagcucaaga

SEQ ID NO: 2551340 - RNA, 19 nt, Artificial Sequence
  Description of Artificial Sequence: Synthetic oligonucleotide
  Sense strand starting at position 2886 of SEQ ID NO: 1888706
aaauuuccgcguugguaaa

SEQ ID NO: 2551341 - RNA, 19 nt, Artificial Sequence
  Description of Artificial Sequence: Synthetic oligonucleotide
  Antisense strand to SEQ ID NO: 2551340
uuuaccaacgcggaaauuu

SEQ ID NO: 2551342 - RNA, 19 nt, Artificial Sequence
  Description of Artificial Sequence: Synthetic oligonucleotide
  Sense strand starting at position 3760 of SEQ ID NO: 1888706
guccuaaacaguuagguuu

SEQ ID NO: 2551343 - RNA, 19 nt, Artificial Sequence
  Description of Artificial Sequence: Synthetic oligonucleotide
  Antisense strand to SEQ ID NO: 2551342
aaaccuaacuguuuaggac

SEQ ID NO: 2551344 - RNA, 19 nt, Artificial Sequence
  Description of Artificial Sequence: Synthetic oligonucleotide
  Sense strand starting at position 3011 of SEQ ID NO: 1888706
cgagacucagauugucuga

SEQ ID NO: 2551345 - RNA, 19 nt, Artificial Sequence
  Description of Artificial Sequence: Synthetic oligonucleotide
  Antisense strand to SEQ ID NO: 2551344
ucagacaaucugagucucg

SEQ ID NO: 2551346 - RNA, 19 nt, Artificial Sequence
  Description of Artificial Sequence: Synthetic oligonucleotide
  Sense strand starting at position 3500 of SEQ ID NO: 1888706
acuggagugaaauguguca

SEQ ID NO: 2551347 - RNA, 19 nt, Artificial Sequence
  Description of Artificial Sequence: Synthetic oligonucleotide
  Antisense strand to SEQ ID NO: 2551346
ugacacauuucacuccagu

SEQ ID NO: 2551348 - RNA, 19 nt, Artificial Sequence
  Description of Artificial Sequence: Synthetic oligonucleotide
  Sense strand starting at position 3490 of SEQ ID NO: 1888706
gauguaucccacuggagug

SEQ ID NO: 2551349 - RNA, 19 nt, Artificial Sequence
  Description of Artificial Sequence: Synthetic oligonucleotide
  Antisense strand to SEQ ID NO: 2551348
cacuccagugggauacauc

SEQ ID NO: 2551350 - RNA, 19 nt, Artificial Sequence
  Description of Artificial Sequence: Synthetic oligonucleotide
  Sense strand starting at position 2851 of SEQ ID NO: 1888706
agacauggcugaucaguuu

SEQ ID NO: 2551351 - RNA, 19 nt, Artificial Sequence
  Description of Artificial Sequence: Synthetic oligonucleotide
  Antisense strand to SEQ ID NO: 2551350
aaacugaucagccaugucu

SEQ ID NO: 2551352 - RNA, 19 nt, Artificial Sequence
  Description of Artificial Sequence: Synthetic oligonucleotide
  Sense strand starting at position 3638 of SEQ ID NO: 1888706
ugaagucaauauguugagu

SEQ ID NO: 2551353 - RNA, 19 nt, Artificial Sequence
  Description of Artificial Sequence: Synthetic oligonucleotide
  Antisense strand to SEQ ID NO: 2551352
acucaacauauugacuuca

SEQ ID NO: 2551354 - RNA, 19 nt, Artificial Sequence
  Description of Artificial Sequence: Synthetic oligonucleotide
  Sense strand starting at position 3782 of SEQ ID NO: 1888706
acaaguguuuacuuucuaa

SEQ ID NO: 2551355 - RNA, 19 nt, Artificial Sequence
  Description of Artificial Sequence: Synthetic oligonucleotide
  Antisense strand to SEQ ID NO: 2551354
uuagaaaguaaacacuugu

SEQ ID NO: 2551356 - RNA, 19 nt, Artificial Sequence
  Description of Artificial Sequence: Synthetic oligonucleotide
  Sense strand starting at position 3785 of SEQ ID NO: 1888706
aguguuuacuuucuaacaa

SEQ ID NO: 2551357 - RNA, 19 nt, Artificial Sequence
  Description of Artificial Sequence: Synthetic oligonucleotide
  Antisense strand to SEQ ID NO: 2551356
uuguuagaaaguaaacacu

SEQ ID NO: 2551358 - RNA, 19 nt, Artificial Sequence
  Description of Artificial Sequence: Synthetic oligonucleotide
  Sense strand starting at position 2887 of SEQ ID NO: 1888706
aauuuccgcguugguaaau

SEQ ID NO: 2551359 - RNA, 19 nt, Artificial Sequence
  Description of Artificial Sequence: Synthetic oligonucleotide
  Antisense strand to SEQ ID NO: 2551358
auuuaccaacgcggaaauu

SEQ ID NO: 2551360 - RNA, 19 nt, Artificial Sequence
  Description of Artificial Sequence: Synthetic oligonucleotide
  Sense strand starting at position 3564 of SEQ ID NO: 1888706
acuuguugcuaauccagaa

SEQ ID NO: 2551361 - RNA, 19 nt, Artificial Sequence
  Description of Artificial Sequence: Synthetic oligonucleotide
  Antisense strand to SEQ ID NO: 2551360
uucuggauuagcaacaagu

SEQ ID NO: 2551362 - RNA, 19 nt, Artificial Sequence
  Description of Artificial Sequence: Synthetic oligonucleotide
  Sense strand starting at position 3191 of SEQ ID NO: 1888706
agguuacuuuaacugucau

SEQ ID NO: 2551363 - RNA, 19 nt, Artificial Sequence
  Description of Artificial Sequence: Synthetic oligonucleotide
  Antisense strand to SEQ ID NO: 2551362
augacaguuaaaguaaccu

SEQ ID NO: 2551364 - RNA, 19 nt, Artificial Sequence
  Description of Artificial Sequence: Synthetic oligonucleotide
  Sense strand starting at position 3641 of SEQ ID NO: 1888706
agucaauauguugaguugu

SEQ ID NO: 2551365 - RNA, 19 nt, Artificial Sequence
  Description of Artificial Sequence: Synthetic oligonucleotide
  Antisense strand to SEQ ID NO: 2551364
acaacucaacauauugacu

SEQ ID NO: 2551366 - RNA, 19 nt, Artificial Sequence
  Description of Artificial Sequence: Synthetic oligonucleotide
  Sense strand starting at position 3697 of SEQ ID NO: 1888706
ucuauuggaucgccaaaug

SEQ ID NO: 2551367 - RNA, 19 nt, Artificial Sequence
  Description of Artificial Sequence: Synthetic oligonucleotide
  Antisense strand to SEQ ID NO: 2551366
cauuuggcgauccaauaga

SEQ ID NO: 2551368 - RNA, 19 nt, Artificial Sequence
  Description of Artificial Sequence: Synthetic oligonucleotide
  Sense strand starting at position 3502 of SEQ ID NO: 1888706
uggagugaaaugugucacu

SEQ ID NO: 2551369 - RNA, 19 nt, Artificial Sequence
  Description of Artificial Sequence: Synthetic oligonucleotide
  Antisense strand to SEQ ID NO: 2551368
agugacacauuucacucca

SEQ ID NO: 2551370 - RNA, 19 nt, Artificial Sequence
  Description of Artificial Sequence: Synthetic oligonucleotide
  Sense strand starting at position 3025 of SEQ ID NO: 1888706
ucugaauugagcuaucgca

SEQ ID NO: 2551371 - RNA, 19 nt, Artificial Sequence
  Description of Artificial Sequence: Synthetic oligonucleotide
  Antisense strand to SEQ ID NO: 2551370
ugcgauagcucaauucaga

SEQ ID NO: 2551372 - RNA, 19 nt, Artificial Sequence
  Description of Artificial Sequence: Synthetic oligonucleotide
  Sense strand starting at position 2124 of SEQ ID NO: 1888706
cuuugugauuggcugaaug

SEQ ID NO: 2551373 - RNA, 19 nt, Artificial Sequence
  Description of Artificial Sequence: Synthetic oligonucleotide
  Antisense strand to SEQ ID NO: 2551372
cauucagccaaucacaaag

SEQ ID NO: 2551374 - RNA, 19 nt, Artificial Sequence
  Description of Artificial Sequence: Synthetic oligonucleotide
  Sense strand starting at position 2575 of SEQ ID NO: 1888706
gaggcuguugucugaggga

SEQ ID NO: 2551375 - RNA, 19 nt, Artificial Sequence
  Description of Artificial Sequence: Synthetic oligonucleotide
  Antisense strand to SEQ ID NO: 2551374
ucccucagacaacagccuc

SEQ ID NO: 2551376 - RNA, 19 nt, Artificial Sequence
  Description of Artificial Sequence: Synthetic oligonucleotide
  Sense strand starting at position 2126 of SEQ ID NO: 1888706
uugugauuggcugaaugcu

SEQ ID NO: 2551377 - RNA, 19 nt, Artificial Sequence
  Description of Artificial Sequence: Synthetic oligonucleotide
  Antisense strand to SEQ ID NO: 2551376
agcauucagccaaucacaa

SEQ ID NO: 2551378 - RNA, 19 nt, Artificial Sequence
  Description of Artificial Sequence: Synthetic oligonucleotide
  Sense strand starting at position 2717 of SEQ ID NO: 1888706
aagaaaucgugagugccua

SEQ ID NO: 2551379 - RNA, 19 nt, Artificial Sequence
  Description of Artificial Sequence: Synthetic oligonucleotide
  Antisense strand to SEQ ID NO: 2551378
uaggcacucacgauuucuu

SEQ ID NO: 2551380 - RNA, 19 nt, Artificial Sequence
  Description of Artificial Sequence: Synthetic oligonucleotide
  Sense strand starting at position 3926 of SEQ ID NO: 1888706
cggcaacuuguuuauaucu

SEQ ID NO: 2551381 - RNA, 19 nt, Artificial Sequence
  Description of Artificial Sequence: Synthetic oligonucleotide
  Antisense strand to SEQ ID NO: 2551380
agauauaaacaaguugccg

SEQ ID NO: 2551382 - RNA, 19 nt, Artificial Sequence
  Description of Artificial Sequence: Synthetic oligonucleotide
  Sense strand starting at position 3379 of SEQ ID NO: 1888706
gcacacaaauucguaagua

SEQ ID NO: 2551383 - RNA, 19 nt, Artificial Sequence
  Description of Artificial Sequence: Synthetic oligonucleotide
  Antisense strand to SEQ ID NO: 2551382
uacuuacgaauuugugugc

SEQ ID NO: 2551384 - RNA, 19 nt, Artificial Sequence
  Description of Artificial Sequence: Synthetic oligonucleotide
  Sense strand starting at position 3924 of SEQ ID NO: 1888706
aacggcaacuuguuuauau

SEQ ID NO: 2551385 - RNA, 19 nt, Artificial Sequence
  Description of Artificial Sequence: Synthetic oligonucleotide
  Antisense strand to SEQ ID NO: 2551384
auauaaacaaguugccguu

SEQ ID NO: 2551386 - RNA, 19 nt, Artificial Sequence
  Description of Artificial Sequence: Synthetic oligonucleotide
  Sense strand starting at position 2898 of SEQ ID NO: 1888706
ugguaaauuuccugacagg

SEQ ID NO: 2551387 - RNA, 19 nt, Artificial Sequence
  Description of Artificial Sequence: Synthetic oligonucleotide
  Antisense strand to SEQ ID NO: 2551386
ccugucaggaaauuuacca

SEQ ID NO: 2551388 - RNA, 19 nt, Artificial Sequence
  Description of Artificial Sequence: Synthetic oligonucleotide
  Sense strand starting at position 3423 of SEQ ID NO: 1888706
aguaacucguuccuugaua

SEQ ID NO: 2551389 - RNA, 19 nt, Artificial Sequence
  Description of Artificial Sequence: Synthetic oligonucleotide
  Antisense strand to SEQ ID NO: 2551388
uaucaaggaacgaguuacu

SEQ ID NO: 2551390 - RNA, 19 nt, Artificial Sequence
  Description of Artificial Sequence: Synthetic oligonucleotide
  Sense strand starting at position 3877 of SEQ ID NO: 1888706
cuggcagauugcucacauc

SEQ ID NO: 2551391 - RNA, 19 nt, Artificial Sequence
  Description of Artificial Sequence: Synthetic oligonucleotide
  Antisense strand to SEQ ID NO: 2551390
gaugugagcaaucugccag

SEQ ID NO: 2551392 - RNA, 19 nt, Artificial Sequence
  Description of Artificial Sequence: Synthetic oligonucleotide
  Sense strand starting at position 3068 of SEQ ID NO: 1888706
gcuacagauuuaugacaua

SEQ ID NO: 2551393 - RNA, 19 nt, Artificial Sequence
  Description of Artificial Sequence: Synthetic oligonucleotide
  Antisense strand to SEQ ID NO: 2551392
uaugucauaaaucuguagc

SEQ ID NO: 2551394 - RNA, 19 nt, Artificial Sequence
  Description of Artificial Sequence: Synthetic oligonucleotide
  Sense strand starting at position 3643 of SEQ ID NO: 1888706
ucaauauguugaguuguuu

SEQ ID NO: 2551395 - RNA, 19 nt, Artificial Sequence
  Description of Artificial Sequence: Synthetic oligonucleotide
  Antisense strand to SEQ ID NO: 2551394
aaacaacucaacauauuga

SEQ ID NO: 2551396 - RNA, 19 nt, Artificial Sequence
  Description of Artificial Sequence: Synthetic oligonucleotide
  Sense strand starting at position 3698 of SEQ ID NO: 1888707
gguagcaaugcagagagaa

SEQ ID NO: 2551397 - RNA, 19 nt, Artificial Sequence
  Description of Artificial Sequence: Synthetic oligonucleotide
  Antisense strand to SEQ ID NO: 2551396
uucucucugcauugcuacc

SEQ ID NO: 2551398 - RNA, 19 nt, Artificial Sequence
  Description of Artificial Sequence: Synthetic oligonucleotide
  Sense strand starting at position 58 of SEQ ID NO: 1888707
gcaccugagagaugaggau

SEQ ID NO: 2551399 - RNA, 19 nt, Artificial Sequence
  Description of Artificial Sequence: Synthetic oligonucleotide
  Antisense strand to SEQ ID NO: 2551398
auccucaucucucaggugc

SEQ ID NO: 2551400 - RNA, 19 nt, Artificial Sequence
  Description of Artificial Sequence: Synthetic oligonucleotide
  Sense strand starting at position 1021 of SEQ ID NO: 1888707
uuugauucgaacgacugaa

SEQ ID NO: 2551401 - RNA, 19 nt, Artificial Sequence
  Description of Artificial Sequence: Synthetic oligonucleotide
  Antisense strand to SEQ ID NO: 2551400
uucagucguucgaaucaaa

SEQ ID NO: 2551402 - RNA, 19 nt, Artificial Sequence
  Description of Artificial Sequence: Synthetic oligonucleotide
  Sense strand starting at position 2909 of SEQ ID NO: 1888707
gucuuugauagauaugagu

SEQ ID NO: 2551403 - RNA, 19 nt, Artificial Sequence
  Description of Artificial Sequence: Synthetic oligonucleotide
  Antisense strand to SEQ ID NO: 2551402
acucauaucuaucaaagac

SEQ ID NO: 2551404 - RNA, 19 nt, Artificial Sequence
  Description of Artificial Sequence: Synthetic oligonucleotide
  Sense strand starting at position 2384 of SEQ ID NO: 1888707
uugaauaaccaagguuacu

SEQ ID NO: 2551405 - RNA, 19 nt, Artificial Sequence
  Description of Artificial Sequence: Synthetic oligonucleotide
  Antisense strand to SEQ ID NO: 2551404
aguaaccuugguuauucaa

SEQ ID NO: 2551406 - RNA, 19 nt, Artificial Sequence
  Description of Artificial Sequence: Synthetic oligonucleotide
  Sense strand starting at position 113 of SEQ ID NO: 1888707
aggcaugcacuccagaaau

SEQ ID NO: 2551407 - RNA, 19 nt, Artificial Sequence
  Description of Artificial Sequence: Synthetic oligonucleotide
  Antisense strand to SEQ ID NO: 2551406
auuucuggagugcaugccu

SEQ ID NO: 2551408 - RNA, 19 nt, Artificial Sequence
  Description of Artificial Sequence: Synthetic oligonucleotide
  Sense strand starting at position 3899 of SEQ ID NO: 1888707
uccugaguagcauagauua

SEQ ID NO: 2551409 - RNA, 19 nt, Artificial Sequence
  Description of Artificial Sequence: Synthetic oligonucleotide
  Antisense strand to SEQ ID NO: 2551408
uaaucuaugcuacucagga

SEQ ID NO: 2551410 - RNA, 19 nt, Artificial Sequence
  Description of Artificial Sequence: Synthetic oligonucleotide
  Sense strand starting at position 639 of SEQ ID NO: 1888707
cucucuagcccuuagggaa

SEQ ID NO: 2551411 - RNA, 19 nt, Artificial Sequence
  Description of Artificial Sequence: Synthetic oligonucleotide
  Antisense strand to SEQ ID NO: 2551410
uucccuaagggcuagagag

SEQ ID NO: 2551412 - RNA, 19 nt, Artificial Sequence
  Description of Artificial Sequence: Synthetic oligonucleotide
  Sense strand starting at position 2924 of SEQ ID NO: 1888707
gaguauugacuccaugguc

SEQ ID NO: 2551413 - RNA, 19 nt, Artificial Sequence
  Description of Artificial Sequence: Synthetic oligonucleotide
  Antisense strand to SEQ ID NO: 2551412
gaccauggagucaauacuc

SEQ ID NO: 2551414 - RNA, 19 nt, Artificial Sequence
  Description of Artificial Sequence: Synthetic oligonucleotide
  Sense strand starting at position 2902 of SEQ ID NO: 1888707
gugagaggucuuugauaga

SEQ ID NO: 2551415 - RNA, 19 nt, Artificial Sequence
  Description of Artificial Sequence: Synthetic oligonucleotide
  Antisense strand to SEQ ID NO: 2551414
ucuaucaaagaccucucac

SEQ ID NO: 2551416 - RNA, 19 nt, Artificial Sequence
  Description of Artificial Sequence: Synthetic oligonucleotide
  Sense strand starting at position 2927 of SEQ ID NO: 1888707
uauugacuccauggucaga

SEQ ID NO: 2551417 - RNA, 19 nt, Artificial Sequence
  Description of Artificial Sequence: Synthetic oligonucleotide
  Antisense strand to SEQ ID NO: 2551416
ucugaccauggagucaaua

SEQ ID NO: 2551418 - RNA, 19 nt, Artificial Sequence
  Description of Artificial Sequence: Synthetic oligonucleotide
  Sense strand starting at position 2553 of SEQ ID NO: 1888707
cauccucugggauacguua

SEQ ID NO: 2551419 - RNA, 19 nt, Artificial Sequence
  Description of Artificial Sequence: Synthetic oligonucleotide
  Antisense strand to SEQ ID NO: 2551418
uaacguaucccagaggaug

SEQ ID NO: 2551420 - RNA, 19 nt, Artificial Sequence
  Description of Artificial Sequence: Synthetic oligonucleotide
  Sense strand starting at position 548 of SEQ ID NO: 1888707
gugucacuagcuuaagaga

SEQ ID NO: 2551421 - RNA, 19 nt, Artificial Sequence
  Description of Artificial Sequence: Synthetic oligonucleotide
  Antisense strand to SEQ ID NO: 2551420
ucucuuaagcuagugacac

SEQ ID NO: 2551422 - RNA, 19 nt, Artificial Sequence
  Description of Artificial Sequence: Synthetic oligonucleotide
  Sense strand starting at position 2517 of SEQ ID NO: 1888707
ucucucuagugcuuuauuu

SEQ ID NO: 2551423 - RNA, 19 nt, Artificial Sequence
  Description of Artificial Sequence: Synthetic oligonucleotide
  Antisense strand to SEQ ID NO: 2551422
aaauaaagcacuagagaga

SEQ ID NO: 2551424 - RNA, 19 nt, Artificial Sequence
  Description of Artificial Sequence: Synthetic oligonucleotide
  Sense strand starting at position 115 of SEQ ID NO: 1888707
gcaugcacuccagaaaucu

SEQ ID NO: 2551425 - RNA, 19 nt, Artificial Sequence
  Description of Artificial Sequence: Synthetic oligonucleotide
  Antisense strand to SEQ ID NO: 2551424
agauuucuggagugcaugc

SEQ ID NO: 2551426 - RNA, 19 nt, Artificial Sequence
  Description of Artificial Sequence: Synthetic oligonucleotide
  Sense strand starting at position 528 of SEQ ID NO: 1888707
cccuuaucuggugaauggu

SEQ ID NO: 2551427 - RNA, 19 nt, Artificial Sequence
  Description of Artificial Sequence: Synthetic oligonucleotide
  Antisense strand to SEQ ID NO: 2551426
accauucaccagauaaggg

SEQ ID NO: 2551428 - RNA, 19 nt, Artificial Sequence
  Description of Artificial Sequence: Synthetic oligonucleotide
  Sense strand starting at position 2564 of SEQ ID NO: 1888707
auacguuagcauuaacauc

SEQ ID NO: 2551429 - RNA, 19 nt, Artificial Sequence
  Description of Artificial Sequence: Synthetic oligonucleotide
  Antisense strand to SEQ ID NO: 2551428
gauguuaaugcuaacguau

SEQ ID NO: 2551430 - RNA, 19 nt, Artificial Sequence
  Description of Artificial Sequence: Synthetic oligonucleotide
  Sense strand starting at position 945 of SEQ ID NO: 1888707
gugccaauuagcgagaaag

SEQ ID NO: 2551431 - RNA, 19 nt, Artificial Sequence
  Description of Artificial Sequence: Synthetic oligonucleotide
  Antisense strand to SEQ ID NO: 2551430
cuuucucgcuaauuggcac

SEQ ID NO: 2551432 - RNA, 19 nt, Artificial Sequence
  Description of Artificial Sequence: Synthetic oligonucleotide
  Sense strand starting at position 2796 of SEQ ID NO: 1888707
caguguccagaauggagua

SEQ ID NO: 2551433 - RNA, 19 nt, Artificial Sequence
  Description of Artificial Sequence: Synthetic oligonucleotide
  Antisense strand to SEQ ID NO: 2551432
uacuccauucuggacacug

SEQ ID NO: 2551434 - RNA, 19 nt, Artificial Sequence
  Description of Artificial Sequence: Synthetic oligonucleotide
  Sense strand starting at position 433 of SEQ ID NO: 1888707
gccugcacuccagaaaucu

SEQ ID NO: 2551435 - RNA, 19 nt, Artificial Sequence
  Description of Artificial Sequence: Synthetic oligonucleotide
  Antisense strand to SEQ ID NO: 2551434
agauuucuggagugcaggc

SEQ ID NO: 2551436 - RNA, 19 nt, Artificial Sequence
  Description of Artificial Sequence: Synthetic oligonucleotide
  Sense strand starting at position 888 of SEQ ID NO: 1888707
uggcaaauccacuggcaaa

SEQ ID NO: 2551437 - RNA, 19 nt, Artificial Sequence
  Description of Artificial Sequence: Synthetic oligonucleotide
  Antisense strand to SEQ ID NO: 2551436
uuugccaguggauuugcca

SEQ ID NO: 2551438 - RNA, 19 nt, Artificial Sequence
  Description of Artificial Sequence: Synthetic oligonucleotide
  Sense strand starting at position 393 of SEQ ID NO: 1888707
ccaggagugcugggauuac

SEQ ID NO: 2551439 - RNA, 19 nt, Artificial Sequence
  Description of Artificial Sequence: Synthetic oligonucleotide
  Antisense strand to SEQ ID NO: 2551438
guaaucccagcacuccugg

SEQ ID NO: 2551440 - RNA, 19 nt, Artificial Sequence
  Description of Artificial Sequence: Synthetic oligonucleotide
  Sense strand starting at position 947 of SEQ ID NO: 1888707
gccaauuagcgagaaagca

SEQ ID NO: 2551441 - RNA, 19 nt, Artificial Sequence
  Description of Artificial Sequence: Synthetic oligonucleotide
  Antisense strand to SEQ ID NO: 2551440
ugcuuucucgcuaauuggc

SEQ ID NO: 2551442 - RNA, 19 nt, Artificial Sequence
  Description of Artificial Sequence: Synthetic oligonucleotide
  Sense strand starting at position 915 of SEQ ID NO: 1888707
gccaauuuagcauguguuc

SEQ ID NO: 2551443 - RNA, 19 nt, Artificial Sequence
  Description of Artificial Sequence: Synthetic oligonucleotide
  Antisense strand to SEQ ID NO: 2551442
gaacacaugcuaaauuggc

SEQ ID NO: 2551444 - RNA, 19 nt, Artificial Sequence
  Description of Artificial Sequence: Synthetic oligonucleotide
  Sense strand starting at position 924 of SEQ ID NO: 1888707
gcauguguuccucaccaaa

SEQ ID NO: 2551445 - RNA, 19 nt, Artificial Sequence
  Description of Artificial Sequence: Synthetic oligonucleotide
  Antisense strand to SEQ ID NO: 2551444
uuuggugaggaacacaugc

SEQ ID NO: 2551446 - RNA, 19 nt, Artificial Sequence
  Description of Artificial Sequence: Synthetic oligonucleotide
  Sense strand starting at position 2560 of SEQ ID NO: 1888707
ugggauacguuagcauuaa

SEQ ID NO: 2551447 - RNA, 19 nt, Artificial Sequence
  Description of Artificial Sequence: Synthetic oligonucleotide
  Antisense strand to SEQ ID NO: 2551446
uuaaugcuaacguauccca

SEQ ID NO: 2551448 - RNA, 19 nt, Artificial Sequence
  Description of Artificial Sequence: Synthetic oligonucleotide
  Sense strand starting at position 431 of SEQ ID NO: 1888707
cggccugcacuccagaaau

SEQ ID NO: 2551449 - RNA, 19 nt, Artificial Sequence
  Description of Artificial Sequence: Synthetic oligonucleotide
  Antisense strand to SEQ ID NO: 2551448
auuucuggagugcaggccg

SEQ ID NO: 2551450 - RNA, 19 nt, Artificial Sequence
  Description of Artificial Sequence: Synthetic oligonucleotide
  Sense strand starting at position 546 of SEQ ID NO: 1888707
uggugucacuagcuuaaga

SEQ ID NO: 2551451 - RNA, 19 nt, Artificial Sequence
  Description of Artificial Sequence: Synthetic oligonucleotide
  Antisense strand to SEQ ID NO: 2551450
ucuuaagcuagugacacca

SEQ ID NO: 2551452 - RNA, 19 nt, Artificial Sequence
  Description of Artificial Sequence: Synthetic oligonucleotide
  Sense strand starting at position 2409 of SEQ ID NO: 1888707
ugccaagcucugugaagaa

SEQ ID NO: 2551453 - RNA, 19 nt, Artificial Sequence
  Description of Artificial Sequence: Synthetic oligonucleotide
  Antisense strand to SEQ ID NO: 2551452
uucuucacagagcuuggca

SEQ ID NO: 2551454 - RNA, 19 nt, Artificial Sequence
  Description of Artificial Sequence: Synthetic oligonucleotide
  Sense strand starting at position 577 of SEQ ID NO: 1888707
ucugaaguccucugacugu

SEQ ID NO: 2551455 - RNA, 19 nt, Artificial Sequence
  Description of Artificial Sequence: Synthetic oligonucleotide
  Antisense strand to SEQ ID NO: 2551454
acagucagaggacuucaga

SEQ ID NO: 2551456 - RNA, 19 nt, Artificial Sequence
  Description of Artificial Sequence: Synthetic oligonucleotide
  Sense strand starting at position 2408 of SEQ ID NO: 1888707
cugccaagcucugugaaga

SEQ ID NO: 2551457 - RNA, 19 nt, Artificial Sequence
  Description of Artificial Sequence: Synthetic oligonucleotide
  Antisense strand to SEQ ID NO: 2551456
ucuucacagagcuuggcag

SEQ ID NO: 2551458 - RNA, 19 nt, Artificial Sequence
  Description of Artificial Sequence: Synthetic oligonucleotide
  Sense strand starting at position 2790 of SEQ ID NO: 1888707
cugucucaguguccagaau

SEQ ID NO: 2551459 - RNA, 19 nt, Artificial Sequence
  Description of Artificial Sequence: Synthetic oligonucleotide
  Antisense strand to SEQ ID NO: 2551458
auucuggacacugagacag

SEQ ID NO: 2551460 - RNA, 19 nt, Artificial Sequence
  Description of Artificial Sequence: Synthetic oligonucleotide
  Sense strand starting at position 2008 of SEQ ID NO: 1888707
cguccaaucagauggcagu

SEQ ID NO: 2551461 - RNA, 19 nt, Artificial Sequence
  Description of Artificial Sequence: Synthetic oligonucleotide
  Antisense strand to SEQ ID NO: 2551460
acugccaucugauuggacg

SEQ ID NO: 2551462 - RNA, 19 nt, Artificial Sequence
  Description of Artificial Sequence: Synthetic oligonucleotide
  Sense strand starting at position 687 of SEQ ID NO: 1888707
agggaaugcucagagacug

SEQ ID NO: 2551463 - RNA, 19 nt, Artificial Sequence
  Description of Artificial Sequence: Synthetic oligonucleotide
  Antisense strand to SEQ ID NO: 2551462
cagucucugagcauucccu

SEQ ID NO: 2551464 - RNA, 19 nt, Artificial Sequence
  Description of Artificial Sequence: Synthetic oligonucleotide
  Sense strand starting at position 2880 of SEQ ID NO: 1888707
guugguuucuauuccaugu

SEQ ID NO: 2551465 - RNA, 19 nt, Artificial Sequence
  Description of Artificial Sequence: Synthetic oligonucleotide
  Antisense strand to SEQ ID NO: 2551464
acauggaauagaaaccaac

SEQ ID NO: 2551466 - RNA, 19 nt, Artificial Sequence
  Description of Artificial Sequence: Synthetic oligonucleotide
  Sense strand starting at position 2454 of SEQ ID NO: 1888707
gggacauacuuugagaggu

SEQ ID NO: 2551467 - RNA, 19 nt, Artificial Sequence
  Description of Artificial Sequence: Synthetic oligonucleotide
  Antisense strand to SEQ ID NO: 2551466
accucucaaaguauguccc

SEQ ID NO: 2551468 - RNA, 19 nt, Artificial Sequence
  Description of Artificial Sequence: Synthetic oligonucleotide
  Sense strand starting at position 1163 of SEQ ID NO: 1888707
gaacuuacccgcuguguga

SEQ ID NO: 2551469 - RNA, 19 nt, Artificial Sequence
  Description of Artificial Sequence: Synthetic oligonucleotide
  Antisense strand to SEQ ID NO: 2551468
ucacacagcggguaaguuc

SEQ ID NO: 2551470 - RNA, 19 nt, Artificial Sequence
  Description of Artificial Sequence: Synthetic oligonucleotide
  Sense strand starting at position 2905 of SEQ ID NO: 1888707
agaggucuuugauagauau

SEQ ID NO: 2551471 - RNA, 19 nt, Artificial Sequence
  Description of Artificial Sequence: Synthetic oligonucleotide
  Antisense strand to SEQ ID NO: 2551470
auaucuaucaaagaccucu

SEQ ID NO: 2551472 - RNA, 19 nt, Artificial Sequence
  Description of Artificial Sequence: Synthetic oligonucleotide
  Sense strand starting at position 2456 of SEQ ID NO: 1888707
gacauacuuugagagguca

SEQ ID NO: 2551473 - RNA, 19 nt, Artificial Sequence
  Description of Artificial Sequence: Synthetic oligonucleotide
  Antisense strand to SEQ ID NO: 2551472
ugaccucucaaaguauguc

SEQ ID NO: 2551474 - RNA, 19 nt, Artificial Sequence
  Description of Artificial Sequence: Synthetic oligonucleotide
  Sense strand starting at position 551 of SEQ ID NO: 1888707
ucacuagcuuaagagauga

SEQ ID NO: 2551475 - RNA, 19 nt, Artificial Sequence
  Description of Artificial Sequence: Synthetic oligonucleotide
  Antisense strand to SEQ ID NO: 2551474
ucaucucuuaagcuaguga

SEQ ID NO: 2551476 - RNA, 19 nt, Artificial Sequence
  Description of Artificial Sequence: Synthetic oligonucleotide
  Sense strand starting at position 3881 of SEQ ID NO: 1888708
gguagcaaugcagagagaa

SEQ ID NO: 2551477 - RNA, 19 nt, Artificial Sequence
  Description of Artificial Sequence: Synthetic oligonucleotide
  Antisense strand to SEQ ID NO: 2551476
uucucucugcauugcuacc

SEQ ID NO: 2551478 - RNA, 19 nt, Artificial Sequence
  Description of Artificial Sequence: Synthetic oligonucleotide
  Sense strand starting at position 241 of SEQ ID NO: 1888708
gcaccugagagaugaggau

SEQ ID NO: 2551479 - RNA, 19 nt, Artificial Sequence
  Description of Artificial Sequence: Synthetic oligonucleotide
  Antisense strand to SEQ ID NO: 2551478
auccucaucucucaggugc

SEQ ID NO: 2551480 - RNA, 19 nt, Artificial Sequence
  Description of Artificial Sequence: Synthetic oligonucleotide
  Sense strand starting at position 1204 of SEQ ID NO: 1888708
uuugauucgaacgacugaa

SEQ ID NO: 2551481 - RNA, 19 nt, Artificial Sequence
  Description of Artificial Sequence: Synthetic oligonucleotide
  Antisense strand to SEQ ID NO: 2551480
uucagucguucgaaucaaa

SEQ ID NO: 2551482 - RNA, 19 nt, Artificial Sequence
  Description of Artificial Sequence: Synthetic oligonucleotide
  Sense strand starting at position 3092 of SEQ ID NO: 1888708
gucuuugauagauaugagu

SEQ ID NO: 2551483 - RNA, 19 nt, Artificial Sequence
  Description of Artificial Sequence: Synthetic oligonucleotide
  Antisense strand to SEQ ID NO: 2551482
acucauaucuaucaaagac

SEQ ID NO: 2551484 - RNA, 19 nt, Artificial Sequence
  Description of Artificial Sequence: Synthetic oligonucleotide
  Sense strand starting at position 2567 of SEQ ID NO: 1888708
uugaauaaccaagguuacu

SEQ ID NO: 2551485 - RNA, 19 nt, Artificial Sequence
  Description of Artificial Sequence: Synthetic oligonucleotide
  Antisense strand to SEQ ID NO: 2551484
aguaaccuugguuauucaa

SEQ ID NO: 2551486 - RNA, 19 nt, Artificial Sequence
  Description of Artificial Sequence: Synthetic oligonucleotide
  Sense strand starting at position 296 of SEQ ID NO: 1888708
aggcaugcacuccagaaau

SEQ ID NO: 2551487 - RNA, 19 nt, Artificial Sequence
  Description of Artificial Sequence: Synthetic oligonucleotide
  Antisense strand to SEQ ID NO: 2551486
auuucuggagugcaugccu

SEQ ID NO: 2551488 - RNA, 19 nt, Artificial Sequence
  Description of Artificial Sequence: Synthetic oligonucleotide
  Sense strand starting at position 822 of SEQ ID NO: 1888708
cucucuagcccuuagggaa

SEQ ID NO: 2551489 - RNA, 19 nt, Artificial Sequence
  Description of Artificial Sequence: Synthetic oligonucleotide
  Antisense strand to SEQ ID NO: 2551488
uucccuaagggcuagagag

SEQ ID NO: 2551490 - RNA, 19 nt, Artificial Sequence
  Description of Artificial Sequence: Synthetic oligonucleotide
  Sense strand starting at position 3107 of SEQ ID NO: 1888708
gaguauugacuccaugguc

SEQ ID NO: 2551491 - RNA, 19 nt, Artificial Sequence
  Description of Artificial Sequence: Synthetic oligonucleotide
  Antisense strand to SEQ ID NO: 2551490
gaccauggagucaauacuc

SEQ ID NO: 2551492 - RNA, 19 nt, Artificial Sequence
  Description of Artificial Sequence: Synthetic oligonucleotide
  Sense strand starting at position 10 of SEQ ID NO: 1888708
ugugauuaggugcaagaac

SEQ ID NO: 2551493 - RNA, 19 nt, Artificial Sequence
  Description of Artificial Sequence: Synthetic oligonucleotide
  Antisense strand to SEQ ID NO: 2551492
guucuugcaccuaaucaca

SEQ ID NO: 2551494 - RNA, 19 nt, Artificial Sequence
  Description of Artificial Sequence: Synthetic oligonucleotide
  Sense strand starting at position 3085 of SEQ ID NO: 1888708
gugagaggucuuugauaga

SEQ ID NO: 2551495 - RNA, 19 nt, Artificial Sequence
  Description of Artificial Sequence: Synthetic oligonucleotide
  Antisense strand to SEQ ID NO: 2551494
ucuaucaaagaccucucac

SEQ ID NO: 2551496 - RNA, 19 nt, Artificial Sequence
  Description of Artificial Sequence: Synthetic oligonucleotide
  Sense strand starting at position 3110 of SEQ ID NO: 1888708
uauugacuccauggucaga

SEQ ID NO: 2551497 - RNA, 19 nt, Artificial Sequence
  Description of Artificial Sequence: Synthetic oligonucleotide
  Antisense strand to SEQ ID NO: 2551496
ucugaccauggagucaaua

SEQ ID NO: 2551498 - RNA, 19 nt, Artificial Sequence
  Description of Artificial Sequence: Synthetic oligonucleotide
  Sense strand starting at position 2736 of SEQ ID NO: 1888708
cauccucugggauacguua

SEQ ID NO: 2551499 - RNA, 19 nt, Artificial Sequence
  Description of Artificial Sequence: Synthetic oligonucleotide
  Antisense strand to SEQ ID NO: 2551498
uaacguaucccagaggaug

SEQ ID NO: 2551500 - RNA, 19 nt, Artificial Sequence
  Description of Artificial Sequence: Synthetic oligonucleotide
  Sense strand starting at position 731 of SEQ ID NO: 1888708
gugucacuagcuuaagaga

SEQ ID NO: 2551501 - RNA, 19 nt, Artificial Sequence
  Description of Artificial Sequence: Synthetic oligonucleotide
  Antisense strand to SEQ ID NO: 2551500
ucucuuaagcuagugacac

SEQ ID NO: 2551502 - RNA, 19 nt, Artificial Sequence
  Description of Artificial Sequence: Synthetic oligonucleotide
  Sense strand starting at position 2700 of SEQ ID NO: 1888708
ucucucuagugcuuuauuu

SEQ ID NO: 2551503 - RNA, 19 nt, Artificial Sequence
  Description of Artificial Sequence: Synthetic oligonucleotide
  Antisense strand to SEQ ID NO: 2551502
aaauaaagcacuagagaga

SEQ ID NO: 2551504 - RNA, 19 nt, Artificial Sequence
  Description of Artificial Sequence: Synthetic oligonucleotide
  Sense strand starting at position 298 of SEQ ID NO: 1888708
gcaugcacuccagaaaucu

SEQ ID NO: 2551505 - RNA, 19 nt, Artificial Sequence
  Description of Artificial Sequence: Synthetic oligonucleotide
  Antisense strand to SEQ ID NO: 2551504
agauuucuggagugcaugc

SEQ ID NO: 2551506 - RNA, 19 nt, Artificial Sequence
  Description of Artificial Sequence: Synthetic oligonucleotide
  Sense strand starting at position 711 of SEQ ID NO: 1888708
cccuuaucuggugaauggu

SEQ ID NO: 2551507 - RNA, 19 nt, Artificial Sequence
  Description of Artificial Sequence: Synthetic oligonucleotide
  Antisense strand to SEQ ID NO: 2551506
accauucaccagauaaggg

SEQ ID NO: 2551508 - RNA, 19 nt, Artificial Sequence
  Description of Artificial Sequence: Synthetic oligonucleotide
  Sense strand starting at position 19 of SEQ ID NO: 1888708
gugcaagaacugugggaaa

SEQ ID NO: 2551509 - RNA, 19 nt, Artificial Sequence
  Description of Artificial Sequence: Synthetic oligonucleotide
  Antisense strand to SEQ ID NO: 2551508
uuucccacaguucuugcac

SEQ ID NO: 2551510 - RNA, 19 nt, Artificial Sequence
  Description of Artificial Sequence: Synthetic oligonucleotide
  Sense strand starting at position 2747 of SEQ ID NO: 1888708
auacguuagcauuaacauc

SEQ ID NO: 2551511 - RNA, 19 nt, Artificial Sequence
  Description of Artificial Sequence: Synthetic oligonucleotide
  Antisense strand to SEQ ID NO: 2551510
gauguuaaugcuaacguau

SEQ ID NO: 2551512 - RNA, 19 nt, Artificial Sequence
  Description of Artificial Sequence: Synthetic oligonucleotide
  Sense strand starting at position 1128 of SEQ ID NO: 1888708
gugccaauuagcgagaaag

SEQ ID NO: 2551513 - RNA, 19 nt, Artificial Sequence
  Description of Artificial Sequence: Synthetic oligonucleotide
  Antisense strand to SEQ ID NO: 2551512
cuuucucgcuaauuggcac

SEQ ID NO: 2551514 - RNA, 19 nt, Artificial Sequence
  Description of Artificial Sequence: Synthetic oligonucleotide
  Sense strand starting at position 2979 of SEQ ID NO: 1888708
caguguccagaauggagua

SEQ ID NO: 2551515 - RNA, 19 nt, Artificial Sequence
  Description of Artificial Sequence: Synthetic oligonucleotide
  Antisense strand to SEQ ID NO: 2551514
uacuccauucuggacacug

SEQ ID NO: 2551516 - RNA, 19 nt, Artificial Sequence
  Description of Artificial Sequence: Synthetic oligonucleotide
  Sense strand starting at position 616 of SEQ ID NO: 1888708
gccugcacuccagaaaucu

SEQ ID NO: 2551517 - RNA, 19 nt, Artificial Sequence
  Description of Artificial Sequence: Synthetic oligonucleotide
  Antisense strand to SEQ ID NO: 2551516
agauuucuggagugcaggc

SEQ ID NO: 2551518 - RNA, 19 nt, Artificial Sequence
  Description of Artificial Sequence: Synthetic oligonucleotide
  Sense strand starting at position 1071 of SEQ ID NO: 1888708
uggcaaauccacuggcaaa

SEQ ID NO: 2551519 - RNA, 19 nt, Artificial Sequence
  Description of Artificial Sequence: Synthetic oligonucleotide
  Antisense strand to SEQ ID NO: 2551518
uuugccaguggauuugcca

SEQ ID NO: 2551520 - RNA, 19 nt, Artificial Sequence
  Description of Artificial Sequence: Synthetic oligonucleotide
  Sense strand starting at position 576 of SEQ ID NO: 1888708
ccaggagugcugggauuac

SEQ ID NO: 2551521 - RNA, 19 nt, Artificial Sequence
  Description of Artificial Sequence: Synthetic oligonucleotide
  Antisense strand to SEQ ID NO: 2551520
guaaucccagcacuccugg

SEQ ID NO: 2551522 - RNA, 19 nt, Artificial Sequence
  Description of Artificial Sequence: Synthetic oligonucleotide
  Sense strand starting at position 1130 of SEQ ID NO: 1888708
gccaauuagcgagaaagca

SEQ ID NO: 2551523 - RNA, 19 nt, Artificial Sequence
  Description of Artificial Sequence: Synthetic oligonucleotide
  Antisense strand to SEQ ID NO: 2551522
ugcuuucucgcuaauuggc

SEQ ID NO: 2551524 - RNA, 19 nt, Artificial Sequence
  Description of Artificial Sequence: Synthetic oligonucleotide
  Sense strand starting at position 1098 of SEQ ID NO: 1888708
gccaauuuagcauguguuc

SEQ ID NO: 2551525 - RNA, 19 nt, Artificial Sequence
  Description of Artificial Sequence: Synthetic oligonucleotide
  Antisense strand to SEQ ID NO: 2551524
gaacacaugcuaaauuggc

SEQ ID NO: 2551526 - RNA, 19 nt, Artificial Sequence
  Description of Artificial Sequence: Synthetic oligonucleotide
  Sense strand starting at position 167 of SEQ ID NO: 1888708
agaauugaguuaucugcuu

SEQ ID NO: 2551527 - RNA, 19 nt, Artificial Sequence
  Description of Artificial Sequence: Synthetic oligonucleotide
  Antisense strand to SEQ ID NO: 2551526
aagcagauaacucaauucu

SEQ ID NO: 2551528 - RNA, 19 nt, Artificial Sequence
  Description of Artificial Sequence: Synthetic oligonucleotide
  Sense strand starting at position 1107 of SEQ ID NO: 1888708
gcauguguuccucaccaaa

SEQ ID NO: 2551529 - RNA, 19 nt, Artificial Sequence
  Description of Artificial Sequence: Synthetic oligonucleotide
  Antisense strand to SEQ ID NO: 2551528
uuuggugaggaacacaugc

SEQ ID NO: 2551530 - RNA, 19 nt, Artificial Sequence
  Description of Artificial Sequence: Synthetic oligonucleotide
  Sense strand starting at position 2743 of SEQ ID NO: 1888708
ugggauacguuagcauuaa

SEQ ID NO: 2551531 - RNA, 19 nt, Artificial Sequence
  Description of Artificial Sequence: Synthetic oligonucleotide
  Antisense strand to SEQ ID NO: 2551530
uuaaugcuaacguauccca

SEQ ID NO: 2551532 - RNA, 19 nt, Artificial Sequence
  Description of Artificial Sequence: Synthetic oligonucleotide
  Sense strand starting at position 614 of SEQ ID NO: 1888708
cggccugcacuccagaaau

SEQ ID NO: 2551533 - RNA, 19 nt, Artificial Sequence
  Description of Artificial Sequence: Synthetic oligonucleotide
  Antisense strand to SEQ ID NO: 2551532
auuucuggagugcaggccg

SEQ ID NO: 2551534 - RNA, 19 nt, Artificial Sequence
  Description of Artificial Sequence: Synthetic oligonucleotide
  Sense strand starting at position 729 of SEQ ID NO: 1888708
uggugucacuagcuuaaga

SEQ ID NO: 2551535 - RNA, 19 nt, Artificial Sequence
  Description of Artificial Sequence: Synthetic oligonucleotide
  Antisense strand to SEQ ID NO: 2551534
ucuuaagcuagugacacca

SEQ ID NO: 2551536 - RNA, 19 nt, Artificial Sequence
  Description of Artificial Sequence: Synthetic oligonucleotide
  Sense strand starting at position 2592 of SEQ ID NO: 1888708
ugccaagcucugugaagaa

SEQ ID NO: 2551537 - RNA, 19 nt, Artificial Sequence
  Description of Artificial Sequence: Synthetic oligonucleotide
  Antisense strand to SEQ ID NO: 2551536
uucuucacagagcuuggca

SEQ ID NO: 2551538 - RNA, 19 nt, Artificial Sequence
  Description of Artificial Sequence: Synthetic oligonucleotide
  Sense strand starting at position 760 of SEQ ID NO: 1888708
ucugaaguccucugacugu

SEQ ID NO: 2551539 - RNA, 19 nt, Artificial Sequence
  Description of Artificial Sequence: Synthetic oligonucleotide
  Antisense strand to SEQ ID NO: 2551538
acagucagaggacuucaga

SEQ ID NO: 2551540 - RNA, 19 nt, Artificial Sequence
  Description of Artificial Sequence: Synthetic oligonucleotide
  Sense strand starting at position 2591 of SEQ ID NO: 1888708
cugccaagcucugugaaga

SEQ ID NO: 2551541 - RNA, 19 nt, Artificial Sequence
  Description of Artificial Sequence: Synthetic oligonucleotide
  Antisense strand to SEQ ID NO: 2551540
ucuucacagagcuuggcag

SEQ ID NO: 2551542 - RNA, 19 nt, Artificial Sequence
  Description of Artificial Sequence: Synthetic oligonucleotide
  Sense strand starting at position 2973 of SEQ ID NO: 1888708
cugucucaguguccagaau

SEQ ID NO: 2551543 - RNA, 19 nt, Artificial Sequence
  Description of Artificial Sequence: Synthetic oligonucleotide
  Antisense strand to SEQ ID NO: 2551542
auucuggacacugagacag

SEQ ID NO: 2551544 - RNA, 19 nt, Artificial Sequence
  Description of Artificial Sequence: Synthetic oligonucleotide
  Sense strand starting at position 2191 of SEQ ID NO: 1888708
cguccaaucagauggcagu

SEQ ID NO: 2551545 - RNA, 19 nt, Artificial Sequence
  Description of Artificial Sequence: Synthetic oligonucleotide
  Antisense strand to SEQ ID NO: 2551544
acugccaucugauuggacg

SEQ ID NO: 2551546 - RNA, 19 nt, Artificial Sequence
  Description of Artificial Sequence: Synthetic oligonucleotide
  Sense strand starting at position 870 of SEQ ID NO: 1888708
agggaaugcucagagacug

SEQ ID NO: 2551547 - RNA, 19 nt, Artificial Sequence
  Description of Artificial Sequence: Synthetic oligonucleotide
  Antisense strand to SEQ ID NO: 2551546
cagucucugagcauucccu

SEQ ID NO: 2551548 - RNA, 19 nt, Artificial Sequence
  Description of Artificial Sequence: Synthetic oligonucleotide
  Sense strand starting at position 3063 of SEQ ID NO: 1888708
guugguuucuauuccaugu

SEQ ID NO: 2551549 - RNA, 19 nt, Artificial Sequence
  Description of Artificial Sequence: Synthetic oligonucleotide
  Antisense strand to SEQ ID NO: 2551548
acauggaauagaaaccaac

SEQ ID NO: 2551550 - RNA, 19 nt, Artificial Sequence
  Description of Artificial Sequence: Synthetic oligonucleotide
  Sense strand starting at position 2637 of SEQ ID NO: 1888708
gggacauacuuugagaggu

SEQ ID NO: 2551551 - RNA, 19 nt, Artificial Sequence
  Description of Artificial Sequence: Synthetic oligonucleotide
  Antisense strand to SEQ ID NO: 2551550
accucucaaaguauguccc

SEQ ID NO: 2551552 - RNA, 19 nt, Artificial Sequence
  Description of Artificial Sequence: Synthetic oligonucleotide
  Sense strand starting at position 1346 of SEQ ID NO: 1888708
gaacuuacccgcuguguga

SEQ ID NO: 2551553 - RNA, 19 nt, Artificial Sequence
  Description of Artificial Sequence: Synthetic oligonucleotide
  Antisense strand to SEQ ID NO: 2551552
ucacacagcggguaaguuc

SEQ ID NO: 2551554 - RNA, 19 nt, Artificial Sequence
  Description of Artificial Sequence: Synthetic oligonucleotide
  Sense strand starting at position 3088 of SEQ ID NO: 1888708
agaggucuuugauagauau

SEQ ID NO: 2551555 - RNA, 19 nt, Artificial Sequence
  Description of Artificial Sequence: Synthetic oligonucleotide
  Antisense strand to SEQ ID NO: 2551554
auaucuaucaaagaccucu

SEQ ID NO: 2551556 - RNA, 19 nt, Artificial Sequence
  Description of Artificial Sequence: Synthetic oligonucleotide
  Sense strand starting at position 3932 of SEQ ID NO: 1888709
cccacuacagcugaagauu

SEQ ID NO: 2551557 - RNA, 19 nt, Artificial Sequence
  Description of Artificial Sequence: Synthetic oligonucleotide
  Antisense strand to SEQ ID NO: 2551556
aaucuucagcuguaguggg

SEQ ID NO: 2551558 - RNA, 19 nt, Artificial Sequence
  Description of Artificial Sequence: Synthetic oligonucleotide
  Sense strand starting at position 3616 of SEQ ID NO: 1888709
cgucgucauccauugcaca

SEQ ID NO: 2551559 - RNA, 19 nt, Artificial Sequence
  Description of Artificial Sequence: Synthetic oligonucleotide
  Antisense strand to SEQ ID NO: 2551558
ugugcaauggaugacgacg

SEQ ID NO: 2551560 - RNA, 19 nt, Artificial Sequence
  Description of Artificial Sequence: Synthetic oligonucleotide
  Sense strand starting at position 1603 of SEQ ID NO: 1888709
ggauucgaccuggaagcua

SEQ ID NO: 2551561 - RNA, 19 nt, Artificial Sequence
  Description of Artificial Sequence: Synthetic oligonucleotide
  Antisense strand to SEQ ID NO: 2551560
uagcuuccaggucgaaucc

SEQ ID NO: 2551562 - RNA, 19 nt, Artificial Sequence
  Description of Artificial Sequence: Synthetic oligonucleotide
  Sense strand starting at position 2519 of SEQ ID NO: 1888709
guuucuuaggcuuaagaga

SEQ ID NO: 2551563 - RNA, 19 nt, Artificial Sequence
  Description of Artificial Sequence: Synthetic oligonucleotide
  Antisense strand to SEQ ID NO: 2551562
ucucuuaagccuaagaaac

SEQ ID NO: 2551564 - RNA, 19 nt, Artificial Sequence
  Description of Artificial Sequence: Synthetic oligonucleotide
  Sense strand starting at position 1946 of SEQ ID NO: 1888709
ggaaucaggugguuugaca

SEQ ID NO: 2551565 - RNA, 19 nt, Artificial Sequence
  Description of Artificial Sequence: Synthetic oligonucleotide
  Antisense strand to SEQ ID NO: 2551564
ugucaaaccaccugauucc

SEQ ID NO: 2551566 - RNA, 19 nt, Artificial Sequence
  Description of Artificial Sequence: Synthetic oligonucleotide
  Sense strand starting at position 3196 of SEQ ID NO: 1888709
cugcuuuguccagaggaag

SEQ ID NO: 2551567 - RNA, 19 nt, Artificial Sequence
  Description of Artificial Sequence: Synthetic oligonucleotide
  Antisense strand to SEQ ID NO: 2551566
cuuccucuggacaaagcag

SEQ ID NO: 2551568 - RNA, 19 nt, Artificial Sequence
  Description of Artificial Sequence: Synthetic oligonucleotide
  Sense strand starting at position 2592 of SEQ ID NO: 1888709
ggauccaggccugauguua

SEQ ID NO: 2551569 - RNA, 19 nt, Artificial Sequence
  Description of Artificial Sequence: Synthetic oligonucleotide
  Antisense strand to SEQ ID NO: 2551568
uaacaucaggccuggaucc

SEQ ID NO: 2551570 - RNA, 19 nt, Artificial Sequence
  Description of Artificial Sequence: Synthetic oligonucleotide
  Sense strand starting at position 543 of SEQ ID NO: 1888709
augugacucucuccaggaa

SEQ ID NO: 2551571 - RNA, 19 nt, Artificial Sequence
  Description of Artificial Sequence: Synthetic oligonucleotide
  Antisense strand to SEQ ID NO: 2551570
uuccuggagagagucacau

SEQ ID NO: 2551572 - RNA, 19 nt, Artificial Sequence
  Description of Artificial Sequence: Synthetic oligonucleotide
  Sense strand starting at position 1347 of SEQ ID NO: 1888709
gauguagaccacugucaga

SEQ ID NO: 2551573 - RNA, 19 nt, Artificial Sequence
  Description of Artificial Sequence: Synthetic oligonucleotide
  Antisense strand to SEQ ID NO: 2551572
ucugacaguggucuacauc

SEQ ID NO: 2551574 - RNA, 19 nt, Artificial Sequence
  Description of Artificial Sequence: Synthetic oligonucleotide
  Sense strand starting at position 3748 of SEQ ID NO: 1888709
gagcucuugccacagggau

SEQ ID NO: 2551575 - RNA, 19 nt, Artificial Sequence
  Description of Artificial Sequence: Synthetic oligonucleotide
  Antisense strand to SEQ ID NO: 2551574
aucccuguggcaagagcuc

SEQ ID NO: 2551576 - RNA, 19 nt, Artificial Sequence
  Description of Artificial Sequence: Synthetic oligonucleotide
  Sense strand starting at position 1955 of SEQ ID NO: 1888709
ugguuugacacucgaggaa

SEQ ID NO: 2551577 - RNA, 19 nt, Artificial Sequence
  Description of Artificial Sequence: Synthetic oligonucleotide
  Antisense strand to SEQ ID NO: 2551576
uuccucgagugucaaacca

SEQ ID NO: 2551578 - RNA, 19 nt, Artificial Sequence
  Description of Artificial Sequence: Synthetic oligonucleotide
  Sense strand starting at position 813 of SEQ ID NO: 1888709
ggccuuacagagugacuaa

SEQ ID NO: 2551579 - RNA, 19 nt, Artificial Sequence
  Description of Artificial Sequence: Synthetic oligonucleotide
  Antisense strand to SEQ ID NO: 2551578
uuagucacucuguaaggcc

SEQ ID NO: 2551580 - RNA, 19 nt, Artificial Sequence
  Description of Artificial Sequence: Synthetic oligonucleotide
  Sense strand starting at position 3907 of SEQ ID NO: 1888709
uuccauuaucagugaccca

SEQ ID NO: 2551581 - RNA, 19 nt, Artificial Sequence
  Description of Artificial Sequence: Synthetic oligonucleotide
  Antisense strand to SEQ ID NO: 2551580
ugggucacugauaauggaa

SEQ ID NO: 2551582 - RNA, 19 nt, Artificial Sequence
  Description of Artificial Sequence: Synthetic oligonucleotide
  Sense strand starting at position 2236 of SEQ ID NO: 1888709
ggugguguauuccuaaaga

SEQ ID NO: 2551583 - RNA, 19 nt, Artificial Sequence
  Description of Artificial Sequence: Synthetic oligonucleotide
  Antisense strand to SEQ ID NO: 2551582
ucuuuaggaauacaccacc

SEQ ID NO: 2551584 - RNA, 19 nt, Artificial Sequence
  Description of Artificial Sequence: Synthetic oligonucleotide
  Sense strand starting at position 3779 of SEQ ID NO: 1888709
agaugagucauguggcacu

SEQ ID NO: 2551585 - RNA, 19 nt, Artificial Sequence
  Description of Artificial Sequence: Synthetic oligonucleotide
  Antisense strand to SEQ ID NO: 2551584
agugccacaugacucaucu

SEQ ID NO: 2551586 - RNA, 19 nt, Artificial Sequence
  Description of Artificial Sequence: Synthetic oligonucleotide
  Sense strand starting at position 3194 of SEQ ID NO: 1888709
gccugcuuuguccagagga

SEQ ID NO: 2551587 - RNA, 19 nt, Artificial Sequence
  Description of Artificial Sequence: Synthetic oligonucleotide
  Antisense strand to SEQ ID NO: 2551586
uccucuggacaaagcaggc

SEQ ID NO: 2551588 - RNA, 19 nt, Artificial Sequence
  Description of Artificial Sequence: Synthetic oligonucleotide
  Sense strand starting at position 3873 of SEQ ID NO: 1888709
ugagacacuucugugcuua

SEQ ID NO: 2551589 - RNA, 19 nt, Artificial Sequence
  Description of Artificial Sequence: Synthetic oligonucleotide
  Antisense strand to SEQ ID NO: 2551588
uaagcacagaagugucuca

SEQ ID NO: 2551590 - RNA, 19 nt, Artificial Sequence
  Description of Artificial Sequence: Synthetic oligonucleotide
  Sense strand starting at position 2685 of SEQ ID NO: 1888709
gaggccaccuccuuaguau

SEQ ID NO: 2551591 - RNA, 19 nt, Artificial Sequence
  Description of Artificial Sequence: Synthetic oligonucleotide
  Antisense strand to SEQ ID NO: 2551590
auacuaaggagguggccuc

SEQ ID NO: 2551592 - RNA, 19 nt, Artificial Sequence
  Description of Artificial Sequence: Synthetic oligonucleotide
  Sense strand starting at position 3901 of SEQ ID NO: 1888709
cgucacuuccauuaucagu

SEQ ID NO: 2551593 - RNA, 19 nt, Artificial Sequence
  Description of Artificial Sequence: Synthetic oligonucleotide
  Antisense strand to SEQ ID NO: 2551592
acugauaauggaagugacg

SEQ ID NO: 2551594 - RNA, 19 nt, Artificial Sequence
  Description of Artificial Sequence: Synthetic oligonucleotide
  Sense strand starting at position 3874 of SEQ ID NO: 1888709
gagacacuucugugcuuac

SEQ ID NO: 2551595 - RNA, 19 nt, Artificial Sequence
  Description of Artificial Sequence: Synthetic oligonucleotide
  Antisense strand to SEQ ID NO: 2551594
guaagcacagaagugucuc

SEQ ID NO: 2551596 - RNA, 19 nt, Artificial Sequence
  Description of Artificial Sequence: Synthetic oligonucleotide
  Sense strand starting at position 3610 of SEQ ID NO: 1888709
ucaagacgucgucauccau

SEQ ID NO: 2551597 - RNA, 19 nt, Artificial Sequence
  Description of Artificial Sequence: Synthetic oligonucleotide
  Antisense strand to SEQ ID NO: 2551596
auggaugacgacgucuuga

SEQ ID NO: 2551598 - RNA, 19 nt, Artificial Sequence
  Description of Artificial Sequence: Synthetic oligonucleotide
  Sense strand starting at position 3875 of SEQ ID NO: 1888709
agacacuucugugcuuacu

SEQ ID NO: 2551599 - RNA, 19 nt, Artificial Sequence
  Description of Artificial Sequence: Synthetic oligonucleotide
  Antisense strand to SEQ ID NO: 2551598
aguaagcacagaagugucu

SEQ ID NO: 2551600 - RNA, 19 nt, Artificial Sequence
  Description of Artificial Sequence: Synthetic oligonucleotide
  Sense strand starting at position 1931 of SEQ ID NO: 1888709
ggaugaaugucuuauggaa

SEQ ID NO: 2551601 - RNA, 19 nt, Artificial Sequence
  Description of Artificial Sequence: Synthetic oligonucleotide
  Antisense strand to SEQ ID NO: 2551600
uuccauaagacauucaucc

SEQ ID NO: 2551602 - RNA, 19 nt, Artificial Sequence
  Description of Artificial Sequence: Synthetic oligonucleotide
  Sense strand starting at position 3261 of SEQ ID NO: 1888709
ggcaguuucgcgggacgga

SEQ ID NO: 2551603 - RNA, 19 nt, Artificial Sequence
  Description of Artificial Sequence: Synthetic oligonucleotide
  Antisense strand to SEQ ID NO: 2551602
uccgucccgcgaaacugcc

SEQ ID NO: 2551604 - RNA, 19 nt, Artificial Sequence
  Description of Artificial Sequence: Synthetic oligonucleotide
  Sense strand starting at position 3798 of SEQ ID NO: 1888709
ggccaucagucugaggaca

SEQ ID NO: 2551605 - RNA, 19 nt, Artificial Sequence
  Description of Artificial Sequence: Synthetic oligonucleotide
  Antisense strand to SEQ ID NO: 2551604
uguccucagacugauggcc

SEQ ID NO: 2551606 - RNA, 19 nt, Artificial Sequence
  Description of Artificial Sequence: Synthetic oligonucleotide
  Sense strand starting at position 1933 of SEQ ID NO: 1888709
augaaugucuuauggaauc

SEQ ID NO: 2551607 - RNA, 19 nt, Artificial Sequence
  Description of Artificial Sequence: Synthetic oligonucleotide
  Antisense strand to SEQ ID NO: 2551606
gauuccauaagacauucau

SEQ ID NO: 2551608 - RNA, 19 nt, Artificial Sequence
  Description of Artificial Sequence: Synthetic oligonucleotide
  Sense strand starting at position 823 of SEQ ID NO: 1888709
agugacuaaugguggaauu

SEQ ID NO: 2551609 - RNA, 19 nt, Artificial Sequence
  Description of Artificial Sequence: Synthetic oligonucleotide
  Antisense strand to SEQ ID NO: 2551608
aauuccaccauuagucacu

SEQ ID NO: 2551610 - RNA, 19 nt, Artificial Sequence
  Description of Artificial Sequence: Synthetic oligonucleotide
  Sense strand starting at position 3619 of SEQ ID NO: 1888709
cgucauccauugcacagau

SEQ ID NO: 2551611 - RNA, 19 nt, Artificial Sequence
  Description of Artificial Sequence: Synthetic oligonucleotide
  Antisense strand to SEQ ID NO: 2551610
aucugugcaauggaugacg

SEQ ID NO: 2551612 - RNA, 19 nt, Artificial Sequence
  Description of Artificial Sequence: Synthetic oligonucleotide
  Sense strand starting at position 3777 of SEQ ID NO: 1888709
cuagaugagucauguggca

SEQ ID NO: 2551613 - RNA, 19 nt, Artificial Sequence
  Description of Artificial Sequence: Synthetic oligonucleotide
  Antisense strand to SEQ ID NO: 2551612
ugccacaugacucaucuag

SEQ ID NO: 2551614 - RNA, 19 nt, Artificial Sequence
  Description of Artificial Sequence: Synthetic oligonucleotide
  Sense strand starting at position 3872 of SEQ ID NO: 1888709
uugagacacuucugugcuu

SEQ ID NO: 2551615 - RNA, 19 nt, Artificial Sequence
  Description of Artificial Sequence: Synthetic oligonucleotide
  Antisense strand to SEQ ID NO: 2551614
aagcacagaagugucucaa

SEQ ID NO: 2551616 - RNA, 19 nt, Artificial Sequence
  Description of Artificial Sequence: Synthetic oligonucleotide
  Sense strand starting at position 1410 of SEQ ID NO: 1888710
agugcaaauccacagacau

SEQ ID NO: 2551617 - RNA, 19 nt, Artificial Sequence
  Description of Artificial Sequence: Synthetic oligonucleotide
  Antisense strand to SEQ ID NO: 2551616
augucuguggauuugcacu

SEQ ID NO: 2551618 - RNA, 19 nt, Artificial Sequence
  Description of Artificial Sequence: Synthetic oligonucleotide
  Sense strand starting at position 2211 of SEQ ID NO: 1888710
cgcugcaugggugucuaau

SEQ ID NO: 2551619 - RNA, 19 nt, Artificial Sequence
  Description of Artificial Sequence: Synthetic oligonucleotide
  Antisense strand to SEQ ID NO: 2551618
auuagacacccaugcagcg

SEQ ID NO: 2551620 - RNA, 19 nt, Artificial Sequence
  Description of Artificial Sequence: Synthetic oligonucleotide
  Sense strand starting at position 2326 of SEQ ID NO: 1888710
cacaucugucugcaggaaa

SEQ ID NO: 2551621 - RNA, 19 nt, Artificial Sequence
  Description of Artificial Sequence: Synthetic oligonucleotide
  Antisense strand to SEQ ID NO: 2551620
uuuccugcagacagaugug

SEQ ID NO: 2551622 - RNA, 19 nt, Artificial Sequence
  Description of Artificial Sequence: Synthetic oligonucleotide
  Sense strand starting at position 2800 of SEQ ID NO: 1888710
guaggaauccagcaccgaa

SEQ ID NO: 2551623 - RNA, 19 nt, Artificial Sequence
  Description of Artificial Sequence: Synthetic oligonucleotide
  Antisense strand to SEQ ID NO: 2551622
uucggugcuggauuccuac

SEQ ID NO: 2551624 - RNA, 19 nt, Artificial Sequence
  Description of Artificial Sequence: Synthetic oligonucleotide
  Sense strand starting at position 104 of SEQ ID NO: 1888710
gucccauuuggcugcagaa

SEQ ID NO: 2551625 - RNA, 19 nt, Artificial Sequence
  Description of Artificial Sequence: Synthetic oligonucleotide
  Antisense strand to SEQ ID NO: 2551624
uucugcagccaaaugggac

SEQ ID NO: 2551626 - RNA, 19 nt, Artificial Sequence
  Description of Artificial Sequence: Synthetic oligonucleotide
  Sense strand starting at position 1371 of SEQ ID NO: 1888710
gggaaacuggccugaucuc

SEQ ID NO: 2551627 - RNA, 19 nt, Artificial Sequence
  Description of Artificial Sequence: Synthetic oligonucleotide
  Antisense strand to SEQ ID NO: 2551626
gagaucaggccaguuuccc

SEQ ID NO: 2551628 - RNA, 19 nt, Artificial Sequence
  Description of Artificial Sequence: Synthetic oligonucleotide
  Sense strand starting at position 119 of SEQ ID NO: 1888710
agaaguucccagggccaau

SEQ ID NO: 2551629 - RNA, 19 nt, Artificial Sequence
  Description of Artificial Sequence: Synthetic oligonucleotide
  Antisense strand to SEQ ID NO: 2551628
auuggcccugggaacuucu

SEQ ID NO: 2551630 - RNA, 19 nt, Artificial Sequence
  Description of Artificial Sequence: Synthetic oligonucleotide
  Sense strand starting at position 2704 of SEQ ID NO: 1888710
cagggagguuugcuaacua

SEQ ID NO: 2551631 - RNA, 19 nt, Artificial Sequence
  Description of Artificial Sequence: Synthetic oligonucleotide
  Antisense strand to SEQ ID NO: 2551630
uaguuagcaaaccucccug

SEQ ID NO: 2551632 - RNA, 19 nt, Artificial Sequence
  Description of Artificial Sequence: Synthetic oligonucleotide
  Sense strand starting at position 3921 of SEQ ID NO: 1888710
ugcaucaaucgacacugua

SEQ ID NO: 2551633 - RNA, 19 nt, Artificial Sequence
  Description of Artificial Sequence: Synthetic oligonucleotide
  Antisense strand to SEQ ID NO: 2551632
uacagugucgauugaugca

SEQ ID NO: 2551634 - RNA, 19 nt, Artificial Sequence
  Description of Artificial Sequence: Synthetic oligonucleotide
  Sense strand starting at position 2325 of SEQ ID NO: 1888710
ccacaucugucugcaggaa

SEQ ID NO: 2551635 - RNA, 19 nt, Artificial Sequence
  Description of Artificial Sequence: Synthetic oligonucleotide
  Antisense strand to SEQ ID NO: 2551634
uuccugcagacagaugugg

SEQ ID NO: 2551636 - RNA, 19 nt, Artificial Sequence
  Description of Artificial Sequence: Synthetic oligonucleotide
  Sense strand starting at position 2574 of SEQ ID NO: 1888710
agagcucugccaugaacac

SEQ ID NO: 2551637 - RNA, 19 nt, Artificial Sequence
  Description of Artificial Sequence: Synthetic oligonucleotide
  Antisense strand to SEQ ID NO: 2551636
guguucauggcagagcucu

SEQ ID NO: 2551638 - RNA, 19 nt, Artificial Sequence
  Description of Artificial Sequence: Synthetic oligonucleotide
  Sense strand starting at position 1383 of SEQ ID NO: 1888710
ugaucucucugagugucaa

SEQ ID NO: 2551639 - RNA, 19 nt, Artificial Sequence
  Description of Artificial Sequence: Synthetic oligonucleotide
  Antisense strand to SEQ ID NO: 2551638
uugacacucagagagauca

SEQ ID NO: 2551640 - RNA, 19 nt, Artificial Sequence
  Description of Artificial Sequence: Synthetic oligonucleotide
  Sense strand starting at position 1384 of SEQ ID NO: 1888710
gaucucucugagugucaau

SEQ ID NO: 2551641 - RNA, 19 nt, Artificial Sequence
  Description of Artificial Sequence: Synthetic oligonucleotide
  Antisense strand to SEQ ID NO: 2551640
auugacacucagagagauc

SEQ ID NO: 2551642 - RNA, 19 nt, Artificial Sequence
  Description of Artificial Sequence: Synthetic oligonucleotide
  Sense strand starting at position 605 of SEQ ID NO: 1888710
cgggugaaggucuguggaa

SEQ ID NO: 2551643 - RNA, 19 nt, Artificial Sequence
  Description of Artificial Sequence: Synthetic oligonucleotide
  Antisense strand to SEQ ID NO: 2551642
uuccacagaccuucacccg

SEQ ID NO: 2551644 - RNA, 19 nt, Artificial Sequence
  Description of Artificial Sequence: Synthetic oligonucleotide
  Sense strand starting at position 1395 of SEQ ID NO: 1888710
gugucaauauccucaagug

SEQ ID NO: 2551645 - RNA, 19 nt, Artificial Sequence
  Description of Artificial Sequence: Synthetic oligonucleotide
  Antisense strand to SEQ ID NO: 2551644
cacuugaggauauugacac

SEQ ID NO: 2551646 - RNA, 19 nt, Artificial Sequence
  Description of Artificial Sequence: Synthetic oligonucleotide
  Sense strand starting at position 945 of SEQ ID NO: 1888710
cgaggaauaaucugccugu

SEQ ID NO: 2551647 - RNA, 19 nt, Artificial Sequence
  Description of Artificial Sequence: Synthetic oligonucleotide
  Antisense strand to SEQ ID NO: 2551646
acaggcagauuauuccucg

SEQ ID NO: 2551648 - RNA, 19 nt, Artificial Sequence
  Description of Artificial Sequence: Synthetic oligonucleotide
  Sense strand starting at position 2223 of SEQ ID NO: 1888710
gucuaauugcgaggauacu

SEQ ID NO: 2551649 - RNA, 19 nt, Artificial Sequence
  Description of Artificial Sequence: Synthetic oligonucleotide
  Antisense strand to SEQ ID NO: 2551648
aguauccucgcaauuagac

SEQ ID NO: 2551650 - RNA, 19 nt, Artificial Sequence
  Description of Artificial Sequence: Synthetic oligonucleotide
  Sense strand starting at position 948 of SEQ ID NO: 1888710
ggaauaaucugccuguguc

SEQ ID NO: 2551651 - RNA, 19 nt, Artificial Sequence
  Description of Artificial Sequence: Synthetic oligonucleotide
  Antisense strand to SEQ ID NO: 2551650
gacacaggcagauuauucc

SEQ ID NO: 2551652 - RNA, 19 nt, Artificial Sequence
  Description of Artificial Sequence: Synthetic oligonucleotide
  Sense strand starting at position 2708 of SEQ ID NO: 1888710
gagguuugcuaacuacugu

SEQ ID NO: 2551653 - RNA, 19 nt, Artificial Sequence
  Description of Artificial Sequence: Synthetic oligonucleotide
  Antisense strand to SEQ ID NO: 2551652
acaguaguuagcaaaccuc

SEQ ID NO: 2551654 - RNA, 19 nt, Artificial Sequence
  Description of Artificial Sequence: Synthetic oligonucleotide
  Sense strand starting at position 2474 of SEQ ID NO: 1888710
gugggagagccuuggccua

SEQ ID NO: 2551655 - RNA, 19 nt, Artificial Sequence
  Description of Artificial Sequence: Synthetic oligonucleotide
  Antisense strand to SEQ ID NO: 2551654
uaggccaaggcucucccac

SEQ ID NO: 2551656 - RNA, 19 nt, Artificial Sequence
  Description of Artificial Sequence: Synthetic oligonucleotide
  Sense strand starting at position 2246 of SEQ ID NO: 1888710
gggcgguguccaggaacua

SEQ ID NO: 2551657 - RNA, 19 nt, Artificial Sequence
  Description of Artificial Sequence: Synthetic oligonucleotide
  Antisense strand to SEQ ID NO: 2551656
uaguuccuggacaccgccc

SEQ ID NO: 2551658 - RNA, 19 nt, Artificial Sequence
  Description of Artificial Sequence: Synthetic oligonucleotide
  Sense strand starting at position 949 of SEQ ID NO: 1888710
gaauaaucugccugugucu

SEQ ID NO: 2551659 - RNA, 19 nt, Artificial Sequence
  Description of Artificial Sequence: Synthetic oligonucleotide
  Antisense strand to SEQ ID NO: 2551658
agacacaggcagauuauuc

SEQ ID NO: 2551660 - RNA, 19 nt, Artificial Sequence
  Description of Artificial Sequence: Synthetic oligonucleotide
  Sense strand starting at position 388 of SEQ ID NO: 1888710
gccgucaacuacuuucuca

SEQ ID NO: 2551661 - RNA, 19 nt, Artificial Sequence
  Description of Artificial Sequence: Synthetic oligonucleotide
  Antisense strand to SEQ ID NO: 2551660
ugagaaaguaguugacggc

SEQ ID NO: 2551662 - RNA, 19 nt, Artificial Sequence
  Description of Artificial Sequence: Synthetic oligonucleotide
  Sense strand starting at position 1380 of SEQ ID NO: 1888710
gccugaucucucugagugu

SEQ ID NO: 2551663 - RNA, 19 nt, Artificial Sequence
  Description of Artificial Sequence: Synthetic oligonucleotide
  Antisense strand to SEQ ID NO: 2551662
acacucagagagaucaggc

SEQ ID NO: 2551664 - RNA, 19 nt, Artificial Sequence
  Description of Artificial Sequence: Synthetic oligonucleotide
  Sense strand starting at position 2096 of SEQ ID NO: 1888710
agcacauccuucuaggaaa

SEQ ID NO: 2551665 - RNA, 19 nt, Artificial Sequence
  Description of Artificial Sequence: Synthetic oligonucleotide
  Antisense strand to SEQ ID NO: 2551664
uuuccuagaaggaugugcu

SEQ ID NO: 2551666 - RNA, 19 nt, Artificial Sequence
  Description of Artificial Sequence: Synthetic oligonucleotide
  Sense strand starting at position 2099 of SEQ ID NO: 1888710
acauccuucuaggaaaugu

SEQ ID NO: 2551667 - RNA, 19 nt, Artificial Sequence
  Description of Artificial Sequence: Synthetic oligonucleotide
  Antisense strand to SEQ ID NO: 2551666
acauuuccuagaaggaugu

SEQ ID NO: 2551668 - RNA, 19 nt, Artificial Sequence
  Description of Artificial Sequence: Synthetic oligonucleotide
  Sense strand starting at position 1361 of SEQ ID NO: 1888710
ggaugcuucugggaaacug

SEQ ID NO: 2551669 - RNA, 19 nt, Artificial Sequence
  Description of Artificial Sequence: Synthetic oligonucleotide
  Antisense strand to SEQ ID NO: 2551668
caguuucccagaagcaucc

SEQ ID NO: 2551670 - RNA, 19 nt, Artificial Sequence
  Description of Artificial Sequence: Synthetic oligonucleotide
  Sense strand starting at position 1015 of SEQ ID NO: 1888710
acgucugagugggaacaaa

SEQ ID NO: 2551671 - RNA, 19 nt, Artificial Sequence
  Description of Artificial Sequence: Synthetic oligonucleotide
  Antisense strand to SEQ ID NO: 2551670
uuuguucccacucagacgu

SEQ ID NO: 2551672 - RNA, 19 nt, Artificial Sequence
  Description of Artificial Sequence: Synthetic oligonucleotide
  Sense strand starting at position 2263 of SEQ ID NO: 1888710
uagaauuuguccuguuagu

SEQ ID NO: 2551673 - RNA, 19 nt, Artificial Sequence
  Description of Artificial Sequence: Synthetic oligonucleotide
  Antisense strand to SEQ ID NO: 2551672
acuaacaggacaaauucua

SEQ ID NO: 2551674 - RNA, 19 nt, Artificial Sequence
  Description of Artificial Sequence: Synthetic oligonucleotide
  Sense strand starting at position 302 of SEQ ID NO: 1888710
ugauuccagucccaguaaa

SEQ ID NO: 2551675 - RNA, 19 nt, Artificial Sequence
  Description of Artificial Sequence: Synthetic oligonucleotide
  Antisense strand to SEQ ID NO: 2551674
uuuacugggacuggaauca

SEQ ID NO: 2551676 - RNA, 19 nt, Artificial Sequence
  Description of Artificial Sequence: Synthetic oligonucleotide
  Sense strand starting at position 2166 of SEQ ID NO: 1888710
gggcggaugucgcugugua

SEQ ID NO: 2551677 - RNA, 19 nt, Artificial Sequence
  Description of Artificial Sequence: Synthetic oligonucleotide
  Antisense strand to SEQ ID NO: 2551676
uacacagcgacauccgccc

SEQ ID NO: 2551678 - RNA, 19 nt, Artificial Sequence
  Description of Artificial Sequence: Synthetic oligonucleotide
  Sense strand starting at position 2167 of SEQ ID NO: 1888710
ggcggaugucgcuguguau

SEQ ID NO: 2551679 - RNA, 19 nt, Artificial Sequence
  Description of Artificial Sequence: Synthetic oligonucleotide
  Antisense strand to SEQ ID NO: 2551678
auacacagcgacauccgcc

SEQ ID NO: 2551680 - RNA, 19 nt, Artificial Sequence
  Description of Artificial Sequence: Synthetic oligonucleotide
  Sense strand starting at position 1358 of SEQ ID NO: 1888710
gcuggaugcuucugggaaa

SEQ ID NO: 2551681 - RNA, 19 nt, Artificial Sequence
  Description of Artificial Sequence: Synthetic oligonucleotide
  Antisense strand to SEQ ID NO: 2551680
uuucccagaagcauccagc

SEQ ID NO: 2551682 - RNA, 19 nt, Artificial Sequence
  Description of Artificial Sequence: Synthetic oligonucleotide
  Sense strand starting at position 2221 of SEQ ID NO: 1888710
gugucuaauugcgaggaua

SEQ ID NO: 2551683 - RNA, 19 nt, Artificial Sequence
  Description of Artificial Sequence: Synthetic oligonucleotide
  Antisense strand to SEQ ID NO: 2551682
uauccucgcaauuagacac

SEQ ID NO: 2551684 - RNA, 19 nt, Artificial Sequence
  Description of Artificial Sequence: Synthetic oligonucleotide
  Sense strand starting at position 2684 of SEQ ID NO: 1888710
gcagaaugcucacagcagu

SEQ ID NO: 2551685 - RNA, 19 nt, Artificial Sequence
  Description of Artificial Sequence: Synthetic oligonucleotide
  Antisense strand to SEQ ID NO: 2551684
acugcugugagcauucugc

SEQ ID NO: 2551686 - RNA, 19 nt, Artificial Sequence
  Description of Artificial Sequence: Synthetic oligonucleotide
  Sense strand starting at position 2220 of SEQ ID NO: 1888710
ggugucuaauugcgaggau

SEQ ID NO: 2551687 - RNA, 19 nt, Artificial Sequence
  Description of Artificial Sequence: Synthetic oligonucleotide
  Antisense strand to SEQ ID NO: 2551686
auccucgcaauuagacacc

SEQ ID NO: 2551688 - RNA, 19 nt, Artificial Sequence
  Description of Artificial Sequence: Synthetic oligonucleotide
  Sense strand starting at position 2770 of SEQ ID NO: 1888710
gguaacgugucgcaaauca

SEQ ID NO: 2551689 - RNA, 19 nt, Artificial Sequence
  Description of Artificial Sequence: Synthetic oligonucleotide
  Antisense strand to SEQ ID NO: 2551688
ugauuugcgacacguuacc

SEQ ID NO: 2551690 - RNA, 19 nt, Artificial Sequence
  Description of Artificial Sequence: Synthetic oligonucleotide
  Sense strand starting at position 37 of SEQ ID NO: 1888710
ugaggugguugcgguagaa

SEQ ID NO: 2551691 - RNA, 19 nt, Artificial Sequence
  Description of Artificial Sequence: Synthetic oligonucleotide
  Antisense strand to SEQ ID NO: 2551690
uucuaccgcaaccaccuca

SEQ ID NO: 2551692 - RNA, 19 nt, Artificial Sequence
  Description of Artificial Sequence: Synthetic oligonucleotide
  Sense strand starting at position 1378 of SEQ ID NO: 1888711
cggaguucugagcuguguu

SEQ ID NO: 2551693 - RNA, 19 nt, Artificial Sequence
  Description of Artificial Sequence: Synthetic oligonucleotide
  Antisense strand to SEQ ID NO: 2551692
aacacagcucagaacuccg

SEQ ID NO: 2551694 - RNA, 19 nt, Artificial Sequence
  Description of Artificial Sequence: Synthetic oligonucleotide
  Sense strand starting at position 483 of SEQ ID NO: 1888711
aguugcugacuauauaaga

SEQ ID NO: 2551695 - RNA, 19 nt, Artificial Sequence
  Description of Artificial Sequence: Synthetic oligonucleotide
  Antisense strand to SEQ ID NO: 2551694
ucuuauauagucagcaacu

SEQ ID NO: 2551696 - RNA, 19 nt, Artificial Sequence
  Description of Artificial Sequence: Synthetic oligonucleotide
  Sense strand starting at position 1100 of SEQ ID NO: 1888711
uuuaauuauggcgagaaau

SEQ ID NO: 2551697 - RNA, 19 nt, Artificial Sequence
  Description of Artificial Sequence: Synthetic oligonucleotide
  Antisense strand to SEQ ID NO: 2551696
auuucucgccauaauuaaa

SEQ ID NO: 2551698 - RNA, 19 nt, Artificial Sequence
  Description of Artificial Sequence: Synthetic oligonucleotide
  Sense strand starting at position 3367 of SEQ ID NO: 1888711
aaacaaugacagugugaug

SEQ ID NO: 2551699 - RNA, 19 nt, Artificial Sequence
  Description of Artificial Sequence: Synthetic oligonucleotide
  Antisense strand to SEQ ID NO: 2551698
caucacacugucauuguuu

SEQ ID NO: 2551700 - RNA, 19 nt, Artificial Sequence
  Description of Artificial Sequence: Synthetic oligonucleotide
  Sense strand starting at position 3361 of SEQ ID NO: 1888711
uuaaguaaacaaugacagu

SEQ ID NO: 2551701 - RNA, 19 nt, Artificial Sequence
  Description of Artificial Sequence: Synthetic oligonucleotide
  Antisense strand to SEQ ID NO: 2551700
acugucauuguuuacuuaa

SEQ ID NO: 2551702 - RNA, 19 nt, Artificial Sequence
  Description of Artificial Sequence: Synthetic oligonucleotide
  Sense strand starting at position 3341 of SEQ ID NO: 1888711
ccuuuagugaaggaggcau

SEQ ID NO: 2551703 - RNA, 19 nt, Artificial Sequence
  Description of Artificial Sequence: Synthetic oligonucleotide
  Antisense strand to SEQ ID NO: 2551702
augccuccuucacuaaagg

SEQ ID NO: 2551704 - RNA, 19 nt, Artificial Sequence
  Description of Artificial Sequence: Synthetic oligonucleotide
  Sense strand starting at position 577 of SEQ ID NO: 1888711
ggcauaggcagguaaugaa

SEQ ID NO: 2551705 - RNA, 19 nt, Artificial Sequence
  Description of Artificial Sequence: Synthetic oligonucleotide
  Antisense strand to SEQ ID NO: 2551704
uucauuaccugccuaugcc

SEQ ID NO: 2551706 - RNA, 19 nt, Artificial Sequence
  Description of Artificial Sequence: Synthetic oligonucleotide
  Sense strand starting at position 2870 of SEQ ID NO: 1888711
gagcuuugauauccagaga

SEQ ID NO: 2551707 - RNA, 19 nt, Artificial Sequence
  Description of Artificial Sequence: Synthetic oligonucleotide
  Antisense strand to SEQ ID NO: 2551706
ucucuggauaucaaagcuc

SEQ ID NO: 2551708 - RNA, 19 nt, Artificial Sequence
  Description of Artificial Sequence: Synthetic oligonucleotide
  Sense strand starting at position 2298 of SEQ ID NO: 1888711
gugcucuccaucguguuaa

SEQ ID NO: 2551709 - RNA, 19 nt, Artificial Sequence
  Description of Artificial Sequence: Synthetic oligonucleotide
  Antisense strand to SEQ ID NO: 2551708
uuaacacgauggagagcac

SEQ ID NO: 2551710 - RNA, 19 nt, Artificial Sequence
  Description of Artificial Sequence: Synthetic oligonucleotide
  Sense strand starting at position 2106 of SEQ ID NO: 1888711
ggucacuacuaagugaaga

SEQ ID NO: 2551711 - RNA, 19 nt, Artificial Sequence
  Description of Artificial Sequence: Synthetic oligonucleotide
  Antisense strand to SEQ ID NO: 2551710
ucuucacuuaguagugacc

SEQ ID NO: 2551712 - RNA, 19 nt, Artificial Sequence
  Description of Artificial Sequence: Synthetic oligonucleotide
  Sense strand starting at position 1011 of SEQ ID NO: 1888711
gcauaaucuuaacuaggac

SEQ ID NO: 2551713 - RNA, 19 nt, Artificial Sequence
  Description of Artificial Sequence: Synthetic oligonucleotide
  Antisense strand to SEQ ID NO: 2551712
guccuaguuaagauuaugc

SEQ ID NO: 2551714 - RNA, 19 nt, Artificial Sequence
  Description of Artificial Sequence: Synthetic oligonucleotide
  Sense strand starting at position 63 of SEQ ID NO: 1888711
gccagaggccgugugcaau

SEQ ID NO: 2551715 - RNA, 19 nt, Artificial Sequence
  Description of Artificial Sequence: Synthetic oligonucleotide
  Antisense strand to SEQ ID NO: 2551714
auugcacacggccucuggc

SEQ ID NO: 2551716 - RNA, 19 nt, Artificial Sequence
  Description of Artificial Sequence: Synthetic oligonucleotide
  Sense strand starting at position 2296 of SEQ ID NO: 1888711
gggugcucuccaucguguu

SEQ ID NO: 2551717 - RNA, 19 nt, Artificial Sequence
  Description of Artificial Sequence: Synthetic oligonucleotide
  Antisense strand to SEQ ID NO: 2551716
aacacgauggagagcaccc

SEQ ID NO: 2551718 - RNA, 19 nt, Artificial Sequence
  Description of Artificial Sequence: Synthetic oligonucleotide
  Sense strand starting at position 481 of SEQ ID NO: 1888711
cuaguugcugacuauauaa

SEQ ID NO: 2551719 - RNA, 19 nt, Artificial Sequence
  Description of Artificial Sequence: Synthetic oligonucleotide
  Antisense strand to SEQ ID NO: 2551718
uuauauagucagcaacuag

SEQ ID NO: 2551720 - RNA, 19 nt, Artificial Sequence
  Description of Artificial Sequence: Synthetic oligonucleotide
  Sense strand starting at position 2811 of SEQ ID NO: 1888711
cucccauuccugcagaaug

SEQ ID NO: 2551721 - RNA, 19 nt, Artificial Sequence
  Description of Artificial Sequence: Synthetic oligonucleotide
  Antisense strand to SEQ ID NO: 2551720
cauucugcaggaaugggag

SEQ ID NO: 2551722 - RNA, 19 nt, Artificial Sequence
  Description of Artificial Sequence: Synthetic oligonucleotide
  Sense strand starting at position 708 of SEQ ID NO: 1888711
caaagaggaucauuguguu

SEQ ID NO: 2551723 - RNA, 19 nt, Artificial Sequence
  Description of Artificial Sequence: Synthetic oligonucleotide
  Antisense strand to SEQ ID NO: 2551722
aacacaaugauccucuuug

SEQ ID NO: 2551724 - RNA, 19 nt, Artificial Sequence
  Description of Artificial Sequence: Synthetic oligonucleotide
  Sense strand starting at position 3979 of SEQ ID NO: 1888711
cagcacagucauuggagaa

SEQ ID NO: 2551725 - RNA, 19 nt, Artificial Sequence
  Description of Artificial Sequence: Synthetic oligonucleotide
  Antisense strand to SEQ ID NO: 2551724
uucuccaaugacugugcug

SEQ ID NO: 2551726 - RNA, 19 nt, Artificial Sequence
  Description of Artificial Sequence: Synthetic oligonucleotide
  Sense strand starting at position 1398 of SEQ ID NO: 1888711
guggcuucagcgcuuugau

SEQ ID NO: 2551727 - RNA, 19 nt, Artificial Sequence
  Description of Artificial Sequence: Synthetic oligonucleotide
  Antisense strand to SEQ ID NO: 2551726
aucaaagcgcugaagccac

SEQ ID NO: 2551728 - RNA, 19 nt, Artificial Sequence
  Description of Artificial Sequence: Synthetic oligonucleotide
  Sense strand starting at position 3544 of SEQ ID NO: 1888711
caccauugaguuugggauu

SEQ ID NO: 2551729 - RNA, 19 nt, Artificial Sequence
  Description of Artificial Sequence: Synthetic oligonucleotide
  Antisense strand to SEQ ID NO: 2551728
aaucccaaacucaauggug

SEQ ID NO: 2551730 - RNA, 19 nt, Artificial Sequence
  Description of Artificial Sequence: Synthetic oligonucleotide
  Sense strand starting at position 972 of SEQ ID NO: 1888711
cgcugaauucucgcugcua

SEQ ID NO: 2551731 - RNA, 19 nt, Artificial Sequence
  Description of Artificial Sequence: Synthetic oligonucleotide
  Antisense strand to SEQ ID NO: 2551730
uagcagcgagaauucagcg

SEQ ID NO: 2551732 - RNA, 19 nt, Artificial Sequence
  Description of Artificial Sequence: Synthetic oligonucleotide
  Sense strand starting at position 2633 of SEQ ID NO: 1888711
ccauauuucuccgcagguu

SEQ ID NO: 2551733 - RNA, 19 nt, Artificial Sequence
  Description of Artificial Sequence: Synthetic oligonucleotide
  Antisense strand to SEQ ID NO: 2551732
aaccugcggagaaauaugg

SEQ ID NO: 2551734 - RNA, 19 nt, Artificial Sequence
  Description of Artificial Sequence: Synthetic oligonucleotide
  Sense strand starting at position 3073 of SEQ ID NO: 1888711
aaucuuaaagugcgaagaa

SEQ ID NO: 2551735 - RNA, 19 nt, Artificial Sequence
  Description of Artificial Sequence: Synthetic oligonucleotide
  Antisense strand to SEQ ID NO: 2551734
uucuucgcacuuuaagauu

SEQ ID NO: 2551736 - RNA, 19 nt, Artificial Sequence
  Description of Artificial Sequence: Synthetic oligonucleotide
  Sense strand starting at position 743 of SEQ ID NO: 1888711
aacgucuauguuuaagauu

SEQ ID NO: 2551737 - RNA, 19 nt, Artificial Sequence
  Description of Artificial Sequence: Synthetic oligonucleotide
  Antisense strand to SEQ ID NO: 2551736
aaucuuaaacauagacguu

SEQ ID NO: 2551738 - RNA, 19 nt, Artificial Sequence
  Description of Artificial Sequence: Synthetic oligonucleotide
  Sense strand starting at position 1647 of SEQ ID NO: 1888711
gcuccaagucuugaaagua

SEQ ID NO: 2551739 - RNA, 19 nt, Artificial Sequence
  Description of Artificial Sequence: Synthetic oligonucleotide
  Antisense strand to SEQ ID NO: 2551738
uacuuucaagacuuggagc

SEQ ID NO: 2551740 - RNA, 19 nt, Artificial Sequence
  Description of Artificial Sequence: Synthetic oligonucleotide
  Sense strand starting at position 796 of SEQ ID NO: 1888711
acuaguuucugauugugaa

SEQ ID NO: 2551741 - RNA, 19 nt, Artificial Sequence
  Description of Artificial Sequence: Synthetic oligonucleotide
  Antisense strand to SEQ ID NO: 2551740
uucacaaucagaaacuagu

SEQ ID NO: 2551742 - RNA, 19 nt, Artificial Sequence
  Description of Artificial Sequence: Synthetic oligonucleotide
  Sense strand starting at position 478 of SEQ ID NO: 1888711
uuucuaguugcugacuaua

SEQ ID NO: 2551743 - RNA, 19 nt, Artificial Sequence
  Description of Artificial Sequence: Synthetic oligonucleotide
  Antisense strand to SEQ ID NO: 2551742
uauagucagcaacuagaaa

SEQ ID NO: 2551744 - RNA, 19 nt, Artificial Sequence
  Description of Artificial Sequence: Synthetic oligonucleotide
  Sense strand starting at position 797 of SEQ ID NO: 1888711
cuaguuucugauugugaaa

SEQ ID NO: 2551745 - RNA, 19 nt, Artificial Sequence
  Description of Artificial Sequence: Synthetic oligonucleotide
  Antisense strand to SEQ ID NO: 2551744
uuucacaaucagaaacuag

SEQ ID NO: 2551746 - RNA, 19 nt, Artificial Sequence
  Description of Artificial Sequence: Synthetic oligonucleotide
  Sense strand starting at position 431 of SEQ ID NO: 1888711
auuaauuaguugccauaug

SEQ ID NO: 2551747 - RNA, 19 nt, Artificial Sequence
  Description of Artificial Sequence: Synthetic oligonucleotide
  Antisense strand to SEQ ID NO: 2551746
cauauggcaacuaauuaau

SEQ ID NO: 2551748 - RNA, 19 nt, Artificial Sequence
  Description of Artificial Sequence: Synthetic oligonucleotide
  Sense strand starting at position 742 of SEQ ID NO: 1888711
aaacgucuauguuuaagau

SEQ ID NO: 2551749 - RNA, 19 nt, Artificial Sequence
  Description of Artificial Sequence: Synthetic oligonucleotide
  Antisense strand to SEQ ID NO: 2551748
aucuuaaacauagacguuu

SEQ ID NO: 2551750 - RNA, 19 nt, Artificial Sequence
  Description of Artificial Sequence: Synthetic oligonucleotide
  Sense strand starting at position 1113 of SEQ ID NO: 1888711
agaaauaucuucucccggu

SEQ ID NO: 2551751 - RNA, 19 nt, Artificial Sequence
  Description of Artificial Sequence: Synthetic oligonucleotide
  Antisense strand to SEQ ID NO: 2551750
accgggagaagauauuucu

SEQ ID NO: 2551752 - RNA, 19 nt, Artificial Sequence
  Description of Artificial Sequence: Synthetic oligonucleotide
  Sense strand starting at position 716 of SEQ ID NO: 1888711
aucauuguguuucuuggaa

SEQ ID NO: 2551753 - RNA, 19 nt, Artificial Sequence
  Description of Artificial Sequence: Synthetic oligonucleotide
  Antisense strand to SEQ ID NO: 2551752
uuccaagaaacacaaugau

SEQ ID NO: 2551754 - RNA, 19 nt, Artificial Sequence
  Description of Artificial Sequence: Synthetic oligonucleotide
  Sense strand starting at position 3978 of SEQ ID NO: 1888711
gcagcacagucauuggaga

SEQ ID NO: 2551755 - RNA, 19 nt, Artificial Sequence
  Description of Artificial Sequence: Synthetic oligonucleotide
  Antisense strand to SEQ ID NO: 2551754
ucuccaaugacugugcugc

SEQ ID NO: 2551756 - RNA, 19 nt, Artificial Sequence
  Description of Artificial Sequence: Synthetic oligonucleotide
  Sense strand starting at position 2632 of SEQ ID NO: 1888711
gccauauuucuccgcaggu

SEQ ID NO: 2551757 - RNA, 19 nt, Artificial Sequence
  Description of Artificial Sequence: Synthetic oligonucleotide
  Antisense strand to SEQ ID NO: 2551756
accugcggagaaauauggc

SEQ ID NO: 2551758 - RNA, 19 nt, Artificial Sequence
  Description of Artificial Sequence: Synthetic oligonucleotide
  Sense strand starting at position 712 of SEQ ID NO: 1888711
gaggaucauuguguuucuu

SEQ ID NO: 2551759 - RNA, 19 nt, Artificial Sequence
  Description of Artificial Sequence: Synthetic oligonucleotide
  Antisense strand to SEQ ID NO: 2551758
aagaaacacaaugauccuc

SEQ ID NO: 2551760 - RNA, 19 nt, Artificial Sequence
  Description of Artificial Sequence: Synthetic oligonucleotide
  Sense strand starting at position 3472 of SEQ ID NO: 1888711
guaaaugaacccuguggca

SEQ ID NO: 2551761 - RNA, 19 nt, Artificial Sequence
  Description of Artificial Sequence: Synthetic oligonucleotide
  Antisense strand to SEQ ID NO: 2551760
ugccacaggguucauuuac

SEQ ID NO: 2551762 - RNA, 19 nt, Artificial Sequence
  Description of Artificial Sequence: Synthetic oligonucleotide
  Sense strand starting at position 1683 of SEQ ID NO: 1888711
gcaaguuuggcuuaguaaa

SEQ ID NO: 2551763 - RNA, 19 nt, Artificial Sequence
  Description of Artificial Sequence: Synthetic oligonucleotide
  Antisense strand to SEQ ID NO: 2551762
uuuacuaagccaaacuugc

SEQ ID NO: 2551764 - RNA, 19 nt, Artificial Sequence
  Description of Artificial Sequence: Synthetic oligonucleotide
  Sense strand starting at position 98 of SEQ ID NO: 1888711
gguucucugcccuaucuga

SEQ ID NO: 2551765 - RNA, 19 nt, Artificial Sequence
  Description of Artificial Sequence: Synthetic oligonucleotide
  Antisense strand to SEQ ID NO: 2551764
ucagauagggcagagaacc

SEQ ID NO: 2551766 - RNA, 19 nt, Artificial Sequence
  Description of Artificial Sequence: Synthetic oligonucleotide
  Sense strand starting at position 480 of SEQ ID NO: 1888711
ucuaguugcugacuauaua

SEQ ID NO: 2551767 - RNA, 19 nt, Artificial Sequence
  Description of Artificial Sequence: Synthetic oligonucleotide
  Antisense strand to SEQ ID NO: 2551766
uauauagucagcaacuaga

SEQ ID NO: 2551768 - RNA, 19 nt, Artificial Sequence
  Description of Artificial Sequence: Synthetic oligonucleotide
  Sense strand starting at position 1672 of SEQ ID NO: 1888711
ccaaaugcccugcaaguuu

SEQ ID NO: 2551769 - RNA, 19 nt, Artificial Sequence
  Description of Artificial Sequence: Synthetic oligonucleotide
  Antisense strand to SEQ ID NO: 2551768
aaacuugcagggcauuugg

SEQ ID NO: 2551770 - RNA, 19 nt, Artificial Sequence
  Description of Artificial Sequence: Synthetic oligonucleotide
  Sense strand starting at position 85 of SEQ ID NO: 1888711
agguuagaucagugguucu

SEQ ID NO: 2551771 - RNA, 19 nt, Artificial Sequence
  Description of Artificial Sequence: Synthetic oligonucleotide
  Antisense strand to SEQ ID NO: 2551770
agaaccacugaucuaaccu

SEQ ID NO: 2551772 - RNA, 19 nt, Artificial Sequence
  Description of Artificial Sequence: Synthetic oligonucleotide
  Sense strand starting at position 13 of SEQ ID NO: 1888713
uguuaccuccuaggagaua

SEQ ID NO: 2551773 - RNA, 19 nt, Artificial Sequence
  Description of Artificial Sequence: Synthetic oligonucleotide
  Antisense strand to SEQ ID NO: 2551772
uaucuccuaggagguaaca

SEQ ID NO: 2551774 - RNA, 19 nt, Artificial Sequence
  Description of Artificial Sequence: Synthetic oligonucleotide
  Sense strand starting at position 42 of SEQ ID NO: 1888713
cacgaaucuguugguaaug

SEQ ID NO: 2551775 - RNA, 19 nt, Artificial Sequence
  Description of Artificial Sequence: Synthetic oligonucleotide
  Antisense strand to SEQ ID NO: 2551774
cauuaccaacagauucgug

SEQ ID NO: 2551776 - RNA, 19 nt, Artificial Sequence
  Description of Artificial Sequence: Synthetic oligonucleotide
  Sense strand starting at position 43 of SEQ ID NO: 1888713
acgaaucuguugguaaugu

SEQ ID NO: 2551777 - RNA, 19 nt, Artificial Sequence
  Description of Artificial Sequence: Synthetic oligonucleotide
  Antisense strand to SEQ ID NO: 2551776
acauuaccaacagauucgu

SEQ ID NO: 2551778 - RNA, 19 nt, Artificial Sequence
  Description of Artificial Sequence: Synthetic oligonucleotide
  Sense strand starting at position 173 of SEQ ID NO: 1888713
aguucuucugaaugcacua

SEQ ID NO: 2551779 - RNA, 19 nt, Artificial Sequence
  Description of Artificial Sequence: Synthetic oligonucleotide
  Antisense strand to SEQ ID NO: 2551778
uagugcauucagaagaacu

SEQ ID NO: 2551780 - RNA, 19 nt, Artificial Sequence
  Description of Artificial Sequence: Synthetic oligonucleotide
  Sense strand starting at position 178 of SEQ ID NO: 1888713
uucugaaugcacuagaagu

SEQ ID NO: 2551781 - RNA, 19 nt, Artificial Sequence
  Description of Artificial Sequence: Synthetic oligonucleotide
  Antisense strand to SEQ ID NO: 2551780
acuucuagugcauucagaa

SEQ ID NO: 2551782 - RNA, 19 nt, Artificial Sequence
  Description of Artificial Sequence: Synthetic oligonucleotide
  Sense strand starting at position 186 of SEQ ID NO: 1888713
gcacuagaagucuaauuaa

SEQ ID NO: 2551783 - RNA, 19 nt, Artificial Sequence
  Description of Artificial Sequence: Synthetic oligonucleotide
  Antisense strand to SEQ ID NO: 2551782
uuaauuagacuucuagugc

SEQ ID NO: 2551784 - RNA, 19 nt, Artificial Sequence
  Description of Artificial Sequence: Synthetic oligonucleotide
  Sense strand starting at position 233 of SEQ ID NO: 1888713
ggaaacaauuuacacagua

SEQ ID NO: 2551785 - RNA, 19 nt, Artificial Sequence
  Description of Artificial Sequence: Synthetic oligonucleotide
  Antisense strand to SEQ ID NO: 2551784
uacuguguaaauuguuucc

SEQ ID NO: 2551786 - RNA, 19 nt, Artificial Sequence
  Description of Artificial Sequence: Synthetic oligonucleotide
  Sense strand starting at position 245 of SEQ ID NO: 1888713
cacaguauguagcuguuau

SEQ ID NO: 2551787 - RNA, 19 nt, Artificial Sequence
  Description of Artificial Sequence: Synthetic oligonucleotide
  Antisense strand to SEQ ID NO: 2551786
auaacagcuacauacugug

SEQ ID NO: 2551788 - RNA, 19 nt, Artificial Sequence
  Description of Artificial Sequence: Synthetic oligonucleotide
  Sense strand starting at position 246 of SEQ ID NO: 1888713
acaguauguagcuguuauu

SEQ ID NO: 2551789 - RNA, 19 nt, Artificial Sequence
  Description of Artificial Sequence: Synthetic oligonucleotide
  Antisense strand to SEQ ID NO: 2551788
aauaacagcuacauacugu

SEQ ID NO: 2551790 - RNA, 19 nt, Artificial Sequence
  Description of Artificial Sequence: Synthetic oligonucleotide
  Sense strand starting at position 358 of SEQ ID NO: 1888713
gcagaacacuccuuuagau

SEQ ID NO: 2551791 - RNA, 19 nt, Artificial Sequence
  Description of Artificial Sequence: Synthetic oligonucleotide
  Antisense strand to SEQ ID NO: 2551790
aucuaaaggaguguucugc

SEQ ID NO: 2551792 - RNA, 19 nt, Artificial Sequence
  Description of Artificial Sequence: Synthetic oligonucleotide
  Sense strand starting at position 393 of SEQ ID NO: 1888713
augucaaguugacaauuua

SEQ ID NO: 2551793 - RNA, 19 nt, Artificial Sequence
  Description of Artificial Sequence: Synthetic oligonucleotide
  Antisense strand to SEQ ID NO: 2551792
uaaauugucaacuugacau

SEQ ID NO: 2551794 - RNA, 19 nt, Artificial Sequence
  Description of Artificial Sequence: Synthetic oligonucleotide
  Sense strand starting at position 470 of SEQ ID NO: 1888713
gguggacuacagugguuaa

SEQ ID NO: 2551795 - RNA, 19 nt, Artificial Sequence
  Description of Artificial Sequence: Synthetic oligonucleotide
  Antisense strand to SEQ ID NO: 2551794
uuaaccacuguaguccacc

SEQ ID NO: 2551796 - RNA, 19 nt, Artificial Sequence
  Description of Artificial Sequence: Synthetic oligonucleotide
  Sense strand starting at position 471 of SEQ ID NO: 1888713
guggacuacagugguuaau

SEQ ID NO: 2551797 - RNA, 19 nt, Artificial Sequence
  Description of Artificial Sequence: Synthetic oligonucleotide
  Antisense strand to SEQ ID NO: 2551796
auuaaccacuguaguccac

SEQ ID NO: 2551798 - RNA, 19 nt, Artificial Sequence
  Description of Artificial Sequence: Synthetic oligonucleotide
  Sense strand starting at position 481 of SEQ ID NO: 1888713
gugguuaauuucccauucu

SEQ ID NO: 2551799 - RNA, 19 nt, Artificial Sequence
  Description of Artificial Sequence: Synthetic oligonucleotide
  Antisense strand to SEQ ID NO: 2551798
agaaugggaaauuaaccac

SEQ ID NO: 2551800 - RNA, 19 nt, Artificial Sequence
  Description of Artificial Sequence: Synthetic oligonucleotide
  Sense strand starting at position 514 of SEQ ID NO: 1888713
auacuaaguucucuccagu

SEQ ID NO: 2551801 - RNA, 19 nt, Artificial Sequence
  Description of Artificial Sequence: Synthetic oligonucleotide
  Antisense strand to SEQ ID NO: 2551800
acuggagagaacuuaguau

SEQ ID NO: 2551802 - RNA, 19 nt, Artificial Sequence
  Description of Artificial Sequence: Synthetic oligonucleotide
  Sense strand starting at position 517 of SEQ ID NO: 1888713
cuaaguucucuccaguaaa

SEQ ID NO: 2551803 - RNA, 19 nt, Artificial Sequence
  Description of Artificial Sequence: Synthetic oligonucleotide
  Antisense strand to SEQ ID NO: 2551802
uuuacuggagagaacuuag

SEQ ID NO: 2551804 - RNA, 19 nt, Artificial Sequence
  Description of Artificial Sequence: Synthetic oligonucleotide
  Sense strand starting at position 520 of SEQ ID NO: 1888713
aguucucuccaguaaaguu

SEQ ID NO: 2551805 - RNA, 19 nt, Artificial Sequence
  Description of Artificial Sequence: Synthetic oligonucleotide
  Antisense strand to SEQ ID NO: 2551804
aacuuuacuggagagaacu

SEQ ID NO: 2551806 - RNA, 19 nt, Artificial Sequence
  Description of Artificial Sequence: Synthetic oligonucleotide
  Sense strand starting at position 528 of SEQ ID NO: 1888713
ccaguaaaguucucaauug

SEQ ID NO: 2551807 - RNA, 19 nt, Artificial Sequence
  Description of Artificial Sequence: Synthetic oligonucleotide
  Antisense strand to SEQ ID NO: 2551806
caauugagaacuuuacugg

SEQ ID NO: 2551808 - RNA, 19 nt, Artificial Sequence
  Description of Artificial Sequence: Synthetic oligonucleotide
  Sense strand starting at position 535 of SEQ ID NO: 1888713
aguucucaauugucauauu

SEQ ID NO: 2551809 - RNA, 19 nt, Artificial Sequence
  Description of Artificial Sequence: Synthetic oligonucleotide
  Antisense strand to SEQ ID NO: 2551808
aauaugacaauugagaacu

SEQ ID NO: 2551810 - RNA, 19 nt, Artificial Sequence
  Description of Artificial Sequence: Synthetic oligonucleotide
  Sense strand starting at position 628 of SEQ ID NO: 1888713
gugucaguuccuuauugga

SEQ ID NO: 2551811 - RNA, 19 nt, Artificial Sequence
  Description of Artificial Sequence: Synthetic oligonucleotide
  Antisense strand to SEQ ID NO: 2551810
uccaauaaggaacugacac

SEQ ID NO: 2551812 - RNA, 19 nt, Artificial Sequence
  Description of Artificial Sequence: Synthetic oligonucleotide
  Sense strand starting at position 692 of SEQ ID NO: 1888713
cuaggugaugcauggcaca

SEQ ID NO: 2551813 - RNA, 19 nt, Artificial Sequence
  Description of Artificial Sequence: Synthetic oligonucleotide
  Antisense strand to SEQ ID NO: 2551812
ugugccaugcaucaccuag

SEQ ID NO: 2551814 - RNA, 19 nt, Artificial Sequence
  Description of Artificial Sequence: Synthetic oligonucleotide
  Sense strand starting at position 803 of SEQ ID NO: 1888713
ugagauucuuaggcaccuu

SEQ ID NO: 2551815 - RNA, 19 nt, Artificial Sequence
  Description of Artificial Sequence: Synthetic oligonucleotide
  Antisense strand to SEQ ID NO: 2551814
aaggugccuaagaaucuca

SEQ ID NO: 2551816 - RNA, 19 nt, Artificial Sequence
  Description of Artificial Sequence: Synthetic oligonucleotide
  Sense strand starting at position 817 of SEQ ID NO: 1888713
accuuuaccugcgugacua

SEQ ID NO: 2551817 - RNA, 19 nt, Artificial Sequence
  Description of Artificial Sequence: Synthetic oligonucleotide
  Antisense strand to SEQ ID NO: 2551816
uagucacgcagguaaaggu

SEQ ID NO: 2551818 - RNA, 19 nt, Artificial Sequence
  Description of Artificial Sequence: Synthetic oligonucleotide
  Sense strand starting at position 818 of SEQ ID NO: 1888713
ccuuuaccugcgugacuaa

SEQ ID NO: 2551819 - RNA, 19 nt, Artificial Sequence
  Description of Artificial Sequence: Synthetic oligonucleotide
  Antisense strand to SEQ ID NO: 2551818
uuagucacgcagguaaagg

SEQ ID NO: 2551820 - RNA, 19 nt, Artificial Sequence
  Description of Artificial Sequence: Synthetic oligonucleotide
  Sense strand starting at position 819 of SEQ ID NO: 1888713
cuuuaccugcgugacuaau

SEQ ID NO: 2551821 - RNA, 19 nt, Artificial Sequence
  Description of Artificial Sequence: Synthetic oligonucleotide
  Antisense strand to SEQ ID NO: 2551820
auuagucacgcagguaaag

SEQ ID NO: 2551822 - RNA, 19 nt, Artificial Sequence
  Description of Artificial Sequence: Synthetic oligonucleotide
  Sense strand starting at position 821 of SEQ ID NO: 1888713
uuaccugcgugacuaauaa

SEQ ID NO: 2551823 - RNA, 19 nt, Artificial Sequence
  Description of Artificial Sequence: Synthetic oligonucleotide
  Antisense strand to SEQ ID NO: 2551822
uuauuagucacgcagguaa

SEQ ID NO: 2551824 - RNA, 19 nt, Artificial Sequence
  Description of Artificial Sequence: Synthetic oligonucleotide
  Sense strand starting at position 1101 of SEQ ID NO: 1888713
gccuaucuguggccgauuu

SEQ ID NO: 2551825 - RNA, 19 nt, Artificial Sequence
  Description of Artificial Sequence: Synthetic oligonucleotide
  Antisense strand to SEQ ID NO: 2551824
aaaucggccacagauaggc

SEQ ID NO: 2551826 - RNA, 19 nt, Artificial Sequence
  Description of Artificial Sequence: Synthetic oligonucleotide
  Sense strand starting at position 2258 of SEQ ID NO: 1888713
acagacaaguuugagauuu

SEQ ID NO: 2551827 - RNA, 19 nt, Artificial Sequence
  Description of Artificial Sequence: Synthetic oligonucleotide
  Antisense strand to SEQ ID NO: 2551826
aaaucucaaacuugucugu

SEQ ID NO: 2551828 - RNA, 19 nt, Artificial Sequence
  Description of Artificial Sequence: Synthetic oligonucleotide
  Sense strand starting at position 2322 of SEQ ID NO: 1888713
uuuacuucgaguuggcuaa

SEQ ID NO: 2551829 - RNA, 19 nt, Artificial Sequence
  Description of Artificial Sequence: Synthetic oligonucleotide
  Antisense strand to SEQ ID NO: 2551828
uuagccaacucgaaguaaa

SEQ ID NO: 2551830 - RNA, 19 nt, Artificial Sequence
  Description of Artificial Sequence: Synthetic oligonucleotide
  Sense strand starting at position 2389 of SEQ ID NO: 1888713
ccaagcuacugggaagaau

SEQ ID NO: 2551831 - RNA, 19 nt, Artificial Sequence
  Description of Artificial Sequence: Synthetic oligonucleotide
  Antisense strand to SEQ ID NO: 2551830
auucuucccaguagcuugg

SEQ ID NO: 2551832 - RNA, 19 nt, Artificial Sequence
  Description of Artificial Sequence: Synthetic oligonucleotide
  Sense strand starting at position 2489 of SEQ ID NO: 1888713
gccaucgcucaaguaugua

SEQ ID NO: 2551833 - RNA, 19 nt, Artificial Sequence
  Description of Artificial Sequence: Synthetic oligonucleotide
  Antisense strand to SEQ ID NO: 2551832
uacauacuugagcgauggc

SEQ ID NO: 2551834 - RNA, 19 nt, Artificial Sequence
  Description of Artificial Sequence: Synthetic oligonucleotide
  Sense strand starting at position 2525 of SEQ ID NO: 1888713
ggccaaggcagguauauua

SEQ ID NO: 2551835 - RNA, 19 nt, Artificial Sequence
  Description of Artificial Sequence: Synthetic oligonucleotide
  Antisense strand to SEQ ID NO: 2551834
uaauauaccugccuuggcc

SEQ ID NO: 2551836 - RNA, 19 nt, Artificial Sequence
  Description of Artificial Sequence: Synthetic oligonucleotide
  Sense strand starting at position 2532 of SEQ ID NO: 1888713
gcagguauauuauugaggu

SEQ ID NO: 2551837 - RNA, 19 nt, Artificial Sequence
  Description of Artificial Sequence: Synthetic oligonucleotide
  Antisense strand to SEQ ID NO: 2551836
accucaauaauauaccugc

SEQ ID NO: 2551838 - RNA, 19 nt, Artificial Sequence
  Description of Artificial Sequence: Synthetic oligonucleotide
  Sense strand starting at position 2814 of SEQ ID NO: 1888713
guuccuagcuagucagaag

SEQ ID NO: 2551839 - RNA, 19 nt, Artificial Sequence
  Description of Artificial Sequence: Synthetic oligonucleotide
  Antisense strand to SEQ ID NO: 2551838
cuucugacuagcuaggaac

SEQ ID NO: 2551840 - RNA, 19 nt, Artificial Sequence
  Description of Artificial Sequence: Synthetic oligonucleotide
  Sense strand starting at position 3047 of SEQ ID NO: 1888713
uucaguacugaguggugaa

SEQ ID NO: 2551841 - RNA, 19 nt, Artificial Sequence
  Description of Artificial Sequence: Synthetic oligonucleotide
  Antisense strand to SEQ ID NO: 2551840
uucaccacucaguacugaa

SEQ ID NO: 2551842 - RNA, 19 nt, Artificial Sequence
  Description of Artificial Sequence: Synthetic oligonucleotide
  Sense strand starting at position 3158 of SEQ ID NO: 1888713
ggcccuaaagcaugacaaa

SEQ ID NO: 2551843 - RNA, 19 nt, Artificial Sequence
  Description of Artificial Sequence: Synthetic oligonucleotide
  Antisense strand to SEQ ID NO: 2551842
uuugucaugcuuuagggcc

SEQ ID NO: 2551844 - RNA, 19 nt, Artificial Sequence
  Description of Artificial Sequence: Synthetic oligonucleotide
  Sense strand starting at position 3828 of SEQ ID NO: 1888713
ugaguugguuucgugauaa

SEQ ID NO: 2551845 - RNA, 19 nt, Artificial Sequence
  Description of Artificial Sequence: Synthetic oligonucleotide
  Antisense strand to SEQ ID NO: 2551844
uuaucacgaaaccaacuca

SEQ ID NO: 2551846 - RNA, 19 nt, Artificial Sequence
  Description of Artificial Sequence: Synthetic oligonucleotide
  Sense strand starting at position 3841 of SEQ ID NO: 1888713
ugauaauauccaggccuuu

SEQ ID NO: 2551847 - RNA, 19 nt, Artificial Sequence
  Description of Artificial Sequence: Synthetic oligonucleotide
  Antisense strand to SEQ ID NO: 2551846
aaaggccuggauauuauca

SEQ ID NO: 2551848 - RNA, 19 nt, Artificial Sequence
  Description of Artificial Sequence: Synthetic oligonucleotide
  Sense strand starting at position 3914 of SEQ ID NO: 1888713
ucuuguuauuaggucacga

SEQ ID NO: 2551849 - RNA, 19 nt, Artificial Sequence
  Description of Artificial Sequence: Synthetic oligonucleotide
  Antisense strand to SEQ ID NO: 2551848
ucgugaccuaauaacaaga

SEQ ID NO: 2551850 - RNA, 19 nt, Artificial Sequence
  Description of Artificial Sequence: Synthetic oligonucleotide
  Sense strand starting at position 3916 of SEQ ID NO: 1888713
uuguuauuaggucacgaga

SEQ ID NO: 2551851 - RNA, 19 nt, Artificial Sequence
  Description of Artificial Sequence: Synthetic oligonucleotide
  Antisense strand to SEQ ID NO: 2551850
ucucgugaccuaauaacaa

SEQ ID NO: 2551852 - RNA, 19 nt, Artificial Sequence
  Description of Artificial Sequence: Synthetic oligonucleotide
  Sense strand starting at position 177 of SEQ ID NO: 1888714
ucaguaaccaagugaggaa

SEQ ID NO: 2551853 - RNA, 19 nt, Artificial Sequence
  Description of Artificial Sequence: Synthetic oligonucleotide
  Antisense strand to SEQ ID NO: 2551852
uuccucacuugguuacuga

SEQ ID NO: 2551854 - RNA, 19 nt, Artificial Sequence
  Description of Artificial Sequence: Synthetic oligonucleotide
  Sense strand starting at position 322 of SEQ ID NO: 1888714
acugguuugcagugauuug

SEQ ID NO: 2551855 - RNA, 19 nt, Artificial Sequence
  Description of Artificial Sequence: Synthetic oligonucleotide
  Antisense strand to SEQ ID NO: 2551854
caaaucacugcaaaccagu

SEQ ID NO: 2551856 - RNA, 19 nt, Artificial Sequence
  Description of Artificial Sequence: Synthetic oligonucleotide
  Sense strand starting at position 323 of SEQ ID NO: 1888714
cugguuugcagugauuugu

SEQ ID NO: 2551857 - RNA, 19 nt, Artificial Sequence
  Description of Artificial Sequence: Synthetic oligonucleotide
  Antisense strand to SEQ ID NO: 2551856
acaaaucacugcaaaccag

SEQ ID NO: 2551858 - RNA, 19 nt, Artificial Sequence
  Description of Artificial Sequence: Synthetic oligonucleotide
  Sense strand starting at position 329 of SEQ ID NO: 1888714
ugcagugauuuguuaccca

SEQ ID NO: 2551859 - RNA, 19 nt, Artificial Sequence
  Description of Artificial Sequence: Synthetic oligonucleotide
  Antisense strand to SEQ ID NO: 2551858
uggguaacaaaucacugca

SEQ ID NO: 2551860 - RNA, 19 nt, Artificial Sequence
  Description of Artificial Sequence: Synthetic oligonucleotide
  Sense strand starting at position 362 of SEQ ID NO: 1888714
agacauuacccauaugcgu

SEQ ID NO: 2551861 - RNA, 19 nt, Artificial Sequence
  Description of Artificial Sequence: Synthetic oligonucleotide
  Antisense strand to SEQ ID NO: 2551860
acgcauauggguaaugucu

SEQ ID NO: 2551862 - RNA, 19 nt, Artificial Sequence
  Description of Artificial Sequence: Synthetic oligonucleotide
  Sense strand starting at position 402 of SEQ ID NO: 1888714
ccaauuggagauugcuaaa

SEQ ID NO: 2551863 - RNA, 19 nt, Artificial Sequence
  Description of Artificial Sequence: Synthetic oligonucleotide
  Antisense strand to SEQ ID NO: 2551862
uuuagcaaucuccaauugg

SEQ ID NO: 2551864 - RNA, 19 nt, Artificial Sequence
  Description of Artificial Sequence: Synthetic oligonucleotide
  Sense strand starting at position 459 of SEQ ID NO: 1888714
ucugaaaucuaugugcaga

SEQ ID NO: 2551865 - RNA, 19 nt, Artificial Sequence
  Description of Artificial Sequence: Synthetic oligonucleotide
  Antisense strand to SEQ ID NO: 2551864
ucugcacauagauuucaga

SEQ ID NO: 2551866 - RNA, 19 nt, Artificial Sequence
  Description of Artificial Sequence: Synthetic oligonucleotide
  Sense strand starting at position 461 of SEQ ID NO: 1888714
ugaaaucuaugugcagauc

SEQ ID NO: 2551867 - RNA, 19 nt, Artificial Sequence
  Description of Artificial Sequence: Synthetic oligonucleotide
  Antisense strand to SEQ ID NO: 2551866
gaucugcacauagauuuca

SEQ ID NO: 2551868 - RNA, 19 nt, Artificial Sequence
  Description of Artificial Sequence: Synthetic oligonucleotide
  Sense strand starting at position 568 of SEQ ID NO: 1888714
guacacauauaguuaaacu

SEQ ID NO: 2551869 - RNA, 19 nt, Artificial Sequence
  Description of Artificial Sequence: Synthetic oligonucleotide
  Antisense strand to SEQ ID NO: 2551868
aguuuaacuauauguguac

SEQ ID NO: 2551870 - RNA, 19 nt, Artificial Sequence
  Description of Artificial Sequence: Synthetic oligonucleotide
  Sense strand starting at position 690 of SEQ ID NO: 1888714
ggaucugucuuccugacua

SEQ ID NO: 2551871 - RNA, 19 nt, Artificial Sequence
  Description of Artificial Sequence: Synthetic oligonucleotide
  Antisense strand to SEQ ID NO: 2551870
uagucaggaagacagaucc

SEQ ID NO: 2551872 - RNA, 19 nt, Artificial Sequence
  Description of Artificial Sequence: Synthetic oligonucleotide
  Sense strand starting at position 901 of SEQ ID NO: 1888714
cagaaugcauguucugauu

SEQ ID NO: 2551873 - RNA, 19 nt, Artificial Sequence
  Description of Artificial Sequence: Synthetic oligonucleotide
  Antisense strand to SEQ ID NO: 2551872
aaucagaacaugcauucug

SEQ ID NO: 2551874 - RNA, 19 nt, Artificial Sequence
  Description of Artificial Sequence: Synthetic oligonucleotide
  Sense strand starting at position 1024 of SEQ ID NO: 1888714
augcuucuugaagacucaa

SEQ ID NO: 2551875 - RNA, 19 nt, Artificial Sequence
  Description of Artificial Sequence: Synthetic oligonucleotide
  Antisense strand to SEQ ID NO: 2551874
uugagucuucaagaagcau

SEQ ID NO: 2551876 - RNA, 19 nt, Artificial Sequence
  Description of Artificial Sequence: Synthetic oligonucleotide
  Sense strand starting at position 1112 of SEQ ID NO: 1888714
guagaauaauggcuuuaug

SEQ ID NO: 2551877 - RNA, 19 nt, Artificial Sequence
  Description of Artificial Sequence: Synthetic oligonucleotide
  Antisense strand to SEQ ID NO: 2551876
cauaaagccauuauucuac

SEQ ID NO: 2551878 - RNA, 19 nt, Artificial Sequence
  Description of Artificial Sequence: Synthetic oligonucleotide
  Sense strand starting at position 1236 of SEQ ID NO: 1888714
aaauaauguucccugagga

SEQ ID NO: 2551879 - RNA, 19 nt, Artificial Sequence
  Description of Artificial Sequence: Synthetic oligonucleotide
  Antisense strand to SEQ ID NO: 2551878
uccucagggaacauuauuu

SEQ ID NO: 2551880 - RNA, 19 nt, Artificial Sequence
  Description of Artificial Sequence: Synthetic oligonucleotide
  Sense strand starting at position 1237 of SEQ ID NO: 1888714
aauaauguucccugaggag

SEQ ID NO: 2551881 - RNA, 19 nt, Artificial Sequence
  Description of Artificial Sequence: Synthetic oligonucleotide
  Antisense strand to SEQ ID NO: 2551880
cuccucagggaacauuauu

SEQ ID NO: 2551882 - RNA, 19 nt, Artificial Sequence
  Description of Artificial Sequence: Synthetic oligonucleotide
  Sense strand starting at position 1585 of SEQ ID NO: 1888714
ccaguagaccagugaauga

SEQ ID NO: 2551883 - RNA, 19 nt, Artificial Sequence
  Description of Artificial Sequence: Synthetic oligonucleotide
  Antisense strand to SEQ ID NO: 2551882
ucauucacuggucuacugg

SEQ ID NO: 2551884 - RNA, 19 nt, Artificial Sequence
  Description of Artificial Sequence: Synthetic oligonucleotide
  Sense strand starting at position 1812 of SEQ ID NO: 1888714
ccacuauagagaggugacu

SEQ ID NO: 2551885 - RNA, 19 nt, Artificial Sequence
  Description of Artificial Sequence: Synthetic oligonucleotide
  Antisense strand to SEQ ID NO: 2551884
agucaccucucuauagugg

SEQ ID NO: 2551886 - RNA, 19 nt, Artificial Sequence
  Description of Artificial Sequence: Synthetic oligonucleotide
  Sense strand starting at position 2394 of SEQ ID NO: 1888714
gccuccucucuggaaauca

SEQ ID NO: 2551887 - RNA, 19 nt, Artificial Sequence
  Description of Artificial Sequence: Synthetic oligonucleotide
  Antisense strand to SEQ ID NO: 2551886
ugauuuccagagaggaggc

SEQ ID NO: 2551888 - RNA, 19 nt, Artificial Sequence
  Description of Artificial Sequence: Synthetic oligonucleotide
  Sense strand starting at position 2414 of SEQ ID NO: 1888714
auguuugucccuuaauacu

SEQ ID NO: 2551889 - RNA, 19 nt, Artificial Sequence
  Description of Artificial Sequence: Synthetic oligonucleotide
  Antisense strand to SEQ ID NO: 2551888
aguauuaagggacaaacau

SEQ ID NO: 2551890 - RNA, 19 nt, Artificial Sequence
  Description of Artificial Sequence: Synthetic oligonucleotide
  Sense strand starting at position 2420 of SEQ ID NO: 1888714
gucccuuaauacuuguaga

SEQ ID NO: 2551891 - RNA, 19 nt, Artificial Sequence
  Description of Artificial Sequence: Synthetic oligonucleotide
  Antisense strand to SEQ ID NO: 2551890
ucuacaaguauuaagggac

SEQ ID NO: 2551892 - RNA, 19 nt, Artificial Sequence
  Description of Artificial Sequence: Synthetic oligonucleotide
  Sense strand starting at position 2477 of SEQ ID NO: 1888714
guaaacaagcacugauaca

SEQ ID NO: 2551893 - RNA, 19 nt, Artificial Sequence
  Description of Artificial Sequence: Synthetic oligonucleotide
  Antisense strand to SEQ ID NO: 2551892
uguaucagugcuuguuuac

SEQ ID NO: 2551894 - RNA, 19 nt, Artificial Sequence
  Description of Artificial Sequence: Synthetic oligonucleotide
  Sense strand starting at position 2490 of SEQ ID NO: 1888714
gauacagcacuuugauaug

SEQ ID NO: 2551895 - RNA, 19 nt, Artificial Sequence
  Description of Artificial Sequence: Synthetic oligonucleotide
  Antisense strand to SEQ ID NO: 2551894
cauaucaaagugcuguauc

SEQ ID NO: 2551896 - RNA, 19 nt, Artificial Sequence
  Description of Artificial Sequence: Synthetic oligonucleotide
  Sense strand starting at position 2562 of SEQ ID NO: 1888714
gaaguaggugggcaugauu

SEQ ID NO: 2551897 - RNA, 19 nt, Artificial Sequence
  Description of Artificial Sequence: Synthetic oligonucleotide
  Antisense strand to SEQ ID NO: 2551896
aaucaugcccaccuacuuc

SEQ ID NO: 2551898 - RNA, 19 nt, Artificial Sequence
  Description of Artificial Sequence: Synthetic oligonucleotide
  Sense strand starting at position 2565 of SEQ ID NO: 1888714
guaggugggcaugauuauu

SEQ ID NO: 2551899 - RNA, 19 nt, Artificial Sequence
  Description of Artificial Sequence: Synthetic oligonucleotide
  Antisense strand to SEQ ID NO: 2551898
aauaaucaugcccaccuac

SEQ ID NO: 2551900 - RNA, 19 nt, Artificial Sequence
  Description of Artificial Sequence: Synthetic oligonucleotide
  Sense strand starting at position 2619 of SEQ ID NO: 1888714
agaaguaauuuguacaaga

SEQ ID NO: 2551901 - RNA, 19 nt, Artificial Sequence
  Description of Artificial Sequence: Synthetic oligonucleotide
  Antisense strand to SEQ ID NO: 2551900
ucuuguacaaauuacuucu

SEQ ID NO: 2551902 - RNA, 19 nt, Artificial Sequence
  Description of Artificial Sequence: Synthetic oligonucleotide
  Sense strand starting at position 2886 of SEQ ID NO: 1888714
gaaauuggguuucucauug

SEQ ID NO: 2551903 - RNA, 19 nt, Artificial Sequence
  Description of Artificial Sequence: Synthetic oligonucleotide
  Antisense strand to SEQ ID NO: 2551902
caaugagaaacccaauuuc

SEQ ID NO: 2551904 - RNA, 19 nt, Artificial Sequence
  Description of Artificial Sequence: Synthetic oligonucleotide
  Sense strand starting at position 2924 of SEQ ID NO: 1888714
guaggaacacagugacaua

SEQ ID NO: 2551905 - RNA, 19 nt, Artificial Sequence
  Description of Artificial Sequence: Synthetic oligonucleotide
  Antisense strand to SEQ ID NO: 2551904
uaugucacuguguuccuac

SEQ ID NO: 2551906 - RNA, 19 nt, Artificial Sequence
  Description of Artificial Sequence: Synthetic oligonucleotide
  Sense strand starting at position 2927 of SEQ ID NO: 1888714
ggaacacagugacauauuu

SEQ ID NO: 2551907 - RNA, 19 nt, Artificial Sequence
  Description of Artificial Sequence: Synthetic oligonucleotide
  Antisense strand to SEQ ID NO: 2551906
aaauaugucacuguguucc

SEQ ID NO: 2551908 - RNA, 19 nt, Artificial Sequence
  Description of Artificial Sequence: Synthetic oligonucleotide
  Sense strand starting at position 2978 of SEQ ID NO: 1888714
ggcuuugguucggugauuu

SEQ ID NO: 2551909 - RNA, 19 nt, Artificial Sequence
  Description of Artificial Sequence: Synthetic oligonucleotide
  Antisense strand to SEQ ID NO: 2551908
aaaucaccgaaccaaagcc

SEQ ID NO: 2551910 - RNA, 19 nt, Artificial Sequence
  Description of Artificial Sequence: Synthetic oligonucleotide
  Sense strand starting at position 3144 of SEQ ID NO: 1888714
ucuuaagaggauuguauau

SEQ ID NO: 2551911 - RNA, 19 nt, Artificial Sequence
  Description of Artificial Sequence: Synthetic oligonucleotide
  Antisense strand to SEQ ID NO: 2551910
auauacaauccucuuaaga

SEQ ID NO: 2551912 - RNA, 19 nt, Artificial Sequence
  Description of Artificial Sequence: Synthetic oligonucleotide
  Sense strand starting at position 3402 of SEQ ID NO: 1888714
auugaugacuuugucauca

SEQ ID NO: 2551913 - RNA, 19 nt, Artificial Sequence
  Description of Artificial Sequence: Synthetic oligonucleotide
  Antisense strand to SEQ ID NO: 2551912
ugaugacaaagucaucaau

SEQ ID NO: 2551914 - RNA, 19 nt, Artificial Sequence
  Description of Artificial Sequence: Synthetic oligonucleotide
  Sense strand starting at position 3410 of SEQ ID NO: 1888714
cuuugucaucaauggaaag

SEQ ID NO: 2551915 - RNA, 19 nt, Artificial Sequence
  Description of Artificial Sequence: Synthetic oligonucleotide
  Antisense strand to SEQ ID NO: 2551914
cuuuccauugaugacaaag

SEQ ID NO: 2551916 - RNA, 19 nt, Artificial Sequence
  Description of Artificial Sequence: Synthetic oligonucleotide
  Sense strand starting at position 3453 of SEQ ID NO: 1888714
cagucaugucagggaucuu

SEQ ID NO: 2551917 - RNA, 19 nt, Artificial Sequence
  Description of Artificial Sequence: Synthetic oligonucleotide
  Antisense strand to SEQ ID NO: 2551916
aagaucccugacaugacug

SEQ ID NO: 2551918 - RNA, 19 nt, Artificial Sequence
  Description of Artificial Sequence: Synthetic oligonucleotide
  Sense strand starting at position 3471 of SEQ ID NO: 1888714
ugaaauauuuaugcucguu

SEQ ID NO: 2551919 - RNA, 19 nt, Artificial Sequence
  Description of Artificial Sequence: Synthetic oligonucleotide
  Antisense strand to SEQ ID NO: 2551918
aacgagcauaaauauuuca

SEQ ID NO: 2551920 - RNA, 19 nt, Artificial Sequence
  Description of Artificial Sequence: Synthetic oligonucleotide
  Sense strand starting at position 3718 of SEQ ID NO: 1888714
ccaagcagugaguaagaau

SEQ ID NO: 2551921 - RNA, 19 nt, Artificial Sequence
  Description of Artificial Sequence: Synthetic oligonucleotide
  Antisense strand to SEQ ID NO: 2551920
auucuuacucacugcuugg

SEQ ID NO: 2551922 - RNA, 19 nt, Artificial Sequence
  Description of Artificial Sequence: Synthetic oligonucleotide
  Sense strand starting at position 3749 of SEQ ID NO: 1888714
uccaaauuggagcauuacu

SEQ ID NO: 2551923 - RNA, 19 nt, Artificial Sequence
  Description of Artificial Sequence: Synthetic oligonucleotide
  Antisense strand to SEQ ID NO: 2551922
aguaaugcuccaauuugga

SEQ ID NO: 2551924 - RNA, 19 nt, Artificial Sequence
  Description of Artificial Sequence: Synthetic oligonucleotide
  Sense strand starting at position 3757 of SEQ ID NO: 1888714
ggagcauuacugcauccaa

SEQ ID NO: 2551925 - RNA, 19 nt, Artificial Sequence
  Description of Artificial Sequence: Synthetic oligonucleotide
  Antisense strand to SEQ ID NO: 2551924
uuggaugcaguaaugcucc

SEQ ID NO: 2551926 - RNA, 19 nt, Artificial Sequence
  Description of Artificial Sequence: Synthetic oligonucleotide
  Sense strand starting at position 3779 of SEQ ID NO: 1888714
cguugcuuuaaagaauaga

SEQ ID NO: 2551927 - RNA, 19 nt, Artificial Sequence
  Description of Artificial Sequence: Synthetic oligonucleotide
  Antisense strand to SEQ ID NO: 2551926
ucuauucuuuaaagcaacg

SEQ ID NO: 2551928 - RNA, 19 nt, Artificial Sequence
  Description of Artificial Sequence: Synthetic oligonucleotide
  Sense strand starting at position 3796 of SEQ ID NO: 1888714
gaaaguuggagguggaauc

SEQ ID NO: 2551929 - RNA, 19 nt, Artificial Sequence
  Description of Artificial Sequence: Synthetic oligonucleotide
  Antisense strand to SEQ ID NO: 2551928
gauuccaccuccaacuuuc

SEQ ID NO: 2551930 - RNA, 19 nt, Artificial Sequence
  Description of Artificial Sequence: Synthetic oligonucleotide
  Sense strand starting at position 3972 of SEQ ID NO: 1888714
aggacucuguaguuaacaa

SEQ ID NO: 2551931 - RNA, 19 nt, Artificial Sequence
  Description of Artificial Sequence: Synthetic oligonucleotide
  Antisense strand to SEQ ID NO: 2551930
uuguuaacuacagaguccu

SEQ ID NO: 2551932 - RNA, 19 nt, Artificial Sequence
  Description of Artificial Sequence: Synthetic oligonucleotide
  Sense strand starting at position 185 of SEQ ID NO: 1888715
acagcuuagcaauagauau

SEQ ID NO: 2551933 - RNA, 19 nt, Artificial Sequence
  Description of Artificial Sequence: Synthetic oligonucleotide
  Antisense strand to SEQ ID NO: 2551932
auaucuauugcuaagcugu

SEQ ID NO: 2551934 - RNA, 19 nt, Artificial Sequence
  Description of Artificial Sequence: Synthetic oligonucleotide
  Sense strand starting at position 308 of SEQ ID NO: 1888715
ccacgacugcuccaaagua

SEQ ID NO: 2551935 - RNA, 19 nt, Artificial Sequence
  Description of Artificial Sequence: Synthetic oligonucleotide
  Antisense strand to SEQ ID NO: 2551934
uacuuuggagcagucgugg

SEQ ID NO: 2551936 - RNA, 19 nt, Artificial Sequence
  Description of Artificial Sequence: Synthetic oligonucleotide
  Sense strand starting at position 542 of SEQ ID NO: 1888715
cggauuuccacacgacgua

SEQ ID NO: 2551937 - RNA, 19 nt, Artificial Sequence
  Description of Artificial Sequence: Synthetic oligonucleotide
  Antisense strand to SEQ ID NO: 2551936
uacgucguguggaaauccg

SEQ ID NO: 2551938 - RNA, 19 nt, Artificial Sequence
  Description of Artificial Sequence: Synthetic oligonucleotide
  Sense strand starting at position 754 of SEQ ID NO: 1888715
ggaaccucauagucaaagu

SEQ ID NO: 2551939 - RNA, 19 nt, Artificial Sequence
  Description of Artificial Sequence: Synthetic oligonucleotide
  Antisense strand to SEQ ID NO: 2551938
acuuugacuaugagguucc

SEQ ID NO: 2551940 - RNA, 19 nt, Artificial Sequence
  Description of Artificial Sequence: Synthetic oligonucleotide
  Sense strand starting at position 1525 of SEQ ID NO: 1888715
cuggauggccucuaagacu

SEQ ID NO: 2551941 - RNA, 19 nt, Artificial Sequence
  Description of Artificial Sequence: Synthetic oligonucleotide
  Antisense strand to SEQ ID NO: 2551940
agucuuagaggccauccag

SEQ ID NO: 2551942 - RNA, 19 nt, Artificial Sequence
  Description of Artificial Sequence: Synthetic oligonucleotide
  Sense strand starting at position 2073 of SEQ ID NO: 1888715
cguguagagcuggaggaau

SEQ ID NO: 2551943 - RNA, 19 nt, Artificial Sequence
  Description of Artificial Sequence: Synthetic oligonucleotide
  Antisense strand to SEQ ID NO: 2551942
auuccuccagcucuacacg

SEQ ID NO: 2551944 - RNA, 19 nt, Artificial Sequence
  Description of Artificial Sequence: Synthetic oligonucleotide
  Sense strand starting at position 2291 of SEQ ID NO: 1888715
ccacucacguuucuggaaa

SEQ ID NO: 2551945 - RNA, 19 nt, Artificial Sequence
  Description of Artificial Sequence: Synthetic oligonucleotide
  Antisense strand to SEQ ID NO: 2551944
uuuccagaaacgugagugg

SEQ ID NO: 2551946 - RNA, 19 nt, Artificial Sequence
  Description of Artificial Sequence: Synthetic oligonucleotide
  Sense strand starting at position 2363 of SEQ ID NO: 1888715
ggacgauugcucugaaguu

SEQ ID NO: 2551947 - RNA, 19 nt, Artificial Sequence
  Description of Artificial Sequence: Synthetic oligonucleotide
  Antisense strand to SEQ ID NO: 2551946
aacuucagagcaaucgucc

SEQ ID NO: 2551948 - RNA, 19 nt, Artificial Sequence
  Description of Artificial Sequence: Synthetic oligonucleotide
  Sense strand starting at position 2382 of SEQ ID NO: 1888715
ggaguuaaaucuccugccu

SEQ ID NO: 2551949 - RNA, 19 nt, Artificial Sequence
  Description of Artificial Sequence: Synthetic oligonucleotide
  Antisense strand to SEQ ID NO: 2551948
aggcaggagauuuaacucc

SEQ ID NO: 2551950 - RNA, 19 nt, Artificial Sequence
  Description of Artificial Sequence: Synthetic oligonucleotide
  Sense strand starting at position 2486 of SEQ ID NO: 1888715
aguggcugccgaugaauga

SEQ ID NO: 2551951 - RNA, 19 nt, Artificial Sequence
  Description of Artificial Sequence: Synthetic oligonucleotide
  Antisense strand to SEQ ID NO: 2551950
ucauucaucggcagccacu

SEQ ID NO: 2551952 - RNA, 19 nt, Artificial Sequence
  Description of Artificial Sequence: Synthetic oligonucleotide
  Sense strand starting at position 2495 of SEQ ID NO: 1888715
cgaugaaugagcuggagau

SEQ ID NO: 2551953 - RNA, 19 nt, Artificial Sequence
  Description of Artificial Sequence: Synthetic oligonucleotide
  Antisense strand to SEQ ID NO: 2551952
aucuccagcucauucaucg

SEQ ID NO: 2551954 - RNA, 19 nt, Artificial Sequence
  Description of Artificial Sequence: Synthetic oligonucleotide
  Sense strand starting at position 2658 of SEQ ID NO: 1888715
gagauuggcgcucacaaag

SEQ ID NO: 2551955 - RNA, 19 nt, Artificial Sequence
  Description of Artificial Sequence: Synthetic oligonucleotide
  Antisense strand to SEQ ID NO: 2551954
cuuugugagcgccaaucuc

SEQ ID NO: 2551956 - RNA, 19 nt, Artificial Sequence
  Description of Artificial Sequence: Synthetic oligonucleotide
  Sense strand starting at position 2778 of SEQ ID NO: 1888715
aggagaugagucugaaagc

SEQ ID NO: 2551957 - RNA, 19 nt, Artificial Sequence
  Description of Artificial Sequence: Synthetic oligonucleotide
  Antisense strand to SEQ ID NO: 2551956
gcuuucagacucaucuccu

SEQ ID NO: 2551958 - RNA, 19 nt, Artificial Sequence
  Description of Artificial Sequence: Synthetic oligonucleotide
  Sense strand starting at position 2871 of SEQ ID NO: 1888715
acaguuaagcuuugcaaug

SEQ ID NO: 2551959 - RNA, 19 nt, Artificial Sequence
  Description of Artificial Sequence: Synthetic oligonucleotide
  Antisense strand to SEQ ID NO: 2551958
cauugcaaagcuuaacugu

SEQ ID NO: 2551960 - RNA, 19 nt, Artificial Sequence
  Description of Artificial Sequence: Synthetic oligonucleotide
  Sense strand starting at position 2926 of SEQ ID NO: 1888715
guuggaaaugucuacuuug

SEQ ID NO: 2551961 - RNA, 19 nt, Artificial Sequence
  Description of Artificial Sequence: Synthetic oligonucleotide
  Antisense strand to SEQ ID NO: 2551960
caaaguagacauuuccaac

SEQ ID NO: 2551962 - RNA, 19 nt, Artificial Sequence
  Description of Artificial Sequence: Synthetic oligonucleotide
  Sense strand starting at position 2929 of SEQ ID NO: 1888715
ggaaaugucuacuuugugu

SEQ ID NO: 2551963 - RNA, 19 nt, Artificial Sequence
  Description of Artificial Sequence: Synthetic oligonucleotide
  Antisense strand to SEQ ID NO: 2551962
acacaaaguagacauuucc

SEQ ID NO: 2551964 - RNA, 19 nt, Artificial Sequence
  Description of Artificial Sequence: Synthetic oligonucleotide
  Sense strand starting at position 3056 of SEQ ID NO: 1888715
agauguuggacacgaacau

SEQ ID NO: 2551965 - RNA, 19 nt, Artificial Sequence
  Description of Artificial Sequence: Synthetic oligonucleotide
  Antisense strand to SEQ ID NO: 2551964
auguucguguccaacaucu

SEQ ID NO: 2551966 - RNA, 19 nt, Artificial Sequence
  Description of Artificial Sequence: Synthetic oligonucleotide
  Sense strand starting at position 3082 of SEQ ID NO: 1888715
gcauaucuaccagaauugu

SEQ ID NO: 2551967 - RNA, 19 nt, Artificial Sequence
  Description of Artificial Sequence: Synthetic oligonucleotide
  Antisense strand to SEQ ID NO: 2551966
acaauucugguagauaugc

SEQ ID NO: 2551968 - RNA, 19 nt, Artificial Sequence
  Description of Artificial Sequence: Synthetic oligonucleotide
  Sense strand starting at position 3088 of SEQ ID NO: 1888715
cuaccagaauuguccaagu

SEQ ID NO: 2551969 - RNA, 19 nt, Artificial Sequence
  Description of Artificial Sequence: Synthetic oligonucleotide
  Antisense strand to SEQ ID NO: 2551968
acuuggacaauucugguag

SEQ ID NO: 2551970 - RNA, 19 nt, Artificial Sequence
  Description of Artificial Sequence: Synthetic oligonucleotide
  Sense strand starting at position 3090 of SEQ ID NO: 1888715
accagaauuguccaaguuu

SEQ ID NO: 2551971 - RNA, 19 nt, Artificial Sequence
  Description of Artificial Sequence: Synthetic oligonucleotide
  Antisense strand to SEQ ID NO: 2551970
aaacuuggacaauucuggu

SEQ ID NO: 2551972 - RNA, 19 nt, Artificial Sequence
  Description of Artificial Sequence: Synthetic oligonucleotide
  Sense strand starting at position 3099 of SEQ ID NO: 1888715
guccaaguuugauucugga

SEQ ID NO: 2551973 - RNA, 19 nt, Artificial Sequence
  Description of Artificial Sequence: Synthetic oligonucleotide
  Antisense strand to SEQ ID NO: 2551972
uccagaaucaaacuuggac

SEQ ID NO: 2551974 - RNA, 19 nt, Artificial Sequence
  Description of Artificial Sequence: Synthetic oligonucleotide
  Sense strand starting at position 3113 of SEQ ID NO: 1888715
cuggaagacuuccuuuauu

SEQ ID NO: 2551975 - RNA, 19 nt, Artificial Sequence
  Description of Artificial Sequence: Synthetic oligonucleotide
  Antisense strand to SEQ ID NO: 2551974
aauaaaggaagucuuccag

SEQ ID NO: 2551976 - RNA, 19 nt, Artificial Sequence
  Description of Artificial Sequence: Synthetic oligonucleotide
  Sense strand starting at position 3241 of SEQ ID NO: 1888715
uuaggagaauucguugucu

SEQ ID NO: 2551977 - RNA, 19 nt, Artificial Sequence
  Description of Artificial Sequence: Synthetic oligonucleotide
  Antisense strand to SEQ ID NO: 2551976
agacaacgaauucuccuaa

SEQ ID NO: 2551978 - RNA, 19 nt, Artificial Sequence
  Description of Artificial Sequence: Synthetic oligonucleotide
  Sense strand starting at position 3245 of SEQ ID NO: 1888715
gagaauucguugucuccac

SEQ ID NO: 2551979 - RNA, 19 nt, Artificial Sequence
  Description of Artificial Sequence: Synthetic oligonucleotide
  Antisense strand to SEQ ID NO: 2551978
guggagacaacgaauucuc

SEQ ID NO: 2551980 - RNA, 19 nt, Artificial Sequence
  Description of Artificial Sequence: Synthetic oligonucleotide
  Sense strand starting at position 3246 of SEQ ID NO: 1888715
agaauucguugucuccaca

SEQ ID NO: 2551981 - RNA, 19 nt, Artificial Sequence
  Description of Artificial Sequence: Synthetic oligonucleotide
  Antisense strand to SEQ ID NO: 2551980
uguggagacaacgaauucu

SEQ ID NO: 2551982 - RNA, 19 nt, Artificial Sequence
  Description of Artificial Sequence: Synthetic oligonucleotide
  Sense strand starting at position 3249 of SEQ ID NO: 1888715
auucguugucuccacaaag

SEQ ID NO: 2551983 - RNA, 19 nt, Artificial Sequence
  Description of Artificial Sequence: Synthetic oligonucleotide
  Antisense strand to SEQ ID NO: 2551982
cuuuguggagacaacgaau

SEQ ID NO: 2551984 - RNA, 19 nt, Artificial Sequence
  Description of Artificial Sequence: Synthetic oligonucleotide
  Sense strand starting at position 3324 of SEQ ID NO: 1888715
acugcacccuuagagauuu

SEQ ID NO: 2551985 - RNA, 19 nt, Artificial Sequence
  Description of Artificial Sequence: Synthetic oligonucleotide
  Antisense strand to SEQ ID NO: 2551984
aaaucucuaagggugcagu

SEQ ID NO: 2551986 - RNA, 19 nt, Artificial Sequence
  Description of Artificial Sequence: Synthetic oligonucleotide
  Sense strand starting at position 3350 of SEQ ID NO: 1888715
gguagcuuuaaugagcuau

SEQ ID NO: 2551987 - RNA, 19 nt, Artificial Sequence
  Description of Artificial Sequence: Synthetic oligonucleotide
  Antisense strand to SEQ ID NO: 2551986
auagcucauuaaagcuacc

SEQ ID NO: 2551988 - RNA, 19 nt, Artificial Sequence
  Description of Artificial Sequence: Synthetic oligonucleotide
  Sense strand starting at position 3371 of SEQ ID NO: 1888715
gcugucugaagacagaguu

SEQ ID NO: 2551989 - RNA, 19 nt, Artificial Sequence
  Description of Artificial Sequence: Synthetic oligonucleotide
  Antisense strand to SEQ ID NO: 2551988
aacucugucuucagacagc

SEQ ID NO: 2551990 - RNA, 19 nt, Artificial Sequence
  Description of Artificial Sequence: Synthetic oligonucleotide
  Sense strand starting at position 3644 of SEQ ID NO: 1888715
acuguaauuuaucacuggu

SEQ ID NO: 2551991 - RNA, 19 nt, Artificial Sequence
  Description of Artificial Sequence: Synthetic oligonucleotide
  Antisense strand to SEQ ID NO: 2551990
accagugauaaauuacagu

SEQ ID NO: 2551992 - RNA, 19 nt, Artificial Sequence
  Description of Artificial Sequence: Synthetic oligonucleotide
  Sense strand starting at position 3650 of SEQ ID NO: 1888715
auuuaucacugguaaugga

SEQ ID NO: 2551993 - RNA, 19 nt, Artificial Sequence
  Description of Artificial Sequence: Synthetic oligonucleotide
  Antisense strand to SEQ ID NO: 2551992
uccauuaccagugauaaau

SEQ ID NO: 2551994 - RNA, 19 nt, Artificial Sequence
  Description of Artificial Sequence: Synthetic oligonucleotide
  Sense strand starting at position 3678 of SEQ ID NO: 1888715
ugucucuaccacugggaua

SEQ ID NO: 2551995 - RNA, 19 nt, Artificial Sequence
  Description of Artificial Sequence: Synthetic oligonucleotide
  Antisense strand to SEQ ID NO: 2551994
uaucccagugguagagaca

SEQ ID NO: 2551996 - RNA, 19 nt, Artificial Sequence
  Description of Artificial Sequence: Synthetic oligonucleotide
  Sense strand starting at position 3704 of SEQ ID NO: 1888715
augguuaugccucauugca

SEQ ID NO: 2551997 - RNA, 19 nt, Artificial Sequence
  Description of Artificial Sequence: Synthetic oligonucleotide
  Antisense strand to SEQ ID NO: 2551996
ugcaaugaggcauaaccau

SEQ ID NO: 2551998 - RNA, 19 nt, Artificial Sequence
  Description of Artificial Sequence: Synthetic oligonucleotide
  Sense strand starting at position 3722 of SEQ ID NO: 1888715
augguuaugccucagugga

SEQ ID NO: 2551999 - RNA, 19 nt, Artificial Sequence
  Description of Artificial Sequence: Synthetic oligonucleotide
  Antisense strand to SEQ ID NO: 2551998
uccacugaggcauaaccau

SEQ ID NO: 2552000 - RNA, 19 nt, Artificial Sequence
  Description of Artificial Sequence: Synthetic oligonucleotide
  Sense strand starting at position 3724 of SEQ ID NO: 1888715
gguuaugccucaguggagu

SEQ ID NO: 2552001 - RNA, 19 nt, Artificial Sequence
  Description of Artificial Sequence: Synthetic oligonucleotide
  Antisense strand to SEQ ID NO: 2552000
acuccacugaggcauaacc

SEQ ID NO: 2552002 - RNA, 19 nt, Artificial Sequence
  Description of Artificial Sequence: Synthetic oligonucleotide
  Sense strand starting at position 3803 of SEQ ID NO: 1888715
gggugagcaacuugaugau

SEQ ID NO: 2552003 - RNA, 19 nt, Artificial Sequence
  Description of Artificial Sequence: Synthetic oligonucleotide
  Antisense strand to SEQ ID NO: 2552002
aucaucaaguugcucaccc

SEQ ID NO: 2552004 - RNA, 19 nt, Artificial Sequence
  Description of Artificial Sequence: Synthetic oligonucleotide
  Sense strand starting at position 3807 of SEQ ID NO: 1888715
gagcaacuugaugauugua

SEQ ID NO: 2552005 - RNA, 19 nt, Artificial Sequence
  Description of Artificial Sequence: Synthetic oligonucleotide
  Antisense strand to SEQ ID NO: 2552004
uacaaucaucaaguugcuc

SEQ ID NO: 2552006 - RNA, 19 nt, Artificial Sequence
  Description of Artificial Sequence: Synthetic oligonucleotide
  Sense strand starting at position 3809 of SEQ ID NO: 1888715
gcaacuugaugauuguauu

SEQ ID NO: 2552007 - RNA, 19 nt, Artificial Sequence
  Description of Artificial Sequence: Synthetic oligonucleotide
  Antisense strand to SEQ ID NO: 2552006
aauacaaucaucaaguugc

SEQ ID NO: 2552008 - RNA, 19 nt, Artificial Sequence
  Description of Artificial Sequence: Synthetic oligonucleotide
  Sense strand starting at position 3812 of SEQ ID NO: 1888715
acuugaugauuguauuuga

SEQ ID NO: 2552009 - RNA, 19 nt, Artificial Sequence
  Description of Artificial Sequence: Synthetic oligonucleotide
  Antisense strand to SEQ ID NO: 2552008
ucaaauacaaucaucaagu

SEQ ID NO: 2552010 - RNA, 19 nt, Artificial Sequence
  Description of Artificial Sequence: Synthetic oligonucleotide
  Sense strand starting at position 3929 of SEQ ID NO: 1888715
gggcauacauucuugcuca

SEQ ID NO: 2552011 - RNA, 19 nt, Artificial Sequence
  Description of Artificial Sequence: Synthetic oligonucleotide
  Antisense strand to SEQ ID NO: 2552010
ugagcaagaauguaugccc

SEQ ID NO: 2552012 - RNA, 19 nt, Artificial Sequence
  Description of Artificial Sequence: Synthetic oligonucleotide
  Sense strand starting at position 67 of SEQ ID NO: 1888716
cucuacucuggguagagua

SEQ ID NO: 2552013 - RNA, 19 nt, Artificial Sequence
  Description of Artificial Sequence: Synthetic oligonucleotide
  Antisense strand to SEQ ID NO: 2552012
uacucuacccagaguagag

SEQ ID NO: 2552014 - RNA, 19 nt, Artificial Sequence
  Description of Artificial Sequence: Synthetic oligonucleotide
  Sense strand starting at position 134 of SEQ ID NO: 1888716
agggucuucguguuuguuu

SEQ ID NO: 2552015 - RNA, 19 nt, Artificial Sequence
  Description of Artificial Sequence: Synthetic oligonucleotide
  Antisense strand to SEQ ID NO: 2552014
aaacaaacacgaagacccu

SEQ ID NO: 2552016 - RNA, 19 nt, Artificial Sequence
  Description of Artificial Sequence: Synthetic oligonucleotide
  Sense strand starting at position 297 of SEQ ID NO: 1888716
gcccaucuaccugaugaua

SEQ ID NO: 2552017 - RNA, 19 nt, Artificial Sequence
  Description of Artificial Sequence: Synthetic oligonucleotide
  Antisense strand to SEQ ID NO: 2552016
uaucaucagguagaugggc

SEQ ID NO: 2552018 - RNA, 19 nt, Artificial Sequence
  Description of Artificial Sequence: Synthetic oligonucleotide
  Sense strand starting at position 388 of SEQ ID NO: 1888716
gaugucuuugcagaaccua

SEQ ID NO: 2552019 - RNA, 19 nt, Artificial Sequence
  Description of Artificial Sequence: Synthetic oligonucleotide
  Antisense strand to SEQ ID NO: 2552018
uagguucugcaaagacauc

SEQ ID NO: 2552020 - RNA, 19 nt, Artificial Sequence
  Description of Artificial Sequence: Synthetic oligonucleotide
  Sense strand starting at position 469 of SEQ ID NO: 1888716
aaucaauagguguggaaug

SEQ ID NO: 2552021 - RNA, 19 nt, Artificial Sequence
  Description of Artificial Sequence: Synthetic oligonucleotide
  Antisense strand to SEQ ID NO: 2552020
cauuccacaccuauugauu

SEQ ID NO: 2552022 - RNA, 19 nt, Artificial Sequence
  Description of Artificial Sequence: Synthetic oligonucleotide
  Sense strand starting at position 788 of SEQ ID NO: 1888716
aggaguaugccucaucaag

SEQ ID NO: 2552023 - RNA, 19 nt, Artificial Sequence
  Description of Artificial Sequence: Synthetic oligonucleotide
  Antisense strand to SEQ ID NO: 2552022
cuugaugaggcauacuccu

SEQ ID NO: 2552024 - RNA, 19 nt, Artificial Sequence
  Description of Artificial Sequence: Synthetic oligonucleotide
  Sense strand starting at position 905 of SEQ ID NO: 1888716
ggaacagguccuuggguau

SEQ ID NO: 2552025 - RNA, 19 nt, Artificial Sequence
  Description of Artificial Sequence: Synthetic oligonucleotide
  Antisense strand to SEQ ID NO: 2552024
auacccaaggaccuguucc

SEQ ID NO: 2552026 - RNA, 19 nt, Artificial Sequence
  Description of Artificial Sequence: Synthetic oligonucleotide
  Sense strand starting at position 1054 of SEQ ID NO: 1888716
agaagcuauccaggauaug

SEQ ID NO: 2552027 - RNA, 19 nt, Artificial Sequence
  Description of Artificial Sequence: Synthetic oligonucleotide
  Antisense strand to SEQ ID NO: 2552026
cauauccuggauagcuucu

SEQ ID NO: 2552028 - RNA, 19 nt, Artificial Sequence
  Description of Artificial Sequence: Synthetic oligonucleotide
  Sense strand starting at position 1055 of SEQ ID NO: 1888716
gaagcuauccaggauaugu

SEQ ID NO: 2552029 - RNA, 19 nt, Artificial Sequence
  Description of Artificial Sequence: Synthetic oligonucleotide
  Antisense strand to SEQ ID NO: 2552028
acauauccuggauagcuuc

SEQ ID NO: 2552030 - RNA, 19 nt, Artificial Sequence
  Description of Artificial Sequence: Synthetic oligonucleotide
  Sense strand starting at position 1057 of SEQ ID NO: 1888716
agcuauccaggauauguua

SEQ ID NO: 2552031 - RNA, 19 nt, Artificial Sequence
  Description of Artificial Sequence: Synthetic oligonucleotide
  Antisense strand to SEQ ID NO: 2552030
uaacauauccuggauagcu

SEQ ID NO: 2552032 - RNA, 19 nt, Artificial Sequence
  Description of Artificial Sequence: Synthetic oligonucleotide
  Sense strand starting at position 1096 of SEQ ID NO: 1888716
ggauuaaaugagugugcaa

SEQ ID NO: 2552033 - RNA, 19 nt, Artificial Sequence
  Description of Artificial Sequence: Synthetic oligonucleotide
  Antisense strand to SEQ ID NO: 2552032
uugcacacucauuuaaucc

SEQ ID NO: 2552034 - RNA, 19 nt, Artificial Sequence
  Description of Artificial Sequence: Synthetic oligonucleotide
  Sense strand starting at position 1235 of SEQ ID NO: 1888716
auguauugauuaguagaga

SEQ ID NO: 2552035 - RNA, 19 nt, Artificial Sequence
  Description of Artificial Sequence: Synthetic oligonucleotide
  Antisense strand to SEQ ID NO: 2552034
ucucuacuaaucaauacau

SEQ ID NO: 2552036 - RNA, 19 nt, Artificial Sequence
  Description of Artificial Sequence: Synthetic oligonucleotide
  Sense strand starting at position 1337 of SEQ ID NO: 1888716
gucccuauagaaugguaga

SEQ ID NO: 2552037 - RNA, 19 nt, Artificial Sequence
  Description of Artificial Sequence: Synthetic oligonucleotide
  Antisense strand to SEQ ID NO: 2552036
ucuaccauucuauagggac

SEQ ID NO: 2552038 - RNA, 19 nt, Artificial Sequence
  Description of Artificial Sequence: Synthetic oligonucleotide
  Sense strand starting at position 1350 of SEQ ID NO: 1888716
gguagagggcagggauaau

SEQ ID NO: 2552039 - RNA, 19 nt, Artificial Sequence
  Description of Artificial Sequence: Synthetic oligonucleotide
  Antisense strand to SEQ ID NO: 2552038
auuaucccugcccucuacc

SEQ ID NO: 2552040 - RNA, 19 nt, Artificial Sequence
  Description of Artificial Sequence: Synthetic oligonucleotide
  Sense strand starting at position 1420 of SEQ ID NO: 1888716
agggucaggccuugauaua

SEQ ID NO: 2552041 - RNA, 19 nt, Artificial Sequence
  Description of Artificial Sequence: Synthetic oligonucleotide
  Antisense strand to SEQ ID NO: 2552040
uauaucaaggccugacccu

SEQ ID NO: 2552042 - RNA, 19 nt, Artificial Sequence
  Description of Artificial Sequence: Synthetic oligonucleotide
  Sense strand starting at position 1421 of SEQ ID NO: 1888716
gggucaggccuugauauaa

SEQ ID NO: 2552043 - RNA, 19 nt, Artificial Sequence
  Description of Artificial Sequence: Synthetic oligonucleotide
  Antisense strand to SEQ ID NO: 2552042
uuauaucaaggccugaccc

SEQ ID NO: 2552044 - RNA, 19 nt, Artificial Sequence
  Description of Artificial Sequence: Synthetic oligonucleotide
  Sense strand starting at position 1530 of SEQ ID NO: 1888716
gagauuaagcucugaaggu

SEQ ID NO: 2552045 - RNA, 19 nt, Artificial Sequence
  Description of Artificial Sequence: Synthetic oligonucleotide
  Antisense strand to SEQ ID NO: 2552044
accuucagagcuuaaucuc

SEQ ID NO: 2552046 - RNA, 19 nt, Artificial Sequence
  Description of Artificial Sequence: Synthetic oligonucleotide
  Sense strand starting at position 1801 of SEQ ID NO: 1888716
gugaaauugggccaccaau

SEQ ID NO: 2552047 - RNA, 19 nt, Artificial Sequence
  Description of Artificial Sequence: Synthetic oligonucleotide
  Antisense strand to SEQ ID NO: 2552046
auugguggcccaauuucac

SEQ ID NO: 2552048 - RNA, 19 nt, Artificial Sequence
  Description of Artificial Sequence: Synthetic oligonucleotide
  Sense strand starting at position 1972 of SEQ ID NO: 1888716
aagcaagucgcugaaauau

SEQ ID NO: 2552049 - RNA, 19 nt, Artificial Sequence
  Description of Artificial Sequence: Synthetic oligonucleotide
  Antisense strand to SEQ ID NO: 2552048
auauuucagcgacuugcuu

SEQ ID NO: 2552050 - RNA, 19 nt, Artificial Sequence
  Description of Artificial Sequence: Synthetic oligonucleotide
  Sense strand starting at position 2027 of SEQ ID NO: 1888716
guugaaggaauauguggua

SEQ ID NO: 2552051 - RNA, 19 nt, Artificial Sequence
  Description of Artificial Sequence: Synthetic oligonucleotide
  Antisense strand to SEQ ID NO: 2552050
uaccacauauuccuucaac

SEQ ID NO: 2552052 - RNA, 19 nt, Artificial Sequence
  Description of Artificial Sequence: Synthetic oligonucleotide
  Sense strand starting at position 2237 of SEQ ID NO: 1888716
acacaagaaucgucagggu

SEQ ID NO: 2552053 - RNA, 19 nt, Artificial Sequence
  Description of Artificial Sequence: Synthetic oligonucleotide
  Antisense strand to SEQ ID NO: 2552052
acccugacgauucuugugu

SEQ ID NO: 2552054 - RNA, 19 nt, Artificial Sequence
  Description of Artificial Sequence: Synthetic oligonucleotide
  Sense strand starting at position 2362 of SEQ ID NO: 1888716
uccaucaggcuuuacuaga

SEQ ID NO: 2552055 - RNA, 19 nt, Artificial Sequence
  Description of Artificial Sequence: Synthetic oligonucleotide
  Antisense strand to SEQ ID NO: 2552054
ucuaguaaagccugaugga

SEQ ID NO: 2552056 - RNA, 19 nt, Artificial Sequence
  Description of Artificial Sequence: Synthetic oligonucleotide
  Sense strand starting at position 2824 of SEQ ID NO: 1888716
aaugaaguaggaugucaau

SEQ ID NO: 2552057 - RNA, 19 nt, Artificial Sequence
  Description of Artificial Sequence: Synthetic oligonucleotide
  Antisense strand to SEQ ID NO: 2552056
auugacauccuacuucauu

SEQ ID NO: 2552058 - RNA, 19 nt, Artificial Sequence
  Description of Artificial Sequence: Synthetic oligonucleotide
  Sense strand starting at position 2827 of SEQ ID NO: 1888716
gaaguaggaugucaauuua

SEQ ID NO: 2552059 - RNA, 19 nt, Artificial Sequence
  Description of Artificial Sequence: Synthetic oligonucleotide
  Antisense strand to SEQ ID NO: 2552058
uaaauugacauccuacuuc

SEQ ID NO: 2552060 - RNA, 19 nt, Artificial Sequence
  Description of Artificial Sequence: Synthetic oligonucleotide
  Sense strand starting at position 2888 of SEQ ID NO: 1888716
gugggcuuacaugagauua

SEQ ID NO: 2552061 - RNA, 19 nt, Artificial Sequence
  Description of Artificial Sequence: Synthetic oligonucleotide
  Antisense strand to SEQ ID NO: 2552060
uaaucucauguaagcccac

SEQ ID NO: 2552062 - RNA, 19 nt, Artificial Sequence
  Description of Artificial Sequence: Synthetic oligonucleotide
  Sense strand starting at position 2933 of SEQ ID NO: 1888716
ggaggcagacacuguuaga

SEQ ID NO: 2552063 - RNA, 19 nt, Artificial Sequence
  Description of Artificial Sequence: Synthetic oligonucleotide
  Antisense strand to SEQ ID NO: 2552062
ucuaacagugucugccucc

SEQ ID NO: 2552064 - RNA, 19 nt, Artificial Sequence
  Description of Artificial Sequence: Synthetic oligonucleotide
  Sense strand starting at position 2985 of SEQ ID NO: 1888716
gcaggaaauuccuucugag

SEQ ID NO: 2552065 - RNA, 19 nt, Artificial Sequence
  Description of Artificial Sequence: Synthetic oligonucleotide
  Antisense strand to SEQ ID NO: 2552064
cucagaaggaauuuccugc

SEQ ID NO: 2552066 - RNA, 19 nt, Artificial Sequence
  Description of Artificial Sequence: Synthetic oligonucleotide
  Sense strand starting at position 3119 of SEQ ID NO: 1888716
acugaugucccagagcaca

SEQ ID NO: 2552067 - RNA, 19 nt, Artificial Sequence
  Description of Artificial Sequence: Synthetic oligonucleotide
  Antisense strand to SEQ ID NO: 2552066
ugugcucugggacaucagu

SEQ ID NO: 2552068 - RNA, 19 nt, Artificial Sequence
  Description of Artificial Sequence: Synthetic oligonucleotide
  Sense strand starting at position 3177 of SEQ ID NO: 1888716
ggagaugcuccagggaaua

SEQ ID NO: 2552069 - RNA, 19 nt, Artificial Sequence
  Description of Artificial Sequence: Synthetic oligonucleotide
  Antisense strand to SEQ ID NO: 2552068
uauucccuggagcaucucc

SEQ ID NO: 2552070 - RNA, 19 nt, Artificial Sequence
  Description of Artificial Sequence: Synthetic oligonucleotide
  Sense strand starting at position 3298 of SEQ ID NO: 1888716
augggcuugcuagaaguca

SEQ ID NO: 2552071 - RNA, 19 nt, Artificial Sequence
  Description of Artificial Sequence: Synthetic oligonucleotide
  Antisense strand to SEQ ID NO: 2552070
ugacuucuagcaagcccau

SEQ ID NO: 2552072 - RNA, 19 nt, Artificial Sequence
  Description of Artificial Sequence: Synthetic oligonucleotide
  Sense strand starting at position 3310 of SEQ ID NO: 1888716
gaagucauuugguccagcu

SEQ ID NO: 2552073 - RNA, 19 nt, Artificial Sequence
  Description of Artificial Sequence: Synthetic oligonucleotide
  Antisense strand to SEQ ID NO: 2552072
agcuggaccaaaugacuuc

SEQ ID NO: 2552074 - RNA, 19 nt, Artificial Sequence
  Description of Artificial Sequence: Synthetic oligonucleotide
  Sense strand starting at position 3415 of SEQ ID NO: 1888716
cuggcuucugcuuaagaga

SEQ ID NO: 2552075 - RNA, 19 nt, Artificial Sequence
  Description of Artificial Sequence: Synthetic oligonucleotide
  Antisense strand to SEQ ID NO: 2552074
ucucuuaagcagaagccag

SEQ ID NO: 2552076 - RNA, 19 nt, Artificial Sequence
  Description of Artificial Sequence: Synthetic oligonucleotide
  Sense strand starting at position 3562 of SEQ ID NO: 1888716
agcaaucuacauuaaggua

SEQ ID NO: 2552077 - RNA, 19 nt, Artificial Sequence
  Description of Artificial Sequence: Synthetic oligonucleotide
  Antisense strand to SEQ ID NO: 2552076
uaccuuaauguagauugcu

SEQ ID NO: 2552078 - RNA, 19 nt, Artificial Sequence
  Description of Artificial Sequence: Synthetic oligonucleotide
  Sense strand starting at position 3637 of SEQ ID NO: 1888716
gcuguuugugaggaugaug

SEQ ID NO: 2552079 - RNA, 19 nt, Artificial Sequence
  Description of Artificial Sequence: Synthetic oligonucleotide
  Antisense strand to SEQ ID NO: 2552078
caucauccucacaaacagc

SEQ ID NO: 2552080 - RNA, 19 nt, Artificial Sequence
  Description of Artificial Sequence: Synthetic oligonucleotide
  Sense strand starting at position 3770 of SEQ ID NO: 1888716
ucuauauugugaccacaag

SEQ ID NO: 2552081 - RNA, 19 nt, Artificial Sequence
  Description of Artificial Sequence: Synthetic oligonucleotide
  Antisense strand to SEQ ID NO: 2552080
cuuguggucacaauauaga

SEQ ID NO: 2552082 - RNA, 19 nt, Artificial Sequence
  Description of Artificial Sequence: Synthetic oligonucleotide
  Sense strand starting at position 3856 of SEQ ID NO: 1888716
agacuaucagauugcacaa

SEQ ID NO: 2552083 - RNA, 19 nt, Artificial Sequence
  Description of Artificial Sequence: Synthetic oligonucleotide
  Antisense strand to SEQ ID NO: 2552082
uugugcaaucugauagucu

SEQ ID NO: 2552084 - RNA, 19 nt, Artificial Sequence
  Description of Artificial Sequence: Synthetic oligonucleotide
  Sense strand starting at position 3880 of SEQ ID NO: 1888716
gccugcaagacauauguga

SEQ ID NO: 2552085 - RNA, 19 nt, Artificial Sequence
  Description of Artificial Sequence: Synthetic oligonucleotide
  Antisense strand to SEQ ID NO: 2552084
ucacauaugucuugcaggc

SEQ ID NO: 2552086 - RNA, 19 nt, Artificial Sequence
  Description of Artificial Sequence: Synthetic oligonucleotide
  Sense strand starting at position 3884 of SEQ ID NO: 1888716
gcaagacauaugugaaaug

SEQ ID NO: 2552087 - RNA, 19 nt, Artificial Sequence
  Description of Artificial Sequence: Synthetic oligonucleotide
  Antisense strand to SEQ ID NO: 2552086
cauuucacauaugucuugc

SEQ ID NO: 2552088 - RNA, 19 nt, Artificial Sequence
  Description of Artificial Sequence: Synthetic oligonucleotide
  Sense strand starting at position 3895 of SEQ ID NO: 1888716
gugaaaugucauuacuccu

SEQ ID NO: 2552089 - RNA, 19 nt, Artificial Sequence
  Description of Artificial Sequence: Synthetic oligonucleotide
  Antisense strand to SEQ ID NO: 2552088
aggaguaaugacauuucac

SEQ ID NO: 2552090 - RNA, 19 nt, Artificial Sequence
  Description of Artificial Sequence: Synthetic oligonucleotide
  Sense strand starting at position 3902 of SEQ ID NO: 1888716
gucauuacuccugauacuu

SEQ ID NO: 2552091 - RNA, 19 nt, Artificial Sequence
  Description of Artificial Sequence: Synthetic oligonucleotide
  Antisense strand to SEQ ID NO: 2552090
aaguaucaggaguaaugac

SEQ ID NO: 2552092 - RNA, 19 nt, Artificial Sequence
  Description of Artificial Sequence: Synthetic oligonucleotide
  Sense strand starting at position 143 of SEQ ID NO: 1888717
aggaacugguuauucucaa

SEQ ID NO: 2552093 - RNA, 19 nt, Artificial Sequence
  Description of Artificial Sequence: Synthetic oligonucleotide
  Antisense strand to SEQ ID NO: 2552092
uugagaauaaccaguuccu

SEQ ID NO: 2552094 - RNA, 19 nt, Artificial Sequence
  Description of Artificial Sequence: Synthetic oligonucleotide
  Sense strand starting at position 144 of SEQ ID NO: 1888717
ggaacugguuauucucaac

SEQ ID NO: 2552095 - RNA, 19 nt, Artificial Sequence
  Description of Artificial Sequence: Synthetic oligonucleotide
  Antisense strand to SEQ ID NO: 2552094
guugagaauaaccaguucc

SEQ ID NO: 2552096 - RNA, 19 nt, Artificial Sequence
  Description of Artificial Sequence: Synthetic oligonucleotide
  Sense strand starting at position 178 of SEQ ID NO: 1888717
ugugcuaaugaguaacuuu

SEQ ID NO: 2552097 - RNA, 19 nt, Artificial Sequence
  Description of Artificial Sequence: Synthetic oligonucleotide
  Antisense strand to SEQ ID NO: 2552096
aaaguuacucauuagcaca

SEQ ID NO: 2552098 - RNA, 19 nt, Artificial Sequence
  Description of Artificial Sequence: Synthetic oligonucleotide
  Sense strand starting at position 208 of SEQ ID NO: 1888717
ggugauuucuuaguauagc

SEQ ID NO: 2552099 - RNA, 19 nt, Artificial Sequence
  Description of Artificial Sequence: Synthetic oligonucleotide
  Antisense strand to SEQ ID NO: 2552098
gcuauacuaagaaaucacc

SEQ ID NO: 2552100 - RNA, 19 nt, Artificial Sequence
  Description of Artificial Sequence: Synthetic oligonucleotide
  Sense strand starting at position 216 of SEQ ID NO: 1888717
cuuaguauagcagacuaca

SEQ ID NO: 2552101 - RNA, 19 nt, Artificial Sequence
  Description of Artificial Sequence: Synthetic oligonucleotide
  Antisense strand to SEQ ID NO: 2552100
uguagucugcuauacuaag

SEQ ID NO: 2552102 - RNA, 19 nt, Artificial Sequence
  Description of Artificial Sequence: Synthetic oligonucleotide
  Sense strand starting at position 278 of SEQ ID NO: 1888717
ccuuguuaagaauauguuu

SEQ ID NO: 2552103 - RNA, 19 nt, Artificial Sequence
  Description of Artificial Sequence: Synthetic oligonucleotide
  Antisense strand to SEQ ID NO: 2552102
aaacauauucuuaacaagg

SEQ ID NO: 2552104 - RNA, 19 nt, Artificial Sequence
  Description of Artificial Sequence: Synthetic oligonucleotide
  Sense strand starting at position 506 of SEQ ID NO: 1888717
gguaucccauccucaaaga

SEQ ID NO: 2552105 - RNA, 19 nt, Artificial Sequence
  Description of Artificial Sequence: Synthetic oligonucleotide
  Antisense strand to SEQ ID NO: 2552104
ucuuugaggaugggauacc

SEQ ID NO: 2552106 - RNA, 19 nt, Artificial Sequence
  Description of Artificial Sequence: Synthetic oligonucleotide
  Sense strand starting at position 519 of SEQ ID NO: 1888717
caaagauugccagggagcu

SEQ ID NO: 2552107 - RNA, 19 nt, Artificial Sequence
  Description of Artificial Sequence: Synthetic oligonucleotide
  Antisense strand to SEQ ID NO: 2552106
agcucccuggcaaucuuug

SEQ ID NO: 2552108 - RNA, 19 nt, Artificial Sequence
  Description of Artificial Sequence: Synthetic oligonucleotide
  Sense strand starting at position 575 of SEQ ID NO: 1888717
uuuggaagugaaugccuaa

SEQ ID NO: 2552109 - RNA, 19 nt, Artificial Sequence
  Description of Artificial Sequence: Synthetic oligonucleotide
  Antisense strand to SEQ ID NO: 2552108
uuaggcauucacuuccaaa

SEQ ID NO: 2552110 - RNA, 19 nt, Artificial Sequence
  Description of Artificial Sequence: Synthetic oligonucleotide
  Sense strand starting at position 578 of SEQ ID NO: 1888717
ggaagugaaugccuaagua

SEQ ID NO: 2552111 - RNA, 19 nt, Artificial Sequence
  Description of Artificial Sequence: Synthetic oligonucleotide
  Antisense strand to SEQ ID NO: 2552110
uacuuaggcauucacuucc

SEQ ID NO: 2552112 - RNA, 19 nt, Artificial Sequence
  Description of Artificial Sequence: Synthetic oligonucleotide
  Sense strand starting at position 879 of SEQ ID NO: 1888717
gggugugagguagguauuu

SEQ ID NO: 2552113 - RNA, 19 nt, Artificial Sequence
  Description of Artificial Sequence: Synthetic oligonucleotide
  Antisense strand to SEQ ID NO: 2552112
aaauaccuaccucacaccc

SEQ ID NO: 2552114 - RNA, 19 nt, Artificial Sequence
  Description of Artificial Sequence: Synthetic oligonucleotide
  Sense strand starting at position 888 of SEQ ID NO: 1888717
guagguauuucauuguggu

SEQ ID NO: 2552115 - RNA, 19 nt, Artificial Sequence
  Description of Artificial Sequence: Synthetic oligonucleotide
  Antisense strand to SEQ ID NO: 2552114
accacaaugaaauaccuac

SEQ ID NO: 2552116 - RNA, 19 nt, Artificial Sequence
  Description of Artificial Sequence: Synthetic oligonucleotide
  Sense strand starting at position 1012 of SEQ ID NO: 1888717
gaggauauuugugaaugug

SEQ ID NO: 2552117 - RNA, 19 nt, Artificial Sequence
  Description of Artificial Sequence: Synthetic oligonucleotide
  Antisense strand to SEQ ID NO: 2552116
cacauucacaaauauccuc

SEQ ID NO: 2552118 - RNA, 19 nt, Artificial Sequence
  Description of Artificial Sequence: Synthetic oligonucleotide
  Sense strand starting at position 1247 of SEQ ID NO: 1888717
uagcuaucugaugagcaca

SEQ ID NO: 2552119 - RNA, 19 nt, Artificial Sequence
  Description of Artificial Sequence: Synthetic oligonucleotide
  Antisense strand to SEQ ID NO: 2552118
ugugcucaucagauagcua

SEQ ID NO: 2552120 - RNA, 19 nt, Artificial Sequence
  Description of Artificial Sequence: Synthetic oligonucleotide
  Sense strand starting at position 1252 of SEQ ID NO: 1888717
aucugaugagcacaguuua

SEQ ID NO: 2552121 - RNA, 19 nt, Artificial Sequence
  Description of Artificial Sequence: Synthetic oligonucleotide
  Antisense strand to SEQ ID NO: 2552120
uaaacugugcucaucagau

SEQ ID NO: 2552122 - RNA, 19 nt, Artificial Sequence
  Description of Artificial Sequence: Synthetic oligonucleotide
  Sense strand starting at position 1275 of SEQ ID NO: 1888717
ccagcuuaucaauggauaa

SEQ ID NO: 2552123 - RNA, 19 nt, Artificial Sequence
  Description of Artificial Sequence: Synthetic oligonucleotide
  Antisense strand to SEQ ID NO: 2552122
uuauccauugauaagcugg

SEQ ID NO: 2552124 - RNA, 19 nt, Artificial Sequence
  Description of Artificial Sequence: Synthetic oligonucleotide
  Sense strand starting at position 1287 of SEQ ID NO: 1888717
uggauaauuuaucaggguu

SEQ ID NO: 2552125 - RNA, 19 nt, Artificial Sequence
  Description of Artificial Sequence: Synthetic oligonucleotide
  Antisense strand to SEQ ID NO: 2552124
aacccugauaaauuaucca

SEQ ID NO: 2552126 - RNA, 19 nt, Artificial Sequence
  Description of Artificial Sequence: Synthetic oligonucleotide
  Sense strand starting at position 1299 of SEQ ID NO: 1888717
caggguucugcagagucau

SEQ ID NO: 2552127 - RNA, 19 nt, Artificial Sequence
  Description of Artificial Sequence: Synthetic oligonucleotide
  Antisense strand to SEQ ID NO: 2552126
augacucugcagaacccug

SEQ ID NO: 2552128 - RNA, 19 nt, Artificial Sequence
  Description of Artificial Sequence: Synthetic oligonucleotide
  Sense strand starting at position 1325 of SEQ ID NO: 1888717
uuuacuguucuggagaguu

SEQ ID NO: 2552129 - RNA, 19 nt, Artificial Sequence
  Description of Artificial Sequence: Synthetic oligonucleotide
  Antisense strand to SEQ ID NO: 2552128
aacucuccagaacaguaaa

SEQ ID NO: 2552130 - RNA, 19 nt, Artificial Sequence
  Description of Artificial Sequence: Synthetic oligonucleotide
  Sense strand starting at position 1405 of SEQ ID NO: 1888717
ucauuagguuucccauaag

SEQ ID NO: 2552131 - RNA, 19 nt, Artificial Sequence
  Description of Artificial Sequence: Synthetic oligonucleotide
  Antisense strand to SEQ ID NO: 2552130
cuuaugggaaaccuaauga

SEQ ID NO: 2552132 - RNA, 19 nt, Artificial Sequence
  Description of Artificial Sequence: Synthetic oligonucleotide
  Sense strand starting at position 1473 of SEQ ID NO: 1888717
auauauggccugugaucaa

SEQ ID NO: 2552133 - RNA, 19 nt, Artificial Sequence
  Description of Artificial Sequence: Synthetic oligonucleotide
  Antisense strand to SEQ ID NO: 2552132
uugaucacaggccauauau

SEQ ID NO: 2552134 - RNA, 19 nt, Artificial Sequence
  Description of Artificial Sequence: Synthetic oligonucleotide
  Sense strand starting at position 1513 of SEQ ID NO: 1888717
gcacaugaagcugauauga

SEQ ID NO: 2552135 - RNA, 19 nt, Artificial Sequence
  Description of Artificial Sequence: Synthetic oligonucleotide
  Antisense strand to SEQ ID NO: 2552134
ucauaucagcuucaugugc

SEQ ID NO: 2552136 - RNA, 19 nt, Artificial Sequence
  Description of Artificial Sequence: Synthetic oligonucleotide
  Sense strand starting at position 1577 of SEQ ID NO: 1888717
agccaucucccuuggagaa

SEQ ID NO: 2552137 - RNA, 19 nt, Artificial Sequence
  Description of Artificial Sequence: Synthetic oligonucleotide
  Antisense strand to SEQ ID NO: 2552136
uucuccaagggagauggcu

SEQ ID NO: 2552138 - RNA, 19 nt, Artificial Sequence
  Description of Artificial Sequence: Synthetic oligonucleotide
  Sense strand starting at position 1640 of SEQ ID NO: 1888717
gccuucuaacuugauguca

SEQ ID NO: 2552139 - RNA, 19 nt, Artificial Sequence
  Description of Artificial Sequence: Synthetic oligonucleotide
  Antisense strand to SEQ ID NO: 2552138
ugacaucaaguuagaaggc

SEQ ID NO: 2552140 - RNA, 19 nt, Artificial Sequence
  Description of Artificial Sequence: Synthetic oligonucleotide
  Sense strand starting at position 1764 of SEQ ID NO: 1888717
ugaauuagggauugcugga

SEQ ID NO: 2552141 - RNA, 19 nt, Artificial Sequence
  Description of Artificial Sequence: Synthetic oligonucleotide
  Antisense strand to SEQ ID NO: 2552140
uccagcaaucccuaauuca

SEQ ID NO: 2552142 - RNA, 19 nt, Artificial Sequence
  Description of Artificial Sequence: Synthetic oligonucleotide
  Sense strand starting at position 1874 of SEQ ID NO: 1888717
ugaagauagugacauauuu

SEQ ID NO: 2552143 - RNA, 19 nt, Artificial Sequence
  Description of Artificial Sequence: Synthetic oligonucleotide
  Antisense strand to SEQ ID NO: 2552142
aaauaugucacuaucuuca

SEQ ID NO: 2552144 - RNA, 19 nt, Artificial Sequence
  Description of Artificial Sequence: Synthetic oligonucleotide
  Sense strand starting at position 2012 of SEQ ID NO: 1888717
agcuuagguuguccauuua

SEQ ID NO: 2552145 - RNA, 19 nt, Artificial Sequence
  Description of Artificial Sequence: Synthetic oligonucleotide
  Antisense strand to SEQ ID NO: 2552144
uaaauggacaaccuaagcu

SEQ ID NO: 2552146 - RNA, 19 nt, Artificial Sequence
  Description of Artificial Sequence: Synthetic oligonucleotide
  Sense strand starting at position 2160 of SEQ ID NO: 1888717
acuuuaagucaucauaguu

SEQ ID NO: 2552147 - RNA, 19 nt, Artificial Sequence
  Description of Artificial Sequence: Synthetic oligonucleotide
  Antisense strand to SEQ ID NO: 2552146
aacuaugaugacuuaaagu

SEQ ID NO: 2552148 - RNA, 19 nt, Artificial Sequence
  Description of Artificial Sequence: Synthetic oligonucleotide
  Sense strand starting at position 2217 of SEQ ID NO: 1888717
ugugccagggcucauuaaa

SEQ ID NO: 2552149 - RNA, 19 nt, Artificial Sequence
  Description of Artificial Sequence: Synthetic oligonucleotide
  Antisense strand to SEQ ID NO: 2552148
uuuaaugagcccuggcaca

SEQ ID NO: 2552150 - RNA, 19 nt, Artificial Sequence
  Description of Artificial Sequence: Synthetic oligonucleotide
  Sense strand starting at position 2411 of SEQ ID NO: 1888717
ucuguauuaggucaaaggu

SEQ ID NO: 2552151 - RNA, 19 nt, Artificial Sequence
  Description of Artificial Sequence: Synthetic oligonucleotide
  Antisense strand to SEQ ID NO: 2552150
accuuugaccuaauacaga

SEQ ID NO: 2552152 - RNA, 19 nt, Artificial Sequence
  Description of Artificial Sequence: Synthetic oligonucleotide
  Sense strand starting at position 2494 of SEQ ID NO: 1888717
acuguaucauacuuaguga

SEQ ID NO: 2552153 - RNA, 19 nt, Artificial Sequence
  Description of Artificial Sequence: Synthetic oligonucleotide
  Antisense strand to SEQ ID NO: 2552152
ucacuaaguaugauacagu

SEQ ID NO: 2552154 - RNA, 19 nt, Artificial Sequence
  Description of Artificial Sequence: Synthetic oligonucleotide
  Sense strand starting at position 2497 of SEQ ID NO: 1888717
guaucauacuuagugaacu

SEQ ID NO: 2552155 - RNA, 19 nt, Artificial Sequence
  Description of Artificial Sequence: Synthetic oligonucleotide
  Antisense strand to SEQ ID NO: 2552154
aguucacuaaguaugauac

SEQ ID NO: 2552156 - RNA, 19 nt, Artificial Sequence
  Description of Artificial Sequence: Synthetic oligonucleotide
  Sense strand starting at position 2570 of SEQ ID NO: 1888717
aagacaguacagugaguaa

SEQ ID NO: 2552157 - RNA, 19 nt, Artificial Sequence
  Description of Artificial Sequence: Synthetic oligonucleotide
  Antisense strand to SEQ ID NO: 2552156
uuacucacuguacugucuu

SEQ ID NO: 2552158 - RNA, 19 nt, Artificial Sequence
  Description of Artificial Sequence: Synthetic oligonucleotide
  Sense strand starting at position 2629 of SEQ ID NO: 1888717
cgaugcuguauuuguuaca

SEQ ID NO: 2552159 - RNA, 19 nt, Artificial Sequence
  Description of Artificial Sequence: Synthetic oligonucleotide
  Antisense strand to SEQ ID NO: 2552158
uguaacaaauacagcaucg

SEQ ID NO: 2552160 - RNA, 19 nt, Artificial Sequence
  Description of Artificial Sequence: Synthetic oligonucleotide
  Sense strand starting at position 2630 of SEQ ID NO: 1888717
gaugcuguauuuguuacaa

SEQ ID NO: 2552161 - RNA, 19 nt, Artificial Sequence
  Description of Artificial Sequence: Synthetic oligonucleotide
  Antisense strand to SEQ ID NO: 2552160
uuguaacaaauacagcauc

SEQ ID NO: 2552162 - RNA, 19 nt, Artificial Sequence
  Description of Artificial Sequence: Synthetic oligonucleotide
  Sense strand starting at position 3067 of SEQ ID NO: 1888717
aggaguguucaucagguau

SEQ ID NO: 2552163 - RNA, 19 nt, Artificial Sequence
  Description of Artificial Sequence: Synthetic oligonucleotide
  Antisense strand to SEQ ID NO: 2552162
auaccugaugaacacuccu

SEQ ID NO: 2552164 - RNA, 19 nt, Artificial Sequence
  Description of Artificial Sequence: Synthetic oligonucleotide
  Sense strand starting at position 3101 of SEQ ID NO: 1888717
ucacuuguuguuuaucuga

SEQ ID NO: 2552165 - RNA, 19 nt, Artificial Sequence
  Description of Artificial Sequence: Synthetic oligonucleotide
  Antisense strand to SEQ ID NO: 2552164
ucagauaaacaacaaguga

SEQ ID NO: 2552166 - RNA, 19 nt, Artificial Sequence
  Description of Artificial Sequence: Synthetic oligonucleotide
  Sense strand starting at position 3332 of SEQ ID NO: 1888717
aggaaaucaguaugcauug

SEQ ID NO: 2552167 - RNA, 19 nt, Artificial Sequence
  Description of Artificial Sequence: Synthetic oligonucleotide
  Antisense strand to SEQ ID NO: 2552166
caaugcauacugauuuccu

SEQ ID NO: 2552168 - RNA, 19 nt, Artificial Sequence
  Description of Artificial Sequence: Synthetic oligonucleotide
  Sense strand starting at position 3343 of SEQ ID NO: 1888717
augcauuggccauacuuau

SEQ ID NO: 2552169 - RNA, 19 nt, Artificial Sequence
  Description of Artificial Sequence: Synthetic oligonucleotide
  Antisense strand to SEQ ID NO: 2552168
auaaguauggccaaugcau

SEQ ID NO: 2552170 - RNA, 19 nt, Artificial Sequence
  Description of Artificial Sequence: Synthetic oligonucleotide
  Sense strand starting at position 3485 of SEQ ID NO: 1888717
acaguaugggcucacauau

SEQ ID NO: 2552171 - RNA, 19 nt, Artificial Sequence
  Description of Artificial Sequence: Synthetic oligonucleotide
  Antisense strand to SEQ ID NO: 2552170
auaugugagcccauacugu

SEQ ID NO: 2552172 - RNA, 19 nt, Artificial Sequence
  Description of Artificial Sequence: Synthetic oligonucleotide
  Sense strand starting at position 202 of SEQ ID NO: 1888718
aaagaauuguacccuggca

SEQ ID NO: 2552173 - RNA, 19 nt, Artificial Sequence
  Description of Artificial Sequence: Synthetic oligonucleotide
  Antisense strand to SEQ ID NO: 2552172
ugccaggguacaauucuuu

SEQ ID NO: 2552174 - RNA, 19 nt, Artificial Sequence
  Description of Artificial Sequence: Synthetic oligonucleotide
  Sense strand starting at position 243 of SEQ ID NO: 1888718
agaagcacugucugagagu

SEQ ID NO: 2552175 - RNA, 19 nt, Artificial Sequence
  Description of Artificial Sequence: Synthetic oligonucleotide
  Antisense strand to SEQ ID NO: 2552174
acucucagacagugcuucu

SEQ ID NO: 2552176 - RNA, 19 nt, Artificial Sequence
  Description of Artificial Sequence: Synthetic oligonucleotide
  Sense strand starting at position 473 of SEQ ID NO: 1888718
gggauucuugcucaacuga

SEQ ID NO: 2552177 - RNA, 19 nt, Artificial Sequence
  Description of Artificial Sequence: Synthetic oligonucleotide
  Antisense strand to SEQ ID NO: 2552176
ucaguugagcaagaauccc

SEQ ID NO: 2552178 - RNA, 19 nt, Artificial Sequence
  Description of Artificial Sequence: Synthetic oligonucleotide
  Sense strand starting at position 498 of SEQ ID NO: 1888718
aggauucucgcucaaggca

SEQ ID NO: 2552179 - RNA, 19 nt, Artificial Sequence
  Description of Artificial Sequence: Synthetic oligonucleotide
  Antisense strand to SEQ ID NO: 2552178
ugccuugagcgagaauccu

SEQ ID NO: 2552180 - RNA, 19 nt, Artificial Sequence
  Description of Artificial Sequence: Synthetic oligonucleotide
  Sense strand starting at position 546 of SEQ ID NO: 1888718
ggaguuacucagcaggacu

SEQ ID NO: 2552181 - RNA, 19 nt, Artificial Sequence
  Description of Artificial Sequence: Synthetic oligonucleotide
  Antisense strand to SEQ ID NO: 2552180
aguccugcugaguaacucc

SEQ ID NO: 2552182 - RNA, 19 nt, Artificial Sequence
  Description of Artificial Sequence: Synthetic oligonucleotide
  Sense strand starting at position 644 of SEQ ID NO: 1888718
guccaaaguuugcucaaag

SEQ ID NO: 2552183 - RNA, 19 nt, Artificial Sequence
  Description of Artificial Sequence: Synthetic oligonucleotide
  Antisense strand to SEQ ID NO: 2552182
cuuugagcaaacuuuggac

SEQ ID NO: 2552184 - RNA, 19 nt, Artificial Sequence
  Description of Artificial Sequence: Synthetic oligonucleotide
  Sense strand starting at position 645 of SEQ ID NO: 1888718
uccaaaguuugcucaaaga

SEQ ID NO: 2552185 - RNA, 19 nt, Artificial Sequence
  Description of Artificial Sequence: Synthetic oligonucleotide
  Antisense strand to SEQ ID NO: 2552184
ucuuugagcaaacuuugga

SEQ ID NO: 2552186 - RNA, 19 nt, Artificial Sequence
  Description of Artificial Sequence: Synthetic oligonucleotide
  Sense strand starting at position 663 of SEQ ID NO: 1888718
agacuuuguuacuuccuca

SEQ ID NO: 2552187 - RNA, 19 nt, Artificial Sequence
  Description of Artificial Sequence: Synthetic oligonucleotide
  Antisense strand to SEQ ID NO: 2552186
ugaggaaguaacaaagucu

SEQ ID NO: 2552188 - RNA, 19 nt, Artificial Sequence
  Description of Artificial Sequence: Synthetic oligonucleotide
  Sense strand starting at position 785 of SEQ ID NO: 1888718
uuaagagcuucuuugaguu

SEQ ID NO: 2552189 - RNA, 19 nt, Artificial Sequence
  Description of Artificial Sequence: Synthetic oligonucleotide
  Antisense strand to SEQ ID NO: 2552188
aacucaaagaagcucuuaa

SEQ ID NO: 2552190 - RNA, 19 nt, Artificial Sequence
  Description of Artificial Sequence: Synthetic oligonucleotide
  Sense strand starting at position 789 of SEQ ID NO: 1888718
gagcuucuuugaguuauaa

SEQ ID NO: 2552191 - RNA, 19 nt, Artificial Sequence
  Description of Artificial Sequence: Synthetic oligonucleotide
  Antisense strand to SEQ ID NO: 2552190
uuauaacucaaagaagcuc

SEQ ID NO: 2552192 - RNA, 19 nt, Artificial Sequence
  Description of Artificial Sequence: Synthetic oligonucleotide
  Sense strand starting at position 877 of SEQ ID NO: 1888718
ugcgaacuaucaccacaau

SEQ ID NO: 2552193 - RNA, 19 nt, Artificial Sequence
  Description of Artificial Sequence: Synthetic oligonucleotide
  Antisense strand to SEQ ID NO: 2552192
auuguggugauaguucgca

SEQ ID NO: 2552194 - RNA, 19 nt, Artificial Sequence
  Description of Artificial Sequence: Synthetic oligonucleotide
  Sense strand starting at position 893 of SEQ ID NO: 1888718
aaucuaaguugggacauuu

SEQ ID NO: 2552195 - RNA, 19 nt, Artificial Sequence
  Description of Artificial Sequence: Synthetic oligonucleotide
  Antisense strand to SEQ ID NO: 2552194
aaaugucccaacuuagauu

SEQ ID NO: 2552196 - RNA, 19 nt, Artificial Sequence
  Description of Artificial Sequence: Synthetic oligonucleotide
  Sense strand starting at position 991 of SEQ ID NO: 1888718
auauuugccuaaggaugaa

SEQ ID NO: 2552197 - RNA, 19 nt, Artificial Sequence
  Description of Artificial Sequence: Synthetic oligonucleotide
  Antisense strand to SEQ ID NO: 2552196
uucauccuuaggcaaauau

SEQ ID NO: 2552198 - RNA, 19 nt, Artificial Sequence
  Description of Artificial Sequence: Synthetic oligonucleotide
  Sense strand starting at position 1043 of SEQ ID NO: 1888718
acuaccacgcgugaaauaa

SEQ ID NO: 2552199 - RNA, 19 nt, Artificial Sequence
  Description of Artificial Sequence: Synthetic oligonucleotide
  Antisense strand to SEQ ID NO: 2552198
uuauuucacgcgugguagu

SEQ ID NO: 2552200 - RNA, 19 nt, Artificial Sequence
  Description of Artificial Sequence: Synthetic oligonucleotide
  Sense strand starting at position 1077 of SEQ ID NO: 1888718
gcacuaauugugcauuucu

SEQ ID NO: 2552201 - RNA, 19 nt, Artificial Sequence
  Description of Artificial Sequence: Synthetic oligonucleotide
  Antisense strand to SEQ ID NO: 2552200
agaaaugcacaauuagugc

SEQ ID NO: 2552202 - RNA, 19 nt, Artificial Sequence
  Description of Artificial Sequence: Synthetic oligonucleotide
  Sense strand starting at position 1119 of SEQ ID NO: 1888718
aagacaagucaaugugaac

SEQ ID NO: 2552203 - RNA, 19 nt, Artificial Sequence
  Description of Artificial Sequence: Synthetic oligonucleotide
  Antisense strand to SEQ ID NO: 2552202
guucacauugacuugucuu

SEQ ID NO: 2552204 - RNA, 19 nt, Artificial Sequence
  Description of Artificial Sequence: Synthetic oligonucleotide
  Sense strand starting at position 1819 of SEQ ID NO: 1888718
ccguguuuggcaaagcgau

SEQ ID NO: 2552205 - RNA, 19 nt, Artificial Sequence
  Description of Artificial Sequence: Synthetic oligonucleotide
  Antisense strand to SEQ ID NO: 2552204
aucgcuuugccaaacacgg

SEQ ID NO: 2552206 - RNA, 19 nt, Artificial Sequence
  Description of Artificial Sequence: Synthetic oligonucleotide
  Sense strand starting at position 1820 of SEQ ID NO: 1888718
cguguuuggcaaagcgauu

SEQ ID NO: 2552207 - RNA, 19 nt, Artificial Sequence
  Description of Artificial Sequence: Synthetic oligonucleotide
  Antisense strand to SEQ ID NO: 2552206
aaucgcuuugccaaacacg

SEQ ID NO: 2552208 - RNA, 19 nt, Artificial Sequence
  Description of Artificial Sequence: Synthetic oligonucleotide
  Sense strand starting at position 1990 of SEQ ID NO: 1888718
gucccuuucccugaaagga

SEQ ID NO: 2552209 - RNA, 19 nt, Artificial Sequence
  Description of Artificial Sequence: Synthetic oligonucleotide
  Antisense strand to SEQ ID NO: 2552208
uccuuucagggaaagggac

SEQ ID NO: 2552210 - RNA, 19 nt, Artificial Sequence
  Description of Artificial Sequence: Synthetic oligonucleotide
  Sense strand starting at position 2387 of SEQ ID NO: 1888718
gaacaucuuguauauguga

SEQ ID NO: 2552211 - RNA, 19 nt, Artificial Sequence
  Description of Artificial Sequence: Synthetic oligonucleotide
  Antisense strand to SEQ ID NO: 2552210
ucacauauacaagauguuc

SEQ ID NO: 2552212 - RNA, 19 nt, Artificial Sequence
  Description of Artificial Sequence: Synthetic oligonucleotide
  Sense strand starting at position 2479 of SEQ ID NO: 1888718
uuggaauguacggguagau

SEQ ID NO: 2552213 - RNA, 19 nt, Artificial Sequence
  Description of Artificial Sequence: Synthetic oligonucleotide
  Antisense strand to SEQ ID NO: 2552212
aucuacccguacauuccaa

SEQ ID NO: 2552214 - RNA, 19 nt, Artificial Sequence
  Description of Artificial Sequence: Synthetic oligonucleotide
  Sense strand starting at position 2481 of SEQ ID NO: 1888718
ggaauguacggguagaugu

SEQ ID NO: 2552215 - RNA, 19 nt, Artificial Sequence
  Description of Artificial Sequence: Synthetic oligonucleotide
  Antisense strand to SEQ ID NO: 2552214
acaucuacccguacauucc

SEQ ID NO: 2552216 - RNA, 19 nt, Artificial Sequence
  Description of Artificial Sequence: Synthetic oligonucleotide
  Sense strand starting at position 2488 of SEQ ID NO: 1888718
acggguagauguucuaaag

SEQ ID NO: 2552217 - RNA, 19 nt, Artificial Sequence
  Description of Artificial Sequence: Synthetic oligonucleotide
  Antisense strand to SEQ ID NO: 2552216
cuuuagaacaucuacccgu

SEQ ID NO: 2552218 - RNA, 19 nt, Artificial Sequence
  Description of Artificial Sequence: Synthetic oligonucleotide
  Sense strand starting at position 2504 of SEQ ID NO: 1888718
aagaauguaucggucagag

SEQ ID NO: 2552219 - RNA, 19 nt, Artificial Sequence
  Description of Artificial Sequence: Synthetic oligonucleotide
  Antisense strand to SEQ ID NO: 2552218
cucugaccgauacauucuu

SEQ ID NO: 2552220 - RNA, 19 nt, Artificial Sequence
  Description of Artificial Sequence: Synthetic oligonucleotide
  Sense strand starting at position 2506 of SEQ ID NO: 1888718
gaauguaucggucagagca

SEQ ID NO: 2552221 - RNA, 19 nt, Artificial Sequence
  Description of Artificial Sequence: Synthetic oligonucleotide
  Antisense strand to SEQ ID NO: 2552220
ugcucugaccgauacauuc

SEQ ID NO: 2552222 - RNA, 19 nt, Artificial Sequence
  Description of Artificial Sequence: Synthetic oligonucleotide
  Sense strand starting at position 2514 of SEQ ID NO: 1888718
cggucagagcauuaggaua

SEQ ID NO: 2552223 - RNA, 19 nt, Artificial Sequence
  Description of Artificial Sequence: Synthetic oligonucleotide
  Antisense strand to SEQ ID NO: 2552222
uauccuaaugcucugaccg

SEQ ID NO: 2552224 - RNA, 19 nt, Artificial Sequence
  Description of Artificial Sequence: Synthetic oligonucleotide
  Sense strand starting at position 2522 of SEQ ID NO: 1888718
gcauuaggauagguucaga

SEQ ID NO: 2552225 - RNA, 19 nt, Artificial Sequence
  Description of Artificial Sequence: Synthetic oligonucleotide
  Antisense strand to SEQ ID NO: 2552224
ucugaaccuauccuaaugc

SEQ ID NO: 2552226 - RNA, 19 nt, Artificial Sequence
  Description of Artificial Sequence: Synthetic oligonucleotide
  Sense strand starting at position 2653 of SEQ ID NO: 1888718
gugcauuuaucugugcuga

SEQ ID NO: 2552227 - RNA, 19 nt, Artificial Sequence
  Description of Artificial Sequence: Synthetic oligonucleotide
  Antisense strand to SEQ ID NO: 2552226
ucagcacagauaaaugcac

SEQ ID NO: 2552228 - RNA, 19 nt, Artificial Sequence
  Description of Artificial Sequence: Synthetic oligonucleotide
  Sense strand starting at position 2654 of SEQ ID NO: 1888718
ugcauuuaucugugcugac

SEQ ID NO: 2552229 - RNA, 19 nt, Artificial Sequence
  Description of Artificial Sequence: Synthetic oligonucleotide
  Antisense strand to SEQ ID NO: 2552228
gucagcacagauaaaugca

SEQ ID NO: 2552230 - RNA, 19 nt, Artificial Sequence
  Description of Artificial Sequence: Synthetic oligonucleotide
  Sense strand starting at position 2800 of SEQ ID NO: 1888718
gcaaauaagcuauaaguuu

SEQ ID NO: 2552231 - RNA, 19 nt, Artificial Sequence
  Description of Artificial Sequence: Synthetic oligonucleotide
  Antisense strand to SEQ ID NO: 2552230
aaacuuauagcuuauuugc

SEQ ID NO: 2552232 - RNA, 19 nt, Artificial Sequence
  Description of Artificial Sequence: Synthetic oligonucleotide
  Sense strand starting at position 2860 of SEQ ID NO: 1888718
ucagauaagcuauaggucu

SEQ ID NO: 2552233 - RNA, 19 nt, Artificial Sequence
  Description of Artificial Sequence: Synthetic oligonucleotide
  Antisense strand to SEQ ID NO: 2552232
agaccuauagcuuaucuga

SEQ ID NO: 2552234 - RNA, 19 nt, Artificial Sequence
  Description of Artificial Sequence: Synthetic oligonucleotide
  Sense strand starting at position 3105 of SEQ ID NO: 1888718
gcccguugccuucucgaaa

SEQ ID NO: 2552235 - RNA, 19 nt, Artificial Sequence
  Description of Artificial Sequence: Synthetic oligonucleotide
  Antisense strand to SEQ ID NO: 2552234
uuucgagaaggcaacgggc

SEQ ID NO: 2552236 - RNA, 19 nt, Artificial Sequence
  Description of Artificial Sequence: Synthetic oligonucleotide
  Sense strand starting at position 3112 of SEQ ID NO: 1888718
gccuucucgaaacguauuu

SEQ ID NO: 2552237 - RNA, 19 nt, Artificial Sequence
  Description of Artificial Sequence: Synthetic oligonucleotide
  Antisense strand to SEQ ID NO: 2552236
aaauacguuucgagaaggc

SEQ ID NO: 2552238 - RNA, 19 nt, Artificial Sequence
  Description of Artificial Sequence: Synthetic oligonucleotide
  Sense strand starting at position 3429 of SEQ ID NO: 1888718
gaggcccaucuuggagaaa

SEQ ID NO: 2552239 - RNA, 19 nt, Artificial Sequence
  Description of Artificial Sequence: Synthetic oligonucleotide
  Antisense strand to SEQ ID NO: 2552238
uuucuccaagaugggccuc

SEQ ID NO: 2552240 - RNA, 19 nt, Artificial Sequence
  Description of Artificial Sequence: Synthetic oligonucleotide
  Sense strand starting at position 3432 of SEQ ID NO: 1888718
gcccaucuuggagaaaucu

SEQ ID NO: 2552241 - RNA, 19 nt, Artificial Sequence
  Description of Artificial Sequence: Synthetic oligonucleotide
  Antisense strand to SEQ ID NO: 2552240
agauuucuccaagaugggc

SEQ ID NO: 2552242 - RNA, 19 nt, Artificial Sequence
  Description of Artificial Sequence: Synthetic oligonucleotide
  Sense strand starting at position 3458 of SEQ ID NO: 1888718
agcugacagcacuaggaau

SEQ ID NO: 2552243 - RNA, 19 nt, Artificial Sequence
  Description of Artificial Sequence: Synthetic oligonucleotide
  Antisense strand to SEQ ID NO: 2552242
auuccuagugcugucagcu

SEQ ID NO: 2552244 - RNA, 19 nt, Artificial Sequence
  Description of Artificial Sequence: Synthetic oligonucleotide
  Sense strand starting at position 3509 of SEQ ID NO: 1888718
acauauucgcaaugcauuu

SEQ ID NO: 2552245 - RNA, 19 nt, Artificial Sequence
  Description of Artificial Sequence: Synthetic oligonucleotide
  Antisense strand to SEQ ID NO: 2552244
aaaugcauugcgaauaugu

SEQ ID NO: 2552246 - RNA, 19 nt, Artificial Sequence
  Description of Artificial Sequence: Synthetic oligonucleotide
  Sense strand starting at position 3563 of SEQ ID NO: 1888718
auaugucaugcuuacacau

SEQ ID NO: 2552247 - RNA, 19 nt, Artificial Sequence
  Description of Artificial Sequence: Synthetic oligonucleotide
  Antisense strand to SEQ ID NO: 2552246
auguguaagcaugacauau

SEQ ID NO: 2552248 - RNA, 19 nt, Artificial Sequence
  Description of Artificial Sequence: Synthetic oligonucleotide
  Sense strand starting at position 3605 of SEQ ID NO: 1888718
cuccuuuaggguuggauga

SEQ ID NO: 2552249 - RNA, 19 nt, Artificial Sequence
  Description of Artificial Sequence: Synthetic oligonucleotide
  Antisense strand to SEQ ID NO: 2552248
ucauccaacccuaaaggag

SEQ ID NO: 2552250 - RNA, 19 nt, Artificial Sequence
  Description of Artificial Sequence: Synthetic oligonucleotide
  Sense strand starting at position 3724 of SEQ ID NO: 1888718
agcuuauuggcuggacaga

SEQ ID NO: 2552251 - RNA, 19 nt, Artificial Sequence
  Description of Artificial Sequence: Synthetic oligonucleotide
  Antisense strand to SEQ ID NO: 2552250
ucuguccagccaauaagcu

SEQ ID NO: 2552252 - RNA, 19 nt, Artificial Sequence
  Description of Artificial Sequence: Synthetic oligonucleotide
  Sense strand starting at position 95 of SEQ ID NO: 1888719
auguuaaguacuugugaca

SEQ ID NO: 2552253 - RNA, 19 nt, Artificial Sequence
  Description of Artificial Sequence: Synthetic oligonucleotide
  Antisense strand to SEQ ID NO: 2552252
ugucacaaguacuuaacau

SEQ ID NO: 2552254 - RNA, 19 nt, Artificial Sequence
  Description of Artificial Sequence: Synthetic oligonucleotide
  Sense strand starting at position 106 of SEQ ID NO: 1888719
uugugacacuuaccaucua

SEQ ID NO: 2552255 - RNA, 19 nt, Artificial Sequence
  Description of Artificial Sequence: Synthetic oligonucleotide
  Antisense strand to SEQ ID NO: 2552254
uagaugguaagugucacaa

SEQ ID NO: 2552256 - RNA, 19 nt, Artificial Sequence
  Description of Artificial Sequence: Synthetic oligonucleotide
  Sense strand starting at position 126 of SEQ ID NO: 1888719
gacauaggucccuguaccu

SEQ ID NO: 2552257 - RNA, 19 nt, Artificial Sequence
  Description of Artificial Sequence: Synthetic oligonucleotide
  Antisense strand to SEQ ID NO: 2552256
agguacagggaccuauguc

SEQ ID NO: 2552258 - RNA, 19 nt, Artificial Sequence
  Description of Artificial Sequence: Synthetic oligonucleotide
  Sense strand starting at position 263 of SEQ ID NO: 1888719
cagacagaggcacguuauu

SEQ ID NO: 2552259 - RNA, 19 nt, Artificial Sequence
  Description of Artificial Sequence: Synthetic oligonucleotide
  Antisense strand to SEQ ID NO: 2552258
aauaacgugccucugucug

SEQ ID NO: 2552260 - RNA, 19 nt, Artificial Sequence
  Description of Artificial Sequence: Synthetic oligonucleotide
  Sense strand starting at position 789 of SEQ ID NO: 1888719
ucaaccuaucucuaggagu

SEQ ID NO: 2552261 - RNA, 19 nt, Artificial Sequence
  Description of Artificial Sequence: Synthetic oligonucleotide
  Antisense strand to SEQ ID NO: 2552260
acuccuagagauagguuga

SEQ ID NO: 2552262 - RNA, 19 nt, Artificial Sequence
  Description of Artificial Sequence: Synthetic oligonucleotide
  Sense strand starting at position 1120 of SEQ ID NO: 1888719
auggaacuccaaugguuua

SEQ ID NO: 2552263 - RNA, 19 nt, Artificial Sequence
  Description of Artificial Sequence: Synthetic oligonucleotide
  Antisense strand to SEQ ID NO: 2552262
uaaaccauuggaguuccau

SEQ ID NO: 2552264 - RNA, 19 nt, Artificial Sequence
  Description of Artificial Sequence: Synthetic oligonucleotide
  Sense strand starting at position 1123 of SEQ ID NO: 1888719
gaacuccaaugguuuagau

SEQ ID NO: 2552265 - RNA, 19 nt, Artificial Sequence
  Description of Artificial Sequence: Synthetic oligonucleotide
  Antisense strand to SEQ ID NO: 2552264
aucuaaaccauuggaguuc

SEQ ID NO: 2552266 - RNA, 19 nt, Artificial Sequence
  Description of Artificial Sequence: Synthetic oligonucleotide
  Sense strand starting at position 1135 of SEQ ID NO: 1888719
uuuagauagugucuguacu

SEQ ID NO: 2552267 - RNA, 19 nt, Artificial Sequence
  Description of Artificial Sequence: Synthetic oligonucleotide
  Antisense strand to SEQ ID NO: 2552266
aguacagacacuaucuaaa

SEQ ID NO: 2552268 - RNA, 19 nt, Artificial Sequence
  Description of Artificial Sequence: Synthetic oligonucleotide
  Sense strand starting at position 1137 of SEQ ID NO: 1888719
uagauagugucuguacuca

SEQ ID NO: 2552269 - RNA, 19 nt, Artificial Sequence
  Description of Artificial Sequence: Synthetic oligonucleotide
  Antisense strand to SEQ ID NO: 2552268
ugaguacagacacuaucua

SEQ ID NO: 2552270 - RNA, 19 nt, Artificial Sequence
  Description of Artificial Sequence: Synthetic oligonucleotide
  Sense strand starting at position 1226 of SEQ ID NO: 1888719
cgaacuacuguccgacaga

SEQ ID NO: 2552271 - RNA, 19 nt, Artificial Sequence
  Description of Artificial Sequence: Synthetic oligonucleotide
  Antisense strand to SEQ ID NO: 2552270
ucugucggacaguaguucg

SEQ ID NO: 2552272 - RNA, 19 nt, Artificial Sequence
  Description of Artificial Sequence: Synthetic oligonucleotide
  Sense strand starting at position 1261 of SEQ ID NO: 1888719
cacuuaguguuggucuaga

SEQ ID NO: 2552273 - RNA, 19 nt, Artificial Sequence
  Description of Artificial Sequence: Synthetic oligonucleotide
  Antisense strand to SEQ ID NO: 2552272
ucuagaccaacacuaagug

SEQ ID NO: 2552274 - RNA, 19 nt, Artificial Sequence
  Description of Artificial Sequence: Synthetic oligonucleotide
  Sense strand starting at position 1317 of SEQ ID NO: 1888719
ucaggaaccugguuaucaa

SEQ ID NO: 2552275 - RNA, 19 nt, Artificial Sequence
  Description of Artificial Sequence: Synthetic oligonucleotide
  Antisense strand to SEQ ID NO: 2552274
uugauaaccagguuccuga

SEQ ID NO: 2552276 - RNA, 19 nt, Artificial Sequence
  Description of Artificial Sequence: Synthetic oligonucleotide
  Sense strand starting at position 1462 of SEQ ID NO: 1888719
ggacauguguggccaguga

SEQ ID NO: 2552277 - RNA, 19 nt, Artificial Sequence
  Description of Artificial Sequence: Synthetic oligonucleotide
  Antisense strand to SEQ ID NO: 2552276
ucacuggccacacaugucc

SEQ ID NO: 2552278 - RNA, 19 nt, Artificial Sequence
  Description of Artificial Sequence: Synthetic oligonucleotide
  Sense strand starting at position 1478 of SEQ ID NO: 1888719
ugauuagagcgaugggcau

SEQ ID NO: 2552279 - RNA, 19 nt, Artificial Sequence
  Description of Artificial Sequence: Synthetic oligonucleotide
  Antisense strand to SEQ ID NO: 2552278
augcccaucgcucuaauca

SEQ ID NO: 2552280 - RNA, 19 nt, Artificial Sequence
  Description of Artificial Sequence: Synthetic oligonucleotide
  Sense strand starting at position 1506 of SEQ ID NO: 1888719
uguauuucccucuggcaga

SEQ ID NO: 2552281 - RNA, 19 nt, Artificial Sequence
  Description of Artificial Sequence: Synthetic oligonucleotide
  Antisense strand to SEQ ID NO: 2552280
ucugccagagggaaauaca

SEQ ID NO: 2552282 - RNA, 19 nt, Artificial Sequence
  Description of Artificial Sequence: Synthetic oligonucleotide
  Sense strand starting at position 1604 of SEQ ID NO: 1888719
ggcaaaggcuccucgaacu

SEQ ID NO: 2552283 - RNA, 19 nt, Artificial Sequence
  Description of Artificial Sequence: Synthetic oligonucleotide
  Antisense strand to SEQ ID NO: 2552282
aguucgaggagccuuugcc

SEQ ID NO: 2552284 - RNA, 19 nt, Artificial Sequence
  Description of Artificial Sequence: Synthetic oligonucleotide
  Sense strand starting at position 2065 of SEQ ID NO: 1888719
guuggaguuuacccaucuu

SEQ ID NO: 2552285 - RNA, 19 nt, Artificial Sequence
  Description of Artificial Sequence: Synthetic oligonucleotide
  Antisense strand to SEQ ID NO: 2552284
aagauggguaaacuccaac

SEQ ID NO: 2552286 - RNA, 19 nt, Artificial Sequence
  Description of Artificial Sequence: Synthetic oligonucleotide
  Sense strand starting at position 2142 of SEQ ID NO: 1888719
uuauguuucuucuuugagu

SEQ ID NO: 2552287 - RNA, 19 nt, Artificial Sequence
  Description of Artificial Sequence: Synthetic oligonucleotide
  Antisense strand to SEQ ID NO: 2552286
acucaaagaagaaacauaa

SEQ ID NO: 2552288 - RNA, 19 nt, Artificial Sequence
  Description of Artificial Sequence: Synthetic oligonucleotide
  Sense strand starting at position 2144 of SEQ ID NO: 1888719
auguuucuucuuugaguaa

SEQ ID NO: 2552289 - RNA, 19 nt, Artificial Sequence
  Description of Artificial Sequence: Synthetic oligonucleotide
  Antisense strand to SEQ ID NO: 2552288
uuacucaaagaagaaacau

SEQ ID NO: 2552290 - RNA, 19 nt, Artificial Sequence
  Description of Artificial Sequence: Synthetic oligonucleotide
  Sense strand starting at position 2234 of SEQ ID NO: 1888719
guacaaugccugcaccaaa

SEQ ID NO: 2552291 - RNA, 19 nt, Artificial Sequence
  Description of Artificial Sequence: Synthetic oligonucleotide
  Antisense strand to SEQ ID NO: 2552290
uuuggugcaggcauuguac

SEQ ID NO: 2552292 - RNA, 19 nt, Artificial Sequence
  Description of Artificial Sequence: Synthetic oligonucleotide
  Sense strand starting at position 2639 of SEQ ID NO: 1888719
acaggugauuuguaacuuu

SEQ ID NO: 2552293 - RNA, 19 nt, Artificial Sequence
  Description of Artificial Sequence: Synthetic oligonucleotide
  Antisense strand to SEQ ID NO: 2552292
aaaguuacaaaucaccugu

SEQ ID NO: 2552294 - RNA, 19 nt, Artificial Sequence
  Description of Artificial Sequence: Synthetic oligonucleotide
  Sense strand starting at position 2658 of SEQ ID NO: 1888719
ugaaguucuggcugaacuc

SEQ ID NO: 2552295 - RNA, 19 nt, Artificial Sequence
  Description of Artificial Sequence: Synthetic oligonucleotide
  Antisense strand to SEQ ID NO: 2552294
gaguucagccagaacuuca

SEQ ID NO: 2552296 - RNA, 19 nt, Artificial Sequence
  Description of Artificial Sequence: Synthetic oligonucleotide
  Sense strand starting at position 2659 of SEQ ID NO: 1888719
gaaguucuggcugaacuca

SEQ ID NO: 2552297 - RNA, 19 nt, Artificial Sequence
  Description of Artificial Sequence: Synthetic oligonucleotide
  Antisense strand to SEQ ID NO: 2552296
ugaguucagccagaacuuc

SEQ ID NO: 2552298 - RNA, 19 nt, Artificial Sequence
  Description of Artificial Sequence: Synthetic oligonucleotide
  Sense strand starting at position 2710 of SEQ ID NO: 1888719
agagaagacuucuagagga

SEQ ID NO: 2552299 - RNA, 19 nt, Artificial Sequence
  Description of Artificial Sequence: Synthetic oligonucleotide
  Antisense strand to SEQ ID NO: 2552298
uccucuagaagucuucucu

SEQ ID NO: 2552300 - RNA, 19 nt, Artificial Sequence
  Description of Artificial Sequence: Synthetic oligonucleotide
  Sense strand starting at position 2726 of SEQ ID NO: 1888719
ggauauauuuaagacccaa

SEQ ID NO: 2552301 - RNA, 19 nt, Artificial Sequence
  Description of Artificial Sequence: Synthetic oligonucleotide
  Antisense strand to SEQ ID NO: 2552300
uugggucuuaaauauaucc

SEQ ID NO: 2552302 - RNA, 19 nt, Artificial Sequence
  Description of Artificial Sequence: Synthetic oligonucleotide
  Sense strand starting at position 2950 of SEQ ID NO: 1888719
gucguaacacuugagaucu

SEQ ID NO: 2552303 - RNA, 19 nt, Artificial Sequence
  Description of Artificial Sequence: Synthetic oligonucleotide
  Antisense strand to SEQ ID NO: 2552302
agaucucaaguguuacgac

SEQ ID NO: 2552304 - RNA, 19 nt, Artificial Sequence
  Description of Artificial Sequence: Synthetic oligonucleotide
  Sense strand starting at position 2972 of SEQ ID NO: 1888719
cggugucugccauucaugu

SEQ ID NO: 2552305 - RNA, 19 nt, Artificial Sequence
  Description of Artificial Sequence: Synthetic oligonucleotide
  Antisense strand to SEQ ID NO: 2552304
acaugaauggcagacaccg

SEQ ID NO: 2552306 - RNA, 19 nt, Artificial Sequence
  Description of Artificial Sequence: Synthetic oligonucleotide
  Sense strand starting at position 3055 of SEQ ID NO: 1888719
uguggaugacugugaauca

SEQ ID NO: 2552307 - RNA, 19 nt, Artificial Sequence
  Description of Artificial Sequence: Synthetic oligonucleotide
  Antisense strand to SEQ ID NO: 2552306
ugauucacagucauccaca

SEQ ID NO: 2552308 - RNA, 19 nt, Artificial Sequence
  Description of Artificial Sequence: Synthetic oligonucleotide
  Sense strand starting at position 3065 of SEQ ID NO: 1888719
ugugaaucacugcaacaca

SEQ ID NO: 2552309 - RNA, 19 nt, Artificial Sequence
  Description of Artificial Sequence: Synthetic oligonucleotide
  Antisense strand to SEQ ID NO: 2552308
uguguugcagugauucaca

SEQ ID NO: 2552310 - RNA, 19 nt, Artificial Sequence
  Description of Artificial Sequence: Synthetic oligonucleotide
  Sense strand starting at position 3323 of SEQ ID NO: 1888719
ggcagccucuuucuuagaa

SEQ ID NO: 2552311 - RNA, 19 nt, Artificial Sequence
  Description of Artificial Sequence: Synthetic oligonucleotide
  Antisense strand to SEQ ID NO: 2552310
uucuaagaaagaggcugcc

SEQ ID NO: 2552312 - RNA, 19 nt, Artificial Sequence
  Description of Artificial Sequence: Synthetic oligonucleotide
  Sense strand starting at position 3428 of SEQ ID NO: 1888719
guccuagugccuuacaauc

SEQ ID NO: 2552313 - RNA, 19 nt, Artificial Sequence
  Description of Artificial Sequence: Synthetic oligonucleotide
  Antisense strand to SEQ ID NO: 2552312
gauuguaaggcacuaggac

SEQ ID NO: 2552314 - RNA, 19 nt, Artificial Sequence
  Description of Artificial Sequence: Synthetic oligonucleotide
  Sense strand starting at position 3467 of SEQ ID NO: 1888719
cucaauugaaagugacgaa

SEQ ID NO: 2552315 - RNA, 19 nt, Artificial Sequence
  Description of Artificial Sequence: Synthetic oligonucleotide
  Antisense strand to SEQ ID NO: 2552314
uucgucacuuucaauugag

SEQ ID NO: 2552316 - RNA, 19 nt, Artificial Sequence
  Description of Artificial Sequence: Synthetic oligonucleotide
  Sense strand starting at position 3611 of SEQ ID NO: 1888719
gcucuuacagaucauuagu

SEQ ID NO: 2552317 - RNA, 19 nt, Artificial Sequence
  Description of Artificial Sequence: Synthetic oligonucleotide
  Antisense strand to SEQ ID NO: 2552316
acuaaugaucuguaagagc

SEQ ID NO: 2552318 - RNA, 19 nt, Artificial Sequence
  Description of Artificial Sequence: Synthetic oligonucleotide
  Sense strand starting at position 3811 of SEQ ID NO: 1888719
auuguugacugguuuguca

SEQ ID NO: 2552319 - RNA, 19 nt, Artificial Sequence
  Description of Artificial Sequence: Synthetic oligonucleotide
  Antisense strand to SEQ ID NO: 2552318
ugacaaaccagucaacaau

SEQ ID NO: 2552320 - RNA, 19 nt, Artificial Sequence
  Description of Artificial Sequence: Synthetic oligonucleotide
  Sense strand starting at position 3813 of SEQ ID NO: 1888719
uguugacugguuugucaag

SEQ ID NO: 2552321 - RNA, 19 nt, Artificial Sequence
  Description of Artificial Sequence: Synthetic oligonucleotide
  Antisense strand to SEQ ID NO: 2552320
cuugacaaaccagucaaca

SEQ ID NO: 2552322 - RNA, 19 nt, Artificial Sequence
  Description of Artificial Sequence: Synthetic oligonucleotide
  Sense strand starting at position 3814 of SEQ ID NO: 1888719
guugacugguuugucaaga

SEQ ID NO: 2552323 - RNA, 19 nt, Artificial Sequence
  Description of Artificial Sequence: Synthetic oligonucleotide
  Antisense strand to SEQ ID NO: 2552322
ucuugacaaaccagucaac

SEQ ID NO: 2552324 - RNA, 19 nt, Artificial Sequence
  Description of Artificial Sequence: Synthetic oligonucleotide
  Sense strand starting at position 3815 of SEQ ID NO: 1888719
uugacugguuugucaagaa

SEQ ID NO: 2552325 - RNA, 19 nt, Artificial Sequence
  Description of Artificial Sequence: Synthetic oligonucleotide
  Antisense strand to SEQ ID NO: 2552324
uucuugacaaaccagucaa

SEQ ID NO: 2552326 - RNA, 19 nt, Artificial Sequence
  Description of Artificial Sequence: Synthetic oligonucleotide
  Sense strand starting at position 3819 of SEQ ID NO: 1888719
cugguuugucaagaaaugg

SEQ ID NO: 2552327 - RNA, 19 nt, Artificial Sequence
  Description of Artificial Sequence: Synthetic oligonucleotide
  Antisense strand to SEQ ID NO: 2552326
ccauuucuugacaaaccag

SEQ ID NO: 2552328 - RNA, 19 nt, Artificial Sequence
  Description of Artificial Sequence: Synthetic oligonucleotide
  Sense strand starting at position 3849 of SEQ ID NO: 1888719
cucuguuggaggcagauau

SEQ ID NO: 2552329 - RNA, 19 nt, Artificial Sequence
  Description of Artificial Sequence: Synthetic oligonucleotide
  Antisense strand to SEQ ID NO: 2552328
auaucugccuccaacagag

SEQ ID NO: 2552330 - RNA, 19 nt, Artificial Sequence
  Description of Artificial Sequence: Synthetic oligonucleotide
  Sense strand starting at position 3853 of SEQ ID NO: 1888719
guuggaggcagauauugau

SEQ ID NO: 2552331 - RNA, 19 nt, Artificial Sequence
  Description of Artificial Sequence: Synthetic oligonucleotide
  Antisense strand to SEQ ID NO: 2552330
aucaauaucugccuccaac

SEQ ID NO: 2552332 - RNA, 19 nt, Artificial Sequence
  Description of Artificial Sequence: Synthetic oligonucleotide
  Sense strand starting at position 145 of SEQ ID NO: 1888720
uggccaaauggcuauugau

SEQ ID NO: 2552333 - RNA, 19 nt, Artificial Sequence
  Description of Artificial Sequence: Synthetic oligonucleotide
  Antisense strand to SEQ ID NO: 2552332
aucaauagccauuuggcca

SEQ ID NO: 2552334 - RNA, 19 nt, Artificial Sequence
  Description of Artificial Sequence: Synthetic oligonucleotide
  Sense strand starting at position 159 of SEQ ID NO: 1888720
uugauauccuggcuaaaug

SEQ ID NO: 2552335 - RNA, 19 nt, Artificial Sequence
  Description of Artificial Sequence: Synthetic oligonucleotide
  Antisense strand to SEQ ID NO: 2552334
cauuuagccaggauaucaa

SEQ ID NO: 2552336 - RNA, 19 nt, Artificial Sequence
  Description of Artificial Sequence: Synthetic oligonucleotide
  Sense strand starting at position 661 of SEQ ID NO: 1888720
cuugcuccaccugauugaa

SEQ ID NO: 2552337 - RNA, 19 nt, Artificial Sequence
  Description of Artificial Sequence: Synthetic oligonucleotide
  Antisense strand to SEQ ID NO: 2552336
uucaaucagguggagcaag

SEQ ID NO: 2552338 - RNA, 19 nt, Artificial Sequence
  Description of Artificial Sequence: Synthetic oligonucleotide
  Sense strand starting at position 663 of SEQ ID NO: 1888720
ugcuccaccugauugaaga

SEQ ID NO: 2552339 - RNA, 19 nt, Artificial Sequence
  Description of Artificial Sequence: Synthetic oligonucleotide
  Antisense strand to SEQ ID NO: 2552338
ucuucaaucagguggagca

SEQ ID NO: 2552340 - RNA, 19 nt, Artificial Sequence
  Description of Artificial Sequence: Synthetic oligonucleotide
  Sense strand starting at position 759 of SEQ ID NO: 1888720
gaugaaucugugggugaaa

SEQ ID NO: 2552341 - RNA, 19 nt, Artificial Sequence
  Description of Artificial Sequence: Synthetic oligonucleotide
  Antisense strand to SEQ ID NO: 2552340
uuucacccacagauucauc

SEQ ID NO: 2552342 - RNA, 19 nt, Artificial Sequence
  Description of Artificial Sequence: Synthetic oligonucleotide
  Sense strand starting at position 761 of SEQ ID NO: 1888720
ugaaucugugggugaaaca

SEQ ID NO: 2552343 - RNA, 19 nt, Artificial Sequence
  Description of Artificial Sequence: Synthetic oligonucleotide
  Antisense strand to SEQ ID NO: 2552342
uguuucacccacagauuca

SEQ ID NO: 2552344 - RNA, 19 nt, Artificial Sequence
  Description of Artificial Sequence: Synthetic oligonucleotide
  Sense strand starting at position 768 of SEQ ID NO: 1888720
gugggugaaacagaguauu

SEQ ID NO: 2552345 - RNA, 19 nt, Artificial Sequence
  Description of Artificial Sequence: Synthetic oligonucleotide
  Antisense strand to SEQ ID NO: 2552344
aauacucuguuucacccac

SEQ ID NO: 2552346 - RNA, 19 nt, Artificial Sequence
  Description of Artificial Sequence: Synthetic oligonucleotide
  Sense strand starting at position 833 of SEQ ID NO: 1888720
uuucgaguuggugauaaag

SEQ ID NO: 2552347 - RNA, 19 nt, Artificial Sequence
  Description of Artificial Sequence: Synthetic oligonucleotide
  Antisense strand to SEQ ID NO: 2552346
cuuuaucaccaacucgaaa

SEQ ID NO: 2552348 - RNA, 19 nt, Artificial Sequence
  Description of Artificial Sequence: Synthetic oligonucleotide
  Sense strand starting at position 953 of SEQ ID NO: 1888720
ggagaugggucucugcuau

SEQ ID NO: 2552349 - RNA, 19 nt, Artificial Sequence
  Description of Artificial Sequence: Synthetic oligonucleotide
  Antisense strand to SEQ ID NO: 2552348
auagcagagacccaucucc

SEQ ID NO: 2552350 - RNA, 19 nt, Artificial Sequence
  Description of Artificial Sequence: Synthetic oligonucleotide
  Sense strand starting at position 968 of SEQ ID NO: 1888720
cuaugauagcuaggagggu

SEQ ID NO: 2552351 - RNA, 19 nt, Artificial Sequence
  Description of Artificial Sequence: Synthetic oligonucleotide
  Antisense strand to SEQ ID NO: 2552350
acccuccuagcuaucauag

SEQ ID NO: 2552352 - RNA, 19 nt, Artificial Sequence
  Description of Artificial Sequence: Synthetic oligonucleotide
  Sense strand starting at position 1007 of SEQ ID NO: 1888720
gguagucuccuacaccaga

SEQ ID NO: 2552353 - RNA, 19 nt, Artificial Sequence
  Description of Artificial Sequence: Synthetic oligonucleotide
  Antisense strand to SEQ ID NO: 2552352
ucugguguaggagacuacc

SEQ ID NO: 2552354 - RNA, 19 nt, Artificial Sequence
  Description of Artificial Sequence: Synthetic oligonucleotide
  Sense strand starting at position 1077 of SEQ ID NO: 1888720
ucagauaaauuccuucguu

SEQ ID NO: 2552355 - RNA, 19 nt, Artificial Sequence
  Description of Artificial Sequence: Synthetic oligonucleotide
  Antisense strand to SEQ ID NO: 2552354
aacgaaggaauuuaucuga

SEQ ID NO: 2552356 - RNA, 19 nt, Artificial Sequence
  Description of Artificial Sequence: Synthetic oligonucleotide
  Sense strand starting at position 1137 of SEQ ID NO: 1888720
gaggauagagucuggcaga

SEQ ID NO: 2552357 - RNA, 19 nt, Artificial Sequence
  Description of Artificial Sequence: Synthetic oligonucleotide
  Antisense strand to SEQ ID NO: 2552356
ucugccagacucuauccuc

SEQ ID NO: 2552358 - RNA, 19 nt, Artificial Sequence
  Description of Artificial Sequence: Synthetic oligonucleotide
  Sense strand starting at position 1188 of SEQ ID NO: 1888720
gagaaaugaaaguguagug

SEQ ID NO: 2552359 - RNA, 19 nt, Artificial Sequence
  Description of Artificial Sequence: Synthetic oligonucleotide
  Antisense strand to SEQ ID NO: 2552358
cacuacacuuucauuucuc

SEQ ID NO: 2552360 - RNA, 19 nt, Artificial Sequence
  Description of Artificial Sequence: Synthetic oligonucleotide
  Sense strand starting at position 1250 of SEQ ID NO: 1888720
uuagacacuugaguuuaaa

SEQ ID NO: 2552361 - RNA, 19 nt, Artificial Sequence
  Description of Artificial Sequence: Synthetic oligonucleotide
  Antisense strand to SEQ ID NO: 2552360
uuuaaacucaagugucuaa

SEQ ID NO: 2552362 - RNA, 19 nt, Artificial Sequence
  Description of Artificial Sequence: Synthetic oligonucleotide
  Sense strand starting at position 1531 of SEQ ID NO: 1888720
ccuucucucgcugaaacuu

SEQ ID NO: 2552363 - RNA, 19 nt, Artificial Sequence
  Description of Artificial Sequence: Synthetic oligonucleotide
  Antisense strand to SEQ ID NO: 2552362
aaguuucagcgagagaagg

SEQ ID NO: 2552364 - RNA, 19 nt, Artificial Sequence
  Description of Artificial Sequence: Synthetic oligonucleotide
  Sense strand starting at position 1543 of SEQ ID NO: 1888720
gaaacuugugccgaaaccu

SEQ ID NO: 2552365 - RNA, 19 nt, Artificial Sequence
  Description of Artificial Sequence: Synthetic oligonucleotide
  Antisense strand to SEQ ID NO: 2552364
agguuucggcacaaguuuc

SEQ ID NO: 2552366 - RNA, 19 nt, Artificial Sequence
  Description of Artificial Sequence: Synthetic oligonucleotide
  Sense strand starting at position 2156 of SEQ ID NO: 1888720
cuuucugguguuugaauuu

SEQ ID NO: 2552367 - RNA, 19 nt, Artificial Sequence
  Description of Artificial Sequence: Synthetic oligonucleotide
  Antisense strand to SEQ ID NO: 2552366
aaauucaaacaccagaaag

SEQ ID NO: 2552368 - RNA, 19 nt, Artificial Sequence
  Description of Artificial Sequence: Synthetic oligonucleotide
  Sense strand starting at position 2261 of SEQ ID NO: 1888720
ggaauugucucauccuuuc

SEQ ID NO: 2552369 - RNA, 19 nt, Artificial Sequence
  Description of Artificial Sequence: Synthetic oligonucleotide
  Antisense strand to SEQ ID NO: 2552368
gaaaggaugagacaauucc

SEQ ID NO: 2552370 - RNA, 19 nt, Artificial Sequence
  Description of Artificial Sequence: Synthetic oligonucleotide
  Sense strand starting at position 2588 of SEQ ID NO: 1888720
ccucauugauuugaugaag

SEQ ID NO: 2552371 - RNA, 19 nt, Artificial Sequence
  Description of Artificial Sequence: Synthetic oligonucleotide
  Antisense strand to SEQ ID NO: 2552370
cuucaucaaaucaaugagg

SEQ ID NO: 2552372 - RNA, 19 nt, Artificial Sequence
  Description of Artificial Sequence: Synthetic oligonucleotide
  Sense strand starting at position 2599 of SEQ ID NO: 1888720
ugaugaaguuaguuuguau

SEQ ID NO: 2552373 - RNA, 19 nt, Artificial Sequence
  Description of Artificial Sequence: Synthetic oligonucleotide
  Antisense strand to SEQ ID NO: 2552372
auacaaacuaacuucauca

SEQ ID NO: 2552374 - RNA, 19 nt, Artificial Sequence
  Description of Artificial Sequence: Synthetic oligonucleotide
  Sense strand starting at position 2602 of SEQ ID NO: 1888720
ugaaguuaguuuguaucaa

SEQ ID NO: 2552375 - RNA, 19 nt, Artificial Sequence
  Description of Artificial Sequence: Synthetic oligonucleotide
  Antisense strand to SEQ ID NO: 2552374
uugauacaaacuaacuuca

SEQ ID NO: 2552376 - RNA, 19 nt, Artificial Sequence
  Description of Artificial Sequence: Synthetic oligonucleotide
  Sense strand starting at position 2612 of SEQ ID NO: 1888720
uuguaucaaguugaacaua

SEQ ID NO: 2552377 - RNA, 19 nt, Artificial Sequence
  Description of Artificial Sequence: Synthetic oligonucleotide
  Antisense strand to SEQ ID NO: 2552376
uauguucaacuugauacaa

SEQ ID NO: 2552378 - RNA, 19 nt, Artificial Sequence
  Description of Artificial Sequence: Synthetic oligonucleotide
  Sense strand starting at position 2637 of SEQ ID NO: 1888720
ucggacugcacaggaaaua

SEQ ID NO: 2552379 - RNA, 19 nt, Artificial Sequence
  Description of Artificial Sequence: Synthetic oligonucleotide
  Antisense strand to SEQ ID NO: 2552378
uauuuccugugcaguccga

SEQ ID NO: 2552380 - RNA, 19 nt, Artificial Sequence
  Description of Artificial Sequence: Synthetic oligonucleotide
  Sense strand starting at position 2763 of SEQ ID NO: 1888720
gaaggucaguguucuaauu

SEQ ID NO: 2552381 - RNA, 19 nt, Artificial Sequence
  Description of Artificial Sequence: Synthetic oligonucleotide
  Antisense strand to SEQ ID NO: 2552380
aauuagaacacugaccuuc

SEQ ID NO: 2552382 - RNA, 19 nt, Artificial Sequence
  Description of Artificial Sequence: Synthetic oligonucleotide
  Sense strand starting at position 2798 of SEQ ID NO: 1888720
agugaacuauugucccuuu

SEQ ID NO: 2552383 - RNA, 19 nt, Artificial Sequence
  Description of Artificial Sequence: Synthetic oligonucleotide
  Antisense strand to SEQ ID NO: 2552382
aaagggacaauaguucacu

SEQ ID NO: 2552384 - RNA, 19 nt, Artificial Sequence
  Description of Artificial Sequence: Synthetic oligonucleotide
  Sense strand starting at position 2842 of SEQ ID NO: 1888720
uuaggugucagaugacuga

SEQ ID NO: 2552385 - RNA, 19 nt, Artificial Sequence
  Description of Artificial Sequence: Synthetic oligonucleotide
  Antisense strand to SEQ ID NO: 2552384
ucagucaucugacaccuaa

SEQ ID NO: 2552386 - RNA, 19 nt, Artificial Sequence
  Description of Artificial Sequence: Synthetic oligonucleotide
  Sense strand starting at position 2845 of SEQ ID NO: 1888720
ggugucagaugacugagau

SEQ ID NO: 2552387 - RNA, 19 nt, Artificial Sequence
  Description of Artificial Sequence: Synthetic oligonucleotide
  Antisense strand to SEQ ID NO: 2552386
aucucagucaucugacacc

SEQ ID NO: 2552388 - RNA, 19 nt, Artificial Sequence
  Description of Artificial Sequence: Synthetic oligonucleotide
  Sense strand starting at position 2846 of SEQ ID NO: 1888720
gugucagaugacugagauc

SEQ ID NO: 2552389 - RNA, 19 nt, Artificial Sequence
  Description of Artificial Sequence: Synthetic oligonucleotide
  Antisense strand to SEQ ID NO: 2552388
gaucucagucaucugacac

SEQ ID NO: 2552390 - RNA, 19 nt, Artificial Sequence
  Description of Artificial Sequence: Synthetic oligonucleotide
  Sense strand starting at position 2870 of SEQ ID NO: 1888720
agaagauugcugggugacu

SEQ ID NO: 2552391 - RNA, 19 nt, Artificial Sequence
  Description of Artificial Sequence: Synthetic oligonucleotide
  Antisense strand to SEQ ID NO: 2552390
agucacccagcaaucuucu

SEQ ID NO: 2552392 - RNA, 19 nt, Artificial Sequence
  Description of Artificial Sequence: Synthetic oligonucleotide
  Sense strand starting at position 2871 of SEQ ID NO: 1888720
gaagauugcugggugacuu

SEQ ID NO: 2552393 - RNA, 19 nt, Artificial Sequence
  Description of Artificial Sequence: Synthetic oligonucleotide
  Antisense strand to SEQ ID NO: 2552392
aagucacccagcaaucuuc

SEQ ID NO: 2552394 - RNA, 19 nt, Artificial Sequence
  Description of Artificial Sequence: Synthetic oligonucleotide
  Sense strand starting at position 2872 of SEQ ID NO: 1888720
aagauugcugggugacuuu

SEQ ID NO: 2552395 - RNA, 19 nt, Artificial Sequence
  Description of Artificial Sequence: Synthetic oligonucleotide
  Antisense strand to SEQ ID NO: 2552394
aaagucacccagcaaucuu

SEQ ID NO: 2552396 - RNA, 19 nt, Artificial Sequence
  Description of Artificial Sequence: Synthetic oligonucleotide
  Sense strand starting at position 2964 of SEQ ID NO: 1888720
acagauuagugacuccaca

SEQ ID NO: 2552397 - RNA, 19 nt, Artificial Sequence
  Description of Artificial Sequence: Synthetic oligonucleotide
  Antisense strand to SEQ ID NO: 2552396
uguggagucacuaaucugu

SEQ ID NO: 2552398 - RNA, 19 nt, Artificial Sequence
  Description of Artificial Sequence: Synthetic oligonucleotide
  Sense strand starting at position 3030 of SEQ ID NO: 1888720
aaguuuguggugcaaccua

SEQ ID NO: 2552399 - RNA, 19 nt, Artificial Sequence
  Description of Artificial Sequence: Synthetic oligonucleotide
  Antisense strand to SEQ ID NO: 2552398
uagguugcaccacaaacuu

SEQ ID NO: 2552400 - RNA, 19 nt, Artificial Sequence
  Description of Artificial Sequence: Synthetic oligonucleotide
  Sense strand starting at position 3037 of SEQ ID NO: 1888720
uggugcaaccuauaaaucu

SEQ ID NO: 2552401 - RNA, 19 nt, Artificial Sequence
  Description of Artificial Sequence: Synthetic oligonucleotide
  Antisense strand to SEQ ID NO: 2552400
agauuuauagguugcacca

SEQ ID NO: 2552402 - RNA, 19 nt, Artificial Sequence
  Description of Artificial Sequence: Synthetic oligonucleotide
  Sense strand starting at position 3263 of SEQ ID NO: 1888720
ccugaugucugugucauuu

SEQ ID NO: 2552403 - RNA, 19 nt, Artificial Sequence
  Description of Artificial Sequence: Synthetic oligonucleotide
  Antisense strand to SEQ ID NO: 2552402
aaaugacacagacaucagg

SEQ ID NO: 2552404 - RNA, 19 nt, Artificial Sequence
  Description of Artificial Sequence: Synthetic oligonucleotide
  Sense strand starting at position 3434 of SEQ ID NO: 1888720
agaaguuaguccucaugca

SEQ ID NO: 2552405 - RNA, 19 nt, Artificial Sequence
  Description of Artificial Sequence: Synthetic oligonucleotide
  Antisense strand to SEQ ID NO: 2552404
ugcaugaggacuaacuucu

SEQ ID NO: 2552406 - RNA, 19 nt, Artificial Sequence
  Description of Artificial Sequence: Synthetic oligonucleotide
  Sense strand starting at position 3435 of SEQ ID NO: 1888720
gaaguuaguccucaugcau

SEQ ID NO: 2552407 - RNA, 19 nt, Artificial Sequence
  Description of Artificial Sequence: Synthetic oligonucleotide
  Antisense strand to SEQ ID NO: 2552406
augcaugaggacuaacuuc

SEQ ID NO: 2552408 - RNA, 19 nt, Artificial Sequence
  Description of Artificial Sequence: Synthetic oligonucleotide
  Sense strand starting at position 3628 of SEQ ID NO: 1888720
agaagucaauaugucacaa

SEQ ID NO: 2552409 - RNA, 19 nt, Artificial Sequence
  Description of Artificial Sequence: Synthetic oligonucleotide
  Antisense strand to SEQ ID NO: 2552408
uugugacauauugacuucu

SEQ ID NO: 2552410 - RNA, 19 nt, Artificial Sequence
  Description of Artificial Sequence: Synthetic oligonucleotide
  Sense strand starting at position 3909 of SEQ ID NO: 1888720
gacagaugacuugguguca

SEQ ID NO: 2552411 - RNA, 19 nt, Artificial Sequence
  Description of Artificial Sequence: Synthetic oligonucleotide
  Antisense strand to SEQ ID NO: 2552410
ugacaccaagucaucuguc

SEQ ID NO: 2552412 - RNA, 19 nt, Artificial Sequence
  Description of Artificial Sequence: Synthetic oligonucleotide
  Sense strand starting at position 194 of SEQ ID NO: 1888722
ggaagauguggcuguuaga

SEQ ID NO: 2552413 - RNA, 19 nt, Artificial Sequence
  Description of Artificial Sequence: Synthetic oligonucleotide
  Antisense strand to SEQ ID NO: 2552412
ucuaacagccacaucuucc

SEQ ID NO: 2552414 - RNA, 19 nt, Artificial Sequence
  Description of Artificial Sequence: Synthetic oligonucleotide
  Sense strand starting at position 292 of SEQ ID NO: 1888722
uucuaucuaucaguccaga

SEQ ID NO: 2552415 - RNA, 19 nt, Artificial Sequence
  Description of Artificial Sequence: Synthetic oligonucleotide
  Antisense strand to SEQ ID NO: 2552414
ucuggacugauagauagaa

SEQ ID NO: 2552416 - RNA, 19 nt, Artificial Sequence
  Description of Artificial Sequence: Synthetic oligonucleotide
  Sense strand starting at position 418 of SEQ ID NO: 1888722
aauauauaacguuagugag

SEQ ID NO: 2552417 - RNA, 19 nt, Artificial Sequence
  Description of Artificial Sequence: Synthetic oligonucleotide
  Antisense strand to SEQ ID NO: 2552416
cucacuaacguuauauauu

SEQ ID NO: 2552418 - RNA, 19 nt, Artificial Sequence
  Description of Artificial Sequence: Synthetic oligonucleotide
  Sense strand starting at position 420 of SEQ ID NO: 1888722
uauauaacguuagugagau

SEQ ID NO: 2552419 - RNA, 19 nt, Artificial Sequence
  Description of Artificial Sequence: Synthetic oligonucleotide
  Antisense strand to SEQ ID NO: 2552418
aucucacuaacguuauaua

SEQ ID NO: 2552420 - RNA, 19 nt, Artificial Sequence
  Description of Artificial Sequence: Synthetic oligonucleotide
  Sense strand starting at position 510 of SEQ ID NO: 1888722
cucucaugucaugaccuua

SEQ ID NO: 2552421 - RNA, 19 nt, Artificial Sequence
  Description of Artificial Sequence: Synthetic oligonucleotide
  Antisense strand to SEQ ID NO: 2552420
uaaggucaugacaugagag

SEQ ID NO: 2552422 - RNA, 19 nt, Artificial Sequence
  Description of Artificial Sequence: Synthetic oligonucleotide
  Sense strand starting at position 671 of SEQ ID NO: 1888722
acucaauuguauguaaacu

SEQ ID NO: 2552423 - RNA, 19 nt, Artificial Sequence
  Description of Artificial Sequence: Synthetic oligonucleotide
  Antisense strand to SEQ ID NO: 2552422
aguuuacauacaauugagu

SEQ ID NO: 2552424 - RNA, 19 nt, Artificial Sequence
  Description of Artificial Sequence: Synthetic oligonucleotide
  Sense strand starting at position 1031 of SEQ ID NO: 1888722
cugucuuauuucuugugca

SEQ ID NO: 2552425 - RNA, 19 nt, Artificial Sequence
  Description of Artificial Sequence: Synthetic oligonucleotide
  Antisense strand to SEQ ID NO: 2552424
ugcacaagaaauaagacag

SEQ ID NO: 2552426 - RNA, 19 nt, Artificial Sequence
  Description of Artificial Sequence: Synthetic oligonucleotide
  Sense strand starting at position 1165 of SEQ ID NO: 1888722
agauaaagagucugugauu

SEQ ID NO: 2552427 - RNA, 19 nt, Artificial Sequence
  Description of Artificial Sequence: Synthetic oligonucleotide
  Antisense strand to SEQ ID NO: 2552426
aaucacagacucuuuaucu

SEQ ID NO: 2552428 - RNA, 19 nt, Artificial Sequence
  Description of Artificial Sequence: Synthetic oligonucleotide
  Sense strand starting at position 1166 of SEQ ID NO: 1888722
gauaaagagucugugauua

SEQ ID NO: 2552429 - RNA, 19 nt, Artificial Sequence
  Description of Artificial Sequence: Synthetic oligonucleotide
  Antisense strand to SEQ ID NO: 2552428
uaaucacagacucuuuauc

SEQ ID NO: 2552430 - RNA, 19 nt, Artificial Sequence
  Description of Artificial Sequence: Synthetic oligonucleotide
  Sense strand starting at position 1213 of SEQ ID NO: 1888722
ugaauugugaaacgauaag

SEQ ID NO: 2552431 - RNA, 19 nt, Artificial Sequence
  Description of Artificial Sequence: Synthetic oligonucleotide
  Antisense strand to SEQ ID NO: 2552430
cuuaucguuucacaauuca

SEQ ID NO: 2552432 - RNA, 19 nt, Artificial Sequence
  Description of Artificial Sequence: Synthetic oligonucleotide
  Sense strand starting at position 1230 of SEQ ID NO: 1888722
aguguuugugcuuaagaua

SEQ ID NO: 2552433 - RNA, 19 nt, Artificial Sequence
  Description of Artificial Sequence: Synthetic oligonucleotide
  Antisense strand to SEQ ID NO: 2552432
uaucuuaagcacaaacacu

SEQ ID NO: 2552434 - RNA, 19 nt, Artificial Sequence
  Description of Artificial Sequence: Synthetic oligonucleotide
  Sense strand starting at position 1244 of SEQ ID NO: 1888722
agauaaucucaacgucuac

SEQ ID NO: 2552435 - RNA, 19 nt, Artificial Sequence
  Description of Artificial Sequence: Synthetic oligonucleotide
  Antisense strand to SEQ ID NO: 2552434
guagacguugagauuaucu

SEQ ID NO: 2552436 - RNA, 19 nt, Artificial Sequence
  Description of Artificial Sequence: Synthetic oligonucleotide
  Sense strand starting at position 1253 of SEQ ID NO: 1888722
caacgucuacaacgaagaa

SEQ ID NO: 2552437 - RNA, 19 nt, Artificial Sequence
  Description of Artificial Sequence: Synthetic oligonucleotide
  Antisense strand to SEQ ID NO: 2552436
uucuucguuguagacguug

SEQ ID NO: 2552438 - RNA, 19 nt, Artificial Sequence
  Description of Artificial Sequence: Synthetic oligonucleotide
  Sense strand starting at position 1471 of SEQ ID NO: 1888722
aguauaaagaggugucacu

SEQ ID NO: 2552439 - RNA, 19 nt, Artificial Sequence
  Description of Artificial Sequence: Synthetic oligonucleotide
  Antisense strand to SEQ ID NO: 2552438
agugacaccucuuuauacu

SEQ ID NO: 2552440 - RNA, 19 nt, Artificial Sequence
  Description of Artificial Sequence: Synthetic oligonucleotide
  Sense strand starting at position 1480 of SEQ ID NO: 1888722
aggugucacuaagcaaaga

SEQ ID NO: 2552441 - RNA, 19 nt, Artificial Sequence
  Description of Artificial Sequence: Synthetic oligonucleotide
  Antisense strand to SEQ ID NO: 2552440
ucuuugcuuagugacaccu

SEQ ID NO: 2552442 - RNA, 19 nt, Artificial Sequence
  Description of Artificial Sequence: Synthetic oligonucleotide
  Sense strand starting at position 1547 of SEQ ID NO: 1888722
ucaauuaauuggguaacgu

SEQ ID NO: 2552443 - RNA, 19 nt, Artificial Sequence
  Description of Artificial Sequence: Synthetic oligonucleotide
  Antisense strand to SEQ ID NO: 2552442
acguuacccaauuaauuga

SEQ ID NO: 2552444 - RNA, 19 nt, Artificial Sequence
  Description of Artificial Sequence: Synthetic oligonucleotide
  Sense strand starting at position 1548 of SEQ ID NO: 1888722
caauuaauuggguaacgua

SEQ ID NO: 2552445 - RNA, 19 nt, Artificial Sequence
  Description of Artificial Sequence: Synthetic oligonucleotide
  Antisense strand to SEQ ID NO: 2552444
uacguuacccaauuaauug

SEQ ID NO: 2552446 - RNA, 19 nt, Artificial Sequence
  Description of Artificial Sequence: Synthetic oligonucleotide
  Sense strand starting at position 1612 of SEQ ID NO: 1888722
ugacacaggucaggauuua

SEQ ID NO: 2552447 - RNA, 19 nt, Artificial Sequence
  Description of Artificial Sequence: Synthetic oligonucleotide
  Antisense strand to SEQ ID NO: 2552446
uaaauccugaccuguguca

SEQ ID NO: 2552448 - RNA, 19 nt, Artificial Sequence
  Description of Artificial Sequence: Synthetic oligonucleotide
  Sense strand starting at position 1674 of SEQ ID NO: 1888722
uguaguuaauaccugaauu

SEQ ID NO: 2552449 - RNA, 19 nt, Artificial Sequence
  Description of Artificial Sequence: Synthetic oligonucleotide
  Antisense strand to SEQ ID NO: 2552448
aauucagguauuaacuaca

SEQ ID NO: 2552450 - RNA, 19 nt, Artificial Sequence
  Description of Artificial Sequence: Synthetic oligonucleotide
  Sense strand starting at position 1814 of SEQ ID NO: 1888722
ggacuuaccugguuucucu

SEQ ID NO: 2552451 - RNA, 19 nt, Artificial Sequence
  Description of Artificial Sequence: Synthetic oligonucleotide
  Antisense strand to SEQ ID NO: 2552450
agagaaaccagguaagucc

SEQ ID NO: 2552452 - RNA, 19 nt, Artificial Sequence
  Description of Artificial Sequence: Synthetic oligonucleotide
  Sense strand starting at position 2189 of SEQ ID NO: 1888722
guacgaguccacuauccca

SEQ ID NO: 2552453 - RNA, 19 nt, Artificial Sequence
  Description of Artificial Sequence: Synthetic oligonucleotide
  Antisense strand to SEQ ID NO: 2552452
ugggauaguggacucguac

SEQ ID NO: 2552454 - RNA, 19 nt, Artificial Sequence
  Description of Artificial Sequence: Synthetic oligonucleotide
  Sense strand starting at position 2317 of SEQ ID NO: 1888722
agucaucuuccacauaguu

SEQ ID NO: 2552455 - RNA, 19 nt, Artificial Sequence
  Description of Artificial Sequence: Synthetic oligonucleotide
  Antisense strand to SEQ ID NO: 2552454
aacuauguggaagaugacu

SEQ ID NO: 2552456 - RNA, 19 nt, Artificial Sequence
  Description of Artificial Sequence: Synthetic oligonucleotide
  Sense strand starting at position 2379 of SEQ ID NO: 1888722
guuaacugccaagauguaa

SEQ ID NO: 2552457 - RNA, 19 nt, Artificial Sequence
  Description of Artificial Sequence: Synthetic oligonucleotide
  Antisense strand to SEQ ID NO: 2552456
uuacaucuuggcaguuaac

SEQ ID NO: 2552458 - RNA, 19 nt, Artificial Sequence
  Description of Artificial Sequence: Synthetic oligonucleotide
  Sense strand starting at position 2465 of SEQ ID NO: 1888722
caguuagacuguguuaacu

SEQ ID NO: 2552459 - RNA, 19 nt, Artificial Sequence
  Description of Artificial Sequence: Synthetic oligonucleotide
  Antisense strand to SEQ ID NO: 2552458
aguuaacacagucuaacug

SEQ ID NO: 2552460 - RNA, 19 nt, Artificial Sequence
  Description of Artificial Sequence: Synthetic oligonucleotide
  Sense strand starting at position 2601 of SEQ ID NO: 1888722
agccuaauuccagauguaa

SEQ ID NO: 2552461 - RNA, 19 nt, Artificial Sequence
  Description of Artificial Sequence: Synthetic oligonucleotide
  Antisense strand to SEQ ID NO: 2552460
uuacaucuggaauuaggcu

SEQ ID NO: 2552462 - RNA, 19 nt, Artificial Sequence
  Description of Artificial Sequence: Synthetic oligonucleotide
  Sense strand starting at position 2609 of SEQ ID NO: 1888722
uccagauguaagugccaga

SEQ ID NO: 2552463 - RNA, 19 nt, Artificial Sequence
  Description of Artificial Sequence: Synthetic oligonucleotide
  Antisense strand to SEQ ID NO: 2552462
ucuggcacuuacaucugga

SEQ ID NO: 2552464 - RNA, 19 nt, Artificial Sequence
  Description of Artificial Sequence: Synthetic oligonucleotide
  Sense strand starting at position 2614 of SEQ ID NO: 1888722
auguaagugccagaacuau

SEQ ID NO: 2552465 - RNA, 19 nt, Artificial Sequence
  Description of Artificial Sequence: Synthetic oligonucleotide
  Antisense strand to SEQ ID NO: 2552464
auaguucuggcacuuacau

SEQ ID NO: 2552466 - RNA, 19 nt, Artificial Sequence
  Description of Artificial Sequence: Synthetic oligonucleotide
  Sense strand starting at position 2812 of SEQ ID NO: 1888722
agaagauuccggugaugca

SEQ ID NO: 2552467 - RNA, 19 nt, Artificial Sequence
  Description of Artificial Sequence: Synthetic oligonucleotide
  Antisense strand to SEQ ID NO: 2552466
ugcaucaccggaaucuucu

SEQ ID NO: 2552468 - RNA, 19 nt, Artificial Sequence
  Description of Artificial Sequence: Synthetic oligonucleotide
  Sense strand starting at position 2813 of SEQ ID NO: 1888722
gaagauuccggugaugcaa

SEQ ID NO: 2552469 - RNA, 19 nt, Artificial Sequence
  Description of Artificial Sequence: Synthetic oligonucleotide
  Antisense strand to SEQ ID NO: 2552468
uugcaucaccggaaucuuc

SEQ ID NO: 2552470 - RNA, 19 nt, Artificial Sequence
  Description of Artificial Sequence: Synthetic oligonucleotide
  Sense strand starting at position 3260 of SEQ ID NO: 1888722
ggcacaaaguaagcauauu

SEQ ID NO: 2552471 - RNA, 19 nt, Artificial Sequence
  Description of Artificial Sequence: Synthetic oligonucleotide
  Antisense strand to SEQ ID NO: 2552470
aauaugcuuacuuugugcc

SEQ ID NO: 2552472 - RNA, 19 nt, Artificial Sequence
  Description of Artificial Sequence: Synthetic oligonucleotide
  Sense strand starting at position 3309 of SEQ ID NO: 1888722
uugucaagucccuauuaag

SEQ ID NO: 2552473 - RNA, 19 nt, Artificial Sequence
  Description of Artificial Sequence: Synthetic oligonucleotide
  Antisense strand to SEQ ID NO: 2552472
cuuaauagggacuugacaa

SEQ ID NO: 2552474 - RNA, 19 nt, Artificial Sequence
  Description of Artificial Sequence: Synthetic oligonucleotide
  Sense strand starting at position 3369 of SEQ ID NO: 1888722
uuaggucugugauuaagua

SEQ ID NO: 2552475 - RNA, 19 nt, Artificial Sequence
  Description of Artificial Sequence: Synthetic oligonucleotide
  Antisense strand to SEQ ID NO: 2552474
uacuuaaucacagaccuaa

SEQ ID NO: 2552476 - RNA, 19 nt, Artificial Sequence
  Description of Artificial Sequence: Synthetic oligonucleotide
  Sense strand starting at position 3370 of SEQ ID NO: 1888722
uaggucugugauuaaguau

SEQ ID NO: 2552477 - RNA, 19 nt, Artificial Sequence
  Description of Artificial Sequence: Synthetic oligonucleotide
  Antisense strand to SEQ ID NO: 2552476
auacuuaaucacagaccua

SEQ ID NO: 2552478 - RNA, 19 nt, Artificial Sequence
  Description of Artificial Sequence: Synthetic oligonucleotide
  Sense strand starting at position 3373 of SEQ ID NO: 1888722
gucugugauuaaguauuuc

SEQ ID NO: 2552479 - RNA, 19 nt, Artificial Sequence
  Description of Artificial Sequence: Synthetic oligonucleotide
  Antisense strand to SEQ ID NO: 2552478
gaaauacuuaaucacagac

SEQ ID NO: 2552480 - RNA, 19 nt, Artificial Sequence
  Description of Artificial Sequence: Synthetic oligonucleotide
  Sense strand starting at position 3566 of SEQ ID NO: 1888722
uuaaguggguuuccaaaua

SEQ ID NO: 2552481 - RNA, 19 nt, Artificial Sequence
  Description of Artificial Sequence: Synthetic oligonucleotide
  Antisense strand to SEQ ID NO: 2552480
uauuuggaaacccacuuaa

SEQ ID NO: 2552482 - RNA, 19 nt, Artificial Sequence
  Description of Artificial Sequence: Synthetic oligonucleotide
  Sense strand starting at position 3727 of SEQ ID NO: 1888722
aguuuaucacuaugagcug

SEQ ID NO: 2552483 - RNA, 19 nt, Artificial Sequence
  Description of Artificial Sequence: Synthetic oligonucleotide
  Antisense strand to SEQ ID NO: 2552482
cagcucauagugauaaacu

SEQ ID NO: 2552484 - RNA, 19 nt, Artificial Sequence
  Description of Artificial Sequence: Synthetic oligonucleotide
  Sense strand starting at position 3762 of SEQ ID NO: 1888722
ccauguacauucuuaggca

SEQ ID NO: 2552485 - RNA, 19 nt, Artificial Sequence
  Description of Artificial Sequence: Synthetic oligonucleotide
  Antisense strand to SEQ ID NO: 2552484
ugccuaagaauguacaugg

SEQ ID NO: 2552486 - RNA, 19 nt, Artificial Sequence
  Description of Artificial Sequence: Synthetic oligonucleotide
  Sense strand starting at position 3871 of SEQ ID NO: 1888722
gcagaagugugaucauagg

SEQ ID NO: 2552487 - RNA, 19 nt, Artificial Sequence
  Description of Artificial Sequence: Synthetic oligonucleotide
  Antisense strand to SEQ ID NO: 2552486
ccuaugaucacacuucugc

SEQ ID NO: 2552488 - RNA, 19 nt, Artificial Sequence
  Description of Artificial Sequence: Synthetic oligonucleotide
  Sense strand starting at position 3881 of SEQ ID NO: 1888722
gaucauagguccuuguaac

SEQ ID NO: 2552489 - RNA, 19 nt, Artificial Sequence
  Description of Artificial Sequence: Synthetic oligonucleotide
  Antisense strand to SEQ ID NO: 2552488
guuacaaggaccuaugauc

SEQ ID NO: 2552490 - RNA, 19 nt, Artificial Sequence
  Description of Artificial Sequence: Synthetic oligonucleotide
  Sense strand starting at position 3887 of SEQ ID NO: 1888722
agguccuuguaaccuuaaa

SEQ ID NO: 2552491 - RNA, 19 nt, Artificial Sequence
  Description of Artificial Sequence: Synthetic oligonucleotide
  Antisense strand to SEQ ID NO: 2552490
uuuaagguuacaaggaccu

SEQ ID NO: 2552492 - RNA, 19 nt, Artificial Sequence
  Description of Artificial Sequence: Synthetic oligonucleotide
  Sense strand starting at position 400 of SEQ ID NO: 1888723
gcaacuaccuguccuagga

SEQ ID NO: 2552493 - RNA, 19 nt, Artificial Sequence
  Description of Artificial Sequence: Synthetic oligonucleotide
  Antisense strand to SEQ ID NO: 2552492
uccuaggacagguaguugc

SEQ ID NO: 2552494 - RNA, 19 nt, Artificial Sequence
  Description of Artificial Sequence: Synthetic oligonucleotide
  Sense strand starting at position 519 of SEQ ID NO: 1888723
ucgcucauguucuugaaca

SEQ ID NO: 2552495 - RNA, 19 nt, Artificial Sequence
  Description of Artificial Sequence: Synthetic oligonucleotide
  Antisense strand to SEQ ID NO: 2552494
uguucaagaacaugagcga

SEQ ID NO: 2552496 - RNA, 19 nt, Artificial Sequence
  Description of Artificial Sequence: Synthetic oligonucleotide
  Sense strand starting at position 521 of SEQ ID NO: 1888723
gcucauguucuugaacaua

SEQ ID NO: 2552497 - RNA, 19 nt, Artificial Sequence
  Description of Artificial Sequence: Synthetic oligonucleotide
  Antisense strand to SEQ ID NO: 2552496
uauguucaagaacaugagc

SEQ ID NO: 2552498 - RNA, 19 nt, Artificial Sequence
  Description of Artificial Sequence: Synthetic oligonucleotide
  Sense strand starting at position 531 of SEQ ID NO: 1888723
uugaacauaccaugaguau

SEQ ID NO: 2552499 - RNA, 19 nt, Artificial Sequence
  Description of Artificial Sequence: Synthetic oligonucleotide
  Antisense strand to SEQ ID NO: 2552498
auacucaugguauguucaa

SEQ ID NO: 2552500 - RNA, 19 nt, Artificial Sequence
  Description of Artificial Sequence: Synthetic oligonucleotide
  Sense strand starting at position 639 of SEQ ID NO: 1888723
cccaguaguucucuuucca

SEQ ID NO: 2552501 - RNA, 19 nt, Artificial Sequence
  Description of Artificial Sequence: Synthetic oligonucleotide
  Antisense strand to SEQ ID NO: 2552500
uggaaagagaacuacuggg

SEQ ID NO: 2552502 - RNA, 19 nt, Artificial Sequence
  Description of Artificial Sequence: Synthetic oligonucleotide
  Sense strand starting at position 824 of SEQ ID NO: 1888723
uccucuuccugcccagaga

SEQ ID NO: 2552503 - RNA, 19 nt, Artificial Sequence
  Description of Artificial Sequence: Synthetic oligonucleotide
  Antisense strand to SEQ ID NO: 2552502
ucucugggcaggaagagga

SEQ ID NO: 2552504 - RNA, 19 nt, Artificial Sequence
  Description of Artificial Sequence: Synthetic oligonucleotide
  Sense strand starting at position 1300 of SEQ ID NO: 1888723
gcaugcugucacuaaucua

SEQ ID NO: 2552505 - RNA, 19 nt, Artificial Sequence
  Description of Artificial Sequence: Synthetic oligonucleotide
  Antisense strand to SEQ ID NO: 2552504
uagauuagugacagcaugc

SEQ ID NO: 2552506 - RNA, 19 nt, Artificial Sequence
  Description of Artificial Sequence: Synthetic oligonucleotide
  Sense strand starting at position 1303 of SEQ ID NO: 1888723
ugcugucacuaaucuagga

SEQ ID NO: 2552507 - RNA, 19 nt, Artificial Sequence
  Description of Artificial Sequence: Synthetic oligonucleotide
  Antisense strand to SEQ ID NO: 2552506
uccuagauuagugacagca

SEQ ID NO: 2552508 - RNA, 19 nt, Artificial Sequence
  Description of Artificial Sequence: Synthetic oligonucleotide
  Sense strand starting at position 1307 of SEQ ID NO: 1888723
gucacuaaucuaggagcau

SEQ ID NO: 2552509 - RNA, 19 nt, Artificial Sequence
  Description of Artificial Sequence: Synthetic oligonucleotide
  Antisense strand to SEQ ID NO: 2552508
augcuccuagauuagugac

SEQ ID NO: 2552510 - RNA, 19 nt, Artificial Sequence
  Description of Artificial Sequence: Synthetic oligonucleotide
  Sense strand starting at position 1308 of SEQ ID NO: 1888723
ucacuaaucuaggagcaua

SEQ ID NO: 2552511 - RNA, 19 nt, Artificial Sequence
  Description of Artificial Sequence: Synthetic oligonucleotide
  Antisense strand to SEQ ID NO: 2552510
uaugcuccuagauuaguga

SEQ ID NO: 2552512 - RNA, 19 nt, Artificial Sequence
  Description of Artificial Sequence: Synthetic oligonucleotide
  Sense strand starting at position 1346 of SEQ ID NO: 1888723
cacccagaucaguggaaua

SEQ ID NO: 2552513 - RNA, 19 nt, Artificial Sequence
  Description of Artificial Sequence: Synthetic oligonucleotide
  Antisense strand to SEQ ID NO: 2552512
uauuccacugaucugggug

SEQ ID NO: 2552514 - RNA, 19 nt, Artificial Sequence
  Description of Artificial Sequence: Synthetic oligonucleotide
  Sense strand starting at position 1365 of SEQ ID NO: 1888723
ggagauggcuucccucaac

SEQ ID NO: 2552515 - RNA, 19 nt, Artificial Sequence
  Description of Artificial Sequence: Synthetic oligonucleotide
  Antisense strand to SEQ ID NO: 2552514
guugagggaagccaucucc

SEQ ID NO: 2552516 - RNA, 19 nt, Artificial Sequence
  Description of Artificial Sequence: Synthetic oligonucleotide
  Sense strand starting at position 1453 of SEQ ID NO: 1888723
ccaguagugugaccuugaa

SEQ ID NO: 2552517 - RNA, 19 nt, Artificial Sequence
  Description of Artificial Sequence: Synthetic oligonucleotide
  Antisense strand to SEQ ID NO: 2552516
uucaaggucacacuacugg

SEQ ID NO: 2552518 - RNA, 19 nt, Artificial Sequence
  Description of Artificial Sequence: Synthetic oligonucleotide
  Sense strand starting at position 1512 of SEQ ID NO: 1888723
ugcaaugggacuugaugau

SEQ ID NO: 2552519 - RNA, 19 nt, Artificial Sequence
  Description of Artificial Sequence: Synthetic oligonucleotide
  Antisense strand to SEQ ID NO: 2552518
aucaucaagucccauugca

SEQ ID NO: 2552520 - RNA, 19 nt, Artificial Sequence
  Description of Artificial Sequence: Synthetic oligonucleotide
  Sense strand starting at position 1591 of SEQ ID NO: 1888723
cuuuguucccuccgucuaa

SEQ ID NO: 2552521 - RNA, 19 nt, Artificial Sequence
  Description of Artificial Sequence: Synthetic oligonucleotide
  Antisense strand to SEQ ID NO: 2552520
uuagacggagggaacaaag

SEQ ID NO: 2552522 - RNA, 19 nt, Artificial Sequence
  Description of Artificial Sequence: Synthetic oligonucleotide
  Sense strand starting at position 1592 of SEQ ID NO: 1888723
uuuguucccuccgucuaaa

SEQ ID NO: 2552523 - RNA, 19 nt, Artificial Sequence
  Description of Artificial Sequence: Synthetic oligonucleotide
  Antisense strand to SEQ ID NO: 2552522
uuuagacggagggaacaaa

SEQ ID NO: 2552524 - RNA, 19 nt, Artificial Sequence
  Description of Artificial Sequence: Synthetic oligonucleotide
  Sense strand starting at position 1619 of SEQ ID NO: 1888723
gggcgaggaauccaugcua

SEQ ID NO: 2552525 - RNA, 19 nt, Artificial Sequence
  Description of Artificial Sequence: Synthetic oligonucleotide
  Antisense strand to SEQ ID NO: 2552524
uagcauggauuccucgccc

SEQ ID NO: 2552526 - RNA, 19 nt, Artificial Sequence
  Description of Artificial Sequence: Synthetic oligonucleotide
  Sense strand starting at position 2167 of SEQ ID NO: 1888723
cucuaagacuugcagaaag

SEQ ID NO: 2552527 - RNA, 19 nt, Artificial Sequence
  Description of Artificial Sequence: Synthetic oligonucleotide
  Antisense strand to SEQ ID NO: 2552526
cuuucugcaagucuuagag

SEQ ID NO: 2552528 - RNA, 19 nt, Artificial Sequence
  Description of Artificial Sequence: Synthetic oligonucleotide
  Sense strand starting at position 2272 of SEQ ID NO: 1888723
guuugucccucucuaucua

SEQ ID NO: 2552529 - RNA, 19 nt, Artificial Sequence
  Description of Artificial Sequence: Synthetic oligonucleotide
  Antisense strand to SEQ ID NO: 2552528
uagauagagagggacaaac

SEQ ID NO: 2552530 - RNA, 19 nt, Artificial Sequence
  Description of Artificial Sequence: Synthetic oligonucleotide
  Sense strand starting at position 2397 of SEQ ID NO: 1888723
ugggcuucugcagagaaga

SEQ ID NO: 2552531 - RNA, 19 nt, Artificial Sequence
  Description of Artificial Sequence: Synthetic oligonucleotide
  Antisense strand to SEQ ID NO: 2552530
ucuucucugcagaagccca

SEQ ID NO: 2552532 - RNA, 19 nt, Artificial Sequence
  Description of Artificial Sequence: Synthetic oligonucleotide
  Sense strand starting at position 2399 of SEQ ID NO: 1888723
ggcuucugcagagaagagu

SEQ ID NO: 2552533 - RNA, 19 nt, Artificial Sequence
  Description of Artificial Sequence: Synthetic oligonucleotide
  Antisense strand to SEQ ID NO: 2552532
acucuucucugcagaagcc

SEQ ID NO: 2552534 - RNA, 19 nt, Artificial Sequence
  Description of Artificial Sequence: Synthetic oligonucleotide
  Sense strand starting at position 2445 of SEQ ID NO: 1888723
gccugucacccaggagaga

SEQ ID NO: 2552535 - RNA, 19 nt, Artificial Sequence
  Description of Artificial Sequence: Synthetic oligonucleotide
  Antisense strand to SEQ ID NO: 2552534
ucucuccugggugacaggc

SEQ ID NO: 2552536 - RNA, 19 nt, Artificial Sequence
  Description of Artificial Sequence: Synthetic oligonucleotide
  Sense strand starting at position 2701 of SEQ ID NO: 1888723
cugugacccgaaggagaau

SEQ ID NO: 2552537 - RNA, 19 nt, Artificial Sequence
  Description of Artificial Sequence: Synthetic oligonucleotide
  Antisense strand to SEQ ID NO: 2552536
auucuccuucgggucacag

SEQ ID NO: 2552538 - RNA, 19 nt, Artificial Sequence
  Description of Artificial Sequence: Synthetic oligonucleotide
  Sense strand starting at position 2801 of SEQ ID NO: 1888723
aaguguacuugugugaaug

SEQ ID NO: 2552539 - RNA, 19 nt, Artificial Sequence
  Description of Artificial Sequence: Synthetic oligonucleotide
  Antisense strand to SEQ ID NO: 2552538
cauucacacaaguacacuu

SEQ ID NO: 2552540 - RNA, 19 nt, Artificial Sequence
  Description of Artificial Sequence: Synthetic oligonucleotide
  Sense strand starting at position 2802 of SEQ ID NO: 1888723
aguguacuugugugaaugu

SEQ ID NO: 2552541 - RNA, 19 nt, Artificial Sequence
  Description of Artificial Sequence: Synthetic oligonucleotide
  Antisense strand to SEQ ID NO: 2552540
acauucacacaaguacacu

SEQ ID NO: 2552542 - RNA, 19 nt, Artificial Sequence
  Description of Artificial Sequence: Synthetic oligonucleotide
  Sense strand starting at position 2878 of SEQ ID NO: 1888723
ugagagugugcguauguga

SEQ ID NO: 2552543 - RNA, 19 nt, Artificial Sequence
  Description of Artificial Sequence: Synthetic oligonucleotide
  Antisense strand to SEQ ID NO: 2552542
ucacauacgcacacucuca

SEQ ID NO: 2552544 - RNA, 19 nt, Artificial Sequence
  Description of Artificial Sequence: Synthetic oligonucleotide
  Sense strand starting at position 3102 of SEQ ID NO: 1888723
gcgugugccaaugaugaca

SEQ ID NO: 2552545 - RNA, 19 nt, Artificial Sequence
  Description of Artificial Sequence: Synthetic oligonucleotide
  Antisense strand to SEQ ID NO: 2552544
ugucaucauuggcacacgc

SEQ ID NO: 2552546 - RNA, 19 nt, Artificial Sequence
  Description of Artificial Sequence: Synthetic oligonucleotide
  Sense strand starting at position 3132 of SEQ ID NO: 1888723
ugcggaugaucaucuaauu

SEQ ID NO: 2552547 - RNA, 19 nt, Artificial Sequence
  Description of Artificial Sequence: Synthetic oligonucleotide
  Antisense strand to SEQ ID NO: 2552546
aauuagaugaucauccgca

SEQ ID NO: 2552548 - RNA, 19 nt, Artificial Sequence
  Description of Artificial Sequence: Synthetic oligonucleotide
  Sense strand starting at position 3141 of SEQ ID NO: 1888723
ucaucuaauuguguccauu

SEQ ID NO: 2552549 - RNA, 19 nt, Artificial Sequence
  Description of Artificial Sequence: Synthetic oligonucleotide
  Antisense strand to SEQ ID NO: 2552548
aauggacacaauuagauga

SEQ ID NO: 2552550 - RNA, 19 nt, Artificial Sequence
  Description of Artificial Sequence: Synthetic oligonucleotide
  Sense strand starting at position 3187 of SEQ ID NO: 1888723
cuggacagagccuguuuau

SEQ ID NO: 2552551 - RNA, 19 nt, Artificial Sequence
  Description of Artificial Sequence: Synthetic oligonucleotide
  Antisense strand to SEQ ID NO: 2552550
auaaacaggcucuguccag

SEQ ID NO: 2552552 - RNA, 19 nt, Artificial Sequence
  Description of Artificial Sequence: Synthetic oligonucleotide
  Sense strand starting at position 3197 of SEQ ID NO: 1888723
ccuguuuauagcugcggaa

SEQ ID NO: 2552553 - RNA, 19 nt, Artificial Sequence
  Description of Artificial Sequence: Synthetic oligonucleotide
  Antisense strand to SEQ ID NO: 2552552
uuccgcagcuauaaacagg

SEQ ID NO: 2552554 - RNA, 19 nt, Artificial Sequence
  Description of Artificial Sequence: Synthetic oligonucleotide
  Sense strand starting at position 3199 of SEQ ID NO: 1888723
uguuuauagcugcggaaag

SEQ ID NO: 2552555 - RNA, 19 nt, Artificial Sequence
  Description of Artificial Sequence: Synthetic oligonucleotide
  Antisense strand to SEQ ID NO: 2552554
cuuuccgcagcuauaaaca

SEQ ID NO: 2552556 - RNA, 19 nt, Artificial Sequence
  Description of Artificial Sequence: Synthetic oligonucleotide
  Sense strand starting at position 3360 of SEQ ID NO: 1888723
caggucaucaugugagagu

SEQ ID NO: 2552557 - RNA, 19 nt, Artificial Sequence
  Description of Artificial Sequence: Synthetic oligonucleotide
  Antisense strand to SEQ ID NO: 2552556
acucucacaugaugaccug

SEQ ID NO: 2552558 - RNA, 19 nt, Artificial Sequence
  Description of Artificial Sequence: Synthetic oligonucleotide
  Sense strand starting at position 3681 of SEQ ID NO: 1888723
uucggcuuuauugagguau

SEQ ID NO: 2552559 - RNA, 19 nt, Artificial Sequence
  Description of Artificial Sequence: Synthetic oligonucleotide
  Antisense strand to SEQ ID NO: 2552558
auaccucaauaaagccgaa

SEQ ID NO: 2552560 - RNA, 19 nt, Artificial Sequence
  Description of Artificial Sequence: Synthetic oligonucleotide
  Sense strand starting at position 3687 of SEQ ID NO: 1888723
uuuauugagguaugauuag

SEQ ID NO: 2552561 - RNA, 19 nt, Artificial Sequence
  Description of Artificial Sequence: Synthetic oligonucleotide
  Antisense strand to SEQ ID NO: 2552560
cuaaucauaccucaauaaa

SEQ ID NO: 2552562 - RNA, 19 nt, Artificial Sequence
  Description of Artificial Sequence: Synthetic oligonucleotide
  Sense strand starting at position 3693 of SEQ ID NO: 1888723
gagguaugauuagcauaca

SEQ ID NO: 2552563 - RNA, 19 nt, Artificial Sequence
  Description of Artificial Sequence: Synthetic oligonucleotide
  Antisense strand to SEQ ID NO: 2552562
uguaugcuaaucauaccuc

SEQ ID NO: 2552564 - RNA, 19 nt, Artificial Sequence
  Description of Artificial Sequence: Synthetic oligonucleotide
  Sense strand starting at position 3696 of SEQ ID NO: 1888723
guaugauuagcauacagua

SEQ ID NO: 2552565 - RNA, 19 nt, Artificial Sequence
  Description of Artificial Sequence: Synthetic oligonucleotide
  Antisense strand to SEQ ID NO: 2552564
uacuguaugcuaaucauac

SEQ ID NO: 2552566 - RNA, 19 nt, Artificial Sequence
  Description of Artificial Sequence: Synthetic oligonucleotide
  Sense strand starting at position 3741 of SEQ ID NO: 1888723
ucaguaagauuugacaaau

SEQ ID NO: 2552567 - RNA, 19 nt, Artificial Sequence
  Description of Artificial Sequence: Synthetic oligonucleotide
  Antisense strand to SEQ ID NO: 2552566
auuugucaaaucuuacuga

SEQ ID NO: 2552568 - RNA, 19 nt, Artificial Sequence
  Description of Artificial Sequence: Synthetic oligonucleotide
  Sense strand starting at position 3809 of SEQ ID NO: 1888723
uucgacauuccagaaaguu

SEQ ID NO: 2552569 - RNA, 19 nt, Artificial Sequence
  Description of Artificial Sequence: Synthetic oligonucleotide
  Antisense strand to SEQ ID NO: 2552568
aacuuucuggaaugucgaa

SEQ ID NO: 2552570 - RNA, 19 nt, Artificial Sequence
  Description of Artificial Sequence: Synthetic oligonucleotide
  Sense strand starting at position 3932 of SEQ ID NO: 1888723
aucauagaguauguaguau

SEQ ID NO: 2552571 - RNA, 19 nt, Artificial Sequence
  Description of Artificial Sequence: Synthetic oligonucleotide
  Antisense strand to SEQ ID NO: 2552570
auacuacauacucuaugau

SEQ ID NO: 2552572 - RNA, 19 nt, Artificial Sequence
  Description of Artificial Sequence: Synthetic oligonucleotide
  Sense strand starting at position 12 of SEQ ID NO: 1888724
uccauuguauaugucauaa

SEQ ID NO: 2552573 - RNA, 19 nt, Artificial Sequence
  Description of Artificial Sequence: Synthetic oligonucleotide
  Antisense strand to SEQ ID NO: 2552572
uuaugacauauacaaugga

SEQ ID NO: 2552574 - RNA, 19 nt, Artificial Sequence
  Description of Artificial Sequence: Synthetic oligonucleotide
  Sense strand starting at position 78 of SEQ ID NO: 1888724
acaugauauuuacauaguc

SEQ ID NO: 2552575 - RNA, 19 nt, Artificial Sequence
  Description of Artificial Sequence: Synthetic oligonucleotide
  Antisense strand to SEQ ID NO: 2552574
gacuauguaaauaucaugu

SEQ ID NO: 2552576 - RNA, 19 nt, Artificial Sequence
  Description of Artificial Sequence: Synthetic oligonucleotide
  Sense strand starting at position 169 of SEQ ID NO: 1888724
aaaugaugccagugaacau

SEQ ID NO: 2552577 - RNA, 19 nt, Artificial Sequence
  Description of Artificial Sequence: Synthetic oligonucleotide
  Antisense strand to SEQ ID NO: 2552576
auguucacuggcaucauuu

SEQ ID NO: 2552578 - RNA, 19 nt, Artificial Sequence
  Description of Artificial Sequence: Synthetic oligonucleotide
  Sense strand starting at position 178 of SEQ ID NO: 1888724
cagugaacauugccaguaa

SEQ ID NO: 2552579 - RNA, 19 nt, Artificial Sequence
  Description of Artificial Sequence: Synthetic oligonucleotide
  Antisense strand to SEQ ID NO: 2552578
uuacuggcaauguucacug

SEQ ID NO: 2552580 - RNA, 19 nt, Artificial Sequence
  Description of Artificial Sequence: Synthetic oligonucleotide
  Sense strand starting at position 477 of SEQ ID NO: 1888724
ugcuauaaggacuguauua

SEQ ID NO: 2552581 - RNA, 19 nt, Artificial Sequence
  Description of Artificial Sequence: Synthetic oligonucleotide
  Antisense strand to SEQ ID NO: 2552580
uaauacaguccuuauagca

SEQ ID NO: 2552582 - RNA, 19 nt, Artificial Sequence
  Description of Artificial Sequence: Synthetic oligonucleotide
  Sense strand starting at position 540 of SEQ ID NO: 1888724
guauuauaucaaugucaag

SEQ ID NO: 2552583 - RNA, 19 nt, Artificial Sequence
  Description of Artificial Sequence: Synthetic oligonucleotide
  Antisense strand to SEQ ID NO: 2552582
cuugacauugauauaauac

SEQ ID NO: 2552584 - RNA, 19 nt, Artificial Sequence
  Description of Artificial Sequence: Synthetic oligonucleotide
  Sense strand starting at position 574 of SEQ ID NO: 1888724
aguguuauaugaucaagua

SEQ ID NO: 2552585 - RNA, 19 nt, Artificial Sequence
  Description of Artificial Sequence: Synthetic oligonucleotide
  Antisense strand to SEQ ID NO: 2552584
uacuugaucauauaacacu

SEQ ID NO: 2552586 - RNA, 19 nt, Artificial Sequence
  Description of Artificial Sequence: Synthetic oligonucleotide
  Sense strand starting at position 575 of SEQ ID NO: 1888724
guguuauaugaucaaguaa

SEQ ID NO: 2552587 - RNA, 19 nt, Artificial Sequence
  Description of Artificial Sequence: Synthetic oligonucleotide
  Antisense strand to SEQ ID NO: 2552586
uuacuugaucauauaacac

SEQ ID NO: 2552588 - RNA, 19 nt, Artificial Sequence
  Description of Artificial Sequence: Synthetic oligonucleotide
  Sense strand starting at position 582 of SEQ ID NO: 1888724
augaucaaguaagcgaauu

SEQ ID NO: 2552589 - RNA, 19 nt, Artificial Sequence
  Description of Artificial Sequence: Synthetic oligonucleotide
  Antisense strand to SEQ ID NO: 2552588
aauucgcuuacuugaucau

SEQ ID NO: 2552590 - RNA, 19 nt, Artificial Sequence
  Description of Artificial Sequence: Synthetic oligonucleotide
  Sense strand starting at position 593 of SEQ ID NO: 1888724
agcgaauucuuauucuuag

SEQ ID NO: 2552591 - RNA, 19 nt, Artificial Sequence
  Description of Artificial Sequence: Synthetic oligonucleotide
  Antisense strand to SEQ ID NO: 2552590
cuaagaauaagaauucgcu

SEQ ID NO: 2552592 - RNA, 19 nt, Artificial Sequence
  Description of Artificial Sequence: Synthetic oligonucleotide
  Sense strand starting at position 594 of SEQ ID NO: 1888724
gcgaauucuuauucuuaga

SEQ ID NO: 2552593 - RNA, 19 nt, Artificial Sequence
  Description of Artificial Sequence: Synthetic oligonucleotide
  Antisense strand to SEQ ID NO: 2552592
ucuaagaauaagaauucgc

SEQ ID NO: 2552594 - RNA, 19 nt, Artificial Sequence
  Description of Artificial Sequence: Synthetic oligonucleotide
  Sense strand starting at position 711 of SEQ ID NO: 1888724
gacauucugacggguguga

SEQ ID NO: 2552595 - RNA, 19 nt, Artificial Sequence
  Description of Artificial Sequence: Synthetic oligonucleotide
  Antisense strand to SEQ ID NO: 2552594
ucacacccgucagaauguc

SEQ ID NO: 2552596 - RNA, 19 nt, Artificial Sequence
  Description of Artificial Sequence: Synthetic oligonucleotide
  Sense strand starting at position 746 of SEQ ID NO: 1888724
ggcuuugaucuacauucca

SEQ ID NO: 2552597 - RNA, 19 nt, Artificial Sequence
  Description of Artificial Sequence: Synthetic oligonucleotide
  Antisense strand to SEQ ID NO: 2552596
uggaauguagaucaaagcc

SEQ ID NO: 2552598 - RNA, 19 nt, Artificial Sequence
  Description of Artificial Sequence: Synthetic oligonucleotide
  Sense strand starting at position 760 of SEQ ID NO: 1888724
uuccaauaaugauuaguga

SEQ ID NO: 2552599 - RNA, 19 nt, Artificial Sequence
  Description of Artificial Sequence: Synthetic oligonucleotide
  Antisense strand to SEQ ID NO: 2552598
ucacuaaucauuauuggaa

SEQ ID NO: 2552600 - RNA, 19 nt, Artificial Sequence
  Description of Artificial Sequence: Synthetic oligonucleotide
  Sense strand starting at position 763 of SEQ ID NO: 1888724
caauaaugauuagugaugu

SEQ ID NO: 2552601 - RNA, 19 nt, Artificial Sequence
  Description of Artificial Sequence: Synthetic oligonucleotide
  Antisense strand to SEQ ID NO: 2552600
acaucacuaaucauuauug

SEQ ID NO: 2552602 - RNA, 19 nt, Artificial Sequence
  Description of Artificial Sequence: Synthetic oligonucleotide
  Sense strand starting at position 1231 of SEQ ID NO: 1888724
uaagauugguaucuuguua

SEQ ID NO: 2552603 - RNA, 19 nt, Artificial Sequence
  Description of Artificial Sequence: Synthetic oligonucleotide
  Antisense strand to SEQ ID NO: 2552602
uaacaagauaccaaucuua

SEQ ID NO: 2552604 - RNA, 19 nt, Artificial Sequence
  Description of Artificial Sequence: Synthetic oligonucleotide
  Sense strand starting at position 1238 of SEQ ID NO: 1888724
gguaucuuguuaucugaaa

SEQ ID NO: 2552605 - RNA, 19 nt, Artificial Sequence
  Description of Artificial Sequence: Synthetic oligonucleotide
  Antisense strand to SEQ ID NO: 2552604
uuucagauaacaagauacc

SEQ ID NO: 2552606 - RNA, 19 nt, Artificial Sequence
  Description of Artificial Sequence: Synthetic oligonucleotide
  Sense strand starting at position 1239 of SEQ ID NO: 1888724
guaucuuguuaucugaaag

SEQ ID NO: 2552607 - RNA, 19 nt, Artificial Sequence
  Description of Artificial Sequence: Synthetic oligonucleotide
  Antisense strand to SEQ ID NO: 2552606
cuuucagauaacaagauac

SEQ ID NO: 2552608 - RNA, 19 nt, Artificial Sequence
  Description of Artificial Sequence: Synthetic oligonucleotide
  Sense strand starting at position 1356 of SEQ ID NO: 1888724
gucauaaugucucuuugaa

SEQ ID NO: 2552609 - RNA, 19 nt, Artificial Sequence
  Description of Artificial Sequence: Synthetic oligonucleotide
  Antisense strand to SEQ ID NO: 2552608
uucaaagagacauuaugac

SEQ ID NO: 2552610 - RNA, 19 nt, Artificial Sequence
  Description of Artificial Sequence: Synthetic oligonucleotide
  Sense strand starting at position 1421 of SEQ ID NO: 1888724
gugcuuucucccguguuaa

SEQ ID NO: 2552611 - RNA, 19 nt, Artificial Sequence
  Description of Artificial Sequence: Synthetic oligonucleotide
  Antisense strand to SEQ ID NO: 2552610
uuaacacgggagaaagcac

SEQ ID NO: 2552612 - RNA, 19 nt, Artificial Sequence
  Description of Artificial Sequence: Synthetic oligonucleotide
  Sense strand starting at position 1438 of SEQ ID NO: 1888724
aaauuacggucuuugagaa

SEQ ID NO: 2552613 - RNA, 19 nt, Artificial Sequence
  Description of Artificial Sequence: Synthetic oligonucleotide
  Antisense strand to SEQ ID NO: 2552612
uucucaaagaccguaauuu

SEQ ID NO: 2552614 - RNA, 19 nt, Artificial Sequence
  Description of Artificial Sequence: Synthetic oligonucleotide
  Sense strand starting at position 1439 of SEQ ID NO: 1888724
aauuacggucuuugagaaa

SEQ ID NO: 2552615 - RNA, 19 nt, Artificial Sequence
  Description of Artificial Sequence: Synthetic oligonucleotide
  Antisense strand to SEQ ID NO: 2552614
uuucucaaagaccguaauu

SEQ ID NO: 2552616 - RNA, 19 nt, Artificial Sequence
  Description of Artificial Sequence: Synthetic oligonucleotide
  Sense strand starting at position 1680 of SEQ ID NO: 1888724
uuucuaaauugguugaaga

SEQ ID NO: 2552617 - RNA, 19 nt, Artificial Sequence
  Description of Artificial Sequence: Synthetic oligonucleotide
  Antisense strand to SEQ ID NO: 2552616
ucuucaaccaauuuagaaa

SEQ ID NO: 2552618 - RNA, 19 nt, Artificial Sequence
  Description of Artificial Sequence: Synthetic oligonucleotide
  Sense strand starting at position 1681 of SEQ ID NO: 1888724
uucuaaauugguugaagag

SEQ ID NO: 2552619 - RNA, 19 nt, Artificial Sequence
  Description of Artificial Sequence: Synthetic oligonucleotide
  Antisense strand to SEQ ID NO: 2552618
cucuucaaccaauuuagaa

SEQ ID NO: 2552620 - RNA, 19 nt, Artificial Sequence
  Description of Artificial Sequence: Synthetic oligonucleotide
  Sense strand starting at position 1690 of SEQ ID NO: 1888724
gguugaagagcucaccuga

SEQ ID NO: 2552621 - RNA, 19 nt, Artificial Sequence
  Description of Artificial Sequence: Synthetic oligonucleotide
  Antisense strand to SEQ ID NO: 2552620
ucaggugagcucuucaacc

SEQ ID NO: 2552622 - RNA, 19 nt, Artificial Sequence
  Description of Artificial Sequence: Synthetic oligonucleotide
  Sense strand starting at position 1827 of SEQ ID NO: 1888724
ucauuaucaccagguggau

SEQ ID NO: 2552623 - RNA, 19 nt, Artificial Sequence
  Description of Artificial Sequence: Synthetic oligonucleotide
  Antisense strand to SEQ ID NO: 2552622
auccaccuggugauaauga

SEQ ID NO: 2552624 - RNA, 19 nt, Artificial Sequence
  Description of Artificial Sequence: Synthetic oligonucleotide
  Sense strand starting at position 1864 of SEQ ID NO: 1888724
ucgaaagcugcucagaauc

SEQ ID NO: 2552625 - RNA, 19 nt, Artificial Sequence
  Description of Artificial Sequence: Synthetic oligonucleotide
  Antisense strand to SEQ ID NO: 2552624
gauucugagcagcuuucga

SEQ ID NO: 2552626 - RNA, 19 nt, Artificial Sequence
  Description of Artificial Sequence: Synthetic oligonucleotide
  Sense strand starting at position 2064 of SEQ ID NO: 1888724
guuugaucuucuguauaug

SEQ ID NO: 2552627 - RNA, 19 nt, Artificial Sequence
  Description of Artificial Sequence: Synthetic oligonucleotide
  Antisense strand to SEQ ID NO: 2552626
cauauacagaagaucaaac

SEQ ID NO: 2552628 - RNA, 19 nt, Artificial Sequence
  Description of Artificial Sequence: Synthetic oligonucleotide
  Sense strand starting at position 2398 of SEQ ID NO: 1888724
gaagacugucaaugguaau

SEQ ID NO: 2552629 - RNA, 19 nt, Artificial Sequence
  Description of Artificial Sequence: Synthetic oligonucleotide
  Antisense strand to SEQ ID NO: 2552628
auuaccauugacagucuuc

SEQ ID NO: 2552630 - RNA, 19 nt, Artificial Sequence
  Description of Artificial Sequence: Synthetic oligonucleotide
  Sense strand starting at position 2401 of SEQ ID NO: 1888724
gacugucaaugguaauuua

SEQ ID NO: 2552631 - RNA, 19 nt, Artificial Sequence
  Description of Artificial Sequence: Synthetic oligonucleotide
  Antisense strand to SEQ ID NO: 2552630
uaaauuaccauugacaguc

SEQ ID NO: 2552632 - RNA, 19 nt, Artificial Sequence
  Description of Artificial Sequence: Synthetic oligonucleotide
  Sense strand starting at position 2785 of SEQ ID NO: 1888724
auaggaucauaucauuuga

SEQ ID NO: 2552633 - RNA, 19 nt, Artificial Sequence
  Description of Artificial Sequence: Synthetic oligonucleotide
  Antisense strand to SEQ ID NO: 2552632
ucaaaugauaugauccuau

SEQ ID NO: 2552634 - RNA, 19 nt, Artificial Sequence
  Description of Artificial Sequence: Synthetic oligonucleotide
  Sense strand starting at position 2897 of SEQ ID NO: 1888724
auugaauaggaguggucau

SEQ ID NO: 2552635 - RNA, 19 nt, Artificial Sequence
  Description of Artificial Sequence: Synthetic oligonucleotide
  Antisense strand to SEQ ID NO: 2552634
augaccacuccuauucaau

SEQ ID NO: 2552636 - RNA, 19 nt, Artificial Sequence
  Description of Artificial Sequence: Synthetic oligonucleotide
  Sense strand starting at position 2898 of SEQ ID NO: 1888724
uugaauaggaguggucaua

SEQ ID NO: 2552637 - RNA, 19 nt, Artificial Sequence
  Description of Artificial Sequence: Synthetic oligonucleotide
  Antisense strand to SEQ ID NO: 2552636
uaugaccacuccuauucaa

SEQ ID NO: 2552638 - RNA, 19 nt, Artificial Sequence
  Description of Artificial Sequence: Synthetic oligonucleotide
  Sense strand starting at position 3373 of SEQ ID NO: 1888724
ggauuaugcugaccucaca

SEQ ID NO: 2552639 - RNA, 19 nt, Artificial Sequence
  Description of Artificial Sequence: Synthetic oligonucleotide
  Antisense strand to SEQ ID NO: 2552638
ugugaggucagcauaaucc

SEQ ID NO: 2552640 - RNA, 19 nt, Artificial Sequence
  Description of Artificial Sequence: Synthetic oligonucleotide
  Sense strand starting at position 3614 of SEQ ID NO: 1888724
guaugcauuugggaauuua

SEQ ID NO: 2552641 - RNA, 19 nt, Artificial Sequence
  Description of Artificial Sequence: Synthetic oligonucleotide
  Antisense strand to SEQ ID NO: 2552640
uaaauucccaaaugcauac

SEQ ID NO: 2552642 - RNA, 19 nt, Artificial Sequence
  Description of Artificial Sequence: Synthetic oligonucleotide
  Sense strand starting at position 3687 of SEQ ID NO: 1888724
cugacaguuguuugcauuu

SEQ ID NO: 2552643 - RNA, 19 nt, Artificial Sequence
  Description of Artificial Sequence: Synthetic oligonucleotide
  Antisense strand to SEQ ID NO: 2552642
aaaugcaaacaacugucag

SEQ ID NO: 2552644 - RNA, 19 nt, Artificial Sequence
  Description of Artificial Sequence: Synthetic oligonucleotide
  Sense strand starting at position 3719 of SEQ ID NO: 1888724
gguaguauuucccuuguca

SEQ ID NO: 2552645 - RNA, 19 nt, Artificial Sequence
  Description of Artificial Sequence: Synthetic oligonucleotide
  Antisense strand to SEQ ID NO: 2552644
ugacaagggaaauacuacc

SEQ ID NO: 2552646 - RNA, 19 nt, Artificial Sequence
  Description of Artificial Sequence: Synthetic oligonucleotide
  Sense strand starting at position 3804 of SEQ ID NO: 1888724
guuauuaugguuuaucaga

SEQ ID NO: 2552647 - RNA, 19 nt, Artificial Sequence
  Description of Artificial Sequence: Synthetic oligonucleotide
  Antisense strand to SEQ ID NO: 2552646
ucugauaaaccauaauaac

SEQ ID NO: 2552648 - RNA, 19 nt, Artificial Sequence
  Description of Artificial Sequence: Synthetic oligonucleotide
  Sense strand starting at position 3834 of SEQ ID NO: 1888724
uggagucauugaucuauua

SEQ ID NO: 2552649 - RNA, 19 nt, Artificial Sequence
  Description of Artificial Sequence: Synthetic oligonucleotide
  Antisense strand to SEQ ID NO: 2552648
uaauagaucaaugacucca

SEQ ID NO: 2552650 - RNA, 19 nt, Artificial Sequence
  Description of Artificial Sequence: Synthetic oligonucleotide
  Sense strand starting at position 3965 of SEQ ID NO: 1888724
uuagguuguuuacuugaga

SEQ ID NO: 2552651 - RNA, 19 nt, Artificial Sequence
  Description of Artificial Sequence: Synthetic oligonucleotide
  Antisense strand to SEQ ID NO: 2552650
ucucaaguaaacaaccuaa

SEQ ID NO: 2552652 - RNA, 19 nt, Artificial Sequence
  Description of Artificial Sequence: Synthetic oligonucleotide
  Sense strand starting at position 70 of SEQ ID NO: 1888725
uacguauaggcacagagaa

SEQ ID NO: 2552653 - RNA, 19 nt, Artificial Sequence
  Description of Artificial Sequence: Synthetic oligonucleotide
  Antisense strand to SEQ ID NO: 2552652
uucucugugccuauacgua

SEQ ID NO: 2552654 - RNA, 19 nt, Artificial Sequence
  Description of Artificial Sequence: Synthetic oligonucleotide
  Sense strand starting at position 195 of SEQ ID NO: 1888725
ucacuaagucccugaagac

SEQ ID NO: 2552655 - RNA, 19 nt, Artificial Sequence
  Description of Artificial Sequence: Synthetic oligonucleotide
  Antisense strand to SEQ ID NO: 2552654
gucuucagggacuuaguga

SEQ ID NO: 2552656 - RNA, 19 nt, Artificial Sequence
  Description of Artificial Sequence: Synthetic oligonucleotide
  Sense strand starting at position 224 of SEQ ID NO: 1888725
gggugaacuuugguucauu

SEQ ID NO: 2552657 - RNA, 19 nt, Artificial Sequence
  Description of Artificial Sequence: Synthetic oligonucleotide
  Antisense strand to SEQ ID NO: 2552656
aaugaaccaaaguucaccc

SEQ ID NO: 2552658 - RNA, 19 nt, Artificial Sequence
  Description of Artificial Sequence: Synthetic oligonucleotide
  Sense strand starting at position 225 of SEQ ID NO: 1888725
ggugaacuuugguucauug

SEQ ID NO: 2552659 - RNA, 19 nt, Artificial Sequence
  Description of Artificial Sequence: Synthetic oligonucleotide
  Antisense strand to SEQ ID NO: 2552658
caaugaaccaaaguucacc

SEQ ID NO: 2552660 - RNA, 19 nt, Artificial Sequence
  Description of Artificial Sequence: Synthetic oligonucleotide
  Sense strand starting at position 239 of SEQ ID NO: 1888725
cauugugaacucugaugca

SEQ ID NO: 2552661 - RNA, 19 nt, Artificial Sequence
  Description of Artificial Sequence: Synthetic oligonucleotide
  Antisense strand to SEQ ID NO: 2552660
ugcaucagaguucacaaug

SEQ ID NO: 2552662 - RNA, 19 nt, Artificial Sequence
  Description of Artificial Sequence: Synthetic oligonucleotide
  Sense strand starting at position 249 of SEQ ID NO: 1888725
ucugaugcaggcuaugaau

SEQ ID NO: 2552663 - RNA, 19 nt, Artificial Sequence
  Description of Artificial Sequence: Synthetic oligonucleotide
  Antisense strand to SEQ ID NO: 2552662
auucauagccugcaucaga

SEQ ID NO: 2552664 - RNA, 19 nt, Artificial Sequence
  Description of Artificial Sequence: Synthetic oligonucleotide
  Sense strand starting at position 265 of SEQ ID NO: 1888725
aauagugacuccucugaga

SEQ ID NO: 2552665 - RNA, 19 nt, Artificial Sequence
  Description of Artificial Sequence: Synthetic oligonucleotide
  Antisense strand to SEQ ID NO: 2552664
ucucagaggagucacuauu

SEQ ID NO: 2552666 - RNA, 19 nt, Artificial Sequence
  Description of Artificial Sequence: Synthetic oligonucleotide
  Sense strand starting at position 267 of SEQ ID NO: 1888725
uagugacuccucugagaga

SEQ ID NO: 2552667 - RNA, 19 nt, Artificial Sequence
  Description of Artificial Sequence: Synthetic oligonucleotide
  Antisense strand to SEQ ID NO: 2552666
ucucucagaggagucacua

SEQ ID NO: 2552668 - RNA, 19 nt, Artificial Sequence
  Description of Artificial Sequence: Synthetic oligonucleotide
  Sense strand starting at position 293 of SEQ ID NO: 1888725
ggcagcaucuuaccagaga

SEQ ID NO: 2552669 - RNA, 19 nt, Artificial Sequence
  Description of Artificial Sequence: Synthetic oligonucleotide
  Antisense strand to SEQ ID NO: 2552668
ucucugguaagaugcugcc

SEQ ID NO: 2552670 - RNA, 19 nt, Artificial Sequence
  Description of Artificial Sequence: Synthetic oligonucleotide
  Sense strand starting at position 304 of SEQ ID NO: 1888725
accagagauuucugacuau

SEQ ID NO: 2552671 - RNA, 19 nt, Artificial Sequence
  Description of Artificial Sequence: Synthetic oligonucleotide
  Antisense strand to SEQ ID NO: 2552670
auagucagaaaucucuggu

SEQ ID NO: 2552672 - RNA, 19 nt, Artificial Sequence
  Description of Artificial Sequence: Synthetic oligonucleotide
  Sense strand starting at position 363 of SEQ ID NO: 1888725
auggucagauuaucaguaa

SEQ ID NO: 2552673 - RNA, 19 nt, Artificial Sequence
  Description of Artificial Sequence: Synthetic oligonucleotide
  Antisense strand to SEQ ID NO: 2552672
uuacugauaaucugaccau

SEQ ID NO: 2552674 - RNA, 19 nt, Artificial Sequence
  Description of Artificial Sequence: Synthetic oligonucleotide
  Sense strand starting at position 366 of SEQ ID NO: 1888725
gucagauuaucaguaaaga

SEQ ID NO: 2552675 - RNA, 19 nt, Artificial Sequence
  Description of Artificial Sequence: Synthetic oligonucleotide
  Antisense strand to SEQ ID NO: 2552674
ucuuuacugauaaucugac

SEQ ID NO: 2552676 - RNA, 19 nt, Artificial Sequence
  Description of Artificial Sequence: Synthetic oligonucleotide
  Sense strand starting at position 448 of SEQ ID NO: 1888725
gguuuacgcaucuucguua

SEQ ID NO: 2552677 - RNA, 19 nt, Artificial Sequence
  Description of Artificial Sequence: Synthetic oligonucleotide
  Antisense strand to SEQ ID NO: 2552676
uaacgaagaugcguaaacc

SEQ ID NO: 2552678 - RNA, 19 nt, Artificial Sequence
  Description of Artificial Sequence: Synthetic oligonucleotide
  Sense strand starting at position 460 of SEQ ID NO: 1888725
uucguuaagucauuuccca

SEQ ID NO: 2552679 - RNA, 19 nt, Artificial Sequence
  Description of Artificial Sequence: Synthetic oligonucleotide
  Antisense strand to SEQ ID NO: 2552678
ugggaaaugacuuaacgaa

SEQ ID NO: 2552680 - RNA, 19 nt, Artificial Sequence
  Description of Artificial Sequence: Synthetic oligonucleotide
  Sense strand starting at position 557 of SEQ ID NO: 1888725
agcauuuaacgcugaauau

SEQ ID NO: 2552681 - RNA, 19 nt, Artificial Sequence
  Description of Artificial Sequence: Synthetic oligonucleotide
  Antisense strand to SEQ ID NO: 2552680
auauucagcguuaaaugcu

SEQ ID NO: 2552682 - RNA, 19 nt, Artificial Sequence
  Description of Artificial Sequence: Synthetic oligonucleotide
  Sense strand starting at position 730 of SEQ ID NO: 1888725
agcauagucaggugggaau

SEQ ID NO: 2552683 - RNA, 19 nt, Artificial Sequence
  Description of Artificial Sequence: Synthetic oligonucleotide
  Antisense strand to SEQ ID NO: 2552682
auucccaccugacuaugcu

SEQ ID NO: 2552684 - RNA, 19 nt, Artificial Sequence
  Description of Artificial Sequence: Synthetic oligonucleotide
  Sense strand starting at position 732 of SEQ ID NO: 1888725
cauagucaggugggaauau

SEQ ID NO: 2552685 - RNA, 19 nt, Artificial Sequence
  Description of Artificial Sequence: Synthetic oligonucleotide
  Antisense strand to SEQ ID NO: 2552684
auauucccaccugacuaug

SEQ ID NO: 2552686 - RNA, 19 nt, Artificial Sequence
  Description of Artificial Sequence: Synthetic oligonucleotide
  Sense strand starting at position 827 of SEQ ID NO: 1888725
ugggaaagcuguucuacuu

SEQ ID NO: 2552687 - RNA, 19 nt, Artificial Sequence
  Description of Artificial Sequence: Synthetic oligonucleotide
  Antisense strand to SEQ ID NO: 2552686
aaguagaacagcuuuccca

SEQ ID NO: 2552688 - RNA, 19 nt, Artificial Sequence
  Description of Artificial Sequence: Synthetic oligonucleotide
  Sense strand starting at position 1131 of SEQ ID NO: 1888725
cgacuuaccugagccagaa

SEQ ID NO: 2552689 - RNA, 19 nt, Artificial Sequence
  Description of Artificial Sequence: Synthetic oligonucleotide
  Antisense strand to SEQ ID NO: 2552688
uucuggcucagguaagucg

SEQ ID NO: 2552690 - RNA, 19 nt, Artificial Sequence
  Description of Artificial Sequence: Synthetic oligonucleotide
  Sense strand starting at position 1239 of SEQ ID NO: 1888725
acgucauuucgucauucca

SEQ ID NO: 2552691 - RNA, 19 nt, Artificial Sequence
  Description of Artificial Sequence: Synthetic oligonucleotide
  Antisense strand to SEQ ID NO: 2552690
uggaaugacgaaaugacgu

SEQ ID NO: 2552692 - RNA, 19 nt, Artificial Sequence
  Description of Artificial Sequence: Synthetic oligonucleotide
  Sense strand starting at position 1505 of SEQ ID NO: 1888725
cgucucugcguuccaacua

SEQ ID NO: 2552693 - RNA, 19 nt, Artificial Sequence
  Description of Artificial Sequence: Synthetic oligonucleotide
  Antisense strand to SEQ ID NO: 2552692
uaguuggaacgcagagacg

SEQ ID NO: 2552694 - RNA, 19 nt, Artificial Sequence
  Description of Artificial Sequence: Synthetic oligonucleotide
  Sense strand starting at position 2169 of SEQ ID NO: 1888725
acuugaucccgggaagcca

SEQ ID NO: 2552695 - RNA, 19 nt, Artificial Sequence
  Description of Artificial Sequence: Synthetic oligonucleotide
  Antisense strand to SEQ ID NO: 2552694
uggcuucccgggaucaagu

SEQ ID NO: 2552696 - RNA, 19 nt, Artificial Sequence
  Description of Artificial Sequence: Synthetic oligonucleotide
  Sense strand starting at position 2245 of SEQ ID NO: 1888725
agauguccgcggcauuuau

SEQ ID NO: 2552697 - RNA, 19 nt, Artificial Sequence
  Description of Artificial Sequence: Synthetic oligonucleotide
  Antisense strand to SEQ ID NO: 2552696
auaaaugccgcggacaucu

SEQ ID NO: 2552698 - RNA, 19 nt, Artificial Sequence
  Description of Artificial Sequence: Synthetic oligonucleotide
  Sense strand starting at position 2305 of SEQ ID NO: 1888725
agugacuuucuccauguau

SEQ ID NO: 2552699 - RNA, 19 nt, Artificial Sequence
  Description of Artificial Sequence: Synthetic oligonucleotide
  Antisense strand to SEQ ID NO: 2552698
auacauggagaaagucacu

SEQ ID NO: 2552700 - RNA, 19 nt, Artificial Sequence
  Description of Artificial Sequence: Synthetic oligonucleotide
  Sense strand starting at position 2339 of SEQ ID NO: 1888725
accacaacucguuaagcaa

SEQ ID NO: 2552701 - RNA, 19 nt, Artificial Sequence
  Description of Artificial Sequence: Synthetic oligonucleotide
  Antisense strand to SEQ ID NO: 2552700
uugcuuaacgaguuguggu

SEQ ID NO: 2552702 - RNA, 19 nt, Artificial Sequence
  Description of Artificial Sequence: Synthetic oligonucleotide
  Sense strand starting at position 2394 of SEQ ID NO: 1888725
ggagcaauguuccuucuag

SEQ ID NO: 2552703 - RNA, 19 nt, Artificial Sequence
  Description of Artificial Sequence: Synthetic oligonucleotide
  Antisense strand to SEQ ID NO: 2552702
cuagaaggaacauugcucc

SEQ ID NO: 2552704 - RNA, 19 nt, Artificial Sequence
  Description of Artificial Sequence: Synthetic oligonucleotide
  Sense strand starting at position 2490 of SEQ ID NO: 1888725
cuuuaaaugcuagggagau

SEQ ID NO: 2552705 - RNA, 19 nt, Artificial Sequence
  Description of Artificial Sequence: Synthetic oligonucleotide
  Antisense strand to SEQ ID NO: 2552704
aucucccuagcauuuaaag

SEQ ID NO: 2552706 - RNA, 19 nt, Artificial Sequence
  Description of Artificial Sequence: Synthetic oligonucleotide
  Sense strand starting at position 2527 of SEQ ID NO: 1888725
ccucuacuuccugaugugu

SEQ ID NO: 2552707 - RNA, 19 nt, Artificial Sequence
  Description of Artificial Sequence: Synthetic oligonucleotide
  Antisense strand to SEQ ID NO: 2552706
acacaucaggaaguagagg

SEQ ID NO: 2552708 - RNA, 19 nt, Artificial Sequence
  Description of Artificial Sequence: Synthetic oligonucleotide
  Sense strand starting at position 2727 of SEQ ID NO: 1888725
ccagaaauuucugaacgga

SEQ ID NO: 2552709 - RNA, 19 nt, Artificial Sequence
  Description of Artificial Sequence: Synthetic oligonucleotide
  Antisense strand to SEQ ID NO: 2552708
uccguucagaaauuucugg

SEQ ID NO: 2552710 - RNA, 19 nt, Artificial Sequence
  Description of Artificial Sequence: Synthetic oligonucleotide
  Sense strand starting at position 2877 of SEQ ID NO: 1888725
ucaaguuuagauggcacaa

SEQ ID NO: 2552711 - RNA, 19 nt, Artificial Sequence
  Description of Artificial Sequence: Synthetic oligonucleotide
  Antisense strand to SEQ ID NO: 2552710
uugugccaucuaaacuuga

SEQ ID NO: 2552712 - RNA, 19 nt, Artificial Sequence
  Description of Artificial Sequence: Synthetic oligonucleotide
  Sense strand starting at position 2971 of SEQ ID NO: 1888725
uucuaauuagcaggaguau

SEQ ID NO: 2552713 - RNA, 19 nt, Artificial Sequence
  Description of Artificial Sequence: Synthetic oligonucleotide
  Antisense strand to SEQ ID NO: 2552712
auacuccugcuaauuagaa

SEQ ID NO: 2552714 - RNA, 19 nt, Artificial Sequence
  Description of Artificial Sequence: Synthetic oligonucleotide
  Sense strand starting at position 2972 of SEQ ID NO: 1888725
ucuaauuagcaggaguauu

SEQ ID NO: 2552715 - RNA, 19 nt, Artificial Sequence
  Description of Artificial Sequence: Synthetic oligonucleotide
  Antisense strand to SEQ ID NO: 2552714
aauacuccugcuaauuaga

SEQ ID NO: 2552716 - RNA, 19 nt, Artificial Sequence
  Description of Artificial Sequence: Synthetic oligonucleotide
  Sense strand starting at position 3148 of SEQ ID NO: 1888725
auaugccaguaaucaagau

SEQ ID NO: 2552717 - RNA, 19 nt, Artificial Sequence
  Description of Artificial Sequence: Synthetic oligonucleotide
  Antisense strand to SEQ ID NO: 2552716
aucuugauuacuggcauau

SEQ ID NO: 2552718 - RNA, 19 nt, Artificial Sequence
  Description of Artificial Sequence: Synthetic oligonucleotide
  Sense strand starting at position 3423 of SEQ ID NO: 1888725
uguaaauuacugcauugau

SEQ ID NO: 2552719 - RNA, 19 nt, Artificial Sequence
  Description of Artificial Sequence: Synthetic oligonucleotide
  Antisense strand to SEQ ID NO: 2552718
aucaaugcaguaauuuaca

SEQ ID NO: 2552720 - RNA, 19 nt, Artificial Sequence
  Description of Artificial Sequence: Synthetic oligonucleotide
  Sense strand starting at position 3494 of SEQ ID NO: 1888725
ggcaacacuguauaaagua

SEQ ID NO: 2552721 - RNA, 19 nt, Artificial Sequence
  Description of Artificial Sequence: Synthetic oligonucleotide
  Antisense strand to SEQ ID NO: 2552720
uacuuuauacaguguugcc

SEQ ID NO: 2552722 - RNA, 19 nt, Artificial Sequence
  Description of Artificial Sequence: Synthetic oligonucleotide
  Sense strand starting at position 3789 of SEQ ID NO: 1888725
cccaguuccucaucaugau

SEQ ID NO: 2552723 - RNA, 19 nt, Artificial Sequence
  Description of Artificial Sequence: Synthetic oligonucleotide
  Antisense strand to SEQ ID NO: 2552722
aucaugaugaggaacuggg

SEQ ID NO: 2552724 - RNA, 19 nt, Artificial Sequence
  Description of Artificial Sequence: Synthetic oligonucleotide
  Sense strand starting at position 3823 of SEQ ID NO: 1888725
gugggaaauaagugucaua

SEQ ID NO: 2552725 - RNA, 19 nt, Artificial Sequence
  Description of Artificial Sequence: Synthetic oligonucleotide
  Antisense strand to SEQ ID NO: 2552724
uaugacacuuauuucccac

SEQ ID NO: 2552726 - RNA, 19 nt, Artificial Sequence
  Description of Artificial Sequence: Synthetic oligonucleotide
  Sense strand starting at position 3866 of SEQ ID NO: 1888725
auggaaacuguuggcauaa

SEQ ID NO: 2552727 - RNA, 19 nt, Artificial Sequence
  Description of Artificial Sequence: Synthetic oligonucleotide
  Antisense strand to SEQ ID NO: 2552726
uuaugccaacaguuuccau

SEQ ID NO: 2552728 - RNA, 19 nt, Artificial Sequence
  Description of Artificial Sequence: Synthetic oligonucleotide
  Sense strand starting at position 3867 of SEQ ID NO: 1888725
uggaaacuguuggcauaau

SEQ ID NO: 2552729 - RNA, 19 nt, Artificial Sequence
  Description of Artificial Sequence: Synthetic oligonucleotide
  Antisense strand to SEQ ID NO: 2552728
auuaugccaacaguuucca

SEQ ID NO: 2552730 - RNA, 19 nt, Artificial Sequence
  Description of Artificial Sequence: Synthetic oligonucleotide
  Sense strand starting at position 3932 of SEQ ID NO: 1888725
uccuguucgacugaguaca

SEQ ID NO: 2552731 - RNA, 19 nt, Artificial Sequence
  Description of Artificial Sequence: Synthetic oligonucleotide
  Antisense strand to SEQ ID NO: 2552730
uguacucagucgaacagga

SEQ ID NO: 2552732 - RNA, 19 nt, Artificial Sequence
  Description of Artificial Sequence: Synthetic oligonucleotide
  Sense strand starting at position 24 of SEQ ID NO: 1888727
cugaauuccugccucugaa

SEQ ID NO: 2552733 - RNA, 19 nt, Artificial Sequence
  Description of Artificial Sequence: Synthetic oligonucleotide
  Antisense strand to SEQ ID NO: 2552732
uucagaggcaggaauucag

SEQ ID NO: 2552734 - RNA, 19 nt, Artificial Sequence
  Description of Artificial Sequence: Synthetic oligonucleotide
  Sense strand starting at position 163 of SEQ ID NO: 1888727
auuccuccuccauagaguu

SEQ ID NO: 2552735 - RNA, 19 nt, Artificial Sequence
  Description of Artificial Sequence: Synthetic oligonucleotide
  Antisense strand to SEQ ID NO: 2552734
aacucuauggaggaggaau

SEQ ID NO: 2552736 - RNA, 19 nt, Artificial Sequence
  Description of Artificial Sequence: Synthetic oligonucleotide
  Sense strand starting at position 179 of SEQ ID NO: 1888727
guuaaacccuaaucugaug

SEQ ID NO: 2552737 - RNA, 19 nt, Artificial Sequence
  Description of Artificial Sequence: Synthetic oligonucleotide
  Antisense strand to SEQ ID NO: 2552736
caucagauuaggguuuaac

SEQ ID NO: 2552738 - RNA, 19 nt, Artificial Sequence
  Description of Artificial Sequence: Synthetic oligonucleotide
  Sense strand starting at position 393 of SEQ ID NO: 1888727
cuguuaacauucuugagga

SEQ ID NO: 2552739 - RNA, 19 nt, Artificial Sequence
  Description of Artificial Sequence: Synthetic oligonucleotide
  Antisense strand to SEQ ID NO: 2552738
uccucaagaauguuaacag

SEQ ID NO: 2552740 - RNA, 19 nt, Artificial Sequence
  Description of Artificial Sequence: Synthetic oligonucleotide
  Sense strand starting at position 567 of SEQ ID NO: 1888727
ggaagcuuucucuacuaca

SEQ ID NO: 2552741 - RNA, 19 nt, Artificial Sequence
  Description of Artificial Sequence: Synthetic oligonucleotide
  Antisense strand to SEQ ID NO: 2552740
uguaguagagaaagcuucc

SEQ ID NO: 2552742 - RNA, 19 nt, Artificial Sequence
  Description of Artificial Sequence: Synthetic oligonucleotide
  Sense strand starting at position 690 of SEQ ID NO: 1888727
acacauaguuuccuagaag

SEQ ID NO: 2552743 - RNA, 19 nt, Artificial Sequence
  Description of Artificial Sequence: Synthetic oligonucleotide
  Antisense strand to SEQ ID NO: 2552742
cuucuaggaaacuaugugu

SEQ ID NO: 2552744 - RNA, 19 nt, Artificial Sequence
  Description of Artificial Sequence: Synthetic oligonucleotide
  Sense strand starting at position 693 of SEQ ID NO: 1888727
cauaguuuccuagaaggua

SEQ ID NO: 2552745 - RNA, 19 nt, Artificial Sequence
  Description of Artificial Sequence: Synthetic oligonucleotide
  Antisense strand to SEQ ID NO: 2552744
uaccuucuaggaaacuaug

SEQ ID NO: 2552746 - RNA, 19 nt, Artificial Sequence
  Description of Artificial Sequence: Synthetic oligonucleotide
  Sense strand starting at position 705 of SEQ ID NO: 1888727
gaagguauuuacugauuuc

SEQ ID NO: 2552747 - RNA, 19 nt, Artificial Sequence
  Description of Artificial Sequence: Synthetic oligonucleotide
  Antisense strand to SEQ ID NO: 2552746
gaaaucaguaaauaccuuc

SEQ ID NO: 2552748 - RNA, 19 nt, Artificial Sequence
  Description of Artificial Sequence: Synthetic oligonucleotide
  Sense strand starting at position 781 of SEQ ID NO: 1888727
ugcgcagaugucuuucuca

SEQ ID NO: 2552749 - RNA, 19 nt, Artificial Sequence
  Description of Artificial Sequence: Synthetic oligonucleotide
  Antisense strand to SEQ ID NO: 2552748
ugagaaagacaucugcgca

SEQ ID NO: 2552750 - RNA, 19 nt, Artificial Sequence
  Description of Artificial Sequence: Synthetic oligonucleotide
  Sense strand starting at position 913 of SEQ ID NO: 1888727
aguaaugagguauguaaca

SEQ ID NO: 2552751 - RNA, 19 nt, Artificial Sequence
  Description of Artificial Sequence: Synthetic oligonucleotide
  Antisense strand to SEQ ID NO: 2552750
uguuacauaccucauuacu

SEQ ID NO: 2552752 - RNA, 19 nt, Artificial Sequence
  Description of Artificial Sequence: Synthetic oligonucleotide
  Sense strand starting at position 920 of SEQ ID NO: 1888727
agguauguaacacgaccaa

SEQ ID NO: 2552753 - RNA, 19 nt, Artificial Sequence
  Description of Artificial Sequence: Synthetic oligonucleotide
  Antisense strand to SEQ ID NO: 2552752
uuggucguguuacauaccu

SEQ ID NO: 2552754 - RNA, 19 nt, Artificial Sequence
  Description of Artificial Sequence: Synthetic oligonucleotide
  Sense strand starting at position 970 of SEQ ID NO: 1888727
auagcauaacucgaaucua

SEQ ID NO: 2552755 - RNA, 19 nt, Artificial Sequence
  Description of Artificial Sequence: Synthetic oligonucleotide
  Antisense strand to SEQ ID NO: 2552754
uagauucgaguuaugcuau

SEQ ID NO: 2552756 - RNA, 19 nt, Artificial Sequence
  Description of Artificial Sequence: Synthetic oligonucleotide
  Sense strand starting at position 979 of SEQ ID NO: 1888727
cucgaaucuaagcagugaa

SEQ ID NO: 2552757 - RNA, 19 nt, Artificial Sequence
  Description of Artificial Sequence: Synthetic oligonucleotide
  Antisense strand to SEQ ID NO: 2552756
uucacugcuuagauucgag

SEQ ID NO: 2552758 - RNA, 19 nt, Artificial Sequence
  Description of Artificial Sequence: Synthetic oligonucleotide
  Sense strand starting at position 1272 of SEQ ID NO: 1888727
accgaauugcaagauuaac

SEQ ID NO: 2552759 - RNA, 19 nt, Artificial Sequence
  Description of Artificial Sequence: Synthetic oligonucleotide
  Antisense strand to SEQ ID NO: 2552758
guuaaucuugcaauucggu

SEQ ID NO: 2552760 - RNA, 19 nt, Artificial Sequence
  Description of Artificial Sequence: Synthetic oligonucleotide
  Sense strand starting at position 2624 of SEQ ID NO: 1888727
gggacacuuugcucugaca

SEQ ID NO: 2552761 - RNA, 19 nt, Artificial Sequence
  Description of Artificial Sequence: Synthetic oligonucleotide
  Antisense strand to SEQ ID NO: 2552760
ugucagagcaaaguguccc

SEQ ID NO: 2552762 - RNA, 19 nt, Artificial Sequence
  Description of Artificial Sequence: Synthetic oligonucleotide
  Sense strand starting at position 2626 of SEQ ID NO: 1888727
gacacuuugcucugacaga

SEQ ID NO: 2552763 - RNA, 19 nt, Artificial Sequence
  Description of Artificial Sequence: Synthetic oligonucleotide
  Antisense strand to SEQ ID NO: 2552762
ucugucagagcaaaguguc

SEQ ID NO: 2552764 - RNA, 19 nt, Artificial Sequence
  Description of Artificial Sequence: Synthetic oligonucleotide
  Sense strand starting at position 2719 of SEQ ID NO: 1888727
cggaaagacucuucuaaag

SEQ ID NO: 2552765 - RNA, 19 nt, Artificial Sequence
  Description of Artificial Sequence: Synthetic oligonucleotide
  Antisense strand to SEQ ID NO: 2552764
cuuuagaagagucuuuccg

SEQ ID NO: 2552766 - RNA, 19 nt, Artificial Sequence
  Description of Artificial Sequence: Synthetic oligonucleotide
  Sense strand starting at position 2854 of SEQ ID NO: 1888727
uaauguuuaccugauguga

SEQ ID NO: 2552767 - RNA, 19 nt, Artificial Sequence
  Description of Artificial Sequence: Synthetic oligonucleotide
  Antisense strand to SEQ ID NO: 2552766
ucacaucagguaaacauua

SEQ ID NO: 2552768 - RNA, 19 nt, Artificial Sequence
  Description of Artificial Sequence: Synthetic oligonucleotide
  Sense strand starting at position 3031 of SEQ ID NO: 1888727
aguguuuagguccacagau

SEQ ID NO: 2552769 - RNA, 19 nt, Artificial Sequence
  Description of Artificial Sequence: Synthetic oligonucleotide
  Antisense strand to SEQ ID NO: 2552768
aucuguggaccuaaacacu

SEQ ID NO: 2552770 - RNA, 19 nt, Artificial Sequence
  Description of Artificial Sequence: Synthetic oligonucleotide
  Sense strand starting at position 3271 of SEQ ID NO: 1888727
cauugaaguguagaagcau

SEQ ID NO: 2552771 - RNA, 19 nt, Artificial Sequence
  Description of Artificial Sequence: Synthetic oligonucleotide
  Antisense strand to SEQ ID NO: 2552770
augcuucuacacuucaaug

SEQ ID NO: 2552772 - RNA, 19 nt, Artificial Sequence
  Description of Artificial Sequence: Synthetic oligonucleotide
  Sense strand starting at position 3562 of SEQ ID NO: 1888727
gcuuuccuuuaccugagaa

SEQ ID NO: 2552773 - RNA, 19 nt, Artificial Sequence
  Description of Artificial Sequence: Synthetic oligonucleotide
  Antisense strand to SEQ ID NO: 2552772
uucucagguaaaggaaagc

SEQ ID NO: 2552774 - RNA, 19 nt, Artificial Sequence
  Description of Artificial Sequence: Synthetic oligonucleotide
  Sense strand starting at position 3593 of SEQ ID NO: 1888727
cccuucguccaugaaggau

SEQ ID NO: 2552775 - RNA, 19 nt, Artificial Sequence
  Description of Artificial Sequence: Synthetic oligonucleotide
  Antisense strand to SEQ ID NO: 2552774
auccuucauggacgaaggg

SEQ ID NO: 2552776 - RNA, 19 nt, Artificial Sequence
  Description of Artificial Sequence: Synthetic oligonucleotide
  Sense strand starting at position 3730 of SEQ ID NO: 1888727
gguguucuccuauaaucaa

SEQ ID NO: 2552777 - RNA, 19 nt, Artificial Sequence
  Description of Artificial Sequence: Synthetic oligonucleotide
  Antisense strand to SEQ ID NO: 2552776
uugauuauaggagaacacc

SEQ ID NO: 2552778 - RNA, 19 nt, Artificial Sequence
  Description of Artificial Sequence: Synthetic oligonucleotide
  Sense strand starting at position 3819 of SEQ ID NO: 1888727
gugugaaucgcuuuguggu

SEQ ID NO: 2552779 - RNA, 19 nt, Artificial Sequence
  Description of Artificial Sequence: Synthetic oligonucleotide
  Antisense strand to SEQ ID NO: 2552778
accacaaagcgauucacac

SEQ ID NO: 2552780 - RNA, 19 nt, Artificial Sequence
  Description of Artificial Sequence: Synthetic oligonucleotide
  Sense strand starting at position 3827 of SEQ ID NO: 1888727
cgcuuugugguugucuuau

SEQ ID NO: 2552781 - RNA, 19 nt, Artificial Sequence
  Description of Artificial Sequence: Synthetic oligonucleotide
  Antisense strand to SEQ ID NO: 2552780
auaagacaaccacaaagcg

SEQ ID NO: 2552782 - RNA, 19 nt, Artificial Sequence
  Description of Artificial Sequence: Synthetic oligonucleotide
  Sense strand starting at position 164 of SEQ ID NO: 1888728
auuccuccuccauagaguu

SEQ ID NO: 2552783 - RNA, 19 nt, Artificial Sequence
  Description of Artificial Sequence: Synthetic oligonucleotide
  Antisense strand to SEQ ID NO: 2552782
aacucuauggaggaggaau

SEQ ID NO: 2552784 - RNA, 19 nt, Artificial Sequence
  Description of Artificial Sequence: Synthetic oligonucleotide
  Sense strand starting at position 180 of SEQ ID NO: 1888728
guuaaacccuaaucugaug

SEQ ID NO: 2552785 - RNA, 19 nt, Artificial Sequence
  Description of Artificial Sequence: Synthetic oligonucleotide
  Antisense strand to SEQ ID NO: 2552784
caucagauuaggguuuaac

SEQ ID NO: 2552786 - RNA, 19 nt, Artificial Sequence
  Description of Artificial Sequence: Synthetic oligonucleotide
  Sense strand starting at position 394 of SEQ ID NO: 1888728
cuguuaacauucuugagga

SEQ ID NO: 2552787 - RNA, 19 nt, Artificial Sequence
  Description of Artificial Sequence: Synthetic oligonucleotide
  Antisense strand to SEQ ID NO: 2552786
uccucaagaauguuaacag

SEQ ID NO: 2552788 - RNA, 19 nt, Artificial Sequence
  Description of Artificial Sequence: Synthetic oligonucleotide
  Sense strand starting at position 568 of SEQ ID NO: 1888728
ggaagcuuucucuacuaca

SEQ ID NO: 2552789 - RNA, 19 nt, Artificial Sequence
  Description of Artificial Sequence: Synthetic oligonucleotide
  Antisense strand to SEQ ID NO: 2552788
uguaguagagaaagcuucc

SEQ ID NO: 2552790 - RNA, 19 nt, Artificial Sequence
  Description of Artificial Sequence: Synthetic oligonucleotide
  Sense strand starting at position 691 of SEQ ID NO: 1888728
acacauaguuuccuagaag

SEQ ID NO: 2552791 - RNA, 19 nt, Artificial Sequence
  Description of Artificial Sequence: Synthetic oligonucleotide
  Antisense strand to SEQ ID NO: 2552790
cuucuaggaaacuaugugu

SEQ ID NO: 2552792 - RNA, 19 nt, Artificial Sequence
  Description of Artificial Sequence: Synthetic oligonucleotide
  Sense strand starting at position 694 of SEQ ID NO: 1888728
cauaguuuccuagaaggua

SEQ ID NO: 2552793 - RNA, 19 nt, Artificial Sequence
  Description of Artificial Sequence: Synthetic oligonucleotide
  Antisense strand to SEQ ID NO: 2552792
uaccuucuaggaaacuaug

SEQ ID NO: 2552794 - RNA, 19 nt, Artificial Sequence
  Description of Artificial Sequence: Synthetic oligonucleotide
  Sense strand starting at position 2625 of SEQ ID NO: 1888728
gggacacuuugcucugaca

SEQ ID NO: 2552795 - RNA, 19 nt, Artificial Sequence
  Description of Artificial Sequence: Synthetic oligonucleotide
  Antisense strand to SEQ ID NO: 2552794
ugucagagcaaaguguccc

SEQ ID NO: 2552796 - RNA, 19 nt, Artificial Sequence
  Description of Artificial Sequence: Synthetic oligonucleotide
  Sense strand starting at position 2627 of SEQ ID NO: 1888728
gacacuuugcucugacaga

SEQ ID NO: 2552797 - RNA, 19 nt, Artificial Sequence
  Description of Artificial Sequence: Synthetic oligonucleotide
  Antisense strand to SEQ ID NO: 2552796
ucugucagagcaaaguguc

SEQ ID NO: 2552798 - RNA, 19 nt, Artificial Sequence
  Description of Artificial Sequence: Synthetic oligonucleotide
  Sense strand starting at position 2720 of SEQ ID NO: 1888728
cggaaagacucuucuaaag

SEQ ID NO: 2552799 - RNA, 19 nt, Artificial Sequence
  Description of Artificial Sequence: Synthetic oligonucleotide
  Antisense strand to SEQ ID NO: 2552798
cuuuagaagagucuuuccg

SEQ ID NO: 2552800 - RNA, 19 nt, Artificial Sequence
  Description of Artificial Sequence: Synthetic oligonucleotide
  Sense strand starting at position 3032 of SEQ ID NO: 1888728
aguguuuagguccacagau

SEQ ID NO: 2552801 - RNA, 19 nt, Artificial Sequence
  Description of Artificial Sequence: Synthetic oligonucleotide
  Antisense strand to SEQ ID NO: 2552800
aucuguggaccuaaacacu

SEQ ID NO: 2552802 - RNA, 19 nt, Artificial Sequence
  Description of Artificial Sequence: Synthetic oligonucleotide
  Sense strand starting at position 3272 of SEQ ID NO: 1888728
cauugaaguguagaagcau

SEQ ID NO: 2552803 - RNA, 19 nt, Artificial Sequence
  Description of Artificial Sequence: Synthetic oligonucleotide
  Antisense strand to SEQ ID NO: 2552802
augcuucuacacuucaaug

SEQ ID NO: 2552804 - RNA, 19 nt, Artificial Sequence
  Description of Artificial Sequence: Synthetic oligonucleotide
  Sense strand starting at position 3594 of SEQ ID NO: 1888728
cccuucguccaugaaggau

SEQ ID NO: 2552805 - RNA, 19 nt, Artificial Sequence
  Description of Artificial Sequence: Synthetic oligonucleotide
  Antisense strand to SEQ ID NO: 2552804
auccuucauggacgaaggg

SEQ ID NO: 2552806 - RNA, 19 nt, Artificial Sequence
  Description of Artificial Sequence: Synthetic oligonucleotide
  Sense strand starting at position 3731 of SEQ ID NO: 1888728
gguguucuccuauaaucaa

SEQ ID NO: 2552807 - RNA, 19 nt, Artificial Sequence
  Description of Artificial Sequence: Synthetic oligonucleotide
  Antisense strand to SEQ ID NO: 2552806
uugauuauaggagaacacc

SEQ ID NO: 2552808 - RNA, 19 nt, Artificial Sequence
  Description of Artificial Sequence: Synthetic oligonucleotide
  Sense strand starting at position 3820 of SEQ ID NO: 1888728
gugugaaucgcuuuguggu

SEQ ID NO: 2552809 - RNA, 19 nt, Artificial Sequence
  Description of Artificial Sequence: Synthetic oligonucleotide
  Antisense strand to SEQ ID NO: 2552808
accacaaagcgauucacac

SEQ ID NO: 2552810 - RNA, 19 nt, Artificial Sequence
  Description of Artificial Sequence: Synthetic oligonucleotide
  Sense strand starting at position 3828 of SEQ ID NO: 1888728
cgcuuugugguugucuuau

SEQ ID NO: 2552811 - RNA, 19 nt, Artificial Sequence
  Description of Artificial Sequence: Synthetic oligonucleotide
  Antisense strand to SEQ ID NO: 2552810
auaagacaaccacaaagcg

SEQ ID NO: 2552812 - RNA, 19 nt, Artificial Sequence
  Description of Artificial Sequence: Synthetic oligonucleotide
  Sense strand starting at position 24 of SEQ ID NO: 1888729
cugaauuccugccucugaa

SEQ ID NO: 2552813 - RNA, 19 nt, Artificial Sequence
  Description of Artificial Sequence: Synthetic oligonucleotide
  Antisense strand to SEQ ID NO: 2552812
uucagaggcaggaauucag

SEQ ID NO: 2552814 - RNA, 19 nt, Artificial Sequence
  Description of Artificial Sequence: Synthetic oligonucleotide
  Sense strand starting at position 163 of SEQ ID NO: 1888729
auuccuccuccauagaguu

SEQ ID NO: 2552815 - RNA, 19 nt, Artificial Sequence
  Description of Artificial Sequence: Synthetic oligonucleotide
  Antisense strand to SEQ ID NO: 2552814
aacucuauggaggaggaau

SEQ ID NO: 2552816 - RNA, 19 nt, Artificial Sequence
  Description of Artificial Sequence: Synthetic oligonucleotide
  Sense strand starting at position 179 of SEQ ID NO: 1888729
guuaaacccuaaucugaug

SEQ ID NO: 2552817 - RNA, 19 nt, Artificial Sequence
  Description of Artificial Sequence: Synthetic oligonucleotide
  Antisense strand to SEQ ID NO: 2552816
caucagauuaggguuuaac

SEQ ID NO: 2552818 - RNA, 19 nt, Artificial Sequence
  Description of Artificial Sequence: Synthetic oligonucleotide
  Sense strand starting at position 393 of SEQ ID NO: 1888729
cuguuaacauucuugagga

SEQ ID NO: 2552819 - RNA, 19 nt, Artificial Sequence
  Description of Artificial Sequence: Synthetic oligonucleotide
  Antisense strand to SEQ ID NO: 2552818
uccucaagaauguuaacag

SEQ ID NO: 2552820 - RNA, 19 nt, Artificial Sequence
  Description of Artificial Sequence: Synthetic oligonucleotide
  Sense strand starting at position 567 of SEQ ID NO: 1888729
ggaagcuuucucuacuaca

SEQ ID NO: 2552821 - RNA, 19 nt, Artificial Sequence
  Description of Artificial Sequence: Synthetic oligonucleotide
  Antisense strand to SEQ ID NO: 2552820
uguaguagagaaagcuucc

SEQ ID NO: 2552822 - RNA, 19 nt, Artificial Sequence
  Description of Artificial Sequence: Synthetic oligonucleotide
  Sense strand starting at position 690 of SEQ ID NO: 1888729
acacauaguuuccuagaag

SEQ ID NO: 2552823 - RNA, 19 nt, Artificial Sequence
  Description of Artificial Sequence: Synthetic oligonucleotide
  Antisense strand to SEQ ID NO: 2552822
cuucuaggaaacuaugugu

SEQ ID NO: 2552824 - RNA, 19 nt, Artificial Sequence
  Description of Artificial Sequence: Synthetic oligonucleotide
  Sense strand starting at position 693 of SEQ ID NO: 1888729
cauaguuuccuagaaggua

SEQ ID NO: 2552825 - RNA, 19 nt, Artificial Sequence
  Description of Artificial Sequence: Synthetic oligonucleotide
  Antisense strand to SEQ ID NO: 2552824
uaccuucuaggaaacuaug

SEQ ID NO: 2552826 - RNA, 19 nt, Artificial Sequence
  Description of Artificial Sequence: Synthetic oligonucleotide
  Sense strand starting at position 705 of SEQ ID NO: 1888729
gaagguauuuacugauuuc

SEQ ID NO: 2552827 - RNA, 19 nt, Artificial Sequence
  Description of Artificial Sequence: Synthetic oligonucleotide
  Antisense strand to SEQ ID NO: 2552826
gaaaucaguaaauaccuuc

SEQ ID NO: 2552828 - RNA, 19 nt, Artificial Sequence
  Description of Artificial Sequence: Synthetic oligonucleotide
  Sense strand starting at position 781 of SEQ ID NO: 1888729
ugcgcagaugucuuucuca

SEQ ID NO: 2552829 - RNA, 19 nt, Artificial Sequence
  Description of Artificial Sequence: Synthetic oligonucleotide
  Antisense strand to SEQ ID NO: 2552828
ugagaaagacaucugcgca

SEQ ID NO: 2552830 - RNA, 19 nt, Artificial Sequence
  Description of Artificial Sequence: Synthetic oligonucleotide
  Sense strand starting at position 913 of SEQ ID NO: 1888729
aguaaugagguauguaaca

SEQ ID NO: 2552831 - RNA, 19 nt, Artificial Sequence
  Description of Artificial Sequence: Synthetic oligonucleotide
  Antisense strand to SEQ ID NO: 2552830
uguuacauaccucauuacu

SEQ ID NO: 2552832 - RNA, 19 nt, Artificial Sequence
  Description of Artificial Sequence: Synthetic oligonucleotide
  Sense strand starting at position 920 of SEQ ID NO: 1888729
agguauguaacacgaccaa

SEQ ID NO: 2552833 - RNA, 19 nt, Artificial Sequence
  Description of Artificial Sequence: Synthetic oligonucleotide
  Antisense strand to SEQ ID NO: 2552832
uuggucguguuacauaccu

SEQ ID NO: 2552834 - RNA, 19 nt, Artificial Sequence
  Description of Artificial Sequence: Synthetic oligonucleotide
  Sense strand starting at position 970 of SEQ ID NO: 1888729
auagcauaacucgaaucua

SEQ ID NO: 2552835 - RNA, 19 nt, Artificial Sequence
  Description of Artificial Sequence: Synthetic oligonucleotide
  Antisense strand to SEQ ID NO: 2552834
uagauucgaguuaugcuau

SEQ ID NO: 2552836 - RNA, 19 nt, Artificial Sequence
  Description of Artificial Sequence: Synthetic oligonucleotide
  Sense strand starting at position 979 of SEQ ID NO: 1888729
cucgaaucuaagcagugaa

SEQ ID NO: 2552837 - RNA, 19 nt, Artificial Sequence
  Description of Artificial Sequence: Synthetic oligonucleotide
  Antisense strand to SEQ ID NO: 2552836
uucacugcuuagauucgag

SEQ ID NO: 2552838 - RNA, 19 nt, Artificial Sequence
  Description of Artificial Sequence: Synthetic oligonucleotide
  Sense strand starting at position 1272 of SEQ ID NO: 1888729
accgaauugcaagauuaac

SEQ ID NO: 2552839 - RNA, 19 nt, Artificial Sequence
  Description of Artificial Sequence: Synthetic oligonucleotide
  Antisense strand to SEQ ID NO: 2552838
guuaaucuugcaauucggu

SEQ ID NO: 2552840 - RNA, 19 nt, Artificial Sequence
  Description of Artificial Sequence: Synthetic oligonucleotide
  Sense strand starting at position 2624 of SEQ ID NO: 1888729
gggacacuuugcucugaca

SEQ ID NO: 2552841 - RNA, 19 nt, Artificial Sequence
  Description of Artificial Sequence: Synthetic oligonucleotide
  Antisense strand to SEQ ID NO: 2552840
ugucagagcaaaguguccc

SEQ ID NO: 2552842 - RNA, 19 nt, Artificial Sequence
  Description of Artificial Sequence: Synthetic oligonucleotide
  Sense strand starting at position 2626 of SEQ ID NO: 1888729
gacacuuugcucugacaga

SEQ ID NO: 2552843 - RNA, 19 nt, Artificial Sequence
  Description of Artificial Sequence: Synthetic oligonucleotide
  Antisense strand to SEQ ID NO: 2552842
ucugucagagcaaaguguc

SEQ ID NO: 2552844 - RNA, 19 nt, Artificial Sequence
  Description of Artificial Sequence: Synthetic oligonucleotide
  Sense strand starting at position 2719 of SEQ ID NO: 1888729
cggaaagacucuucuaaag

SEQ ID NO: 2552845 - RNA, 19 nt, Artificial Sequence
  Description of Artificial Sequence: Synthetic oligonucleotide
  Antisense strand to SEQ ID NO: 2552844
cuuuagaagagucuuuccg

SEQ ID NO: 2552846 - RNA, 19 nt, Artificial Sequence
  Description of Artificial Sequence: Synthetic oligonucleotide
  Sense strand starting at position 2854 of SEQ ID NO: 1888729
uaauguuuaccugauguga

SEQ ID NO: 2552847 - RNA, 19 nt, Artificial Sequence
  Description of Artificial Sequence: Synthetic oligonucleotide
  Antisense strand to SEQ ID NO: 2552846
ucacaucagguaaacauua

SEQ ID NO: 2552848 - RNA, 19 nt, Artificial Sequence
  Description of Artificial Sequence: Synthetic oligonucleotide
  Sense strand starting at position 3031 of SEQ ID NO: 1888729
aguguuuagguccacagau

SEQ ID NO: 2552849 - RNA, 19 nt, Artificial Sequence
  Description of Artificial Sequence: Synthetic oligonucleotide
  Antisense strand to SEQ ID NO: 2552848
aucuguggaccuaaacacu

SEQ ID NO: 2552850 - RNA, 19 nt, Artificial Sequence
  Description of Artificial Sequence: Synthetic oligonucleotide
  Sense strand starting at position 3271 of SEQ ID NO: 1888729
cauugaaguguagaagcau

SEQ ID NO: 2552851 - RNA, 19 nt, Artificial Sequence
  Description of Artificial Sequence: Synthetic oligonucleotide
  Antisense strand to SEQ ID NO: 2552850
augcuucuacacuucaaug

SEQ ID NO: 2552852 - RNA, 19 nt, Artificial Sequence
  Description of Artificial Sequence: Synthetic oligonucleotide
  Sense strand starting at position 3562 of SEQ ID NO: 1888729
gcuuuccuuuaccugagaa

SEQ ID NO: 2552853 - RNA, 19 nt, Artificial Sequence
  Description of Artificial Sequence: Synthetic oligonucleotide
  Antisense strand to SEQ ID NO: 2552852
uucucagguaaaggaaagc

SEQ ID NO: 2552854 - RNA, 19 nt, Artificial Sequence
  Description of Artificial Sequence: Synthetic oligonucleotide
  Sense strand starting at position 3593 of SEQ ID NO: 1888729
cccuucguccaugaaggau

SEQ ID NO: 2552855 - RNA, 19 nt, Artificial Sequence
  Description of Artificial Sequence: Synthetic oligonucleotide
  Antisense strand to SEQ ID NO: 2552854
auccuucauggacgaaggg

SEQ ID NO: 2552856 - RNA, 19 nt, Artificial Sequence
  Description of Artificial Sequence: Synthetic oligonucleotide
  Sense strand starting at position 3730 of SEQ ID NO: 1888729
gguguucuccuauaaucaa

SEQ ID NO: 2552857 - RNA, 19 nt, Artificial Sequence
  Description of Artificial Sequence: Synthetic oligonucleotide
  Antisense strand to SEQ ID NO: 2552856
uugauuauaggagaacacc

SEQ ID NO: 2552858 - RNA, 19 nt, Artificial Sequence
  Description of Artificial Sequence: Synthetic oligonucleotide
  Sense strand starting at position 3819 of SEQ ID NO: 1888729
gugugaaucgcuuuguggu

SEQ ID NO: 2552859 - RNA, 19 nt, Artificial Sequence
  Description of Artificial Sequence: Synthetic oligonucleotide
  Antisense strand to SEQ ID NO: 2552858
accacaaagcgauucacac

SEQ ID NO: 2552860 - RNA, 19 nt, Artificial Sequence
  Description of Artificial Sequence: Synthetic oligonucleotide
  Sense strand starting at position 3827 of SEQ ID NO: 1888729
cgcuuugugguugucuuau

SEQ ID NO: 2552861 - RNA, 19 nt, Artificial Sequence
  Description of Artificial Sequence: Synthetic oligonucleotide
  Antisense strand to SEQ ID NO: 2552860
auaagacaaccacaaagcg

SEQ ID NO: 2552862 - RNA, 19 nt, Artificial Sequence
  Description of Artificial Sequence: Synthetic oligonucleotide
  Sense strand starting at position 164 of SEQ ID NO: 1888730
auuccuccuccauagaguu

SEQ ID NO: 2552863 - RNA, 19 nt, Artificial Sequence
  Description of Artificial Sequence: Synthetic oligonucleotide
  Antisense strand to SEQ ID NO: 2552862
aacucuauggaggaggaau

SEQ ID NO: 2552864 - RNA, 19 nt, Artificial Sequence
  Description of Artificial Sequence: Synthetic oligonucleotide
  Sense strand starting at position 180 of SEQ ID NO: 1888730
guuaaacccuaaucugaug

SEQ ID NO: 2552865 - RNA, 19 nt, Artificial Sequence
  Description of Artificial Sequence: Synthetic oligonucleotide
  Antisense strand to SEQ ID NO: 2552864
caucagauuaggguuuaac

SEQ ID NO: 2552866 - RNA, 19 nt, Artificial Sequence
  Description of Artificial Sequence: Synthetic oligonucleotide
  Sense strand starting at position 394 of SEQ ID NO: 1888730
cuguuaacauucuugagga

SEQ ID NO: 2552867 - RNA, 19 nt, Artificial Sequence
  Description of Artificial Sequence: Synthetic oligonucleotide
  Antisense strand to SEQ ID NO: 2552866
uccucaagaauguuaacag

SEQ ID NO: 2552868 - RNA, 19 nt, Artificial Sequence
  Description of Artificial Sequence: Synthetic oligonucleotide
  Sense strand starting at position 568 of SEQ ID NO: 1888730
ggaagcuuucucuacuaca

SEQ ID NO: 2552869 - RNA, 19 nt, Artificial Sequence
  Description of Artificial Sequence: Synthetic oligonucleotide
  Antisense strand to SEQ ID NO: 2552868
uguaguagagaaagcuucc

SEQ ID NO: 2552870 - RNA, 19 nt, Artificial Sequence
  Description of Artificial Sequence: Synthetic oligonucleotide
  Sense strand starting at position 691 of SEQ ID NO: 1888730
acacauaguuuccuagaag

SEQ ID NO: 2552871 - RNA, 19 nt, Artificial Sequence
  Description of Artificial Sequence: Synthetic oligonucleotide
  Antisense strand to SEQ ID NO: 2552870
cuucuaggaaacuaugugu

SEQ ID NO: 2552872 - RNA, 19 nt, Artificial Sequence
  Description of Artificial Sequence: Synthetic oligonucleotide
  Sense strand starting at position 694 of SEQ ID NO: 1888730
cauaguuuccuagaaggua

SEQ ID NO: 2552873 - RNA, 19 nt, Artificial Sequence
  Description of Artificial Sequence: Synthetic oligonucleotide
  Antisense strand to SEQ ID NO: 2552872
uaccuucuaggaaacuaug

SEQ ID NO: 2552874 - RNA, 19 nt, Artificial Sequence
  Description of Artificial Sequence: Synthetic oligonucleotide
  Sense strand starting at position 2625 of SEQ ID NO: 1888730
gggacacuuugcucugaca

SEQ ID NO: 2552875 - RNA, 19 nt, Artificial Sequence
  Description of Artificial Sequence: Synthetic oligonucleotide
  Antisense strand to SEQ ID NO: 2552874
ugucagagcaaaguguccc

SEQ ID NO: 2552876 - RNA, 19 nt, Artificial Sequence
  Description of Artificial Sequence: Synthetic oligonucleotide
  Sense strand starting at position 2627 of SEQ ID NO: 1888730
gacacuuugcucugacaga

SEQ ID NO: 2552877 - RNA, 19 nt, Artificial Sequence
  Description of Artificial Sequence: Synthetic oligonucleotide
  Antisense strand to SEQ ID NO: 2552876
ucugucagagcaaaguguc

SEQ ID NO: 2552878 - RNA, 19 nt, Artificial Sequence
  Description of Artificial Sequence: Synthetic oligonucleotide
  Sense strand starting at position 2720 of SEQ ID NO: 1888730
cggaaagacucuucuaaag

SEQ ID NO: 2552879 - RNA, 19 nt, Artificial Sequence
  Description of Artificial Sequence: Synthetic oligonucleotide
  Antisense strand to SEQ ID NO: 2552878
cuuuagaagagucuuuccg

SEQ ID NO: 2552880 - RNA, 19 nt, Artificial Sequence
  Description of Artificial Sequence: Synthetic oligonucleotide
  Sense strand starting at position 3032 of SEQ ID NO: 1888730
aguguuuagguccacagau

SEQ ID NO: 2552881 - RNA, 19 nt, Artificial Sequence
  Description of Artificial Sequence: Synthetic oligonucleotide
  Antisense strand to SEQ ID NO: 2552880
aucuguggaccuaaacacu

SEQ ID NO: 2552882 - RNA, 19 nt, Artificial Sequence
  Description of Artificial Sequence: Synthetic oligonucleotide
  Sense strand starting at position 3272 of SEQ ID NO: 1888730
cauugaaguguagaagcau

SEQ ID NO: 2552883 - RNA, 19 nt, Artificial Sequence
  Description of Artificial Sequence: Synthetic oligonucleotide
  Antisense strand to SEQ ID NO: 2552882
augcuucuacacuucaaug

SEQ ID NO: 2552884 - RNA, 19 nt, Artificial Sequence
  Description of Artificial Sequence: Synthetic oligonucleotide
  Sense strand starting at position 3594 of SEQ ID NO: 1888730
cccuucguccaugaaggau

SEQ ID NO: 2552885 - RNA, 19 nt, Artificial Sequence
  Description of Artificial Sequence: Synthetic oligonucleotide
  Antisense strand to SEQ ID NO: 2552884
auccuucauggacgaaggg

SEQ ID NO: 2552886 - RNA, 19 nt, Artificial Sequence
  Description of Artificial Sequence: Synthetic oligonucleotide
  Sense strand starting at position 3731 of SEQ ID NO: 1888730
gguguucuccuauaaucaa

SEQ ID NO: 2552887 - RNA, 19 nt, Artificial Sequence
  Description of Artificial Sequence: Synthetic oligonucleotide
  Antisense strand to SEQ ID NO: 2552886
uugauuauaggagaacacc

SEQ ID NO: 2552888 - RNA, 19 nt, Artificial Sequence
  Description of Artificial Sequence: Synthetic oligonucleotide
  Sense strand starting at position 3820 of SEQ ID NO: 1888730
gugugaaucgcuuuguggu

SEQ ID NO: 2552889 - RNA, 19 nt, Artificial Sequence
  Description of Artificial Sequence: Synthetic oligonucleotide
  Antisense strand to SEQ ID NO: 2552888
accacaaagcgauucacac

SEQ ID NO: 2552890 - RNA, 19 nt, Artificial Sequence
  Description of Artificial Sequence: Synthetic oligonucleotide
  Sense strand starting at position 3828 of SEQ ID NO: 1888730
cgcuuugugguugucuuau

SEQ ID NO: 2552891 - RNA, 19 nt, Artificial Sequence
  Description of Artificial Sequence: Synthetic oligonucleotide
  Antisense strand to SEQ ID NO: 2552890
auaagacaaccacaaagcg

SEQ ID NO: 2552892 - RNA, 19 nt, Artificial Sequence
  Description of Artificial Sequence: Synthetic oligonucleotide
  Sense strand starting at position 54 of SEQ ID NO: 1888731
ugcaaauauugcuccaaag

SEQ ID NO: 2552893 - RNA, 19 nt, Artificial Sequence
  Description of Artificial Sequence: Synthetic oligonucleotide
  Antisense strand to SEQ ID NO: 2552892
cuuuggagcaauauuugca

SEQ ID NO: 2552894 - RNA, 19 nt, Artificial Sequence
  Description of Artificial Sequence: Synthetic oligonucleotide
  Sense strand starting at position 86 of SEQ ID NO: 1888731
ugaucaugcuaaucgaauu

SEQ ID NO: 2552895 - RNA, 19 nt, Artificial Sequence
  Description of Artificial Sequence: Synthetic oligonucleotide
  Antisense strand to SEQ ID NO: 2552894
aauucgauuagcaugauca

SEQ ID NO: 2552896 - RNA, 19 nt, Artificial Sequence
  Description of Artificial Sequence: Synthetic oligonucleotide
  Sense strand starting at position 110 of SEQ ID NO: 1888731
agcacagucuucuuauaua

SEQ ID NO: 2552897 - RNA, 19 nt, Artificial Sequence
  Description of Artificial Sequence: Synthetic oligonucleotide
  Antisense strand to SEQ ID NO: 2552896
uauauaagaagacugugcu

SEQ ID NO: 2552898 - RNA, 19 nt, Artificial Sequence
  Description of Artificial Sequence: Synthetic oligonucleotide
  Sense strand starting at position 161 of SEQ ID NO: 1888731
ugacaaguguuacucaaga

SEQ ID NO: 2552899 - RNA, 19 nt, Artificial Sequence
  Description of Artificial Sequence: Synthetic oligonucleotide
  Antisense strand to SEQ ID NO: 2552898
ucuugaguaacacuuguca

SEQ ID NO: 2552900 - RNA, 19 nt, Artificial Sequence
  Description of Artificial Sequence: Synthetic oligonucleotide
  Sense strand starting at position 186 of SEQ ID NO: 1888731
ucaacuuauuuauggaaga

SEQ ID NO: 2552901 - RNA, 19 nt, Artificial Sequence
  Description of Artificial Sequence: Synthetic oligonucleotide
  Antisense strand to SEQ ID NO: 2552900
ucuuccauaaauaaguuga

SEQ ID NO: 2552902 - RNA, 19 nt, Artificial Sequence
  Description of Artificial Sequence: Synthetic oligonucleotide
  Sense strand starting at position 307 of SEQ ID NO: 1888731
gauggugugagucaaguua

SEQ ID NO: 2552903 - RNA, 19 nt, Artificial Sequence
  Description of Artificial Sequence: Synthetic oligonucleotide
  Antisense strand to SEQ ID NO: 2552902
uaacuugacucacaccauc

SEQ ID NO: 2552904 - RNA, 19 nt, Artificial Sequence
  Description of Artificial Sequence: Synthetic oligonucleotide
  Sense strand starting at position 474 of SEQ ID NO: 1888731
guuaucuuguuaccagaaa

SEQ ID NO: 2552905 - RNA, 19 nt, Artificial Sequence
  Description of Artificial Sequence: Synthetic oligonucleotide
  Antisense strand to SEQ ID NO: 2552904
uuucugguaacaagauaac

SEQ ID NO: 2552906 - RNA, 19 nt, Artificial Sequence
  Description of Artificial Sequence: Synthetic oligonucleotide
  Sense strand starting at position 499 of SEQ ID NO: 1888731
gagguagauuuagaccaaa

SEQ ID NO: 2552907 - RNA, 19 nt, Artificial Sequence
  Description of Artificial Sequence: Synthetic oligonucleotide
  Antisense strand to SEQ ID NO: 2552906
uuuggucuaaaucuaccuc

SEQ ID NO: 2552908 - RNA, 19 nt, Artificial Sequence
  Description of Artificial Sequence: Synthetic oligonucleotide
  Sense strand starting at position 703 of SEQ ID NO: 1888731
ucaguuaugcauuacagau

SEQ ID NO: 2552909 - RNA, 19 nt, Artificial Sequence
  Description of Artificial Sequence: Synthetic oligonucleotide
  Antisense strand to SEQ ID NO: 2552908
aucuguaaugcauaacuga

SEQ ID NO: 2552910 - RNA, 19 nt, Artificial Sequence
  Description of Artificial Sequence: Synthetic oligonucleotide
  Sense strand starting at position 713 of SEQ ID NO: 1888731
auuacagaugaguaagcuu

SEQ ID NO: 2552911 - RNA, 19 nt, Artificial Sequence
  Description of Artificial Sequence: Synthetic oligonucleotide
  Antisense strand to SEQ ID NO: 2552910
aagcuuacucaucuguaau

SEQ ID NO: 2552912 - RNA, 19 nt, Artificial Sequence
  Description of Artificial Sequence: Synthetic oligonucleotide
  Sense strand starting at position 786 of SEQ ID NO: 1888731
agaaauugauuugacucau

SEQ ID NO: 2552913 - RNA, 19 nt, Artificial Sequence
  Description of Artificial Sequence: Synthetic oligonucleotide
  Antisense strand to SEQ ID NO: 2552912
augagucaaaucaauuucu

SEQ ID NO: 2552914 - RNA, 19 nt, Artificial Sequence
  Description of Artificial Sequence: Synthetic oligonucleotide
  Sense strand starting at position 857 of SEQ ID NO: 1888731
uccuuuaaacuguagugau

SEQ ID NO: 2552915 - RNA, 19 nt, Artificial Sequence
  Description of Artificial Sequence: Synthetic oligonucleotide
  Antisense strand to SEQ ID NO: 2552914
aucacuacaguuuaaagga

SEQ ID NO: 2552916 - RNA, 19 nt, Artificial Sequence
  Description of Artificial Sequence: Synthetic oligonucleotide
  Sense strand starting at position 869 of SEQ ID NO: 1888731
uagugauaaguagaccuuu

SEQ ID NO: 2552917 - RNA, 19 nt, Artificial Sequence
  Description of Artificial Sequence: Synthetic oligonucleotide
  Antisense strand to SEQ ID NO: 2552916
aaaggucuacuuaucacua

SEQ ID NO: 2552918 - RNA, 19 nt, Artificial Sequence
  Description of Artificial Sequence: Synthetic oligonucleotide
  Sense strand starting at position 889 of SEQ ID NO: 1888731
agucaucuacuauguugau

SEQ ID NO: 2552919 - RNA, 19 nt, Artificial Sequence
  Description of Artificial Sequence: Synthetic oligonucleotide
  Antisense strand to SEQ ID NO: 2552918
aucaacauaguagaugacu

SEQ ID NO: 2552920 - RNA, 19 nt, Artificial Sequence
  Description of Artificial Sequence: Synthetic oligonucleotide
  Sense strand starting at position 988 of SEQ ID NO: 1888731
cucaguauggcuuacauaa

SEQ ID NO: 2552921 - RNA, 19 nt, Artificial Sequence
  Description of Artificial Sequence: Synthetic oligonucleotide
  Antisense strand to SEQ ID NO: 2552920
uuauguaagccauacugag

SEQ ID NO: 2552922 - RNA, 19 nt, Artificial Sequence
  Description of Artificial Sequence: Synthetic oligonucleotide
  Sense strand starting at position 1189 of SEQ ID NO: 1888731
uacaacauuuccguuguga

SEQ ID NO: 2552923 - RNA, 19 nt, Artificial Sequence
  Description of Artificial Sequence: Synthetic oligonucleotide
  Antisense strand to SEQ ID NO: 2552922
ucacaacggaaauguugua

SEQ ID NO: 2552924 - RNA, 19 nt, Artificial Sequence
  Description of Artificial Sequence: Synthetic oligonucleotide
  Sense strand starting at position 1237 of SEQ ID NO: 1888731
uuagacagcuugguucuaa

SEQ ID NO: 2552925 - RNA, 19 nt, Artificial Sequence
  Description of Artificial Sequence: Synthetic oligonucleotide
  Antisense strand to SEQ ID NO: 2552924
uuagaaccaagcugucuaa

SEQ ID NO: 2552926 - RNA, 19 nt, Artificial Sequence
  Description of Artificial Sequence: Synthetic oligonucleotide
  Sense strand starting at position 1238 of SEQ ID NO: 1888731
uagacagcuugguucuaaa

SEQ ID NO: 2552927 - RNA, 19 nt, Artificial Sequence
  Description of Artificial Sequence: Synthetic oligonucleotide
  Antisense strand to SEQ ID NO: 2552926
uuuagaaccaagcugucua

SEQ ID NO: 2552928 - RNA, 19 nt, Artificial Sequence
  Description of Artificial Sequence: Synthetic oligonucleotide
  Sense strand starting at position 1316 of SEQ ID NO: 1888731
ggaacuauaugaguuuccu

SEQ ID NO: 2552929 - RNA, 19 nt, Artificial Sequence
  Description of Artificial Sequence: Synthetic oligonucleotide
  Antisense strand to SEQ ID NO: 2552928
aggaaacucauauaguucc

SEQ ID NO: 2552930 - RNA, 19 nt, Artificial Sequence
  Description of Artificial Sequence: Synthetic oligonucleotide
  Sense strand starting at position 1320 of SEQ ID NO: 1888731
cuauaugaguuuccucaug

SEQ ID NO: 2552931 - RNA, 19 nt, Artificial Sequence
  Description of Artificial Sequence: Synthetic oligonucleotide
  Antisense strand to SEQ ID NO: 2552930
caugaggaaacucauauag

SEQ ID NO: 2552932 - RNA, 19 nt, Artificial Sequence
  Description of Artificial Sequence: Synthetic oligonucleotide
  Sense strand starting at position 1322 of SEQ ID NO: 1888731
auaugaguuuccucaugug

SEQ ID NO: 2552933 - RNA, 19 nt, Artificial Sequence
  Description of Artificial Sequence: Synthetic oligonucleotide
  Antisense strand to SEQ ID NO: 2552932
cacaugaggaaacucauau

SEQ ID NO: 2552934 - RNA, 19 nt, Artificial Sequence
  Description of Artificial Sequence: Synthetic oligonucleotide
  Sense strand starting at position 1362 of SEQ ID NO: 1888731
gcaaucaucuuaguuugga

SEQ ID NO: 2552935 - RNA, 19 nt, Artificial Sequence
  Description of Artificial Sequence: Synthetic oligonucleotide
  Antisense strand to SEQ ID NO: 2552934
uccaaacuaagaugauugc

SEQ ID NO: 2552936 - RNA, 19 nt, Artificial Sequence
  Description of Artificial Sequence: Synthetic oligonucleotide
  Sense strand starting at position 1605 of SEQ ID NO: 1888731
gagggcucgcgcucuaaau

SEQ ID NO: 2552937 - RNA, 19 nt, Artificial Sequence
  Description of Artificial Sequence: Synthetic oligonucleotide
  Antisense strand to SEQ ID NO: 2552936
auuuagagcgcgagcccuc

SEQ ID NO: 2552938 - RNA, 19 nt, Artificial Sequence
  Description of Artificial Sequence: Synthetic oligonucleotide
  Sense strand starting at position 2512 of SEQ ID NO: 1888731
cuucgugauccuuaaaguu

SEQ ID NO: 2552939 - RNA, 19 nt, Artificial Sequence
  Description of Artificial Sequence: Synthetic oligonucleotide
  Antisense strand to SEQ ID NO: 2552938
aacuuuaaggaucacgaag

SEQ ID NO: 2552940 - RNA, 19 nt, Artificial Sequence
  Description of Artificial Sequence: Synthetic oligonucleotide
  Sense strand starting at position 2525 of SEQ ID NO: 1888731
aaaguuguaggcuagacuu

SEQ ID NO: 2552941 - RNA, 19 nt, Artificial Sequence
  Description of Artificial Sequence: Synthetic oligonucleotide
  Antisense strand to SEQ ID NO: 2552940
aagucuagccuacaacuuu

SEQ ID NO: 2552942 - RNA, 19 nt, Artificial Sequence
  Description of Artificial Sequence: Synthetic oligonucleotide
  Sense strand starting at position 2527 of SEQ ID NO: 1888731
aguuguaggcuagacuuaa

SEQ ID NO: 2552943 - RNA, 19 nt, Artificial Sequence
  Description of Artificial Sequence: Synthetic oligonucleotide
  Antisense strand to SEQ ID NO: 2552942
uuaagucuagccuacaacu

SEQ ID NO: 2552944 - RNA, 19 nt, Artificial Sequence
  Description of Artificial Sequence: Synthetic oligonucleotide
  Sense strand starting at position 2537 of SEQ ID NO: 1888731
uagacuuaauagguaaagu

SEQ ID NO: 2552945 - RNA, 19 nt, Artificial Sequence
  Description of Artificial Sequence: Synthetic oligonucleotide
  Antisense strand to SEQ ID NO: 2552944
acuuuaccuauuaagucua

SEQ ID NO: 2552946 - RNA, 19 nt, Artificial Sequence
  Description of Artificial Sequence: Synthetic oligonucleotide
  Sense strand starting at position 2548 of SEQ ID NO: 1888731
gguaaaguuuaugugaaau

SEQ ID NO: 2552947 - RNA, 19 nt, Artificial Sequence
  Description of Artificial Sequence: Synthetic oligonucleotide
  Antisense strand to SEQ ID NO: 2552946
auuucacauaaacuuuacc

SEQ ID NO: 2552948 - RNA, 19 nt, Artificial Sequence
  Description of Artificial Sequence: Synthetic oligonucleotide
  Sense strand starting at position 2625 of SEQ ID NO: 1888731
agucuauaaugugcaagga

SEQ ID NO: 2552949 - RNA, 19 nt, Artificial Sequence
  Description of Artificial Sequence: Synthetic oligonucleotide
  Antisense strand to SEQ ID NO: 2552948
uccuugcacauuauagacu

SEQ ID NO: 2552950 - RNA, 19 nt, Artificial Sequence
  Description of Artificial Sequence: Synthetic oligonucleotide
  Sense strand starting at position 2696 of SEQ ID NO: 1888731
guuccaaaguuauuagaca

SEQ ID NO: 2552951 - RNA, 19 nt, Artificial Sequence
  Description of Artificial Sequence: Synthetic oligonucleotide
  Antisense strand to SEQ ID NO: 2552950
ugucuaauaacuuuggaac

SEQ ID NO: 2552952 - RNA, 19 nt, Artificial Sequence
  Description of Artificial Sequence: Synthetic oligonucleotide
  Sense strand starting at position 2707 of SEQ ID NO: 1888731
auuagacacuauggauuua

SEQ ID NO: 2552953 - RNA, 19 nt, Artificial Sequence
  Description of Artificial Sequence: Synthetic oligonucleotide
  Antisense strand to SEQ ID NO: 2552952
uaaauccauagugucuaau

SEQ ID NO: 2552954 - RNA, 19 nt, Artificial Sequence
  Description of Artificial Sequence: Synthetic oligonucleotide
  Sense strand starting at position 2744 of SEQ ID NO: 1888731
ugggaauugucgauucguu

SEQ ID NO: 2552955 - RNA, 19 nt, Artificial Sequence
  Description of Artificial Sequence: Synthetic oligonucleotide
  Antisense strand to SEQ ID NO: 2552954
aacgaaucgacaauuccca

SEQ ID NO: 2552956 - RNA, 19 nt, Artificial Sequence
  Description of Artificial Sequence: Synthetic oligonucleotide
  Sense strand starting at position 2903 of SEQ ID NO: 1888731
auaagcaucuaauuggaua

SEQ ID NO: 2552957 - RNA, 19 nt, Artificial Sequence
  Description of Artificial Sequence: Synthetic oligonucleotide
  Antisense strand to SEQ ID NO: 2552956
uauccaauuagaugcuuau

SEQ ID NO: 2552958 - RNA, 19 nt, Artificial Sequence
  Description of Artificial Sequence: Synthetic oligonucleotide
  Sense strand starting at position 3119 of SEQ ID NO: 1888731
cuguauaaagauugcuuua

SEQ ID NO: 2552959 - RNA, 19 nt, Artificial Sequence
  Description of Artificial Sequence: Synthetic oligonucleotide
  Antisense strand to SEQ ID NO: 2552958
uaaagcaaucuuuauacag

SEQ ID NO: 2552960 - RNA, 19 nt, Artificial Sequence
  Description of Artificial Sequence: Synthetic oligonucleotide
  Sense strand starting at position 3211 of SEQ ID NO: 1888731
uuugaucaguuucuauacu

SEQ ID NO: 2552961 - RNA, 19 nt, Artificial Sequence
  Description of Artificial Sequence: Synthetic oligonucleotide
  Antisense strand to SEQ ID NO: 2552960
aguauagaaacugaucaaa

SEQ ID NO: 2552962 - RNA, 19 nt, Artificial Sequence
  Description of Artificial Sequence: Synthetic oligonucleotide
  Sense strand starting at position 3411 of SEQ ID NO: 1888731
cuagacuuauauguagcua

SEQ ID NO: 2552963 - RNA, 19 nt, Artificial Sequence
  Description of Artificial Sequence: Synthetic oligonucleotide
  Antisense strand to SEQ ID NO: 2552962
uagcuacauauaagucuag

SEQ ID NO: 2552964 - RNA, 19 nt, Artificial Sequence
  Description of Artificial Sequence: Synthetic oligonucleotide
  Sense strand starting at position 3423 of SEQ ID NO: 1888731
guagcuaagcuauaagaau

SEQ ID NO: 2552965 - RNA, 19 nt, Artificial Sequence
  Description of Artificial Sequence: Synthetic oligonucleotide
  Antisense strand to SEQ ID NO: 2552964
auucuuauagcuuagcuac

SEQ ID NO: 2552966 - RNA, 19 nt, Artificial Sequence
  Description of Artificial Sequence: Synthetic oligonucleotide
  Sense strand starting at position 3555 of SEQ ID NO: 1888731
ggguauuuguuguugaugu

SEQ ID NO: 2552967 - RNA, 19 nt, Artificial Sequence
  Description of Artificial Sequence: Synthetic oligonucleotide
  Antisense strand to SEQ ID NO: 2552966
acaucaacaacaaauaccc

SEQ ID NO: 2552968 - RNA, 19 nt, Artificial Sequence
  Description of Artificial Sequence: Synthetic oligonucleotide
  Sense strand starting at position 3566 of SEQ ID NO: 1888731
guugauguccgccuuaagu

SEQ ID NO: 2552969 - RNA, 19 nt, Artificial Sequence
  Description of Artificial Sequence: Synthetic oligonucleotide
  Antisense strand to SEQ ID NO: 2552968
acuuaaggcggacaucaac

SEQ ID NO: 2552970 - RNA, 19 nt, Artificial Sequence
  Description of Artificial Sequence: Synthetic oligonucleotide
  Sense strand starting at position 3815 of SEQ ID NO: 1888731
acgaacaaaucuguuaaag

SEQ ID NO: 2552971 - RNA, 19 nt, Artificial Sequence
  Description of Artificial Sequence: Synthetic oligonucleotide
  Antisense strand to SEQ ID NO: 2552970
cuuuaacagauuuguucgu

SEQ ID NO: 2552972 - RNA, 19 nt, Artificial Sequence
  Description of Artificial Sequence: Synthetic oligonucleotide
  Sense strand starting at position 562 of SEQ ID NO: 1888733
ucaggcuucucaccuggau

SEQ ID NO: 2552973 - RNA, 19 nt, Artificial Sequence
  Description of Artificial Sequence: Synthetic oligonucleotide
  Antisense strand to SEQ ID NO: 2552972
auccaggugagaagccuga

SEQ ID NO: 2552974 - RNA, 19 nt, Artificial Sequence
  Description of Artificial Sequence: Synthetic oligonucleotide
  Sense strand starting at position 724 of SEQ ID NO: 1888733
guagguuguccagggcuga

SEQ ID NO: 2552975 - RNA, 19 nt, Artificial Sequence
  Description of Artificial Sequence: Synthetic oligonucleotide
  Antisense strand to SEQ ID NO: 2552974
ucagcccuggacaaccuac

SEQ ID NO: 2552976 - RNA, 19 nt, Artificial Sequence
  Description of Artificial Sequence: Synthetic oligonucleotide
  Sense strand starting at position 894 of SEQ ID NO: 1888733
caaccucuugccuguggua

SEQ ID NO: 2552977 - RNA, 19 nt, Artificial Sequence
  Description of Artificial Sequence: Synthetic oligonucleotide
  Antisense strand to SEQ ID NO: 2552976
uaccacaggcaagagguug

SEQ ID NO: 2552978 - RNA, 19 nt, Artificial Sequence
  Description of Artificial Sequence: Synthetic oligonucleotide
  Sense strand starting at position 896 of SEQ ID NO: 1888733
accucuugccugugguaca

SEQ ID NO: 2552979 - RNA, 19 nt, Artificial Sequence
  Description of Artificial Sequence: Synthetic oligonucleotide
  Antisense strand to SEQ ID NO: 2552978
uguaccacaggcaagaggu

SEQ ID NO: 2552980 - RNA, 19 nt, Artificial Sequence
  Description of Artificial Sequence: Synthetic oligonucleotide
  Sense strand starting at position 933 of SEQ ID NO: 1888733
agcuaucucugaucggguu

SEQ ID NO: 2552981 - RNA, 19 nt, Artificial Sequence
  Description of Artificial Sequence: Synthetic oligonucleotide
  Antisense strand to SEQ ID NO: 2552980
aacccgaucagagauagcu

SEQ ID NO: 2552982 - RNA, 19 nt, Artificial Sequence
  Description of Artificial Sequence: Synthetic oligonucleotide
  Sense strand starting at position 1113 of SEQ ID NO: 1888733
gcaaaucugucacccugaa

SEQ ID NO: 2552983 - RNA, 19 nt, Artificial Sequence
  Description of Artificial Sequence: Synthetic oligonucleotide
  Antisense strand to SEQ ID NO: 2552982
uucagggugacagauuugc

SEQ ID NO: 2552984 - RNA, 19 nt, Artificial Sequence
  Description of Artificial Sequence: Synthetic oligonucleotide
  Sense strand starting at position 1284 of SEQ ID NO: 1888733
gggucuguaucccuaggau

SEQ ID NO: 2552985 - RNA, 19 nt, Artificial Sequence
  Description of Artificial Sequence: Synthetic oligonucleotide
  Antisense strand to SEQ ID NO: 2552984
auccuagggauacagaccc

SEQ ID NO: 2552986 - RNA, 19 nt, Artificial Sequence
  Description of Artificial Sequence: Synthetic oligonucleotide
  Sense strand starting at position 2121 of SEQ ID NO: 1888733
acuggauucuuccuggaug

SEQ ID NO: 2552987 - RNA, 19 nt, Artificial Sequence
  Description of Artificial Sequence: Synthetic oligonucleotide
  Antisense strand to SEQ ID NO: 2552986
cauccaggaagaauccagu

SEQ ID NO: 2552988 - RNA, 19 nt, Artificial Sequence
  Description of Artificial Sequence: Synthetic oligonucleotide
  Sense strand starting at position 2405 of SEQ ID NO: 1888733
gugacauuauugccuaagu

SEQ ID NO: 2552989 - RNA, 19 nt, Artificial Sequence
  Description of Artificial Sequence: Synthetic oligonucleotide
  Antisense strand to SEQ ID NO: 2552988
acuuaggcaauaaugucac

SEQ ID NO: 2552990 - RNA, 19 nt, Artificial Sequence
  Description of Artificial Sequence: Synthetic oligonucleotide
  Sense strand starting at position 2406 of SEQ ID NO: 1888733
ugacauuauugccuaaguu

SEQ ID NO: 2552991 - RNA, 19 nt, Artificial Sequence
  Description of Artificial Sequence: Synthetic oligonucleotide
  Antisense strand to SEQ ID NO: 2552990
aacuuaggcaauaauguca

SEQ ID NO: 2552992 - RNA, 19 nt, Artificial Sequence
  Description of Artificial Sequence: Synthetic oligonucleotide
  Sense strand starting at position 2418 of SEQ ID NO: 1888733
cuaaguuuaccagggcuga

SEQ ID NO: 2552993 - RNA, 19 nt, Artificial Sequence
  Description of Artificial Sequence: Synthetic oligonucleotide
  Antisense strand to SEQ ID NO: 2552992
ucagcccugguaaacuuag

SEQ ID NO: 2552994 - RNA, 19 nt, Artificial Sequence
  Description of Artificial Sequence: Synthetic oligonucleotide
  Sense strand starting at position 2538 of SEQ ID NO: 1888733
ugaagugauuggcaggaga

SEQ ID NO: 2552995 - RNA, 19 nt, Artificial Sequence
  Description of Artificial Sequence: Synthetic oligonucleotide
  Antisense strand to SEQ ID NO: 2552994
ucuccugccaaucacuuca

SEQ ID NO: 2552996 - RNA, 19 nt, Artificial Sequence
  Description of Artificial Sequence: Synthetic oligonucleotide
  Sense strand starting at position 2540 of SEQ ID NO: 1888733
aagugauuggcaggagaua

SEQ ID NO: 2552997 - RNA, 19 nt, Artificial Sequence
  Description of Artificial Sequence: Synthetic oligonucleotide
  Antisense strand to SEQ ID NO: 2552996
uaucuccugccaaucacuu

SEQ ID NO: 2552998 - RNA, 19 nt, Artificial Sequence
  Description of Artificial Sequence: Synthetic oligonucleotide
  Sense strand starting at position 2553 of SEQ ID NO: 1888733
gagauacucuguuucugua

SEQ ID NO: 2552999 - RNA, 19 nt, Artificial Sequence
  Description of Artificial Sequence: Synthetic oligonucleotide
  Antisense strand to SEQ ID NO: 2552998
uacagaaacagaguaucuc

SEQ ID NO: 2553000 - RNA, 19 nt, Artificial Sequence
  Description of Artificial Sequence: Synthetic oligonucleotide
  Sense strand starting at position 2567 of SEQ ID NO: 1888733
cuguaacgucugugcauuu

SEQ ID NO: 2553001 - RNA, 19 nt, Artificial Sequence
  Description of Artificial Sequence: Synthetic oligonucleotide
  Antisense strand to SEQ ID NO: 2553000
aaaugcacagacguuacag

SEQ ID NO: 2553002 - RNA, 19 nt, Artificial Sequence
  Description of Artificial Sequence: Synthetic oligonucleotide
  Sense strand starting at position 2663 of SEQ ID NO: 1888733
cguauugaccucuggaaga

SEQ ID NO: 2553003 - RNA, 19 nt, Artificial Sequence
  Description of Artificial Sequence: Synthetic oligonucleotide
  Antisense strand to SEQ ID NO: 2553002
ucuuccagaggucaauacg

SEQ ID NO: 2553004 - RNA, 19 nt, Artificial Sequence
  Description of Artificial Sequence: Synthetic oligonucleotide
  Sense strand starting at position 2777 of SEQ ID NO: 1888733
cgguuuacauaucuuccaa

SEQ ID NO: 2553005 - RNA, 19 nt, Artificial Sequence
  Description of Artificial Sequence: Synthetic oligonucleotide
  Antisense strand to SEQ ID NO: 2553004
uuggaagauauguaaaccg

SEQ ID NO: 2553006 - RNA, 19 nt, Artificial Sequence
  Description of Artificial Sequence: Synthetic oligonucleotide
  Sense strand starting at position 2779 of SEQ ID NO: 1888733
guuuacauaucuuccaagu

SEQ ID NO: 2553007 - RNA, 19 nt, Artificial Sequence
  Description of Artificial Sequence: Synthetic oligonucleotide
  Antisense strand to SEQ ID NO: 2553006
acuuggaagauauguaaac

SEQ ID NO: 2553008 - RNA, 19 nt, Artificial Sequence
  Description of Artificial Sequence: Synthetic oligonucleotide
  Sense strand starting at position 2792 of SEQ ID NO: 1888733
ccaaguauauauguaggua

SEQ ID NO: 2553009 - RNA, 19 nt, Artificial Sequence
  Description of Artificial Sequence: Synthetic oligonucleotide
  Antisense strand to SEQ ID NO: 2553008
uaccuacauauauacuugg

SEQ ID NO: 2553010 - RNA, 19 nt, Artificial Sequence
  Description of Artificial Sequence: Synthetic oligonucleotide
  Sense strand starting at position 2796 of SEQ ID NO: 1888733
guauauauguagguagcga

SEQ ID NO: 2553011 - RNA, 19 nt, Artificial Sequence
  Description of Artificial Sequence: Synthetic oligonucleotide
  Antisense strand to SEQ ID NO: 2553010
ucgcuaccuacauauauac

SEQ ID NO: 2553012 - RNA, 19 nt, Artificial Sequence
  Description of Artificial Sequence: Synthetic oligonucleotide
  Sense strand starting at position 2797 of SEQ ID NO: 1888733
uauauauguagguagcgau

SEQ ID NO: 2553013 - RNA, 19 nt, Artificial Sequence
  Description of Artificial Sequence: Synthetic oligonucleotide
  Antisense strand to SEQ ID NO: 2553012
aucgcuaccuacauauaua

SEQ ID NO: 2553014 - RNA, 19 nt, Artificial Sequence
  Description of Artificial Sequence: Synthetic oligonucleotide
  Sense strand starting at position 2801 of SEQ ID NO: 1888733
uauguagguagcgauauau

SEQ ID NO: 2553015 - RNA, 19 nt, Artificial Sequence
  Description of Artificial Sequence: Synthetic oligonucleotide
  Antisense strand to SEQ ID NO: 2553014
auauaucgcuaccuacaua

SEQ ID NO: 2553016 - RNA, 19 nt, Artificial Sequence
  Description of Artificial Sequence: Synthetic oligonucleotide
  Sense strand starting at position 2901 of SEQ ID NO: 1888733
uuguguucuguugaaggaa

SEQ ID NO: 2553017 - RNA, 19 nt, Artificial Sequence
  Description of Artificial Sequence: Synthetic oligonucleotide
  Antisense strand to SEQ ID NO: 2553016
uuccuucaacagaacacaa

SEQ ID NO: 2553018 - RNA, 19 nt, Artificial Sequence
  Description of Artificial Sequence: Synthetic oligonucleotide
  Sense strand starting at position 3120 of SEQ ID NO: 1888733
uucuguuaucugccgucua

SEQ ID NO: 2553019 - RNA, 19 nt, Artificial Sequence
  Description of Artificial Sequence: Synthetic oligonucleotide
  Antisense strand to SEQ ID NO: 2553018
uagacggcagauaacagaa

SEQ ID NO: 2553020 - RNA, 19 nt, Artificial Sequence
  Description of Artificial Sequence: Synthetic oligonucleotide
  Sense strand starting at position 3364 of SEQ ID NO: 1888733
uguaaugucggcgacuaca

SEQ ID NO: 2553021 - RNA, 19 nt, Artificial Sequence
  Description of Artificial Sequence: Synthetic oligonucleotide
  Antisense strand to SEQ ID NO: 2553020
uguagucgccgacauuaca

SEQ ID NO: 2553022 - RNA, 19 nt, Artificial Sequence
  Description of Artificial Sequence: Synthetic oligonucleotide
  Sense strand starting at position 3499 of SEQ ID NO: 1888733
augucaguauacuucgaua

SEQ ID NO: 2553023 - RNA, 19 nt, Artificial Sequence
  Description of Artificial Sequence: Synthetic oligonucleotide
  Antisense strand to SEQ ID NO: 2553022
uaucgaaguauacugacau

SEQ ID NO: 2553024 - RNA, 19 nt, Artificial Sequence
  Description of Artificial Sequence: Synthetic oligonucleotide
  Sense strand starting at position 3501 of SEQ ID NO: 1888733
gucaguauacuucgauagu

SEQ ID NO: 2553025 - RNA, 19 nt, Artificial Sequence
  Description of Artificial Sequence: Synthetic oligonucleotide
  Antisense strand to SEQ ID NO: 2553024
acuaucgaaguauacugac

SEQ ID NO: 2553026 - RNA, 19 nt, Artificial Sequence
  Description of Artificial Sequence: Synthetic oligonucleotide
  Sense strand starting at position 3510 of SEQ ID NO: 1888733
cuucgauaguugccucuau

SEQ ID NO: 2553027 - RNA, 19 nt, Artificial Sequence
  Description of Artificial Sequence: Synthetic oligonucleotide
  Antisense strand to SEQ ID NO: 2553026
auagaggcaacuaucgaag

SEQ ID NO: 2553028 - RNA, 19 nt, Artificial Sequence
  Description of Artificial Sequence: Synthetic oligonucleotide
  Sense strand starting at position 3511 of SEQ ID NO: 1888733
uucgauaguugccucuaua

SEQ ID NO: 2553029 - RNA, 19 nt, Artificial Sequence
  Description of Artificial Sequence: Synthetic oligonucleotide
  Antisense strand to SEQ ID NO: 2553028
uauagaggcaacuaucgaa

SEQ ID NO: 2553030 - RNA, 19 nt, Artificial Sequence
  Description of Artificial Sequence: Synthetic oligonucleotide
  Sense strand starting at position 3514 of SEQ ID NO: 1888733
gauaguugccucuauaagc

SEQ ID NO: 2553031 - RNA, 19 nt, Artificial Sequence
  Description of Artificial Sequence: Synthetic oligonucleotide
  Antisense strand to SEQ ID NO: 2553030
gcuuauagaggcaacuauc

SEQ ID NO: 2553032 - RNA, 19 nt, Artificial Sequence
  Description of Artificial Sequence: Synthetic oligonucleotide
  Sense strand starting at position 3604 of SEQ ID NO: 1888733
gucuauuaauugcuguagu

SEQ ID NO: 2553033 - RNA, 19 nt, Artificial Sequence
  Description of Artificial Sequence: Synthetic oligonucleotide
  Antisense strand to SEQ ID NO: 2553032
acuacagcaauuaauagac

SEQ ID NO: 2553034 - RNA, 19 nt, Artificial Sequence
  Description of Artificial Sequence: Synthetic oligonucleotide
  Sense strand starting at position 3607 of SEQ ID NO: 1888733
uauuaauugcuguaguuag

SEQ ID NO: 2553035 - RNA, 19 nt, Artificial Sequence
  Description of Artificial Sequence: Synthetic oligonucleotide
  Antisense strand to SEQ ID NO: 2553034
cuaacuacagcaauuaaua

SEQ ID NO: 2553036 - RNA, 19 nt, Artificial Sequence
  Description of Artificial Sequence: Synthetic oligonucleotide
  Sense strand starting at position 3871 of SEQ ID NO: 1888733
ucucguuccugacuggaau

SEQ ID NO: 2553037 - RNA, 19 nt, Artificial Sequence
  Description of Artificial Sequence: Synthetic oligonucleotide
  Antisense strand to SEQ ID NO: 2553036
auuccagucaggaacgaga

SEQ ID NO: 2553038 - RNA, 19 nt, Artificial Sequence
  Description of Artificial Sequence: Synthetic oligonucleotide
  Sense strand starting at position 3874 of SEQ ID NO: 1888733
cguuccugacuggaaugau

SEQ ID NO: 2553039 - RNA, 19 nt, Artificial Sequence
  Description of Artificial Sequence: Synthetic oligonucleotide
  Antisense strand to SEQ ID NO: 2553038
aucauuccagucaggaacg

SEQ ID NO: 2553040 - RNA, 19 nt, Artificial Sequence
  Description of Artificial Sequence: Synthetic oligonucleotide
  Sense strand starting at position 3877 of SEQ ID NO: 1888733
uccugacuggaaugauagu

SEQ ID NO: 2553041 - RNA, 19 nt, Artificial Sequence
  Description of Artificial Sequence: Synthetic oligonucleotide
  Antisense strand to SEQ ID NO: 2553040
acuaucauuccagucagga

SEQ ID NO: 2553042 - RNA, 19 nt, Artificial Sequence
  Description of Artificial Sequence: Synthetic oligonucleotide
  Sense strand starting at position 3886 of SEQ ID NO: 1888733
gaaugauaguucuucgaac

SEQ ID NO: 2553043 - RNA, 19 nt, Artificial Sequence
  Description of Artificial Sequence: Synthetic oligonucleotide
  Antisense strand to SEQ ID NO: 2553042
guucgaagaacuaucauuc

SEQ ID NO: 2553044 - RNA, 19 nt, Artificial Sequence
  Description of Artificial Sequence: Synthetic oligonucleotide
  Sense strand starting at position 3887 of SEQ ID NO: 1888733
aaugauaguucuucgaaca

SEQ ID NO: 2553045 - RNA, 19 nt, Artificial Sequence
  Description of Artificial Sequence: Synthetic oligonucleotide
  Antisense strand to SEQ ID NO: 2553044
uguucgaagaacuaucauu

SEQ ID NO: 2553046 - RNA, 19 nt, Artificial Sequence
  Description of Artificial Sequence: Synthetic oligonucleotide
  Sense strand starting at position 3888 of SEQ ID NO: 1888733
augauaguucuucgaacau

SEQ ID NO: 2553047 - RNA, 19 nt, Artificial Sequence
  Description of Artificial Sequence: Synthetic oligonucleotide
  Antisense strand to SEQ ID NO: 2553046
auguucgaagaacuaucau

SEQ ID NO: 2553048 - RNA, 19 nt, Artificial Sequence
  Description of Artificial Sequence: Synthetic oligonucleotide
  Sense strand starting at position 3945 of SEQ ID NO: 1888733
ggaagugcucuuugaauau

SEQ ID NO: 2553049 - RNA, 19 nt, Artificial Sequence
  Description of Artificial Sequence: Synthetic oligonucleotide
  Antisense strand to SEQ ID NO: 2553048
auauucaaagagcacuucc

SEQ ID NO: 2553050 - RNA, 19 nt, Artificial Sequence
  Description of Artificial Sequence: Synthetic oligonucleotide
  Sense strand starting at position 3949 of SEQ ID NO: 1888733
gugcucuuugaauauaggu

SEQ ID NO: 2553051 - RNA, 19 nt, Artificial Sequence
  Description of Artificial Sequence: Synthetic oligonucleotide
  Antisense strand to SEQ ID NO: 2553050
accuauauucaaagagcac

SEQ ID NO: 2553052 - RNA, 19 nt, Artificial Sequence
  Description of Artificial Sequence: Synthetic oligonucleotide
  Sense strand starting at position 53 of SEQ ID NO: 1888735
ugaacauagccaugugcua

SEQ ID NO: 2553053 - RNA, 19 nt, Artificial Sequence
  Description of Artificial Sequence: Synthetic oligonucleotide
  Antisense strand to SEQ ID NO: 2553052
uagcacauggcuauguuca

SEQ ID NO: 2553054 - RNA, 19 nt, Artificial Sequence
  Description of Artificial Sequence: Synthetic oligonucleotide
  Sense strand starting at position 847 of SEQ ID NO: 1888735
ggagaguaugugugaggua

SEQ ID NO: 2553055 - RNA, 19 nt, Artificial Sequence
  Description of Artificial Sequence: Synthetic oligonucleotide
  Antisense strand to SEQ ID NO: 2553054
uaccucacacauacucucc

SEQ ID NO: 2553056 - RNA, 19 nt, Artificial Sequence
  Description of Artificial Sequence: Synthetic oligonucleotide
  Sense strand starting at position 852 of SEQ ID NO: 1888735
guaugugugagguaaccua

SEQ ID NO: 2553057 - RNA, 19 nt, Artificial Sequence
  Description of Artificial Sequence: Synthetic oligonucleotide
  Antisense strand to SEQ ID NO: 2553056
uagguuaccucacacauac

SEQ ID NO: 2553058 - RNA, 19 nt, Artificial Sequence
  Description of Artificial Sequence: Synthetic oligonucleotide
  Sense strand starting at position 862 of SEQ ID NO: 1888735
gguaaccuauuauuauaga

SEQ ID NO: 2553059 - RNA, 19 nt, Artificial Sequence
  Description of Artificial Sequence: Synthetic oligonucleotide
  Antisense strand to SEQ ID NO: 2553058
ucuauaauaauagguuacc

SEQ ID NO: 2553060 - RNA, 19 nt, Artificial Sequence
  Description of Artificial Sequence: Synthetic oligonucleotide
  Sense strand starting at position 890 of SEQ ID NO: 1888735
cuuccuuaggcugacuaga

SEQ ID NO: 2553061 - RNA, 19 nt, Artificial Sequence
  Description of Artificial Sequence: Synthetic oligonucleotide
  Antisense strand to SEQ ID NO: 2553060
ucuagucagccuaaggaag

SEQ ID NO: 2553062 - RNA, 19 nt, Artificial Sequence
  Description of Artificial Sequence: Synthetic oligonucleotide
  Sense strand starting at position 899 of SEQ ID NO: 1888735
gcugacuagagauggucaa

SEQ ID NO: 2553063 - RNA, 19 nt, Artificial Sequence
  Description of Artificial Sequence: Synthetic oligonucleotide
  Antisense strand to SEQ ID NO: 2553062
uugaccaucucuagucagc

SEQ ID NO: 2553064 - RNA, 19 nt, Artificial Sequence
  Description of Artificial Sequence: Synthetic oligonucleotide
  Sense strand starting at position 900 of SEQ ID NO: 1888735
cugacuagagauggucaau

SEQ ID NO: 2553065 - RNA, 19 nt, Artificial Sequence
  Description of Artificial Sequence: Synthetic oligonucleotide
  Antisense strand to SEQ ID NO: 2553064
auugaccaucucuagucag

SEQ ID NO: 2553066 - RNA, 19 nt, Artificial Sequence
  Description of Artificial Sequence: Synthetic oligonucleotide
  Sense strand starting at position 1165 of SEQ ID NO: 1888735
ucuugaaggccuuauucua

SEQ ID NO: 2553067 - RNA, 19 nt, Artificial Sequence
  Description of Artificial Sequence: Synthetic oligonucleotide
  Antisense strand to SEQ ID NO: 2553066
uagaauaaggccuucaaga

SEQ ID NO: 2553068 - RNA, 19 nt, Artificial Sequence
  Description of Artificial Sequence: Synthetic oligonucleotide
  Sense strand starting at position 1261 of SEQ ID NO: 1888735
aagguauuugcuggcauac

SEQ ID NO: 2553069 - RNA, 19 nt, Artificial Sequence
  Description of Artificial Sequence: Synthetic oligonucleotide
  Antisense strand to SEQ ID NO: 2553068
guaugccagcaaauaccuu

SEQ ID NO: 2553070 - RNA, 19 nt, Artificial Sequence
  Description of Artificial Sequence: Synthetic oligonucleotide
  Sense strand starting at position 1271 of SEQ ID NO: 1888735
cuggcauacucugcaugau

SEQ ID NO: 2553071 - RNA, 19 nt, Artificial Sequence
  Description of Artificial Sequence: Synthetic oligonucleotide
  Antisense strand to SEQ ID NO: 2553070
aucaugcagaguaugccag

SEQ ID NO: 2553072 - RNA, 19 nt, Artificial Sequence
  Description of Artificial Sequence: Synthetic oligonucleotide
  Sense strand starting at position 1272 of SEQ ID NO: 1888735
uggcauacucugcaugauu

SEQ ID NO: 2553073 - RNA, 19 nt, Artificial Sequence
  Description of Artificial Sequence: Synthetic oligonucleotide
  Antisense strand to SEQ ID NO: 2553072
aaucaugcagaguaugcca

SEQ ID NO: 2553074 - RNA, 19 nt, Artificial Sequence
  Description of Artificial Sequence: Synthetic oligonucleotide
  Sense strand starting at position 1342 of SEQ ID NO: 1888735
gauggugucuggagggaga

SEQ ID NO: 2553075 - RNA, 19 nt, Artificial Sequence
  Description of Artificial Sequence: Synthetic oligonucleotide
  Antisense strand to SEQ ID NO: 2553074
ucucccuccagacaccauc

SEQ ID NO: 2553076 - RNA, 19 nt, Artificial Sequence
  Description of Artificial Sequence: Synthetic oligonucleotide
  Sense strand starting at position 1568 of SEQ ID NO: 1888735
uacuuuacugcggauguaa

SEQ ID NO: 2553077 - RNA, 19 nt, Artificial Sequence
  Description of Artificial Sequence: Synthetic oligonucleotide
  Antisense strand to SEQ ID NO: 2553076
uuacauccgcaguaaagua

SEQ ID NO: 2553078 - RNA, 19 nt, Artificial Sequence
  Description of Artificial Sequence: Synthetic oligonucleotide
  Sense strand starting at position 1570 of SEQ ID NO: 1888735
cuuuacugcggauguaaua

SEQ ID NO: 2553079 - RNA, 19 nt, Artificial Sequence
  Description of Artificial Sequence: Synthetic oligonucleotide
  Antisense strand to SEQ ID NO: 2553078
uauuacauccgcaguaaag

SEQ ID NO: 2553080 - RNA, 19 nt, Artificial Sequence
  Description of Artificial Sequence: Synthetic oligonucleotide
  Sense strand starting at position 1621 of SEQ ID NO: 1888735
ccagaaacugcugauuauc

SEQ ID NO: 2553081 - RNA, 19 nt, Artificial Sequence
  Description of Artificial Sequence: Synthetic oligonucleotide
  Antisense strand to SEQ ID NO: 2553080
gauaaucagcaguuucugg

SEQ ID NO: 2553082 - RNA, 19 nt, Artificial Sequence
  Description of Artificial Sequence: Synthetic oligonucleotide
  Sense strand starting at position 1627 of SEQ ID NO: 1888735
acugcugauuaucugagaa

SEQ ID NO: 2553083 - RNA, 19 nt, Artificial Sequence
  Description of Artificial Sequence: Synthetic oligonucleotide
  Antisense strand to SEQ ID NO: 2553082
uucucagauaaucagcagu

SEQ ID NO: 2553084 - RNA, 19 nt, Artificial Sequence
  Description of Artificial Sequence: Synthetic oligonucleotide
  Sense strand starting at position 1631 of SEQ ID NO: 1888735
cugauuaucugagaagaga

SEQ ID NO: 2553085 - RNA, 19 nt, Artificial Sequence
  Description of Artificial Sequence: Synthetic oligonucleotide
  Antisense strand to SEQ ID NO: 2553084
ucucuucucagauaaucag

SEQ ID NO: 2553086 - RNA, 19 nt, Artificial Sequence
  Description of Artificial Sequence: Synthetic oligonucleotide
  Sense strand starting at position 1665 of SEQ ID NO: 1888735
gggcccauuucugugaucu

SEQ ID NO: 2553087 - RNA, 19 nt, Artificial Sequence
  Description of Artificial Sequence: Synthetic oligonucleotide
  Antisense strand to SEQ ID NO: 2553086
agaucacagaaaugggccc

SEQ ID NO: 2553088 - RNA, 19 nt, Artificial Sequence
  Description of Artificial Sequence: Synthetic oligonucleotide
  Sense strand starting at position 1666 of SEQ ID NO: 1888735
ggcccauuucugugaucuc

SEQ ID NO: 2553089 - RNA, 19 nt, Artificial Sequence
  Description of Artificial Sequence: Synthetic oligonucleotide
  Antisense strand to SEQ ID NO: 2553088
gagaucacagaaaugggcc

SEQ ID NO: 2553090 - RNA, 19 nt, Artificial Sequence
  Description of Artificial Sequence: Synthetic oligonucleotide
  Sense strand starting at position 1737 of SEQ ID NO: 1888735
cccucaccuccauguuuga

SEQ ID NO: 2553091 - RNA, 19 nt, Artificial Sequence
  Description of Artificial Sequence: Synthetic oligonucleotide
  Antisense strand to SEQ ID NO: 2553090
ucaaacauggaggugaggg

SEQ ID NO: 2553092 - RNA, 19 nt, Artificial Sequence
  Description of Artificial Sequence: Synthetic oligonucleotide
  Sense strand starting at position 1762 of SEQ ID NO: 1888735
ugaacaugcccucaagauc

SEQ ID NO: 2553093 - RNA, 19 nt, Artificial Sequence
  Description of Artificial Sequence: Synthetic oligonucleotide
  Antisense strand to SEQ ID NO: 2553092
gaucuugagggcauguuca

SEQ ID NO: 2553094 - RNA, 19 nt, Artificial Sequence
  Description of Artificial Sequence: Synthetic oligonucleotide
  Sense strand starting at position 1773 of SEQ ID NO: 1888735
ucaagaucgccucacucuu

SEQ ID NO: 2553095 - RNA, 19 nt, Artificial Sequence
  Description of Artificial Sequence: Synthetic oligonucleotide
  Antisense strand to SEQ ID NO: 2553094
aagagugaggcgaucuuga

SEQ ID NO: 2553096 - RNA, 19 nt, Artificial Sequence
  Description of Artificial Sequence: Synthetic oligonucleotide
  Sense strand starting at position 1815 of SEQ ID NO: 1888735
gcagaaggaggguguucua

SEQ ID NO: 2553097 - RNA, 19 nt, Artificial Sequence
  Description of Artificial Sequence: Synthetic oligonucleotide
  Antisense strand to SEQ ID NO: 2553096
uagaacacccuccuucugc

SEQ ID NO: 2553098 - RNA, 19 nt, Artificial Sequence
  Description of Artificial Sequence: Synthetic oligonucleotide
  Sense strand starting at position 1924 of SEQ ID NO: 1888735
gcaggagagagcuguugau

SEQ ID NO: 2553099 - RNA, 19 nt, Artificial Sequence
  Description of Artificial Sequence: Synthetic oligonucleotide
  Antisense strand to SEQ ID NO: 2553098
aucaacagcucucuccugc

SEQ ID NO: 2553100 - RNA, 19 nt, Artificial Sequence
  Description of Artificial Sequence: Synthetic oligonucleotide
  Sense strand starting at position 1928 of SEQ ID NO: 1888735
gagagagcuguugauaguu

SEQ ID NO: 2553101 - RNA, 19 nt, Artificial Sequence
  Description of Artificial Sequence: Synthetic oligonucleotide
  Antisense strand to SEQ ID NO: 2553100
aacuaucaacagcucucuc

SEQ ID NO: 2553102 - RNA, 19 nt, Artificial Sequence
  Description of Artificial Sequence: Synthetic oligonucleotide
  Sense strand starting at position 1982 of SEQ ID NO: 1888735
acugcaguuaagggauuau

SEQ ID NO: 2553103 - RNA, 19 nt, Artificial Sequence
  Description of Artificial Sequence: Synthetic oligonucleotide
  Antisense strand to SEQ ID NO: 2553102
auaaucccuuaacugcagu

SEQ ID NO: 2553104 - RNA, 19 nt, Artificial Sequence
  Description of Artificial Sequence: Synthetic oligonucleotide
  Sense strand starting at position 2065 of SEQ ID NO: 1888735
ggguauguuaaagauuagu

SEQ ID NO: 2553105 - RNA, 19 nt, Artificial Sequence
  Description of Artificial Sequence: Synthetic oligonucleotide
  Antisense strand to SEQ ID NO: 2553104
acuaaucuuuaacauaccc

SEQ ID NO: 2553106 - RNA, 19 nt, Artificial Sequence
  Description of Artificial Sequence: Synthetic oligonucleotide
  Sense strand starting at position 2071 of SEQ ID NO: 1888735
guuaaagauuaguuggaaa

SEQ ID NO: 2553107 - RNA, 19 nt, Artificial Sequence
  Description of Artificial Sequence: Synthetic oligonucleotide
  Antisense strand to SEQ ID NO: 2553106
uuuccaacuaaucuuuaac

SEQ ID NO: 2553108 - RNA, 19 nt, Artificial Sequence
  Description of Artificial Sequence: Synthetic oligonucleotide
  Sense strand starting at position 2660 of SEQ ID NO: 1888735
gaacaaucggaggguagau

SEQ ID NO: 2553109 - RNA, 19 nt, Artificial Sequence
  Description of Artificial Sequence: Synthetic oligonucleotide
  Antisense strand to SEQ ID NO: 2553108
aucuacccuccgauuguuc

SEQ ID NO: 2553110 - RNA, 19 nt, Artificial Sequence
  Description of Artificial Sequence: Synthetic oligonucleotide
  Sense strand starting at position 2956 of SEQ ID NO: 1888735
caggcuuuaggguguaaca

SEQ ID NO: 2553111 - RNA, 19 nt, Artificial Sequence
  Description of Artificial Sequence: Synthetic oligonucleotide
  Antisense strand to SEQ ID NO: 2553110
uguuacacccuaaagccug

SEQ ID NO: 2553112 - RNA, 19 nt, Artificial Sequence
  Description of Artificial Sequence: Synthetic oligonucleotide
  Sense strand starting at position 3141 of SEQ ID NO: 1888735
cagauauguccaggucagg

SEQ ID NO: 2553113 - RNA, 19 nt, Artificial Sequence
  Description of Artificial Sequence: Synthetic oligonucleotide
  Antisense strand to SEQ ID NO: 2553112
ccugaccuggacauaucug

SEQ ID NO: 2553114 - RNA, 19 nt, Artificial Sequence
  Description of Artificial Sequence: Synthetic oligonucleotide
  Sense strand starting at position 3196 of SEQ ID NO: 1888735
gugccaaaggaguacucau

SEQ ID NO: 2553115 - RNA, 19 nt, Artificial Sequence
  Description of Artificial Sequence: Synthetic oligonucleotide
  Antisense strand to SEQ ID NO: 2553114
augaguacuccuuuggcac

SEQ ID NO: 2553116 - RNA, 19 nt, Artificial Sequence
  Description of Artificial Sequence: Synthetic oligonucleotide
  Sense strand starting at position 3203 of SEQ ID NO: 1888735
aggaguacucaugaugucu

SEQ ID NO: 2553117 - RNA, 19 nt, Artificial Sequence
  Description of Artificial Sequence: Synthetic oligonucleotide
  Antisense strand to SEQ ID NO: 2553116
agacaucaugaguacuccu

SEQ ID NO: 2553118 - RNA, 19 nt, Artificial Sequence
  Description of Artificial Sequence: Synthetic oligonucleotide
  Sense strand starting at position 3500 of SEQ ID NO: 1888735
cgugguauucaguaacaag

SEQ ID NO: 2553119 - RNA, 19 nt, Artificial Sequence
  Description of Artificial Sequence: Synthetic oligonucleotide
  Antisense strand to SEQ ID NO: 2553118
cuuguuacugaauaccacg

SEQ ID NO: 2553120 - RNA, 19 nt, Artificial Sequence
  Description of Artificial Sequence: Synthetic oligonucleotide
  Sense strand starting at position 3511 of SEQ ID NO: 1888735
guaacaagauccucuaggu

SEQ ID NO: 2553121 - RNA, 19 nt, Artificial Sequence
  Description of Artificial Sequence: Synthetic oligonucleotide
  Antisense strand to SEQ ID NO: 2553120
accuagaggaucuuguuac

SEQ ID NO: 2553122 - RNA, 19 nt, Artificial Sequence
  Description of Artificial Sequence: Synthetic oligonucleotide
  Sense strand starting at position 3527 of SEQ ID NO: 1888735
gguucuucagggugggaau

SEQ ID NO: 2553123 - RNA, 19 nt, Artificial Sequence
  Description of Artificial Sequence: Synthetic oligonucleotide
  Antisense strand to SEQ ID NO: 2553122
auucccacccugaagaacc

SEQ ID NO: 2553124 - RNA, 19 nt, Artificial Sequence
  Description of Artificial Sequence: Synthetic oligonucleotide
  Sense strand starting at position 3528 of SEQ ID NO: 1888735
guucuucagggugggaauu

SEQ ID NO: 2553125 - RNA, 19 nt, Artificial Sequence
  Description of Artificial Sequence: Synthetic oligonucleotide
  Antisense strand to SEQ ID NO: 2553124
aauucccacccugaagaac

SEQ ID NO: 2553126 - RNA, 19 nt, Artificial Sequence
  Description of Artificial Sequence: Synthetic oligonucleotide
  Sense strand starting at position 3620 of SEQ ID NO: 1888735
ccaguugucccauaugaaa

SEQ ID NO: 2553127 - RNA, 19 nt, Artificial Sequence
  Description of Artificial Sequence: Synthetic oligonucleotide
  Antisense strand to SEQ ID NO: 2553126
uuucauaugggacaacugg

SEQ ID NO: 2553128 - RNA, 19 nt, Artificial Sequence
  Description of Artificial Sequence: Synthetic oligonucleotide
  Sense strand starting at position 3635 of SEQ ID NO: 1888735
gaaauaaagugauucugug

SEQ ID NO: 2553129 - RNA, 19 nt, Artificial Sequence
  Description of Artificial Sequence: Synthetic oligonucleotide
  Antisense strand to SEQ ID NO: 2553128
cacagaaucacuuuauuuc

SEQ ID NO: 2553130 - RNA, 19 nt, Artificial Sequence
  Description of Artificial Sequence: Synthetic oligonucleotide
  Sense strand starting at position 3639 of SEQ ID NO: 1888735
uaaagugauucuguguucu

SEQ ID NO: 2553131 - RNA, 19 nt, Artificial Sequence
  Description of Artificial Sequence: Synthetic oligonucleotide
  Antisense strand to SEQ ID NO: 2553130
agaacacagaaucacuuua

SEQ ID NO: 2553132 - RNA, 19 nt, Artificial Sequence
  Description of Artificial Sequence: Synthetic oligonucleotide
  Sense strand starting at position 256 of SEQ ID NO: 1888736
gcaauucuauuggcccaga

SEQ ID NO: 2553133 - RNA, 19 nt, Artificial Sequence
  Description of Artificial Sequence: Synthetic oligonucleotide
  Antisense strand to SEQ ID NO: 2553132
ucugggccaauagaauugc

SEQ ID NO: 2553134 - RNA, 19 nt, Artificial Sequence
  Description of Artificial Sequence: Synthetic oligonucleotide
  Sense strand starting at position 384 of SEQ ID NO: 1888736
acugcaaucccaggagcaa

SEQ ID NO: 2553135 - RNA, 19 nt, Artificial Sequence
  Description of Artificial Sequence: Synthetic oligonucleotide
  Antisense strand to SEQ ID NO: 2553134
uugcuccugggauugcagu

SEQ ID NO: 2553136 - RNA, 19 nt, Artificial Sequence
  Description of Artificial Sequence: Synthetic oligonucleotide
  Sense strand starting at position 385 of SEQ ID NO: 1888736
cugcaaucccaggagcaau

SEQ ID NO: 2553137 - RNA, 19 nt, Artificial Sequence
  Description of Artificial Sequence: Synthetic oligonucleotide
  Antisense strand to SEQ ID NO: 2553136
auugcuccugggauugcag

SEQ ID NO: 2553138 - RNA, 19 nt, Artificial Sequence
  Description of Artificial Sequence: Synthetic oligonucleotide
  Sense strand starting at position 902 of SEQ ID NO: 1888736
ucuccuaagccuggaaagu

SEQ ID NO: 2553139 - RNA, 19 nt, Artificial Sequence
  Description of Artificial Sequence: Synthetic oligonucleotide
  Antisense strand to SEQ ID NO: 2553138
acuuuccaggcuuaggaga

SEQ ID NO: 2553140 - RNA, 19 nt, Artificial Sequence
  Description of Artificial Sequence: Synthetic oligonucleotide
  Sense strand starting at position 903 of SEQ ID NO: 1888736
cuccuaagccuggaaaguu

SEQ ID NO: 2553141 - RNA, 19 nt, Artificial Sequence
  Description of Artificial Sequence: Synthetic oligonucleotide
  Antisense strand to SEQ ID NO: 2553140
aacuuuccaggcuuaggag

SEQ ID NO: 2553142 - RNA, 19 nt, Artificial Sequence
  Description of Artificial Sequence: Synthetic oligonucleotide
  Sense strand starting at position 984 of SEQ ID NO: 1888736
ugaagauccuaauugucaa

SEQ ID NO: 2553143 - RNA, 19 nt, Artificial Sequence
  Description of Artificial Sequence: Synthetic oligonucleotide
  Antisense strand to SEQ ID NO: 2553142
uugacaauuaggaucuuca

SEQ ID NO: 2553144 - RNA, 19 nt, Artificial Sequence
  Description of Artificial Sequence: Synthetic oligonucleotide
  Sense strand starting at position 987 of SEQ ID NO: 1888736
agauccuaauugucaauga

SEQ ID NO: 2553145 - RNA, 19 nt, Artificial Sequence
  Description of Artificial Sequence: Synthetic oligonucleotide
  Antisense strand to SEQ ID NO: 2553144
ucauugacaauuaggaucu

SEQ ID NO: 2553146 - RNA, 19 nt, Artificial Sequence
  Description of Artificial Sequence: Synthetic oligonucleotide
  Sense strand starting at position 1018 of SEQ ID NO: 1888736
uccuuugaauuagaaagaa

SEQ ID NO: 2553147 - RNA, 19 nt, Artificial Sequence
  Description of Artificial Sequence: Synthetic oligonucleotide
  Antisense strand to SEQ ID NO: 2553146
uucuuucuaauucaaagga

SEQ ID NO: 2553148 - RNA, 19 nt, Artificial Sequence
  Description of Artificial Sequence: Synthetic oligonucleotide
  Sense strand starting at position 1071 of SEQ ID NO: 1888736
agagaacgcuuauucuaaa

SEQ ID NO: 2553149 - RNA, 19 nt, Artificial Sequence
  Description of Artificial Sequence: Synthetic oligonucleotide
  Antisense strand to SEQ ID NO: 2553148
uuuagaauaagcguucucu

SEQ ID NO: 2553150 - RNA, 19 nt, Artificial Sequence
  Description of Artificial Sequence: Synthetic oligonucleotide
  Sense strand starting at position 1099 of SEQ ID NO: 1888736
uauuguauuuaugggaaga

SEQ ID NO: 2553151 - RNA, 19 nt, Artificial Sequence
  Description of Artificial Sequence: Synthetic oligonucleotide
  Antisense strand to SEQ ID NO: 2553150
ucuucccauaaauacaaua

SEQ ID NO: 2553152 - RNA, 19 nt, Artificial Sequence
  Description of Artificial Sequence: Synthetic oligonucleotide
  Sense strand starting at position 1210 of SEQ ID NO: 1888736
guugaaaucugcucccacu

SEQ ID NO: 2553153 - RNA, 19 nt, Artificial Sequence
  Description of Artificial Sequence: Synthetic oligonucleotide
  Antisense strand to SEQ ID NO: 2553152
agugggagcagauuucaac

SEQ ID NO: 2553154 - RNA, 19 nt, Artificial Sequence
  Description of Artificial Sequence: Synthetic oligonucleotide
  Sense strand starting at position 1459 of SEQ ID NO: 1888736
ucucucuuucccuggauga

SEQ ID NO: 2553155 - RNA, 19 nt, Artificial Sequence
  Description of Artificial Sequence: Synthetic oligonucleotide
  Antisense strand to SEQ ID NO: 2553154
ucauccagggaaagagaga

SEQ ID NO: 2553156 - RNA, 19 nt, Artificial Sequence
  Description of Artificial Sequence: Synthetic oligonucleotide
  Sense strand starting at position 1460 of SEQ ID NO: 1888736
cucucuuucccuggaugau

SEQ ID NO: 2553157 - RNA, 19 nt, Artificial Sequence
  Description of Artificial Sequence: Synthetic oligonucleotide
  Antisense strand to SEQ ID NO: 2553156
aucauccagggaaagagag

SEQ ID NO: 2553158 - RNA, 19 nt, Artificial Sequence
  Description of Artificial Sequence: Synthetic oligonucleotide
  Sense strand starting at position 1461 of SEQ ID NO: 1888736
ucucuuucccuggaugauu

SEQ ID NO: 2553159 - RNA, 19 nt, Artificial Sequence
  Description of Artificial Sequence: Synthetic oligonucleotide
  Antisense strand to SEQ ID NO: 2553158
aaucauccagggaaagaga

SEQ ID NO: 2553160 - RNA, 19 nt, Artificial Sequence
  Description of Artificial Sequence: Synthetic oligonucleotide
  Sense strand starting at position 1508 of SEQ ID NO: 1888736
caaaucaggccuggucuua

SEQ ID NO: 2553161 - RNA, 19 nt, Artificial Sequence
  Description of Artificial Sequence: Synthetic oligonucleotide
  Antisense strand to SEQ ID NO: 2553160
uaagaccaggccugauuug

SEQ ID NO: 2553162 - RNA, 19 nt, Artificial Sequence
  Description of Artificial Sequence: Synthetic oligonucleotide
  Sense strand starting at position 1540 of SEQ ID NO: 1888736
agaggucauuuauguaaga

SEQ ID NO: 2553163 - RNA, 19 nt, Artificial Sequence
  Description of Artificial Sequence: Synthetic oligonucleotide
  Antisense strand to SEQ ID NO: 2553162
ucuuacauaaaugaccucu

SEQ ID NO: 2553164 - RNA, 19 nt, Artificial Sequence
  Description of Artificial Sequence: Synthetic oligonucleotide
  Sense strand starting at position 1545 of SEQ ID NO: 1888736
ucauuuauguaagaacuga

SEQ ID NO: 2553165 - RNA, 19 nt, Artificial Sequence
  Description of Artificial Sequence: Synthetic oligonucleotide
  Antisense strand to SEQ ID NO: 2553164
ucaguucuuacauaaauga

SEQ ID NO: 2553166 - RNA, 19 nt, Artificial Sequence
  Description of Artificial Sequence: Synthetic oligonucleotide
  Sense strand starting at position 1648 of SEQ ID NO: 1888736
aaggcuuuguaaucagacu

SEQ ID NO: 2553167 - RNA, 19 nt, Artificial Sequence
  Description of Artificial Sequence: Synthetic oligonucleotide
  Antisense strand to SEQ ID NO: 2553166
agucugauuacaaagccuu

SEQ ID NO: 2553168 - RNA, 19 nt, Artificial Sequence
  Description of Artificial Sequence: Synthetic oligonucleotide
  Sense strand starting at position 2099 of SEQ ID NO: 1888736
auguauucagaacgaggga

SEQ ID NO: 2553169 - RNA, 19 nt, Artificial Sequence
  Description of Artificial Sequence: Synthetic oligonucleotide
  Antisense strand to SEQ ID NO: 2553168
ucccucguucugaauacau

SEQ ID NO: 2553170 - RNA, 19 nt, Artificial Sequence
  Description of Artificial Sequence: Synthetic oligonucleotide
  Sense strand starting at position 2135 of SEQ ID NO: 1888736
ugucaagagacguauacaa

SEQ ID NO: 2553171 - RNA, 19 nt, Artificial Sequence
  Description of Artificial Sequence: Synthetic oligonucleotide
  Antisense strand to SEQ ID NO: 2553170
uuguauacgucucuugaca

SEQ ID NO: 2553172 - RNA, 19 nt, Artificial Sequence
  Description of Artificial Sequence: Synthetic oligonucleotide
  Sense strand starting at position 2186 of SEQ ID NO: 1888736
agcuccagagcauagaaau

SEQ ID NO: 2553173 - RNA, 19 nt, Artificial Sequence
  Description of Artificial Sequence: Synthetic oligonucleotide
  Antisense strand to SEQ ID NO: 2553172
auuucuaugcucuggagcu

SEQ ID NO: 2553174 - RNA, 19 nt, Artificial Sequence
  Description of Artificial Sequence: Synthetic oligonucleotide
  Sense strand starting at position 2224 of SEQ ID NO: 1888736
ccggaaaucuucuugauac

SEQ ID NO: 2553175 - RNA, 19 nt, Artificial Sequence
  Description of Artificial Sequence: Synthetic oligonucleotide
  Antisense strand to SEQ ID NO: 2553174
guaucaagaagauuuccgg

SEQ ID NO: 2553176 - RNA, 19 nt, Artificial Sequence
  Description of Artificial Sequence: Synthetic oligonucleotide
  Sense strand starting at position 2277 of SEQ ID NO: 1888736
cuggucagucuguaagcau

SEQ ID NO: 2553177 - RNA, 19 nt, Artificial Sequence
  Description of Artificial Sequence: Synthetic oligonucleotide
  Antisense strand to SEQ ID NO: 2553176
augcuuacagacugaccag

SEQ ID NO: 2553178 - RNA, 19 nt, Artificial Sequence
  Description of Artificial Sequence: Synthetic oligonucleotide
  Sense strand starting at position 2284 of SEQ ID NO: 1888736
gucuguaagcauuauaaug

SEQ ID NO: 2553179 - RNA, 19 nt, Artificial Sequence
  Description of Artificial Sequence: Synthetic oligonucleotide
  Antisense strand to SEQ ID NO: 2553178
cauuauaaugcuuacagac

SEQ ID NO: 2553180 - RNA, 19 nt, Artificial Sequence
  Description of Artificial Sequence: Synthetic oligonucleotide
  Sense strand starting at position 2380 of SEQ ID NO: 1888736
cggcuugaauuguuacaga

SEQ ID NO: 2553181 - RNA, 19 nt, Artificial Sequence
  Description of Artificial Sequence: Synthetic oligonucleotide
  Antisense strand to SEQ ID NO: 2553180
ucuguaacaauucaagccg

SEQ ID NO: 2553182 - RNA, 19 nt, Artificial Sequence
  Description of Artificial Sequence: Synthetic oligonucleotide
  Sense strand starting at position 2436 of SEQ ID NO: 1888736
ucauaucuuuggucagcca

SEQ ID NO: 2553183 - RNA, 19 nt, Artificial Sequence
  Description of Artificial Sequence: Synthetic oligonucleotide
  Antisense strand to SEQ ID NO: 2553182
uggcugaccaaagauauga

SEQ ID NO: 2553184 - RNA, 19 nt, Artificial Sequence
  Description of Artificial Sequence: Synthetic oligonucleotide
  Sense strand starting at position 2443 of SEQ ID NO: 1888736
uuuggucagccacaagauu

SEQ ID NO: 2553185 - RNA, 19 nt, Artificial Sequence
  Description of Artificial Sequence: Synthetic oligonucleotide
  Antisense strand to SEQ ID NO: 2553184
aaucuuguggcugaccaaa

SEQ ID NO: 2553186 - RNA, 19 nt, Artificial Sequence
  Description of Artificial Sequence: Synthetic oligonucleotide
  Sense strand starting at position 2464 of SEQ ID NO: 1888736
ucuaguuugucuucugaaa

SEQ ID NO: 2553187 - RNA, 19 nt, Artificial Sequence
  Description of Artificial Sequence: Synthetic oligonucleotide
  Antisense strand to SEQ ID NO: 2553186
uuucagaagacaaacuaga

SEQ ID NO: 2553188 - RNA, 19 nt, Artificial Sequence
  Description of Artificial Sequence: Synthetic oligonucleotide
  Sense strand starting at position 2702 of SEQ ID NO: 1888736
ggauuuaauugacacugau

SEQ ID NO: 2553189 - RNA, 19 nt, Artificial Sequence
  Description of Artificial Sequence: Synthetic oligonucleotide
  Antisense strand to SEQ ID NO: 2553188
aucagugucaauuaaaucc

SEQ ID NO: 2553190 - RNA, 19 nt, Artificial Sequence
  Description of Artificial Sequence: Synthetic oligonucleotide
  Sense strand starting at position 2872 of SEQ ID NO: 1888736
ucuaguuucugacuccuca

SEQ ID NO: 2553191 - RNA, 19 nt, Artificial Sequence
  Description of Artificial Sequence: Synthetic oligonucleotide
  Antisense strand to SEQ ID NO: 2553190
ugaggagucagaaacuaga

SEQ ID NO: 2553192 - RNA, 19 nt, Artificial Sequence
  Description of Artificial Sequence: Synthetic oligonucleotide
  Sense strand starting at position 2876 of SEQ ID NO: 1888736
guuucugacuccucacuua

SEQ ID NO: 2553193 - RNA, 19 nt, Artificial Sequence
  Description of Artificial Sequence: Synthetic oligonucleotide
  Antisense strand to SEQ ID NO: 2553192
uaagugaggagucagaaac

SEQ ID NO: 2553194 - RNA, 19 nt, Artificial Sequence
  Description of Artificial Sequence: Synthetic oligonucleotide
  Sense strand starting at position 2934 of SEQ ID NO: 1888736
gcugccauacaauguaaua

SEQ ID NO: 2553195 - RNA, 19 nt, Artificial Sequence
  Description of Artificial Sequence: Synthetic oligonucleotide
  Antisense strand to SEQ ID NO: 2553194
uauuacauuguauggcagc

SEQ ID NO: 2553196 - RNA, 19 nt, Artificial Sequence
  Description of Artificial Sequence: Synthetic oligonucleotide
  Sense strand starting at position 3106 of SEQ ID NO: 1888736
gggcuuaaugugcaaguga

SEQ ID NO: 2553197 - RNA, 19 nt, Artificial Sequence
  Description of Artificial Sequence: Synthetic oligonucleotide
  Antisense strand to SEQ ID NO: 2553196
ucacuugcacauuaagccc

SEQ ID NO: 2553198 - RNA, 19 nt, Artificial Sequence
  Description of Artificial Sequence: Synthetic oligonucleotide
  Sense strand starting at position 3130 of SEQ ID NO: 1888736
gacuacuacugaguacaga

SEQ ID NO: 2553199 - RNA, 19 nt, Artificial Sequence
  Description of Artificial Sequence: Synthetic oligonucleotide
  Antisense strand to SEQ ID NO: 2553198
ucuguacucaguaguaguc

SEQ ID NO: 2553200 - RNA, 19 nt, Artificial Sequence
  Description of Artificial Sequence: Synthetic oligonucleotide
  Sense strand starting at position 3362 of SEQ ID NO: 1888736
guacaagauuuguaaguug

SEQ ID NO: 2553201 - RNA, 19 nt, Artificial Sequence
  Description of Artificial Sequence: Synthetic oligonucleotide
  Antisense strand to SEQ ID NO: 2553200
caacuuacaaaucuuguac

SEQ ID NO: 2553202 - RNA, 19 nt, Artificial Sequence
  Description of Artificial Sequence: Synthetic oligonucleotide
  Sense strand starting at position 3369 of SEQ ID NO: 1888736
auuuguaaguuguacaaga

SEQ ID NO: 2553203 - RNA, 19 nt, Artificial Sequence
  Description of Artificial Sequence: Synthetic oligonucleotide
  Antisense strand to SEQ ID NO: 2553202
ucuuguacaacuuacaaau

SEQ ID NO: 2553204 - RNA, 19 nt, Artificial Sequence
  Description of Artificial Sequence: Synthetic oligonucleotide
  Sense strand starting at position 3371 of SEQ ID NO: 1888736
uuguaaguuguacaagauu

SEQ ID NO: 2553205 - RNA, 19 nt, Artificial Sequence
  Description of Artificial Sequence: Synthetic oligonucleotide
  Antisense strand to SEQ ID NO: 2553204
aaucuuguacaacuuacaa

SEQ ID NO: 2553206 - RNA, 19 nt, Artificial Sequence
  Description of Artificial Sequence: Synthetic oligonucleotide
  Sense strand starting at position 3436 of SEQ ID NO: 1888736
accucaauuccuggugaug

SEQ ID NO: 2553207 - RNA, 19 nt, Artificial Sequence
  Description of Artificial Sequence: Synthetic oligonucleotide
  Antisense strand to SEQ ID NO: 2553206
caucaccaggaauugaggu

SEQ ID NO: 2553208 - RNA, 19 nt, Artificial Sequence
  Description of Artificial Sequence: Synthetic oligonucleotide
  Sense strand starting at position 3562 of SEQ ID NO: 1888736
gggauauuguaagucacuc

SEQ ID NO: 2553209 - RNA, 19 nt, Artificial Sequence
  Description of Artificial Sequence: Synthetic oligonucleotide
  Antisense strand to SEQ ID NO: 2553208
gagugacuuacaauauccc

SEQ ID NO: 2553210 - RNA, 19 nt, Artificial Sequence
  Description of Artificial Sequence: Synthetic oligonucleotide
  Sense strand starting at position 3609 of SEQ ID NO: 1888736
acuugaauucuguagccuu

SEQ ID NO: 2553211 - RNA, 19 nt, Artificial Sequence
  Description of Artificial Sequence: Synthetic oligonucleotide
  Antisense strand to SEQ ID NO: 2553210
aaggcuacagaauucaagu

SEQ ID NO: 2553212 - RNA, 19 nt, Artificial Sequence
  Description of Artificial Sequence: Synthetic oligonucleotide
  Sense strand starting at position 37 of SEQ ID NO: 1888738
acauuuguaucggaaugga

SEQ ID NO: 2553213 - RNA, 19 nt, Artificial Sequence
  Description of Artificial Sequence: Synthetic oligonucleotide
  Antisense strand to SEQ ID NO: 2553212
uccauuccgauacaaaugu

SEQ ID NO: 2553214 - RNA, 19 nt, Artificial Sequence
  Description of Artificial Sequence: Synthetic oligonucleotide
  Sense strand starting at position 40 of SEQ ID NO: 1888738
uuuguaucggaauggaaau

SEQ ID NO: 2553215 - RNA, 19 nt, Artificial Sequence
  Description of Artificial Sequence: Synthetic oligonucleotide
  Antisense strand to SEQ ID NO: 2553214
auuuccauuccgauacaaa

SEQ ID NO: 2553216 - RNA, 19 nt, Artificial Sequence
  Description of Artificial Sequence: Synthetic oligonucleotide
  Sense strand starting at position 113 of SEQ ID NO: 1888738
accagaauggccugaaaug

SEQ ID NO: 2553217 - RNA, 19 nt, Artificial Sequence
  Description of Artificial Sequence: Synthetic oligonucleotide
  Antisense strand to SEQ ID NO: 2553216
cauuucaggccauucuggu

SEQ ID NO: 2553218 - RNA, 19 nt, Artificial Sequence
  Description of Artificial Sequence: Synthetic oligonucleotide
  Sense strand starting at position 222 of SEQ ID NO: 1888738
gugaaauccuaugaauuuc

SEQ ID NO: 2553219 - RNA, 19 nt, Artificial Sequence
  Description of Artificial Sequence: Synthetic oligonucleotide
  Antisense strand to SEQ ID NO: 2553218
gaaauucauaggauuucac

SEQ ID NO: 2553220 - RNA, 19 nt, Artificial Sequence
  Description of Artificial Sequence: Synthetic oligonucleotide
  Sense strand starting at position 334 of SEQ ID NO: 1888738
uuucucugagaauguuauu

SEQ ID NO: 2553221 - RNA, 19 nt, Artificial Sequence
  Description of Artificial Sequence: Synthetic oligonucleotide
  Antisense strand to SEQ ID NO: 2553220
aauaacauucucagagaaa

SEQ ID NO: 2553222 - RNA, 19 nt, Artificial Sequence
  Description of Artificial Sequence: Synthetic oligonucleotide
  Sense strand starting at position 339 of SEQ ID NO: 1888738
cugagaauguuauugaaug

SEQ ID NO: 2553223 - RNA, 19 nt, Artificial Sequence
  Description of Artificial Sequence: Synthetic oligonucleotide
  Antisense strand to SEQ ID NO: 2553222
cauucaauaacauucucag

SEQ ID NO: 2553224 - RNA, 19 nt, Artificial Sequence
  Description of Artificial Sequence: Synthetic oligonucleotide
  Sense strand starting at position 347 of SEQ ID NO: 1888738
guuauugaaugugcauaua

SEQ ID NO: 2553225 - RNA, 19 nt, Artificial Sequence
  Description of Artificial Sequence: Synthetic oligonucleotide
  Antisense strand to SEQ ID NO: 2553224
uauaugcacauucaauaac

SEQ ID NO: 2553226 - RNA, 19 nt, Artificial Sequence
  Description of Artificial Sequence: Synthetic oligonucleotide
  Sense strand starting at position 457 of SEQ ID NO: 1888738
uugagauguuaucucauuc

SEQ ID NO: 2553227 - RNA, 19 nt, Artificial Sequence
  Description of Artificial Sequence: Synthetic oligonucleotide
  Antisense strand to SEQ ID NO: 2553226
gaaugagauaacaucucaa

SEQ ID NO: 2553228 - RNA, 19 nt, Artificial Sequence
  Description of Artificial Sequence: Synthetic oligonucleotide
  Sense strand starting at position 764 of SEQ ID NO: 1888738
uguauaugucaucaucucu

SEQ ID NO: 2553229 - RNA, 19 nt, Artificial Sequence
  Description of Artificial Sequence: Synthetic oligonucleotide
  Antisense strand to SEQ ID NO: 2553228
agagaugaugacauauaca

SEQ ID NO: 2553230 - RNA, 19 nt, Artificial Sequence
  Description of Artificial Sequence: Synthetic oligonucleotide
  Sense strand starting at position 794 of SEQ ID NO: 1888738
cugcaaacucauugaaguc

SEQ ID NO: 2553231 - RNA, 19 nt, Artificial Sequence
  Description of Artificial Sequence: Synthetic oligonucleotide
  Antisense strand to SEQ ID NO: 2553230
gacuucaaugaguuugcag

SEQ ID NO: 2553232 - RNA, 19 nt, Artificial Sequence
  Description of Artificial Sequence: Synthetic oligonucleotide
  Sense strand starting at position 814 of SEQ ID NO: 1888738
uggauuccacauugucaau

SEQ ID NO: 2553233 - RNA, 19 nt, Artificial Sequence
  Description of Artificial Sequence: Synthetic oligonucleotide
  Antisense strand to SEQ ID NO: 2553232
auugacaauguggaaucca

SEQ ID NO: 2553234 - RNA, 19 nt, Artificial Sequence
  Description of Artificial Sequence: Synthetic oligonucleotide
  Sense strand starting at position 820 of SEQ ID NO: 1888738
ccacauugucaauaguaau

SEQ ID NO: 2553235 - RNA, 19 nt, Artificial Sequence
  Description of Artificial Sequence: Synthetic oligonucleotide
  Antisense strand to SEQ ID NO: 2553234
auuacuauugacaaugugg

SEQ ID NO: 2553236 - RNA, 19 nt, Artificial Sequence
  Description of Artificial Sequence: Synthetic oligonucleotide
  Sense strand starting at position 832 of SEQ ID NO: 1888738
uaguaauugccaggaauac

SEQ ID NO: 2553237 - RNA, 19 nt, Artificial Sequence
  Description of Artificial Sequence: Synthetic oligonucleotide
  Antisense strand to SEQ ID NO: 2553236
guauuccuggcaauuacua

SEQ ID NO: 2553238 - RNA, 19 nt, Artificial Sequence
  Description of Artificial Sequence: Synthetic oligonucleotide
  Sense strand starting at position 935 of SEQ ID NO: 1888738
accugagaguauccguaau

SEQ ID NO: 2553239 - RNA, 19 nt, Artificial Sequence
  Description of Artificial Sequence: Synthetic oligonucleotide
  Antisense strand to SEQ ID NO: 2553238
auuacggauacucucaggu

SEQ ID NO: 2553240 - RNA, 19 nt, Artificial Sequence
  Description of Artificial Sequence: Synthetic oligonucleotide
  Sense strand starting at position 937 of SEQ ID NO: 1888738
cugagaguauccguaauug

SEQ ID NO: 2553241 - RNA, 19 nt, Artificial Sequence
  Description of Artificial Sequence: Synthetic oligonucleotide
  Antisense strand to SEQ ID NO: 2553240
caauuacggauacucucag

SEQ ID NO: 2553242 - RNA, 19 nt, Artificial Sequence
  Description of Artificial Sequence: Synthetic oligonucleotide
  Sense strand starting at position 1076 of SEQ ID NO: 1888738
caauaaaugugaguugaga

SEQ ID NO: 2553243 - RNA, 19 nt, Artificial Sequence
  Description of Artificial Sequence: Synthetic oligonucleotide
  Antisense strand to SEQ ID NO: 2553242
ucucaacucacauuuauug

SEQ ID NO: 2553244 - RNA, 19 nt, Artificial Sequence
  Description of Artificial Sequence: Synthetic oligonucleotide
  Sense strand starting at position 1213 of SEQ ID NO: 1888738
gcgagauccucuuuauuua

SEQ ID NO: 2553245 - RNA, 19 nt, Artificial Sequence
  Description of Artificial Sequence: Synthetic oligonucleotide
  Antisense strand to SEQ ID NO: 2553244
uaaauaaagaggaucucgc

SEQ ID NO: 2553246 - RNA, 19 nt, Artificial Sequence
  Description of Artificial Sequence: Synthetic oligonucleotide
  Sense strand starting at position 1316 of SEQ ID NO: 1888738
gggaacagugguggaauua

SEQ ID NO: 2553247 - RNA, 19 nt, Artificial Sequence
  Description of Artificial Sequence: Synthetic oligonucleotide
  Antisense strand to SEQ ID NO: 2553246
uaauuccaccacuguuccc

SEQ ID NO: 2553248 - RNA, 19 nt, Artificial Sequence
  Description of Artificial Sequence: Synthetic oligonucleotide
  Sense strand starting at position 1374 of SEQ ID NO: 1888738
gaagaagcuugugcauaca

SEQ ID NO: 2553249 - RNA, 19 nt, Artificial Sequence
  Description of Artificial Sequence: Synthetic oligonucleotide
  Antisense strand to SEQ ID NO: 2553248
uguaugcacaagcuucuuc

SEQ ID NO: 2553250 - RNA, 19 nt, Artificial Sequence
  Description of Artificial Sequence: Synthetic oligonucleotide
  Sense strand starting at position 1409 of SEQ ID NO: 1888738
aacuguaacuguguuuaag

SEQ ID NO: 2553251 - RNA, 19 nt, Artificial Sequence
  Description of Artificial Sequence: Synthetic oligonucleotide
  Antisense strand to SEQ ID NO: 2553250
cuuaaacacaguuacaguu

SEQ ID NO: 2553252 - RNA, 19 nt, Artificial Sequence
  Description of Artificial Sequence: Synthetic oligonucleotide
  Sense strand starting at position 1445 of SEQ ID NO: 1888738
aguagauauauguggaaug

SEQ ID NO: 2553253 - RNA, 19 nt, Artificial Sequence
  Description of Artificial Sequence: Synthetic oligonucleotide
  Antisense strand to SEQ ID NO: 2553252
cauuccacauauaucuacu

SEQ ID NO: 2553254 - RNA, 19 nt, Artificial Sequence
  Description of Artificial Sequence: Synthetic oligonucleotide
  Sense strand starting at position 1509 of SEQ ID NO: 1888738
gaucuaaaggaaugugagu

SEQ ID NO: 2553255 - RNA, 19 nt, Artificial Sequence
  Description of Artificial Sequence: Synthetic oligonucleotide
  Antisense strand to SEQ ID NO: 2553254
acucacauuccuuuagauc

SEQ ID NO: 2553256 - RNA, 19 nt, Artificial Sequence
  Description of Artificial Sequence: Synthetic oligonucleotide
  Sense strand starting at position 1584 of SEQ ID NO: 1888738
gcaggauugaucgauugca

SEQ ID NO: 2553257 - RNA, 19 nt, Artificial Sequence
  Description of Artificial Sequence: Synthetic oligonucleotide
  Antisense strand to SEQ ID NO: 2553256
ugcaaucgaucaauccugc

SEQ ID NO: 2553258 - RNA, 19 nt, Artificial Sequence
  Description of Artificial Sequence: Synthetic oligonucleotide
  Sense strand starting at position 1597 of SEQ ID NO: 1888738
auugcaguuagcgaagaau

SEQ ID NO: 2553259 - RNA, 19 nt, Artificial Sequence
  Description of Artificial Sequence: Synthetic oligonucleotide
  Antisense strand to SEQ ID NO: 2553258
auucuucgcuaacugcaau

SEQ ID NO: 2553260 - RNA, 19 nt, Artificial Sequence
  Description of Artificial Sequence: Synthetic oligonucleotide
  Sense strand starting at position 1645 of SEQ ID NO: 1888738
ucuguacuucuguacaacu

SEQ ID NO: 2553261 - RNA, 19 nt, Artificial Sequence
  Description of Artificial Sequence: Synthetic oligonucleotide
  Antisense strand to SEQ ID NO: 2553260
aguuguacagaaguacaga

SEQ ID NO: 2553262 - RNA, 19 nt, Artificial Sequence
  Description of Artificial Sequence: Synthetic oligonucleotide
  Sense strand starting at position 1754 of SEQ ID NO: 1888738
gcuuccaaguccuuuaaag

SEQ ID NO: 2553263 - RNA, 19 nt, Artificial Sequence
  Description of Artificial Sequence: Synthetic oligonucleotide
  Antisense strand to SEQ ID NO: 2553262
cuuuaaaggacuuggaagc

SEQ ID NO: 2553264 - RNA, 19 nt, Artificial Sequence
  Description of Artificial Sequence: Synthetic oligonucleotide
  Sense strand starting at position 1861 of SEQ ID NO: 1888738
cuaguccugucaucuaaug

SEQ ID NO: 2553265 - RNA, 19 nt, Artificial Sequence
  Description of Artificial Sequence: Synthetic oligonucleotide
  Antisense strand to SEQ ID NO: 2553264
cauuagaugacaggacuag

SEQ ID NO: 2553266 - RNA, 19 nt, Artificial Sequence
  Description of Artificial Sequence: Synthetic oligonucleotide
  Sense strand starting at position 2414 of SEQ ID NO: 1888738
ggaguuauucuugaaggua

SEQ ID NO: 2553267 - RNA, 19 nt, Artificial Sequence
  Description of Artificial Sequence: Synthetic oligonucleotide
  Antisense strand to SEQ ID NO: 2553266
uaccuucaagaauaacucc

SEQ ID NO: 2553268 - RNA, 19 nt, Artificial Sequence
  Description of Artificial Sequence: Synthetic oligonucleotide
  Sense strand starting at position 2417 of SEQ ID NO: 1888738
guuauucuugaagguaaag

SEQ ID NO: 2553269 - RNA, 19 nt, Artificial Sequence
  Description of Artificial Sequence: Synthetic oligonucleotide
  Antisense strand to SEQ ID NO: 2553268
cuuuaccuucaagaauaac

SEQ ID NO: 2553270 - RNA, 19 nt, Artificial Sequence
  Description of Artificial Sequence: Synthetic oligonucleotide
  Sense strand starting at position 2494 of SEQ ID NO: 1888738
gcuucuguaacguuuguau

SEQ ID NO: 2553271 - RNA, 19 nt, Artificial Sequence
  Description of Artificial Sequence: Synthetic oligonucleotide
  Antisense strand to SEQ ID NO: 2553270
auacaaacguuacagaagc

SEQ ID NO: 2553272 - RNA, 19 nt, Artificial Sequence
  Description of Artificial Sequence: Synthetic oligonucleotide
  Sense strand starting at position 3348 of SEQ ID NO: 1888738
cgcgcaaucggaaaucugu

SEQ ID NO: 2553273 - RNA, 19 nt, Artificial Sequence
  Description of Artificial Sequence: Synthetic oligonucleotide
  Antisense strand to SEQ ID NO: 2553272
acagauuuccgauugcgcg

SEQ ID NO: 2553274 - RNA, 19 nt, Artificial Sequence
  Description of Artificial Sequence: Synthetic oligonucleotide
  Sense strand starting at position 3410 of SEQ ID NO: 1888738
ugcguuucugcuccggaau

SEQ ID NO: 2553275 - RNA, 19 nt, Artificial Sequence
  Description of Artificial Sequence: Synthetic oligonucleotide
  Antisense strand to SEQ ID NO: 2553274
auuccggagcagaaacgca

SEQ ID NO: 2553276 - RNA, 19 nt, Artificial Sequence
  Description of Artificial Sequence: Synthetic oligonucleotide
  Sense strand starting at position 3481 of SEQ ID NO: 1888738
uggaaauuccagcgaagca

SEQ ID NO: 2553277 - RNA, 19 nt, Artificial Sequence
  Description of Artificial Sequence: Synthetic oligonucleotide
  Antisense strand to SEQ ID NO: 2553276
ugcuucgcuggaauuucca

SEQ ID NO: 2553278 - RNA, 19 nt, Artificial Sequence
  Description of Artificial Sequence: Synthetic oligonucleotide
  Sense strand starting at position 3482 of SEQ ID NO: 1888738
ggaaauuccagcgaagcaa

SEQ ID NO: 2553279 - RNA, 19 nt, Artificial Sequence
  Description of Artificial Sequence: Synthetic oligonucleotide
  Antisense strand to SEQ ID NO: 2553278
uugcuucgcuggaauuucc

SEQ ID NO: 2553280 - RNA, 19 nt, Artificial Sequence
  Description of Artificial Sequence: Synthetic oligonucleotide
  Sense strand starting at position 3578 of SEQ ID NO: 1888738
auaaauuagguuugugcua

SEQ ID NO: 2553281 - RNA, 19 nt, Artificial Sequence
  Description of Artificial Sequence: Synthetic oligonucleotide
  Antisense strand to SEQ ID NO: 2553280
uagcacaaaccuaauuuau

SEQ ID NO: 2553282 - RNA, 19 nt, Artificial Sequence
  Description of Artificial Sequence: Synthetic oligonucleotide
  Sense strand starting at position 3663 of SEQ ID NO: 1888738
aauagucaaguucgaugau

SEQ ID NO: 2553283 - RNA, 19 nt, Artificial Sequence
  Description of Artificial Sequence: Synthetic oligonucleotide
  Antisense strand to SEQ ID NO: 2553282
aucaucgaacuugacuauu

SEQ ID NO: 2553284 - RNA, 19 nt, Artificial Sequence
  Description of Artificial Sequence: Synthetic oligonucleotide
  Sense strand starting at position 3677 of SEQ ID NO: 1888738
augauuugauucugaccua

SEQ ID NO: 2553285 - RNA, 19 nt, Artificial Sequence
  Description of Artificial Sequence: Synthetic oligonucleotide
  Antisense strand to SEQ ID NO: 2553284
uaggucagaaucaaaucau

SEQ ID NO: 2553286 - RNA, 19 nt, Artificial Sequence
  Description of Artificial Sequence: Synthetic oligonucleotide
  Sense strand starting at position 3901 of SEQ ID NO: 1888738
uccucagaauaaucguaau

SEQ ID NO: 2553287 - RNA, 19 nt, Artificial Sequence
  Description of Artificial Sequence: Synthetic oligonucleotide
  Antisense strand to SEQ ID NO: 2553286
auuacgauuauucugagga

SEQ ID NO: 2553288 - RNA, 19 nt, Artificial Sequence
  Description of Artificial Sequence: Synthetic oligonucleotide
  Sense strand starting at position 3915 of SEQ ID NO: 1888738
guaauagugcuagggagac

SEQ ID NO: 2553289 - RNA, 19 nt, Artificial Sequence
  Description of Artificial Sequence: Synthetic oligonucleotide
  Antisense strand to SEQ ID NO: 2553288
gucucccuagcacuauuac

SEQ ID NO: 2553290 - RNA, 19 nt, Artificial Sequence
  Description of Artificial Sequence: Synthetic oligonucleotide
  Sense strand starting at position 3946 of SEQ ID NO: 1888738
uguugugauccguuucugu

SEQ ID NO: 2553291 - RNA, 19 nt, Artificial Sequence
  Description of Artificial Sequence: Synthetic oligonucleotide
  Antisense strand to SEQ ID NO: 2553290
acagaaacggaucacaaca

SEQ ID NO: 2553292 - RNA, 19 nt, Artificial Sequence
  Description of Artificial Sequence: Synthetic oligonucleotide
  Sense strand starting at position 81 of SEQ ID NO: 1888739
gggacucccggcuaacaua

SEQ ID NO: 2553293 - RNA, 19 nt, Artificial Sequence
  Description of Artificial Sequence: Synthetic oligonucleotide
  Antisense strand to SEQ ID NO: 2553292
uauguuagccgggaguccc

SEQ ID NO: 2553294 - RNA, 19 nt, Artificial Sequence
  Description of Artificial Sequence: Synthetic oligonucleotide
  Sense strand starting at position 252 of SEQ ID NO: 1888739
cccaaucuucugcgucaca

SEQ ID NO: 2553295 - RNA, 19 nt, Artificial Sequence
  Description of Artificial Sequence: Synthetic oligonucleotide
  Antisense strand to SEQ ID NO: 2553294
ugugacgcagaagauuggg

SEQ ID NO: 2553296 - RNA, 19 nt, Artificial Sequence
  Description of Artificial Sequence: Synthetic oligonucleotide
  Sense strand starting at position 253 of SEQ ID NO: 1888739
ccaaucuucugcgucacaa

SEQ ID NO: 2553297 - RNA, 19 nt, Artificial Sequence
  Description of Artificial Sequence: Synthetic oligonucleotide
  Antisense strand to SEQ ID NO: 2553296
uugugacgcagaagauugg

SEQ ID NO: 2553298 - RNA, 19 nt, Artificial Sequence
  Description of Artificial Sequence: Synthetic oligonucleotide
  Sense strand starting at position 691 of SEQ ID NO: 1888739
ucacuaaucagucgggauu

SEQ ID NO: 2553299 - RNA, 19 nt, Artificial Sequence
  Description of Artificial Sequence: Synthetic oligonucleotide
  Antisense strand to SEQ ID NO: 2553298
aaucccgacugauuaguga

SEQ ID NO: 2553300 - RNA, 19 nt, Artificial Sequence
  Description of Artificial Sequence: Synthetic oligonucleotide
  Sense strand starting at position 2517 of SEQ ID NO: 1888739
agaagaagguguuuacuag

SEQ ID NO: 2553301 - RNA, 19 nt, Artificial Sequence
  Description of Artificial Sequence: Synthetic oligonucleotide
  Antisense strand to SEQ ID NO: 2553300
cuaguaaacaccuucuucu

SEQ ID NO: 2553302 - RNA, 19 nt, Artificial Sequence
  Description of Artificial Sequence: Synthetic oligonucleotide
  Sense strand starting at position 2518 of SEQ ID NO: 1888739
gaagaagguguuuacuagu

SEQ ID NO: 2553303 - RNA, 19 nt, Artificial Sequence
  Description of Artificial Sequence: Synthetic oligonucleotide
  Antisense strand to SEQ ID NO: 2553302
acuaguaaacaccuucuuc

SEQ ID NO: 2553304 - RNA, 19 nt, Artificial Sequence
  Description of Artificial Sequence: Synthetic oligonucleotide
  Sense strand starting at position 2521 of SEQ ID NO: 1888739
gaagguguuuacuagugga

SEQ ID NO: 2553305 - RNA, 19 nt, Artificial Sequence
  Description of Artificial Sequence: Synthetic oligonucleotide
  Antisense strand to SEQ ID NO: 2553304
uccacuaguaaacaccuuc

SEQ ID NO: 2553306 - RNA, 19 nt, Artificial Sequence
  Description of Artificial Sequence: Synthetic oligonucleotide
  Sense strand starting at position 2563 of SEQ ID NO: 1888739
gcacauccguaguuucuua

SEQ ID NO: 2553307 - RNA, 19 nt, Artificial Sequence
  Description of Artificial Sequence: Synthetic oligonucleotide
  Antisense strand to SEQ ID NO: 2553306
uaagaaacuacggaugugc

SEQ ID NO: 2553308 - RNA, 19 nt, Artificial Sequence
  Description of Artificial Sequence: Synthetic oligonucleotide
  Sense strand starting at position 2606 of SEQ ID NO: 1888739
cccucagcccuacgaaauu

SEQ ID NO: 2553309 - RNA, 19 nt, Artificial Sequence
  Description of Artificial Sequence: Synthetic oligonucleotide
  Antisense strand to SEQ ID NO: 2553308
aauuucguagggcugaggg

SEQ ID NO: 2553310 - RNA, 19 nt, Artificial Sequence
  Description of Artificial Sequence: Synthetic oligonucleotide
  Sense strand starting at position 2684 of SEQ ID NO: 1888739
auaguucgugcucaucaca

SEQ ID NO: 2553311 - RNA, 19 nt, Artificial Sequence
  Description of Artificial Sequence: Synthetic oligonucleotide
  Antisense strand to SEQ ID NO: 2553310
ugugaugagcacgaacuau

SEQ ID NO: 2553312 - RNA, 19 nt, Artificial Sequence
  Description of Artificial Sequence: Synthetic oligonucleotide
  Sense strand starting at position 2687 of SEQ ID NO: 1888739
guucgugcucaucacauaa

SEQ ID NO: 2553313 - RNA, 19 nt, Artificial Sequence
  Description of Artificial Sequence: Synthetic oligonucleotide
  Antisense strand to SEQ ID NO: 2553312
uuaugugaugagcacgaac

SEQ ID NO: 2553314 - RNA, 19 nt, Artificial Sequence
  Description of Artificial Sequence: Synthetic oligonucleotide
  Sense strand starting at position 2754 of SEQ ID NO: 1888739
cggaaauucgaacgagaua

SEQ ID NO: 2553315 - RNA, 19 nt, Artificial Sequence
  Description of Artificial Sequence: Synthetic oligonucleotide
  Antisense strand to SEQ ID NO: 2553314
uaucucguucgaauuuccg

SEQ ID NO: 2553316 - RNA, 19 nt, Artificial Sequence
  Description of Artificial Sequence: Synthetic oligonucleotide
  Sense strand starting at position 2841 of SEQ ID NO: 1888739
aaaggagucugcuacauuc

SEQ ID NO: 2553317 - RNA, 19 nt, Artificial Sequence
  Description of Artificial Sequence: Synthetic oligonucleotide
  Antisense strand to SEQ ID NO: 2553316
gaauguagcagacuccuuu

SEQ ID NO: 2553318 - RNA, 19 nt, Artificial Sequence
  Description of Artificial Sequence: Synthetic oligonucleotide
  Sense strand starting at position 2858 of SEQ ID NO: 1888739
uccauaacccugugaaaga

SEQ ID NO: 2553319 - RNA, 19 nt, Artificial Sequence
  Description of Artificial Sequence: Synthetic oligonucleotide
  Antisense strand to SEQ ID NO: 2553318
ucuuucacaggguuaugga

SEQ ID NO: 2553320 - RNA, 19 nt, Artificial Sequence
  Description of Artificial Sequence: Synthetic oligonucleotide
  Sense strand starting at position 3107 of SEQ ID NO: 1888739
acuggaaagguguguugau

SEQ ID NO: 2553321 - RNA, 19 nt, Artificial Sequence
  Description of Artificial Sequence: Synthetic oligonucleotide
  Antisense strand to SEQ ID NO: 2553320
aucaacacaccuuuccagu

SEQ ID NO: 2553322 - RNA, 19 nt, Artificial Sequence
  Description of Artificial Sequence: Synthetic oligonucleotide
  Sense strand starting at position 3108 of SEQ ID NO: 1888739
cuggaaagguguguugauu

SEQ ID NO: 2553323 - RNA, 19 nt, Artificial Sequence
  Description of Artificial Sequence: Synthetic oligonucleotide
  Antisense strand to SEQ ID NO: 2553322
aaucaacacaccuuuccag

SEQ ID NO: 2553324 - RNA, 19 nt, Artificial Sequence
  Description of Artificial Sequence: Synthetic oligonucleotide
  Sense strand starting at position 3277 of SEQ ID NO: 1888739
gggcaaagauacuuugugu

SEQ ID NO: 2553325 - RNA, 19 nt, Artificial Sequence
  Description of Artificial Sequence: Synthetic oligonucleotide
  Antisense strand to SEQ ID NO: 2553324
acacaaaguaucuuugccc

SEQ ID NO: 2553326 - RNA, 19 nt, Artificial Sequence
  Description of Artificial Sequence: Synthetic oligonucleotide
  Sense strand starting at position 3310 of SEQ ID NO: 1888739
guguuaguucuaggcuuag

SEQ ID NO: 2553327 - RNA, 19 nt, Artificial Sequence
  Description of Artificial Sequence: Synthetic oligonucleotide
  Antisense strand to SEQ ID NO: 2553326
cuaagccuagaacuaacac

SEQ ID NO: 2553328 - RNA, 19 nt, Artificial Sequence
  Description of Artificial Sequence: Synthetic oligonucleotide
  Sense strand starting at position 3314 of SEQ ID NO: 1888739
uaguucuaggcuuagauga

SEQ ID NO: 2553329 - RNA, 19 nt, Artificial Sequence
  Description of Artificial Sequence: Synthetic oligonucleotide
  Antisense strand to SEQ ID NO: 2553328
ucaucuaagccuagaacua

SEQ ID NO: 2553330 - RNA, 19 nt, Artificial Sequence
  Description of Artificial Sequence: Synthetic oligonucleotide
  Sense strand starting at position 3316 of SEQ ID NO: 1888739
guucuaggcuuagaugaua

SEQ ID NO: 2553331 - RNA, 19 nt, Artificial Sequence
  Description of Artificial Sequence: Synthetic oligonucleotide
  Antisense strand to SEQ ID NO: 2553330
uaucaucuaagccuagaac

SEQ ID NO: 2553332 - RNA, 19 nt, Artificial Sequence
  Description of Artificial Sequence: Synthetic oligonucleotide
  Sense strand starting at position 3321 of SEQ ID NO: 1888739
aggcuuagaugauaaugaa

SEQ ID NO: 2553333 - RNA, 19 nt, Artificial Sequence
  Description of Artificial Sequence: Synthetic oligonucleotide
  Antisense strand to SEQ ID NO: 2553332
uucauuaucaucuaagccu

SEQ ID NO: 2553334 - RNA, 19 nt, Artificial Sequence
  Description of Artificial Sequence: Synthetic oligonucleotide
  Sense strand starting at position 3324 of SEQ ID NO: 1888739
cuuagaugauaaugaacua

SEQ ID NO: 2553335 - RNA, 19 nt, Artificial Sequence
  Description of Artificial Sequence: Synthetic oligonucleotide
  Antisense strand to SEQ ID NO: 2553334
uaguucauuaucaucuaag

SEQ ID NO: 2553336 - RNA, 19 nt, Artificial Sequence
  Description of Artificial Sequence: Synthetic oligonucleotide
  Sense strand starting at position 3351 of SEQ ID NO: 1888739
ccgacauguguccagugau

SEQ ID NO: 2553337 - RNA, 19 nt, Artificial Sequence
  Description of Artificial Sequence: Synthetic oligonucleotide
  Antisense strand to SEQ ID NO: 2553336
aucacuggacacaugucgg

SEQ ID NO: 2553338 - RNA, 19 nt, Artificial Sequence
  Description of Artificial Sequence: Synthetic oligonucleotide
  Sense strand starting at position 3372 of SEQ ID NO: 1888739
aauuauucgcucuguggga

SEQ ID NO: 2553339 - RNA, 19 nt, Artificial Sequence
  Description of Artificial Sequence: Synthetic oligonucleotide
  Antisense strand to SEQ ID NO: 2553338
ucccacagagcgaauaauu

SEQ ID NO: 2553340 - RNA, 19 nt, Artificial Sequence
  Description of Artificial Sequence: Synthetic oligonucleotide
  Sense strand starting at position 3445 of SEQ ID NO: 1888739
aguagcucucgccagucau

SEQ ID NO: 2553341 - RNA, 19 nt, Artificial Sequence
  Description of Artificial Sequence: Synthetic oligonucleotide
  Antisense strand to SEQ ID NO: 2553340
augacuggcgagagcuacu

SEQ ID NO: 2553342 - RNA, 19 nt, Artificial Sequence
  Description of Artificial Sequence: Synthetic oligonucleotide
  Sense strand starting at position 3452 of SEQ ID NO: 1888739
cucgccagucauugugaca

SEQ ID NO: 2553343 - RNA, 19 nt, Artificial Sequence
  Description of Artificial Sequence: Synthetic oligonucleotide
  Antisense strand to SEQ ID NO: 2553342
ugucacaaugacuggcgag

SEQ ID NO: 2553344 - RNA, 19 nt, Artificial Sequence
  Description of Artificial Sequence: Synthetic oligonucleotide
  Sense strand starting at position 3505 of SEQ ID NO: 1888739
gagagccacuagguuuaau

SEQ ID NO: 2553345 - RNA, 19 nt, Artificial Sequence
  Description of Artificial Sequence: Synthetic oligonucleotide
  Antisense strand to SEQ ID NO: 2553344
auuaaaccuaguggcucuc

SEQ ID NO: 2553346 - RNA, 19 nt, Artificial Sequence
  Description of Artificial Sequence: Synthetic oligonucleotide
  Sense strand starting at position 3508 of SEQ ID NO: 1888739
agccacuagguuuaaugau

SEQ ID NO: 2553347 - RNA, 19 nt, Artificial Sequence
  Description of Artificial Sequence: Synthetic oligonucleotide
  Antisense strand to SEQ ID NO: 2553346
aucauuaaaccuaguggcu

SEQ ID NO: 2553348 - RNA, 19 nt, Artificial Sequence
  Description of Artificial Sequence: Synthetic oligonucleotide
  Sense strand starting at position 3533 of SEQ ID NO: 1888739
gucccuuccugcccugaga

SEQ ID NO: 2553349 - RNA, 19 nt, Artificial Sequence
  Description of Artificial Sequence: Synthetic oligonucleotide
  Antisense strand to SEQ ID NO: 2553348
ucucagggcaggaagggac

SEQ ID NO: 2553350 - RNA, 19 nt, Artificial Sequence
  Description of Artificial Sequence: Synthetic oligonucleotide
  Sense strand starting at position 3535 of SEQ ID NO: 1888739
cccuuccugcccugagauu

SEQ ID NO: 2553351 - RNA, 19 nt, Artificial Sequence
  Description of Artificial Sequence: Synthetic oligonucleotide
  Antisense strand to SEQ ID NO: 2553350
aaucucagggcaggaaggg

SEQ ID NO: 2553352 - RNA, 19 nt, Artificial Sequence
  Description of Artificial Sequence: Synthetic oligonucleotide
  Sense strand starting at position 3542 of SEQ ID NO: 1888739
ugcccugagauucguggau

SEQ ID NO: 2553353 - RNA, 19 nt, Artificial Sequence
  Description of Artificial Sequence: Synthetic oligonucleotide
  Antisense strand to SEQ ID NO: 2553352
auccacgaaucucagggca

SEQ ID NO: 2553354 - RNA, 19 nt, Artificial Sequence
  Description of Artificial Sequence: Synthetic oligonucleotide
  Sense strand starting at position 3544 of SEQ ID NO: 1888739
cccugagauucguggauuc

SEQ ID NO: 2553355 - RNA, 19 nt, Artificial Sequence
  Description of Artificial Sequence: Synthetic oligonucleotide
  Antisense strand to SEQ ID NO: 2553354
gaauccacgaaucucaggg

SEQ ID NO: 2553356 - RNA, 19 nt, Artificial Sequence
  Description of Artificial Sequence: Synthetic oligonucleotide
  Sense strand starting at position 3546 of SEQ ID NO: 1888739
cugagauucguggauucuc

SEQ ID NO: 2553357 - RNA, 19 nt, Artificial Sequence
  Description of Artificial Sequence: Synthetic oligonucleotide
  Antisense strand to SEQ ID NO: 2553356
gagaauccacgaaucucag

SEQ ID NO: 2553358 - RNA, 19 nt, Artificial Sequence
  Description of Artificial Sequence: Synthetic oligonucleotide
  Sense strand starting at position 3555 of SEQ ID NO: 1888739
guggauucucauggaguuu

SEQ ID NO: 2553359 - RNA, 19 nt, Artificial Sequence
  Description of Artificial Sequence: Synthetic oligonucleotide
  Antisense strand to SEQ ID NO: 2553358
aaacuccaugagaauccac

SEQ ID NO: 2553360 - RNA, 19 nt, Artificial Sequence
  Description of Artificial Sequence: Synthetic oligonucleotide
  Sense strand starting at position 3609 of SEQ ID NO: 1888739
uccuaugaaccaggguaaa

SEQ ID NO: 2553361 - RNA, 19 nt, Artificial Sequence
  Description of Artificial Sequence: Synthetic oligonucleotide
  Antisense strand to SEQ ID NO: 2553360
uuuacccugguucauagga

SEQ ID NO: 2553362 - RNA, 19 nt, Artificial Sequence
  Description of Artificial Sequence: Synthetic oligonucleotide
  Sense strand starting at position 3621 of SEQ ID NO: 1888739
ggguaaacaugagucaggu

SEQ ID NO: 2553363 - RNA, 19 nt, Artificial Sequence
  Description of Artificial Sequence: Synthetic oligonucleotide
  Antisense strand to SEQ ID NO: 2553362
accugacucauguuuaccc

SEQ ID NO: 2553364 - RNA, 19 nt, Artificial Sequence
  Description of Artificial Sequence: Synthetic oligonucleotide
  Sense strand starting at position 3625 of SEQ ID NO: 1888739
aaacaugagucagguucga

SEQ ID NO: 2553365 - RNA, 19 nt, Artificial Sequence
  Description of Artificial Sequence: Synthetic oligonucleotide
  Antisense strand to SEQ ID NO: 2553364
ucgaaccugacucauguuu

SEQ ID NO: 2553366 - RNA, 19 nt, Artificial Sequence
  Description of Artificial Sequence: Synthetic oligonucleotide
  Sense strand starting at position 3866 of SEQ ID NO: 1888739
acguuauaauuggaauauc

SEQ ID NO: 2553367 - RNA, 19 nt, Artificial Sequence
  Description of Artificial Sequence: Synthetic oligonucleotide
  Antisense strand to SEQ ID NO: 2553366
gauauuccaauuauaacgu

SEQ ID NO: 2553368 - RNA, 19 nt, Artificial Sequence
  Description of Artificial Sequence: Synthetic oligonucleotide
  Sense strand starting at position 3946 of SEQ ID NO: 1888739
aagaaugaugugcacacuu

SEQ ID NO: 2553369 - RNA, 19 nt, Artificial Sequence
  Description of Artificial Sequence: Synthetic oligonucleotide
  Antisense strand to SEQ ID NO: 2553368
aagugugcacaucauucuu

SEQ ID NO: 2553370 - RNA, 19 nt, Artificial Sequence
  Description of Artificial Sequence: Synthetic oligonucleotide
  Sense strand starting at position 3948 of SEQ ID NO: 1888739
gaaugaugugcacacuuga

SEQ ID NO: 2553371 - RNA, 19 nt, Artificial Sequence
  Description of Artificial Sequence: Synthetic oligonucleotide
  Antisense strand to SEQ ID NO: 2553370
ucaagugugcacaucauuc

SEQ ID NO: 2553372 - RNA, 19 nt, Artificial Sequence
  Description of Artificial Sequence: Synthetic oligonucleotide
  Sense strand starting at position 20 of SEQ ID NO: 1888740
guguuuaaagcucaguaug

SEQ ID NO: 2553373 - RNA, 19 nt, Artificial Sequence
  Description of Artificial Sequence: Synthetic oligonucleotide
  Antisense strand to SEQ ID NO: 2553372
cauacugagcuuuaaacac

SEQ ID NO: 2553374 - RNA, 19 nt, Artificial Sequence
  Description of Artificial Sequence: Synthetic oligonucleotide
  Sense strand starting at position 22 of SEQ ID NO: 1888740
guuuaaagcucaguaugau

SEQ ID NO: 2553375 - RNA, 19 nt, Artificial Sequence
  Description of Artificial Sequence: Synthetic oligonucleotide
  Antisense strand to SEQ ID NO: 2553374
aucauacugagcuuuaaac

SEQ ID NO: 2553376 - RNA, 19 nt, Artificial Sequence
  Description of Artificial Sequence: Synthetic oligonucleotide
  Sense strand starting at position 23 of SEQ ID NO: 1888740
uuuaaagcucaguaugaua

SEQ ID NO: 2553377 - RNA, 19 nt, Artificial Sequence
  Description of Artificial Sequence: Synthetic oligonucleotide
  Antisense strand to SEQ ID NO: 2553376
uaucauacugagcuuuaaa

SEQ ID NO: 2553378 - RNA, 19 nt, Artificial Sequence
  Description of Artificial Sequence: Synthetic oligonucleotide
  Sense strand starting at position 31 of SEQ ID NO: 1888740
ucaguaugauacggccaaa

SEQ ID NO: 2553379 - RNA, 19 nt, Artificial Sequence
  Description of Artificial Sequence: Synthetic oligonucleotide
  Antisense strand to SEQ ID NO: 2553378
uuuggccguaucauacuga

SEQ ID NO: 2553380 - RNA, 19 nt, Artificial Sequence
  Description of Artificial Sequence: Synthetic oligonucleotide
  Sense strand starting at position 83 of SEQ ID NO: 1888740
ggaagcagaugcuauacuu

SEQ ID NO: 2553381 - RNA, 19 nt, Artificial Sequence
  Description of Artificial Sequence: Synthetic oligonucleotide
  Antisense strand to SEQ ID NO: 2553380
aaguauagcaucugcuucc

SEQ ID NO: 2553382 - RNA, 19 nt, Artificial Sequence
  Description of Artificial Sequence: Synthetic oligonucleotide
  Sense strand starting at position 167 of SEQ ID NO: 1888740
gcgcuuucucuugcuacca

SEQ ID NO: 2553383 - RNA, 19 nt, Artificial Sequence
  Description of Artificial Sequence: Synthetic oligonucleotide
  Antisense strand to SEQ ID NO: 2553382
ugguagcaagagaaagcgc

SEQ ID NO: 2553384 - RNA, 19 nt, Artificial Sequence
  Description of Artificial Sequence: Synthetic oligonucleotide
  Sense strand starting at position 168 of SEQ ID NO: 1888740
cgcuuucucuugcuaccau

SEQ ID NO: 2553385 - RNA, 19 nt, Artificial Sequence
  Description of Artificial Sequence: Synthetic oligonucleotide
  Antisense strand to SEQ ID NO: 2553384
augguagcaagagaaagcg

SEQ ID NO: 2553386 - RNA, 19 nt, Artificial Sequence
  Description of Artificial Sequence: Synthetic oligonucleotide
  Sense strand starting at position 339 of SEQ ID NO: 1888740
gcugguagguuguuaaagu

SEQ ID NO: 2553387 - RNA, 19 nt, Artificial Sequence
  Description of Artificial Sequence: Synthetic oligonucleotide
  Antisense strand to SEQ ID NO: 2553386
acuuuaacaaccuaccagc

SEQ ID NO: 2553388 - RNA, 19 nt, Artificial Sequence
  Description of Artificial Sequence: Synthetic oligonucleotide
  Sense strand starting at position 503 of SEQ ID NO: 1888740
gccacuaaacuucgucuca

SEQ ID NO: 2553389 - RNA, 19 nt, Artificial Sequence
  Description of Artificial Sequence: Synthetic oligonucleotide
  Antisense strand to SEQ ID NO: 2553388
ugagacgaaguuuaguggc

SEQ ID NO: 2553390 - RNA, 19 nt, Artificial Sequence
  Description of Artificial Sequence: Synthetic oligonucleotide
  Sense strand starting at position 508 of SEQ ID NO: 1888740
uaaacuucgucucaggauu

SEQ ID NO: 2553391 - RNA, 19 nt, Artificial Sequence
  Description of Artificial Sequence: Synthetic oligonucleotide
  Antisense strand to SEQ ID NO: 2553390
aauccugagacgaaguuua

SEQ ID NO: 2553392 - RNA, 19 nt, Artificial Sequence
  Description of Artificial Sequence: Synthetic oligonucleotide
  Sense strand starting at position 510 of SEQ ID NO: 1888740
aacuucgucucaggauuau

SEQ ID NO: 2553393 - RNA, 19 nt, Artificial Sequence
  Description of Artificial Sequence: Synthetic oligonucleotide
  Antisense strand to SEQ ID NO: 2553392
auaauccugagacgaaguu

SEQ ID NO: 2553394 - RNA, 19 nt, Artificial Sequence
  Description of Artificial Sequence: Synthetic oligonucleotide
  Sense strand starting at position 519 of SEQ ID NO: 1888740
ucaggauuauuccggaguu

SEQ ID NO: 2553395 - RNA, 19 nt, Artificial Sequence
  Description of Artificial Sequence: Synthetic oligonucleotide
  Antisense strand to SEQ ID NO: 2553394
aacuccggaauaauccuga

SEQ ID NO: 2553396 - RNA, 19 nt, Artificial Sequence
  Description of Artificial Sequence: Synthetic oligonucleotide
  Sense strand starting at position 520 of SEQ ID NO: 1888740
caggauuauuccggaguuu

SEQ ID NO: 2553397 - RNA, 19 nt, Artificial Sequence
  Description of Artificial Sequence: Synthetic oligonucleotide
  Antisense strand to SEQ ID NO: 2553396
aaacuccggaauaauccug

SEQ ID NO: 2553398 - RNA, 19 nt, Artificial Sequence
  Description of Artificial Sequence: Synthetic oligonucleotide
  Sense strand starting at position 521 of SEQ ID NO: 1888740
aggauuauuccggaguuug

SEQ ID NO: 2553399 - RNA, 19 nt, Artificial Sequence
  Description of Artificial Sequence: Synthetic oligonucleotide
  Antisense strand to SEQ ID NO: 2553398
caaacuccggaauaauccu

SEQ ID NO: 2553400 - RNA, 19 nt, Artificial Sequence
  Description of Artificial Sequence: Synthetic oligonucleotide
  Sense strand starting at position 526 of SEQ ID NO: 1888740
uauuccggaguuugugaaa

SEQ ID NO: 2553401 - RNA, 19 nt, Artificial Sequence
  Description of Artificial Sequence: Synthetic oligonucleotide
  Antisense strand to SEQ ID NO: 2553400
uuucacaaacuccggaaua

SEQ ID NO: 2553402 - RNA, 19 nt, Artificial Sequence
  Description of Artificial Sequence: Synthetic oligonucleotide
  Sense strand starting at position 529 of SEQ ID NO: 1888740
uccggaguuugugaaauca

SEQ ID NO: 2553403 - RNA, 19 nt, Artificial Sequence
  Description of Artificial Sequence: Synthetic oligonucleotide
  Antisense strand to SEQ ID NO: 2553402
ugauuucacaaacuccgga

SEQ ID NO: 2553404 - RNA, 19 nt, Artificial Sequence
  Description of Artificial Sequence: Synthetic oligonucleotide
  Sense strand starting at position 561 of SEQ ID NO: 1888740
cacaguagacaguaguuua

SEQ ID NO: 2553405 - RNA, 19 nt, Artificial Sequence
  Description of Artificial Sequence: Synthetic oligonucleotide
  Antisense strand to SEQ ID NO: 2553404
uaaacuacugucuacugug

SEQ ID NO: 2553406 - RNA, 19 nt, Artificial Sequence
  Description of Artificial Sequence: Synthetic oligonucleotide
  Sense strand starting at position 775 of SEQ ID NO: 1888740
gcaagauucuacuccacag

SEQ ID NO: 2553407 - RNA, 19 nt, Artificial Sequence
  Description of Artificial Sequence: Synthetic oligonucleotide
  Antisense strand to SEQ ID NO: 2553406
cuguggaguagaaucuugc

SEQ ID NO: 2553408 - RNA, 19 nt, Artificial Sequence
  Description of Artificial Sequence: Synthetic oligonucleotide
  Sense strand starting at position 854 of SEQ ID NO: 1888740
ggcggauuccuggaucaca

SEQ ID NO: 2553409 - RNA, 19 nt, Artificial Sequence
  Description of Artificial Sequence: Synthetic oligonucleotide
  Antisense strand to SEQ ID NO: 2553408
ugugauccaggaauccgcc

SEQ ID NO: 2553410 - RNA, 19 nt, Artificial Sequence
  Description of Artificial Sequence: Synthetic oligonucleotide
  Sense strand starting at position 935 of SEQ ID NO: 1888740
gggacucccggcuaacaua

SEQ ID NO: 2553411 - RNA, 19 nt, Artificial Sequence
  Description of Artificial Sequence: Synthetic oligonucleotide
  Antisense strand to SEQ ID NO: 2553410
uauguuagccgggaguccc

SEQ ID NO: 2553412 - RNA, 19 nt, Artificial Sequence
  Description of Artificial Sequence: Synthetic oligonucleotide
  Sense strand starting at position 1106 of SEQ ID NO: 1888740
cccaaucuucugcgucaca

SEQ ID NO: 2553413 - RNA, 19 nt, Artificial Sequence
  Description of Artificial Sequence: Synthetic oligonucleotide
  Antisense strand to SEQ ID NO: 2553412
ugugacgcagaagauuggg

SEQ ID NO: 2553414 - RNA, 19 nt, Artificial Sequence
  Description of Artificial Sequence: Synthetic oligonucleotide
  Sense strand starting at position 1107 of SEQ ID NO: 1888740
ccaaucuucugcgucacaa

SEQ ID NO: 2553415 - RNA, 19 nt, Artificial Sequence
  Description of Artificial Sequence: Synthetic oligonucleotide
  Antisense strand to SEQ ID NO: 2553414
uugugacgcagaagauugg

SEQ ID NO: 2553416 - RNA, 19 nt, Artificial Sequence
  Description of Artificial Sequence: Synthetic oligonucleotide
  Sense strand starting at position 1545 of SEQ ID NO: 1888740
ucacuaaucagucgggauu

SEQ ID NO: 2553417 - RNA, 19 nt, Artificial Sequence
  Description of Artificial Sequence: Synthetic oligonucleotide
  Antisense strand to SEQ ID NO: 2553416
aaucccgacugauuaguga

SEQ ID NO: 2553418 - RNA, 19 nt, Artificial Sequence
  Description of Artificial Sequence: Synthetic oligonucleotide
  Sense strand starting at position 3153 of SEQ ID NO: 1888740
gcccaagggugucgggaau

SEQ ID NO: 2553419 - RNA, 19 nt, Artificial Sequence
  Description of Artificial Sequence: Synthetic oligonucleotide
  Antisense strand to SEQ ID NO: 2553418
auucccgacacccuugggc

SEQ ID NO: 2553420 - RNA, 19 nt, Artificial Sequence
  Description of Artificial Sequence: Synthetic oligonucleotide
  Sense strand starting at position 3371 of SEQ ID NO: 1888740
agaagaagguguuuacuag

SEQ ID NO: 2553421 - RNA, 19 nt, Artificial Sequence
  Description of Artificial Sequence: Synthetic oligonucleotide
  Antisense strand to SEQ ID NO: 2553420
cuaguaaacaccuucuucu

SEQ ID NO: 2553422 - RNA, 19 nt, Artificial Sequence
  Description of Artificial Sequence: Synthetic oligonucleotide
  Sense strand starting at position 3372 of SEQ ID NO: 1888740
gaagaagguguuuacuagu

SEQ ID NO: 2553423 - RNA, 19 nt, Artificial Sequence
  Description of Artificial Sequence: Synthetic oligonucleotide
  Antisense strand to SEQ ID NO: 2553422
acuaguaaacaccuucuuc

SEQ ID NO: 2553424 - RNA, 19 nt, Artificial Sequence
  Description of Artificial Sequence: Synthetic oligonucleotide
  Sense strand starting at position 3375 of SEQ ID NO: 1888740
gaagguguuuacuagugga

SEQ ID NO: 2553425 - RNA, 19 nt, Artificial Sequence
  Description of Artificial Sequence: Synthetic oligonucleotide
  Antisense strand to SEQ ID NO: 2553424
uccacuaguaaacaccuuc

SEQ ID NO: 2553426 - RNA, 19 nt, Artificial Sequence
  Description of Artificial Sequence: Synthetic oligonucleotide
  Sense strand starting at position 3378 of SEQ ID NO: 1888740
gguguuuacuaguggauuc

SEQ ID NO: 2553427 - RNA, 19 nt, Artificial Sequence
  Description of Artificial Sequence: Synthetic oligonucleotide
  Antisense strand to SEQ ID NO: 2553426
gaauccacuaguaaacacc

SEQ ID NO: 2553428 - RNA, 19 nt, Artificial Sequence
  Description of Artificial Sequence: Synthetic oligonucleotide
  Sense strand starting at position 3417 of SEQ ID NO: 1888740
gcacauccguaguuucuua

SEQ ID NO: 2553429 - RNA, 19 nt, Artificial Sequence
  Description of Artificial Sequence: Synthetic oligonucleotide
  Antisense strand to SEQ ID NO: 2553428
uaagaaacuacggaugugc

SEQ ID NO: 2553430 - RNA, 19 nt, Artificial Sequence
  Description of Artificial Sequence: Synthetic oligonucleotide
  Sense strand starting at position 3460 of SEQ ID NO: 1888740
cccucagcccuacgaaauu

SEQ ID NO: 2553431 - RNA, 19 nt, Artificial Sequence
  Description of Artificial Sequence: Synthetic oligonucleotide
  Antisense strand to SEQ ID NO: 2553430
aauuucguagggcugaggg

SEQ ID NO: 2553432 - RNA, 19 nt, Artificial Sequence
  Description of Artificial Sequence: Synthetic oligonucleotide
  Sense strand starting at position 3513 of SEQ ID NO: 1888740
aaggucuucugcugccaga

SEQ ID NO: 2553433 - RNA, 19 nt, Artificial Sequence
  Description of Artificial Sequence: Synthetic oligonucleotide
  Antisense strand to SEQ ID NO: 2553432
ucuggcagcagaagaccuu

SEQ ID NO: 2553434 - RNA, 19 nt, Artificial Sequence
  Description of Artificial Sequence: Synthetic oligonucleotide
  Sense strand starting at position 3516 of SEQ ID NO: 1888740
gucuucugcugccagaauu

SEQ ID NO: 2553435 - RNA, 19 nt, Artificial Sequence
  Description of Artificial Sequence: Synthetic oligonucleotide
  Antisense strand to SEQ ID NO: 2553434
aauucuggcagcagaagac

SEQ ID NO: 2553436 - RNA, 19 nt, Artificial Sequence
  Description of Artificial Sequence: Synthetic oligonucleotide
  Sense strand starting at position 3538 of SEQ ID NO: 1888740
auaguucgugcucaucaca

SEQ ID NO: 2553437 - RNA, 19 nt, Artificial Sequence
  Description of Artificial Sequence: Synthetic oligonucleotide
  Antisense strand to SEQ ID NO: 2553436
ugugaugagcacgaacuau

SEQ ID NO: 2553438 - RNA, 19 nt, Artificial Sequence
  Description of Artificial Sequence: Synthetic oligonucleotide
  Sense strand starting at position 3541 of SEQ ID NO: 1888740
guucgugcucaucacauaa

SEQ ID NO: 2553439 - RNA, 19 nt, Artificial Sequence
  Description of Artificial Sequence: Synthetic oligonucleotide
  Antisense strand to SEQ ID NO: 2553438
uuaugugaugagcacgaac

SEQ ID NO: 2553440 - RNA, 19 nt, Artificial Sequence
  Description of Artificial Sequence: Synthetic oligonucleotide
  Sense strand starting at position 3543 of SEQ ID NO: 1888740
ucgugcucaucacauaauu

SEQ ID NO: 2553441 - RNA, 19 nt, Artificial Sequence
  Description of Artificial Sequence: Synthetic oligonucleotide
  Antisense strand to SEQ ID NO: 2553440
aauuaugugaugagcacga

SEQ ID NO: 2553442 - RNA, 19 nt, Artificial Sequence
  Description of Artificial Sequence: Synthetic oligonucleotide
  Sense strand starting at position 3608 of SEQ ID NO: 1888740
cggaaauucgaacgagaua

SEQ ID NO: 2553443 - RNA, 19 nt, Artificial Sequence
  Description of Artificial Sequence: Synthetic oligonucleotide
  Antisense strand to SEQ ID NO: 2553442
uaucucguucgaauuuccg

SEQ ID NO: 2553444 - RNA, 19 nt, Artificial Sequence
  Description of Artificial Sequence: Synthetic oligonucleotide
  Sense strand starting at position 3695 of SEQ ID NO: 1888740
aaaggagucugcuacauuc

SEQ ID NO: 2553445 - RNA, 19 nt, Artificial Sequence
  Description of Artificial Sequence: Synthetic oligonucleotide
  Antisense strand to SEQ ID NO: 2553444
gaauguagcagacuccuuu

SEQ ID NO: 2553446 - RNA, 19 nt, Artificial Sequence
  Description of Artificial Sequence: Synthetic oligonucleotide
  Sense strand starting at position 3712 of SEQ ID NO: 1888740
uccauaacccugugaaaga

SEQ ID NO: 2553447 - RNA, 19 nt, Artificial Sequence
  Description of Artificial Sequence: Synthetic oligonucleotide
  Antisense strand to SEQ ID NO: 2553446
ucuuucacaggguuaugga

SEQ ID NO: 2553448 - RNA, 19 nt, Artificial Sequence
  Description of Artificial Sequence: Synthetic oligonucleotide
  Sense strand starting at position 3961 of SEQ ID NO: 1888740
acuggaaagguguguugau

SEQ ID NO: 2553449 - RNA, 19 nt, Artificial Sequence
  Description of Artificial Sequence: Synthetic oligonucleotide
  Antisense strand to SEQ ID NO: 2553448
aucaacacaccuuuccagu

SEQ ID NO: 2553450 - RNA, 19 nt, Artificial Sequence
  Description of Artificial Sequence: Synthetic oligonucleotide
  Sense strand starting at position 3962 of SEQ ID NO: 1888740
cuggaaagguguguugauu

SEQ ID NO: 2553451 - RNA, 19 nt, Artificial Sequence
  Description of Artificial Sequence: Synthetic oligonucleotide
  Antisense strand to SEQ ID NO: 2553450
aaucaacacaccuuuccag

SEQ ID NO: 2553452 - RNA, 19 nt, Artificial Sequence
  Description of Artificial Sequence: Synthetic oligonucleotide
  Sense strand starting at position 12 of SEQ ID NO: 1888741
uaagaaaggccaugugacu

SEQ ID NO: 2553453 - RNA, 19 nt, Artificial Sequence
  Description of Artificial Sequence: Synthetic oligonucleotide
  Antisense strand to SEQ ID NO: 2553452
agucacauggccuuucuua

SEQ ID NO: 2553454 - RNA, 19 nt, Artificial Sequence
  Description of Artificial Sequence: Synthetic oligonucleotide
  Sense strand starting at position 36 of SEQ ID NO: 1888741
cuaauuuccuggcuugcau

SEQ ID NO: 2553455 - RNA, 19 nt, Artificial Sequence
  Description of Artificial Sequence: Synthetic oligonucleotide
  Antisense strand to SEQ ID NO: 2553454
augcaagccaggaaauuag

SEQ ID NO: 2553456 - RNA, 19 nt, Artificial Sequence
  Description of Artificial Sequence: Synthetic oligonucleotide
  Sense strand starting at position 112 of SEQ ID NO: 1888741
ccacuauaucgugcugcuu

SEQ ID NO: 2553457 - RNA, 19 nt, Artificial Sequence
  Description of Artificial Sequence: Synthetic oligonucleotide
  Antisense strand to SEQ ID NO: 2553456
aagcagcacgauauagugg

SEQ ID NO: 2553458 - RNA, 19 nt, Artificial Sequence
  Description of Artificial Sequence: Synthetic oligonucleotide
  Sense strand starting at position 176 of SEQ ID NO: 1888741
gugaacuguguucaggaca

SEQ ID NO: 2553459 - RNA, 19 nt, Artificial Sequence
  Description of Artificial Sequence: Synthetic oligonucleotide
  Antisense strand to SEQ ID NO: 2553458
uguccugaacacaguucac

SEQ ID NO: 2553460 - RNA, 19 nt, Artificial Sequence
  Description of Artificial Sequence: Synthetic oligonucleotide
  Sense strand starting at position 267 of SEQ ID NO: 1888741
ggagaaugccaagguuauu

SEQ ID NO: 2553461 - RNA, 19 nt, Artificial Sequence
  Description of Artificial Sequence: Synthetic oligonucleotide
  Antisense strand to SEQ ID NO: 2553460
aauaaccuuggcauucucc

SEQ ID NO: 2553462 - RNA, 19 nt, Artificial Sequence
  Description of Artificial Sequence: Synthetic oligonucleotide
  Sense strand starting at position 611 of SEQ ID NO: 1888741
uuaauaagguuuccuagag

SEQ ID NO: 2553463 - RNA, 19 nt, Artificial Sequence
  Description of Artificial Sequence: Synthetic oligonucleotide
  Antisense strand to SEQ ID NO: 2553462
cucuaggaaaccuuauuaa

SEQ ID NO: 2553464 - RNA, 19 nt, Artificial Sequence
  Description of Artificial Sequence: Synthetic oligonucleotide
  Sense strand starting at position 612 of SEQ ID NO: 1888741
uaauaagguuuccuagagu

SEQ ID NO: 2553465 - RNA, 19 nt, Artificial Sequence
  Description of Artificial Sequence: Synthetic oligonucleotide
  Antisense strand to SEQ ID NO: 2553464
acucuaggaaaccuuauua

SEQ ID NO: 2553466 - RNA, 19 nt, Artificial Sequence
  Description of Artificial Sequence: Synthetic oligonucleotide
  Sense strand starting at position 615 of SEQ ID NO: 1888741
uaagguuuccuagaguagg

SEQ ID NO: 2553467 - RNA, 19 nt, Artificial Sequence
  Description of Artificial Sequence: Synthetic oligonucleotide
  Antisense strand to SEQ ID NO: 2553466
ccuacucuaggaaaccuua

SEQ ID NO: 2553468 - RNA, 19 nt, Artificial Sequence
  Description of Artificial Sequence: Synthetic oligonucleotide
  Sense strand starting at position 620 of SEQ ID NO: 1888741
uuuccuagaguaggaaaua

SEQ ID NO: 2553469 - RNA, 19 nt, Artificial Sequence
  Description of Artificial Sequence: Synthetic oligonucleotide
  Antisense strand to SEQ ID NO: 2553468
uauuuccuacucuaggaaa

SEQ ID NO: 2553470 - RNA, 19 nt, Artificial Sequence
  Description of Artificial Sequence: Synthetic oligonucleotide
  Sense strand starting at position 732 of SEQ ID NO: 1888741
agggaaugaugacaaugaa

SEQ ID NO: 2553471 - RNA, 19 nt, Artificial Sequence
  Description of Artificial Sequence: Synthetic oligonucleotide
  Antisense strand to SEQ ID NO: 2553470
uucauugucaucauucccu

SEQ ID NO: 2553472 - RNA, 19 nt, Artificial Sequence
  Description of Artificial Sequence: Synthetic oligonucleotide
  Sense strand starting at position 766 of SEQ ID NO: 1888741
ggauguuuggcagauuaau

SEQ ID NO: 2553473 - RNA, 19 nt, Artificial Sequence
  Description of Artificial Sequence: Synthetic oligonucleotide
  Antisense strand to SEQ ID NO: 2553472
auuaaucugccaaacaucc

SEQ ID NO: 2553474 - RNA, 19 nt, Artificial Sequence
  Description of Artificial Sequence: Synthetic oligonucleotide
  Sense strand starting at position 804 of SEQ ID NO: 1888741
agagguaugagaggucagu

SEQ ID NO: 2553475 - RNA, 19 nt, Artificial Sequence
  Description of Artificial Sequence: Synthetic oligonucleotide
  Antisense strand to SEQ ID NO: 2553474
acugaccucucauaccucu

SEQ ID NO: 2553476 - RNA, 19 nt, Artificial Sequence
  Description of Artificial Sequence: Synthetic oligonucleotide
  Sense strand starting at position 838 of SEQ ID NO: 1888741
aggcuuauguuauuuacuu

SEQ ID NO: 2553477 - RNA, 19 nt, Artificial Sequence
  Description of Artificial Sequence: Synthetic oligonucleotide
  Antisense strand to SEQ ID NO: 2553476
aaguaaauaacauaagccu

SEQ ID NO: 2553478 - RNA, 19 nt, Artificial Sequence
  Description of Artificial Sequence: Synthetic oligonucleotide
  Sense strand starting at position 839 of SEQ ID NO: 1888741
ggcuuauguuauuuacuuu

SEQ ID NO: 2553479 - RNA, 19 nt, Artificial Sequence
  Description of Artificial Sequence: Synthetic oligonucleotide
  Antisense strand to SEQ ID NO: 2553478
aaaguaaauaacauaagcc

SEQ ID NO: 2553480 - RNA, 19 nt, Artificial Sequence
  Description of Artificial Sequence: Synthetic oligonucleotide
  Sense strand starting at position 858 of SEQ ID NO: 1888741
ucaucaucacugugaggaa

SEQ ID NO: 2553481 - RNA, 19 nt, Artificial Sequence
  Description of Artificial Sequence: Synthetic oligonucleotide
  Antisense strand to SEQ ID NO: 2553480
uuccucacagugaugauga

SEQ ID NO: 2553482 - RNA, 19 nt, Artificial Sequence
  Description of Artificial Sequence: Synthetic oligonucleotide
  Sense strand starting at position 979 of SEQ ID NO: 1888741
acguuaucaguuuaauuac

SEQ ID NO: 2553483 - RNA, 19 nt, Artificial Sequence
  Description of Artificial Sequence: Synthetic oligonucleotide
  Antisense strand to SEQ ID NO: 2553482
guaauuaaacugauaacgu

SEQ ID NO: 2553484 - RNA, 19 nt, Artificial Sequence
  Description of Artificial Sequence: Synthetic oligonucleotide
  Sense strand starting at position 1320 of SEQ ID NO: 1888741
agguguuguaaucacaaug

SEQ ID NO: 2553485 - RNA, 19 nt, Artificial Sequence
  Description of Artificial Sequence: Synthetic oligonucleotide
  Antisense strand to SEQ ID NO: 2553484
cauugugauuacaacaccu

SEQ ID NO: 2553486 - RNA, 19 nt, Artificial Sequence
  Description of Artificial Sequence: Synthetic oligonucleotide
  Sense strand starting at position 1484 of SEQ ID NO: 1888741
gcugcaucaggcuagagaa

SEQ ID NO: 2553487 - RNA, 19 nt, Artificial Sequence
  Description of Artificial Sequence: Synthetic oligonucleotide
  Antisense strand to SEQ ID NO: 2553486
uucucuagccugaugcagc

SEQ ID NO: 2553488 - RNA, 19 nt, Artificial Sequence
  Description of Artificial Sequence: Synthetic oligonucleotide
  Sense strand starting at position 1584 of SEQ ID NO: 1888741
uauaauaguugagugagaa

SEQ ID NO: 2553489 - RNA, 19 nt, Artificial Sequence
  Description of Artificial Sequence: Synthetic oligonucleotide
  Antisense strand to SEQ ID NO: 2553488
uucucacucaacuauuaua

SEQ ID NO: 2553490 - RNA, 19 nt, Artificial Sequence
  Description of Artificial Sequence: Synthetic oligonucleotide
  Sense strand starting at position 1658 of SEQ ID NO: 1888741
ucauccauucuacagugua

SEQ ID NO: 2553491 - RNA, 19 nt, Artificial Sequence
  Description of Artificial Sequence: Synthetic oligonucleotide
  Antisense strand to SEQ ID NO: 2553490
uacacuguagaauggauga

SEQ ID NO: 2553492 - RNA, 19 nt, Artificial Sequence
  Description of Artificial Sequence: Synthetic oligonucleotide
  Sense strand starting at position 1663 of SEQ ID NO: 1888741
cauucuacaguguaaggau

SEQ ID NO: 2553493 - RNA, 19 nt, Artificial Sequence
  Description of Artificial Sequence: Synthetic oligonucleotide
  Antisense strand to SEQ ID NO: 2553492
auccuuacacuguagaaug

SEQ ID NO: 2553494 - RNA, 19 nt, Artificial Sequence
  Description of Artificial Sequence: Synthetic oligonucleotide
  Sense strand starting at position 1900 of SEQ ID NO: 1888741
gaguguuugcucucugcuu

SEQ ID NO: 2553495 - RNA, 19 nt, Artificial Sequence
  Description of Artificial Sequence: Synthetic oligonucleotide
  Antisense strand to SEQ ID NO: 2553494
aagcagagagcaaacacuc

SEQ ID NO: 2553496 - RNA, 19 nt, Artificial Sequence
  Description of Artificial Sequence: Synthetic oligonucleotide
  Sense strand starting at position 1939 of SEQ ID NO: 1888741
guauccucacauugugaaa

SEQ ID NO: 2553497 - RNA, 19 nt, Artificial Sequence
  Description of Artificial Sequence: Synthetic oligonucleotide
  Antisense strand to SEQ ID NO: 2553496
uuucacaaugugaggauac

SEQ ID NO: 2553498 - RNA, 19 nt, Artificial Sequence
  Description of Artificial Sequence: Synthetic oligonucleotide
  Sense strand starting at position 2162 of SEQ ID NO: 1888741
cauaguaaaggguaucuuu

SEQ ID NO: 2553499 - RNA, 19 nt, Artificial Sequence
  Description of Artificial Sequence: Synthetic oligonucleotide
  Antisense strand to SEQ ID NO: 2553498
aaagauacccuuuacuaug

SEQ ID NO: 2553500 - RNA, 19 nt, Artificial Sequence
  Description of Artificial Sequence: Synthetic oligonucleotide
  Sense strand starting at position 2165 of SEQ ID NO: 1888741
aguaaaggguaucuuugaa

SEQ ID NO: 2553501 - RNA, 19 nt, Artificial Sequence
  Description of Artificial Sequence: Synthetic oligonucleotide
  Antisense strand to SEQ ID NO: 2553500
uucaaagauacccuuuacu

SEQ ID NO: 2553502 - RNA, 19 nt, Artificial Sequence
  Description of Artificial Sequence: Synthetic oligonucleotide
  Sense strand starting at position 2234 of SEQ ID NO: 1888741
acaacuuauccuggaaguu

SEQ ID NO: 2553503 - RNA, 19 nt, Artificial Sequence
  Description of Artificial Sequence: Synthetic oligonucleotide
  Antisense strand to SEQ ID NO: 2553502
aacuuccaggauaaguugu

SEQ ID NO: 2553504 - RNA, 19 nt, Artificial Sequence
  Description of Artificial Sequence: Synthetic oligonucleotide
  Sense strand starting at position 2570 of SEQ ID NO: 1888741
ugucaaagucauggaccua

SEQ ID NO: 2553505 - RNA, 19 nt, Artificial Sequence
  Description of Artificial Sequence: Synthetic oligonucleotide
  Antisense strand to SEQ ID NO: 2553504
uagguccaugacuuugaca

SEQ ID NO: 2553506 - RNA, 19 nt, Artificial Sequence
  Description of Artificial Sequence: Synthetic oligonucleotide
  Sense strand starting at position 2585 of SEQ ID NO: 1888741
ccuagaaauccaggcuuag

SEQ ID NO: 2553507 - RNA, 19 nt, Artificial Sequence
  Description of Artificial Sequence: Synthetic oligonucleotide
  Antisense strand to SEQ ID NO: 2553506
cuaagccuggauuucuagg

SEQ ID NO: 2553508 - RNA, 19 nt, Artificial Sequence
  Description of Artificial Sequence: Synthetic oligonucleotide
  Sense strand starting at position 2862 of SEQ ID NO: 1888741
ugagcuaagugagcuauuu

SEQ ID NO: 2553509 - RNA, 19 nt, Artificial Sequence
  Description of Artificial Sequence: Synthetic oligonucleotide
  Antisense strand to SEQ ID NO: 2553508
aaauagcucacuuagcuca

SEQ ID NO: 2553510 - RNA, 19 nt, Artificial Sequence
  Description of Artificial Sequence: Synthetic oligonucleotide
  Sense strand starting at position 3011 of SEQ ID NO: 1888741
cagugaaauguguaguuau

SEQ ID NO: 2553511 - RNA, 19 nt, Artificial Sequence
  Description of Artificial Sequence: Synthetic oligonucleotide
  Antisense strand to SEQ ID NO: 2553510
auaacuacacauuucacug

SEQ ID NO: 2553512 - RNA, 19 nt, Artificial Sequence
  Description of Artificial Sequence: Synthetic oligonucleotide
  Sense strand starting at position 3014 of SEQ ID NO: 1888741
ugaaauguguaguuaugaa

SEQ ID NO: 2553513 - RNA, 19 nt, Artificial Sequence
  Description of Artificial Sequence: Synthetic oligonucleotide
  Antisense strand to SEQ ID NO: 2553512
uucauaacuacacauuuca

SEQ ID NO: 2553514 - RNA, 19 nt, Artificial Sequence
  Description of Artificial Sequence: Synthetic oligonucleotide
  Sense strand starting at position 3169 of SEQ ID NO: 1888741
ugacauugguguuucuaga

SEQ ID NO: 2553515 - RNA, 19 nt, Artificial Sequence
  Description of Artificial Sequence: Synthetic oligonucleotide
  Antisense strand to SEQ ID NO: 2553514
ucuagaaacaccaauguca

SEQ ID NO: 2553516 - RNA, 19 nt, Artificial Sequence
  Description of Artificial Sequence: Synthetic oligonucleotide
  Sense strand starting at position 3273 of SEQ ID NO: 1888741
cuuuaaucuguguaucaga

SEQ ID NO: 2553517 - RNA, 19 nt, Artificial Sequence
  Description of Artificial Sequence: Synthetic oligonucleotide
  Antisense strand to SEQ ID NO: 2553516
ucugauacacagauuaaag

SEQ ID NO: 2553518 - RNA, 19 nt, Artificial Sequence
  Description of Artificial Sequence: Synthetic oligonucleotide
  Sense strand starting at position 3281 of SEQ ID NO: 1888741
uguguaucagaguaucaau

SEQ ID NO: 2553519 - RNA, 19 nt, Artificial Sequence
  Description of Artificial Sequence: Synthetic oligonucleotide
  Antisense strand to SEQ ID NO: 2553518
auugauacucugauacaca

SEQ ID NO: 2553520 - RNA, 19 nt, Artificial Sequence
  Description of Artificial Sequence: Synthetic oligonucleotide
  Sense strand starting at position 3388 of SEQ ID NO: 1888741
gaucuucguuagguauuua

SEQ ID NO: 2553521 - RNA, 19 nt, Artificial Sequence
  Description of Artificial Sequence: Synthetic oligonucleotide
  Antisense strand to SEQ ID NO: 2553520
uaaauaccuaacgaagauc

SEQ ID NO: 2553522 - RNA, 19 nt, Artificial Sequence
  Description of Artificial Sequence: Synthetic oligonucleotide
  Sense strand starting at position 3412 of SEQ ID NO: 1888741
gggaaaucuuaaguaaucu

SEQ ID NO: 2553523 - RNA, 19 nt, Artificial Sequence
  Description of Artificial Sequence: Synthetic oligonucleotide
  Antisense strand to SEQ ID NO: 2553522
agauuacuuaagauuuccc

SEQ ID NO: 2553524 - RNA, 19 nt, Artificial Sequence
  Description of Artificial Sequence: Synthetic oligonucleotide
  Sense strand starting at position 3574 of SEQ ID NO: 1888741
auauuaaguuguuccagac

SEQ ID NO: 2553525 - RNA, 19 nt, Artificial Sequence
  Description of Artificial Sequence: Synthetic oligonucleotide
  Antisense strand to SEQ ID NO: 2553524
gucuggaacaacuuaauau

SEQ ID NO: 2553526 - RNA, 19 nt, Artificial Sequence
  Description of Artificial Sequence: Synthetic oligonucleotide
  Sense strand starting at position 3926 of SEQ ID NO: 1888741
cauggaauacuuuguggaa

SEQ ID NO: 2553527 - RNA, 19 nt, Artificial Sequence
  Description of Artificial Sequence: Synthetic oligonucleotide
  Antisense strand to SEQ ID NO: 2553526
uuccacaaaguauuccaug

SEQ ID NO: 2553528 - RNA, 19 nt, Artificial Sequence
  Description of Artificial Sequence: Synthetic oligonucleotide
  Sense strand starting at position 3953 of SEQ ID NO: 1888741
cagagagaaagcugugagu

SEQ ID NO: 2553529 - RNA, 19 nt, Artificial Sequence
  Description of Artificial Sequence: Synthetic oligonucleotide
  Antisense strand to SEQ ID NO: 2553528
acucacagcuuucucucug

SEQ ID NO: 2553530 - RNA, 19 nt, Artificial Sequence
  Description of Artificial Sequence: Synthetic oligonucleotide
  Sense strand starting at position 3955 of SEQ ID NO: 1888741
gagagaaagcugugaguug

SEQ ID NO: 2553531 - RNA, 19 nt, Artificial Sequence
  Description of Artificial Sequence: Synthetic oligonucleotide
  Antisense strand to SEQ ID NO: 2553530
caacucacagcuuucucuc

SEQ ID NO: 2553532 - RNA, 19 nt, Artificial Sequence
  Description of Artificial Sequence: Synthetic oligonucleotide
  Sense strand starting at position 243 of SEQ ID NO: 1888742
guauuauuacaacagucga

SEQ ID NO: 2553533 - RNA, 19 nt, Artificial Sequence
  Description of Artificial Sequence: Synthetic oligonucleotide
  Antisense strand to SEQ ID NO: 2553532
ucgacuguuguaauaauac

SEQ ID NO: 2553534 - RNA, 19 nt, Artificial Sequence
  Description of Artificial Sequence: Synthetic oligonucleotide
  Sense strand starting at position 337 of SEQ ID NO: 1888742
guagccuagguguacagau

SEQ ID NO: 2553535 - RNA, 19 nt, Artificial Sequence
  Description of Artificial Sequence: Synthetic oligonucleotide
  Antisense strand to SEQ ID NO: 2553534
aucuguacaccuaggcuac

SEQ ID NO: 2553536 - RNA, 19 nt, Artificial Sequence
  Description of Artificial Sequence: Synthetic oligonucleotide
  Sense strand starting at position 339 of SEQ ID NO: 1888742
agccuagguguacagauua

SEQ ID NO: 2553537 - RNA, 19 nt, Artificial Sequence
  Description of Artificial Sequence: Synthetic oligonucleotide
  Antisense strand to SEQ ID NO: 2553536
uaaucuguacaccuaggcu

SEQ ID NO: 2553538 - RNA, 19 nt, Artificial Sequence
  Description of Artificial Sequence: Synthetic oligonucleotide
  Sense strand starting at position 354 of SEQ ID NO: 1888742
auuauaaagucuccaguag

SEQ ID NO: 2553539 - RNA, 19 nt, Artificial Sequence
  Description of Artificial Sequence: Synthetic oligonucleotide
  Antisense strand to SEQ ID NO: 2553538
cuacuggagacuuuauaau

SEQ ID NO: 2553540 - RNA, 19 nt, Artificial Sequence
  Description of Artificial Sequence: Synthetic oligonucleotide
  Sense strand starting at position 477 of SEQ ID NO: 1888742
uuauaaccuuguguacuau

SEQ ID NO: 2553541 - RNA, 19 nt, Artificial Sequence
  Description of Artificial Sequence: Synthetic oligonucleotide
  Antisense strand to SEQ ID NO: 2553540
auaguacacaagguuauaa

SEQ ID NO: 2553542 - RNA, 19 nt, Artificial Sequence
  Description of Artificial Sequence: Synthetic oligonucleotide
  Sense strand starting at position 885 of SEQ ID NO: 1888742
cuuagacauguuuaaguac

SEQ ID NO: 2553543 - RNA, 19 nt, Artificial Sequence
  Description of Artificial Sequence: Synthetic oligonucleotide
  Antisense strand to SEQ ID NO: 2553542
guacuuaaacaugucuaag

SEQ ID NO: 2553544 - RNA, 19 nt, Artificial Sequence
  Description of Artificial Sequence: Synthetic oligonucleotide
  Sense strand starting at position 888 of SEQ ID NO: 1888742
agacauguuuaaguacaca

SEQ ID NO: 2553545 - RNA, 19 nt, Artificial Sequence
  Description of Artificial Sequence: Synthetic oligonucleotide
  Antisense strand to SEQ ID NO: 2553544
uguguacuuaaacaugucu

SEQ ID NO: 2553546 - RNA, 19 nt, Artificial Sequence
  Description of Artificial Sequence: Synthetic oligonucleotide
  Sense strand starting at position 1097 of SEQ ID NO: 1888742
aacguauauccguagguaa

SEQ ID NO: 2553547 - RNA, 19 nt, Artificial Sequence
  Description of Artificial Sequence: Synthetic oligonucleotide
  Antisense strand to SEQ ID NO: 2553546
uuaccuacggauauacguu

SEQ ID NO: 2553548 - RNA, 19 nt, Artificial Sequence
  Description of Artificial Sequence: Synthetic oligonucleotide
  Sense strand starting at position 1265 of SEQ ID NO: 1888742
cggaaaguuccauaagcga

SEQ ID NO: 2553549 - RNA, 19 nt, Artificial Sequence
  Description of Artificial Sequence: Synthetic oligonucleotide
  Antisense strand to SEQ ID NO: 2553548
ucgcuuauggaacuuuccg

SEQ ID NO: 2553550 - RNA, 19 nt, Artificial Sequence
  Description of Artificial Sequence: Synthetic oligonucleotide
  Sense strand starting at position 1497 of SEQ ID NO: 1888742
agaugucuuucgacggcga

SEQ ID NO: 2553551 - RNA, 19 nt, Artificial Sequence
  Description of Artificial Sequence: Synthetic oligonucleotide
  Antisense strand to SEQ ID NO: 2553550
ucgccgucgaaagacaucu

SEQ ID NO: 2553552 - RNA, 19 nt, Artificial Sequence
  Description of Artificial Sequence: Synthetic oligonucleotide
  Sense strand starting at position 2230 of SEQ ID NO: 1888742
uggaucaguccugaugcau

SEQ ID NO: 2553553 - RNA, 19 nt, Artificial Sequence
  Description of Artificial Sequence: Synthetic oligonucleotide
  Antisense strand to SEQ ID NO: 2553552
augcaucaggacugaucca

SEQ ID NO: 2553554 - RNA, 19 nt, Artificial Sequence
  Description of Artificial Sequence: Synthetic oligonucleotide
  Sense strand starting at position 2236 of SEQ ID NO: 1888742
aguccugaugcauaaguga

SEQ ID NO: 2553555 - RNA, 19 nt, Artificial Sequence
  Description of Artificial Sequence: Synthetic oligonucleotide
  Antisense strand to SEQ ID NO: 2553554
ucacuuaugcaucaggacu

SEQ ID NO: 2553556 - RNA, 19 nt, Artificial Sequence
  Description of Artificial Sequence: Synthetic oligonucleotide
  Sense strand starting at position 2316 of SEQ ID NO: 1888742
gcagauggccaauaggagu

SEQ ID NO: 2553557 - RNA, 19 nt, Artificial Sequence
  Description of Artificial Sequence: Synthetic oligonucleotide
  Antisense strand to SEQ ID NO: 2553556
acuccuauuggccaucugc

SEQ ID NO: 2553558 - RNA, 19 nt, Artificial Sequence
  Description of Artificial Sequence: Synthetic oligonucleotide
  Sense strand starting at position 2332 of SEQ ID NO: 1888742
aguagugugcgugccacau

SEQ ID NO: 2553559 - RNA, 19 nt, Artificial Sequence
  Description of Artificial Sequence: Synthetic oligonucleotide
  Antisense strand to SEQ ID NO: 2553558
auguggcacgcacacuacu

SEQ ID NO: 2553560 - RNA, 19 nt, Artificial Sequence
  Description of Artificial Sequence: Synthetic oligonucleotide
  Sense strand starting at position 2438 of SEQ ID NO: 1888742
gcguauccgaaauauuauc

SEQ ID NO: 2553561 - RNA, 19 nt, Artificial Sequence
  Description of Artificial Sequence: Synthetic oligonucleotide
  Antisense strand to SEQ ID NO: 2553560
gauaauauuucggauacgc

SEQ ID NO: 2553562 - RNA, 19 nt, Artificial Sequence
  Description of Artificial Sequence: Synthetic oligonucleotide
  Sense strand starting at position 2641 of SEQ ID NO: 1888742
acaggaugagccuggguau

SEQ ID NO: 2553563 - RNA, 19 nt, Artificial Sequence
  Description of Artificial Sequence: Synthetic oligonucleotide
  Antisense strand to SEQ ID NO: 2553562
auacccaggcucauccugu

SEQ ID NO: 2553564 - RNA, 19 nt, Artificial Sequence
  Description of Artificial Sequence: Synthetic oligonucleotide
  Sense strand starting at position 2644 of SEQ ID NO: 1888742
ggaugagccuggguaucau

SEQ ID NO: 2553565 - RNA, 19 nt, Artificial Sequence
  Description of Artificial Sequence: Synthetic oligonucleotide
  Antisense strand to SEQ ID NO: 2553564
augauacccaggcucaucc

SEQ ID NO: 2553566 - RNA, 19 nt, Artificial Sequence
  Description of Artificial Sequence: Synthetic oligonucleotide
  Sense strand starting at position 2715 of SEQ ID NO: 1888742
uuugguggugucuaauuga

SEQ ID NO: 2553567 - RNA, 19 nt, Artificial Sequence
  Description of Artificial Sequence: Synthetic oligonucleotide
  Antisense strand to SEQ ID NO: 2553566
ucaauuagacaccaccaaa

SEQ ID NO: 2553568 - RNA, 19 nt, Artificial Sequence
  Description of Artificial Sequence: Synthetic oligonucleotide
  Sense strand starting at position 2722 of SEQ ID NO: 1888742
gugucuaauugaucacagu

SEQ ID NO: 2553569 - RNA, 19 nt, Artificial Sequence
  Description of Artificial Sequence: Synthetic oligonucleotide
  Antisense strand to SEQ ID NO: 2553568
acugugaucaauuagacac

SEQ ID NO: 2553570 - RNA, 19 nt, Artificial Sequence
  Description of Artificial Sequence: Synthetic oligonucleotide
  Sense strand starting at position 2723 of SEQ ID NO: 1888742
ugucuaauugaucacagug

SEQ ID NO: 2553571 - RNA, 19 nt, Artificial Sequence
  Description of Artificial Sequence: Synthetic oligonucleotide
  Antisense strand to SEQ ID NO: 2553570
cacugugaucaauuagaca

SEQ ID NO: 2553572 - RNA, 19 nt, Artificial Sequence
  Description of Artificial Sequence: Synthetic oligonucleotide
  Sense strand starting at position 2735 of SEQ ID NO: 1888742
cacaguguccuguaguaag

SEQ ID NO: 2553573 - RNA, 19 nt, Artificial Sequence
  Description of Artificial Sequence: Synthetic oligonucleotide
  Antisense strand to SEQ ID NO: 2553572
cuuacuacaggacacugug

SEQ ID NO: 2553574 - RNA, 19 nt, Artificial Sequence
  Description of Artificial Sequence: Synthetic oligonucleotide
  Sense strand starting at position 2746 of SEQ ID NO: 1888742
guaguaagccaucaugauc

SEQ ID NO: 2553575 - RNA, 19 nt, Artificial Sequence
  Description of Artificial Sequence: Synthetic oligonucleotide
  Antisense strand to SEQ ID NO: 2553574
gaucaugauggcuuacuac

SEQ ID NO: 2553576 - RNA, 19 nt, Artificial Sequence
  Description of Artificial Sequence: Synthetic oligonucleotide
  Sense strand starting at position 2991 of SEQ ID NO: 1888742
gcacuagcccgugugaauc

SEQ ID NO: 2553577 - RNA, 19 nt, Artificial Sequence
  Description of Artificial Sequence: Synthetic oligonucleotide
  Antisense strand to SEQ ID NO: 2553576
gauucacacgggcuagugc

SEQ ID NO: 2553578 - RNA, 19 nt, Artificial Sequence
  Description of Artificial Sequence: Synthetic oligonucleotide
  Sense strand starting at position 3129 of SEQ ID NO: 1888742
cacaauugguagcuggaua

SEQ ID NO: 2553579 - RNA, 19 nt, Artificial Sequence
  Description of Artificial Sequence: Synthetic oligonucleotide
  Antisense strand to SEQ ID NO: 2553578
uauccagcuaccaauugug

SEQ ID NO: 2553580 - RNA, 19 nt, Artificial Sequence
  Description of Artificial Sequence: Synthetic oligonucleotide
  Sense strand starting at position 3130 of SEQ ID NO: 1888742
acaauugguagcuggauaa

SEQ ID NO: 2553581 - RNA, 19 nt, Artificial Sequence
  Description of Artificial Sequence: Synthetic oligonucleotide
  Antisense strand to SEQ ID NO: 2553580
uuauccagcuaccaauugu

SEQ ID NO: 2553582 - RNA, 19 nt, Artificial Sequence
  Description of Artificial Sequence: Synthetic oligonucleotide
  Sense strand starting at position 3229 of SEQ ID NO: 1888742
auaauugagucccugggaa

SEQ ID NO: 2553583 - RNA, 19 nt, Artificial Sequence
  Description of Artificial Sequence: Synthetic oligonucleotide
  Antisense strand to SEQ ID NO: 2553582
uucccagggacucaauuau

SEQ ID NO: 2553584 - RNA, 19 nt, Artificial Sequence
  Description of Artificial Sequence: Synthetic oligonucleotide
  Sense strand starting at position 3231 of SEQ ID NO: 1888742
aauugagucccugggaacu

SEQ ID NO: 2553585 - RNA, 19 nt, Artificial Sequence
  Description of Artificial Sequence: Synthetic oligonucleotide
  Antisense strand to SEQ ID NO: 2553584
aguucccagggacucaauu

SEQ ID NO: 2553586 - RNA, 19 nt, Artificial Sequence
  Description of Artificial Sequence: Synthetic oligonucleotide
  Sense strand starting at position 3251 of SEQ ID NO: 1888742
auuugaucaucucacugua

SEQ ID NO: 2553587 - RNA, 19 nt, Artificial Sequence
  Description of Artificial Sequence: Synthetic oligonucleotide
  Antisense strand to SEQ ID NO: 2553586
uacagugagaugaucaaau

SEQ ID NO: 2553588 - RNA, 19 nt, Artificial Sequence
  Description of Artificial Sequence: Synthetic oligonucleotide
  Sense strand starting at position 3285 of SEQ ID NO: 1888742
cugaguggaccugaugcau

SEQ ID NO: 2553589 - RNA, 19 nt, Artificial Sequence
  Description of Artificial Sequence: Synthetic oligonucleotide
  Antisense strand to SEQ ID NO: 2553588
augcaucagguccacucag

SEQ ID NO: 2553590 - RNA, 19 nt, Artificial Sequence
  Description of Artificial Sequence: Synthetic oligonucleotide
  Sense strand starting at position 3362 of SEQ ID NO: 1888742
ggugauaccucagugaacu

SEQ ID NO: 2553591 - RNA, 19 nt, Artificial Sequence
  Description of Artificial Sequence: Synthetic oligonucleotide
  Antisense strand to SEQ ID NO: 2553590
aguucacugagguaucacc

SEQ ID NO: 2553592 - RNA, 19 nt, Artificial Sequence
  Description of Artificial Sequence: Synthetic oligonucleotide
  Sense strand starting at position 3363 of SEQ ID NO: 1888742
gugauaccucagugaacuu

SEQ ID NO: 2553593 - RNA, 19 nt, Artificial Sequence
  Description of Artificial Sequence: Synthetic oligonucleotide
  Antisense strand to SEQ ID NO: 2553592
aaguucacugagguaucac

SEQ ID NO: 2553594 - RNA, 19 nt, Artificial Sequence
  Description of Artificial Sequence: Synthetic oligonucleotide
  Sense strand starting at position 3677 of SEQ ID NO: 1888742
acggaaugacugugauaca

SEQ ID NO: 2553595 - RNA, 19 nt, Artificial Sequence
  Description of Artificial Sequence: Synthetic oligonucleotide
  Antisense strand to SEQ ID NO: 2553594
uguaucacagucauuccgu

SEQ ID NO: 2553596 - RNA, 19 nt, Artificial Sequence
  Description of Artificial Sequence: Synthetic oligonucleotide
  Sense strand starting at position 3689 of SEQ ID NO: 1888742
ugauacauguggucuuaag

SEQ ID NO: 2553597 - RNA, 19 nt, Artificial Sequence
  Description of Artificial Sequence: Synthetic oligonucleotide
  Antisense strand to SEQ ID NO: 2553596
cuuaagaccacauguauca

SEQ ID NO: 2553598 - RNA, 19 nt, Artificial Sequence
  Description of Artificial Sequence: Synthetic oligonucleotide
  Sense strand starting at position 3708 of SEQ ID NO: 1888742
accugaccugcccaugaua

SEQ ID NO: 2553599 - RNA, 19 nt, Artificial Sequence
  Description of Artificial Sequence: Synthetic oligonucleotide
  Antisense strand to SEQ ID NO: 2553598
uaucaugggcaggucaggu

SEQ ID NO: 2553600 - RNA, 19 nt, Artificial Sequence
  Description of Artificial Sequence: Synthetic oligonucleotide
  Sense strand starting at position 3710 of SEQ ID NO: 1888742
cugaccugcccaugauaaa

SEQ ID NO: 2553601 - RNA, 19 nt, Artificial Sequence
  Description of Artificial Sequence: Synthetic oligonucleotide
  Antisense strand to SEQ ID NO: 2553600
uuuaucaugggcaggucag

SEQ ID NO: 2553602 - RNA, 19 nt, Artificial Sequence
  Description of Artificial Sequence: Synthetic oligonucleotide
  Sense strand starting at position 3719 of SEQ ID NO: 1888742
ccaugauaaacuggguguu

SEQ ID NO: 2553603 - RNA, 19 nt, Artificial Sequence
  Description of Artificial Sequence: Synthetic oligonucleotide
  Antisense strand to SEQ ID NO: 2553602
aacacccaguuuaucaugg

SEQ ID NO: 2553604 - RNA, 19 nt, Artificial Sequence
  Description of Artificial Sequence: Synthetic oligonucleotide
  Sense strand starting at position 3795 of SEQ ID NO: 1888742
ucuggcaauuccuugaaag

SEQ ID NO: 2553605 - RNA, 19 nt, Artificial Sequence
  Description of Artificial Sequence: Synthetic oligonucleotide
  Antisense strand to SEQ ID NO: 2553604
cuuucaaggaauugccaga

SEQ ID NO: 2553606 - RNA, 19 nt, Artificial Sequence
  Description of Artificial Sequence: Synthetic oligonucleotide
  Sense strand starting at position 3796 of SEQ ID NO: 1888742
cuggcaauuccuugaaagg

SEQ ID NO: 2553607 - RNA, 19 nt, Artificial Sequence
  Description of Artificial Sequence: Synthetic oligonucleotide
  Antisense strand to SEQ ID NO: 2553606
ccuuucaaggaauugccag

SEQ ID NO: 2553608 - RNA, 19 nt, Artificial Sequence
  Description of Artificial Sequence: Synthetic oligonucleotide
  Sense strand starting at position 3797 of SEQ ID NO: 1888742
uggcaauuccuugaaaggu

SEQ ID NO: 2553609 - RNA, 19 nt, Artificial Sequence
  Description of Artificial Sequence: Synthetic oligonucleotide
  Antisense strand to SEQ ID NO: 2553608
accuuucaaggaauugcca

SEQ ID NO: 2553610 - RNA, 19 nt, Artificial Sequence
  Description of Artificial Sequence: Synthetic oligonucleotide
  Sense strand starting at position 3889 of SEQ ID NO: 1888742
uuagauagaugguuguaca

SEQ ID NO: 2553611 - RNA, 19 nt, Artificial Sequence
  Description of Artificial Sequence: Synthetic oligonucleotide
  Antisense strand to SEQ ID NO: 2553610
uguacaaccaucuaucuaa

SEQ ID NO: 2553612 - RNA, 19 nt, Artificial Sequence
  Description of Artificial Sequence: Synthetic oligonucleotide
  Sense strand starting at position 32 of SEQ ID NO: 1888743
ccuuacuuccuccgaggaa

SEQ ID NO: 2553613 - RNA, 19 nt, Artificial Sequence
  Description of Artificial Sequence: Synthetic oligonucleotide
  Antisense strand to SEQ ID NO: 2553612
uuccucggaggaaguaagg

SEQ ID NO: 2553614 - RNA, 19 nt, Artificial Sequence
  Description of Artificial Sequence: Synthetic oligonucleotide
  Sense strand starting at position 45 of SEQ ID NO: 1888743
gaggaaugcuucuugagau

SEQ ID NO: 2553615 - RNA, 19 nt, Artificial Sequence
  Description of Artificial Sequence: Synthetic oligonucleotide
  Antisense strand to SEQ ID NO: 2553614
aucucaagaagcauuccuc

SEQ ID NO: 2553616 - RNA, 19 nt, Artificial Sequence
  Description of Artificial Sequence: Synthetic oligonucleotide
  Sense strand starting at position 129 of SEQ ID NO: 1888743
cgggacuagacuuaucuuu

SEQ ID NO: 2553617 - RNA, 19 nt, Artificial Sequence
  Description of Artificial Sequence: Synthetic oligonucleotide
  Antisense strand to SEQ ID NO: 2553616
aaagauaagucuagucccg

SEQ ID NO: 2553618 - RNA, 19 nt, Artificial Sequence
  Description of Artificial Sequence: Synthetic oligonucleotide
  Sense strand starting at position 131 of SEQ ID NO: 1888743
ggacuagacuuaucuuuga

SEQ ID NO: 2553619 - RNA, 19 nt, Artificial Sequence
  Description of Artificial Sequence: Synthetic oligonucleotide
  Antisense strand to SEQ ID NO: 2553618
ucaaagauaagucuagucc

SEQ ID NO: 2553620 - RNA, 19 nt, Artificial Sequence
  Description of Artificial Sequence: Synthetic oligonucleotide
  Sense strand starting at position 167 of SEQ ID NO: 1888743
auuggaucuuaacccugau

SEQ ID NO: 2553621 - RNA, 19 nt, Artificial Sequence
  Description of Artificial Sequence: Synthetic oligonucleotide
  Antisense strand to SEQ ID NO: 2553620
aucaggguuaagauccaau

SEQ ID NO: 2553622 - RNA, 19 nt, Artificial Sequence
  Description of Artificial Sequence: Synthetic oligonucleotide
  Sense strand starting at position 173 of SEQ ID NO: 1888743
ucuuaacccugauuggcau

SEQ ID NO: 2553623 - RNA, 19 nt, Artificial Sequence
  Description of Artificial Sequence: Synthetic oligonucleotide
  Antisense strand to SEQ ID NO: 2553622
augccaaucaggguuaaga

SEQ ID NO: 2553624 - RNA, 19 nt, Artificial Sequence
  Description of Artificial Sequence: Synthetic oligonucleotide
  Sense strand starting at position 190 of SEQ ID NO: 1888743
auuugaccuuuaugaagau

SEQ ID NO: 2553625 - RNA, 19 nt, Artificial Sequence
  Description of Artificial Sequence: Synthetic oligonucleotide
  Antisense strand to SEQ ID NO: 2553624
aucuucauaaaggucaaau

SEQ ID NO: 2553626 - RNA, 19 nt, Artificial Sequence
  Description of Artificial Sequence: Synthetic oligonucleotide
  Sense strand starting at position 202 of SEQ ID NO: 1888743
ugaagauaauuguuacacu

SEQ ID NO: 2553627 - RNA, 19 nt, Artificial Sequence
  Description of Artificial Sequence: Synthetic oligonucleotide
  Antisense strand to SEQ ID NO: 2553626
aguguaacaauuaucuuca

SEQ ID NO: 2553628 - RNA, 19 nt, Artificial Sequence
  Description of Artificial Sequence: Synthetic oligonucleotide
  Sense strand starting at position 210 of SEQ ID NO: 1888743
auuguuacacuagagaugu

SEQ ID NO: 2553629 - RNA, 19 nt, Artificial Sequence
  Description of Artificial Sequence: Synthetic oligonucleotide
  Antisense strand to SEQ ID NO: 2553628
acaucucuaguguaacaau

SEQ ID NO: 2553630 - RNA, 19 nt, Artificial Sequence
  Description of Artificial Sequence: Synthetic oligonucleotide
  Sense strand starting at position 375 of SEQ ID NO: 1888743
ucucuuuggacaggugaau

SEQ ID NO: 2553631 - RNA, 19 nt, Artificial Sequence
  Description of Artificial Sequence: Synthetic oligonucleotide
  Antisense strand to SEQ ID NO: 2553630
auucaccuguccaaagaga

SEQ ID NO: 2553632 - RNA, 19 nt, Artificial Sequence
  Description of Artificial Sequence: Synthetic oligonucleotide
  Sense strand starting at position 556 of SEQ ID NO: 1888743
uugccauccuagguaacaa

SEQ ID NO: 2553633 - RNA, 19 nt, Artificial Sequence
  Description of Artificial Sequence: Synthetic oligonucleotide
  Antisense strand to SEQ ID NO: 2553632
uuguuaccuaggauggcaa

SEQ ID NO: 2553634 - RNA, 19 nt, Artificial Sequence
  Description of Artificial Sequence: Synthetic oligonucleotide
  Sense strand starting at position 658 of SEQ ID NO: 1888743
gcuugaaagcaucaauuaa

SEQ ID NO: 2553635 - RNA, 19 nt, Artificial Sequence
  Description of Artificial Sequence: Synthetic oligonucleotide
  Antisense strand to SEQ ID NO: 2553634
uuaauugaugcuuucaagc

SEQ ID NO: 2553636 - RNA, 19 nt, Artificial Sequence
  Description of Artificial Sequence: Synthetic oligonucleotide
  Sense strand starting at position 887 of SEQ ID NO: 1888743
uuaagagaucuugggccaa

SEQ ID NO: 2553637 - RNA, 19 nt, Artificial Sequence
  Description of Artificial Sequence: Synthetic oligonucleotide
  Antisense strand to SEQ ID NO: 2553636
uuggcccaagaucucuuaa

SEQ ID NO: 2553638 - RNA, 19 nt, Artificial Sequence
  Description of Artificial Sequence: Synthetic oligonucleotide
  Sense strand starting at position 889 of SEQ ID NO: 1888743
aagagaucuugggccaaac

SEQ ID NO: 2553639 - RNA, 19 nt, Artificial Sequence
  Description of Artificial Sequence: Synthetic oligonucleotide
  Antisense strand to SEQ ID NO: 2553638
guuuggcccaagaucucuu

SEQ ID NO: 2553640 - RNA, 19 nt, Artificial Sequence
  Description of Artificial Sequence: Synthetic oligonucleotide
  Sense strand starting at position 936 of SEQ ID NO: 1888743
ucaagaugaccgugaaaga

SEQ ID NO: 2553641 - RNA, 19 nt, Artificial Sequence
  Description of Artificial Sequence: Synthetic oligonucleotide
  Antisense strand to SEQ ID NO: 2553640
ucuuucacggucaucuuga

SEQ ID NO: 2553642 - RNA, 19 nt, Artificial Sequence
  Description of Artificial Sequence: Synthetic oligonucleotide
  Sense strand starting at position 978 of SEQ ID NO: 1888743
auacuaugcccuugggaua

SEQ ID NO: 2553643 - RNA, 19 nt, Artificial Sequence
  Description of Artificial Sequence: Synthetic oligonucleotide
  Antisense strand to SEQ ID NO: 2553642
uaucccaagggcauaguau

SEQ ID NO: 2553644 - RNA, 19 nt, Artificial Sequence
  Description of Artificial Sequence: Synthetic oligonucleotide
  Sense strand starting at position 1781 of SEQ ID NO: 1888743
ucccuugcccuagaggaau

SEQ ID NO: 2553645 - RNA, 19 nt, Artificial Sequence
  Description of Artificial Sequence: Synthetic oligonucleotide
  Antisense strand to SEQ ID NO: 2553644
auuccucuagggcaaggga

SEQ ID NO: 2553646 - RNA, 19 nt, Artificial Sequence
  Description of Artificial Sequence: Synthetic oligonucleotide
  Sense strand starting at position 2045 of SEQ ID NO: 1888743
gcucuauuuccgcgaugag

SEQ ID NO: 2553647 - RNA, 19 nt, Artificial Sequence
  Description of Artificial Sequence: Synthetic oligonucleotide
  Antisense strand to SEQ ID NO: 2553646
cucaucgcggaaauagagc

SEQ ID NO: 2553648 - RNA, 19 nt, Artificial Sequence
  Description of Artificial Sequence: Synthetic oligonucleotide
  Sense strand starting at position 2209 of SEQ ID NO: 1888743
aggcucuucugaucgagga

SEQ ID NO: 2553649 - RNA, 19 nt, Artificial Sequence
  Description of Artificial Sequence: Synthetic oligonucleotide
  Antisense strand to SEQ ID NO: 2553648
uccucgaucagaagagccu

SEQ ID NO: 2553650 - RNA, 19 nt, Artificial Sequence
  Description of Artificial Sequence: Synthetic oligonucleotide
  Sense strand starting at position 2211 of SEQ ID NO: 1888743
gcucuucugaucgaggaca

SEQ ID NO: 2553651 - RNA, 19 nt, Artificial Sequence
  Description of Artificial Sequence: Synthetic oligonucleotide
  Antisense strand to SEQ ID NO: 2553650
uguccucgaucagaagagc

SEQ ID NO: 2553652 - RNA, 19 nt, Artificial Sequence
  Description of Artificial Sequence: Synthetic oligonucleotide
  Sense strand starting at position 2213 of SEQ ID NO: 1888743
ucuucugaucgaggacaga

SEQ ID NO: 2553653 - RNA, 19 nt, Artificial Sequence
  Description of Artificial Sequence: Synthetic oligonucleotide
  Antisense strand to SEQ ID NO: 2553652
ucuguccucgaucagaaga

SEQ ID NO: 2553654 - RNA, 19 nt, Artificial Sequence
  Description of Artificial Sequence: Synthetic oligonucleotide
  Sense strand starting at position 2266 of SEQ ID NO: 1888743
guuggucugagguaaugag

SEQ ID NO: 2553655 - RNA, 19 nt, Artificial Sequence
  Description of Artificial Sequence: Synthetic oligonucleotide
  Antisense strand to SEQ ID NO: 2553654
cucauuaccucagaccaac

SEQ ID NO: 2553656 - RNA, 19 nt, Artificial Sequence
  Description of Artificial Sequence: Synthetic oligonucleotide
  Sense strand starting at position 2311 of SEQ ID NO: 1888743
agucauuucucuccuuguu

SEQ ID NO: 2553657 - RNA, 19 nt, Artificial Sequence
  Description of Artificial Sequence: Synthetic oligonucleotide
  Antisense strand to SEQ ID NO: 2553656
aacaaggagagaaaugacu

SEQ ID NO: 2553658 - RNA, 19 nt, Artificial Sequence
  Description of Artificial Sequence: Synthetic oligonucleotide
  Sense strand starting at position 2356 of SEQ ID NO: 1888743
gcaccuuagggauauuguu

SEQ ID NO: 2553659 - RNA, 19 nt, Artificial Sequence
  Description of Artificial Sequence: Synthetic oligonucleotide
  Antisense strand to SEQ ID NO: 2553658
aacaauaucccuaaggugc

SEQ ID NO: 2553660 - RNA, 19 nt, Artificial Sequence
  Description of Artificial Sequence: Synthetic oligonucleotide
  Sense strand starting at position 2394 of SEQ ID NO: 1888743
ugcuguucgcuuuccagua

SEQ ID NO: 2553661 - RNA, 19 nt, Artificial Sequence
  Description of Artificial Sequence: Synthetic oligonucleotide
  Antisense strand to SEQ ID NO: 2553660
uacuggaaagcgaacagca

SEQ ID NO: 2553662 - RNA, 19 nt, Artificial Sequence
  Description of Artificial Sequence: Synthetic oligonucleotide
  Sense strand starting at position 2613 of SEQ ID NO: 1888743
ggguaugcuggauacuagu

SEQ ID NO: 2553663 - RNA, 19 nt, Artificial Sequence
  Description of Artificial Sequence: Synthetic oligonucleotide
  Antisense strand to SEQ ID NO: 2553662
acuaguauccagcauaccc

SEQ ID NO: 2553664 - RNA, 19 nt, Artificial Sequence
  Description of Artificial Sequence: Synthetic oligonucleotide
  Sense strand starting at position 2622 of SEQ ID NO: 1888743
ggauacuagugacuacaua

SEQ ID NO: 2553665 - RNA, 19 nt, Artificial Sequence
  Description of Artificial Sequence: Synthetic oligonucleotide
  Antisense strand to SEQ ID NO: 2553664
uauguagucacuaguaucc

SEQ ID NO: 2553666 - RNA, 19 nt, Artificial Sequence
  Description of Artificial Sequence: Synthetic oligonucleotide
  Sense strand starting at position 2960 of SEQ ID NO: 1888743
ggagacugguccagaggga

SEQ ID NO: 2553667 - RNA, 19 nt, Artificial Sequence
  Description of Artificial Sequence: Synthetic oligonucleotide
  Antisense strand to SEQ ID NO: 2553666
ucccucuggaccagucucc

SEQ ID NO: 2553668 - RNA, 19 nt, Artificial Sequence
  Description of Artificial Sequence: Synthetic oligonucleotide
  Sense strand starting at position 3148 of SEQ ID NO: 1888743
agagaccuugcaugugauu

SEQ ID NO: 2553669 - RNA, 19 nt, Artificial Sequence
  Description of Artificial Sequence: Synthetic oligonucleotide
  Antisense strand to SEQ ID NO: 2553668
aaucacaugcaaggucucu

SEQ ID NO: 2553670 - RNA, 19 nt, Artificial Sequence
  Description of Artificial Sequence: Synthetic oligonucleotide
  Sense strand starting at position 3227 of SEQ ID NO: 1888743
aggaucaagugguccaauu

SEQ ID NO: 2553671 - RNA, 19 nt, Artificial Sequence
  Description of Artificial Sequence: Synthetic oligonucleotide
  Antisense strand to SEQ ID NO: 2553670
aauuggaccacuugauccu

SEQ ID NO: 2553672 - RNA, 19 nt, Artificial Sequence
  Description of Artificial Sequence: Synthetic oligonucleotide
  Sense strand starting at position 3229 of SEQ ID NO: 1888743
gaucaagugguccaauucu

SEQ ID NO: 2553673 - RNA, 19 nt, Artificial Sequence
  Description of Artificial Sequence: Synthetic oligonucleotide
  Antisense strand to SEQ ID NO: 2553672
agaauuggaccacuugauc

SEQ ID NO: 2553674 - RNA, 19 nt, Artificial Sequence
  Description of Artificial Sequence: Synthetic oligonucleotide
  Sense strand starting at position 3343 of SEQ ID NO: 1888743
cagcuuaauccugaggucu

SEQ ID NO: 2553675 - RNA, 19 nt, Artificial Sequence
  Description of Artificial Sequence: Synthetic oligonucleotide
  Antisense strand to SEQ ID NO: 2553674
agaccucaggauuaagcug

SEQ ID NO: 2553676 - RNA, 19 nt, Artificial Sequence
  Description of Artificial Sequence: Synthetic oligonucleotide
  Sense strand starting at position 3371 of SEQ ID NO: 1888743
gacagaccaugcuugugaa

SEQ ID NO: 2553677 - RNA, 19 nt, Artificial Sequence
  Description of Artificial Sequence: Synthetic oligonucleotide
  Antisense strand to SEQ ID NO: 2553676
uucacaagcauggucuguc

SEQ ID NO: 2553678 - RNA, 19 nt, Artificial Sequence
  Description of Artificial Sequence: Synthetic oligonucleotide
  Sense strand starting at position 3507 of SEQ ID NO: 1888743
agguuagagugaucuccau

SEQ ID NO: 2553679 - RNA, 19 nt, Artificial Sequence
  Description of Artificial Sequence: Synthetic oligonucleotide
  Antisense strand to SEQ ID NO: 2553678
auggagaucacucuaaccu

SEQ ID NO: 2553680 - RNA, 19 nt, Artificial Sequence
  Description of Artificial Sequence: Synthetic oligonucleotide
  Sense strand starting at position 3511 of SEQ ID NO: 1888743
uagagugaucuccauggug

SEQ ID NO: 2553681 - RNA, 19 nt, Artificial Sequence
  Description of Artificial Sequence: Synthetic oligonucleotide
  Antisense strand to SEQ ID NO: 2553680
caccauggagaucacucua

SEQ ID NO: 2553682 - RNA, 19 nt, Artificial Sequence
  Description of Artificial Sequence: Synthetic oligonucleotide
  Sense strand starting at position 3559 of SEQ ID NO: 1888743
cagccuuuagcaugagaga

SEQ ID NO: 2553683 - RNA, 19 nt, Artificial Sequence
  Description of Artificial Sequence: Synthetic oligonucleotide
  Antisense strand to SEQ ID NO: 2553682
ucucucaugcuaaaggcug

SEQ ID NO: 2553684 - RNA, 19 nt, Artificial Sequence
  Description of Artificial Sequence: Synthetic oligonucleotide
  Sense strand starting at position 3560 of SEQ ID NO: 1888743
agccuuuagcaugagagau

SEQ ID NO: 2553685 - RNA, 19 nt, Artificial Sequence
  Description of Artificial Sequence: Synthetic oligonucleotide
  Antisense strand to SEQ ID NO: 2553684
aucucucaugcuaaaggcu

SEQ ID NO: 2553686 - RNA, 19 nt, Artificial Sequence
  Description of Artificial Sequence: Synthetic oligonucleotide
  Sense strand starting at position 3638 of SEQ ID NO: 1888743
aaugguguuauugagaggu

SEQ ID NO: 2553687 - RNA, 19 nt, Artificial Sequence
  Description of Artificial Sequence: Synthetic oligonucleotide
  Antisense strand to SEQ ID NO: 2553686
accucucaauaacaccauu

SEQ ID NO: 2553688 - RNA, 19 nt, Artificial Sequence
  Description of Artificial Sequence: Synthetic oligonucleotide
  Sense strand starting at position 3644 of SEQ ID NO: 1888743
guuauugagagguaaguca

SEQ ID NO: 2553689 - RNA, 19 nt, Artificial Sequence
  Description of Artificial Sequence: Synthetic oligonucleotide
  Antisense strand to SEQ ID NO: 2553688
ugacuuaccucucaauaac

SEQ ID NO: 2553690 - RNA, 19 nt, Artificial Sequence
  Description of Artificial Sequence: Synthetic oligonucleotide
  Sense strand starting at position 3699 of SEQ ID NO: 1888743
agugacuuuagguauaguu

SEQ ID NO: 2553691 - RNA, 19 nt, Artificial Sequence
  Description of Artificial Sequence: Synthetic oligonucleotide
  Antisense strand to SEQ ID NO: 2553690
aacuauaccuaaagucacu

SEQ ID NO: 2553692 - RNA, 19 nt, Artificial Sequence
  Description of Artificial Sequence: Synthetic oligonucleotide
  Sense strand starting at position 5 of SEQ ID NO: 1888744
ucuuaacccugauuggcau

SEQ ID NO: 2553693 - RNA, 19 nt, Artificial Sequence
  Description of Artificial Sequence: Synthetic oligonucleotide
  Antisense strand to SEQ ID NO: 2553692
augccaaucaggguuaaga

SEQ ID NO: 2553694 - RNA, 19 nt, Artificial Sequence
  Description of Artificial Sequence: Synthetic oligonucleotide
  Sense strand starting at position 22 of SEQ ID NO: 1888744
auuugaccuuuaugaagau

SEQ ID NO: 2553695 - RNA, 19 nt, Artificial Sequence
  Description of Artificial Sequence: Synthetic oligonucleotide
  Antisense strand to SEQ ID NO: 2553694
aucuucauaaaggucaaau

SEQ ID NO: 2553696 - RNA, 19 nt, Artificial Sequence
  Description of Artificial Sequence: Synthetic oligonucleotide
  Sense strand starting at position 34 of SEQ ID NO: 1888744
ugaagauaauuguuacacu

SEQ ID NO: 2553697 - RNA, 19 nt, Artificial Sequence
  Description of Artificial Sequence: Synthetic oligonucleotide
  Antisense strand to SEQ ID NO: 2553696
aguguaacaauuaucuuca

SEQ ID NO: 2553698 - RNA, 19 nt, Artificial Sequence
  Description of Artificial Sequence: Synthetic oligonucleotide
  Sense strand starting at position 42 of SEQ ID NO: 1888744
auuguuacacuagagaugu

SEQ ID NO: 2553699 - RNA, 19 nt, Artificial Sequence
  Description of Artificial Sequence: Synthetic oligonucleotide
  Antisense strand to SEQ ID NO: 2553698
acaucucuaguguaacaau

SEQ ID NO: 2553700 - RNA, 19 nt, Artificial Sequence
  Description of Artificial Sequence: Synthetic oligonucleotide
  Sense strand starting at position 46 of SEQ ID NO: 1888744
uuacacuagagaugucgua

SEQ ID NO: 2553701 - RNA, 19 nt, Artificial Sequence
  Description of Artificial Sequence: Synthetic oligonucleotide
  Antisense strand to SEQ ID NO: 2553700
uacgacaucucuaguguaa

SEQ ID NO: 2553702 - RNA, 19 nt, Artificial Sequence
  Description of Artificial Sequence: Synthetic oligonucleotide
  Sense strand starting at position 207 of SEQ ID NO: 1888744
ucucuuuggacaggugaau

SEQ ID NO: 2553703 - RNA, 19 nt, Artificial Sequence
  Description of Artificial Sequence: Synthetic oligonucleotide
  Antisense strand to SEQ ID NO: 2553702
auucaccuguccaaagaga

SEQ ID NO: 2553704 - RNA, 19 nt, Artificial Sequence
  Description of Artificial Sequence: Synthetic oligonucleotide
  Sense strand starting at position 388 of SEQ ID NO: 1888744
uugccauccuagguaacaa

SEQ ID NO: 2553705 - RNA, 19 nt, Artificial Sequence
  Description of Artificial Sequence: Synthetic oligonucleotide
  Antisense strand to SEQ ID NO: 2553704
uuguuaccuaggauggcaa

SEQ ID NO: 2553706 - RNA, 19 nt, Artificial Sequence
  Description of Artificial Sequence: Synthetic oligonucleotide
  Sense strand starting at position 490 of SEQ ID NO: 1888744
gcuugaaagcaucaauuaa

SEQ ID NO: 2553707 - RNA, 19 nt, Artificial Sequence
  Description of Artificial Sequence: Synthetic oligonucleotide
  Antisense strand to SEQ ID NO: 2553706
uuaauugaugcuuucaagc

SEQ ID NO: 2553708 - RNA, 19 nt, Artificial Sequence
  Description of Artificial Sequence: Synthetic oligonucleotide
  Sense strand starting at position 719 of SEQ ID NO: 1888744
uuaagagaucuugggccaa

SEQ ID NO: 2553709 - RNA, 19 nt, Artificial Sequence
  Description of Artificial Sequence: Synthetic oligonucleotide
  Antisense strand to SEQ ID NO: 2553708
uuggcccaagaucucuuaa

SEQ ID NO: 2553710 - RNA, 19 nt, Artificial Sequence
  Description of Artificial Sequence: Synthetic oligonucleotide
  Sense strand starting at position 721 of SEQ ID NO: 1888744
aagagaucuugggccaaac

SEQ ID NO: 2553711 - RNA, 19 nt, Artificial Sequence
  Description of Artificial Sequence: Synthetic oligonucleotide
  Antisense strand to SEQ ID NO: 2553710
guuuggcccaagaucucuu

SEQ ID NO: 2553712 - RNA, 19 nt, Artificial Sequence
  Description of Artificial Sequence: Synthetic oligonucleotide
  Sense strand starting at position 768 of SEQ ID NO: 1888744
ucaagaugaccgugaaaga

SEQ ID NO: 2553713 - RNA, 19 nt, Artificial Sequence
  Description of Artificial Sequence: Synthetic oligonucleotide
  Antisense strand to SEQ ID NO: 2553712
ucuuucacggucaucuuga

SEQ ID NO: 2553714 - RNA, 19 nt, Artificial Sequence
  Description of Artificial Sequence: Synthetic oligonucleotide
  Sense strand starting at position 810 of SEQ ID NO: 1888744
auacuaugcccuugggaua

SEQ ID NO: 2553715 - RNA, 19 nt, Artificial Sequence
  Description of Artificial Sequence: Synthetic oligonucleotide
  Antisense strand to SEQ ID NO: 2553714
uaucccaagggcauaguau

SEQ ID NO: 2553716 - RNA, 19 nt, Artificial Sequence
  Description of Artificial Sequence: Synthetic oligonucleotide
  Sense strand starting at position 1613 of SEQ ID NO: 1888744
ucccuugcccuagaggaau

SEQ ID NO: 2553717 - RNA, 19 nt, Artificial Sequence
  Description of Artificial Sequence: Synthetic oligonucleotide
  Antisense strand to SEQ ID NO: 2553716
auuccucuagggcaaggga

SEQ ID NO: 2553718 - RNA, 19 nt, Artificial Sequence
  Description of Artificial Sequence: Synthetic oligonucleotide
  Sense strand starting at position 1876 of SEQ ID NO: 1888744
ugcucuauuuccgcgauga

SEQ ID NO: 2553719 - RNA, 19 nt, Artificial Sequence
  Description of Artificial Sequence: Synthetic oligonucleotide
  Antisense strand to SEQ ID NO: 2553718
ucaucgcggaaauagagca

SEQ ID NO: 2553720 - RNA, 19 nt, Artificial Sequence
  Description of Artificial Sequence: Synthetic oligonucleotide
  Sense strand starting at position 1877 of SEQ ID NO: 1888744
gcucuauuuccgcgaugag

SEQ ID NO: 2553721 - RNA, 19 nt, Artificial Sequence
  Description of Artificial Sequence: Synthetic oligonucleotide
  Antisense strand to SEQ ID NO: 2553720
cucaucgcggaaauagagc

SEQ ID NO: 2553722 - RNA, 19 nt, Artificial Sequence
  Description of Artificial Sequence: Synthetic oligonucleotide
  Sense strand starting at position 2041 of SEQ ID NO: 1888744
aggcucuucugaucgagga

SEQ ID NO: 2553723 - RNA, 19 nt, Artificial Sequence
  Description of Artificial Sequence: Synthetic oligonucleotide
  Antisense strand to SEQ ID NO: 2553722
uccucgaucagaagagccu

SEQ ID NO: 2553724 - RNA, 19 nt, Artificial Sequence
  Description of Artificial Sequence: Synthetic oligonucleotide
  Sense strand starting at position 2043 of SEQ ID NO: 1888744
gcucuucugaucgaggaca

SEQ ID NO: 2553725 - RNA, 19 nt, Artificial Sequence
  Description of Artificial Sequence: Synthetic oligonucleotide
  Antisense strand to SEQ ID NO: 2553724
uguccucgaucagaagagc

SEQ ID NO: 2553726 - RNA, 19 nt, Artificial Sequence
  Description of Artificial Sequence: Synthetic oligonucleotide
  Sense strand starting at position 2045 of SEQ ID NO: 1888744
ucuucugaucgaggacaga

SEQ ID NO: 2553727 - RNA, 19 nt, Artificial Sequence
  Description of Artificial Sequence: Synthetic oligonucleotide
  Antisense strand to SEQ ID NO: 2553726
ucuguccucgaucagaaga

SEQ ID NO: 2553728 - RNA, 19 nt, Artificial Sequence
  Description of Artificial Sequence: Synthetic oligonucleotide
  Sense strand starting at position 2098 of SEQ ID NO: 1888744
guuggucugagguaaugag

SEQ ID NO: 2553729 - RNA, 19 nt, Artificial Sequence
  Description of Artificial Sequence: Synthetic oligonucleotide
  Antisense strand to SEQ ID NO: 2553728
cucauuaccucagaccaac

SEQ ID NO: 2553730 - RNA, 19 nt, Artificial Sequence
  Description of Artificial Sequence: Synthetic oligonucleotide
  Sense strand starting at position 2143 of SEQ ID NO: 1888744
agucauuucucuccuuguu

SEQ ID NO: 2553731 - RNA, 19 nt, Artificial Sequence
  Description of Artificial Sequence: Synthetic oligonucleotide
  Antisense strand to SEQ ID NO: 2553730
aacaaggagagaaaugacu

SEQ ID NO: 2553732 - RNA, 19 nt, Artificial Sequence
  Description of Artificial Sequence: Synthetic oligonucleotide
  Sense strand starting at position 2188 of SEQ ID NO: 1888744
gcaccuuagggauauuguu

SEQ ID NO: 2553733 - RNA, 19 nt, Artificial Sequence
  Description of Artificial Sequence: Synthetic oligonucleotide
  Antisense strand to SEQ ID NO: 2553732
aacaauaucccuaaggugc

SEQ ID NO: 2553734 - RNA, 19 nt, Artificial Sequence
  Description of Artificial Sequence: Synthetic oligonucleotide
  Sense strand starting at position 2226 of SEQ ID NO: 1888744
ugcuguucgcuuuccagua

SEQ ID NO: 2553735 - RNA, 19 nt, Artificial Sequence
  Description of Artificial Sequence: Synthetic oligonucleotide
  Antisense strand to SEQ ID NO: 2553734
uacuggaaagcgaacagca

SEQ ID NO: 2553736 - RNA, 19 nt, Artificial Sequence
  Description of Artificial Sequence: Synthetic oligonucleotide
  Sense strand starting at position 2355 of SEQ ID NO: 1888744
guguauguuguaggagaaa

SEQ ID NO: 2553737 - RNA, 19 nt, Artificial Sequence
  Description of Artificial Sequence: Synthetic oligonucleotide
  Antisense strand to SEQ ID NO: 2553736
uuucuccuacaacauacac

SEQ ID NO: 2553738 - RNA, 19 nt, Artificial Sequence
  Description of Artificial Sequence: Synthetic oligonucleotide
  Sense strand starting at position 2445 of SEQ ID NO: 1888744
ggguaugcuggauacuagu

SEQ ID NO: 2553739 - RNA, 19 nt, Artificial Sequence
  Description of Artificial Sequence: Synthetic oligonucleotide
  Antisense strand to SEQ ID NO: 2553738
acuaguauccagcauaccc

SEQ ID NO: 2553740 - RNA, 19 nt, Artificial Sequence
  Description of Artificial Sequence: Synthetic oligonucleotide
  Sense strand starting at position 2454 of SEQ ID NO: 1888744
ggauacuagugacuacaua

SEQ ID NO: 2553741 - RNA, 19 nt, Artificial Sequence
  Description of Artificial Sequence: Synthetic oligonucleotide
  Antisense strand to SEQ ID NO: 2553740
uauguagucacuaguaucc

SEQ ID NO: 2553742 - RNA, 19 nt, Artificial Sequence
  Description of Artificial Sequence: Synthetic oligonucleotide
  Sense strand starting at position 2792 of SEQ ID NO: 1888744
ggagacugguccagaggga

SEQ ID NO: 2553743 - RNA, 19 nt, Artificial Sequence
  Description of Artificial Sequence: Synthetic oligonucleotide
  Antisense strand to SEQ ID NO: 2553742
ucccucuggaccagucucc

SEQ ID NO: 2553744 - RNA, 19 nt, Artificial Sequence
  Description of Artificial Sequence: Synthetic oligonucleotide
  Sense strand starting at position 2980 of SEQ ID NO: 1888744
agagaccuugcaugugauu

SEQ ID NO: 2553745 - RNA, 19 nt, Artificial Sequence
  Description of Artificial Sequence: Synthetic oligonucleotide
  Antisense strand to SEQ ID NO: 2553744
aaucacaugcaaggucucu

SEQ ID NO: 2553746 - RNA, 19 nt, Artificial Sequence
  Description of Artificial Sequence: Synthetic oligonucleotide
  Sense strand starting at position 3059 of SEQ ID NO: 1888744
aggaucaagugguccaauu

SEQ ID NO: 2553747 - RNA, 19 nt, Artificial Sequence
  Description of Artificial Sequence: Synthetic oligonucleotide
  Antisense strand to SEQ ID NO: 2553746
aauuggaccacuugauccu

SEQ ID NO: 2553748 - RNA, 19 nt, Artificial Sequence
  Description of Artificial Sequence: Synthetic oligonucleotide
  Sense strand starting at position 3061 of SEQ ID NO: 1888744
gaucaagugguccaauucu

SEQ ID NO: 2553749 - RNA, 19 nt, Artificial Sequence
  Description of Artificial Sequence: Synthetic oligonucleotide
  Antisense strand to SEQ ID NO: 2553748
agaauuggaccacuugauc

SEQ ID NO: 2553750 - RNA, 19 nt, Artificial Sequence
  Description of Artificial Sequence: Synthetic oligonucleotide
  Sense strand starting at position 3175 of SEQ ID NO: 1888744
cagcuuaauccugaggucu

SEQ ID NO: 2553751 - RNA, 19 nt, Artificial Sequence
  Description of Artificial Sequence: Synthetic oligonucleotide
  Antisense strand to SEQ ID NO: 2553750
agaccucaggauuaagcug

SEQ ID NO: 2553752 - RNA, 19 nt, Artificial Sequence
  Description of Artificial Sequence: Synthetic oligonucleotide
  Sense strand starting at position 3203 of SEQ ID NO: 1888744
gacagaccaugcuugugaa

SEQ ID NO: 2553753 - RNA, 19 nt, Artificial Sequence
  Description of Artificial Sequence: Synthetic oligonucleotide
  Antisense strand to SEQ ID NO: 2553752
uucacaagcauggucuguc

SEQ ID NO: 2553754 - RNA, 19 nt, Artificial Sequence
  Description of Artificial Sequence: Synthetic oligonucleotide
  Sense strand starting at position 3339 of SEQ ID NO: 1888744
agguuagagugaucuccau

SEQ ID NO: 2553755 - RNA, 19 nt, Artificial Sequence
  Description of Artificial Sequence: Synthetic oligonucleotide
  Antisense strand to SEQ ID NO: 2553754
auggagaucacucuaaccu

SEQ ID NO: 2553756 - RNA, 19 nt, Artificial Sequence
  Description of Artificial Sequence: Synthetic oligonucleotide
  Sense strand starting at position 3343 of SEQ ID NO: 1888744
uagagugaucuccauggug

SEQ ID NO: 2553757 - RNA, 19 nt, Artificial Sequence
  Description of Artificial Sequence: Synthetic oligonucleotide
  Antisense strand to SEQ ID NO: 2553756
caccauggagaucacucua

SEQ ID NO: 2553758 - RNA, 19 nt, Artificial Sequence
  Description of Artificial Sequence: Synthetic oligonucleotide
  Sense strand starting at position 3391 of SEQ ID NO: 1888744
cagccuuuagcaugagaga

SEQ ID NO: 2553759 - RNA, 19 nt, Artificial Sequence
  Description of Artificial Sequence: Synthetic oligonucleotide
  Antisense strand to SEQ ID NO: 2553758
ucucucaugcuaaaggcug

SEQ ID NO: 2553760 - RNA, 19 nt, Artificial Sequence
  Description of Artificial Sequence: Synthetic oligonucleotide
  Sense strand starting at position 3392 of SEQ ID NO: 1888744
agccuuuagcaugagagau

SEQ ID NO: 2553761 - RNA, 19 nt, Artificial Sequence
  Description of Artificial Sequence: Synthetic oligonucleotide
  Antisense strand to SEQ ID NO: 2553760
aucucucaugcuaaaggcu

SEQ ID NO: 2553762 - RNA, 19 nt, Artificial Sequence
  Description of Artificial Sequence: Synthetic oligonucleotide
  Sense strand starting at position 3394 of SEQ ID NO: 1888744
ccuuuagcaugagagauuu

SEQ ID NO: 2553763 - RNA, 19 nt, Artificial Sequence
  Description of Artificial Sequence: Synthetic oligonucleotide
  Antisense strand to SEQ ID NO: 2553762
aaaucucucaugcuaaagg

SEQ ID NO: 2553764 - RNA, 19 nt, Artificial Sequence
  Description of Artificial Sequence: Synthetic oligonucleotide
  Sense strand starting at position 3470 of SEQ ID NO: 1888744
aaugguguuauugagaggu

SEQ ID NO: 2553765 - RNA, 19 nt, Artificial Sequence
  Description of Artificial Sequence: Synthetic oligonucleotide
  Antisense strand to SEQ ID NO: 2553764
accucucaauaacaccauu

SEQ ID NO: 2553766 - RNA, 19 nt, Artificial Sequence
  Description of Artificial Sequence: Synthetic oligonucleotide
  Sense strand starting at position 3476 of SEQ ID NO: 1888744
guuauugagagguaaguca

SEQ ID NO: 2553767 - RNA, 19 nt, Artificial Sequence
  Description of Artificial Sequence: Synthetic oligonucleotide
  Antisense strand to SEQ ID NO: 2553766
ugacuuaccucucaauaac

SEQ ID NO: 2553768 - RNA, 19 nt, Artificial Sequence
  Description of Artificial Sequence: Synthetic oligonucleotide
  Sense strand starting at position 3530 of SEQ ID NO: 1888744
cagugacuuuagguauagu

SEQ ID NO: 2553769 - RNA, 19 nt, Artificial Sequence
  Description of Artificial Sequence: Synthetic oligonucleotide
  Antisense strand to SEQ ID NO: 2553768
acuauaccuaaagucacug

SEQ ID NO: 2553770 - RNA, 19 nt, Artificial Sequence
  Description of Artificial Sequence: Synthetic oligonucleotide
  Sense strand starting at position 3531 of SEQ ID NO: 1888744
agugacuuuagguauaguu

SEQ ID NO: 2553771 - RNA, 19 nt, Artificial Sequence
  Description of Artificial Sequence: Synthetic oligonucleotide
  Antisense strand to SEQ ID NO: 2553770
aacuauaccuaaagucacu

SEQ ID NO: 2553772 - RNA, 19 nt, Artificial Sequence
  Description of Artificial Sequence: Synthetic oligonucleotide
  Sense strand starting at position 602 of SEQ ID NO: 1888745
uccugauucgcgccagacu

SEQ ID NO: 2553773 - RNA, 19 nt, Artificial Sequence
  Description of Artificial Sequence: Synthetic oligonucleotide
  Antisense strand to SEQ ID NO: 2553772
agucuggcgcgaaucagga

SEQ ID NO: 2553774 - RNA, 19 nt, Artificial Sequence
  Description of Artificial Sequence: Synthetic oligonucleotide
  Sense strand starting at position 711 of SEQ ID NO: 1888745
ggguuauaaucccuggaag

SEQ ID NO: 2553775 - RNA, 19 nt, Artificial Sequence
  Description of Artificial Sequence: Synthetic oligonucleotide
  Antisense strand to SEQ ID NO: 2553774
cuuccagggauuauaaccc

SEQ ID NO: 2553776 - RNA, 19 nt, Artificial Sequence
  Description of Artificial Sequence: Synthetic oligonucleotide
  Sense strand starting at position 712 of SEQ ID NO: 1888745
gguuauaaucccuggaagc

SEQ ID NO: 2553777 - RNA, 19 nt, Artificial Sequence
  Description of Artificial Sequence: Synthetic oligonucleotide
  Antisense strand to SEQ ID NO: 2553776
gcuuccagggauuauaacc

SEQ ID NO: 2553778 - RNA, 19 nt, Artificial Sequence
  Description of Artificial Sequence: Synthetic oligonucleotide
  Sense strand starting at position 787 of SEQ ID NO: 1888745
gguuucuuuauggacaguu

SEQ ID NO: 2553779 - RNA, 19 nt, Artificial Sequence
  Description of Artificial Sequence: Synthetic oligonucleotide
  Antisense strand to SEQ ID NO: 2553778
aacuguccauaaagaaacc

SEQ ID NO: 2553780 - RNA, 19 nt, Artificial Sequence
  Description of Artificial Sequence: Synthetic oligonucleotide
  Sense strand starting at position 834 of SEQ ID NO: 1888745
uugugaacagugggugaaa

SEQ ID NO: 2553781 - RNA, 19 nt, Artificial Sequence
  Description of Artificial Sequence: Synthetic oligonucleotide
  Antisense strand to SEQ ID NO: 2553780
uuucacccacuguucacaa

SEQ ID NO: 2553782 - RNA, 19 nt, Artificial Sequence
  Description of Artificial Sequence: Synthetic oligonucleotide
  Sense strand starting at position 847 of SEQ ID NO: 1888745
gugaaaccuugauacauuu

SEQ ID NO: 2553783 - RNA, 19 nt, Artificial Sequence
  Description of Artificial Sequence: Synthetic oligonucleotide
  Antisense strand to SEQ ID NO: 2553782
aaauguaucaagguuucac

SEQ ID NO: 2553784 - RNA, 19 nt, Artificial Sequence
  Description of Artificial Sequence: Synthetic oligonucleotide
  Sense strand starting at position 907 of SEQ ID NO: 1888745
caggauauagcuuauguuu

SEQ ID NO: 2553785 - RNA, 19 nt, Artificial Sequence
  Description of Artificial Sequence: Synthetic oligonucleotide
  Antisense strand to SEQ ID NO: 2553784
aaacauaagcuauauccug

SEQ ID NO: 2553786 - RNA, 19 nt, Artificial Sequence
  Description of Artificial Sequence: Synthetic oligonucleotide
  Sense strand starting at position 924 of SEQ ID NO: 1888745
uuguuugcugaagacuuau

SEQ ID NO: 2553787 - RNA, 19 nt, Artificial Sequence
  Description of Artificial Sequence: Synthetic oligonucleotide
  Antisense strand to SEQ ID NO: 2553786
auaagucuucagcaaacaa

SEQ ID NO: 2553788 - RNA, 19 nt, Artificial Sequence
  Description of Artificial Sequence: Synthetic oligonucleotide
  Sense strand starting at position 930 of SEQ ID NO: 1888745
gcugaagacuuauuccaua

SEQ ID NO: 2553789 - RNA, 19 nt, Artificial Sequence
  Description of Artificial Sequence: Synthetic oligonucleotide
  Antisense strand to SEQ ID NO: 2553788
uauggaauaagucuucagc

SEQ ID NO: 2553790 - RNA, 19 nt, Artificial Sequence
  Description of Artificial Sequence: Synthetic oligonucleotide
  Sense strand starting at position 1188 of SEQ ID NO: 1888745
agccguauaacuugaagaa

SEQ ID NO: 2553791 - RNA, 19 nt, Artificial Sequence
  Description of Artificial Sequence: Synthetic oligonucleotide
  Antisense strand to SEQ ID NO: 2553790
uucuucaaguuauacggcu

SEQ ID NO: 2553792 - RNA, 19 nt, Artificial Sequence
  Description of Artificial Sequence: Synthetic oligonucleotide
  Sense strand starting at position 1189 of SEQ ID NO: 1888745
gccguauaacuugaagaaa

SEQ ID NO: 2553793 - RNA, 19 nt, Artificial Sequence
  Description of Artificial Sequence: Synthetic oligonucleotide
  Antisense strand to SEQ ID NO: 2553792
uuucuucaaguuauacggc

SEQ ID NO: 2553794 - RNA, 19 nt, Artificial Sequence
  Description of Artificial Sequence: Synthetic oligonucleotide
  Sense strand starting at position 1357 of SEQ ID NO: 1888745
gcuggcuccagggauucua

SEQ ID NO: 2553795 - RNA, 19 nt, Artificial Sequence
  Description of Artificial Sequence: Synthetic oligonucleotide
  Antisense strand to SEQ ID NO: 2553794
uagaaucccuggagccagc

SEQ ID NO: 2553796 - RNA, 19 nt, Artificial Sequence
  Description of Artificial Sequence: Synthetic oligonucleotide
  Sense strand starting at position 1643 of SEQ ID NO: 1888745
caggaauaguaucugucuu

SEQ ID NO: 2553797 - RNA, 19 nt, Artificial Sequence
  Description of Artificial Sequence: Synthetic oligonucleotide
  Antisense strand to SEQ ID NO: 2553796
aagacagauacuauuccug

SEQ ID NO: 2553798 - RNA, 19 nt, Artificial Sequence
  Description of Artificial Sequence: Synthetic oligonucleotide
  Sense strand starting at position 1645 of SEQ ID NO: 1888745
ggaauaguaucugucuuaa

SEQ ID NO: 2553799 - RNA, 19 nt, Artificial Sequence
  Description of Artificial Sequence: Synthetic oligonucleotide
  Antisense strand to SEQ ID NO: 2553798
uuaagacagauacuauucc

SEQ ID NO: 2553800 - RNA, 19 nt, Artificial Sequence
  Description of Artificial Sequence: Synthetic oligonucleotide
  Sense strand starting at position 1657 of SEQ ID NO: 1888745
gucuuaaucucauuggauu

SEQ ID NO: 2553801 - RNA, 19 nt, Artificial Sequence
  Description of Artificial Sequence: Synthetic oligonucleotide
  Antisense strand to SEQ ID NO: 2553800
aauccaaugagauuaagac

SEQ ID NO: 2553802 - RNA, 19 nt, Artificial Sequence
  Description of Artificial Sequence: Synthetic oligonucleotide
  Sense strand starting at position 1658 of SEQ ID NO: 1888745
ucuuaaucucauuggauug

SEQ ID NO: 2553803 - RNA, 19 nt, Artificial Sequence
  Description of Artificial Sequence: Synthetic oligonucleotide
  Antisense strand to SEQ ID NO: 2553802
caauccaaugagauuaaga

SEQ ID NO: 2553804 - RNA, 19 nt, Artificial Sequence
  Description of Artificial Sequence: Synthetic oligonucleotide
  Sense strand starting at position 1674 of SEQ ID NO: 1888745
uugccagcacuugacaauu

SEQ ID NO: 2553805 - RNA, 19 nt, Artificial Sequence
  Description of Artificial Sequence: Synthetic oligonucleotide
  Antisense strand to SEQ ID NO: 2553804
aauugucaagugcuggcaa

SEQ ID NO: 2553806 - RNA, 19 nt, Artificial Sequence
  Description of Artificial Sequence: Synthetic oligonucleotide
  Sense strand starting at position 1685 of SEQ ID NO: 1888745
ugacaauuaguagaugcuu

SEQ ID NO: 2553807 - RNA, 19 nt, Artificial Sequence
  Description of Artificial Sequence: Synthetic oligonucleotide
  Antisense strand to SEQ ID NO: 2553806
aagcaucuacuaauuguca

SEQ ID NO: 2553808 - RNA, 19 nt, Artificial Sequence
  Description of Artificial Sequence: Synthetic oligonucleotide
  Sense strand starting at position 1986 of SEQ ID NO: 1888745
gagugauccggguaugguu

SEQ ID NO: 2553809 - RNA, 19 nt, Artificial Sequence
  Description of Artificial Sequence: Synthetic oligonucleotide
  Antisense strand to SEQ ID NO: 2553808
aaccauacccggaucacuc

SEQ ID NO: 2553810 - RNA, 19 nt, Artificial Sequence
  Description of Artificial Sequence: Synthetic oligonucleotide
  Sense strand starting at position 2129 of SEQ ID NO: 1888745
gagguaaagcccuaaucac

SEQ ID NO: 2553811 - RNA, 19 nt, Artificial Sequence
  Description of Artificial Sequence: Synthetic oligonucleotide
  Antisense strand to SEQ ID NO: 2553810
gugauuagggcuuuaccuc

SEQ ID NO: 2553812 - RNA, 19 nt, Artificial Sequence
  Description of Artificial Sequence: Synthetic oligonucleotide
  Sense strand starting at position 2216 of SEQ ID NO: 1888745
accaaucaguucuuaguua

SEQ ID NO: 2553813 - RNA, 19 nt, Artificial Sequence
  Description of Artificial Sequence: Synthetic oligonucleotide
  Antisense strand to SEQ ID NO: 2553812
uaacuaagaacugauuggu

SEQ ID NO: 2553814 - RNA, 19 nt, Artificial Sequence
  Description of Artificial Sequence: Synthetic oligonucleotide
  Sense strand starting at position 2228 of SEQ ID NO: 1888745
uuaguuaucuuacuuagag

SEQ ID NO: 2553815 - RNA, 19 nt, Artificial Sequence
  Description of Artificial Sequence: Synthetic oligonucleotide
  Antisense strand to SEQ ID NO: 2553814
cucuaaguaagauaacuaa

SEQ ID NO: 2553816 - RNA, 19 nt, Artificial Sequence
  Description of Artificial Sequence: Synthetic oligonucleotide
  Sense strand starting at position 2229 of SEQ ID NO: 1888745
uaguuaucuuacuuagagg

SEQ ID NO: 2553817 - RNA, 19 nt, Artificial Sequence
  Description of Artificial Sequence: Synthetic oligonucleotide
  Antisense strand to SEQ ID NO: 2553816
ccucuaaguaagauaacua

SEQ ID NO: 2553818 - RNA, 19 nt, Artificial Sequence
  Description of Artificial Sequence: Synthetic oligonucleotide
  Sense strand starting at position 2238 of SEQ ID NO: 1888745
uacuuagaggaaugguacu

SEQ ID NO: 2553819 - RNA, 19 nt, Artificial Sequence
  Description of Artificial Sequence: Synthetic oligonucleotide
  Antisense strand to SEQ ID NO: 2553818
aguaccauuccucuaagua

SEQ ID NO: 2553820 - RNA, 19 nt, Artificial Sequence
  Description of Artificial Sequence: Synthetic oligonucleotide
  Sense strand starting at position 2477 of SEQ ID NO: 1888745
uacugacuguaaucaguga

SEQ ID NO: 2553821 - RNA, 19 nt, Artificial Sequence
  Description of Artificial Sequence: Synthetic oligonucleotide
  Antisense strand to SEQ ID NO: 2553820
ucacugauuacagucagua

SEQ ID NO: 2553822 - RNA, 19 nt, Artificial Sequence
  Description of Artificial Sequence: Synthetic oligonucleotide
  Sense strand starting at position 2481 of SEQ ID NO: 1888745
gacuguaaucagugaacug

SEQ ID NO: 2553823 - RNA, 19 nt, Artificial Sequence
  Description of Artificial Sequence: Synthetic oligonucleotide
  Antisense strand to SEQ ID NO: 2553822
caguucacugauuacaguc

SEQ ID NO: 2553824 - RNA, 19 nt, Artificial Sequence
  Description of Artificial Sequence: Synthetic oligonucleotide
  Sense strand starting at position 2605 of SEQ ID NO: 1888745
acaaguaaaugggcagaau

SEQ ID NO: 2553825 - RNA, 19 nt, Artificial Sequence
  Description of Artificial Sequence: Synthetic oligonucleotide
  Antisense strand to SEQ ID NO: 2553824
auucugcccauuuacuugu

SEQ ID NO: 2553826 - RNA, 19 nt, Artificial Sequence
  Description of Artificial Sequence: Synthetic oligonucleotide
  Sense strand starting at position 2614 of SEQ ID NO: 1888745
ugggcagaauuauugcaua

SEQ ID NO: 2553827 - RNA, 19 nt, Artificial Sequence
  Description of Artificial Sequence: Synthetic oligonucleotide
  Antisense strand to SEQ ID NO: 2553826
uaugcaauaauucugccca

SEQ ID NO: 2553828 - RNA, 19 nt, Artificial Sequence
  Description of Artificial Sequence: Synthetic oligonucleotide
  Sense strand starting at position 2619 of SEQ ID NO: 1888745
agaauuauugcauaguggu

SEQ ID NO: 2553829 - RNA, 19 nt, Artificial Sequence
  Description of Artificial Sequence: Synthetic oligonucleotide
  Antisense strand to SEQ ID NO: 2553828
accacuaugcaauaauucu

SEQ ID NO: 2553830 - RNA, 19 nt, Artificial Sequence
  Description of Artificial Sequence: Synthetic oligonucleotide
  Sense strand starting at position 2625 of SEQ ID NO: 1888745
auugcauagugguuaagag

SEQ ID NO: 2553831 - RNA, 19 nt, Artificial Sequence
  Description of Artificial Sequence: Synthetic oligonucleotide
  Antisense strand to SEQ ID NO: 2553830
cucuuaaccacuaugcaau

SEQ ID NO: 2553832 - RNA, 19 nt, Artificial Sequence
  Description of Artificial Sequence: Synthetic oligonucleotide
  Sense strand starting at position 2672 of SEQ ID NO: 1888745
cagggauguugaguaggga

SEQ ID NO: 2553833 - RNA, 19 nt, Artificial Sequence
  Description of Artificial Sequence: Synthetic oligonucleotide
  Antisense strand to SEQ ID NO: 2553832
ucccuacucaacaucccug

SEQ ID NO: 2553834 - RNA, 19 nt, Artificial Sequence
  Description of Artificial Sequence: Synthetic oligonucleotide
  Sense strand starting at position 2721 of SEQ ID NO: 1888745
ccgaacagaucuucuuuau

SEQ ID NO: 2553835 - RNA, 19 nt, Artificial Sequence
  Description of Artificial Sequence: Synthetic oligonucleotide
  Antisense strand to SEQ ID NO: 2553834
auaaagaagaucuguucgg

SEQ ID NO: 2553836 - RNA, 19 nt, Artificial Sequence
  Description of Artificial Sequence: Synthetic oligonucleotide
  Sense strand starting at position 2913 of SEQ ID NO: 1888745
acaguucucuguccagaca

SEQ ID NO: 2553837 - RNA, 19 nt, Artificial Sequence
  Description of Artificial Sequence: Synthetic oligonucleotide
  Antisense strand to SEQ ID NO: 2553836
ugucuggacagagaacugu

SEQ ID NO: 2553838 - RNA, 19 nt, Artificial Sequence
  Description of Artificial Sequence: Synthetic oligonucleotide
  Sense strand starting at position 3004 of SEQ ID NO: 1888745
cgcuuagaagaauauguau

SEQ ID NO: 2553839 - RNA, 19 nt, Artificial Sequence
  Description of Artificial Sequence: Synthetic oligonucleotide
  Antisense strand to SEQ ID NO: 2553838
auacauauucuucuaagcg

SEQ ID NO: 2553840 - RNA, 19 nt, Artificial Sequence
  Description of Artificial Sequence: Synthetic oligonucleotide
  Sense strand starting at position 3050 of SEQ ID NO: 1888745
gggugcuaaagugaaaugu

SEQ ID NO: 2553841 - RNA, 19 nt, Artificial Sequence
  Description of Artificial Sequence: Synthetic oligonucleotide
  Antisense strand to SEQ ID NO: 2553840
acauuucacuuuagcaccc

SEQ ID NO: 2553842 - RNA, 19 nt, Artificial Sequence
  Description of Artificial Sequence: Synthetic oligonucleotide
  Sense strand starting at position 3156 of SEQ ID NO: 1888745
aggugauaauguguuaaug

SEQ ID NO: 2553843 - RNA, 19 nt, Artificial Sequence
  Description of Artificial Sequence: Synthetic oligonucleotide
  Antisense strand to SEQ ID NO: 2553842
cauuaacacauuaucaccu

SEQ ID NO: 2553844 - RNA, 19 nt, Artificial Sequence
  Description of Artificial Sequence: Synthetic oligonucleotide
  Sense strand starting at position 3170 of SEQ ID NO: 1888745
uaauguugggauuggagau

SEQ ID NO: 2553845 - RNA, 19 nt, Artificial Sequence
  Description of Artificial Sequence: Synthetic oligonucleotide
  Antisense strand to SEQ ID NO: 2553844
aucuccaaucccaacauua

SEQ ID NO: 2553846 - RNA, 19 nt, Artificial Sequence
  Description of Artificial Sequence: Synthetic oligonucleotide
  Sense strand starting at position 3171 of SEQ ID NO: 1888745
aauguugggauuggagauu

SEQ ID NO: 2553847 - RNA, 19 nt, Artificial Sequence
  Description of Artificial Sequence: Synthetic oligonucleotide
  Antisense strand to SEQ ID NO: 2553846
aaucuccaaucccaacauu

SEQ ID NO: 2553848 - RNA, 19 nt, Artificial Sequence
  Description of Artificial Sequence: Synthetic oligonucleotide
  Sense strand starting at position 3418 of SEQ ID NO: 1888745
gaggauggucaggguaagu

SEQ ID NO: 2553849 - RNA, 19 nt, Artificial Sequence
  Description of Artificial Sequence: Synthetic oligonucleotide
  Antisense strand to SEQ ID NO: 2553848
acuuacccugaccauccuc

SEQ ID NO: 2553850 - RNA, 19 nt, Artificial Sequence
  Description of Artificial Sequence: Synthetic oligonucleotide
  Sense strand starting at position 3420 of SEQ ID NO: 1888745
ggauggucaggguaagugu

SEQ ID NO: 2553851 - RNA, 19 nt, Artificial Sequence
  Description of Artificial Sequence: Synthetic oligonucleotide
  Antisense strand to SEQ ID NO: 2553850
acacuuacccugaccaucc

SEQ ID NO: 2553852 - RNA, 19 nt, Artificial Sequence
  Description of Artificial Sequence: Synthetic oligonucleotide
  Sense strand starting at position 85 of SEQ ID NO: 1888746
ggaugcuuaaauuguaaag

SEQ ID NO: 2553853 - RNA, 19 nt, Artificial Sequence
  Description of Artificial Sequence: Synthetic oligonucleotide
  Antisense strand to SEQ ID NO: 2553852
cuuuacaauuuaagcaucc

SEQ ID NO: 2553854 - RNA, 19 nt, Artificial Sequence
  Description of Artificial Sequence: Synthetic oligonucleotide
  Sense strand starting at position 96 of SEQ ID NO: 1888746
uuguaaagccgugacaaca

SEQ ID NO: 2553855 - RNA, 19 nt, Artificial Sequence
  Description of Artificial Sequence: Synthetic oligonucleotide
  Antisense strand to SEQ ID NO: 2553854
uguugucacggcuuuacaa

SEQ ID NO: 2553856 - RNA, 19 nt, Artificial Sequence
  Description of Artificial Sequence: Synthetic oligonucleotide
  Sense strand starting at position 307 of SEQ ID NO: 1888746
ugaggaauuuaauagcuaa

SEQ ID NO: 2553857 - RNA, 19 nt, Artificial Sequence
  Description of Artificial Sequence: Synthetic oligonucleotide
  Antisense strand to SEQ ID NO: 2553856
uuagcuauuaaauuccuca

SEQ ID NO: 2553858 - RNA, 19 nt, Artificial Sequence
  Description of Artificial Sequence: Synthetic oligonucleotide
  Sense strand starting at position 372 of SEQ ID NO: 1888746
guuacaauuccaggguaag

SEQ ID NO: 2553859 - RNA, 19 nt, Artificial Sequence
  Description of Artificial Sequence: Synthetic oligonucleotide
  Antisense strand to SEQ ID NO: 2553858
cuuacccuggaauuguaac

SEQ ID NO: 2553860 - RNA, 19 nt, Artificial Sequence
  Description of Artificial Sequence: Synthetic oligonucleotide
  Sense strand starting at position 373 of SEQ ID NO: 1888746
uuacaauuccaggguaagu

SEQ ID NO: 2553861 - RNA, 19 nt, Artificial Sequence
  Description of Artificial Sequence: Synthetic oligonucleotide
  Antisense strand to SEQ ID NO: 2553860
acuuacccuggaauuguaa

SEQ ID NO: 2553862 - RNA, 19 nt, Artificial Sequence
  Description of Artificial Sequence: Synthetic oligonucleotide
  Sense strand starting at position 426 of SEQ ID NO: 1888746
gugugucugccagugucua

SEQ ID NO: 2553863 - RNA, 19 nt, Artificial Sequence
  Description of Artificial Sequence: Synthetic oligonucleotide
  Antisense strand to SEQ ID NO: 2553862
uagacacuggcagacacac

SEQ ID NO: 2553864 - RNA, 19 nt, Artificial Sequence
  Description of Artificial Sequence: Synthetic oligonucleotide
  Sense strand starting at position 452 of SEQ ID NO: 1888746
guucuuaugccaguggugu

SEQ ID NO: 2553865 - RNA, 19 nt, Artificial Sequence
  Description of Artificial Sequence: Synthetic oligonucleotide
  Antisense strand to SEQ ID NO: 2553864
acaccacuggcauaagaac

SEQ ID NO: 2553866 - RNA, 19 nt, Artificial Sequence
  Description of Artificial Sequence: Synthetic oligonucleotide
  Sense strand starting at position 545 of SEQ ID NO: 1888746
ugacauaguuacuccacua

SEQ ID NO: 2553867 - RNA, 19 nt, Artificial Sequence
  Description of Artificial Sequence: Synthetic oligonucleotide
  Antisense strand to SEQ ID NO: 2553866
uaguggaguaacuauguca

SEQ ID NO: 2553868 - RNA, 19 nt, Artificial Sequence
  Description of Artificial Sequence: Synthetic oligonucleotide
  Sense strand starting at position 560 of SEQ ID NO: 1888746
acuagauugucaccaugag

SEQ ID NO: 2553869 - RNA, 19 nt, Artificial Sequence
  Description of Artificial Sequence: Synthetic oligonucleotide
  Antisense strand to SEQ ID NO: 2553868
cucauggugacaaucuagu

SEQ ID NO: 2553870 - RNA, 19 nt, Artificial Sequence
  Description of Artificial Sequence: Synthetic oligonucleotide
  Sense strand starting at position 574 of SEQ ID NO: 1888746
augagauuguggcugauua

SEQ ID NO: 2553871 - RNA, 19 nt, Artificial Sequence
  Description of Artificial Sequence: Synthetic oligonucleotide
  Antisense strand to SEQ ID NO: 2553870
uaaucagccacaaucucau

SEQ ID NO: 2553872 - RNA, 19 nt, Artificial Sequence
  Description of Artificial Sequence: Synthetic oligonucleotide
  Sense strand starting at position 576 of SEQ ID NO: 1888746
gagauuguggcugauuacu

SEQ ID NO: 2553873 - RNA, 19 nt, Artificial Sequence
  Description of Artificial Sequence: Synthetic oligonucleotide
  Antisense strand to SEQ ID NO: 2553872
aguaaucagccacaaucuc

SEQ ID NO: 2553874 - RNA, 19 nt, Artificial Sequence
  Description of Artificial Sequence: Synthetic oligonucleotide
  Sense strand starting at position 585 of SEQ ID NO: 1888746
gcugauuacuuccuugaaa

SEQ ID NO: 2553875 - RNA, 19 nt, Artificial Sequence
  Description of Artificial Sequence: Synthetic oligonucleotide
  Antisense strand to SEQ ID NO: 2553874
uuucaaggaaguaaucagc

SEQ ID NO: 2553876 - RNA, 19 nt, Artificial Sequence
  Description of Artificial Sequence: Synthetic oligonucleotide
  Sense strand starting at position 660 of SEQ ID NO: 1888746
guuccuugucaauaaguaa

SEQ ID NO: 2553877 - RNA, 19 nt, Artificial Sequence
  Description of Artificial Sequence: Synthetic oligonucleotide
  Antisense strand to SEQ ID NO: 2553876
uuacuuauugacaaggaac

SEQ ID NO: 2553878 - RNA, 19 nt, Artificial Sequence
  Description of Artificial Sequence: Synthetic oligonucleotide
  Sense strand starting at position 667 of SEQ ID NO: 1888746
gucaauaaguaaucagauu

SEQ ID NO: 2553879 - RNA, 19 nt, Artificial Sequence
  Description of Artificial Sequence: Synthetic oligonucleotide
  Antisense strand to SEQ ID NO: 2553878
aaucugauuacuuauugac

SEQ ID NO: 2553880 - RNA, 19 nt, Artificial Sequence
  Description of Artificial Sequence: Synthetic oligonucleotide
  Sense strand starting at position 766 of SEQ ID NO: 1888746
uccuaagaauggcugaguu

SEQ ID NO: 2553881 - RNA, 19 nt, Artificial Sequence
  Description of Artificial Sequence: Synthetic oligonucleotide
  Antisense strand to SEQ ID NO: 2553880
aacucagccauucuuagga

SEQ ID NO: 2553882 - RNA, 19 nt, Artificial Sequence
  Description of Artificial Sequence: Synthetic oligonucleotide
  Sense strand starting at position 768 of SEQ ID NO: 1888746
cuaagaauggcugaguuua

SEQ ID NO: 2553883 - RNA, 19 nt, Artificial Sequence
  Description of Artificial Sequence: Synthetic oligonucleotide
  Antisense strand to SEQ ID NO: 2553882
uaaacucagccauucuuag

SEQ ID NO: 2553884 - RNA, 19 nt, Artificial Sequence
  Description of Artificial Sequence: Synthetic oligonucleotide
  Sense strand starting at position 770 of SEQ ID NO: 1888746
aagaauggcugaguuuacu

SEQ ID NO: 2553885 - RNA, 19 nt, Artificial Sequence
  Description of Artificial Sequence: Synthetic oligonucleotide
  Antisense strand to SEQ ID NO: 2553884
aguaaacucagccauucuu

SEQ ID NO: 2553886 - RNA, 19 nt, Artificial Sequence
  Description of Artificial Sequence: Synthetic oligonucleotide
  Sense strand starting at position 820 of SEQ ID NO: 1888746
uucucaucucuaggagacu

SEQ ID NO: 2553887 - RNA, 19 nt, Artificial Sequence
  Description of Artificial Sequence: Synthetic oligonucleotide
  Antisense strand to SEQ ID NO: 2553886
agucuccuagagaugagaa

SEQ ID NO: 2553888 - RNA, 19 nt, Artificial Sequence
  Description of Artificial Sequence: Synthetic oligonucleotide
  Sense strand starting at position 1100 of SEQ ID NO: 1888746
uuugucuuugaucauggua

SEQ ID NO: 2553889 - RNA, 19 nt, Artificial Sequence
  Description of Artificial Sequence: Synthetic oligonucleotide
  Antisense strand to SEQ ID NO: 2553888
uaccaugaucaaagacaaa

SEQ ID NO: 2553890 - RNA, 19 nt, Artificial Sequence
  Description of Artificial Sequence: Synthetic oligonucleotide
  Sense strand starting at position 1228 of SEQ ID NO: 1888746
aagugugaagcugaguuua

SEQ ID NO: 2553891 - RNA, 19 nt, Artificial Sequence
  Description of Artificial Sequence: Synthetic oligonucleotide
  Antisense strand to SEQ ID NO: 2553890
uaaacucagcuucacacuu

SEQ ID NO: 2553892 - RNA, 19 nt, Artificial Sequence
  Description of Artificial Sequence: Synthetic oligonucleotide
  Sense strand starting at position 1359 of SEQ ID NO: 1888746
gugaucggacuguggauaa

SEQ ID NO: 2553893 - RNA, 19 nt, Artificial Sequence
  Description of Artificial Sequence: Synthetic oligonucleotide
  Antisense strand to SEQ ID NO: 2553892
uuauccacaguccgaucac

SEQ ID NO: 2553894 - RNA, 19 nt, Artificial Sequence
  Description of Artificial Sequence: Synthetic oligonucleotide
  Sense strand starting at position 1363 of SEQ ID NO: 1888746
ucggacuguggauaagauu

SEQ ID NO: 2553895 - RNA, 19 nt, Artificial Sequence
  Description of Artificial Sequence: Synthetic oligonucleotide
  Antisense strand to SEQ ID NO: 2553894
aaucuuauccacaguccga

SEQ ID NO: 2553896 - RNA, 19 nt, Artificial Sequence
  Description of Artificial Sequence: Synthetic oligonucleotide
  Sense strand starting at position 1372 of SEQ ID NO: 1888746
ggauaagauugguuuccuu

SEQ ID NO: 2553897 - RNA, 19 nt, Artificial Sequence
  Description of Artificial Sequence: Synthetic oligonucleotide
  Antisense strand to SEQ ID NO: 2553896
aaggaaaccaaucuuaucc

SEQ ID NO: 2553898 - RNA, 19 nt, Artificial Sequence
  Description of Artificial Sequence: Synthetic oligonucleotide
  Sense strand starting at position 1481 of SEQ ID NO: 1888746
cccaguaacacguggagaa

SEQ ID NO: 2553899 - RNA, 19 nt, Artificial Sequence
  Description of Artificial Sequence: Synthetic oligonucleotide
  Antisense strand to SEQ ID NO: 2553898
uucuccacguguuacuggg

SEQ ID NO: 2553900 - RNA, 19 nt, Artificial Sequence
  Description of Artificial Sequence: Synthetic oligonucleotide
  Sense strand starting at position 1482 of SEQ ID NO: 1888746
ccaguaacacguggagaaa

SEQ ID NO: 2553901 - RNA, 19 nt, Artificial Sequence
  Description of Artificial Sequence: Synthetic oligonucleotide
  Antisense strand to SEQ ID NO: 2553900
uuucuccacguguuacugg

SEQ ID NO: 2553902 - RNA, 19 nt, Artificial Sequence
  Description of Artificial Sequence: Synthetic oligonucleotide
  Sense strand starting at position 1853 of SEQ ID NO: 1888746
ccgagaucuuggcugagaa

SEQ ID NO: 2553903 - RNA, 19 nt, Artificial Sequence
  Description of Artificial Sequence: Synthetic oligonucleotide
  Antisense strand to SEQ ID NO: 2553902
uucucagccaagaucucgg

SEQ ID NO: 2553904 - RNA, 19 nt, Artificial Sequence
  Description of Artificial Sequence: Synthetic oligonucleotide
  Sense strand starting at position 1854 of SEQ ID NO: 1888746
cgagaucuuggcugagaaa

SEQ ID NO: 2553905 - RNA, 19 nt, Artificial Sequence
  Description of Artificial Sequence: Synthetic oligonucleotide
  Antisense strand to SEQ ID NO: 2553904
uuucucagccaagaucucg

SEQ ID NO: 2553906 - RNA, 19 nt, Artificial Sequence
  Description of Artificial Sequence: Synthetic oligonucleotide
  Sense strand starting at position 2219 of SEQ ID NO: 1888746
ugccaaucccauggacauu

SEQ ID NO: 2553907 - RNA, 19 nt, Artificial Sequence
  Description of Artificial Sequence: Synthetic oligonucleotide
  Antisense strand to SEQ ID NO: 2553906
aauguccaugggauuggca

SEQ ID NO: 2553908 - RNA, 19 nt, Artificial Sequence
  Description of Artificial Sequence: Synthetic oligonucleotide
  Sense strand starting at position 2947 of SEQ ID NO: 1888746
aagggaucauccuuugcag

SEQ ID NO: 2553909 - RNA, 19 nt, Artificial Sequence
  Description of Artificial Sequence: Synthetic oligonucleotide
  Antisense strand to SEQ ID NO: 2553908
cugcaaaggaugaucccuu

SEQ ID NO: 2553910 - RNA, 19 nt, Artificial Sequence
  Description of Artificial Sequence: Synthetic oligonucleotide
  Sense strand starting at position 2990 of SEQ ID NO: 1888746
guuccucuaucuguauuua

SEQ ID NO: 2553911 - RNA, 19 nt, Artificial Sequence
  Description of Artificial Sequence: Synthetic oligonucleotide
  Antisense strand to SEQ ID NO: 2553910
uaaauacagauagaggaac

SEQ ID NO: 2553912 - RNA, 19 nt, Artificial Sequence
  Description of Artificial Sequence: Synthetic oligonucleotide
  Sense strand starting at position 3027 of SEQ ID NO: 1888746
aagggagugcuagaguuua

SEQ ID NO: 2553913 - RNA, 19 nt, Artificial Sequence
  Description of Artificial Sequence: Synthetic oligonucleotide
  Antisense strand to SEQ ID NO: 2553912
uaaacucuagcacucccuu

SEQ ID NO: 2553914 - RNA, 19 nt, Artificial Sequence
  Description of Artificial Sequence: Synthetic oligonucleotide
  Sense strand starting at position 3067 of SEQ ID NO: 1888746
uuaaguaggugaucucaca

SEQ ID NO: 2553915 - RNA, 19 nt, Artificial Sequence
  Description of Artificial Sequence: Synthetic oligonucleotide
  Antisense strand to SEQ ID NO: 2553914
ugugagaucaccuacuuaa

SEQ ID NO: 2553916 - RNA, 19 nt, Artificial Sequence
  Description of Artificial Sequence: Synthetic oligonucleotide
  Sense strand starting at position 3090 of SEQ ID NO: 1888746
gcugcauucccugaggaug

SEQ ID NO: 2553917 - RNA, 19 nt, Artificial Sequence
  Description of Artificial Sequence: Synthetic oligonucleotide
  Antisense strand to SEQ ID NO: 2553916
cauccucagggaaugcagc

SEQ ID NO: 2553918 - RNA, 19 nt, Artificial Sequence
  Description of Artificial Sequence: Synthetic oligonucleotide
  Sense strand starting at position 3289 of SEQ ID NO: 1888746
uaagucaguuuaguuagaa

SEQ ID NO: 2553919 - RNA, 19 nt, Artificial Sequence
  Description of Artificial Sequence: Synthetic oligonucleotide
  Antisense strand to SEQ ID NO: 2553918
uucuaacuaaacugacuua

SEQ ID NO: 2553920 - RNA, 19 nt, Artificial Sequence
  Description of Artificial Sequence: Synthetic oligonucleotide
  Sense strand starting at position 3290 of SEQ ID NO: 1888746
aagucaguuuaguuagaau

SEQ ID NO: 2553921 - RNA, 19 nt, Artificial Sequence
  Description of Artificial Sequence: Synthetic oligonucleotide
  Antisense strand to SEQ ID NO: 2553920
auucuaacuaaacugacuu

SEQ ID NO: 2553922 - RNA, 19 nt, Artificial Sequence
  Description of Artificial Sequence: Synthetic oligonucleotide
  Sense strand starting at position 3317 of SEQ ID NO: 1888746
aucaauaucucaguuaggu

SEQ ID NO: 2553923 - RNA, 19 nt, Artificial Sequence
  Description of Artificial Sequence: Synthetic oligonucleotide
  Antisense strand to SEQ ID NO: 2553922
accuaacugagauauugau

SEQ ID NO: 2553924 - RNA, 19 nt, Artificial Sequence
  Description of Artificial Sequence: Synthetic oligonucleotide
  Sense strand starting at position 3747 of SEQ ID NO: 1888746
caugcuaucgucuacaaag

SEQ ID NO: 2553925 - RNA, 19 nt, Artificial Sequence
  Description of Artificial Sequence: Synthetic oligonucleotide
  Antisense strand to SEQ ID NO: 2553924
cuuuguagacgauagcaug

SEQ ID NO: 2553926 - RNA, 19 nt, Artificial Sequence
  Description of Artificial Sequence: Synthetic oligonucleotide
  Sense strand starting at position 3767 of SEQ ID NO: 1888746
gggcaaauagaugguuaga

SEQ ID NO: 2553927 - RNA, 19 nt, Artificial Sequence
  Description of Artificial Sequence: Synthetic oligonucleotide
  Antisense strand to SEQ ID NO: 2553926
ucuaaccaucuauuugccc

SEQ ID NO: 2553928 - RNA, 19 nt, Artificial Sequence
  Description of Artificial Sequence: Synthetic oligonucleotide
  Sense strand starting at position 3769 of SEQ ID NO: 1888746
gcaaauagaugguuagaaa

SEQ ID NO: 2553929 - RNA, 19 nt, Artificial Sequence
  Description of Artificial Sequence: Synthetic oligonucleotide
  Antisense strand to SEQ ID NO: 2553928
uuucuaaccaucuauuugc

SEQ ID NO: 2553930 - RNA, 19 nt, Artificial Sequence
  Description of Artificial Sequence: Synthetic oligonucleotide
  Sense strand starting at position 3889 of SEQ ID NO: 1888746
auggaaaguggcugauuca

SEQ ID NO: 2553931 - RNA, 19 nt, Artificial Sequence
  Description of Artificial Sequence: Synthetic oligonucleotide
  Antisense strand to SEQ ID NO: 2553930
ugaaucagccacuuuccau

SEQ ID NO: 2553932 - RNA, 19 nt, Artificial Sequence
  Description of Artificial Sequence: Synthetic oligonucleotide
  Sense strand starting at position 114 of SEQ ID NO: 1888747
cagcguccucgggaaauaa

SEQ ID NO: 2553933 - RNA, 19 nt, Artificial Sequence
  Description of Artificial Sequence: Synthetic oligonucleotide
  Antisense strand to SEQ ID NO: 2553932
uuauuucccgaggacgcug

SEQ ID NO: 2553934 - RNA, 19 nt, Artificial Sequence
  Description of Artificial Sequence: Synthetic oligonucleotide
  Sense strand starting at position 255 of SEQ ID NO: 1888747
gcagaaauaucugucucaa

SEQ ID NO: 2553935 - RNA, 19 nt, Artificial Sequence
  Description of Artificial Sequence: Synthetic oligonucleotide
  Antisense strand to SEQ ID NO: 2553934
uugagacagauauuucugc

SEQ ID NO: 2553936 - RNA, 19 nt, Artificial Sequence
  Description of Artificial Sequence: Synthetic oligonucleotide
  Sense strand starting at position 414 of SEQ ID NO: 1888747
gcucuccuagacugagaaa

SEQ ID NO: 2553937 - RNA, 19 nt, Artificial Sequence
  Description of Artificial Sequence: Synthetic oligonucleotide
  Antisense strand to SEQ ID NO: 2553936
uuucucagucuaggagagc

SEQ ID NO: 2553938 - RNA, 19 nt, Artificial Sequence
  Description of Artificial Sequence: Synthetic oligonucleotide
  Sense strand starting at position 485 of SEQ ID NO: 1888747
gauggaaucccuggaucuc

SEQ ID NO: 2553939 - RNA, 19 nt, Artificial Sequence
  Description of Artificial Sequence: Synthetic oligonucleotide
  Antisense strand to SEQ ID NO: 2553938
gagauccagggauuccauc

SEQ ID NO: 2553940 - RNA, 19 nt, Artificial Sequence
  Description of Artificial Sequence: Synthetic oligonucleotide
  Sense strand starting at position 1186 of SEQ ID NO: 1888747
agcuuuaggagaggaugua

SEQ ID NO: 2553941 - RNA, 19 nt, Artificial Sequence
  Description of Artificial Sequence: Synthetic oligonucleotide
  Antisense strand to SEQ ID NO: 2553940
uacauccucuccuaaagcu

SEQ ID NO: 2553942 - RNA, 19 nt, Artificial Sequence
  Description of Artificial Sequence: Synthetic oligonucleotide
  Sense strand starting at position 2077 of SEQ ID NO: 1888747
cuguguuaucccuaucaca

SEQ ID NO: 2553943 - RNA, 19 nt, Artificial Sequence
  Description of Artificial Sequence: Synthetic oligonucleotide
  Antisense strand to SEQ ID NO: 2553942
ugugauagggauaacacag

SEQ ID NO: 2553944 - RNA, 19 nt, Artificial Sequence
  Description of Artificial Sequence: Synthetic oligonucleotide
  Sense strand starting at position 2752 of SEQ ID NO: 1888747
aacagugcagugugauuua

SEQ ID NO: 2553945 - RNA, 19 nt, Artificial Sequence
  Description of Artificial Sequence: Synthetic oligonucleotide
  Antisense strand to SEQ ID NO: 2553944
uaaaucacacugcacuguu

SEQ ID NO: 2553946 - RNA, 19 nt, Artificial Sequence
  Description of Artificial Sequence: Synthetic oligonucleotide
  Sense strand starting at position 2755 of SEQ ID NO: 1888747
agugcagugugauuuagga

SEQ ID NO: 2553947 - RNA, 19 nt, Artificial Sequence
  Description of Artificial Sequence: Synthetic oligonucleotide
  Antisense strand to SEQ ID NO: 2553946
uccuaaaucacacugcacu

SEQ ID NO: 2553948 - RNA, 19 nt, Artificial Sequence
  Description of Artificial Sequence: Synthetic oligonucleotide
  Sense strand starting at position 2765 of SEQ ID NO: 1888747
gauuuaggaugaggacuuu

SEQ ID NO: 2553949 - RNA, 19 nt, Artificial Sequence
  Description of Artificial Sequence: Synthetic oligonucleotide
  Antisense strand to SEQ ID NO: 2553948
aaaguccucauccuaaauc

SEQ ID NO: 2553950 - RNA, 19 nt, Artificial Sequence
  Description of Artificial Sequence: Synthetic oligonucleotide
  Sense strand starting at position 2794 of SEQ ID NO: 1888747
aggugauacgcuuagaacu

SEQ ID NO: 2553951 - RNA, 19 nt, Artificial Sequence
  Description of Artificial Sequence: Synthetic oligonucleotide
  Antisense strand to SEQ ID NO: 2553950
aguucuaagcguaucaccu

SEQ ID NO: 2553952 - RNA, 19 nt, Artificial Sequence
  Description of Artificial Sequence: Synthetic oligonucleotide
  Sense strand starting at position 2804 of SEQ ID NO: 1888747
cuuagaacuguugaaaguu

SEQ ID NO: 2553953 - RNA, 19 nt, Artificial Sequence
  Description of Artificial Sequence: Synthetic oligonucleotide
  Antisense strand to SEQ ID NO: 2553952
aacuuucaacaguucuaag

SEQ ID NO: 2553954 - RNA, 19 nt, Artificial Sequence
  Description of Artificial Sequence: Synthetic oligonucleotide
  Sense strand starting at position 2845 of SEQ ID NO: 1888747
aaagaaaucggccaugcaa

SEQ ID NO: 2553955 - RNA, 19 nt, Artificial Sequence
  Description of Artificial Sequence: Synthetic oligonucleotide
  Antisense strand to SEQ ID NO: 2553954
uugcauggccgauuucuuu

SEQ ID NO: 2553956 - RNA, 19 nt, Artificial Sequence
  Description of Artificial Sequence: Synthetic oligonucleotide
  Sense strand starting at position 3156 of SEQ ID NO: 1888747
caaggaggucacugugaua

SEQ ID NO: 2553957 - RNA, 19 nt, Artificial Sequence
  Description of Artificial Sequence: Synthetic oligonucleotide
  Antisense strand to SEQ ID NO: 2553956
uaucacagugaccuccuug

SEQ ID NO: 2553958 - RNA, 19 nt, Artificial Sequence
  Description of Artificial Sequence: Synthetic oligonucleotide
  Sense strand starting at position 3362 of SEQ ID NO: 1888747
agaaaucugucaucagcau

SEQ ID NO: 2553959 - RNA, 19 nt, Artificial Sequence
  Description of Artificial Sequence: Synthetic oligonucleotide
  Antisense strand to SEQ ID NO: 2553958
augcugaugacagauuucu

SEQ ID NO: 2553960 - RNA, 19 nt, Artificial Sequence
  Description of Artificial Sequence: Synthetic oligonucleotide
  Sense strand starting at position 3377 of SEQ ID NO: 1888747
gcaucaaggccuugaagau

SEQ ID NO: 2553961 - RNA, 19 nt, Artificial Sequence
  Description of Artificial Sequence: Synthetic oligonucleotide
  Antisense strand to SEQ ID NO: 2553960
aucuucaaggccuugaugc

SEQ ID NO: 2553962 - RNA, 19 nt, Artificial Sequence
  Description of Artificial Sequence: Synthetic oligonucleotide
  Sense strand starting at position 3446 of SEQ ID NO: 1888747
gggagucagcucggagaca

SEQ ID NO: 2553963 - RNA, 19 nt, Artificial Sequence
  Description of Artificial Sequence: Synthetic oligonucleotide
  Antisense strand to SEQ ID NO: 2553962
ugucuccgagcugacuccc

SEQ ID NO: 2553964 - RNA, 19 nt, Artificial Sequence
  Description of Artificial Sequence: Synthetic oligonucleotide
  Sense strand starting at position 3537 of SEQ ID NO: 1888747
aaaugauggugcucggaac

SEQ ID NO: 2553965 - RNA, 19 nt, Artificial Sequence
  Description of Artificial Sequence: Synthetic oligonucleotide
  Antisense strand to SEQ ID NO: 2553964
guuccgagcaccaucauuu

SEQ ID NO: 2553966 - RNA, 19 nt, Artificial Sequence
  Description of Artificial Sequence: Synthetic oligonucleotide
  Sense strand starting at position 113 of SEQ ID NO: 1888748
cagcguccucgggaaauaa

SEQ ID NO: 2553967 - RNA, 19 nt, Artificial Sequence
  Description of Artificial Sequence: Synthetic oligonucleotide
  Antisense strand to SEQ ID NO: 2553966
uuauuucccgaggacgcug

SEQ ID NO: 2553968 - RNA, 19 nt, Artificial Sequence
  Description of Artificial Sequence: Synthetic oligonucleotide
  Sense strand starting at position 254 of SEQ ID NO: 1888748
gcagaaauaucugucucaa

SEQ ID NO: 2553969 - RNA, 19 nt, Artificial Sequence
  Description of Artificial Sequence: Synthetic oligonucleotide
  Antisense strand to SEQ ID NO: 2553968
uugagacagauauuucugc

SEQ ID NO: 2553970 - RNA, 19 nt, Artificial Sequence
  Description of Artificial Sequence: Synthetic oligonucleotide
  Sense strand starting at position 413 of SEQ ID NO: 1888748
gcucuccuagacugagaaa

SEQ ID NO: 2553971 - RNA, 19 nt, Artificial Sequence
  Description of Artificial Sequence: Synthetic oligonucleotide
  Antisense strand to SEQ ID NO: 2553970
uuucucagucuaggagagc

SEQ ID NO: 2553972 - RNA, 19 nt, Artificial Sequence
  Description of Artificial Sequence: Synthetic oligonucleotide
  Sense strand starting at position 484 of SEQ ID NO: 1888748
gauggaaucccuggaucuc

SEQ ID NO: 2553973 - RNA, 19 nt, Artificial Sequence
  Description of Artificial Sequence: Synthetic oligonucleotide
  Antisense strand to SEQ ID NO: 2553972
gagauccagggauuccauc

SEQ ID NO: 2553974 - RNA, 19 nt, Artificial Sequence
  Description of Artificial Sequence: Synthetic oligonucleotide
  Sense strand starting at position 1185 of SEQ ID NO: 1888748
agcuuuaggagaggaugua

SEQ ID NO: 2553975 - RNA, 19 nt, Artificial Sequence
  Description of Artificial Sequence: Synthetic oligonucleotide
  Antisense strand to SEQ ID NO: 2553974
uacauccucuccuaaagcu

SEQ ID NO: 2553976 - RNA, 19 nt, Artificial Sequence
  Description of Artificial Sequence: Synthetic oligonucleotide
  Sense strand starting at position 1374 of SEQ ID NO: 1888748
cauagauacgugcaaccau

SEQ ID NO: 2553977 - RNA, 19 nt, Artificial Sequence
  Description of Artificial Sequence: Synthetic oligonucleotide
  Antisense strand to SEQ ID NO: 2553976
augguugcacguaucuaug

SEQ ID NO: 2553978 - RNA, 19 nt, Artificial Sequence
  Description of Artificial Sequence: Synthetic oligonucleotide
  Sense strand starting at position 1498 of SEQ ID NO: 1888748
ccaaucgacuuuccuuaga

SEQ ID NO: 2553979 - RNA, 19 nt, Artificial Sequence
  Description of Artificial Sequence: Synthetic oligonucleotide
  Antisense strand to SEQ ID NO: 2553978
ucuaaggaaagucgauugg

SEQ ID NO: 2553980 - RNA, 19 nt, Artificial Sequence
  Description of Artificial Sequence: Synthetic oligonucleotide
  Sense strand starting at position 1539 of SEQ ID NO: 1888748
gaggaauuauagucgaaug

SEQ ID NO: 2553981 - RNA, 19 nt, Artificial Sequence
  Description of Artificial Sequence: Synthetic oligonucleotide
  Antisense strand to SEQ ID NO: 2553980
cauucgacuauaauuccuc

SEQ ID NO: 2553982 - RNA, 19 nt, Artificial Sequence
  Description of Artificial Sequence: Synthetic oligonucleotide
  Sense strand starting at position 1632 of SEQ ID NO: 1888748
gccguaagagcauugcauc

SEQ ID NO: 2553983 - RNA, 19 nt, Artificial Sequence
  Description of Artificial Sequence: Synthetic oligonucleotide
  Antisense strand to SEQ ID NO: 2553982
gaugcaaugcucuuacggc

SEQ ID NO: 2553984 - RNA, 19 nt, Artificial Sequence
  Description of Artificial Sequence: Synthetic oligonucleotide
  Sense strand starting at position 1773 of SEQ ID NO: 1888748
gucugugcucuugcacaua

SEQ ID NO: 2553985 - RNA, 19 nt, Artificial Sequence
  Description of Artificial Sequence: Synthetic oligonucleotide
  Antisense strand to SEQ ID NO: 2553984
uaugugcaagagcacagac

SEQ ID NO: 2553986 - RNA, 19 nt, Artificial Sequence
  Description of Artificial Sequence: Synthetic oligonucleotide
  Sense strand starting at position 2076 of SEQ ID NO: 1888748
cuguguuaucccuaucaca

SEQ ID NO: 2553987 - RNA, 19 nt, Artificial Sequence
  Description of Artificial Sequence: Synthetic oligonucleotide
  Antisense strand to SEQ ID NO: 2553986
ugugauagggauaacacag

SEQ ID NO: 2553988 - RNA, 19 nt, Artificial Sequence
  Description of Artificial Sequence: Synthetic oligonucleotide
  Sense strand starting at position 2751 of SEQ ID NO: 1888748
aacagugcagugugauuua

SEQ ID NO: 2553989 - RNA, 19 nt, Artificial Sequence
  Description of Artificial Sequence: Synthetic oligonucleotide
  Antisense strand to SEQ ID NO: 2553988
uaaaucacacugcacuguu

SEQ ID NO: 2553990 - RNA, 19 nt, Artificial Sequence
  Description of Artificial Sequence: Synthetic oligonucleotide
  Sense strand starting at position 2754 of SEQ ID NO: 1888748
agugcagugugauuuagga

SEQ ID NO: 2553991 - RNA, 19 nt, Artificial Sequence
  Description of Artificial Sequence: Synthetic oligonucleotide
  Antisense strand to SEQ ID NO: 2553990
uccuaaaucacacugcacu

SEQ ID NO: 2553992 - RNA, 19 nt, Artificial Sequence
  Description of Artificial Sequence: Synthetic oligonucleotide
  Sense strand starting at position 2764 of SEQ ID NO: 1888748
gauuuaggaugaggacuuu

SEQ ID NO: 2553993 - RNA, 19 nt, Artificial Sequence
  Description of Artificial Sequence: Synthetic oligonucleotide
  Antisense strand to SEQ ID NO: 2553992
aaaguccucauccuaaauc

SEQ ID NO: 2553994 - RNA, 19 nt, Artificial Sequence
  Description of Artificial Sequence: Synthetic oligonucleotide
  Sense strand starting at position 2793 of SEQ ID NO: 1888748
aggugauacgcuuagaacu

SEQ ID NO: 2553995 - RNA, 19 nt, Artificial Sequence
  Description of Artificial Sequence: Synthetic oligonucleotide
  Antisense strand to SEQ ID NO: 2553994
aguucuaagcguaucaccu

SEQ ID NO: 2553996 - RNA, 19 nt, Artificial Sequence
  Description of Artificial Sequence: Synthetic oligonucleotide
  Sense strand starting at position 2803 of SEQ ID NO: 1888748
cuuagaacuguugaaaguu

SEQ ID NO: 2553997 - RNA, 19 nt, Artificial Sequence
  Description of Artificial Sequence: Synthetic oligonucleotide
  Antisense strand to SEQ ID NO: 2553996
aacuuucaacaguucuaag

SEQ ID NO: 2553998 - RNA, 19 nt, Artificial Sequence
  Description of Artificial Sequence: Synthetic oligonucleotide
  Sense strand starting at position 2844 of SEQ ID NO: 1888748
aaagaaaucggccaugcaa

SEQ ID NO: 2553999 - RNA, 19 nt, Artificial Sequence
  Description of Artificial Sequence: Synthetic oligonucleotide
  Antisense strand to SEQ ID NO: 2553998
uugcauggccgauuucuuu

SEQ ID NO: 2554000 - RNA, 19 nt, Artificial Sequence
  Description of Artificial Sequence: Synthetic oligonucleotide
  Sense strand starting at position 3025 of SEQ ID NO: 1888748
ugaggaugaguucagguuu

SEQ ID NO: 2554001 - RNA, 19 nt, Artificial Sequence
  Description of Artificial Sequence: Synthetic oligonucleotide
  Antisense strand to SEQ ID NO: 2554000
aaaccugaacucauccuca

SEQ ID NO: 2554002 - RNA, 19 nt, Artificial Sequence
  Description of Artificial Sequence: Synthetic oligonucleotide
  Sense strand starting at position 3155 of SEQ ID NO: 1888748
caaggaggucacugugaua

SEQ ID NO: 2554003 - RNA, 19 nt, Artificial Sequence
  Description of Artificial Sequence: Synthetic oligonucleotide
  Antisense strand to SEQ ID NO: 2554002
uaucacagugaccuccuug

SEQ ID NO: 2554004 - RNA, 19 nt, Artificial Sequence
  Description of Artificial Sequence: Synthetic oligonucleotide
  Sense strand starting at position 3361 of SEQ ID NO: 1888748
agaaaucugucaucagcau

SEQ ID NO: 2554005 - RNA, 19 nt, Artificial Sequence
  Description of Artificial Sequence: Synthetic oligonucleotide
  Antisense strand to SEQ ID NO: 2554004
augcugaugacagauuucu

SEQ ID NO: 2554006 - RNA, 19 nt, Artificial Sequence
  Description of Artificial Sequence: Synthetic oligonucleotide
  Sense strand starting at position 3376 of SEQ ID NO: 1888748
gcaucaaggccuugaagau

SEQ ID NO: 2554007 - RNA, 19 nt, Artificial Sequence
  Description of Artificial Sequence: Synthetic oligonucleotide
  Antisense strand to SEQ ID NO: 2554006
aucuucaaggccuugaugc

SEQ ID NO: 2554008 - RNA, 19 nt, Artificial Sequence
  Description of Artificial Sequence: Synthetic oligonucleotide
  Sense strand starting at position 3445 of SEQ ID NO: 1888748
gggagucagcucggagaca

SEQ ID NO: 2554009 - RNA, 19 nt, Artificial Sequence
  Description of Artificial Sequence: Synthetic oligonucleotide
  Antisense strand to SEQ ID NO: 2554008
ugucuccgagcugacuccc

SEQ ID NO: 2554010 - RNA, 19 nt, Artificial Sequence
  Description of Artificial Sequence: Synthetic oligonucleotide
  Sense strand starting at position 3536 of SEQ ID NO: 1888748
aaaugauggugcucggaac

SEQ ID NO: 2554011 - RNA, 19 nt, Artificial Sequence
  Description of Artificial Sequence: Synthetic oligonucleotide
  Antisense strand to SEQ ID NO: 2554010
guuccgagcaccaucauuu

SEQ ID NO: 2554012 - RNA, 19 nt, Artificial Sequence
  Description of Artificial Sequence: Synthetic oligonucleotide
  Sense strand starting at position 114 of SEQ ID NO: 1888749
cagcguccucgggaaauaa

SEQ ID NO: 2554013 - RNA, 19 nt, Artificial Sequence
  Description of Artificial Sequence: Synthetic oligonucleotide
  Antisense strand to SEQ ID NO: 2554012
uuauuucccgaggacgcug

SEQ ID NO: 2554014 - RNA, 19 nt, Artificial Sequence
  Description of Artificial Sequence: Synthetic oligonucleotide
  Sense strand starting at position 255 of SEQ ID NO: 1888749
gcagaaauaucugucucaa

SEQ ID NO: 2554015 - RNA, 19 nt, Artificial Sequence
  Description of Artificial Sequence: Synthetic oligonucleotide
  Antisense strand to SEQ ID NO: 2554014
uugagacagauauuucugc

SEQ ID NO: 2554016 - RNA, 19 nt, Artificial Sequence
  Description of Artificial Sequence: Synthetic oligonucleotide
  Sense strand starting at position 414 of SEQ ID NO: 1888749
gcucuccuagacugagaaa

SEQ ID NO: 2554017 - RNA, 19 nt, Artificial Sequence
  Description of Artificial Sequence: Synthetic oligonucleotide
  Antisense strand to SEQ ID NO: 2554016
uuucucagucuaggagagc

SEQ ID NO: 2554018 - RNA, 19 nt, Artificial Sequence
  Description of Artificial Sequence: Synthetic oligonucleotide
  Sense strand starting at position 485 of SEQ ID NO: 1888749
gauggaaucccuggaucuc

SEQ ID NO: 2554019 - RNA, 19 nt, Artificial Sequence
  Description of Artificial Sequence: Synthetic oligonucleotide
  Antisense strand to SEQ ID NO: 2554018
gagauccagggauuccauc

SEQ ID NO: 2554020 - RNA, 19 nt, Artificial Sequence
  Description of Artificial Sequence: Synthetic oligonucleotide
  Sense strand starting at position 1186 of SEQ ID NO: 1888749
agcuuuaggagaggaugua

SEQ ID NO: 2554021 - RNA, 19 nt, Artificial Sequence
  Description of Artificial Sequence: Synthetic oligonucleotide
  Antisense strand to SEQ ID NO: 2554020
uacauccucuccuaaagcu

SEQ ID NO: 2554022 - RNA, 19 nt, Artificial Sequence
  Description of Artificial Sequence: Synthetic oligonucleotide
  Sense strand starting at position 2077 of SEQ ID NO: 1888749
cuguguuaucccuaucaca

SEQ ID NO: 2554023 - RNA, 19 nt, Artificial Sequence
  Description of Artificial Sequence: Synthetic oligonucleotide
  Antisense strand to SEQ ID NO: 2554022
ugugauagggauaacacag

SEQ ID NO: 2554024 - RNA, 19 nt, Artificial Sequence
  Description of Artificial Sequence: Synthetic oligonucleotide
  Sense strand starting at position 2752 of SEQ ID NO: 1888749
aacagugcagugugauuua

SEQ ID NO: 2554025 - RNA, 19 nt, Artificial Sequence
  Description of Artificial Sequence: Synthetic oligonucleotide
  Antisense strand to SEQ ID NO: 2554024
uaaaucacacugcacuguu

SEQ ID NO: 2554026 - RNA, 19 nt, Artificial Sequence
  Description of Artificial Sequence: Synthetic oligonucleotide
  Sense strand starting at position 2755 of SEQ ID NO: 1888749
agugcagugugauuuagga

SEQ ID NO: 2554027 - RNA, 19 nt, Artificial Sequence
  Description of Artificial Sequence: Synthetic oligonucleotide
  Antisense strand to SEQ ID NO: 2554026
uccuaaaucacacugcacu

SEQ ID NO: 2554028 - RNA, 19 nt, Artificial Sequence
  Description of Artificial Sequence: Synthetic oligonucleotide
  Sense strand starting at position 2765 of SEQ ID NO: 1888749
gauuuaggaugaggacuuu

SEQ ID NO: 2554029 - RNA, 19 nt, Artificial Sequence
  Description of Artificial Sequence: Synthetic oligonucleotide
  Antisense strand to SEQ ID NO: 2554028
aaaguccucauccuaaauc

SEQ ID NO: 2554030 - RNA, 19 nt, Artificial Sequence
  Description of Artificial Sequence: Synthetic oligonucleotide
  Sense strand starting at position 2794 of SEQ ID NO: 1888749
aggugauacgcuuagaacu

SEQ ID NO: 2554031 - RNA, 19 nt, Artificial Sequence
  Description of Artificial Sequence: Synthetic oligonucleotide
  Antisense strand to SEQ ID NO: 2554030
aguucuaagcguaucaccu

SEQ ID NO: 2554032 - RNA, 19 nt, Artificial Sequence
  Description of Artificial Sequence: Synthetic oligonucleotide
  Sense strand starting at position 2804 of SEQ ID NO: 1888749
cuuagaacuguugaaaguu

SEQ ID NO: 2554033 - RNA, 19 nt, Artificial Sequence
  Description of Artificial Sequence: Synthetic oligonucleotide
  Antisense strand to SEQ ID NO: 2554032
aacuuucaacaguucuaag

SEQ ID NO: 2554034 - RNA, 19 nt, Artificial Sequence
  Description of Artificial Sequence: Synthetic oligonucleotide
  Sense strand starting at position 2845 of SEQ ID NO: 1888749
aaagaaaucggccaugcaa

SEQ ID NO: 2554035 - RNA, 19 nt, Artificial Sequence
  Description of Artificial Sequence: Synthetic oligonucleotide
  Antisense strand to SEQ ID NO: 2554034
uugcauggccgauuucuuu

SEQ ID NO: 2554036 - RNA, 19 nt, Artificial Sequence
  Description of Artificial Sequence: Synthetic oligonucleotide
  Sense strand starting at position 3156 of SEQ ID NO: 1888749
caaggaggucacugugaua

SEQ ID NO: 2554037 - RNA, 19 nt, Artificial Sequence
  Description of Artificial Sequence: Synthetic oligonucleotide
  Antisense strand to SEQ ID NO: 2554036
uaucacagugaccuccuug

SEQ ID NO: 2554038 - RNA, 19 nt, Artificial Sequence
  Description of Artificial Sequence: Synthetic oligonucleotide
  Sense strand starting at position 3362 of SEQ ID NO: 1888749
agaaaucugucaucagcau

SEQ ID NO: 2554039 - RNA, 19 nt, Artificial Sequence
  Description of Artificial Sequence: Synthetic oligonucleotide
  Antisense strand to SEQ ID NO: 2554038
augcugaugacagauuucu

SEQ ID NO: 2554040 - RNA, 19 nt, Artificial Sequence
  Description of Artificial Sequence: Synthetic oligonucleotide
  Sense strand starting at position 3377 of SEQ ID NO: 1888749
gcaucaaggccuugaagau

SEQ ID NO: 2554041 - RNA, 19 nt, Artificial Sequence
  Description of Artificial Sequence: Synthetic oligonucleotide
  Antisense strand to SEQ ID NO: 2554040
aucuucaaggccuugaugc

SEQ ID NO: 2554042 - RNA, 19 nt, Artificial Sequence
  Description of Artificial Sequence: Synthetic oligonucleotide
  Sense strand starting at position 3446 of SEQ ID NO: 1888749
gggagucagcucggagaca

SEQ ID NO: 2554043 - RNA, 19 nt, Artificial Sequence
  Description of Artificial Sequence: Synthetic oligonucleotide
  Antisense strand to SEQ ID NO: 2554042
ugucuccgagcugacuccc

SEQ ID NO: 2554044 - RNA, 19 nt, Artificial Sequence
  Description of Artificial Sequence: Synthetic oligonucleotide
  Sense strand starting at position 3537 of SEQ ID NO: 1888749
aaaugauggugcucggaac

SEQ ID NO: 2554045 - RNA, 19 nt, Artificial Sequence
  Description of Artificial Sequence: Synthetic oligonucleotide
  Antisense strand to SEQ ID NO: 2554044
guuccgagcaccaucauuu

SEQ ID NO: 2554046 - RNA, 19 nt, Artificial Sequence
  Description of Artificial Sequence: Synthetic oligonucleotide
  Sense strand starting at position 113 of SEQ ID NO: 1888750
cagcguccucgggaaauaa

SEQ ID NO: 2554047 - RNA, 19 nt, Artificial Sequence
  Description of Artificial Sequence: Synthetic oligonucleotide
  Antisense strand to SEQ ID NO: 2554046
uuauuucccgaggacgcug

SEQ ID NO: 2554048 - RNA, 19 nt, Artificial Sequence
  Description of Artificial Sequence: Synthetic oligonucleotide
  Sense strand starting at position 254 of SEQ ID NO: 1888750
gcagaaauaucugucucaa

SEQ ID NO: 2554049 - RNA, 19 nt, Artificial Sequence
  Description of Artificial Sequence: Synthetic oligonucleotide
  Antisense strand to SEQ ID NO: 2554048
uugagacagauauuucugc

SEQ ID NO: 2554050 - RNA, 19 nt, Artificial Sequence
  Description of Artificial Sequence: Synthetic oligonucleotide
  Sense strand starting at position 413 of SEQ ID NO: 1888750
gcucuccuagacugagaaa

SEQ ID NO: 2554051 - RNA, 19 nt, Artificial Sequence
  Description of Artificial Sequence: Synthetic oligonucleotide
  Antisense strand to SEQ ID NO: 2554050
uuucucagucuaggagagc

SEQ ID NO: 2554052 - RNA, 19 nt, Artificial Sequence
  Description of Artificial Sequence: Synthetic oligonucleotide
  Sense strand starting at position 484 of SEQ ID NO: 1888750
gauggaaucccuggaucuc

SEQ ID NO: 2554053 - RNA, 19 nt, Artificial Sequence
  Description of Artificial Sequence: Synthetic oligonucleotide
  Antisense strand to SEQ ID NO: 2554052
gagauccagggauuccauc

SEQ ID NO: 2554054 - RNA, 19 nt, Artificial Sequence
  Description of Artificial Sequence: Synthetic oligonucleotide
  Sense strand starting at position 1185 of SEQ ID NO: 1888750
agcuuuaggagaggaugua

SEQ ID NO: 2554055 - RNA, 19 nt, Artificial Sequence
  Description of Artificial Sequence: Synthetic oligonucleotide
  Antisense strand to SEQ ID NO: 2554054
uacauccucuccuaaagcu

SEQ ID NO: 2554056 - RNA, 19 nt, Artificial Sequence
  Description of Artificial Sequence: Synthetic oligonucleotide
  Sense strand starting at position 1374 of SEQ ID NO: 1888750
cauagauacgugcaaccau

SEQ ID NO: 2554057 - RNA, 19 nt, Artificial Sequence
  Description of Artificial Sequence: Synthetic oligonucleotide
  Antisense strand to SEQ ID NO: 2554056
augguugcacguaucuaug

SEQ ID NO: 2554058 - RNA, 19 nt, Artificial Sequence
  Description of Artificial Sequence: Synthetic oligonucleotide
  Sense strand starting at position 1498 of SEQ ID NO: 1888750
ccaaucgacuuuccuuaga

SEQ ID NO: 2554059 - RNA, 19 nt, Artificial Sequence
  Description of Artificial Sequence: Synthetic oligonucleotide
  Antisense strand to SEQ ID NO: 2554058
ucuaaggaaagucgauugg

SEQ ID NO: 2554060 - RNA, 19 nt, Artificial Sequence
  Description of Artificial Sequence: Synthetic oligonucleotide
  Sense strand starting at position 1539 of SEQ ID NO: 1888750
gaggaauuauagucgaaug

SEQ ID NO: 2554061 - RNA, 19 nt, Artificial Sequence
  Description of Artificial Sequence: Synthetic oligonucleotide
  Antisense strand to SEQ ID NO: 2554060
cauucgacuauaauuccuc

SEQ ID NO: 2554062 - RNA, 19 nt, Artificial Sequence
  Description of Artificial Sequence: Synthetic oligonucleotide
  Sense strand starting at position 1632 of SEQ ID NO: 1888750
gccguaagagcauugcauc

SEQ ID NO: 2554063 - RNA, 19 nt, Artificial Sequence
  Description of Artificial Sequence: Synthetic oligonucleotide
  Antisense strand to SEQ ID NO: 2554062
gaugcaaugcucuuacggc

SEQ ID NO: 2554064 - RNA, 19 nt, Artificial Sequence
  Description of Artificial Sequence: Synthetic oligonucleotide
  Sense strand starting at position 1773 of SEQ ID NO: 1888750
gucugugcucuugcacaua

SEQ ID NO: 2554065 - RNA, 19 nt, Artificial Sequence
  Description of Artificial Sequence: Synthetic oligonucleotide
  Antisense strand to SEQ ID NO: 2554064
uaugugcaagagcacagac

SEQ ID NO: 2554066 - RNA, 19 nt, Artificial Sequence
  Description of Artificial Sequence: Synthetic oligonucleotide
  Sense strand starting at position 2076 of SEQ ID NO: 1888750
cuguguuaucccuaucaca

SEQ ID NO: 2554067 - RNA, 19 nt, Artificial Sequence
  Description of Artificial Sequence: Synthetic oligonucleotide
  Antisense strand to SEQ ID NO: 2554066
ugugauagggauaacacag

SEQ ID NO: 2554068 - RNA, 19 nt, Artificial Sequence
  Description of Artificial Sequence: Synthetic oligonucleotide
  Sense strand starting at position 2751 of SEQ ID NO: 1888750
aacagugcagugugauuua

SEQ ID NO: 2554069 - RNA, 19 nt, Artificial Sequence
  Description of Artificial Sequence: Synthetic oligonucleotide
  Antisense strand to SEQ ID NO: 2554068
uaaaucacacugcacuguu

SEQ ID NO: 2554070 - RNA, 19 nt, Artificial Sequence
  Description of Artificial Sequence: Synthetic oligonucleotide
  Sense strand starting at position 2754 of SEQ ID NO: 1888750
agugcagugugauuuagga

SEQ ID NO: 2554071 - RNA, 19 nt, Artificial Sequence
  Description of Artificial Sequence: Synthetic oligonucleotide
  Antisense strand to SEQ ID NO: 2554070
uccuaaaucacacugcacu

SEQ ID NO: 2554072 - RNA, 19 nt, Artificial Sequence
  Description of Artificial Sequence: Synthetic oligonucleotide
  Sense strand starting at position 2764 of SEQ ID NO: 1888750
gauuuaggaugaggacuuu

SEQ ID NO: 2554073 - RNA, 19 nt, Artificial Sequence
  Description of Artificial Sequence: Synthetic oligonucleotide
  Antisense strand to SEQ ID NO: 2554072
aaaguccucauccuaaauc

SEQ ID NO: 2554074 - RNA, 19 nt, Artificial Sequence
  Description of Artificial Sequence: Synthetic oligonucleotide
  Sense strand starting at position 2793 of SEQ ID NO: 1888750
aggugauacgcuuagaacu

SEQ ID NO: 2554075 - RNA, 19 nt, Artificial Sequence
  Description of Artificial Sequence: Synthetic oligonucleotide
  Antisense strand to SEQ ID NO: 2554074
aguucuaagcguaucaccu

SEQ ID NO: 2554076 - RNA, 19 nt, Artificial Sequence
  Description of Artificial Sequence: Synthetic oligonucleotide
  Sense strand starting at position 2803 of SEQ ID NO: 1888750
cuuagaacuguugaaaguu

SEQ ID NO: 2554077 - RNA, 19 nt, Artificial Sequence
  Description of Artificial Sequence: Synthetic oligonucleotide
  Antisense strand to SEQ ID NO: 2554076
aacuuucaacaguucuaag

SEQ ID NO: 2554078 - RNA, 19 nt, Artificial Sequence
  Description of Artificial Sequence: Synthetic oligonucleotide
  Sense strand starting at position 2844 of SEQ ID NO: 1888750
aaagaaaucggccaugcaa

SEQ ID NO: 2554079 - RNA, 19 nt, Artificial Sequence
  Description of Artificial Sequence: Synthetic oligonucleotide
  Antisense strand to SEQ ID NO: 2554078
uugcauggccgauuucuuu

SEQ ID NO: 2554080 - RNA, 19 nt, Artificial Sequence
  Description of Artificial Sequence: Synthetic oligonucleotide
  Sense strand starting at position 3025 of SEQ ID NO: 1888750
ugaggaugaguucagguuu

SEQ ID NO: 2554081 - RNA, 19 nt, Artificial Sequence
  Description of Artificial Sequence: Synthetic oligonucleotide
  Antisense strand to SEQ ID NO: 2554080
aaaccugaacucauccuca

SEQ ID NO: 2554082 - RNA, 19 nt, Artificial Sequence
  Description of Artificial Sequence: Synthetic oligonucleotide
  Sense strand starting at position 3155 of SEQ ID NO: 1888750
caaggaggucacugugaua

SEQ ID NO: 2554083 - RNA, 19 nt, Artificial Sequence
  Description of Artificial Sequence: Synthetic oligonucleotide
  Antisense strand to SEQ ID NO: 2554082
uaucacagugaccuccuug

SEQ ID NO: 2554084 - RNA, 19 nt, Artificial Sequence
  Description of Artificial Sequence: Synthetic oligonucleotide
  Sense strand starting at position 3361 of SEQ ID NO: 1888750
agaaaucugucaucagcau

SEQ ID NO: 2554085 - RNA, 19 nt, Artificial Sequence
  Description of Artificial Sequence: Synthetic oligonucleotide
  Antisense strand to SEQ ID NO: 2554084
augcugaugacagauuucu

SEQ ID NO: 2554086 - RNA, 19 nt, Artificial Sequence
  Description of Artificial Sequence: Synthetic oligonucleotide
  Sense strand starting at position 3376 of SEQ ID NO: 1888750
gcaucaaggccuugaagau

SEQ ID NO: 2554087 - RNA, 19 nt, Artificial Sequence
  Description of Artificial Sequence: Synthetic oligonucleotide
  Antisense strand to SEQ ID NO: 2554086
aucuucaaggccuugaugc

SEQ ID NO: 2554088 - RNA, 19 nt, Artificial Sequence
  Description of Artificial Sequence: Synthetic oligonucleotide
  Sense strand starting at position 3445 of SEQ ID NO: 1888750
gggagucagcucggagaca

SEQ ID NO: 2554089 - RNA, 19 nt, Artificial Sequence
  Description of Artificial Sequence: Synthetic oligonucleotide
  Antisense strand to SEQ ID NO: 2554088
ugucuccgagcugacuccc

SEQ ID NO: 2554090 - RNA, 19 nt, Artificial Sequence
  Description of Artificial Sequence: Synthetic oligonucleotide
  Sense strand starting at position 3536 of SEQ ID NO: 1888750
aaaugauggugcucggaac

SEQ ID NO: 2554091 - RNA, 19 nt, Artificial Sequence
  Description of Artificial Sequence: Synthetic oligonucleotide
  Antisense strand to SEQ ID NO: 2554090
guuccgagcaccaucauuu

SEQ ID NO: 2554092 - RNA, 19 nt, Artificial Sequence
  Description of Artificial Sequence: Synthetic oligonucleotide
  Sense strand starting at position 2283 of SEQ ID NO: 1888751
ucaugugaggcuugaaaga

SEQ ID NO: 2554093 - RNA, 19 nt, Artificial Sequence
  Description of Artificial Sequence: Synthetic oligonucleotide
  Antisense strand to SEQ ID NO: 2554092
ucuuucaagccucacauga

SEQ ID NO: 2554094 - RNA, 19 nt, Artificial Sequence
  Description of Artificial Sequence: Synthetic oligonucleotide
  Sense strand starting at position 2324 of SEQ ID NO: 1888751
cccaguguaagcgcuuaau

SEQ ID NO: 2554095 - RNA, 19 nt, Artificial Sequence
  Description of Artificial Sequence: Synthetic oligonucleotide
  Antisense strand to SEQ ID NO: 2554094
auuaagcgcuuacacuggg

SEQ ID NO: 2554096 - RNA, 19 nt, Artificial Sequence
  Description of Artificial Sequence: Synthetic oligonucleotide
  Sense strand starting at position 2327 of SEQ ID NO: 1888751
aguguaagcgcuuaauaac

SEQ ID NO: 2554097 - RNA, 19 nt, Artificial Sequence
  Description of Artificial Sequence: Synthetic oligonucleotide
  Antisense strand to SEQ ID NO: 2554096
guuauuaagcgcuuacacu

SEQ ID NO: 2554098 - RNA, 19 nt, Artificial Sequence
  Description of Artificial Sequence: Synthetic oligonucleotide
  Sense strand starting at position 2350 of SEQ ID NO: 1888751
accuguuguugugaugaau

SEQ ID NO: 2554099 - RNA, 19 nt, Artificial Sequence
  Description of Artificial Sequence: Synthetic oligonucleotide
  Antisense strand to SEQ ID NO: 2554098
auucaucacaacaacaggu

SEQ ID NO: 2554100 - RNA, 19 nt, Artificial Sequence
  Description of Artificial Sequence: Synthetic oligonucleotide
  Sense strand starting at position 2358 of SEQ ID NO: 1888751
uugugaugaauccgaucau

SEQ ID NO: 2554101 - RNA, 19 nt, Artificial Sequence
  Description of Artificial Sequence: Synthetic oligonucleotide
  Antisense strand to SEQ ID NO: 2554100
augaucggauucaucacaa

SEQ ID NO: 2554102 - RNA, 19 nt, Artificial Sequence
  Description of Artificial Sequence: Synthetic oligonucleotide
  Sense strand starting at position 2359 of SEQ ID NO: 1888751
ugugaugaauccgaucauu

SEQ ID NO: 2554103 - RNA, 19 nt, Artificial Sequence
  Description of Artificial Sequence: Synthetic oligonucleotide
  Antisense strand to SEQ ID NO: 2554102
aaugaucggauucaucaca

SEQ ID NO: 2554104 - RNA, 19 nt, Artificial Sequence
  Description of Artificial Sequence: Synthetic oligonucleotide
  Sense strand starting at position 2367 of SEQ ID NO: 1888751
auccgaucauucuggauua

SEQ ID NO: 2554105 - RNA, 19 nt, Artificial Sequence
  Description of Artificial Sequence: Synthetic oligonucleotide
  Antisense strand to SEQ ID NO: 2554104
uaauccagaaugaucggau

SEQ ID NO: 2554106 - RNA, 19 nt, Artificial Sequence
  Description of Artificial Sequence: Synthetic oligonucleotide
  Sense strand starting at position 2369 of SEQ ID NO: 1888751
ccgaucauucuggauuauc

SEQ ID NO: 2554107 - RNA, 19 nt, Artificial Sequence
  Description of Artificial Sequence: Synthetic oligonucleotide
  Antisense strand to SEQ ID NO: 2554106
gauaauccagaaugaucgg

SEQ ID NO: 2554108 - RNA, 19 nt, Artificial Sequence
  Description of Artificial Sequence: Synthetic oligonucleotide
  Sense strand starting at position 2377 of SEQ ID NO: 1888751
ucuggauuaucuucguauc

SEQ ID NO: 2554109 - RNA, 19 nt, Artificial Sequence
  Description of Artificial Sequence: Synthetic oligonucleotide
  Antisense strand to SEQ ID NO: 2554108
gauacgaagauaauccaga

SEQ ID NO: 2554110 - RNA, 19 nt, Artificial Sequence
  Description of Artificial Sequence: Synthetic oligonucleotide
  Sense strand starting at position 2399 of SEQ ID NO: 1888751
ccuucucuccuguggagaa

SEQ ID NO: 2554111 - RNA, 19 nt, Artificial Sequence
  Description of Artificial Sequence: Synthetic oligonucleotide
  Antisense strand to SEQ ID NO: 2554110
uucuccacaggagagaagg

SEQ ID NO: 2554112 - RNA, 19 nt, Artificial Sequence
  Description of Artificial Sequence: Synthetic oligonucleotide
  Sense strand starting at position 2486 of SEQ ID NO: 1888751
ugaaguugcuuugcucagu

SEQ ID NO: 2554113 - RNA, 19 nt, Artificial Sequence
  Description of Artificial Sequence: Synthetic oligonucleotide
  Antisense strand to SEQ ID NO: 2554112
acugagcaaagcaacuuca

SEQ ID NO: 2554114 - RNA, 19 nt, Artificial Sequence
  Description of Artificial Sequence: Synthetic oligonucleotide
  Sense strand starting at position 2514 of SEQ ID NO: 1888751
agaguaagcacuuagugag

SEQ ID NO: 2554115 - RNA, 19 nt, Artificial Sequence
  Description of Artificial Sequence: Synthetic oligonucleotide
  Antisense strand to SEQ ID NO: 2554114
cucacuaagugcuuacucu

SEQ ID NO: 2554116 - RNA, 19 nt, Artificial Sequence
  Description of Artificial Sequence: Synthetic oligonucleotide
  Sense strand starting at position 2587 of SEQ ID NO: 1888751
cacccuguguggucaucua

SEQ ID NO: 2554117 - RNA, 19 nt, Artificial Sequence
  Description of Artificial Sequence: Synthetic oligonucleotide
  Antisense strand to SEQ ID NO: 2554116
uagaugaccacacagggug

SEQ ID NO: 2554118 - RNA, 19 nt, Artificial Sequence
  Description of Artificial Sequence: Synthetic oligonucleotide
  Sense strand starting at position 2599 of SEQ ID NO: 1888751
ucaucuagauguggaggaa

SEQ ID NO: 2554119 - RNA, 19 nt, Artificial Sequence
  Description of Artificial Sequence: Synthetic oligonucleotide
  Antisense strand to SEQ ID NO: 2554118
uuccuccacaucuagauga

SEQ ID NO: 2554120 - RNA, 19 nt, Artificial Sequence
  Description of Artificial Sequence: Synthetic oligonucleotide
  Sense strand starting at position 2667 of SEQ ID NO: 1888751
uuucuuuaugaucagugga

SEQ ID NO: 2554121 - RNA, 19 nt, Artificial Sequence
  Description of Artificial Sequence: Synthetic oligonucleotide
  Antisense strand to SEQ ID NO: 2554120
uccacugaucauaaagaaa

SEQ ID NO: 2554122 - RNA, 19 nt, Artificial Sequence
  Description of Artificial Sequence: Synthetic oligonucleotide
  Sense strand starting at position 2704 of SEQ ID NO: 1888751
aguucucuugcguauucuu

SEQ ID NO: 2554123 - RNA, 19 nt, Artificial Sequence
  Description of Artificial Sequence: Synthetic oligonucleotide
  Antisense strand to SEQ ID NO: 2554122
aagaauacgcaagagaacu

SEQ ID NO: 2554124 - RNA, 19 nt, Artificial Sequence
  Description of Artificial Sequence: Synthetic oligonucleotide
  Sense strand starting at position 2713 of SEQ ID NO: 1888751
gcguauucuuucucuccua

SEQ ID NO: 2554125 - RNA, 19 nt, Artificial Sequence
  Description of Artificial Sequence: Synthetic oligonucleotide
  Antisense strand to SEQ ID NO: 2554124
uaggagagaaagaauacgc

SEQ ID NO: 2554126 - RNA, 19 nt, Artificial Sequence
  Description of Artificial Sequence: Synthetic oligonucleotide
  Sense strand starting at position 2729 of SEQ ID NO: 1888751
cuacacagucuggaaaguu

SEQ ID NO: 2554127 - RNA, 19 nt, Artificial Sequence
  Description of Artificial Sequence: Synthetic oligonucleotide
  Antisense strand to SEQ ID NO: 2554126
aacuuuccagacuguguag

SEQ ID NO: 2554128 - RNA, 19 nt, Artificial Sequence
  Description of Artificial Sequence: Synthetic oligonucleotide
  Sense strand starting at position 2737 of SEQ ID NO: 1888751
ucuggaaaguuauuguuaa

SEQ ID NO: 2554129 - RNA, 19 nt, Artificial Sequence
  Description of Artificial Sequence: Synthetic oligonucleotide
  Antisense strand to SEQ ID NO: 2554128
uuaacaauaacuuuccaga

SEQ ID NO: 2554130 - RNA, 19 nt, Artificial Sequence
  Description of Artificial Sequence: Synthetic oligonucleotide
  Sense strand starting at position 2738 of SEQ ID NO: 1888751
cuggaaaguuauuguuaau

SEQ ID NO: 2554131 - RNA, 19 nt, Artificial Sequence
  Description of Artificial Sequence: Synthetic oligonucleotide
  Antisense strand to SEQ ID NO: 2554130
auuaacaauaacuuuccag

SEQ ID NO: 2554132 - RNA, 19 nt, Artificial Sequence
  Description of Artificial Sequence: Synthetic oligonucleotide
  Sense strand starting at position 2829 of SEQ ID NO: 1888751
gcgccucauccuuucucua

SEQ ID NO: 2554133 - RNA, 19 nt, Artificial Sequence
  Description of Artificial Sequence: Synthetic oligonucleotide
  Antisense strand to SEQ ID NO: 2554132
uagagaaaggaugaggcgc

SEQ ID NO: 2554134 - RNA, 19 nt, Artificial Sequence
  Description of Artificial Sequence: Synthetic oligonucleotide
  Sense strand starting at position 2924 of SEQ ID NO: 1888751
cuaggaagccugcaaauaa

SEQ ID NO: 2554135 - RNA, 19 nt, Artificial Sequence
  Description of Artificial Sequence: Synthetic oligonucleotide
  Antisense strand to SEQ ID NO: 2554134
uuauuugcaggcuuccuag

SEQ ID NO: 2554136 - RNA, 19 nt, Artificial Sequence
  Description of Artificial Sequence: Synthetic oligonucleotide
  Sense strand starting at position 2968 of SEQ ID NO: 1888751
gcaagugcauucucuuauu

SEQ ID NO: 2554137 - RNA, 19 nt, Artificial Sequence
  Description of Artificial Sequence: Synthetic oligonucleotide
  Antisense strand to SEQ ID NO: 2554136
aauaagagaaugcacuugc

SEQ ID NO: 2554138 - RNA, 19 nt, Artificial Sequence
  Description of Artificial Sequence: Synthetic oligonucleotide
  Sense strand starting at position 2986 of SEQ ID NO: 1888751
uguaucgugguacaacuua

SEQ ID NO: 2554139 - RNA, 19 nt, Artificial Sequence
  Description of Artificial Sequence: Synthetic oligonucleotide
  Antisense strand to SEQ ID NO: 2554138
uaaguuguaccacgauaca

SEQ ID NO: 2554140 - RNA, 19 nt, Artificial Sequence
  Description of Artificial Sequence: Synthetic oligonucleotide
  Sense strand starting at position 2991 of SEQ ID NO: 1888751
cgugguacaacuuagcauu

SEQ ID NO: 2554141 - RNA, 19 nt, Artificial Sequence
  Description of Artificial Sequence: Synthetic oligonucleotide
  Antisense strand to SEQ ID NO: 2554140
aaugcuaaguuguaccacg

SEQ ID NO: 2554142 - RNA, 19 nt, Artificial Sequence
  Description of Artificial Sequence: Synthetic oligonucleotide
  Sense strand starting at position 3367 of SEQ ID NO: 1888751
ugggauuacggucgacuuu

SEQ ID NO: 2554143 - RNA, 19 nt, Artificial Sequence
  Description of Artificial Sequence: Synthetic oligonucleotide
  Antisense strand to SEQ ID NO: 2554142
aaagucgaccguaauccca

SEQ ID NO: 2554144 - RNA, 19 nt, Artificial Sequence
  Description of Artificial Sequence: Synthetic oligonucleotide
  Sense strand starting at position 3395 of SEQ ID NO: 1888751
auuguuauaccucgaaaua

SEQ ID NO: 2554145 - RNA, 19 nt, Artificial Sequence
  Description of Artificial Sequence: Synthetic oligonucleotide
  Antisense strand to SEQ ID NO: 2554144
uauuucgagguauaacaau

SEQ ID NO: 2554146 - RNA, 19 nt, Artificial Sequence
  Description of Artificial Sequence: Synthetic oligonucleotide
  Sense strand starting at position 3396 of SEQ ID NO: 1888751
uuguuauaccucgaaauaa

SEQ ID NO: 2554147 - RNA, 19 nt, Artificial Sequence
  Description of Artificial Sequence: Synthetic oligonucleotide
  Antisense strand to SEQ ID NO: 2554146
uuauuucgagguauaacaa

SEQ ID NO: 2554148 - RNA, 19 nt, Artificial Sequence
  Description of Artificial Sequence: Synthetic oligonucleotide
  Sense strand starting at position 3484 of SEQ ID NO: 1888751
guugcuaauucugcuauaa

SEQ ID NO: 2554149 - RNA, 19 nt, Artificial Sequence
  Description of Artificial Sequence: Synthetic oligonucleotide
  Antisense strand to SEQ ID NO: 2554148
uuauagcagaauuagcaac

SEQ ID NO: 2554150 - RNA, 19 nt, Artificial Sequence
  Description of Artificial Sequence: Synthetic oligonucleotide
  Sense strand starting at position 3486 of SEQ ID NO: 1888751
ugcuaauucugcuauaaag

SEQ ID NO: 2554151 - RNA, 19 nt, Artificial Sequence
  Description of Artificial Sequence: Synthetic oligonucleotide
  Antisense strand to SEQ ID NO: 2554150
cuuuauagcagaauuagca

SEQ ID NO: 2554152 - RNA, 19 nt, Artificial Sequence
  Description of Artificial Sequence: Synthetic oligonucleotide
  Sense strand starting at position 3591 of SEQ ID NO: 1888751
ugucgucaucuguaagaac

SEQ ID NO: 2554153 - RNA, 19 nt, Artificial Sequence
  Description of Artificial Sequence: Synthetic oligonucleotide
  Antisense strand to SEQ ID NO: 2554152
guucuuacagaugacgaca

SEQ ID NO: 2554154 - RNA, 19 nt, Artificial Sequence
  Description of Artificial Sequence: Synthetic oligonucleotide
  Sense strand starting at position 3660 of SEQ ID NO: 1888751
acuagaauuucuuaggacu

SEQ ID NO: 2554155 - RNA, 19 nt, Artificial Sequence
  Description of Artificial Sequence: Synthetic oligonucleotide
  Antisense strand to SEQ ID NO: 2554154
aguccuaagaaauucuagu

SEQ ID NO: 2554156 - RNA, 19 nt, Artificial Sequence
  Description of Artificial Sequence: Synthetic oligonucleotide
  Sense strand starting at position 3663 of SEQ ID NO: 1888751
agaauuucuuaggacuuau

SEQ ID NO: 2554157 - RNA, 19 nt, Artificial Sequence
  Description of Artificial Sequence: Synthetic oligonucleotide
  Antisense strand to SEQ ID NO: 2554156
auaaguccuaagaaauucu

SEQ ID NO: 2554158 - RNA, 19 nt, Artificial Sequence
  Description of Artificial Sequence: Synthetic oligonucleotide
  Sense strand starting at position 3677 of SEQ ID NO: 1888751
cuuauaguuuacuaugaga

SEQ ID NO: 2554159 - RNA, 19 nt, Artificial Sequence
  Description of Artificial Sequence: Synthetic oligonucleotide
  Antisense strand to SEQ ID NO: 2554158
ucucauaguaaacuauaag

SEQ ID NO: 2554160 - RNA, 19 nt, Artificial Sequence
  Description of Artificial Sequence: Synthetic oligonucleotide
  Sense strand starting at position 3708 of SEQ ID NO: 1888751
ucauuaacaugagaagaug

SEQ ID NO: 2554161 - RNA, 19 nt, Artificial Sequence
  Description of Artificial Sequence: Synthetic oligonucleotide
  Antisense strand to SEQ ID NO: 2554160
caucuucucauguuaauga

SEQ ID NO: 2554162 - RNA, 19 nt, Artificial Sequence
  Description of Artificial Sequence: Synthetic oligonucleotide
  Sense strand starting at position 3762 of SEQ ID NO: 1888751
auguucuuccauugauucu

SEQ ID NO: 2554163 - RNA, 19 nt, Artificial Sequence
  Description of Artificial Sequence: Synthetic oligonucleotide
  Antisense strand to SEQ ID NO: 2554162
agaaucaauggaagaacau

SEQ ID NO: 2554164 - RNA, 19 nt, Artificial Sequence
  Description of Artificial Sequence: Synthetic oligonucleotide
  Sense strand starting at position 3782 of SEQ ID NO: 1888751
cucuuuaaucaggguacuu

SEQ ID NO: 2554165 - RNA, 19 nt, Artificial Sequence
  Description of Artificial Sequence: Synthetic oligonucleotide
  Antisense strand to SEQ ID NO: 2554164
aaguacccugauuaaagag

SEQ ID NO: 2554166 - RNA, 19 nt, Artificial Sequence
  Description of Artificial Sequence: Synthetic oligonucleotide
  Sense strand starting at position 3844 of SEQ ID NO: 1888751
uaaguuuguccauggcagu

SEQ ID NO: 2554167 - RNA, 19 nt, Artificial Sequence
  Description of Artificial Sequence: Synthetic oligonucleotide
  Antisense strand to SEQ ID NO: 2554166
acugccauggacaaacuua

SEQ ID NO: 2554168 - RNA, 19 nt, Artificial Sequence
  Description of Artificial Sequence: Synthetic oligonucleotide
  Sense strand starting at position 3878 of SEQ ID NO: 1888751
gcugcuaugaauuguguau

SEQ ID NO: 2554169 - RNA, 19 nt, Artificial Sequence
  Description of Artificial Sequence: Synthetic oligonucleotide
  Antisense strand to SEQ ID NO: 2554168
auacacaauucauagcagc

SEQ ID NO: 2554170 - RNA, 19 nt, Artificial Sequence
  Description of Artificial Sequence: Synthetic oligonucleotide
  Sense strand starting at position 3889 of SEQ ID NO: 1888751
uuguguauuucccauuaug

SEQ ID NO: 2554171 - RNA, 19 nt, Artificial Sequence
  Description of Artificial Sequence: Synthetic oligonucleotide
  Antisense strand to SEQ ID NO: 2554170
cauaaugggaaauacacaa

SEQ ID NO: 2554172 - RNA, 19 nt, Artificial Sequence
  Description of Artificial Sequence: Synthetic oligonucleotide
  Sense strand starting at position 11 of SEQ ID NO: 1888752
ucuggagaacuaggcaaau

SEQ ID NO: 2554173 - RNA, 19 nt, Artificial Sequence
  Description of Artificial Sequence: Synthetic oligonucleotide
  Antisense strand to SEQ ID NO: 2554172
auuugccuaguucuccaga

SEQ ID NO: 2554174 - RNA, 19 nt, Artificial Sequence
  Description of Artificial Sequence: Synthetic oligonucleotide
  Sense strand starting at position 123 of SEQ ID NO: 1888752
cugguaaagucucucaaac

SEQ ID NO: 2554175 - RNA, 19 nt, Artificial Sequence
  Description of Artificial Sequence: Synthetic oligonucleotide
  Antisense strand to SEQ ID NO: 2554174
guuugagagacuuuaccag

SEQ ID NO: 2554176 - RNA, 19 nt, Artificial Sequence
  Description of Artificial Sequence: Synthetic oligonucleotide
  Sense strand starting at position 352 of SEQ ID NO: 1888752
uuagguauggcguuuguuu

SEQ ID NO: 2554177 - RNA, 19 nt, Artificial Sequence
  Description of Artificial Sequence: Synthetic oligonucleotide
  Antisense strand to SEQ ID NO: 2554176
aaacaaacgccauaccuaa

SEQ ID NO: 2554178 - RNA, 19 nt, Artificial Sequence
  Description of Artificial Sequence: Synthetic oligonucleotide
  Sense strand starting at position 381 of SEQ ID NO: 1888752
auaauucugucaucaugua

SEQ ID NO: 2554179 - RNA, 19 nt, Artificial Sequence
  Description of Artificial Sequence: Synthetic oligonucleotide
  Antisense strand to SEQ ID NO: 2554178
uacaugaugacagaauuau

SEQ ID NO: 2554180 - RNA, 19 nt, Artificial Sequence
  Description of Artificial Sequence: Synthetic oligonucleotide
  Sense strand starting at position 491 of SEQ ID NO: 1888752
cuaaaucacugagaaagac

SEQ ID NO: 2554181 - RNA, 19 nt, Artificial Sequence
  Description of Artificial Sequence: Synthetic oligonucleotide
  Antisense strand to SEQ ID NO: 2554180
gucuuucucagugauuuag

SEQ ID NO: 2554182 - RNA, 19 nt, Artificial Sequence
  Description of Artificial Sequence: Synthetic oligonucleotide
  Sense strand starting at position 685 of SEQ ID NO: 1888752
cugacacuagccugagauu

SEQ ID NO: 2554183 - RNA, 19 nt, Artificial Sequence
  Description of Artificial Sequence: Synthetic oligonucleotide
  Antisense strand to SEQ ID NO: 2554182
aaucucaggcuagugucag

SEQ ID NO: 2554184 - RNA, 19 nt, Artificial Sequence
  Description of Artificial Sequence: Synthetic oligonucleotide
  Sense strand starting at position 732 of SEQ ID NO: 1888752
ugauacuugcuccagccau

SEQ ID NO: 2554185 - RNA, 19 nt, Artificial Sequence
  Description of Artificial Sequence: Synthetic oligonucleotide
  Antisense strand to SEQ ID NO: 2554184
auggcuggagcaaguauca

SEQ ID NO: 2554186 - RNA, 19 nt, Artificial Sequence
  Description of Artificial Sequence: Synthetic oligonucleotide
  Sense strand starting at position 1038 of SEQ ID NO: 1888752
gugggauugcugugggaca

SEQ ID NO: 2554187 - RNA, 19 nt, Artificial Sequence
  Description of Artificial Sequence: Synthetic oligonucleotide
  Antisense strand to SEQ ID NO: 2554186
ugucccacagcaaucccac

SEQ ID NO: 2554188 - RNA, 19 nt, Artificial Sequence
  Description of Artificial Sequence: Synthetic oligonucleotide
  Sense strand starting at position 1086 of SEQ ID NO: 1888752
acacuagcuuuggugauga

SEQ ID NO: 2554189 - RNA, 19 nt, Artificial Sequence
  Description of Artificial Sequence: Synthetic oligonucleotide
  Antisense strand to SEQ ID NO: 2554188
ucaucaccaaagcuagugu

SEQ ID NO: 2554190 - RNA, 19 nt, Artificial Sequence
  Description of Artificial Sequence: Synthetic oligonucleotide
  Sense strand starting at position 1140 of SEQ ID NO: 1888752
gacgaaaugugccuccaac

SEQ ID NO: 2554191 - RNA, 19 nt, Artificial Sequence
  Description of Artificial Sequence: Synthetic oligonucleotide
  Antisense strand to SEQ ID NO: 2554190
guuggaggcacauuucguc

SEQ ID NO: 2554192 - RNA, 19 nt, Artificial Sequence
  Description of Artificial Sequence: Synthetic oligonucleotide
  Sense strand starting at position 1209 of SEQ ID NO: 1888752
gaagaucgaguccagagua

SEQ ID NO: 2554193 - RNA, 19 nt, Artificial Sequence
  Description of Artificial Sequence: Synthetic oligonucleotide
  Antisense strand to SEQ ID NO: 2554192
uacucuggacucgaucuuc

SEQ ID NO: 2554194 - RNA, 19 nt, Artificial Sequence
  Description of Artificial Sequence: Synthetic oligonucleotide
  Sense strand starting at position 1214 of SEQ ID NO: 1888752
ucgaguccagaguaaucau

SEQ ID NO: 2554195 - RNA, 19 nt, Artificial Sequence
  Description of Artificial Sequence: Synthetic oligonucleotide
  Antisense strand to SEQ ID NO: 2554194
augauuacucuggacucga

SEQ ID NO: 2554196 - RNA, 19 nt, Artificial Sequence
  Description of Artificial Sequence: Synthetic oligonucleotide
  Sense strand starting at position 1311 of SEQ ID NO: 1888752
auaggagugcucugcugga

SEQ ID NO: 2554197 - RNA, 19 nt, Artificial Sequence
  Description of Artificial Sequence: Synthetic oligonucleotide
  Antisense strand to SEQ ID NO: 2554196
uccagcagagcacuccuau

SEQ ID NO: 2554198 - RNA, 19 nt, Artificial Sequence
  Description of Artificial Sequence: Synthetic oligonucleotide
  Sense strand starting at position 1371 of SEQ ID NO: 1888752
gucagaggcuuucuugaaa

SEQ ID NO: 2554199 - RNA, 19 nt, Artificial Sequence
  Description of Artificial Sequence: Synthetic oligonucleotide
  Antisense strand to SEQ ID NO: 2554198
uuucaagaaagccucugac

SEQ ID NO: 2554200 - RNA, 19 nt, Artificial Sequence
  Description of Artificial Sequence: Synthetic oligonucleotide
  Sense strand starting at position 1455 of SEQ ID NO: 1888752
caccgucuuccgguucuua

SEQ ID NO: 2554201 - RNA, 19 nt, Artificial Sequence
  Description of Artificial Sequence: Synthetic oligonucleotide
  Antisense strand to SEQ ID NO: 2554200
uaagaaccggaagacggug

SEQ ID NO: 2554202 - RNA, 19 nt, Artificial Sequence
  Description of Artificial Sequence: Synthetic oligonucleotide
  Sense strand starting at position 1660 of SEQ ID NO: 1888752
ggcuccaugccucagaaga

SEQ ID NO: 2554203 - RNA, 19 nt, Artificial Sequence
  Description of Artificial Sequence: Synthetic oligonucleotide
  Antisense strand to SEQ ID NO: 2554202
ucuucugaggcauggagcc

SEQ ID NO: 2554204 - RNA, 19 nt, Artificial Sequence
  Description of Artificial Sequence: Synthetic oligonucleotide
  Sense strand starting at position 2285 of SEQ ID NO: 1888752
ucaugugaggcuugaaaga

SEQ ID NO: 2554205 - RNA, 19 nt, Artificial Sequence
  Description of Artificial Sequence: Synthetic oligonucleotide
  Antisense strand to SEQ ID NO: 2554204
ucuuucaagccucacauga

SEQ ID NO: 2554206 - RNA, 19 nt, Artificial Sequence
  Description of Artificial Sequence: Synthetic oligonucleotide
  Sense strand starting at position 2326 of SEQ ID NO: 1888752
cccaguguaagcgcuuaau

SEQ ID NO: 2554207 - RNA, 19 nt, Artificial Sequence
  Description of Artificial Sequence: Synthetic oligonucleotide
  Antisense strand to SEQ ID NO: 2554206
auuaagcgcuuacacuggg

SEQ ID NO: 2554208 - RNA, 19 nt, Artificial Sequence
  Description of Artificial Sequence: Synthetic oligonucleotide
  Sense strand starting at position 2360 of SEQ ID NO: 1888752
uugugaugaauccgaucau

SEQ ID NO: 2554209 - RNA, 19 nt, Artificial Sequence
  Description of Artificial Sequence: Synthetic oligonucleotide
  Antisense strand to SEQ ID NO: 2554208
augaucggauucaucacaa

SEQ ID NO: 2554210 - RNA, 19 nt, Artificial Sequence
  Description of Artificial Sequence: Synthetic oligonucleotide
  Sense strand starting at position 2371 of SEQ ID NO: 1888752
ccgaucauucuggauuauc

SEQ ID NO: 2554211 - RNA, 19 nt, Artificial Sequence
  Description of Artificial Sequence: Synthetic oligonucleotide
  Antisense strand to SEQ ID NO: 2554210
gauaauccagaaugaucgg

SEQ ID NO: 2554212 - RNA, 19 nt, Artificial Sequence
  Description of Artificial Sequence: Synthetic oligonucleotide
  Sense strand starting at position 2379 of SEQ ID NO: 1888752
ucuggauuaucuucguauc

SEQ ID NO: 2554213 - RNA, 19 nt, Artificial Sequence
  Description of Artificial Sequence: Synthetic oligonucleotide
  Antisense strand to SEQ ID NO: 2554212
gauacgaagauaauccaga

SEQ ID NO: 2554214 - RNA, 19 nt, Artificial Sequence
  Description of Artificial Sequence: Synthetic oligonucleotide
  Sense strand starting at position 2401 of SEQ ID NO: 1888752
ccuucucuccuguggagaa

SEQ ID NO: 2554215 - RNA, 19 nt, Artificial Sequence
  Description of Artificial Sequence: Synthetic oligonucleotide
  Antisense strand to SEQ ID NO: 2554214
uucuccacaggagagaagg

SEQ ID NO: 2554216 - RNA, 19 nt, Artificial Sequence
  Description of Artificial Sequence: Synthetic oligonucleotide
  Sense strand starting at position 2516 of SEQ ID NO: 1888752
agaguaagcacuuagugag

SEQ ID NO: 2554217 - RNA, 19 nt, Artificial Sequence
  Description of Artificial Sequence: Synthetic oligonucleotide
  Antisense strand to SEQ ID NO: 2554216
cucacuaagugcuuacucu

SEQ ID NO: 2554218 - RNA, 19 nt, Artificial Sequence
  Description of Artificial Sequence: Synthetic oligonucleotide
  Sense strand starting at position 2669 of SEQ ID NO: 1888752
uuucuuuaugaucagugga

SEQ ID NO: 2554219 - RNA, 19 nt, Artificial Sequence
  Description of Artificial Sequence: Synthetic oligonucleotide
  Antisense strand to SEQ ID NO: 2554218
uccacugaucauaaagaaa

SEQ ID NO: 2554220 - RNA, 19 nt, Artificial Sequence
  Description of Artificial Sequence: Synthetic oligonucleotide
  Sense strand starting at position 2671 of SEQ ID NO: 1888752
ucuuuaugaucaguggauc

SEQ ID NO: 2554221 - RNA, 19 nt, Artificial Sequence
  Description of Artificial Sequence: Synthetic oligonucleotide
  Antisense strand to SEQ ID NO: 2554220
gauccacugaucauaaaga

SEQ ID NO: 2554222 - RNA, 19 nt, Artificial Sequence
  Description of Artificial Sequence: Synthetic oligonucleotide
  Sense strand starting at position 2672 of SEQ ID NO: 1888752
cuuuaugaucaguggaucu

SEQ ID NO: 2554223 - RNA, 19 nt, Artificial Sequence
  Description of Artificial Sequence: Synthetic oligonucleotide
  Antisense strand to SEQ ID NO: 2554222
agauccacugaucauaaag

SEQ ID NO: 2554224 - RNA, 19 nt, Artificial Sequence
  Description of Artificial Sequence: Synthetic oligonucleotide
  Sense strand starting at position 2731 of SEQ ID NO: 1888752
cuacacagucuggaaaguu

SEQ ID NO: 2554225 - RNA, 19 nt, Artificial Sequence
  Description of Artificial Sequence: Synthetic oligonucleotide
  Antisense strand to SEQ ID NO: 2554224
aacuuuccagacuguguag

SEQ ID NO: 2554226 - RNA, 19 nt, Artificial Sequence
  Description of Artificial Sequence: Synthetic oligonucleotide
  Sense strand starting at position 2739 of SEQ ID NO: 1888752
ucuggaaaguuauuguuaa

SEQ ID NO: 2554227 - RNA, 19 nt, Artificial Sequence
  Description of Artificial Sequence: Synthetic oligonucleotide
  Antisense strand to SEQ ID NO: 2554226
uuaacaauaacuuuccaga

SEQ ID NO: 2554228 - RNA, 19 nt, Artificial Sequence
  Description of Artificial Sequence: Synthetic oligonucleotide
  Sense strand starting at position 2831 of SEQ ID NO: 1888752
gcgccucauccuuucucua

SEQ ID NO: 2554229 - RNA, 19 nt, Artificial Sequence
  Description of Artificial Sequence: Synthetic oligonucleotide
  Antisense strand to SEQ ID NO: 2554228
uagagaaaggaugaggcgc

SEQ ID NO: 2554230 - RNA, 19 nt, Artificial Sequence
  Description of Artificial Sequence: Synthetic oligonucleotide
  Sense strand starting at position 2926 of SEQ ID NO: 1888752
cuaggaagccugcaaauaa

SEQ ID NO: 2554231 - RNA, 19 nt, Artificial Sequence
  Description of Artificial Sequence: Synthetic oligonucleotide
  Antisense strand to SEQ ID NO: 2554230
uuauuugcaggcuuccuag

SEQ ID NO: 2554232 - RNA, 19 nt, Artificial Sequence
  Description of Artificial Sequence: Synthetic oligonucleotide
  Sense strand starting at position 2988 of SEQ ID NO: 1888752
uguaucgugguacaacuua

SEQ ID NO: 2554233 - RNA, 19 nt, Artificial Sequence
  Description of Artificial Sequence: Synthetic oligonucleotide
  Antisense strand to SEQ ID NO: 2554232
uaaguuguaccacgauaca

SEQ ID NO: 2554234 - RNA, 19 nt, Artificial Sequence
  Description of Artificial Sequence: Synthetic oligonucleotide
  Sense strand starting at position 2993 of SEQ ID NO: 1888752
cgugguacaacuuagcauu

SEQ ID NO: 2554235 - RNA, 19 nt, Artificial Sequence
  Description of Artificial Sequence: Synthetic oligonucleotide
  Antisense strand to SEQ ID NO: 2554234
aaugcuaaguuguaccacg

SEQ ID NO: 2554236 - RNA, 19 nt, Artificial Sequence
  Description of Artificial Sequence: Synthetic oligonucleotide
  Sense strand starting at position 3369 of SEQ ID NO: 1888752
ugggauuacggucgacuuu

SEQ ID NO: 2554237 - RNA, 19 nt, Artificial Sequence
  Description of Artificial Sequence: Synthetic oligonucleotide
  Antisense strand to SEQ ID NO: 2554236
aaagucgaccguaauccca

SEQ ID NO: 2554238 - RNA, 19 nt, Artificial Sequence
  Description of Artificial Sequence: Synthetic oligonucleotide
  Sense strand starting at position 3397 of SEQ ID NO: 1888752
auuguuauaccucgaaaua

SEQ ID NO: 2554239 - RNA, 19 nt, Artificial Sequence
  Description of Artificial Sequence: Synthetic oligonucleotide
  Antisense strand to SEQ ID NO: 2554238
uauuucgagguauaacaau

SEQ ID NO: 2554240 - RNA, 19 nt, Artificial Sequence
  Description of Artificial Sequence: Synthetic oligonucleotide
  Sense strand starting at position 3398 of SEQ ID NO: 1888752
uuguuauaccucgaaauaa

SEQ ID NO: 2554241 - RNA, 19 nt, Artificial Sequence
  Description of Artificial Sequence: Synthetic oligonucleotide
  Antisense strand to SEQ ID NO: 2554240
uuauuucgagguauaacaa

SEQ ID NO: 2554242 - RNA, 19 nt, Artificial Sequence
  Description of Artificial Sequence: Synthetic oligonucleotide
  Sense strand starting at position 3593 of SEQ ID NO: 1888752
ugucgucaucuguaagaac

SEQ ID NO: 2554243 - RNA, 19 nt, Artificial Sequence
  Description of Artificial Sequence: Synthetic oligonucleotide
  Antisense strand to SEQ ID NO: 2554242
guucuuacagaugacgaca

SEQ ID NO: 2554244 - RNA, 19 nt, Artificial Sequence
  Description of Artificial Sequence: Synthetic oligonucleotide
  Sense strand starting at position 3662 of SEQ ID NO: 1888752
acuagaauuucuuaggacu

SEQ ID NO: 2554245 - RNA, 19 nt, Artificial Sequence
  Description of Artificial Sequence: Synthetic oligonucleotide
  Antisense strand to SEQ ID NO: 2554244
aguccuaagaaauucuagu

SEQ ID NO: 2554246 - RNA, 19 nt, Artificial Sequence
  Description of Artificial Sequence: Synthetic oligonucleotide
  Sense strand starting at position 3665 of SEQ ID NO: 1888752
agaauuucuuaggacuuau

SEQ ID NO: 2554247 - RNA, 19 nt, Artificial Sequence
  Description of Artificial Sequence: Synthetic oligonucleotide
  Antisense strand to SEQ ID NO: 2554246
auaaguccuaagaaauucu

SEQ ID NO: 2554248 - RNA, 19 nt, Artificial Sequence
  Description of Artificial Sequence: Synthetic oligonucleotide
  Sense strand starting at position 3764 of SEQ ID NO: 1888752
auguucuuccauugauucu

SEQ ID NO: 2554249 - RNA, 19 nt, Artificial Sequence
  Description of Artificial Sequence: Synthetic oligonucleotide
  Antisense strand to SEQ ID NO: 2554248
agaaucaauggaagaacau

SEQ ID NO: 2554250 - RNA, 19 nt, Artificial Sequence
  Description of Artificial Sequence: Synthetic oligonucleotide
  Sense strand starting at position 3784 of SEQ ID NO: 1888752
cucuuuaaucaggguacuu

SEQ ID NO: 2554251 - RNA, 19 nt, Artificial Sequence
  Description of Artificial Sequence: Synthetic oligonucleotide
  Antisense strand to SEQ ID NO: 2554250
aaguacccugauuaaagag

SEQ ID NO: 2554252 - RNA, 19 nt, Artificial Sequence
  Description of Artificial Sequence: Synthetic oligonucleotide
  Sense strand starting at position 2283 of SEQ ID NO: 1888753
ucaugugaggcuugaaaga

SEQ ID NO: 2554253 - RNA, 19 nt, Artificial Sequence
  Description of Artificial Sequence: Synthetic oligonucleotide
  Antisense strand to SEQ ID NO: 2554252
ucuuucaagccucacauga

SEQ ID NO: 2554254 - RNA, 19 nt, Artificial Sequence
  Description of Artificial Sequence: Synthetic oligonucleotide
  Sense strand starting at position 2324 of SEQ ID NO: 1888753
cccaguguaagcgcuuaau

SEQ ID NO: 2554255 - RNA, 19 nt, Artificial Sequence
  Description of Artificial Sequence: Synthetic oligonucleotide
  Antisense strand to SEQ ID NO: 2554254
auuaagcgcuuacacuggg

SEQ ID NO: 2554256 - RNA, 19 nt, Artificial Sequence
  Description of Artificial Sequence: Synthetic oligonucleotide
  Sense strand starting at position 2327 of SEQ ID NO: 1888753
aguguaagcgcuuaauaac

SEQ ID NO: 2554257 - RNA, 19 nt, Artificial Sequence
  Description of Artificial Sequence: Synthetic oligonucleotide
  Antisense strand to SEQ ID NO: 2554256
guuauuaagcgcuuacacu

SEQ ID NO: 2554258 - RNA, 19 nt, Artificial Sequence
  Description of Artificial Sequence: Synthetic oligonucleotide
  Sense strand starting at position 2350 of SEQ ID NO: 1888753
accuguuguugugaugaau

SEQ ID NO: 2554259 - RNA, 19 nt, Artificial Sequence
  Description of Artificial Sequence: Synthetic oligonucleotide
  Antisense strand to SEQ ID NO: 2554258
auucaucacaacaacaggu

SEQ ID NO: 2554260 - RNA, 19 nt, Artificial Sequence
  Description of Artificial Sequence: Synthetic oligonucleotide
  Sense strand starting at position 2358 of SEQ ID NO: 1888753
uugugaugaauccgaucau

SEQ ID NO: 2554261 - RNA, 19 nt, Artificial Sequence
  Description of Artificial Sequence: Synthetic oligonucleotide
  Antisense strand to SEQ ID NO: 2554260
augaucggauucaucacaa

SEQ ID NO: 2554262 - RNA, 19 nt, Artificial Sequence
  Description of Artificial Sequence: Synthetic oligonucleotide
  Sense strand starting at position 2359 of SEQ ID NO: 1888753
ugugaugaauccgaucauu

SEQ ID NO: 2554263 - RNA, 19 nt, Artificial Sequence
  Description of Artificial Sequence: Synthetic oligonucleotide
  Antisense strand to SEQ ID NO: 2554262
aaugaucggauucaucaca

SEQ ID NO: 2554264 - RNA, 19 nt, Artificial Sequence
  Description of Artificial Sequence: Synthetic oligonucleotide
  Sense strand starting at position 2367 of SEQ ID NO: 1888753
auccgaucauucuggauua

SEQ ID NO: 2554265 - RNA, 19 nt, Artificial Sequence
  Description of Artificial Sequence: Synthetic oligonucleotide
  Antisense strand to SEQ ID NO: 2554264
uaauccagaaugaucggau

SEQ ID NO: 2554266 - RNA, 19 nt, Artificial Sequence
  Description of Artificial Sequence: Synthetic oligonucleotide
  Sense strand starting at position 2369 of SEQ ID NO: 1888753
ccgaucauucuggauuauc

SEQ ID NO: 2554267 - RNA, 19 nt, Artificial Sequence
  Description of Artificial Sequence: Synthetic oligonucleotide
  Antisense strand to SEQ ID NO: 2554266
gauaauccagaaugaucgg

SEQ ID NO: 2554268 - RNA, 19 nt, Artificial Sequence
  Description of Artificial Sequence: Synthetic oligonucleotide
  Sense strand starting at position 2377 of SEQ ID NO: 1888753
ucuggauuaucuucguauc

SEQ ID NO: 2554269 - RNA, 19 nt, Artificial Sequence
  Description of Artificial Sequence: Synthetic oligonucleotide
  Antisense strand to SEQ ID NO: 2554268
gauacgaagauaauccaga

SEQ ID NO: 2554270 - RNA, 19 nt, Artificial Sequence
  Description of Artificial Sequence: Synthetic oligonucleotide
  Sense strand starting at position 2399 of SEQ ID NO: 1888753
ccuucucuccuguggagaa

SEQ ID NO: 2554271 - RNA, 19 nt, Artificial Sequence
  Description of Artificial Sequence: Synthetic oligonucleotide
  Antisense strand to SEQ ID NO: 2554270
uucuccacaggagagaagg

SEQ ID NO: 2554272 - RNA, 19 nt, Artificial Sequence
  Description of Artificial Sequence: Synthetic oligonucleotide
  Sense strand starting at position 2486 of SEQ ID NO: 1888753
ugaaguugcuuugcucagu

SEQ ID NO: 2554273 - RNA, 19 nt, Artificial Sequence
  Description of Artificial Sequence: Synthetic oligonucleotide
  Antisense strand to SEQ ID NO: 2554272
acugagcaaagcaacuuca

SEQ ID NO: 2554274 - RNA, 19 nt, Artificial Sequence
  Description of Artificial Sequence: Synthetic oligonucleotide
  Sense strand starting at position 2514 of SEQ ID NO: 1888753
agaguaagcacuuagugag

SEQ ID NO: 2554275 - RNA, 19 nt, Artificial Sequence
  Description of Artificial Sequence: Synthetic oligonucleotide
  Antisense strand to SEQ ID NO: 2554274
cucacuaagugcuuacucu

SEQ ID NO: 2554276 - RNA, 19 nt, Artificial Sequence
  Description of Artificial Sequence: Synthetic oligonucleotide
  Sense strand starting at position 2587 of SEQ ID NO: 1888753
cacccuguguggucaucua

SEQ ID NO: 2554277 - RNA, 19 nt, Artificial Sequence
  Description of Artificial Sequence: Synthetic oligonucleotide
  Antisense strand to SEQ ID NO: 2554276
uagaugaccacacagggug

SEQ ID NO: 2554278 - RNA, 19 nt, Artificial Sequence
  Description of Artificial Sequence: Synthetic oligonucleotide
  Sense strand starting at position 2599 of SEQ ID NO: 1888753
ucaucuagauguggaggaa

SEQ ID NO: 2554279 - RNA, 19 nt, Artificial Sequence
  Description of Artificial Sequence: Synthetic oligonucleotide
  Antisense strand to SEQ ID NO: 2554278
uuccuccacaucuagauga

SEQ ID NO: 2554280 - RNA, 19 nt, Artificial Sequence
  Description of Artificial Sequence: Synthetic oligonucleotide
  Sense strand starting at position 2667 of SEQ ID NO: 1888753
uuucuuuaugaucagugga

SEQ ID NO: 2554281 - RNA, 19 nt, Artificial Sequence
  Description of Artificial Sequence: Synthetic oligonucleotide
  Antisense strand to SEQ ID NO: 2554280
uccacugaucauaaagaaa

SEQ ID NO: 2554282 - RNA, 19 nt, Artificial Sequence
  Description of Artificial Sequence: Synthetic oligonucleotide
  Sense strand starting at position 2704 of SEQ ID NO: 1888753
aguucucuugcguauucuu

SEQ ID NO: 2554283 - RNA, 19 nt, Artificial Sequence
  Description of Artificial Sequence: Synthetic oligonucleotide
  Antisense strand to SEQ ID NO: 2554282
aagaauacgcaagagaacu

SEQ ID NO: 2554284 - RNA, 19 nt, Artificial Sequence
  Description of Artificial Sequence: Synthetic oligonucleotide
  Sense strand starting at position 2713 of SEQ ID NO: 1888753
gcguauucuuucucuccua

SEQ ID NO: 2554285 - RNA, 19 nt, Artificial Sequence
  Description of Artificial Sequence: Synthetic oligonucleotide
  Antisense strand to SEQ ID NO: 2554284
uaggagagaaagaauacgc

SEQ ID NO: 2554286 - RNA, 19 nt, Artificial Sequence
  Description of Artificial Sequence: Synthetic oligonucleotide
  Sense strand starting at position 2729 of SEQ ID NO: 1888753
cuacacagucuggaaaguu

SEQ ID NO: 2554287 - RNA, 19 nt, Artificial Sequence
  Description of Artificial Sequence: Synthetic oligonucleotide
  Antisense strand to SEQ ID NO: 2554286
aacuuuccagacuguguag

SEQ ID NO: 2554288 - RNA, 19 nt, Artificial Sequence
  Description of Artificial Sequence: Synthetic oligonucleotide
  Sense strand starting at position 2737 of SEQ ID NO: 1888753
ucuggaaaguuauuguuaa

SEQ ID NO: 2554289 - RNA, 19 nt, Artificial Sequence
  Description of Artificial Sequence: Synthetic oligonucleotide
  Antisense strand to SEQ ID NO: 2554288
uuaacaauaacuuuccaga

SEQ ID NO: 2554290 - RNA, 19 nt, Artificial Sequence
  Description of Artificial Sequence: Synthetic oligonucleotide
  Sense strand starting at position 2738 of SEQ ID NO: 1888753
cuggaaaguuauuguuaau

SEQ ID NO: 2554291 - RNA, 19 nt, Artificial Sequence
  Description of Artificial Sequence: Synthetic oligonucleotide
  Antisense strand to SEQ ID NO: 2554290
auuaacaauaacuuuccag

SEQ ID NO: 2554292 - RNA, 19 nt, Artificial Sequence
  Description of Artificial Sequence: Synthetic oligonucleotide
  Sense strand starting at position 2829 of SEQ ID NO: 1888753
gcgccucauccuuucucua

SEQ ID NO: 2554293 - RNA, 19 nt, Artificial Sequence
  Description of Artificial Sequence: Synthetic oligonucleotide
  Antisense strand to SEQ ID NO: 2554292
uagagaaaggaugaggcgc

SEQ ID NO: 2554294 - RNA, 19 nt, Artificial Sequence
  Description of Artificial Sequence: Synthetic oligonucleotide
  Sense strand starting at position 2924 of SEQ ID NO: 1888753
cuaggaagccugcaaauaa

SEQ ID NO: 2554295 - RNA, 19 nt, Artificial Sequence
  Description of Artificial Sequence: Synthetic oligonucleotide
  Antisense strand to SEQ ID NO: 2554294
uuauuugcaggcuuccuag

SEQ ID NO: 2554296 - RNA, 19 nt, Artificial Sequence
  Description of Artificial Sequence: Synthetic oligonucleotide
  Sense strand starting at position 2968 of SEQ ID NO: 1888753
gcaagugcauucucuuauu

SEQ ID NO: 2554297 - RNA, 19 nt, Artificial Sequence
  Description of Artificial Sequence: Synthetic oligonucleotide
  Antisense strand to SEQ ID NO: 2554296
aauaagagaaugcacuugc

SEQ ID NO: 2554298 - RNA, 19 nt, Artificial Sequence
  Description of Artificial Sequence: Synthetic oligonucleotide
  Sense strand starting at position 2986 of SEQ ID NO: 1888753
uguaucgugguacaacuua

SEQ ID NO: 2554299 - RNA, 19 nt, Artificial Sequence
  Description of Artificial Sequence: Synthetic oligonucleotide
  Antisense strand to SEQ ID NO: 2554298
uaaguuguaccacgauaca

SEQ ID NO: 2554300 - RNA, 19 nt, Artificial Sequence
  Description of Artificial Sequence: Synthetic oligonucleotide
  Sense strand starting at position 2991 of SEQ ID NO: 1888753
cgugguacaacuuagcauu

SEQ ID NO: 2554301 - RNA, 19 nt, Artificial Sequence
  Description of Artificial Sequence: Synthetic oligonucleotide
  Antisense strand to SEQ ID NO: 2554300
aaugcuaaguuguaccacg

SEQ ID NO: 2554302 - RNA, 19 nt, Artificial Sequence
  Description of Artificial Sequence: Synthetic oligonucleotide
  Sense strand starting at position 3367 of SEQ ID NO: 1888753
ugggauuacggucgacuuu

SEQ ID NO: 2554303 - RNA, 19 nt, Artificial Sequence
  Description of Artificial Sequence: Synthetic oligonucleotide
  Antisense strand to SEQ ID NO: 2554302
aaagucgaccguaauccca

SEQ ID NO: 2554304 - RNA, 19 nt, Artificial Sequence
  Description of Artificial Sequence: Synthetic oligonucleotide
  Sense strand starting at position 3395 of SEQ ID NO: 1888753
auuguuauaccucgaaaua

SEQ ID NO: 2554305 - RNA, 19 nt, Artificial Sequence
  Description of Artificial Sequence: Synthetic oligonucleotide
  Antisense strand to SEQ ID NO: 2554304
uauuucgagguauaacaau

SEQ ID NO: 2554306 - RNA, 19 nt, Artificial Sequence
  Description of Artificial Sequence: Synthetic oligonucleotide
  Sense strand starting at position 3396 of SEQ ID NO: 1888753
uuguuauaccucgaaauaa

SEQ ID NO: 2554307 - RNA, 19 nt, Artificial Sequence
  Description of Artificial Sequence: Synthetic oligonucleotide
  Antisense strand to SEQ ID NO: 2554306
uuauuucgagguauaacaa

SEQ ID NO: 2554308 - RNA, 19 nt, Artificial Sequence
  Description of Artificial Sequence: Synthetic oligonucleotide
  Sense strand starting at position 3484 of SEQ ID NO: 1888753
guugcuaauucugcuauaa

SEQ ID NO: 2554309 - RNA, 19 nt, Artificial Sequence
  Description of Artificial Sequence: Synthetic oligonucleotide
  Antisense strand to SEQ ID NO: 2554308
uuauagcagaauuagcaac

SEQ ID NO: 2554310 - RNA, 19 nt, Artificial Sequence
  Description of Artificial Sequence: Synthetic oligonucleotide
  Sense strand starting at position 3486 of SEQ ID NO: 1888753
ugcuaauucugcuauaaag

SEQ ID NO: 2554311 - RNA, 19 nt, Artificial Sequence
  Description of Artificial Sequence: Synthetic oligonucleotide
  Antisense strand to SEQ ID NO: 2554310
cuuuauagcagaauuagca

SEQ ID NO: 2554312 - RNA, 19 nt, Artificial Sequence
  Description of Artificial Sequence: Synthetic oligonucleotide
  Sense strand starting at position 3591 of SEQ ID NO: 1888753
ugucgucaucuguaagaac

SEQ ID NO: 2554313 - RNA, 19 nt, Artificial Sequence
  Description of Artificial Sequence: Synthetic oligonucleotide
  Antisense strand to SEQ ID NO: 2554312
guucuuacagaugacgaca

SEQ ID NO: 2554314 - RNA, 19 nt, Artificial Sequence
  Description of Artificial Sequence: Synthetic oligonucleotide
  Sense strand starting at position 3660 of SEQ ID NO: 1888753
acuagaauuucuuaggacu

SEQ ID NO: 2554315 - RNA, 19 nt, Artificial Sequence
  Description of Artificial Sequence: Synthetic oligonucleotide
  Antisense strand to SEQ ID NO: 2554314
aguccuaagaaauucuagu

SEQ ID NO: 2554316 - RNA, 19 nt, Artificial Sequence
  Description of Artificial Sequence: Synthetic oligonucleotide
  Sense strand starting at position 3663 of SEQ ID NO: 1888753
agaauuucuuaggacuuau

SEQ ID NO: 2554317 - RNA, 19 nt, Artificial Sequence
  Description of Artificial Sequence: Synthetic oligonucleotide
  Antisense strand to SEQ ID NO: 2554316
auaaguccuaagaaauucu

SEQ ID NO: 2554318 - RNA, 19 nt, Artificial Sequence
  Description of Artificial Sequence: Synthetic oligonucleotide
  Sense strand starting at position 3677 of SEQ ID NO: 1888753
cuuauaguuuacuaugaga

SEQ ID NO: 2554319 - RNA, 19 nt, Artificial Sequence
  Description of Artificial Sequence: Synthetic oligonucleotide
  Antisense strand to SEQ ID NO: 2554318
ucucauaguaaacuauaag

SEQ ID NO: 2554320 - RNA, 19 nt, Artificial Sequence
  Description of Artificial Sequence: Synthetic oligonucleotide
  Sense strand starting at position 3708 of SEQ ID NO: 1888753
ucauuaacaugagaagaug

SEQ ID NO: 2554321 - RNA, 19 nt, Artificial Sequence
  Description of Artificial Sequence: Synthetic oligonucleotide
  Antisense strand to SEQ ID NO: 2554320
caucuucucauguuaauga

SEQ ID NO: 2554322 - RNA, 19 nt, Artificial Sequence
  Description of Artificial Sequence: Synthetic oligonucleotide
  Sense strand starting at position 3762 of SEQ ID NO: 1888753
auguucuuccauugauucu

SEQ ID NO: 2554323 - RNA, 19 nt, Artificial Sequence
  Description of Artificial Sequence: Synthetic oligonucleotide
  Antisense strand to SEQ ID NO: 2554322
agaaucaauggaagaacau

SEQ ID NO: 2554324 - RNA, 19 nt, Artificial Sequence
  Description of Artificial Sequence: Synthetic oligonucleotide
  Sense strand starting at position 3782 of SEQ ID NO: 1888753
cucuuuaaucaggguacuu

SEQ ID NO: 2554325 - RNA, 19 nt, Artificial Sequence
  Description of Artificial Sequence: Synthetic oligonucleotide
  Antisense strand to SEQ ID NO: 2554324
aaguacccugauuaaagag

SEQ ID NO: 2554326 - RNA, 19 nt, Artificial Sequence
  Description of Artificial Sequence: Synthetic oligonucleotide
  Sense strand starting at position 3844 of SEQ ID NO: 1888753
uaaguuuguccauggcagu

SEQ ID NO: 2554327 - RNA, 19 nt, Artificial Sequence
  Description of Artificial Sequence: Synthetic oligonucleotide
  Antisense strand to SEQ ID NO: 2554326
acugccauggacaaacuua

SEQ ID NO: 2554328 - RNA, 19 nt, Artificial Sequence
  Description of Artificial Sequence: Synthetic oligonucleotide
  Sense strand starting at position 3878 of SEQ ID NO: 1888753
gcugcuaugaauuguguau

SEQ ID NO: 2554329 - RNA, 19 nt, Artificial Sequence
  Description of Artificial Sequence: Synthetic oligonucleotide
  Antisense strand to SEQ ID NO: 2554328
auacacaauucauagcagc

SEQ ID NO: 2554330 - RNA, 19 nt, Artificial Sequence
  Description of Artificial Sequence: Synthetic oligonucleotide
  Sense strand starting at position 3889 of SEQ ID NO: 1888753
uuguguauuucccauuaug

SEQ ID NO: 2554331 - RNA, 19 nt, Artificial Sequence
  Description of Artificial Sequence: Synthetic oligonucleotide
  Antisense strand to SEQ ID NO: 2554330
cauaaugggaaauacacaa

SEQ ID NO: 2554332 - RNA, 19 nt, Artificial Sequence
  Description of Artificial Sequence: Synthetic oligonucleotide
  Sense strand starting at position 11 of SEQ ID NO: 1888754
ucuggagaacuaggcaaau

SEQ ID NO: 2554333 - RNA, 19 nt, Artificial Sequence
  Description of Artificial Sequence: Synthetic oligonucleotide
  Antisense strand to SEQ ID NO: 2554332
auuugccuaguucuccaga

SEQ ID NO: 2554334 - RNA, 19 nt, Artificial Sequence
  Description of Artificial Sequence: Synthetic oligonucleotide
  Sense strand starting at position 123 of SEQ ID NO: 1888754
cugguaaagucucucaaac

SEQ ID NO: 2554335 - RNA, 19 nt, Artificial Sequence
  Description of Artificial Sequence: Synthetic oligonucleotide
  Antisense strand to SEQ ID NO: 2554334
guuugagagacuuuaccag

SEQ ID NO: 2554336 - RNA, 19 nt, Artificial Sequence
  Description of Artificial Sequence: Synthetic oligonucleotide
  Sense strand starting at position 352 of SEQ ID NO: 1888754
uuagguauggcguuuguuu

SEQ ID NO: 2554337 - RNA, 19 nt, Artificial Sequence
  Description of Artificial Sequence: Synthetic oligonucleotide
  Antisense strand to SEQ ID NO: 2554336
aaacaaacgccauaccuaa

SEQ ID NO: 2554338 - RNA, 19 nt, Artificial Sequence
  Description of Artificial Sequence: Synthetic oligonucleotide
  Sense strand starting at position 381 of SEQ ID NO: 1888754
auaauucugucaucaugua

SEQ ID NO: 2554339 - RNA, 19 nt, Artificial Sequence
  Description of Artificial Sequence: Synthetic oligonucleotide
  Antisense strand to SEQ ID NO: 2554338
uacaugaugacagaauuau

SEQ ID NO: 2554340 - RNA, 19 nt, Artificial Sequence
  Description of Artificial Sequence: Synthetic oligonucleotide
  Sense strand starting at position 491 of SEQ ID NO: 1888754
cuaaaucacugagaaagac

SEQ ID NO: 2554341 - RNA, 19 nt, Artificial Sequence
  Description of Artificial Sequence: Synthetic oligonucleotide
  Antisense strand to SEQ ID NO: 2554340
gucuuucucagugauuuag

SEQ ID NO: 2554342 - RNA, 19 nt, Artificial Sequence
  Description of Artificial Sequence: Synthetic oligonucleotide
  Sense strand starting at position 685 of SEQ ID NO: 1888754
cugacacuagccugagauu

SEQ ID NO: 2554343 - RNA, 19 nt, Artificial Sequence
  Description of Artificial Sequence: Synthetic oligonucleotide
  Antisense strand to SEQ ID NO: 2554342
aaucucaggcuagugucag

SEQ ID NO: 2554344 - RNA, 19 nt, Artificial Sequence
  Description of Artificial Sequence: Synthetic oligonucleotide
  Sense strand starting at position 732 of SEQ ID NO: 1888754
ugauacuugcuccagccau

SEQ ID NO: 2554345 - RNA, 19 nt, Artificial Sequence
  Description of Artificial Sequence: Synthetic oligonucleotide
  Antisense strand to SEQ ID NO: 2554344
auggcuggagcaaguauca

SEQ ID NO: 2554346 - RNA, 19 nt, Artificial Sequence
  Description of Artificial Sequence: Synthetic oligonucleotide
  Sense strand starting at position 1038 of SEQ ID NO: 1888754
gugggauugcugugggaca

SEQ ID NO: 2554347 - RNA, 19 nt, Artificial Sequence
  Description of Artificial Sequence: Synthetic oligonucleotide
  Antisense strand to SEQ ID NO: 2554346
ugucccacagcaaucccac

SEQ ID NO: 2554348 - RNA, 19 nt, Artificial Sequence
  Description of Artificial Sequence: Synthetic oligonucleotide
  Sense strand starting at position 1086 of SEQ ID NO: 1888754
acacuagcuuuggugauga

SEQ ID NO: 2554349 - RNA, 19 nt, Artificial Sequence
  Description of Artificial Sequence: Synthetic oligonucleotide
  Antisense strand to SEQ ID NO: 2554348
ucaucaccaaagcuagugu

SEQ ID NO: 2554350 - RNA, 19 nt, Artificial Sequence
  Description of Artificial Sequence: Synthetic oligonucleotide
  Sense strand starting at position 1140 of SEQ ID NO: 1888754
gacgaaaugugccuccaac

SEQ ID NO: 2554351 - RNA, 19 nt, Artificial Sequence
  Description of Artificial Sequence: Synthetic oligonucleotide
  Antisense strand to SEQ ID NO: 2554350
guuggaggcacauuucguc

SEQ ID NO: 2554352 - RNA, 19 nt, Artificial Sequence
  Description of Artificial Sequence: Synthetic oligonucleotide
  Sense strand starting at position 1209 of SEQ ID NO: 1888754
gaagaucgaguccagagua

SEQ ID NO: 2554353 - RNA, 19 nt, Artificial Sequence
  Description of Artificial Sequence: Synthetic oligonucleotide
  Antisense strand to SEQ ID NO: 2554352
uacucuggacucgaucuuc

SEQ ID NO: 2554354 - RNA, 19 nt, Artificial Sequence
  Description of Artificial Sequence: Synthetic oligonucleotide
  Sense strand starting at position 1214 of SEQ ID NO: 1888754
ucgaguccagaguaaucau

SEQ ID NO: 2554355 - RNA, 19 nt, Artificial Sequence
  Description of Artificial Sequence: Synthetic oligonucleotide
  Antisense strand to SEQ ID NO: 2554354
augauuacucuggacucga

SEQ ID NO: 2554356 - RNA, 19 nt, Artificial Sequence
  Description of Artificial Sequence: Synthetic oligonucleotide
  Sense strand starting at position 1311 of SEQ ID NO: 1888754
auaggagugcucugcugga

SEQ ID NO: 2554357 - RNA, 19 nt, Artificial Sequence
  Description of Artificial Sequence: Synthetic oligonucleotide
  Antisense strand to SEQ ID NO: 2554356
uccagcagagcacuccuau

SEQ ID NO: 2554358 - RNA, 19 nt, Artificial Sequence
  Description of Artificial Sequence: Synthetic oligonucleotide
  Sense strand starting at position 1371 of SEQ ID NO: 1888754
gucagaggcuuucuugaaa

SEQ ID NO: 2554359 - RNA, 19 nt, Artificial Sequence
  Description of Artificial Sequence: Synthetic oligonucleotide
  Antisense strand to SEQ ID NO: 2554358
uuucaagaaagccucugac

SEQ ID NO: 2554360 - RNA, 19 nt, Artificial Sequence
  Description of Artificial Sequence: Synthetic oligonucleotide
  Sense strand starting at position 1455 of SEQ ID NO: 1888754
caccgucuuccgguucuua

SEQ ID NO: 2554361 - RNA, 19 nt, Artificial Sequence
  Description of Artificial Sequence: Synthetic oligonucleotide
  Antisense strand to SEQ ID NO: 2554360
uaagaaccggaagacggug

SEQ ID NO: 2554362 - RNA, 19 nt, Artificial Sequence
  Description of Artificial Sequence: Synthetic oligonucleotide
  Sense strand starting at position 1660 of SEQ ID NO: 1888754
ggcuccaugccucagaaga

SEQ ID NO: 2554363 - RNA, 19 nt, Artificial Sequence
  Description of Artificial Sequence: Synthetic oligonucleotide
  Antisense strand to SEQ ID NO: 2554362
ucuucugaggcauggagcc

SEQ ID NO: 2554364 - RNA, 19 nt, Artificial Sequence
  Description of Artificial Sequence: Synthetic oligonucleotide
  Sense strand starting at position 2285 of SEQ ID NO: 1888754
ucaugugaggcuugaaaga

SEQ ID NO: 2554365 - RNA, 19 nt, Artificial Sequence
  Description of Artificial Sequence: Synthetic oligonucleotide
  Antisense strand to SEQ ID NO: 2554364
ucuuucaagccucacauga

SEQ ID NO: 2554366 - RNA, 19 nt, Artificial Sequence
  Description of Artificial Sequence: Synthetic oligonucleotide
  Sense strand starting at position 2326 of SEQ ID NO: 1888754
cccaguguaagcgcuuaau

SEQ ID NO: 2554367 - RNA, 19 nt, Artificial Sequence
  Description of Artificial Sequence: Synthetic oligonucleotide
  Antisense strand to SEQ ID NO: 2554366
auuaagcgcuuacacuggg

SEQ ID NO: 2554368 - RNA, 19 nt, Artificial Sequence
  Description of Artificial Sequence: Synthetic oligonucleotide
  Sense strand starting at position 2360 of SEQ ID NO: 1888754
uugugaugaauccgaucau

SEQ ID NO: 2554369 - RNA, 19 nt, Artificial Sequence
  Description of Artificial Sequence: Synthetic oligonucleotide
  Antisense strand to SEQ ID NO: 2554368
augaucggauucaucacaa

SEQ ID NO: 2554370 - RNA, 19 nt, Artificial Sequence
  Description of Artificial Sequence: Synthetic oligonucleotide
  Sense strand starting at position 2371 of SEQ ID NO: 1888754
ccgaucauucuggauuauc

SEQ ID NO: 2554371 - RNA, 19 nt, Artificial Sequence
  Description of Artificial Sequence: Synthetic oligonucleotide
  Antisense strand to SEQ ID NO: 2554370
gauaauccagaaugaucgg

SEQ ID NO: 2554372 - RNA, 19 nt, Artificial Sequence
  Description of Artificial Sequence: Synthetic oligonucleotide
  Sense strand starting at position 2379 of SEQ ID NO: 1888754
ucuggauuaucuucguauc

SEQ ID NO: 2554373 - RNA, 19 nt, Artificial Sequence
  Description of Artificial Sequence: Synthetic oligonucleotide
  Antisense strand to SEQ ID NO: 2554372
gauacgaagauaauccaga

SEQ ID NO: 2554374 - RNA, 19 nt, Artificial Sequence
  Description of Artificial Sequence: Synthetic oligonucleotide
  Sense strand starting at position 2401 of SEQ ID NO: 1888754
ccuucucuccuguggagaa
